United States Patent Application Publication US 2014/0004565 A1 - sequence listing, part 77

SEQ ID NO: 1883527 - RNA, 19 nt, Artificial Sequence
  Description of Artificial Sequence: Synthetic oligonucleotide
gcuggauaaacugccucca

SEQ ID NO: 1883528 - RNA, 19 nt, Artificial Sequence
  Description of Artificial Sequence: Synthetic oligonucleotide
gcuuagaaccagccugaca

SEQ ID NO: 1883529 - RNA, 19 nt, Artificial Sequence
  Description of Artificial Sequence: Synthetic oligonucleotide
caucccucagggcuggaua

SEQ ID NO: 1883530 - RNA, 19 nt, Artificial Sequence
  Description of Artificial Sequence: Synthetic oligonucleotide
ggguacugugguacauggg

SEQ ID NO: 1883531 - RNA, 19 nt, Artificial Sequence
  Description of Artificial Sequence: Synthetic oligonucleotide
gcagacaaucccagagggc

SEQ ID NO: 1883532 - RNA, 19 nt, Artificial Sequence
  Description of Artificial Sequence: Synthetic oligonucleotide
caaguucagaaagucuagu

SEQ ID NO: 1883533 - RNA, 19 nt, Artificial Sequence
  Description of Artificial Sequence: Synthetic oligonucleotide
ccgguggugguucucuuug

SEQ ID NO: 1883534 - RNA, 19 nt, Artificial Sequence
  Description of Artificial Sequence: Synthetic oligonucleotide
ccagccugacaaaaugaca

SEQ ID NO: 1883535 - RNA, 19 nt, Artificial Sequence
  Description of Artificial Sequence: Synthetic oligonucleotide
cccaacuuagugagagauc

SEQ ID NO: 1883536 - RNA, 19 nt, Artificial Sequence
  Description of Artificial Sequence: Synthetic oligonucleotide
uggugucaucagagggcuc

SEQ ID NO: 1883537 - RNA, 19 nt, Artificial Sequence
  Description of Artificial Sequence: Synthetic oligonucleotide
gugccaaaucaaggcugag

SEQ ID NO: 1883538 - RNA, 19 nt, Artificial Sequence
  Description of Artificial Sequence: Synthetic oligonucleotide
ugcuaaccucugccuccac

SEQ ID NO: 1883539 - RNA, 19 nt, Artificial Sequence
  Description of Artificial Sequence: Synthetic oligonucleotide
cacaccauucaugcaaggu

SEQ ID NO: 1883540 - RNA, 19 nt, Artificial Sequence
  Description of Artificial Sequence: Synthetic oligonucleotide
cguuuuccgcaaugggacc

SEQ ID NO: 1883541 - RNA, 19 nt, Artificial Sequence
  Description of Artificial Sequence: Synthetic oligonucleotide
accugacuagagacacuug

SEQ ID NO: 1883542 - RNA, 19 nt, Artificial Sequence
  Description of Artificial Sequence: Synthetic oligonucleotide
acguaggaaaggaggugaa

SEQ ID NO: 1883543 - RNA, 19 nt, Artificial Sequence
  Description of Artificial Sequence: Synthetic oligonucleotide
uuuccgcaaugggaccaaa

SEQ ID NO: 1883544 - RNA, 19 nt, Artificial Sequence
  Description of Artificial Sequence: Synthetic oligonucleotide
cguugagccccugaguuug

SEQ ID NO: 1883545 - RNA, 19 nt, Artificial Sequence
  Description of Artificial Sequence: Synthetic oligonucleotide
cccaacagaacugccucac

SEQ ID NO: 1883546 - RNA, 19 nt, Artificial Sequence
  Description of Artificial Sequence: Synthetic oligonucleotide
ggucgccagccaaggaggg

SEQ ID NO: 1883547 - RNA, 19 nt, Artificial Sequence
  Description of Artificial Sequence: Synthetic oligonucleotide
aaacugccuccagcuuaga

SEQ ID NO: 1883548 - RNA, 19 nt, Artificial Sequence
  Description of Artificial Sequence: Synthetic oligonucleotide
acguggcuaccugacuaga

SEQ ID NO: 1883549 - RNA, 19 nt, Artificial Sequence
  Description of Artificial Sequence: Synthetic oligonucleotide
ggaaccccuggagggaggc

SEQ ID NO: 1883550 - RNA, 19 nt, Artificial Sequence
  Description of Artificial Sequence: Synthetic oligonucleotide
acugggccuaagugccaaa

SEQ ID NO: 1883551 - RNA, 19 nt, Artificial Sequence
  Description of Artificial Sequence: Synthetic oligonucleotide
ucccucagggcuggauaaa

SEQ ID NO: 1883552 - RNA, 19 nt, Artificial Sequence
  Description of Artificial Sequence: Synthetic oligonucleotide
acucggacucagacaccag

SEQ ID NO: 1883553 - RNA, 19 nt, Artificial Sequence
  Description of Artificial Sequence: Synthetic oligonucleotide
ccgagccaggagaaacacc

SEQ ID NO: 1883554 - RNA, 19 nt, Artificial Sequence
  Description of Artificial Sequence: Synthetic oligonucleotide
caacuuagugagagauccu

SEQ ID NO: 1883555 - RNA, 19 nt, Artificial Sequence
  Description of Artificial Sequence: Synthetic oligonucleotide
cuaagacagcaggaggagu

SEQ ID NO: 1883556 - RNA, 19 nt, Artificial Sequence
  Description of Artificial Sequence: Synthetic oligonucleotide
gggagguagcccauacaca

SEQ ID NO: 1883557 - RNA, 19 nt, Artificial Sequence
  Description of Artificial Sequence: Synthetic oligonucleotide
uggcauccguugagccccu

SEQ ID NO: 1883558 - RNA, 19 nt, Artificial Sequence
  Description of Artificial Sequence: Synthetic oligonucleotide
cagccugaacuggcacugc

SEQ ID NO: 1883559 - RNA, 19 nt, Artificial Sequence
  Description of Artificial Sequence: Synthetic oligonucleotide
gaggaggacgcuguugcuu

SEQ ID NO: 1883560 - RNA, 19 nt, Artificial Sequence
  Description of Artificial Sequence: Synthetic oligonucleotide
gcccacggaccccaagcgc

SEQ ID NO: 1883561 - RNA, 19 nt, Artificial Sequence
  Description of Artificial Sequence: Synthetic oligonucleotide
gacaccgagccaggagaaa

SEQ ID NO: 1883562 - RNA, 19 nt, Artificial Sequence
  Description of Artificial Sequence: Synthetic oligonucleotide
cguaggaaaggaggugaag

SEQ ID NO: 1883563 - RNA, 19 nt, Artificial Sequence
  Description of Artificial Sequence: Synthetic oligonucleotide
caagcgcccuccacucgga

SEQ ID NO: 1883564 - RNA, 19 nt, Artificial Sequence
  Description of Artificial Sequence: Synthetic oligonucleotide
cccaaagguuuaguaaaca

SEQ ID NO: 1883565 - RNA, 19 nt, Artificial Sequence
  Description of Artificial Sequence: Synthetic oligonucleotide
gcagugucggacccuguua

SEQ ID NO: 1883566 - RNA, 19 nt, Artificial Sequence
  Description of Artificial Sequence: Synthetic oligonucleotide
ccucuucacucagagagaa

SEQ ID NO: 1883567 - RNA, 19 nt, Artificial Sequence
  Description of Artificial Sequence: Synthetic oligonucleotide
cuaccugacuagagacacu

SEQ ID NO: 1883568 - RNA, 19 nt, Artificial Sequence
  Description of Artificial Sequence: Synthetic oligonucleotide
uucggaugucacggccaau

SEQ ID NO: 1883569 - RNA, 19 nt, Artificial Sequence
  Description of Artificial Sequence: Synthetic oligonucleotide
gggaacaacguggcuaccu

SEQ ID NO: 1883570 - RNA, 19 nt, Artificial Sequence
  Description of Artificial Sequence: Synthetic oligonucleotide
gcccaacagaacugccuca

SEQ ID NO: 1883571 - RNA, 19 nt, Artificial Sequence
  Description of Artificial Sequence: Synthetic oligonucleotide
gcccauacacagagacaag

SEQ ID NO: 1883572 - RNA, 19 nt, Artificial Sequence
  Description of Artificial Sequence: Synthetic oligonucleotide
cccucagggcuggauaaac

SEQ ID NO: 1883573 - RNA, 19 nt, Artificial Sequence
  Description of Artificial Sequence: Synthetic oligonucleotide
ccaggaguauggugucauc

SEQ ID NO: 1883574 - RNA, 19 nt, Artificial Sequence
  Description of Artificial Sequence: Synthetic oligonucleotide
ccccaagcgcccuccacuc

SEQ ID NO: 1883575 - RNA, 19 nt, Artificial Sequence
  Description of Artificial Sequence: Synthetic oligonucleotide
guugagccccugaguuuga

SEQ ID NO: 1883576 - RNA, 19 nt, Artificial Sequence
  Description of Artificial Sequence: Synthetic oligonucleotide
ggaggacgcuguugcuuuc

SEQ ID NO: 1883577 - RNA, 19 nt, Artificial Sequence
  Description of Artificial Sequence: Synthetic oligonucleotide
cccaagcgcccuccacucg

SEQ ID NO: 1883578 - RNA, 19 nt, Artificial Sequence
  Description of Artificial Sequence: Synthetic oligonucleotide
agauccuggcugggcuuaa

SEQ ID NO: 1883579 - RNA, 19 nt, Artificial Sequence
  Description of Artificial Sequence: Synthetic oligonucleotide
cugggucgccagccaagga

SEQ ID NO: 1883580 - RNA, 19 nt, Artificial Sequence
  Description of Artificial Sequence: Synthetic oligonucleotide
gaguccgguggugguucuc

SEQ ID NO: 1883581 - RNA, 19 nt, Artificial Sequence
  Description of Artificial Sequence: Synthetic oligonucleotide
cuagagacacuugcaccau

SEQ ID NO: 1883582 - RNA, 19 nt, Artificial Sequence
  Description of Artificial Sequence: Synthetic oligonucleotide
cuucggcaucaccauuccu

SEQ ID NO: 1883583 - RNA, 19 nt, Artificial Sequence
  Description of Artificial Sequence: Synthetic oligonucleotide
ggacaccgagccaggagaa

SEQ ID NO: 1883584 - RNA, 19 nt, Artificial Sequence
  Description of Artificial Sequence: Synthetic oligonucleotide
gcugggcuuaagaggcuga

SEQ ID NO: 1883585 - RNA, 19 nt, Artificial Sequence
  Description of Artificial Sequence: Synthetic oligonucleotide
gcccagugcucccaacuua

SEQ ID NO: 1883586 - RNA, 19 nt, Artificial Sequence
  Description of Artificial Sequence: Synthetic oligonucleotide
ggacgcuguugcuuucagu

SEQ ID NO: 1883587 - RNA, 19 nt, Artificial Sequence
  Description of Artificial Sequence: Synthetic oligonucleotide
cacuugcaccauugugggu

SEQ ID NO: 1883588 - RNA, 19 nt, Artificial Sequence
  Description of Artificial Sequence: Synthetic oligonucleotide
cugggccuaagugccaaau

SEQ ID NO: 1883589 - RNA, 19 nt, Artificial Sequence
  Description of Artificial Sequence: Synthetic oligonucleotide
ggccaggaguaugguguca

SEQ ID NO: 1883590 - RNA, 19 nt, Artificial Sequence
  Description of Artificial Sequence: Synthetic oligonucleotide
gaaccccuggagggaggcu

SEQ ID NO: 1883591 - RNA, 19 nt, Artificial Sequence
  Description of Artificial Sequence: Synthetic oligonucleotide
ccaaggagggugggaagaa

SEQ ID NO: 1883592 - RNA, 19 nt, Artificial Sequence
  Description of Artificial Sequence: Synthetic oligonucleotide
gucgccagccaaggagggu

SEQ ID NO: 1883593 - RNA, 19 nt, Artificial Sequence
  Description of Artificial Sequence: Synthetic oligonucleotide
agagggcaacugggccuaa

SEQ ID NO: 1883594 - RNA, 19 nt, Artificial Sequence
  Description of Artificial Sequence: Synthetic oligonucleotide
gcccuccacucggacucag

SEQ ID NO: 1883595 - RNA, 19 nt, Artificial Sequence
  Description of Artificial Sequence: Synthetic oligonucleotide
cggaccccaagcgcccucc

SEQ ID NO: 1883596 - RNA, 19 nt, Artificial Sequence
  Description of Artificial Sequence: Synthetic oligonucleotide
guccgguggugguucucuu

SEQ ID NO: 1883597 - RNA, 19 nt, Artificial Sequence
  Description of Artificial Sequence: Synthetic oligonucleotide
gucaucccucagggcugga

SEQ ID NO: 1883598 - RNA, 19 nt, Artificial Sequence
  Description of Artificial Sequence: Synthetic oligonucleotide
ggcauccguugagccccug

SEQ ID NO: 1883599 - RNA, 19 nt, Artificial Sequence
  Description of Artificial Sequence: Synthetic oligonucleotide
cggacccuguuaggauggc

SEQ ID NO: 1883600 - RNA, 19 nt, Artificial Sequence
  Description of Artificial Sequence: Synthetic oligonucleotide
ccguugagccccugaguuu

SEQ ID NO: 1883601 - RNA, 19 nt, Artificial Sequence
  Description of Artificial Sequence: Synthetic oligonucleotide
cgcccuccacucggacuca

SEQ ID NO: 1883602 - RNA, 19 nt, Artificial Sequence
  Description of Artificial Sequence: Synthetic oligonucleotide
aagaaauaaggccaccugg

SEQ ID NO: 1883603 - RNA, 19 nt, Artificial Sequence
  Description of Artificial Sequence: Synthetic oligonucleotide
ugaaccuucaagauguggg

SEQ ID NO: 1883604 - RNA, 19 nt, Artificial Sequence
  Description of Artificial Sequence: Synthetic oligonucleotide
auaguagugaggcacaagg

SEQ ID NO: 1883605 - RNA, 19 nt, Artificial Sequence
  Description of Artificial Sequence: Synthetic oligonucleotide
gauagggcaagaaauaagg

SEQ ID NO: 1883606 - RNA, 19 nt, Artificial Sequence
  Description of Artificial Sequence: Synthetic oligonucleotide
ugauagggcaagaaauaag

SEQ ID NO: 1883607 - RNA, 19 nt, Artificial Sequence
  Description of Artificial Sequence: Synthetic oligonucleotide
uuguugcucacgaacagug

SEQ ID NO: 1883608 - RNA, 19 nt, Artificial Sequence
  Description of Artificial Sequence: Synthetic oligonucleotide
ugccagauaagccugggcu

SEQ ID NO: 1883609 - RNA, 19 nt, Artificial Sequence
  Description of Artificial Sequence: Synthetic oligonucleotide
agaagugcucgucguagcc

SEQ ID NO: 1883610 - RNA, 19 nt, Artificial Sequence
  Description of Artificial Sequence: Synthetic oligonucleotide
ucgaacaagacgcccugcg

SEQ ID NO: 1883611 - RNA, 19 nt, Artificial Sequence
  Description of Artificial Sequence: Synthetic oligonucleotide
gucgcagucgaacaagacg

SEQ ID NO: 1883612 - RNA, 19 nt, Artificial Sequence
  Description of Artificial Sequence: Synthetic oligonucleotide
ugaaugugacucauggccu

SEQ ID NO: 1883613 - RNA, 19 nt, Artificial Sequence
  Description of Artificial Sequence: Synthetic oligonucleotide
aagucugaaaugcucucca

SEQ ID NO: 1883614 - RNA, 19 nt, Artificial Sequence
  Description of Artificial Sequence: Synthetic oligonucleotide
caucuaugggaucagggag

SEQ ID NO: 1883615 - RNA, 19 nt, Artificial Sequence
  Description of Artificial Sequence: Synthetic oligonucleotide
ucuucggugaugcacugga

SEQ ID NO: 1883616 - RNA, 19 nt, Artificial Sequence
  Description of Artificial Sequence: Synthetic oligonucleotide
uguuguugcucacgaacag

SEQ ID NO: 1883617 - RNA, 19 nt, Artificial Sequence
  Description of Artificial Sequence: Synthetic oligonucleotide
gguaugagagcccacaaac

SEQ ID NO: 1883618 - RNA, 19 nt, Artificial Sequence
  Description of Artificial Sequence: Synthetic oligonucleotide
auagggcaagaaauaaggc

SEQ ID NO: 1883619 - RNA, 19 nt, Artificial Sequence
  Description of Artificial Sequence: Synthetic oligonucleotide
cagacgaucacccaccauc

SEQ ID NO: 1883620 - RNA, 19 nt, Artificial Sequence
  Description of Artificial Sequence: Synthetic oligonucleotide
ucggugaugcacuggaaca

SEQ ID NO: 1883621 - RNA, 19 nt, Artificial Sequence
  Description of Artificial Sequence: Synthetic oligonucleotide
aacaagacgcccugcgccu

SEQ ID NO: 1883622 - RNA, 19 nt, Artificial Sequence
  Description of Artificial Sequence: Synthetic oligonucleotide
ucuucgaggcgugacaccc

SEQ ID NO: 1883623 - RNA, 19 nt, Artificial Sequence
  Description of Artificial Sequence: Synthetic oligonucleotide
aagggucgcgaucgguggc

SEQ ID NO: 1883624 - RNA, 19 nt, Artificial Sequence
  Description of Artificial Sequence: Synthetic oligonucleotide
aagugcucgucguagccca

SEQ ID NO: 1883625 - RNA, 19 nt, Artificial Sequence
  Description of Artificial Sequence: Synthetic oligonucleotide
aaugugacucauggccugg

SEQ ID NO: 1883626 - RNA, 19 nt, Artificial Sequence
  Description of Artificial Sequence: Synthetic oligonucleotide
guagcccacgagcacagcg

SEQ ID NO: 1883627 - RNA, 19 nt, Artificial Sequence
  Description of Artificial Sequence: Synthetic oligonucleotide
gcuacgagcaggcagucgg

SEQ ID NO: 1883628 - RNA, 19 nt, Artificial Sequence
  Description of Artificial Sequence: Synthetic oligonucleotide
ugagugggugccaaggguc

SEQ ID NO: 1883629 - RNA, 19 nt, Artificial Sequence
  Description of Artificial Sequence: Synthetic oligonucleotide
agucugaaaugcucuccac

SEQ ID NO: 1883630 - RNA, 19 nt, Artificial Sequence
  Description of Artificial Sequence: Synthetic oligonucleotide
agaaauaaggccaccuggu

SEQ ID NO: 1883631 - RNA, 19 nt, Artificial Sequence
  Description of Artificial Sequence: Synthetic oligonucleotide
ucgucguagcccacgagca

SEQ ID NO: 1883632 - RNA, 19 nt, Artificial Sequence
  Description of Artificial Sequence: Synthetic oligonucleotide
aagucuucggugaugcacu

SEQ ID NO: 1883633 - RNA, 19 nt, Artificial Sequence
  Description of Artificial Sequence: Synthetic oligonucleotide
cacgcugaagucuucggug

SEQ ID NO: 1883634 - RNA, 19 nt, Artificial Sequence
  Description of Artificial Sequence: Synthetic oligonucleotide
accccugugagugugagca

SEQ ID NO: 1883635 - RNA, 19 nt, Artificial Sequence
  Description of Artificial Sequence: Synthetic oligonucleotide
acgaauacagugcccggug

SEQ ID NO: 1883636 - RNA, 19 nt, Artificial Sequence
  Description of Artificial Sequence: Synthetic oligonucleotide
auugcuaggagggguauga

SEQ ID NO: 1883637 - RNA, 19 nt, Artificial Sequence
  Description of Artificial Sequence: Synthetic oligonucleotide
acagcgcagagcugaagag

SEQ ID NO: 1883638 - RNA, 19 nt, Artificial Sequence
  Description of Artificial Sequence: Synthetic oligonucleotide
aauacagugcccggugcgu

SEQ ID NO: 1883639 - RNA, 19 nt, Artificial Sequence
  Description of Artificial Sequence: Synthetic oligonucleotide
gauccuagcuucccuuuac

SEQ ID NO: 1883640 - RNA, 19 nt, Artificial Sequence
  Description of Artificial Sequence: Synthetic oligonucleotide
caagggucgcgaucggugg

SEQ ID NO: 1883641 - RNA, 19 nt, Artificial Sequence
  Description of Artificial Sequence: Synthetic oligonucleotide
ucuaugggaucagggagug

SEQ ID NO: 1883642 - RNA, 19 nt, Artificial Sequence
  Description of Artificial Sequence: Synthetic oligonucleotide
uacagugcccggugcgucg

SEQ ID NO: 1883643 - RNA, 19 nt, Artificial Sequence
  Description of Artificial Sequence: Synthetic oligonucleotide
augaaccuucaagaugugg

SEQ ID NO: 1883644 - RNA, 19 nt, Artificial Sequence
  Description of Artificial Sequence: Synthetic oligonucleotide
acgaucacccaccaucagu

SEQ ID NO: 1883645 - RNA, 19 nt, Artificial Sequence
  Description of Artificial Sequence: Synthetic oligonucleotide
gagaagugcucgucguagc

SEQ ID NO: 1883646 - RNA, 19 nt, Artificial Sequence
  Description of Artificial Sequence: Synthetic oligonucleotide
aggugauagggcaagaaau

SEQ ID NO: 1883647 - RNA, 19 nt, Artificial Sequence
  Description of Artificial Sequence: Synthetic oligonucleotide
gacgcuggcacagcaggcg

SEQ ID NO: 1883648 - RNA, 19 nt, Artificial Sequence
  Description of Artificial Sequence: Synthetic oligonucleotide
guaugagagcccacaaacc

SEQ ID NO: 1883649 - RNA, 19 nt, Artificial Sequence
  Description of Artificial Sequence: Synthetic oligonucleotide
agucgaacaagacgcccug

SEQ ID NO: 1883650 - RNA, 19 nt, Artificial Sequence
  Description of Artificial Sequence: Synthetic oligonucleotide
ucaccacccagcacgaaua

SEQ ID NO: 1883651 - RNA, 19 nt, Artificial Sequence
  Description of Artificial Sequence: Synthetic oligonucleotide
cacgcagccgcucgcagcg

SEQ ID NO: 1883652 - RNA, 19 nt, Artificial Sequence
  Description of Artificial Sequence: Synthetic oligonucleotide
cucgccguuccacagcacc

SEQ ID NO: 1883653 - RNA, 19 nt, Artificial Sequence
  Description of Artificial Sequence: Synthetic oligonucleotide
ugcucauggugcugaaugu

SEQ ID NO: 1883654 - RNA, 19 nt, Artificial Sequence
  Description of Artificial Sequence: Synthetic oligonucleotide
aucgguggcuacgagcagg

SEQ ID NO: 1883655 - RNA, 19 nt, Artificial Sequence
  Description of Artificial Sequence: Synthetic oligonucleotide
acauguaggggcuggguuu

SEQ ID NO: 1883656 - RNA, 19 nt, Artificial Sequence
  Description of Artificial Sequence: Synthetic oligonucleotide
gaagugcucgucguagccc

SEQ ID NO: 1883657 - RNA, 19 nt, Artificial Sequence
  Description of Artificial Sequence: Synthetic oligonucleotide
uccacugcggcagccaggc

SEQ ID NO: 1883658 - RNA, 19 nt, Artificial Sequence
  Description of Artificial Sequence: Synthetic oligonucleotide
ucgguggcuacgagcaggc

SEQ ID NO: 1883659 - RNA, 19 nt, Artificial Sequence
  Description of Artificial Sequence: Synthetic oligonucleotide
ccacccagcacgaauacag

SEQ ID NO: 1883660 - RNA, 19 nt, Artificial Sequence
  Description of Artificial Sequence: Synthetic oligonucleotide
gcuuccgucgcugaguggg

SEQ ID NO: 1883661 - RNA, 19 nt, Artificial Sequence
  Description of Artificial Sequence: Synthetic oligonucleotide
gguacagacaccugugcca

SEQ ID NO: 1883662 - RNA, 19 nt, Artificial Sequence
  Description of Artificial Sequence: Synthetic oligonucleotide
gagugggugccaagggucg

SEQ ID NO: 1883663 - RNA, 19 nt, Artificial Sequence
  Description of Artificial Sequence: Synthetic oligonucleotide
uucgaggcgugacaccccu

SEQ ID NO: 1883664 - RNA, 19 nt, Artificial Sequence
  Description of Artificial Sequence: Synthetic oligonucleotide
ucccgcggcacgcagcuca

SEQ ID NO: 1883665 - RNA, 19 nt, Artificial Sequence
  Description of Artificial Sequence: Synthetic oligonucleotide
uggguuugcccaccaccag

SEQ ID NO: 1883666 - RNA, 19 nt, Artificial Sequence
  Description of Artificial Sequence: Synthetic oligonucleotide
uacgcucgccguuccacag

SEQ ID NO: 1883667 - RNA, 19 nt, Artificial Sequence
  Description of Artificial Sequence: Synthetic oligonucleotide
aucuaugggaucagggagu

SEQ ID NO: 1883668 - RNA, 19 nt, Artificial Sequence
  Description of Artificial Sequence: Synthetic oligonucleotide
uggcacagcaggcgcgcgg

SEQ ID NO: 1883669 - RNA, 19 nt, Artificial Sequence
  Description of Artificial Sequence: Synthetic oligonucleotide
agggcuuggcguccugagg

SEQ ID NO: 1883670 - RNA, 19 nt, Artificial Sequence
  Description of Artificial Sequence: Synthetic oligonucleotide
accaucagugugcgggcag

SEQ ID NO: 1883671 - RNA, 19 nt, Artificial Sequence
  Description of Artificial Sequence: Synthetic oligonucleotide
uucuucgaggcgugacacc

SEQ ID NO: 1883672 - RNA, 19 nt, Artificial Sequence
  Description of Artificial Sequence: Synthetic oligonucleotide
ccuuuacugggguacagac

SEQ ID NO: 1883673 - RNA, 19 nt, Artificial Sequence
  Description of Artificial Sequence: Synthetic oligonucleotide
acgaacaguguggccuugc

SEQ ID NO: 1883674 - RNA, 19 nt, Artificial Sequence
  Description of Artificial Sequence: Synthetic oligonucleotide
uccagacgaucacccacca

SEQ ID NO: 1883675 - RNA, 19 nt, Artificial Sequence
  Description of Artificial Sequence: Synthetic oligonucleotide
cucgcagcgcgccaugcag

SEQ ID NO: 1883676 - RNA, 19 nt, Artificial Sequence
  Description of Artificial Sequence: Synthetic oligonucleotide
aggcgugacaccccuguga

SEQ ID NO: 1883677 - RNA, 19 nt, Artificial Sequence
  Description of Artificial Sequence: Synthetic oligonucleotide
gggcuuggcguccugaggc

SEQ ID NO: 1883678 - RNA, 19 nt, Artificial Sequence
  Description of Artificial Sequence: Synthetic oligonucleotide
caaggucaugcugaccagc

SEQ ID NO: 1883679 - RNA, 19 nt, Artificial Sequence
  Description of Artificial Sequence: Synthetic oligonucleotide
ucggggucgcgcaggugcg

SEQ ID NO: 1883680 - RNA, 19 nt, Artificial Sequence
  Description of Artificial Sequence: Synthetic oligonucleotide
ucggucuccagacgaucac

SEQ ID NO: 1883681 - RNA, 19 nt, Artificial Sequence
  Description of Artificial Sequence: Synthetic oligonucleotide
ggcgugacaccccugugag

SEQ ID NO: 1883682 - RNA, 19 nt, Artificial Sequence
  Description of Artificial Sequence: Synthetic oligonucleotide
cacagcgcagagcugaaga

SEQ ID NO: 1883683 - RNA, 19 nt, Artificial Sequence
  Description of Artificial Sequence: Synthetic oligonucleotide
gacgaucacccaccaucag

SEQ ID NO: 1883684 - RNA, 19 nt, Artificial Sequence
  Description of Artificial Sequence: Synthetic oligonucleotide
cacauaguagugaggcaca

SEQ ID NO: 1883685 - RNA, 19 nt, Artificial Sequence
  Description of Artificial Sequence: Synthetic oligonucleotide
acgcucgccguuccacagc

SEQ ID NO: 1883686 - RNA, 19 nt, Artificial Sequence
  Description of Artificial Sequence: Synthetic oligonucleotide
caaaggagaagugcucguc

SEQ ID NO: 1883687 - RNA, 19 nt, Artificial Sequence
  Description of Artificial Sequence: Synthetic oligonucleotide
acgguacgcucgccguucc

SEQ ID NO: 1883688 - RNA, 19 nt, Artificial Sequence
  Description of Artificial Sequence: Synthetic oligonucleotide
gugauagggcaagaaauaa

SEQ ID NO: 1883689 - RNA, 19 nt, Artificial Sequence
  Description of Artificial Sequence: Synthetic oligonucleotide
agagcccacaaaccuuccu

SEQ ID NO: 1883690 - RNA, 19 nt, Artificial Sequence
  Description of Artificial Sequence: Synthetic oligonucleotide
agacgaucacccaccauca

SEQ ID NO: 1883691 - RNA, 19 nt, Artificial Sequence
  Description of Artificial Sequence: Synthetic oligonucleotide
cauguaggggcuggguuug

SEQ ID NO: 1883692 - RNA, 19 nt, Artificial Sequence
  Description of Artificial Sequence: Synthetic oligonucleotide
agugggugccaagggucgc

SEQ ID NO: 1883693 - RNA, 19 nt, Artificial Sequence
  Description of Artificial Sequence: Synthetic oligonucleotide
gucgcgaucgguggcuacg

SEQ ID NO: 1883694 - RNA, 19 nt, Artificial Sequence
  Description of Artificial Sequence: Synthetic oligonucleotide
acgcgcgugucgucgucgc

SEQ ID NO: 1883695 - RNA, 19 nt, Artificial Sequence
  Description of Artificial Sequence: Synthetic oligonucleotide
cagcgcagagcugaagagc

SEQ ID NO: 1883696 - RNA, 19 nt, Artificial Sequence
  Description of Artificial Sequence: Synthetic oligonucleotide
cgaucacccaccaucagug

SEQ ID NO: 1883697 - RNA, 19 nt, Artificial Sequence
  Description of Artificial Sequence: Synthetic oligonucleotide
gaucgguggcuacgagcag

SEQ ID NO: 1883698 - RNA, 19 nt, Artificial Sequence
  Description of Artificial Sequence: Synthetic oligonucleotide
cuucgaggcgugacacccc

SEQ ID NO: 1883699 - RNA, 19 nt, Artificial Sequence
  Description of Artificial Sequence: Synthetic oligonucleotide
cugccagauaagccugggc

SEQ ID NO: 1883700 - RNA, 19 nt, Artificial Sequence
  Description of Artificial Sequence: Synthetic oligonucleotide
ugggcgaagcgcagcgcca

SEQ ID NO: 1883701 - RNA, 19 nt, Artificial Sequence
  Description of Artificial Sequence: Synthetic oligonucleotide
ucccuuuacugggguacag

SEQ ID NO: 1883702 - RNA, 19 nt, Artificial Sequence
  Description of Artificial Sequence: Synthetic oligonucleotide
uggauccuagcuucccuuu

SEQ ID NO: 1883703 - RNA, 19 nt, Artificial Sequence
  Description of Artificial Sequence: Synthetic oligonucleotide
aggucaugcugaccagcug

SEQ ID NO: 1883704 - RNA, 19 nt, Artificial Sequence
  Description of Artificial Sequence: Synthetic oligonucleotide
ugcgcgcaugccucgcuca

SEQ ID NO: 1883705 - RNA, 19 nt, Artificial Sequence
  Description of Artificial Sequence: Synthetic oligonucleotide
ugccaagggucgcgaucgg

SEQ ID NO: 1883706 - RNA, 19 nt, Artificial Sequence
  Description of Artificial Sequence: Synthetic oligonucleotide
uucccuuuacugggguaca

SEQ ID NO: 1883707 - RNA, 19 nt, Artificial Sequence
  Description of Artificial Sequence: Synthetic oligonucleotide
cuccaucuaugggaucagg

SEQ ID NO: 1883708 - RNA, 19 nt, Artificial Sequence
  Description of Artificial Sequence: Synthetic oligonucleotide
agugcccggugcgucgggc

SEQ ID NO: 1883709 - RNA, 19 nt, Artificial Sequence
  Description of Artificial Sequence: Synthetic oligonucleotide
augggaucagggagugggg

SEQ ID NO: 1883710 - RNA, 19 nt, Artificial Sequence
  Description of Artificial Sequence: Synthetic oligonucleotide
caagacgcccugcgccugg

SEQ ID NO: 1883711 - RNA, 19 nt, Artificial Sequence
  Description of Artificial Sequence: Synthetic oligonucleotide
ccaucuaugggaucaggga

SEQ ID NO: 1883712 - RNA, 19 nt, Artificial Sequence
  Description of Artificial Sequence: Synthetic oligonucleotide
accccgucgcagucgaaca

SEQ ID NO: 1883713 - RNA, 19 nt, Artificial Sequence
  Description of Artificial Sequence: Synthetic oligonucleotide
uacgguacgcucgccguuc

SEQ ID NO: 1883714 - RNA, 19 nt, Artificial Sequence
  Description of Artificial Sequence: Synthetic oligonucleotide
ccaagggucgcgaucggug

SEQ ID NO: 1883715 - RNA, 19 nt, Artificial Sequence
  Description of Artificial Sequence: Synthetic oligonucleotide
agccccgcgaagcccagcu

SEQ ID NO: 1883716 - RNA, 19 nt, Artificial Sequence
  Description of Artificial Sequence: Synthetic oligonucleotide
gggguacagacaccugugc

SEQ ID NO: 1883717 - RNA, 19 nt, Artificial Sequence
  Description of Artificial Sequence: Synthetic oligonucleotide
agcaccccgucgcagucga

SEQ ID NO: 1883718 - RNA, 19 nt, Artificial Sequence
  Description of Artificial Sequence: Synthetic oligonucleotide
agggugcucauggugcuga

SEQ ID NO: 1883719 - RNA, 19 nt, Artificial Sequence
  Description of Artificial Sequence: Synthetic oligonucleotide
ggugauagggcaagaaaua

SEQ ID NO: 1883720 - RNA, 19 nt, Artificial Sequence
  Description of Artificial Sequence: Synthetic oligonucleotide
ggugcgucgggcugcccgg

SEQ ID NO: 1883721 - RNA, 19 nt, Artificial Sequence
  Description of Artificial Sequence: Synthetic oligonucleotide
cagcgcgcagcccuucacc

SEQ ID NO: 1883722 - RNA, 19 nt, Artificial Sequence
  Description of Artificial Sequence: Synthetic oligonucleotide
aggagaagugcucgucgua

SEQ ID NO: 1883723 - RNA, 19 nt, Artificial Sequence
  Description of Artificial Sequence: Synthetic oligonucleotide
gcgaucgguggcuacgagc

SEQ ID NO: 1883724 - RNA, 19 nt, Artificial Sequence
  Description of Artificial Sequence: Synthetic oligonucleotide
gcacgaauacagugcccgg

SEQ ID NO: 1883725 - RNA, 19 nt, Artificial Sequence
  Description of Artificial Sequence: Synthetic oligonucleotide
ugcccggugcgucgggcug

SEQ ID NO: 1883726 - RNA, 19 nt, Artificial Sequence
  Description of Artificial Sequence: Synthetic oligonucleotide
ggaacauguaggggcuggg

SEQ ID NO: 1883727 - RNA, 19 nt, Artificial Sequence
  Description of Artificial Sequence: Synthetic oligonucleotide
ugucggucuccagacgauc

SEQ ID NO: 1883728 - RNA, 19 nt, Artificial Sequence
  Description of Artificial Sequence: Synthetic oligonucleotide
acauaguagugaggcacaa

SEQ ID NO: 1883729 - RNA, 19 nt, Artificial Sequence
  Description of Artificial Sequence: Synthetic oligonucleotide
cauugcuaggagggguaug

SEQ ID NO: 1883730 - RNA, 19 nt, Artificial Sequence
  Description of Artificial Sequence: Synthetic oligonucleotide
acagugcccggugcgucgg

SEQ ID NO: 1883731 - RNA, 19 nt, Artificial Sequence
  Description of Artificial Sequence: Synthetic oligonucleotide
ggcacaaggucaugcugac

SEQ ID NO: 1883732 - RNA, 19 nt, Artificial Sequence
  Description of Artificial Sequence: Synthetic oligonucleotide
gcgguggccaaagaggaug

SEQ ID NO: 1883733 - RNA, 19 nt, Artificial Sequence
  Description of Artificial Sequence: Synthetic oligonucleotide
caggugcgcgcaugccucg

SEQ ID NO: 1883734 - RNA, 19 nt, Artificial Sequence
  Description of Artificial Sequence: Synthetic oligonucleotide
cugggguacagacaccugu

SEQ ID NO: 1883735 - RNA, 19 nt, Artificial Sequence
  Description of Artificial Sequence: Synthetic oligonucleotide
caccacccagcacgaauac

SEQ ID NO: 1883736 - RNA, 19 nt, Artificial Sequence
  Description of Artificial Sequence: Synthetic oligonucleotide
gcgcaugccucgcucagcc

SEQ ID NO: 1883737 - RNA, 19 nt, Artificial Sequence
  Description of Artificial Sequence: Synthetic oligonucleotide
cuaugggaucagggagugg

SEQ ID NO: 1883738 - RNA, 19 nt, Artificial Sequence
  Description of Artificial Sequence: Synthetic oligonucleotide
gucggucuccagacgauca

SEQ ID NO: 1883739 - RNA, 19 nt, Artificial Sequence
  Description of Artificial Sequence: Synthetic oligonucleotide
gcuaggcgcagucccgcgg

SEQ ID NO: 1883740 - RNA, 19 nt, Artificial Sequence
  Description of Artificial Sequence: Synthetic oligonucleotide
aggcuccaucuaugggauc

SEQ ID NO: 1883741 - RNA, 19 nt, Artificial Sequence
  Description of Artificial Sequence: Synthetic oligonucleotide
guacgcucgccguuccaca

SEQ ID NO: 1883742 - RNA, 19 nt, Artificial Sequence
  Description of Artificial Sequence: Synthetic oligonucleotide
uuccgucgcugagugggug

SEQ ID NO: 1883743 - RNA, 19 nt, Artificial Sequence
  Description of Artificial Sequence: Synthetic oligonucleotide
gaagagcugcucggcgcgc

SEQ ID NO: 1883744 - RNA, 19 nt, Artificial Sequence
  Description of Artificial Sequence: Synthetic oligonucleotide
ucgcugagugggugccaag

SEQ ID NO: 1883745 - RNA, 19 nt, Artificial Sequence
  Description of Artificial Sequence: Synthetic oligonucleotide
gaacagcaguguccagcca

SEQ ID NO: 1883746 - RNA, 19 nt, Artificial Sequence
  Description of Artificial Sequence: Synthetic oligonucleotide
gcgccaugcagccggcugg

SEQ ID NO: 1883747 - RNA, 19 nt, Artificial Sequence
  Description of Artificial Sequence: Synthetic oligonucleotide
ggugccaagggucgcgauc

SEQ ID NO: 1883748 - RNA, 19 nt, Artificial Sequence
  Description of Artificial Sequence: Synthetic oligonucleotide
cagucgaacaagacgcccu

SEQ ID NO: 1883749 - RNA, 19 nt, Artificial Sequence
  Description of Artificial Sequence: Synthetic oligonucleotide
caccccgucgcagucgaac

SEQ ID NO: 1883750 - RNA, 19 nt, Artificial Sequence
  Description of Artificial Sequence: Synthetic oligonucleotide
gcagucgaacaagacgccc

SEQ ID NO: 1883751 - RNA, 19 nt, Artificial Sequence
  Description of Artificial Sequence: Synthetic oligonucleotide
gucgaacaagacgcccugc

SEQ ID NO: 1883752 - RNA, 19 nt, Artificial Sequence
  Description of Artificial Sequence: Synthetic oligonucleotide
cacgguggucaugccacag

SEQ ID NO: 1883753 - RNA, 19 nt, Artificial Sequence
  Description of Artificial Sequence: Synthetic oligonucleotide
ucgcgaucgguggcuacga

SEQ ID NO: 1883754 - RNA, 19 nt, Artificial Sequence
  Description of Artificial Sequence: Synthetic oligonucleotide
ggcaagaaauaaggccacc

SEQ ID NO: 1883755 - RNA, 19 nt, Artificial Sequence
  Description of Artificial Sequence: Synthetic oligonucleotide
guuguugcucacgaacagu

SEQ ID NO: 1883756 - RNA, 19 nt, Artificial Sequence
  Description of Artificial Sequence: Synthetic oligonucleotide
ggcgcagucccgcggcacg

SEQ ID NO: 1883757 - RNA, 19 nt, Artificial Sequence
  Description of Artificial Sequence: Synthetic oligonucleotide
cgaucgguggcuacgagca

SEQ ID NO: 1883758 - RNA, 19 nt, Artificial Sequence
  Description of Artificial Sequence: Synthetic oligonucleotide
ccuccaucaagucugaaau

SEQ ID NO: 1883759 - RNA, 19 nt, Artificial Sequence
  Description of Artificial Sequence: Synthetic oligonucleotide
aggugcgcgcaugccucgc

SEQ ID NO: 1883760 - RNA, 19 nt, Artificial Sequence
  Description of Artificial Sequence: Synthetic oligonucleotide
ucgaggcgugacaccccug

SEQ ID NO: 1883761 - RNA, 19 nt, Artificial Sequence
  Description of Artificial Sequence: Synthetic oligonucleotide
gugcgggcaggguccacgc

SEQ ID NO: 1883762 - RNA, 19 nt, Artificial Sequence
  Description of Artificial Sequence: Synthetic oligonucleotide
caaaccuuccuggauccua

SEQ ID NO: 1883763 - RNA, 19 nt, Artificial Sequence
  Description of Artificial Sequence: Synthetic oligonucleotide
caccccugugagugugagc

SEQ ID NO: 1883764 - RNA, 19 nt, Artificial Sequence
  Description of Artificial Sequence: Synthetic oligonucleotide
cacgcgcgugucgucgucg

SEQ ID NO: 1883765 - RNA, 19 nt, Artificial Sequence
  Description of Artificial Sequence: Synthetic oligonucleotide
cagucccgcggcacgcagc

SEQ ID NO: 1883766 - RNA, 19 nt, Artificial Sequence
  Description of Artificial Sequence: Synthetic oligonucleotide
acaagacgcccugcgccug

SEQ ID NO: 1883767 - RNA, 19 nt, Artificial Sequence
  Description of Artificial Sequence: Synthetic oligonucleotide
gaucacccaccaucagugu

SEQ ID NO: 1883768 - RNA, 19 nt, Artificial Sequence
  Description of Artificial Sequence: Synthetic oligonucleotide
gguacgcucgccguuccac

SEQ ID NO: 1883769 - RNA, 19 nt, Artificial Sequence
  Description of Artificial Sequence: Synthetic oligonucleotide
acaaaccuuccuggauccu

SEQ ID NO: 1883770 - RNA, 19 nt, Artificial Sequence
  Description of Artificial Sequence: Synthetic oligonucleotide
ccagauaagccugggcuuc

SEQ ID NO: 1883771 - RNA, 19 nt, Artificial Sequence
  Description of Artificial Sequence: Synthetic oligonucleotide
ggguaugagagcccacaaa

SEQ ID NO: 1883772 - RNA, 19 nt, Artificial Sequence
  Description of Artificial Sequence: Synthetic oligonucleotide
gaacauguaggggcugggu

SEQ ID NO: 1883773 - RNA, 19 nt, Artificial Sequence
  Description of Artificial Sequence: Synthetic oligonucleotide
gcaagaaauaaggccaccu

SEQ ID NO: 1883774 - RNA, 19 nt, Artificial Sequence
  Description of Artificial Sequence: Synthetic oligonucleotide
gcgcgugucgucgucgccg

SEQ ID NO: 1883775 - RNA, 19 nt, Artificial Sequence
  Description of Artificial Sequence: Synthetic oligonucleotide
cgaacaagacgcccugcgc

SEQ ID NO: 1883776 - RNA, 19 nt, Artificial Sequence
  Description of Artificial Sequence: Synthetic oligonucleotide
gaggcuccaucuaugggau

SEQ ID NO: 1883777 - RNA, 19 nt, Artificial Sequence
  Description of Artificial Sequence: Synthetic oligonucleotide
cagggccgcgccacgcagc

SEQ ID NO: 1883778 - RNA, 19 nt, Artificial Sequence
  Description of Artificial Sequence: Synthetic oligonucleotide
agcaggcagucggggucgc

SEQ ID NO: 1883779 - RNA, 19 nt, Artificial Sequence
  Description of Artificial Sequence: Synthetic oligonucleotide
cgaauacagugcccggugc

SEQ ID NO: 1883780 - RNA, 19 nt, Artificial Sequence
  Description of Artificial Sequence: Synthetic oligonucleotide
gagugugagcacggugguc

SEQ ID NO: 1883781 - RNA, 19 nt, Artificial Sequence
  Description of Artificial Sequence: Synthetic oligonucleotide
guguggccuugcccgcccg

SEQ ID NO: 1883782 - RNA, 19 nt, Artificial Sequence
  Description of Artificial Sequence: Synthetic oligonucleotide
gguacgguacgcucgccgu

SEQ ID NO: 1883783 - RNA, 19 nt, Artificial Sequence
  Description of Artificial Sequence: Synthetic oligonucleotide
cuucggugaugcacuggaa

SEQ ID NO: 1883784 - RNA, 19 nt, Artificial Sequence
  Description of Artificial Sequence: Synthetic oligonucleotide
cagcaccccgucgcagucg

SEQ ID NO: 1883785 - RNA, 19 nt, Artificial Sequence
  Description of Artificial Sequence: Synthetic oligonucleotide
gcguccugaggcugucucc

SEQ ID NO: 1883786 - RNA, 19 nt, Artificial Sequence
  Description of Artificial Sequence: Synthetic oligonucleotide
gcagccggcuggccgcucg

SEQ ID NO: 1883787 - RNA, 19 nt, Artificial Sequence
  Description of Artificial Sequence: Synthetic oligonucleotide
gagggguaugagagcccac

SEQ ID NO: 1883788 - RNA, 19 nt, Artificial Sequence
  Description of Artificial Sequence: Synthetic oligonucleotide
cgaacaguguggccuugcc

SEQ ID NO: 1883789 - RNA, 19 nt, Artificial Sequence
  Description of Artificial Sequence: Synthetic oligonucleotide
ggcuacgagcaggcagucg

SEQ ID NO: 1883790 - RNA, 19 nt, Artificial Sequence
  Description of Artificial Sequence: Synthetic oligonucleotide
cccgcuaggcgcagucccg

SEQ ID NO: 1883791 - RNA, 19 nt, Artificial Sequence
  Description of Artificial Sequence: Synthetic oligonucleotide
gggguaugagagcccacaa

SEQ ID NO: 1883792 - RNA, 19 nt, Artificial Sequence
  Description of Artificial Sequence: Synthetic oligonucleotide
cuggcccagcacgucgcgc

SEQ ID NO: 1883793 - RNA, 19 nt, Artificial Sequence
  Description of Artificial Sequence: Synthetic oligonucleotide
ccccgcuaggcgcaguccc

SEQ ID NO: 1883794 - RNA, 19 nt, Artificial Sequence
  Description of Artificial Sequence: Synthetic oligonucleotide
gccucgcucagccuggcaa

SEQ ID NO: 1883795 - RNA, 19 nt, Artificial Sequence
  Description of Artificial Sequence: Synthetic oligonucleotide
cccgguacgguacgcucgc

SEQ ID NO: 1883796 - RNA, 19 nt, Artificial Sequence
  Description of Artificial Sequence: Synthetic oligonucleotide
cacgaauacagugcccggu

SEQ ID NO: 1883797 - RNA, 19 nt, Artificial Sequence
  Description of Artificial Sequence: Synthetic oligonucleotide
agugugcgggcagggucca

SEQ ID NO: 1883798 - RNA, 19 nt, Artificial Sequence
  Description of Artificial Sequence: Synthetic oligonucleotide
ugccacagcgguggccaaa

SEQ ID NO: 1883799 - RNA, 19 nt, Artificial Sequence
  Description of Artificial Sequence: Synthetic oligonucleotide
cacagcgcgcacgcgcgug

SEQ ID NO: 1883800 - RNA, 19 nt, Artificial Sequence
  Description of Artificial Sequence: Synthetic oligonucleotide
ucgcgcaggugcgcgcaug

SEQ ID NO: 1883801 - RNA, 19 nt, Artificial Sequence
  Description of Artificial Sequence: Synthetic oligonucleotide
ucgcgcagggccgcgccac

SEQ ID NO: 1883802 - RNA, 19 nt, Artificial Sequence
  Description of Artificial Sequence: Synthetic oligonucleotide
cgguacgguacgcucgccg

SEQ ID NO: 1883803 - RNA, 19 nt, Artificial Sequence
  Description of Artificial Sequence: Synthetic oligonucleotide
gcgcacagcgcagagcuga

SEQ ID NO: 1883804 - RNA, 19 nt, Artificial Sequence
  Description of Artificial Sequence: Synthetic oligonucleotide
ggcagucggggucgcgcag

SEQ ID NO: 1883805 - RNA, 19 nt, Artificial Sequence
  Description of Artificial Sequence: Synthetic oligonucleotide
uggcuacgagcaggcaguc

SEQ ID NO: 1883806 - RNA, 19 nt, Artificial Sequence
  Description of Artificial Sequence: Synthetic oligonucleotide
ggggucgcgcaggugcgcg

SEQ ID NO: 1883807 - RNA, 19 nt, Artificial Sequence
  Description of Artificial Sequence: Synthetic oligonucleotide
gucgcugagugggugccaa

SEQ ID NO: 1883808 - RNA, 19 nt, Artificial Sequence
  Description of Artificial Sequence: Synthetic oligonucleotide
gcggcacgcagcucagcgc

SEQ ID NO: 1883809 - RNA, 19 nt, Artificial Sequence
  Description of Artificial Sequence: Synthetic oligonucleotide
cgcagucgaacaagacgcc

SEQ ID NO: 1883810 - RNA, 19 nt, Artificial Sequence
  Description of Artificial Sequence: Synthetic oligonucleotide
cuggauccuagcuucccuu

SEQ ID NO: 1883811 - RNA, 19 nt, Artificial Sequence
  Description of Artificial Sequence: Synthetic oligonucleotide
gcucgucguagcccacgag

SEQ ID NO: 1883812 - RNA, 19 nt, Artificial Sequence
  Description of Artificial Sequence: Synthetic oligonucleotide
cccgucgcagucgaacaag

SEQ ID NO: 1883813 - RNA, 19 nt, Artificial Sequence
  Description of Artificial Sequence: Synthetic oligonucleotide
gcagucccgcggcacgcag

SEQ ID NO: 1883814 - RNA, 19 nt, Artificial Sequence
  Description of Artificial Sequence: Synthetic oligonucleotide
cagccgcucgcagcgcgcc

SEQ ID NO: 1883815 - RNA, 19 nt, Artificial Sequence
  Description of Artificial Sequence: Synthetic oligonucleotide
gacucauggccuggaggcu

SEQ ID NO: 1883816 - RNA, 19 nt, Artificial Sequence
  Description of Artificial Sequence: Synthetic oligonucleotide
cucagcgcgcagcccuuca

SEQ ID NO: 1883817 - RNA, 19 nt, Artificial Sequence
  Description of Artificial Sequence: Synthetic oligonucleotide
cgugucgucgucgccgggg

SEQ ID NO: 1883818 - RNA, 19 nt, Artificial Sequence
  Description of Artificial Sequence: Synthetic oligonucleotide
cucgcacgcgcgcgccgag

SEQ ID NO: 1883819 - RNA, 19 nt, Artificial Sequence
  Description of Artificial Sequence: Synthetic oligonucleotide
cagugcccggugcgucggg

SEQ ID NO: 1883820 - RNA, 19 nt, Artificial Sequence
  Description of Artificial Sequence: Synthetic oligonucleotide
gcgcacgcgcgugucgucg

SEQ ID NO: 1883821 - RNA, 19 nt, Artificial Sequence
  Description of Artificial Sequence: Synthetic oligonucleotide
ucgcacgcgcgcgccgagc

SEQ ID NO: 1883822 - RNA, 19 nt, Artificial Sequence
  Description of Artificial Sequence: Synthetic oligonucleotide
cacccagcacgaauacagu

SEQ ID NO: 1883823 - RNA, 19 nt, Artificial Sequence
  Description of Artificial Sequence: Synthetic oligonucleotide
cggugcgucgggcugcccg

SEQ ID NO: 1883824 - RNA, 19 nt, Artificial Sequence
  Description of Artificial Sequence: Synthetic oligonucleotide
gcgcgcaugccucgcucag

SEQ ID NO: 1883825 - RNA, 19 nt, Artificial Sequence
  Description of Artificial Sequence: Synthetic oligonucleotide
gugucgucgucgccggggu

SEQ ID NO: 1883826 - RNA, 19 nt, Artificial Sequence
  Description of Artificial Sequence: Synthetic oligonucleotide
cgucgcagucgaacaagac

SEQ ID NO: 1883827 - RNA, 19 nt, Artificial Sequence
  Description of Artificial Sequence: Synthetic oligonucleotide
agcgguggccaaagaggau

SEQ ID NO: 1883828 - RNA, 19 nt, Artificial Sequence
  Description of Artificial Sequence: Synthetic oligonucleotide
cccgggcagacgcuggcac

SEQ ID NO: 1883829 - RNA, 19 nt, Artificial Sequence
  Description of Artificial Sequence: Synthetic oligonucleotide
ggucgcgaucgguggcuac

SEQ ID NO: 1883830 - RNA, 19 nt, Artificial Sequence
  Description of Artificial Sequence: Synthetic oligonucleotide
gugacaccccugugagugu

SEQ ID NO: 1883831 - RNA, 19 nt, Artificial Sequence
  Description of Artificial Sequence: Synthetic oligonucleotide
cacgucgcgcagggccgcg

SEQ ID NO: 1883832 - RNA, 19 nt, Artificial Sequence
  Description of Artificial Sequence: Synthetic oligonucleotide
cgcgugucgucgucgccgg

SEQ ID NO: 1883833 - RNA, 19 nt, Artificial Sequence
  Description of Artificial Sequence: Synthetic oligonucleotide
ggcuggguuugcccaccac

SEQ ID NO: 1883834 - RNA, 19 nt, Artificial Sequence
  Description of Artificial Sequence: Synthetic oligonucleotide
agucggggucgcgcaggug

SEQ ID NO: 1883835 - RNA, 19 nt, Artificial Sequence
  Description of Artificial Sequence: Synthetic oligonucleotide
gggcgcccgguacgguacg

SEQ ID NO: 1883836 - RNA, 19 nt, Artificial Sequence
  Description of Artificial Sequence: Synthetic oligonucleotide
gccauugcuaggaggggua

SEQ ID NO: 1883837 - RNA, 19 nt, Artificial Sequence
  Description of Artificial Sequence: Synthetic oligonucleotide
ccgucgcagucgaacaaga

SEQ ID NO: 1883838 - RNA, 19 nt, Artificial Sequence
  Description of Artificial Sequence: Synthetic oligonucleotide
cuuccgucgcugagugggu

SEQ ID NO: 1883839 - RNA, 19 nt, Artificial Sequence
  Description of Artificial Sequence: Synthetic oligonucleotide
gucgcgcagggccgcgcca

SEQ ID NO: 1883840 - RNA, 19 nt, Artificial Sequence
  Description of Artificial Sequence: Synthetic oligonucleotide
guacgguacgcucgccguu

SEQ ID NO: 1883841 - RNA, 19 nt, Artificial Sequence
  Description of Artificial Sequence: Synthetic oligonucleotide
gcucgcagcgcgccaugca

SEQ ID NO: 1883842 - RNA, 19 nt, Artificial Sequence
  Description of Artificial Sequence: Synthetic oligonucleotide
ccgucgcugagugggugcc

SEQ ID NO: 1883843 - RNA, 19 nt, Artificial Sequence
  Description of Artificial Sequence: Synthetic oligonucleotide
cgucguagcccacgagcac

SEQ ID NO: 1883844 - RNA, 19 nt, Artificial Sequence
  Description of Artificial Sequence: Synthetic oligonucleotide
gggucgcgcaggugcgcgc

SEQ ID NO: 1883845 - RNA, 19 nt, Artificial Sequence
  Description of Artificial Sequence: Synthetic oligonucleotide
ggggcgcccgguacgguac

SEQ ID NO: 1883846 - RNA, 19 nt, Artificial Sequence
  Description of Artificial Sequence: Synthetic oligonucleotide
cagauaagccugggcuucu

SEQ ID NO: 1883847 - RNA, 19 nt, Artificial Sequence
  Description of Artificial Sequence: Synthetic oligonucleotide
cccuuuacugggguacaga

SEQ ID NO: 1883848 - RNA, 19 nt, Artificial Sequence
  Description of Artificial Sequence: Synthetic oligonucleotide
cgcgcaggugcgcgcaugc

SEQ ID NO: 1883849 - RNA, 19 nt, Artificial Sequence
  Description of Artificial Sequence: Synthetic oligonucleotide
gcgcgcagcccuucaccac

SEQ ID NO: 1883850 - RNA, 19 nt, Artificial Sequence
  Description of Artificial Sequence: Synthetic oligonucleotide
ggucgcgcaggugcgcgca

SEQ ID NO: 1883851 - RNA, 19 nt, Artificial Sequence
  Description of Artificial Sequence: Synthetic oligonucleotide
cgcgccaugcagccggcug

SEQ ID NO: 1883852 - RNA, 19 nt, Artificial Sequence
  Description of Artificial Sequence: Synthetic oligonucleotide
cgcuaggcgcagucccgcg

SEQ ID NO: 1883853 - RNA, 19 nt, Artificial Sequence
  Description of Artificial Sequence: Synthetic oligonucleotide
ccgcuaggcgcagucccgc

SEQ ID NO: 1883854 - RNA, 19 nt, Artificial Sequence
  Description of Artificial Sequence: Synthetic oligonucleotide
ccccugugagugugagcac

SEQ ID NO: 1883855 - RNA, 19 nt, Artificial Sequence
  Description of Artificial Sequence: Synthetic oligonucleotide
ccacgcugaagucuucggu

SEQ ID NO: 1883856 - RNA, 19 nt, Artificial Sequence
  Description of Artificial Sequence: Synthetic oligonucleotide
gcgcgccggcuguuguugc

SEQ ID NO: 1883857 - RNA, 19 nt, Artificial Sequence
  Description of Artificial Sequence: Synthetic oligonucleotide
gcgugucgucgucgccggg

SEQ ID NO: 1883858 - RNA, 19 nt, Artificial Sequence
  Description of Artificial Sequence: Synthetic oligonucleotide
ggcgcacagcgcagagcug

SEQ ID NO: 1883859 - RNA, 19 nt, Artificial Sequence
  Description of Artificial Sequence: Synthetic oligonucleotide
cccgcggcacgcagcucag

SEQ ID NO: 1883860 - RNA, 19 nt, Artificial Sequence
  Description of Artificial Sequence: Synthetic oligonucleotide
gcgcgccgagcucccuccg

SEQ ID NO: 1883861 - RNA, 19 nt, Artificial Sequence
  Description of Artificial Sequence: Synthetic oligonucleotide
ggguccacgcugaagucuu

SEQ ID NO: 1883862 - RNA, 19 nt, Artificial Sequence
  Description of Artificial Sequence: Synthetic oligonucleotide
cgcucgccguuccacagca

SEQ ID NO: 1883863 - RNA, 19 nt, Artificial Sequence
  Description of Artificial Sequence: Synthetic oligonucleotide
caccugugccagggugcuc

SEQ ID NO: 1883864 - RNA, 19 nt, Artificial Sequence
  Description of Artificial Sequence: Synthetic oligonucleotide
cggcgcacagcgcagagcu

SEQ ID NO: 1883865 - RNA, 19 nt, Artificial Sequence
  Description of Artificial Sequence: Synthetic oligonucleotide
ggcgcccgguacgguacgc

SEQ ID NO: 1883866 - RNA, 19 nt, Artificial Sequence
  Description of Artificial Sequence: Synthetic oligonucleotide
cagucggggucgcgcaggu

SEQ ID NO: 1883867 - RNA, 19 nt, Artificial Sequence
  Description of Artificial Sequence: Synthetic oligonucleotide
ccgggcagacgcuggcaca

SEQ ID NO: 1883868 - RNA, 19 nt, Artificial Sequence
  Description of Artificial Sequence: Synthetic oligonucleotide
ggcuggccgcucgcacgcg

SEQ ID NO: 1883869 - RNA, 19 nt, Artificial Sequence
  Description of Artificial Sequence: Synthetic oligonucleotide
cgcgaucgguggcuacgag

SEQ ID NO: 1883870 - RNA, 19 nt, Artificial Sequence
  Description of Artificial Sequence: Synthetic oligonucleotide
gcgcaggugcgcgcaugcc

SEQ ID NO: 1883871 - RNA, 19 nt, Artificial Sequence
  Description of Artificial Sequence: Synthetic oligonucleotide
gcucgcacgcgcgcgccga

SEQ ID NO: 1883872 - RNA, 19 nt, Artificial Sequence
  Description of Artificial Sequence: Synthetic oligonucleotide
cgccaugcagccggcuggc

SEQ ID NO: 1883873 - RNA, 19 nt, Artificial Sequence
  Description of Artificial Sequence: Synthetic oligonucleotide
cgagcacagcgcgcacgcg

SEQ ID NO: 1883874 - RNA, 19 nt, Artificial Sequence
  Description of Artificial Sequence: Synthetic oligonucleotide
ccuugcccgcccgcgccag

SEQ ID NO: 1883875 - RNA, 19 nt, Artificial Sequence
  Description of Artificial Sequence: Synthetic oligonucleotide
cgcgcgccggcuguuguug

SEQ ID NO: 1883876 - RNA, 19 nt, Artificial Sequence
  Description of Artificial Sequence: Synthetic oligonucleotide
ccagcacgucgcgcagggc

SEQ ID NO: 1883877 - RNA, 19 nt, Artificial Sequence
  Description of Artificial Sequence: Synthetic oligonucleotide
ggggucaggccaggaugaa

SEQ ID NO: 1883878 - RNA, 19 nt, Artificial Sequence
  Description of Artificial Sequence: Synthetic oligonucleotide
gcacgcgcgcgccgagcuc

SEQ ID NO: 1883879 - RNA, 19 nt, Artificial Sequence
  Description of Artificial Sequence: Synthetic oligonucleotide
ccccgucgcagucgaacaa

SEQ ID NO: 1883880 - RNA, 19 nt, Artificial Sequence
  Description of Artificial Sequence: Synthetic oligonucleotide
gccaagggucgcgaucggu

SEQ ID NO: 1883881 - RNA, 19 nt, Artificial Sequence
  Description of Artificial Sequence: Synthetic oligonucleotide
ccgguacgguacgcucgcc

SEQ ID NO: 1883882 - RNA, 19 nt, Artificial Sequence
  Description of Artificial Sequence: Synthetic oligonucleotide
gcgugacaccccugugagu

SEQ ID NO: 1883883 - RNA, 19 nt, Artificial Sequence
  Description of Artificial Sequence: Synthetic oligonucleotide
cccggugcgucgggcugcc

SEQ ID NO: 1883884 - RNA, 19 nt, Artificial Sequence
  Description of Artificial Sequence: Synthetic oligonucleotide
cgcaggugcgcgcaugccu

SEQ ID NO: 1883885 - RNA, 19 nt, Artificial Sequence
  Description of Artificial Sequence: Synthetic oligonucleotide
cgcgcagggccgcgccacg

SEQ ID NO: 1883886 - RNA, 19 nt, Artificial Sequence
  Description of Artificial Sequence: Synthetic oligonucleotide
gcucgccguuccacagcac

SEQ ID NO: 1883887 - RNA, 19 nt, Artificial Sequence
  Description of Artificial Sequence: Synthetic oligonucleotide
gucgcgcaggugcgcgcau

SEQ ID NO: 1883888 - RNA, 19 nt, Artificial Sequence
  Description of Artificial Sequence: Synthetic oligonucleotide
ccgcucgcagcgcgccaug

SEQ ID NO: 1883889 - RNA, 19 nt, Artificial Sequence
  Description of Artificial Sequence: Synthetic oligonucleotide
gucccgcggcacgcagcuc

SEQ ID NO: 1883890 - RNA, 19 nt, Artificial Sequence
  Description of Artificial Sequence: Synthetic oligonucleotide
gggucgcgaucgguggcua

SEQ ID NO: 1883891 - RNA, 19 nt, Artificial Sequence
  Description of Artificial Sequence: Synthetic oligonucleotide
ccauugcuaggagggguau

SEQ ID NO: 1883892 - RNA, 19 nt, Artificial Sequence
  Description of Artificial Sequence: Synthetic oligonucleotide
ccagacgaucacccaccau

SEQ ID NO: 1883893 - RNA, 19 nt, Artificial Sequence
  Description of Artificial Sequence: Synthetic oligonucleotide
cgcgcacgcgcgugucguc

SEQ ID NO: 1883894 - RNA, 19 nt, Artificial Sequence
  Description of Artificial Sequence: Synthetic oligonucleotide
cggggucgcgcaggugcgc

SEQ ID NO: 1883895 - RNA, 19 nt, Artificial Sequence
  Description of Artificial Sequence: Synthetic oligonucleotide
gcgcccgguacgguacgcu

SEQ ID NO: 1883896 - RNA, 19 nt, Artificial Sequence
  Description of Artificial Sequence: Synthetic oligonucleotide
cgguacgcucgccguucca

SEQ ID NO: 1883897 - RNA, 19 nt, Artificial Sequence
  Description of Artificial Sequence: Synthetic oligonucleotide
cgcacgcgcgcgccgagcu

SEQ ID NO: 1883898 - RNA, 19 nt, Artificial Sequence
  Description of Artificial Sequence: Synthetic oligonucleotide
ccgcgcgcgccggcuguug

SEQ ID NO: 1883899 - RNA, 19 nt, Artificial Sequence
  Description of Artificial Sequence: Synthetic oligonucleotide
cgccacgcagccgcucgca

SEQ ID NO: 1883900 - RNA, 19 nt, Artificial Sequence
  Description of Artificial Sequence: Synthetic oligonucleotide
cggcgcgcagccccgcgaa

SEQ ID NO: 1883901 - RNA, 19 nt, Artificial Sequence
  Description of Artificial Sequence: Synthetic oligonucleotide
cgcagucccgcggcacgca

SEQ ID NO: 1883902 - RNA, 19 nt, Artificial Sequence
  Description of Artificial Sequence: Synthetic oligonucleotide
ccgcgccacgcagccgcuc

SEQ ID NO: 1883903 - RNA, 19 nt, Artificial Sequence
  Description of Artificial Sequence: Synthetic oligonucleotide
ccggugcgucgggcugccc

SEQ ID NO: 1883904 - RNA, 19 nt, Artificial Sequence
  Description of Artificial Sequence: Synthetic oligonucleotide
cgcacgcgcgugucgucgu

SEQ ID NO: 1883905 - RNA, 19 nt, Artificial Sequence
  Description of Artificial Sequence: Synthetic oligonucleotide
gcaccccgucgcagucgaa

SEQ ID NO: 1883906 - RNA, 19 nt, Artificial Sequence
  Description of Artificial Sequence: Synthetic oligonucleotide
gccgcgccacgcagccgcu

SEQ ID NO: 1883907 - RNA, 19 nt, Artificial Sequence
  Description of Artificial Sequence: Synthetic oligonucleotide
gcgcgccaugcagccggcu

SEQ ID NO: 1883908 - RNA, 19 nt, Artificial Sequence
  Description of Artificial Sequence: Synthetic oligonucleotide
gccgcgcgcgccggcuguu

SEQ ID NO: 1883909 - RNA, 19 nt, Artificial Sequence
  Description of Artificial Sequence: Synthetic oligonucleotide
aagccaguaauuuuccugc

SEQ ID NO: 1883910 - RNA, 19 nt, Artificial Sequence
  Description of Artificial Sequence: Synthetic oligonucleotide
ucuaauuccaccaggaugu

SEQ ID NO: 1883911 - RNA, 19 nt, Artificial Sequence
  Description of Artificial Sequence: Synthetic oligonucleotide
uucuauuagccuaaucugg

SEQ ID NO: 1883912 - RNA, 19 nt, Artificial Sequence
  Description of Artificial Sequence: Synthetic oligonucleotide
uugauacugaauaagccag

SEQ ID NO: 1883913 - RNA, 19 nt, Artificial Sequence
  Description of Artificial Sequence: Synthetic oligonucleotide
aacucaguuucuauuagcc

SEQ ID NO: 1883914 - RNA, 19 nt, Artificial Sequence
  Description of Artificial Sequence: Synthetic oligonucleotide
auuagccuaaucugguucc

SEQ ID NO: 1883915 - RNA, 19 nt, Artificial Sequence
  Description of Artificial Sequence: Synthetic oligonucleotide
auuucagccaugcuggaac

SEQ ID NO: 1883916 - RNA, 19 nt, Artificial Sequence
  Description of Artificial Sequence: Synthetic oligonucleotide
aauaagccaguaauuuucc

SEQ ID NO: 1883917 - RNA, 19 nt, Artificial Sequence
  Description of Artificial Sequence: Synthetic oligonucleotide
aaugagccggcucuuacag

SEQ ID NO: 1883918 - RNA, 19 nt, Artificial Sequence
  Description of Artificial Sequence: Synthetic oligonucleotide
uacugaauaagccaguaau

SEQ ID NO: 1883919 - RNA, 19 nt, Artificial Sequence
  Description of Artificial Sequence: Synthetic oligonucleotide
ugagacacccaccuuagcc

SEQ ID NO: 1883920 - RNA, 19 nt, Artificial Sequence
  Description of Artificial Sequence: Synthetic oligonucleotide
gagaccaucuccugaagcg

SEQ ID NO: 1883921 - RNA, 19 nt, Artificial Sequence
  Description of Artificial Sequence: Synthetic oligonucleotide
uuuaacuccagcuguguca

SEQ ID NO: 1883922 - RNA, 19 nt, Artificial Sequence
  Description of Artificial Sequence: Synthetic oligonucleotide
ucaaaagccguugauacug

SEQ ID NO: 1883923 - RNA, 19 nt, Artificial Sequence
  Description of Artificial Sequence: Synthetic oligonucleotide
ucugguuggacccuggcca

SEQ ID NO: 1883924 - RNA, 19 nt, Artificial Sequence
  Description of Artificial Sequence: Synthetic oligonucleotide
gugguuucaacucugguug

SEQ ID NO: 1883925 - RNA, 19 nt, Artificial Sequence
  Description of Artificial Sequence: Synthetic oligonucleotide
aggcuucugguucaaaagc

SEQ ID NO: 1883926 - RNA, 19 nt, Artificial Sequence
  Description of Artificial Sequence: Synthetic oligonucleotide
gauggugccaagcaagggc

SEQ ID NO: 1883927 - RNA, 19 nt, Artificial Sequence
  Description of Artificial Sequence: Synthetic oligonucleotide
guugauacugaauaagcca

SEQ ID NO: 1883928 - RNA, 19 nt, Artificial Sequence
  Description of Artificial Sequence: Synthetic oligonucleotide
acuagcuggcguuccaugc

SEQ ID NO: 1883929 - RNA, 19 nt, Artificial Sequence
  Description of Artificial Sequence: Synthetic oligonucleotide
aagccguugauacugaaua

SEQ ID NO: 1883930 - RNA, 19 nt, Artificial Sequence
  Description of Artificial Sequence: Synthetic oligonucleotide
uucaacucugguuggaccc

SEQ ID NO: 1883931 - RNA, 19 nt, Artificial Sequence
  Description of Artificial Sequence: Synthetic oligonucleotide
gaauaagccaguaauuuuc

SEQ ID NO: 1883932 - RNA, 19 nt, Artificial Sequence
  Description of Artificial Sequence: Synthetic oligonucleotide
gaggaagaccauuugggcc

SEQ ID NO: 1883933 - RNA, 19 nt, Artificial Sequence
  Description of Artificial Sequence: Synthetic oligonucleotide
uauuagccuaaucugguuc

SEQ ID NO: 1883934 - RNA, 19 nt, Artificial Sequence
  Description of Artificial Sequence: Synthetic oligonucleotide
aggaucucauguugcaggc

SEQ ID NO: 1883935 - RNA, 19 nt, Artificial Sequence
  Description of Artificial Sequence: Synthetic oligonucleotide
ugccaaaaggccaugguaa

SEQ ID NO: 1883936 - RNA, 19 nt, Artificial Sequence
  Description of Artificial Sequence: Synthetic oligonucleotide
ucuccguaggaucucaugu

SEQ ID NO: 1883937 - RNA, 19 nt, Artificial Sequence
  Description of Artificial Sequence: Synthetic oligonucleotide
aacgugggugcaugggagc

SEQ ID NO: 1883938 - RNA, 19 nt, Artificial Sequence
  Description of Artificial Sequence: Synthetic oligonucleotide
ugugcauucagcugcugug

SEQ ID NO: 1883939 - RNA, 19 nt, Artificial Sequence
  Description of Artificial Sequence: Synthetic oligonucleotide
aucuccagggcucauucgg

SEQ ID NO: 1883940 - RNA, 19 nt, Artificial Sequence
  Description of Artificial Sequence: Synthetic oligonucleotide
aguaacucaguuucuauua

SEQ ID NO: 1883941 - RNA, 19 nt, Artificial Sequence
  Description of Artificial Sequence: Synthetic oligonucleotide
uuaacuccagcugugucag

SEQ ID NO: 1883942 - RNA, 19 nt, Artificial Sequence
  Description of Artificial Sequence: Synthetic oligonucleotide
aacgagauucggugguggg

SEQ ID NO: 1883943 - RNA, 19 nt, Artificial Sequence
  Description of Artificial Sequence: Synthetic oligonucleotide
aggaagaccauuugggccu

SEQ ID NO: 1883944 - RNA, 19 nt, Artificial Sequence
  Description of Artificial Sequence: Synthetic oligonucleotide
ugcuugguuucacucuugg

SEQ ID NO: 1883945 - RNA, 19 nt, Artificial Sequence
  Description of Artificial Sequence: Synthetic oligonucleotide
agaucuccagggcucauuc

SEQ ID NO: 1883946 - RNA, 19 nt, Artificial Sequence
  Description of Artificial Sequence: Synthetic oligonucleotide
uaacucaguuucuauuagc

SEQ ID NO: 1883947 - RNA, 19 nt, Artificial Sequence
  Description of Artificial Sequence: Synthetic oligonucleotide
agacucauaggccaucuga

SEQ ID NO: 1883948 - RNA, 19 nt, Artificial Sequence
  Description of Artificial Sequence: Synthetic oligonucleotide
uuccucuuuaacuccagcu

SEQ ID NO: 1883949 - RNA, 19 nt, Artificial Sequence
  Description of Artificial Sequence: Synthetic oligonucleotide
aucugaaugagccggcucu

SEQ ID NO: 1883950 - RNA, 19 nt, Artificial Sequence
  Description of Artificial Sequence: Synthetic oligonucleotide
ucaguuucuauuagccuaa

SEQ ID NO: 1883951 - RNA, 19 nt, Artificial Sequence
  Description of Artificial Sequence: Synthetic oligonucleotide
uucugagacacccaccuua

SEQ ID NO: 1883952 - RNA, 19 nt, Artificial Sequence
  Description of Artificial Sequence: Synthetic oligonucleotide
uccguaggaucucauguug

SEQ ID NO: 1883953 - RNA, 19 nt, Artificial Sequence
  Description of Artificial Sequence: Synthetic oligonucleotide
aaucuugcccuagucuggg

SEQ ID NO: 1883954 - RNA, 19 nt, Artificial Sequence
  Description of Artificial Sequence: Synthetic oligonucleotide
guaacucaguuucuauuag

SEQ ID NO: 1883955 - RNA, 19 nt, Artificial Sequence
  Description of Artificial Sequence: Synthetic oligonucleotide
ugaauaagccaguaauuuu

SEQ ID NO: 1883956 - RNA, 19 nt, Artificial Sequence
  Description of Artificial Sequence: Synthetic oligonucleotide
caugccuucuuccugcagc

SEQ ID NO: 1883957 - RNA, 19 nt, Artificial Sequence
  Description of Artificial Sequence: Synthetic oligonucleotide
aaccgguucugccauucag

SEQ ID NO: 1883958 - RNA, 19 nt, Artificial Sequence
  Description of Artificial Sequence: Synthetic oligonucleotide
gaguucuucuucucgcugc

SEQ ID NO: 1883959 - RNA, 19 nt, Artificial Sequence
  Description of Artificial Sequence: Synthetic oligonucleotide
agaugcaucaucagcgggg

SEQ ID NO: 1883960 - RNA, 19 nt, Artificial Sequence
  Description of Artificial Sequence: Synthetic oligonucleotide
aguuucuauuagccuaauc

SEQ ID NO: 1883961 - RNA, 19 nt, Artificial Sequence
  Description of Artificial Sequence: Synthetic oligonucleotide
uggagagccucgaaugcag

SEQ ID NO: 1883962 - RNA, 19 nt, Artificial Sequence
  Description of Artificial Sequence: Synthetic oligonucleotide
auggugccaagcaagggcc

SEQ ID NO: 1883963 - RNA, 19 nt, Artificial Sequence
  Description of Artificial Sequence: Synthetic oligonucleotide
gccucugagacucauaggc

SEQ ID NO: 1883964 - RNA, 19 nt, Artificial Sequence
  Description of Artificial Sequence: Synthetic oligonucleotide
cauucagcugcugugguag

SEQ ID NO: 1883965 - RNA, 19 nt, Artificial Sequence
  Description of Artificial Sequence: Synthetic oligonucleotide
ugugucagcugcaguaacu

SEQ ID NO: 1883966 - RNA, 19 nt, Artificial Sequence
  Description of Artificial Sequence: Synthetic oligonucleotide
caguaauuuuccugcuugg

SEQ ID NO: 1883967 - RNA, 19 nt, Artificial Sequence
  Description of Artificial Sequence: Synthetic oligonucleotide
acccaccuuagccagaucu

SEQ ID NO: 1883968 - RNA, 19 nt, Artificial Sequence
  Description of Artificial Sequence: Synthetic oligonucleotide
uccaacgagauucgguggu

SEQ ID NO: 1883969 - RNA, 19 nt, Artificial Sequence
  Description of Artificial Sequence: Synthetic oligonucleotide
ucggcagacagcuccacca

SEQ ID NO: 1883970 - RNA, 19 nt, Artificial Sequence
  Description of Artificial Sequence: Synthetic oligonucleotide
ugauacugaauaagccagu

SEQ ID NO: 1883971 - RNA, 19 nt, Artificial Sequence
  Description of Artificial Sequence: Synthetic oligonucleotide
cagauggucucacugacuc

SEQ ID NO: 1883972 - RNA, 19 nt, Artificial Sequence
  Description of Artificial Sequence: Synthetic oligonucleotide
ugcaugggagcccagcagu

SEQ ID NO: 1883973 - RNA, 19 nt, Artificial Sequence
  Description of Artificial Sequence: Synthetic oligonucleotide
ucgggaggcucccaagggg

SEQ ID NO: 1883974 - RNA, 19 nt, Artificial Sequence
  Description of Artificial Sequence: Synthetic oligonucleotide
agaccaucuccugaagcgc

SEQ ID NO: 1883975 - RNA, 19 nt, Artificial Sequence
  Description of Artificial Sequence: Synthetic oligonucleotide
gagacacccaccuuagcca

SEQ ID NO: 1883976 - RNA, 19 nt, Artificial Sequence
  Description of Artificial Sequence: Synthetic oligonucleotide
uuugcgcugcucucgagac

SEQ ID NO: 1883977 - RNA, 19 nt, Artificial Sequence
  Description of Artificial Sequence: Synthetic oligonucleotide
cuagucuggggaacguggg

SEQ ID NO: 1883978 - RNA, 19 nt, Artificial Sequence
  Description of Artificial Sequence: Synthetic oligonucleotide
uucaaaagccguugauacu

SEQ ID NO: 1883979 - RNA, 19 nt, Artificial Sequence
  Description of Artificial Sequence: Synthetic oligonucleotide
ugcucucgagaccaucucc

SEQ ID NO: 1883980 - RNA, 19 nt, Artificial Sequence
  Description of Artificial Sequence: Synthetic oligonucleotide
gauccggaggcgcugggag

SEQ ID NO: 1883981 - RNA, 19 nt, Artificial Sequence
  Description of Artificial Sequence: Synthetic oligonucleotide
gaaugcagccuucugcauc

SEQ ID NO: 1883982 - RNA, 19 nt, Artificial Sequence
  Description of Artificial Sequence: Synthetic oligonucleotide
cugccgaugcgccaggucc

SEQ ID NO: 1883983 - RNA, 19 nt, Artificial Sequence
  Description of Artificial Sequence: Synthetic oligonucleotide
cucccaaggggcuucgggg

SEQ ID NO: 1883984 - RNA, 19 nt, Artificial Sequence
  Description of Artificial Sequence: Synthetic oligonucleotide
cagguggugccaaaaggcc

SEQ ID NO: 1883985 - RNA, 19 nt, Artificial Sequence
  Description of Artificial Sequence: Synthetic oligonucleotide
cucaguuucuauuagccua

SEQ ID NO: 1883986 - RNA, 19 nt, Artificial Sequence
  Description of Artificial Sequence: Synthetic oligonucleotide
acucaguuucuauuagccu

SEQ ID NO: 1883987 - RNA, 19 nt, Artificial Sequence
  Description of Artificial Sequence: Synthetic oligonucleotide
cucagcauguccaacgaga

SEQ ID NO: 1883988 - RNA, 19 nt, Artificial Sequence
  Description of Artificial Sequence: Synthetic oligonucleotide
cacucuuggcuucuaauuc

SEQ ID NO: 1883989 - RNA, 19 nt, Artificial Sequence
  Description of Artificial Sequence: Synthetic oligonucleotide
gcggcgaucucacagaacc

SEQ ID NO: 1883990 - RNA, 19 nt, Artificial Sequence
  Description of Artificial Sequence: Synthetic oligonucleotide
acucgggaggcucccaagg

SEQ ID NO: 1883991 - RNA, 19 nt, Artificial Sequence
  Description of Artificial Sequence: Synthetic oligonucleotide
ucucgagaccaucuccuga

SEQ ID NO: 1883992 - RNA, 19 nt, Artificial Sequence
  Description of Artificial Sequence: Synthetic oligonucleotide
caugucuaguucugcuggg

SEQ ID NO: 1883993 - RNA, 19 nt, Artificial Sequence
  Description of Artificial Sequence: Synthetic oligonucleotide
aacacacucugagguuggc

SEQ ID NO: 1883994 - RNA, 19 nt, Artificial Sequence
  Description of Artificial Sequence: Synthetic oligonucleotide
agacacccaccuuagccag

SEQ ID NO: 1883995 - RNA, 19 nt, Artificial Sequence
  Description of Artificial Sequence: Synthetic oligonucleotide
ugaucugccgaugcgccag

SEQ ID NO: 1883996 - RNA, 19 nt, Artificial Sequence
  Description of Artificial Sequence: Synthetic oligonucleotide
acgagauucgguggugggc

SEQ ID NO: 1883997 - RNA, 19 nt, Artificial Sequence
  Description of Artificial Sequence: Synthetic oligonucleotide
agauggucucacugacucg

SEQ ID NO: 1883998 - RNA, 19 nt, Artificial Sequence
  Description of Artificial Sequence: Synthetic oligonucleotide
gaucuccagggcucauucg

SEQ ID NO: 1883999 - RNA, 19 nt, Artificial Sequence
  Description of Artificial Sequence: Synthetic oligonucleotide
accgguucugccauucagc

SEQ ID NO: 1884000 - RNA, 19 nt, Artificial Sequence
  Description of Artificial Sequence: Synthetic oligonucleotide
cauccagaagguuccgggc

SEQ ID NO: 1884001 - RNA, 19 nt, Artificial Sequence
  Description of Artificial Sequence: Synthetic oligonucleotide
cucuuuaacuccagcugug

SEQ ID NO: 1884002 - RNA, 19 nt, Artificial Sequence
  Description of Artificial Sequence: Synthetic oligonucleotide
acucugguuggacccuggc

SEQ ID NO: 1884003 - RNA, 19 nt, Artificial Sequence
  Description of Artificial Sequence: Synthetic oligonucleotide
gcucuuacagcucucaguc

SEQ ID NO: 1884004 - RNA, 19 nt, Artificial Sequence
  Description of Artificial Sequence: Synthetic oligonucleotide
uagugcucggcagacagcu

SEQ ID NO: 1884005 - RNA, 19 nt, Artificial Sequence
  Description of Artificial Sequence: Synthetic oligonucleotide
ugcgcugcucucgagacca

SEQ ID NO: 1884006 - RNA, 19 nt, Artificial Sequence
  Description of Artificial Sequence: Synthetic oligonucleotide
aggacaaaggcuucugguu

SEQ ID NO: 1884007 - RNA, 19 nt, Artificial Sequence
  Description of Artificial Sequence: Synthetic oligonucleotide
aguaauuuuccugcuuggu

SEQ ID NO: 1884008 - RNA, 19 nt, Artificial Sequence
  Description of Artificial Sequence: Synthetic oligonucleotide
cucugagacucauaggcca

SEQ ID NO: 1884009 - RNA, 19 nt, Artificial Sequence
  Description of Artificial Sequence: Synthetic oligonucleotide
agcagacauggccacaggu

SEQ ID NO: 1884010 - RNA, 19 nt, Artificial Sequence
  Description of Artificial Sequence: Synthetic oligonucleotide
gaacgugggugcaugggag

SEQ ID NO: 1884011 - RNA, 19 nt, Artificial Sequence
  Description of Artificial Sequence: Synthetic oligonucleotide
agaccauuugggccucacg

SEQ ID NO: 1884012 - RNA, 19 nt, Artificial Sequence
  Description of Artificial Sequence: Synthetic oligonucleotide
aagaccauuugggccucac

SEQ ID NO: 1884013 - RNA, 19 nt, Artificial Sequence
  Description of Artificial Sequence: Synthetic oligonucleotide
aaaagccguugauacugaa

SEQ ID NO: 1884014 - RNA, 19 nt, Artificial Sequence
  Description of Artificial Sequence: Synthetic oligonucleotide
gaccauuugggccucacgu

SEQ ID NO: 1884015 - RNA, 19 nt, Artificial Sequence
  Description of Artificial Sequence: Synthetic oligonucleotide
ugaagcgccucugugucca

SEQ ID NO: 1884016 - RNA, 19 nt, Artificial Sequence
  Description of Artificial Sequence: Synthetic oligonucleotide
uggcagguggugccaaaag

SEQ ID NO: 1884017 - RNA, 19 nt, Artificial Sequence
  Description of Artificial Sequence: Synthetic oligonucleotide
auacugaauaagccaguaa

SEQ ID NO: 1884018 - RNA, 19 nt, Artificial Sequence
  Description of Artificial Sequence: Synthetic oligonucleotide
guccaacgagauucggugg

SEQ ID NO: 1884019 - RNA, 19 nt, Artificial Sequence
  Description of Artificial Sequence: Synthetic oligonucleotide
ggagcagauggucucacug

SEQ ID NO: 1884020 - RNA, 19 nt, Artificial Sequence
  Description of Artificial Sequence: Synthetic oligonucleotide
ugcuggaacaggccugcug

SEQ ID NO: 1884021 - RNA, 19 nt, Artificial Sequence
  Description of Artificial Sequence: Synthetic oligonucleotide
agccuaaucugguuccuga

SEQ ID NO: 1884022 - RNA, 19 nt, Artificial Sequence
  Description of Artificial Sequence: Synthetic oligonucleotide
cugggagaucuccuggcgg

SEQ ID NO: 1884023 - RNA, 19 nt, Artificial Sequence
  Description of Artificial Sequence: Synthetic oligonucleotide
ucugagacucauaggccau

SEQ ID NO: 1884024 - RNA, 19 nt, Artificial Sequence
  Description of Artificial Sequence: Synthetic oligonucleotide
cuuuaacuccagcuguguc

SEQ ID NO: 1884025 - RNA, 19 nt, Artificial Sequence
  Description of Artificial Sequence: Synthetic oligonucleotide
uccugaucugccgaugcgc

SEQ ID NO: 1884026 - RNA, 19 nt, Artificial Sequence
  Description of Artificial Sequence: Synthetic oligonucleotide
cagaugcaucaucagcggg

SEQ ID NO: 1884027 - RNA, 19 nt, Artificial Sequence
  Description of Artificial Sequence: Synthetic oligonucleotide
caagcaagggccagcgcug

SEQ ID NO: 1884028 - RNA, 19 nt, Artificial Sequence
  Description of Artificial Sequence: Synthetic oligonucleotide
uucuuugcgcugcucucga

SEQ ID NO: 1884029 - RNA, 19 nt, Artificial Sequence
  Description of Artificial Sequence: Synthetic oligonucleotide
uucaaggacaaaggcuucu

SEQ ID NO: 1884030 - RNA, 19 nt, Artificial Sequence
  Description of Artificial Sequence: Synthetic oligonucleotide
ccguugauacugaauaagc

SEQ ID NO: 1884031 - RNA, 19 nt, Artificial Sequence
  Description of Artificial Sequence: Synthetic oligonucleotide
uggaguucuucuucucgcu

SEQ ID NO: 1884032 - RNA, 19 nt, Artificial Sequence
  Description of Artificial Sequence: Synthetic oligonucleotide
ugccucugagacucauagg

SEQ ID NO: 1884033 - RNA, 19 nt, Artificial Sequence
  Description of Artificial Sequence: Synthetic oligonucleotide
gaaugagccggcucuuaca

SEQ ID NO: 1884034 - RNA, 19 nt, Artificial Sequence
  Description of Artificial Sequence: Synthetic oligonucleotide
uucucgcugcuucuuuucu

SEQ ID NO: 1884035 - RNA, 19 nt, Artificial Sequence
  Description of Artificial Sequence: Synthetic oligonucleotide
agaaccgguucugccauuc

SEQ ID NO: 1884036 - RNA, 19 nt, Artificial Sequence
  Description of Artificial Sequence: Synthetic oligonucleotide
gaacaggccugcuggacca

SEQ ID NO: 1884037 - RNA, 19 nt, Artificial Sequence
  Description of Artificial Sequence: Synthetic oligonucleotide
ugcauucagcugcuguggu

SEQ ID NO: 1884038 - RNA, 19 nt, Artificial Sequence
  Description of Artificial Sequence: Synthetic oligonucleotide
cguugauacugaauaagcc

SEQ ID NO: 1884039 - RNA, 19 nt, Artificial Sequence
  Description of Artificial Sequence: Synthetic oligonucleotide
ccuagucuggggaacgugg

SEQ ID NO: 1884040 - RNA, 19 nt, Artificial Sequence
  Description of Artificial Sequence: Synthetic oligonucleotide
gaaccgcugguccauuuca

SEQ ID NO: 1884041 - RNA, 19 nt, Artificial Sequence
  Description of Artificial Sequence: Synthetic oligonucleotide
aggccaucugaaugagccg

SEQ ID NO: 1884042 - RNA, 19 nt, Artificial Sequence
  Description of Artificial Sequence: Synthetic oligonucleotide
gugcauucagcugcugugg

SEQ ID NO: 1884043 - RNA, 19 nt, Artificial Sequence
  Description of Artificial Sequence: Synthetic oligonucleotide
aaaaggccaugguaaucuu

SEQ ID NO: 1884044 - RNA, 19 nt, Artificial Sequence
  Description of Artificial Sequence: Synthetic oligonucleotide
aaagccguugauacugaau

SEQ ID NO: 1884045 - RNA, 19 nt, Artificial Sequence
  Description of Artificial Sequence: Synthetic oligonucleotide
uucugguucaaaagccguu

SEQ ID NO: 1884046 - RNA, 19 nt, Artificial Sequence
  Description of Artificial Sequence: Synthetic oligonucleotide
acagaaccgguucugccau

SEQ ID NO: 1884047 - RNA, 19 nt, Artificial Sequence
  Description of Artificial Sequence: Synthetic oligonucleotide
ucgagaccaucuccugaag

SEQ ID NO: 1884048 - RNA, 19 nt, Artificial Sequence
  Description of Artificial Sequence: Synthetic oligonucleotide
ucugcugcauggcggcggc

SEQ ID NO: 1884049 - RNA, 19 nt, Artificial Sequence
  Description of Artificial Sequence: Synthetic oligonucleotide
ggucucacugacucgggag

SEQ ID NO: 1884050 - RNA, 19 nt, Artificial Sequence
  Description of Artificial Sequence: Synthetic oligonucleotide
ugagacucauaggccaucu

SEQ ID NO: 1884051 - RNA, 19 nt, Artificial Sequence
  Description of Artificial Sequence: Synthetic oligonucleotide
uagcuggcugugcauucag

SEQ ID NO: 1884052 - RNA, 19 nt, Artificial Sequence
  Description of Artificial Sequence: Synthetic oligonucleotide
caacacugcuggcagcagc

SEQ ID NO: 1884053 - RNA, 19 nt, Artificial Sequence
  Description of Artificial Sequence: Synthetic oligonucleotide
ucucauguugcaggccugc

SEQ ID NO: 1884054 - RNA, 19 nt, Artificial Sequence
  Description of Artificial Sequence: Synthetic oligonucleotide
ggacaaaggcuucugguuc

SEQ ID NO: 1884055 - RNA, 19 nt, Artificial Sequence
  Description of Artificial Sequence: Synthetic oligonucleotide
gcugcugugguagauccgg

SEQ ID NO: 1884056 - RNA, 19 nt, Artificial Sequence
  Description of Artificial Sequence: Synthetic oligonucleotide
aggugaggaagaccauuug

SEQ ID NO: 1884057 - RNA, 19 nt, Artificial Sequence
  Description of Artificial Sequence: Synthetic oligonucleotide
aagcaagggccagcgcugg

SEQ ID NO: 1884058 - RNA, 19 nt, Artificial Sequence
  Description of Artificial Sequence: Synthetic oligonucleotide
cacagaaccgguucugcca

SEQ ID NO: 1884059 - RNA, 19 nt, Artificial Sequence
  Description of Artificial Sequence: Synthetic oligonucleotide
ggcgaucucacagaaccgg

SEQ ID NO: 1884060 - RNA, 19 nt, Artificial Sequence
  Description of Artificial Sequence: Synthetic oligonucleotide
gaccaucuccugaagcgcc

SEQ ID NO: 1884061 - RNA, 19 nt, Artificial Sequence
  Description of Artificial Sequence: Synthetic oligonucleotide
cucgggaggcucccaaggg

SEQ ID NO: 1884062 - RNA, 19 nt, Artificial Sequence
  Description of Artificial Sequence: Synthetic oligonucleotide
uagcuggcguuccaugccu

SEQ ID NO: 1884063 - RNA, 19 nt, Artificial Sequence
  Description of Artificial Sequence: Synthetic oligonucleotide
uaauuccaccaggauguca

SEQ ID NO: 1884064 - RNA, 19 nt, Artificial Sequence
  Description of Artificial Sequence: Synthetic oligonucleotide
agcgcugguagcuggcugu

SEQ ID NO: 1884065 - RNA, 19 nt, Artificial Sequence
  Description of Artificial Sequence: Synthetic oligonucleotide
caacgagauucgguggugg

SEQ ID NO: 1884066 - RNA, 19 nt, Artificial Sequence
  Description of Artificial Sequence: Synthetic oligonucleotide
gcuucugguucaaaagccg

SEQ ID NO: 1884067 - RNA, 19 nt, Artificial Sequence
  Description of Artificial Sequence: Synthetic oligonucleotide
aagguuccgggcucuccgu

SEQ ID NO: 1884068 - RNA, 19 nt, Artificial Sequence
  Description of Artificial Sequence: Synthetic oligonucleotide
ugagguuggcaugucuagu

SEQ ID NO: 1884069 - RNA, 19 nt, Artificial Sequence
  Description of Artificial Sequence: Synthetic oligonucleotide
caagggccagcgcugguag

SEQ ID NO: 1884070 - RNA, 19 nt, Artificial Sequence
  Description of Artificial Sequence: Synthetic oligonucleotide
ugcccuagucuggggaacg

SEQ ID NO: 1884071 - RNA, 19 nt, Artificial Sequence
  Description of Artificial Sequence: Synthetic oligonucleotide
guuccgggcucuccguagg

SEQ ID NO: 1884072 - RNA, 19 nt, Artificial Sequence
  Description of Artificial Sequence: Synthetic oligonucleotide
guggcugauggcuuugcuc

SEQ ID NO: 1884073 - RNA, 19 nt, Artificial Sequence
  Description of Artificial Sequence: Synthetic oligonucleotide
augggagcccagcaguggu

SEQ ID NO: 1884074 - RNA, 19 nt, Artificial Sequence
  Description of Artificial Sequence: Synthetic oligonucleotide
ugcauggcggcggcgaucu

SEQ ID NO: 1884075 - RNA, 19 nt, Artificial Sequence
  Description of Artificial Sequence: Synthetic oligonucleotide
cucacagaaccgguucugc

SEQ ID NO: 1884076 - RNA, 19 nt, Artificial Sequence
  Description of Artificial Sequence: Synthetic oligonucleotide
caaaaggccaugguaaucu

SEQ ID NO: 1884077 - RNA, 19 nt, Artificial Sequence
  Description of Artificial Sequence: Synthetic oligonucleotide
cauaggccaucugaaugag

SEQ ID NO: 1884078 - RNA, 19 nt, Artificial Sequence
  Description of Artificial Sequence: Synthetic oligonucleotide
cucuccguaggaucucaug

SEQ ID NO: 1884079 - RNA, 19 nt, Artificial Sequence
  Description of Artificial Sequence: Synthetic oligonucleotide
gagacucauaggccaucug

SEQ ID NO: 1884080 - RNA, 19 nt, Artificial Sequence
  Description of Artificial Sequence: Synthetic oligonucleotide
uagauccggaggcgcuggg

SEQ ID NO: 1884081 - RNA, 19 nt, Artificial Sequence
  Description of Artificial Sequence: Synthetic oligonucleotide
agagccucgaaugcagccu

SEQ ID NO: 1884082 - RNA, 19 nt, Artificial Sequence
  Description of Artificial Sequence: Synthetic oligonucleotide
auucggcucagcaugucca

SEQ ID NO: 1884083 - RNA, 19 nt, Artificial Sequence
  Description of Artificial Sequence: Synthetic oligonucleotide
aucugcugcauggcggcgg

SEQ ID NO: 1884084 - RNA, 19 nt, Artificial Sequence
  Description of Artificial Sequence: Synthetic oligonucleotide
gacucgggaggcucccaag

SEQ ID NO: 1884085 - RNA, 19 nt, Artificial Sequence
  Description of Artificial Sequence: Synthetic oligonucleotide
gauucgguggugggcgaag

SEQ ID NO: 1884086 - RNA, 19 nt, Artificial Sequence
  Description of Artificial Sequence: Synthetic oligonucleotide
cucauccuuaggugguuuc

SEQ ID NO: 1884087 - RNA, 19 nt, Artificial Sequence
  Description of Artificial Sequence: Synthetic oligonucleotide
aaccgcugguccauuucag

SEQ ID NO: 1884088 - RNA, 19 nt, Artificial Sequence
  Description of Artificial Sequence: Synthetic oligonucleotide
aacucugguuggacccugg

SEQ ID NO: 1884089 - RNA, 19 nt, Artificial Sequence
  Description of Artificial Sequence: Synthetic oligonucleotide
ggacuuccucuuuaacucc

SEQ ID NO: 1884090 - RNA, 19 nt, Artificial Sequence
  Description of Artificial Sequence: Synthetic oligonucleotide
uucagccaugcuggaacag

SEQ ID NO: 1884091 - RNA, 19 nt, Artificial Sequence
  Description of Artificial Sequence: Synthetic oligonucleotide
ucaacucugguuggacccu

SEQ ID NO: 1884092 - RNA, 19 nt, Artificial Sequence
  Description of Artificial Sequence: Synthetic oligonucleotide
guagauccggaggcgcugg

SEQ ID NO: 1884093 - RNA, 19 nt, Artificial Sequence
  Description of Artificial Sequence: Synthetic oligonucleotide
accauuugggccucacguu

SEQ ID NO: 1884094 - RNA, 19 nt, Artificial Sequence
  Description of Artificial Sequence: Synthetic oligonucleotide
aucaucagcgggguuggca

SEQ ID NO: 1884095 - RNA, 19 nt, Artificial Sequence
  Description of Artificial Sequence: Synthetic oligonucleotide
agccguugauacugaauaa

SEQ ID NO: 1884096 - RNA, 19 nt, Artificial Sequence
  Description of Artificial Sequence: Synthetic oligonucleotide
caugggagcccagcagugg

SEQ ID NO: 1884097 - RNA, 19 nt, Artificial Sequence
  Description of Artificial Sequence: Synthetic oligonucleotide
gaucugccgaugcgccagg

SEQ ID NO: 1884098 - RNA, 19 nt, Artificial Sequence
  Description of Artificial Sequence: Synthetic oligonucleotide
cuuugcgcugcucucgaga

SEQ ID NO: 1884099 - RNA, 19 nt, Artificial Sequence
  Description of Artificial Sequence: Synthetic oligonucleotide
ugcagccuucugcaucaca

SEQ ID NO: 1884100 - RNA, 19 nt, Artificial Sequence
  Description of Artificial Sequence: Synthetic oligonucleotide
ugggagcccagcaguggug

SEQ ID NO: 1884101 - RNA, 19 nt, Artificial Sequence
  Description of Artificial Sequence: Synthetic oligonucleotide
agccaguaauuuuccugcu

SEQ ID NO: 1884102 - RNA, 19 nt, Artificial Sequence
  Description of Artificial Sequence: Synthetic oligonucleotide
aucuugcccuagucugggg

SEQ ID NO: 1884103 - RNA, 19 nt, Artificial Sequence
  Description of Artificial Sequence: Synthetic oligonucleotide
gugccaaaaggccauggua

SEQ ID NO: 1884104 - RNA, 19 nt, Artificial Sequence
  Description of Artificial Sequence: Synthetic oligonucleotide
uucaccuggagagccucga

SEQ ID NO: 1884105 - RNA, 19 nt, Artificial Sequence
  Description of Artificial Sequence: Synthetic oligonucleotide
ggaguucuucuucucgcug

SEQ ID NO: 1884106 - RNA, 19 nt, Artificial Sequence
  Description of Artificial Sequence: Synthetic oligonucleotide
cacuagcuggcguuccaug

SEQ ID NO: 1884107 - RNA, 19 nt, Artificial Sequence
  Description of Artificial Sequence: Synthetic oligonucleotide
ugcucggcagacagcucca

SEQ ID NO: 1884108 - RNA, 19 nt, Artificial Sequence
  Description of Artificial Sequence: Synthetic oligonucleotide
uggggaacgugggugcaug

SEQ ID NO: 1884109 - RNA, 19 nt, Artificial Sequence
  Description of Artificial Sequence: Synthetic oligonucleotide
ugacucgggaggcucccaa

SEQ ID NO: 1884110 - RNA, 19 nt, Artificial Sequence
  Description of Artificial Sequence: Synthetic oligonucleotide
ugccgaugcgccagguccu

SEQ ID NO: 1884111 - RNA, 19 nt, Artificial Sequence
  Description of Artificial Sequence: Synthetic oligonucleotide
caucagcgggguuggcagg

SEQ ID NO: 1884112 - RNA, 19 nt, Artificial Sequence
  Description of Artificial Sequence: Synthetic oligonucleotide
ccgguucugccauucagcc

SEQ ID NO: 1884113 - RNA, 19 nt, Artificial Sequence
  Description of Artificial Sequence: Synthetic oligonucleotide
ccugaucugccgaugcgcc

SEQ ID NO: 1884114 - RNA, 19 nt, Artificial Sequence
  Description of Artificial Sequence: Synthetic oligonucleotide
cugguuggacccuggccac

SEQ ID NO: 1884115 - RNA, 19 nt, Artificial Sequence
  Description of Artificial Sequence: Synthetic oligonucleotide
uucggcucagcauguccaa

SEQ ID NO: 1884116 - RNA, 19 nt, Artificial Sequence
  Description of Artificial Sequence: Synthetic oligonucleotide
uggugccaagcaagggcca

SEQ ID NO: 1884117 - RNA, 19 nt, Artificial Sequence
  Description of Artificial Sequence: Synthetic oligonucleotide
uugcgcugcucucgagacc

SEQ ID NO: 1884118 - RNA, 19 nt, Artificial Sequence
  Description of Artificial Sequence: Synthetic oligonucleotide
cucggcagacagcuccacc

SEQ ID NO: 1884119 - RNA, 19 nt, Artificial Sequence
  Description of Artificial Sequence: Synthetic oligonucleotide
ucugccgaugcgccagguc

SEQ ID NO: 1884120 - RNA, 19 nt, Artificial Sequence
  Description of Artificial Sequence: Synthetic oligonucleotide
uagccuaaucugguuccug

SEQ ID NO: 1884121 - RNA, 19 nt, Artificial Sequence
  Description of Artificial Sequence: Synthetic oligonucleotide
cugcugccaugacagaauc

SEQ ID NO: 1884122 - RNA, 19 nt, Artificial Sequence
  Description of Artificial Sequence: Synthetic oligonucleotide
cugaauaagccaguaauuu

SEQ ID NO: 1884123 - RNA, 19 nt, Artificial Sequence
  Description of Artificial Sequence: Synthetic oligonucleotide
agccggcucuuacagcucu

SEQ ID NO: 1884124 - RNA, 19 nt, Artificial Sequence
  Description of Artificial Sequence: Synthetic oligonucleotide
cuccugaagcgccucugug

SEQ ID NO: 1884125 - RNA, 19 nt, Artificial Sequence
  Description of Artificial Sequence: Synthetic oligonucleotide
gccaugguaaucuugcccu

SEQ ID NO: 1884126 - RNA, 19 nt, Artificial Sequence
  Description of Artificial Sequence: Synthetic oligonucleotide
caaaagccguugauacuga

SEQ ID NO: 1884127 - RNA, 19 nt, Artificial Sequence
  Description of Artificial Sequence: Synthetic oligonucleotide
ggaacgugggugcauggga

SEQ ID NO: 1884128 - RNA, 19 nt, Artificial Sequence
  Description of Artificial Sequence: Synthetic oligonucleotide
ggcggcggcgaucucacag

SEQ ID NO: 1884129 - RNA, 19 nt, Artificial Sequence
  Description of Artificial Sequence: Synthetic oligonucleotide
agggccacuagcuggcguu

SEQ ID NO: 1884130 - RNA, 19 nt, Artificial Sequence
  Description of Artificial Sequence: Synthetic oligonucleotide
auggcggcggcgaucucac

SEQ ID NO: 1884131 - RNA, 19 nt, Artificial Sequence
  Description of Artificial Sequence: Synthetic oligonucleotide
gagguuggcaugucuaguu

SEQ ID NO: 1884132 - RNA, 19 nt, Artificial Sequence
  Description of Artificial Sequence: Synthetic oligonucleotide
gaugcaucaucagcggggu

SEQ ID NO: 1884133 - RNA, 19 nt, Artificial Sequence
  Description of Artificial Sequence: Synthetic oligonucleotide
uuugggccucacguuccag

SEQ ID NO: 1884134 - RNA, 19 nt, Artificial Sequence
  Description of Artificial Sequence: Synthetic oligonucleotide
ugguggagauggugccaag

SEQ ID NO: 1884135 - RNA, 19 nt, Artificial Sequence
  Description of Artificial Sequence: Synthetic oligonucleotide
ccauuugggccucacguuc

SEQ ID NO: 1884136 - RNA, 19 nt, Artificial Sequence
  Description of Artificial Sequence: Synthetic oligonucleotide
cuugcccuagucuggggaa

SEQ ID NO: 1884137 - RNA, 19 nt, Artificial Sequence
  Description of Artificial Sequence: Synthetic oligonucleotide
ccguaggaucucauguugc

SEQ ID NO: 1884138 - RNA, 19 nt, Artificial Sequence
  Description of Artificial Sequence: Synthetic oligonucleotide
cgagauucgguggugggcg

SEQ ID NO: 1884139 - RNA, 19 nt, Artificial Sequence
  Description of Artificial Sequence: Synthetic oligonucleotide
uucagcugcugugguagau

SEQ ID NO: 1884140 - RNA, 19 nt, Artificial Sequence
  Description of Artificial Sequence: Synthetic oligonucleotide
cacguuccaggcacacaac

SEQ ID NO: 1884141 - RNA, 19 nt, Artificial Sequence
  Description of Artificial Sequence: Synthetic oligonucleotide
ccuaaucugguuccugauc

SEQ ID NO: 1884142 - RNA, 19 nt, Artificial Sequence
  Description of Artificial Sequence: Synthetic oligonucleotide
gguuccgggcucuccguag

SEQ ID NO: 1884143 - RNA, 19 nt, Artificial Sequence
  Description of Artificial Sequence: Synthetic oligonucleotide
ggugguuucaacucugguu

SEQ ID NO: 1884144 - RNA, 19 nt, Artificial Sequence
  Description of Artificial Sequence: Synthetic oligonucleotide
gguggagauggugccaagc

SEQ ID NO: 1884145 - RNA, 19 nt, Artificial Sequence
  Description of Artificial Sequence: Synthetic oligonucleotide
cagguagugcucggcagac

SEQ ID NO: 1884146 - RNA, 19 nt, Artificial Sequence
  Description of Artificial Sequence: Synthetic oligonucleotide
cugcuugguuucacucuug

SEQ ID NO: 1884147 - RNA, 19 nt, Artificial Sequence
  Description of Artificial Sequence: Synthetic oligonucleotide
ggugcaugggagcccagca

SEQ ID NO: 1884148 - RNA, 19 nt, Artificial Sequence
  Description of Artificial Sequence: Synthetic oligonucleotide
ucugaaugagccggcucuu

SEQ ID NO: 1884149 - RNA, 19 nt, Artificial Sequence
  Description of Artificial Sequence: Synthetic oligonucleotide
ggugggcgaagaugggcag

SEQ ID NO: 1884150 - RNA, 19 nt, Artificial Sequence
  Description of Artificial Sequence: Synthetic oligonucleotide
cucuuacagcucucaguca

SEQ ID NO: 1884151 - RNA, 19 nt, Artificial Sequence
  Description of Artificial Sequence: Synthetic oligonucleotide
gcugguagcuggcugugca

SEQ ID NO: 1884152 - RNA, 19 nt, Artificial Sequence
  Description of Artificial Sequence: Synthetic oligonucleotide
gaaccgguucugccauuca

SEQ ID NO: 1884153 - RNA, 19 nt, Artificial Sequence
  Description of Artificial Sequence: Synthetic oligonucleotide
gggaacgugggugcauggg

SEQ ID NO: 1884154 - RNA, 19 nt, Artificial Sequence
  Description of Artificial Sequence: Synthetic oligonucleotide
gcauguccaacgagauucg

SEQ ID NO: 1884155 - RNA, 19 nt, Artificial Sequence
  Description of Artificial Sequence: Synthetic oligonucleotide
ccaccuuagccagaucucc

SEQ ID NO: 1884156 - RNA, 19 nt, Artificial Sequence
  Description of Artificial Sequence: Synthetic oligonucleotide
aucagcgggguuggcaggu

SEQ ID NO: 1884157 - RNA, 19 nt, Artificial Sequence
  Description of Artificial Sequence: Synthetic oligonucleotide
uugcccuagucuggggaac

SEQ ID NO: 1884158 - RNA, 19 nt, Artificial Sequence
  Description of Artificial Sequence: Synthetic oligonucleotide
gagauucgguggugggcga

SEQ ID NO: 1884159 - RNA, 19 nt, Artificial Sequence
  Description of Artificial Sequence: Synthetic oligonucleotide
guagugcucggcagacagc

SEQ ID NO: 1884160 - RNA, 19 nt, Artificial Sequence
  Description of Artificial Sequence: Synthetic oligonucleotide
cugcucucgagaccaucuc

SEQ ID NO: 1884161 - RNA, 19 nt, Artificial Sequence
  Description of Artificial Sequence: Synthetic oligonucleotide
acacccaccuuagccagau

SEQ ID NO: 1884162 - RNA, 19 nt, Artificial Sequence
  Description of Artificial Sequence: Synthetic oligonucleotide
cuaauuccaccaggauguc

SEQ ID NO: 1884163 - RNA, 19 nt, Artificial Sequence
  Description of Artificial Sequence: Synthetic oligonucleotide
acucugagguuggcauguc

SEQ ID NO: 1884164 - RNA, 19 nt, Artificial Sequence
  Description of Artificial Sequence: Synthetic oligonucleotide
gaagcgccucuguguccag

SEQ ID NO: 1884165 - RNA, 19 nt, Artificial Sequence
  Description of Artificial Sequence: Synthetic oligonucleotide
ggcaggugcguaguggcug

SEQ ID NO: 1884166 - RNA, 19 nt, Artificial Sequence
  Description of Artificial Sequence: Synthetic oligonucleotide
aucucauguugcaggccug

SEQ ID NO: 1884167 - RNA, 19 nt, Artificial Sequence
  Description of Artificial Sequence: Synthetic oligonucleotide
caguaacucaguuucuauu

SEQ ID NO: 1884168 - RNA, 19 nt, Artificial Sequence
  Description of Artificial Sequence: Synthetic oligonucleotide
gcaggugcguaguggcugc

SEQ ID NO: 1884169 - RNA, 19 nt, Artificial Sequence
  Description of Artificial Sequence: Synthetic oligonucleotide
gcguuccaugccuucuucc

SEQ ID NO: 1884170 - RNA, 19 nt, Artificial Sequence
  Description of Artificial Sequence: Synthetic oligonucleotide
guagcuggcugugcauuca

SEQ ID NO: 1884171 - RNA, 19 nt, Artificial Sequence
  Description of Artificial Sequence: Synthetic oligonucleotide
gguagauccggaggcgcug

SEQ ID NO: 1884172 - RNA, 19 nt, Artificial Sequence
  Description of Artificial Sequence: Synthetic oligonucleotide
ggaaccgcugguccauuuc

SEQ ID NO: 1884173 - RNA, 19 nt, Artificial Sequence
  Description of Artificial Sequence: Synthetic oligonucleotide
gcagguagugcucggcaga

SEQ ID NO: 1884174 - RNA, 19 nt, Artificial Sequence
  Description of Artificial Sequence: Synthetic oligonucleotide
cauggcggcggcgaucuca

SEQ ID NO: 1884175 - RNA, 19 nt, Artificial Sequence
  Description of Artificial Sequence: Synthetic oligonucleotide
cugaucugccgaugcgcca

SEQ ID NO: 1884176 - RNA, 19 nt, Artificial Sequence
  Description of Artificial Sequence: Synthetic oligonucleotide
ggcucuuacagcucucagu

SEQ ID NO: 1884177 - RNA, 19 nt, Artificial Sequence
  Description of Artificial Sequence: Synthetic oligonucleotide
ggaucucauguugcaggcc

SEQ ID NO: 1884178 - RNA, 19 nt, Artificial Sequence
  Description of Artificial Sequence: Synthetic oligonucleotide
caacucugguuggacccug

SEQ ID NO: 1884179 - RNA, 19 nt, Artificial Sequence
  Description of Artificial Sequence: Synthetic oligonucleotide
cagcgcugguagcuggcug

SEQ ID NO: 1884180 - RNA, 19 nt, Artificial Sequence
  Description of Artificial Sequence: Synthetic oligonucleotide
gggcucauucggcucagca

SEQ ID NO: 1884181 - RNA, 19 nt, Artificial Sequence
  Description of Artificial Sequence: Synthetic oligonucleotide
gaccucauccuuagguggu

SEQ ID NO: 1884182 - RNA, 19 nt, Artificial Sequence
  Description of Artificial Sequence: Synthetic oligonucleotide
agugcucggcagacagcuc

SEQ ID NO: 1884183 - RNA, 19 nt, Artificial Sequence
  Description of Artificial Sequence: Synthetic oligonucleotide
agauccggaggcgcuggga

SEQ ID NO: 1884184 - RNA, 19 nt, Artificial Sequence
  Description of Artificial Sequence: Synthetic oligonucleotide
agggcucauucggcucagc

SEQ ID NO: 1884185 - RNA, 19 nt, Artificial Sequence
  Description of Artificial Sequence: Synthetic oligonucleotide
gguuucaacucugguugga

SEQ ID NO: 1884186 - RNA, 19 nt, Artificial Sequence
  Description of Artificial Sequence: Synthetic oligonucleotide
ugguuggacccuggccaca

SEQ ID NO: 1884187 - RNA, 19 nt, Artificial Sequence
  Description of Artificial Sequence: Synthetic oligonucleotide
cccaccuuagccagaucuc

SEQ ID NO: 1884188 - RNA, 19 nt, Artificial Sequence
  Description of Artificial Sequence: Synthetic oligonucleotide
cucauucggcucagcaugu

SEQ ID NO: 1884189 - RNA, 19 nt, Artificial Sequence
  Description of Artificial Sequence: Synthetic oligonucleotide
ccaaaaggccaugguaauc

SEQ ID NO: 1884190 - RNA, 19 nt, Artificial Sequence
  Description of Artificial Sequence: Synthetic oligonucleotide
ggugccaaaaggccauggu

SEQ ID NO: 1884191 - RNA, 19 nt, Artificial Sequence
  Description of Artificial Sequence: Synthetic oligonucleotide
ggugcguaguggcugccaa

SEQ ID NO: 1884192 - RNA, 19 nt, Artificial Sequence
  Description of Artificial Sequence: Synthetic oligonucleotide
agccucgaaugcagccuuc

SEQ ID NO: 1884193 - RNA, 19 nt, Artificial Sequence
  Description of Artificial Sequence: Synthetic oligonucleotide
agguuccgggcucuccgua

SEQ ID NO: 1884194 - RNA, 19 nt, Artificial Sequence
  Description of Artificial Sequence: Synthetic oligonucleotide
cguaggaucucauguugca

SEQ ID NO: 1884195 - RNA, 19 nt, Artificial Sequence
  Description of Artificial Sequence: Synthetic oligonucleotide
uccgggcucuccguaggau

SEQ ID NO: 1884196 - RNA, 19 nt, Artificial Sequence
  Description of Artificial Sequence: Synthetic oligonucleotide
cacucugagguuggcaugu

SEQ ID NO: 1884197 - RNA, 19 nt, Artificial Sequence
  Description of Artificial Sequence: Synthetic oligonucleotide
aggugcguaguggcugcca

SEQ ID NO: 1884198 - RNA, 19 nt, Artificial Sequence
  Description of Artificial Sequence: Synthetic oligonucleotide
cacaacacacucugagguu

SEQ ID NO: 1884199 - RNA, 19 nt, Artificial Sequence
  Description of Artificial Sequence: Synthetic oligonucleotide
gagccucgaaugcagccuu

SEQ ID NO: 1884200 - RNA, 19 nt, Artificial Sequence
  Description of Artificial Sequence: Synthetic oligonucleotide
gcaugggagcccagcagug

SEQ ID NO: 1884201 - RNA, 19 nt, Artificial Sequence
  Description of Artificial Sequence: Synthetic oligonucleotide
agcgggguuggcagguggu

SEQ ID NO: 1884202 - RNA, 19 nt, Artificial Sequence
  Description of Artificial Sequence: Synthetic oligonucleotide
cuccguaggaucucauguu

SEQ ID NO: 1884203 - RNA, 19 nt, Artificial Sequence
  Description of Artificial Sequence: Synthetic oligonucleotide
cucacguuccaggcacaca

SEQ ID NO: 1884204 - RNA, 19 nt, Artificial Sequence
  Description of Artificial Sequence: Synthetic oligonucleotide
ggagaucuccuggcggcac

SEQ ID NO: 1884205 - RNA, 19 nt, Artificial Sequence
  Description of Artificial Sequence: Synthetic oligonucleotide
guuggacccuggccacauc

SEQ ID NO: 1884206 - RNA, 19 nt, Artificial Sequence
  Description of Artificial Sequence: Synthetic oligonucleotide
aggcucccaaggggcuucg

SEQ ID NO: 1884207 - RNA, 19 nt, Artificial Sequence
  Description of Artificial Sequence: Synthetic oligonucleotide
cagggcucauucggcucag

SEQ ID NO: 1884208 - RNA, 19 nt, Artificial Sequence
  Description of Artificial Sequence: Synthetic oligonucleotide
cacucuccugaaggaugug

SEQ ID NO: 1884209 - RNA, 19 nt, Artificial Sequence
  Description of Artificial Sequence: Synthetic oligonucleotide
ccgggcucuccguaggauc

SEQ ID NO: 1884210 - RNA, 19 nt, Artificial Sequence
  Description of Artificial Sequence: Synthetic oligonucleotide
ccaacgagauucgguggug

SEQ ID NO: 1884211 - RNA, 19 nt, Artificial Sequence
  Description of Artificial Sequence: Synthetic oligonucleotide
gcuggcguuccaugccuuc

SEQ ID NO: 1884212 - RNA, 19 nt, Artificial Sequence
  Description of Artificial Sequence: Synthetic oligonucleotide
gaagaccauuugggccuca

SEQ ID NO: 1884213 - RNA, 19 nt, Artificial Sequence
  Description of Artificial Sequence: Synthetic oligonucleotide
augcaucaucagcgggguu

SEQ ID NO: 1884214 - RNA, 19 nt, Artificial Sequence
  Description of Artificial Sequence: Synthetic oligonucleotide
cggcgaucucacagaaccg

SEQ ID NO: 1884215 - RNA, 19 nt, Artificial Sequence
  Description of Artificial Sequence: Synthetic oligonucleotide
gccaaaaggccaugguaau

SEQ ID NO: 1884216 - RNA, 19 nt, Artificial Sequence
  Description of Artificial Sequence: Synthetic oligonucleotide
caggugcguaguggcugcc

SEQ ID NO: 1884217 - RNA, 19 nt, Artificial Sequence
  Description of Artificial Sequence: Synthetic oligonucleotide
gcguaguggcugccaacac

SEQ ID NO: 1884218 - RNA, 19 nt, Artificial Sequence
  Description of Artificial Sequence: Synthetic oligonucleotide
gcucucgagaccaucuccu

SEQ ID NO: 1884219 - RNA, 19 nt, Artificial Sequence
  Description of Artificial Sequence: Synthetic oligonucleotide
aucugccgaugcgccaggu

SEQ ID NO: 1884220 - RNA, 19 nt, Artificial Sequence
  Description of Artificial Sequence: Synthetic oligonucleotide
cugaaugagccggcucuua

SEQ ID NO: 1884221 - RNA, 19 nt, Artificial Sequence
  Description of Artificial Sequence: Synthetic oligonucleotide
gccaagcaagggccagcgc

SEQ ID NO: 1884222 - RNA, 19 nt, Artificial Sequence
  Description of Artificial Sequence: Synthetic oligonucleotide
gccacuagcuggcguucca

SEQ ID NO: 1884223 - RNA, 19 nt, Artificial Sequence
  Description of Artificial Sequence: Synthetic oligonucleotide
ggaagaccauuugggccuc

SEQ ID NO: 1884224 - RNA, 19 nt, Artificial Sequence
  Description of Artificial Sequence: Synthetic oligonucleotide
gaugcgccagguccuucuu

SEQ ID NO: 1884225 - RNA, 19 nt, Artificial Sequence
  Description of Artificial Sequence: Synthetic oligonucleotide
ggccacuagcuggcguucc

SEQ ID NO: 1884226 - RNA, 19 nt, Artificial Sequence
  Description of Artificial Sequence: Synthetic oligonucleotide
caucuccugaagcgccucu

SEQ ID NO: 1884227 - RNA, 19 nt, Artificial Sequence
  Description of Artificial Sequence: Synthetic oligonucleotide
cugcugcauggcggcggcg

SEQ ID NO: 1884228 - RNA, 19 nt, Artificial Sequence
  Description of Artificial Sequence: Synthetic oligonucleotide
cacagugggcaggugcgua

SEQ ID NO: 1884229 - RNA, 19 nt, Artificial Sequence
  Description of Artificial Sequence: Synthetic oligonucleotide
cugguagcuggcugugcau

SEQ ID NO: 1884230 - RNA, 19 nt, Artificial Sequence
  Description of Artificial Sequence: Synthetic oligonucleotide
ccucacguuccaggcacac

SEQ ID NO: 1884231 - RNA, 19 nt, Artificial Sequence
  Description of Artificial Sequence: Synthetic oligonucleotide
gguccauuucagccaugcu

SEQ ID NO: 1884232 - RNA, 19 nt, Artificial Sequence
  Description of Artificial Sequence: Synthetic oligonucleotide
ggcucuccguaggaucuca

SEQ ID NO: 1884233 - RNA, 19 nt, Artificial Sequence
  Description of Artificial Sequence: Synthetic oligonucleotide
cccuagucuggggaacgug

SEQ ID NO: 1884234 - RNA, 19 nt, Artificial Sequence
  Description of Artificial Sequence: Synthetic oligonucleotide
uggcggcggcgaucucaca

SEQ ID NO: 1884235 - RNA, 19 nt, Artificial Sequence
  Description of Artificial Sequence: Synthetic oligonucleotide
gguuucacucuuggcuucu

SEQ ID NO: 1884236 - RNA, 19 nt, Artificial Sequence
  Description of Artificial Sequence: Synthetic oligonucleotide
gccuaaucugguuccugau

SEQ ID NO: 1884237 - RNA, 19 nt, Artificial Sequence
  Description of Artificial Sequence: Synthetic oligonucleotide
ggagcccagcaguggugga

SEQ ID NO: 1884238 - RNA, 19 nt, Artificial Sequence
  Description of Artificial Sequence: Synthetic oligonucleotide
cucacugacucgggaggcu

SEQ ID NO: 1884239 - RNA, 19 nt, Artificial Sequence
  Description of Artificial Sequence: Synthetic oligonucleotide
cacccaccuuagccagauc

SEQ ID NO: 1884240 - RNA, 19 nt, Artificial Sequence
  Description of Artificial Sequence: Synthetic oligonucleotide
agcuggcguuccaugccuu

SEQ ID NO: 1884241 - RNA, 19 nt, Artificial Sequence
  Description of Artificial Sequence: Synthetic oligonucleotide
cugacucgggaggcuccca

SEQ ID NO: 1884242 - RNA, 19 nt, Artificial Sequence
  Description of Artificial Sequence: Synthetic oligonucleotide
gcgccagguccuucuucac

SEQ ID NO: 1884243 - RNA, 19 nt, Artificial Sequence
  Description of Artificial Sequence: Synthetic oligonucleotide
gguuggcagguggugccaa

SEQ ID NO: 1884244 - RNA, 19 nt, Artificial Sequence
  Description of Artificial Sequence: Synthetic oligonucleotide
cguaguggcugccaacacu

SEQ ID NO: 1884245 - RNA, 19 nt, Artificial Sequence
  Description of Artificial Sequence: Synthetic oligonucleotide
gcagauggucucacugacu

SEQ ID NO: 1884246 - RNA, 19 nt, Artificial Sequence
  Description of Artificial Sequence: Synthetic oligonucleotide
gcgaucucacagaaccggu

SEQ ID NO: 1884247 - RNA, 19 nt, Artificial Sequence
  Description of Artificial Sequence: Synthetic oligonucleotide
cugauccaucugcugccau

SEQ ID NO: 1884248 - RNA, 19 nt, Artificial Sequence
  Description of Artificial Sequence: Synthetic oligonucleotide
ggcucccaaggggcuucgg

SEQ ID NO: 1884249 - RNA, 19 nt, Artificial Sequence
  Description of Artificial Sequence: Synthetic oligonucleotide
cagggccacuagcuggcgu

SEQ ID NO: 1884250 - RNA, 19 nt, Artificial Sequence
  Description of Artificial Sequence: Synthetic oligonucleotide
gggccacuagcuggcguuc

SEQ ID NO: 1884251 - RNA, 19 nt, Artificial Sequence
  Description of Artificial Sequence: Synthetic oligonucleotide
gguuggacccuggccacau

SEQ ID NO: 1884252 - RNA, 19 nt, Artificial Sequence
  Description of Artificial Sequence: Synthetic oligonucleotide
cagaucuccagggcucauu

SEQ ID NO: 1884253 - RNA, 19 nt, Artificial Sequence
  Description of Artificial Sequence: Synthetic oligonucleotide
caguuucuauuagccuaau

SEQ ID NO: 1884254 - RNA, 19 nt, Artificial Sequence
  Description of Artificial Sequence: Synthetic oligonucleotide
gggcucuccguaggaucuc

SEQ ID NO: 1884255 - RNA, 19 nt, Artificial Sequence
  Description of Artificial Sequence: Synthetic oligonucleotide
cuggggaacgugggugcau

SEQ ID NO: 1884256 - RNA, 19 nt, Artificial Sequence
  Description of Artificial Sequence: Synthetic oligonucleotide
cgcugguagcuggcugugc

SEQ ID NO: 1884257 - RNA, 19 nt, Artificial Sequence
  Description of Artificial Sequence: Synthetic oligonucleotide
ccaucugaaugagccggcu

SEQ ID NO: 1884258 - RNA, 19 nt, Artificial Sequence
  Description of Artificial Sequence: Synthetic oligonucleotide
cgaugcgccagguccuucu

SEQ ID NO: 1884259 - RNA, 19 nt, Artificial Sequence
  Description of Artificial Sequence: Synthetic oligonucleotide
gccucacguuccaggcaca

SEQ ID NO: 1884260 - RNA, 19 nt, Artificial Sequence
  Description of Artificial Sequence: Synthetic oligonucleotide
cagaaccgguucugccauu

SEQ ID NO: 1884261 - RNA, 19 nt, Artificial Sequence
  Description of Artificial Sequence: Synthetic oligonucleotide
cgaucucacagaaccgguu

SEQ ID NO: 1884262 - RNA, 19 nt, Artificial Sequence
  Description of Artificial Sequence: Synthetic oligonucleotide
gcacagugggcaggugcgu

SEQ ID NO: 1884263 - RNA, 19 nt, Artificial Sequence
  Description of Artificial Sequence: Synthetic oligonucleotide
ccgaugcgccagguccuuc

SEQ ID NO: 1884264 - RNA, 19 nt, Artificial Sequence
  Description of Artificial Sequence: Synthetic oligonucleotide
gcccuagucuggggaacgu

SEQ ID NO: 1884265 - RNA, 19 nt, Artificial Sequence
  Description of Artificial Sequence: Synthetic oligonucleotide
gcucuccguaggaucucau

SEQ ID NO: 1884266 - RNA, 19 nt, Artificial Sequence
  Description of Artificial Sequence: Synthetic oligonucleotide
ccacuagcuggcguuccau

SEQ ID NO: 1884267 - RNA, 19 nt, Artificial Sequence
  Description of Artificial Sequence: Synthetic oligonucleotide
ccagcgcugguagcuggcu

SEQ ID NO: 1884268 - RNA, 19 nt, Artificial Sequence
  Description of Artificial Sequence: Synthetic oligonucleotide
ccggaggcgcugggagauc

SEQ ID NO: 1884269 - RNA, 19 nt, Artificial Sequence
  Description of Artificial Sequence: Synthetic oligonucleotide
ccucauccuuaggugguuu

SEQ ID NO: 1884270 - RNA, 19 nt, Artificial Sequence
  Description of Artificial Sequence: Synthetic oligonucleotide
cggaggcgcugggagaucu

SEQ ID NO: 1884271 - RNA, 19 nt, Artificial Sequence
  Description of Artificial Sequence: Synthetic oligonucleotide
gccgaugcgccagguccuu

SEQ ID NO: 1884272 - RNA, 19 nt, Artificial Sequence
  Description of Artificial Sequence: Synthetic oligonucleotide
gcgcugcucucgagaccau

SEQ ID NO: 1884273 - RNA, 19 nt, Artificial Sequence
  Description of Artificial Sequence: Synthetic oligonucleotide
aauagggacaguucaugac

SEQ ID NO: 1884274 - RNA, 19 nt, Artificial Sequence
  Description of Artificial Sequence: Synthetic oligonucleotide
ucugucaucgcuucuauag

SEQ ID NO: 1884275 - RNA, 19 nt, Artificial Sequence
  Description of Artificial Sequence: Synthetic oligonucleotide
ugauguuucaauguagggg

SEQ ID NO: 1884276 - RNA, 19 nt, Artificial Sequence
  Description of Artificial Sequence: Synthetic oligonucleotide
gauguuucaauguagggga

SEQ ID NO: 1884277 - RNA, 19 nt, Artificial Sequence
  Description of Artificial Sequence: Synthetic oligonucleotide
aaucucacguacuagugug

SEQ ID NO: 1884278 - RNA, 19 nt, Artificial Sequence
  Description of Artificial Sequence: Synthetic oligonucleotide
agcucaugcagccagggcc

SEQ ID NO: 1884279 - RNA, 19 nt, Artificial Sequence
  Description of Artificial Sequence: Synthetic oligonucleotide
aaacacacagaggaagccc

SEQ ID NO: 1884280 - RNA, 19 nt, Artificial Sequence
  Description of Artificial Sequence: Synthetic oligonucleotide
acuguaauucaaccugugc

SEQ ID NO: 1884281 - RNA, 19 nt, Artificial Sequence
  Description of Artificial Sequence: Synthetic oligonucleotide
auagcugcgggcaaggucc

SEQ ID NO: 1884282 - RNA, 19 nt, Artificial Sequence
  Description of Artificial Sequence: Synthetic oligonucleotide
gauagcacacacuugcagc

SEQ ID NO: 1884283 - RNA, 19 nt, Artificial Sequence
  Description of Artificial Sequence: Synthetic oligonucleotide
augaaguucaucuggcuag

SEQ ID NO: 1884284 - RNA, 19 nt, Artificial Sequence
  Description of Artificial Sequence: Synthetic oligonucleotide
ucuaagauguccagcagac

SEQ ID NO: 1884285 - RNA, 19 nt, Artificial Sequence
  Description of Artificial Sequence: Synthetic oligonucleotide
ucaugacacagucuguucc

SEQ ID NO: 1884286 - RNA, 19 nt, Artificial Sequence
  Description of Artificial Sequence: Synthetic oligonucleotide
cacaaaaugguucuggauc

SEQ ID NO: 1884287 - RNA, 19 nt, Artificial Sequence
  Description of Artificial Sequence: Synthetic oligonucleotide
agacucaacaguucgagca

SEQ ID NO: 1884288 - RNA, 19 nt, Artificial Sequence
  Description of Artificial Sequence: Synthetic oligonucleotide
accaucaaauaauuuacug

SEQ ID NO: 1884289 - RNA, 19 nt, Artificial Sequence
  Description of Artificial Sequence: Synthetic oligonucleotide
uaugcugccgaaucucacg

SEQ ID NO: 1884290 - RNA, 19 nt, Artificial Sequence
  Description of Artificial Sequence: Synthetic oligonucleotide
aucgucugagucuuucacc

SEQ ID NO: 1884291 - RNA, 19 nt, Artificial Sequence
  Description of Artificial Sequence: Synthetic oligonucleotide
aauguaggggaugccauag

SEQ ID NO: 1884292 - RNA, 19 nt, Artificial Sequence
  Description of Artificial Sequence: Synthetic oligonucleotide
gauaugaaguucaucuggc

SEQ ID NO: 1884293 - RNA, 19 nt, Artificial Sequence
  Description of Artificial Sequence: Synthetic oligonucleotide
ucgucugagucuuucaccc

SEQ ID NO: 1884294 - RNA, 19 nt, Artificial Sequence
  Description of Artificial Sequence: Synthetic oligonucleotide
auagggacaguucaugaca

SEQ ID NO: 1884295 - RNA, 19 nt, Artificial Sequence
  Description of Artificial Sequence: Synthetic oligonucleotide
auacucguccacaaaaugg

SEQ ID NO: 1884296 - RNA, 19 nt, Artificial Sequence
  Description of Artificial Sequence: Synthetic oligonucleotide
uggacuggcuccagcaucg

SEQ ID NO: 1884297 - RNA, 19 nt, Artificial Sequence
  Description of Artificial Sequence: Synthetic oligonucleotide
acacuugcagcucaugcag

SEQ ID NO: 1884298 - RNA, 19 nt, Artificial Sequence
  Description of Artificial Sequence: Synthetic oligonucleotide
uguaggggaugccauagcu

SEQ ID NO: 1884299 - RNA, 19 nt, Artificial Sequence
  Description of Artificial Sequence: Synthetic oligonucleotide
uguuccaauuguccaugcg

SEQ ID NO: 1884300 - RNA, 19 nt, Artificial Sequence
  Description of Artificial Sequence: Synthetic oligonucleotide
uggcaauagggacaguuca

SEQ ID NO: 1884301 - RNA, 19 nt, Artificial Sequence
  Description of Artificial Sequence: Synthetic oligonucleotide
cuuccguaguuuaugcugc

SEQ ID NO: 1884302 - RNA, 19 nt, Artificial Sequence
  Description of Artificial Sequence: Synthetic oligonucleotide
cguacuaguguguagaagg

SEQ ID NO: 1884303 - RNA, 19 nt, Artificial Sequence
  Description of Artificial Sequence: Synthetic oligonucleotide
caugcgaaggucuugguca

SEQ ID NO: 1884304 - RNA, 19 nt, Artificial Sequence
  Description of Artificial Sequence: Synthetic oligonucleotide
auagcacacacuugcagcu

SEQ ID NO: 1884305 - RNA, 19 nt, Artificial Sequence
  Description of Artificial Sequence: Synthetic oligonucleotide
acugagagggguugaggac

SEQ ID NO: 1884306 - RNA, 19 nt, Artificial Sequence
  Description of Artificial Sequence: Synthetic oligonucleotide
cacuauacuccucuugacc

SEQ ID NO: 1884307 - RNA, 19 nt, Artificial Sequence
  Description of Artificial Sequence: Synthetic oligonucleotide
acccgaagggaacugagag

SEQ ID NO: 1884308 - RNA, 19 nt, Artificial Sequence
  Description of Artificial Sequence: Synthetic oligonucleotide
aacaguucgagcagccagg

SEQ ID NO: 1884309 - RNA, 19 nt, Artificial Sequence
  Description of Artificial Sequence: Synthetic oligonucleotide
uuccaauuguccaugcgaa

SEQ ID NO: 1884310 - RNA, 19 nt, Artificial Sequence
  Description of Artificial Sequence: Synthetic oligonucleotide
caucagaguggauaugaag

SEQ ID NO: 1884311 - RNA, 19 nt, Artificial Sequence
  Description of Artificial Sequence: Synthetic oligonucleotide
aucggguggguucagcuuc

SEQ ID NO: 1884312 - RNA, 19 nt, Artificial Sequence
  Description of Artificial Sequence: Synthetic oligonucleotide
ucaucuggcuagcuggggc

SEQ ID NO: 1884313 - RNA, 19 nt, Artificial Sequence
  Description of Artificial Sequence: Synthetic oligonucleotide
uucaaccugugccccauag

SEQ ID NO: 1884314 - RNA, 19 nt, Artificial Sequence
  Description of Artificial Sequence: Synthetic oligonucleotide
cagucuguuccaauugucc

SEQ ID NO: 1884315 - RNA, 19 nt, Artificial Sequence
  Description of Artificial Sequence: Synthetic oligonucleotide
acucucaucggguggguuc

SEQ ID NO: 1884316 - RNA, 19 nt, Artificial Sequence
  Description of Artificial Sequence: Synthetic oligonucleotide
aucgcuucuauagaggcug

SEQ ID NO: 1884317 - RNA, 19 nt, Artificial Sequence
  Description of Artificial Sequence: Synthetic oligonucleotide
gacucaacaguucgagcag

SEQ ID NO: 1884318 - RNA, 19 nt, Artificial Sequence
  Description of Artificial Sequence: Synthetic oligonucleotide
ucguccacaaaaugguucu

SEQ ID NO: 1884319 - RNA, 19 nt, Artificial Sequence
  Description of Artificial Sequence: Synthetic oligonucleotide
agcuuguauucugucaucg

SEQ ID NO: 1884320 - RNA, 19 nt, Artificial Sequence
  Description of Artificial Sequence: Synthetic oligonucleotide
ucacguacuaguguguaga

SEQ ID NO: 1884321 - RNA, 19 nt, Artificial Sequence
  Description of Artificial Sequence: Synthetic oligonucleotide
agucuguuccaauugucca

SEQ ID NO: 1884322 - RNA, 19 nt, Artificial Sequence
  Description of Artificial Sequence: Synthetic oligonucleotide
cuucuauagaggcugccac

SEQ ID NO: 1884323 - RNA, 19 nt, Artificial Sequence
  Description of Artificial Sequence: Synthetic oligonucleotide
gugucuaagauguccagca

SEQ ID NO: 1884324 - RNA, 19 nt, Artificial Sequence
  Description of Artificial Sequence: Synthetic oligonucleotide
ucaauguaggggaugccau

SEQ ID NO: 1884325 - RNA, 19 nt, Artificial Sequence
  Description of Artificial Sequence: Synthetic oligonucleotide
caacaguucgagcagccag

SEQ ID NO: 1884326 - RNA, 19 nt, Artificial Sequence
  Description of Artificial Sequence: Synthetic oligonucleotide
aaaggacuugguguuguug

SEQ ID NO: 1884327 - RNA, 19 nt, Artificial Sequence
  Description of Artificial Sequence: Synthetic oligonucleotide
ugugucuaagauguccagc

SEQ ID NO: 1884328 - RNA, 19 nt, Artificial Sequence
  Description of Artificial Sequence: Synthetic oligonucleotide
ucauacucguccacaaaau

SEQ ID NO: 1884329 - RNA, 19 nt, Artificial Sequence
  Description of Artificial Sequence: Synthetic oligonucleotide
uacuguaauucaaccugug

SEQ ID NO: 1884330 - RNA, 19 nt, Artificial Sequence
  Description of Artificial Sequence: Synthetic oligonucleotide
ucucuuuccuuccuuccgu

SEQ ID NO: 1884331 - RNA, 19 nt, Artificial Sequence
  Description of Artificial Sequence: Synthetic oligonucleotide
agcaucgcuuccuuccuuc

SEQ ID NO: 1884332 - RNA, 19 nt, Artificial Sequence
  Description of Artificial Sequence: Synthetic oligonucleotide
accaccacgagcuuguauu

SEQ ID NO: 1884333 - RNA, 19 nt, Artificial Sequence
  Description of Artificial Sequence: Synthetic oligonucleotide
agggcacucuuucccacgc

SEQ ID NO: 1884334 - RNA, 19 nt, Artificial Sequence
  Description of Artificial Sequence: Synthetic oligonucleotide
auaugaaguucaucuggcu

SEQ ID NO: 1884335 - RNA, 19 nt, Artificial Sequence
  Description of Artificial Sequence: Synthetic oligonucleotide
aaaggacaccacugaccuc

SEQ ID NO: 1884336 - RNA, 19 nt, Artificial Sequence
  Description of Artificial Sequence: Synthetic oligonucleotide
ucuauagaggcugccacuc

SEQ ID NO: 1884337 - RNA, 19 nt, Artificial Sequence
  Description of Artificial Sequence: Synthetic oligonucleotide
uucuauagaggcugccacu

SEQ ID NO: 1884338 - RNA, 19 nt, Artificial Sequence
  Description of Artificial Sequence: Synthetic oligonucleotide
guggguucagcuuccguag

SEQ ID NO: 1884339 - RNA, 19 nt, Artificial Sequence
  Description of Artificial Sequence: Synthetic oligonucleotide
uccaauuguccaugcgaag

SEQ ID NO: 1884340 - RNA, 19 nt, Artificial Sequence
  Description of Artificial Sequence: Synthetic oligonucleotide
auguaggggaugccauagc

SEQ ID NO: 1884341 - RNA, 19 nt, Artificial Sequence
  Description of Artificial Sequence: Synthetic oligonucleotide
aguggauaugaaguucauc

SEQ ID NO: 1884342 - RNA, 19 nt, Artificial Sequence
  Description of Artificial Sequence: Synthetic oligonucleotide
uguacugauggaugucuuc

SEQ ID NO: 1884343 - RNA, 19 nt, Artificial Sequence
  Description of Artificial Sequence: Synthetic oligonucleotide
cucguccacaaaaugguuc

SEQ ID NO: 1884344 - RNA, 19 nt, Artificial Sequence
  Description of Artificial Sequence: Synthetic oligonucleotide
uguuucaauguaggggaug

SEQ ID NO: 1884345 - RNA, 19 nt, Artificial Sequence
  Description of Artificial Sequence: Synthetic oligonucleotide
agaguggauaugaaguuca

SEQ ID NO: 1884346 - RNA, 19 nt, Artificial Sequence
  Description of Artificial Sequence: Synthetic oligonucleotide
uuucccacgccuccagcgc

SEQ ID NO: 1884347 - RNA, 19 nt, Artificial Sequence
  Description of Artificial Sequence: Synthetic oligonucleotide
gcugauguuucaauguagg

SEQ ID NO: 1884348 - RNA, 19 nt, Artificial Sequence
  Description of Artificial Sequence: Synthetic oligonucleotide
cuagcuggggccacugccc

SEQ ID NO: 1884349 - RNA, 19 nt, Artificial Sequence
  Description of Artificial Sequence: Synthetic oligonucleotide
augcgaaggucuuggucac

SEQ ID NO: 1884350 - RNA, 19 nt, Artificial Sequence
  Description of Artificial Sequence: Synthetic oligonucleotide
guaauucaaccugugcccc

SEQ ID NO: 1884351 - RNA, 19 nt, Artificial Sequence
  Description of Artificial Sequence: Synthetic oligonucleotide
gagacucaacaguucgagc

SEQ ID NO: 1884352 - RNA, 19 nt, Artificial Sequence
  Description of Artificial Sequence: Synthetic oligonucleotide
uuaugcugccgaaucucac

SEQ ID NO: 1884353 - RNA, 19 nt, Artificial Sequence
  Description of Artificial Sequence: Synthetic oligonucleotide
caucuggcuagcuggggcc

SEQ ID NO: 1884354 - RNA, 19 nt, Artificial Sequence
  Description of Artificial Sequence: Synthetic oligonucleotide
accacgagcuuguauucug

SEQ ID NO: 1884355 - RNA, 19 nt, Artificial Sequence
  Description of Artificial Sequence: Synthetic oligonucleotide
augagcuccguccgcggcg

SEQ ID NO: 1884356 - RNA, 19 nt, Artificial Sequence
  Description of Artificial Sequence: Synthetic oligonucleotide
ugaccugcugugucuaaga

SEQ ID NO: 1884357 - RNA, 19 nt, Artificial Sequence
  Description of Artificial Sequence: Synthetic oligonucleotide
uuggcacaucgucugaguc

SEQ ID NO: 1884358 - RNA, 19 nt, Artificial Sequence
  Description of Artificial Sequence: Synthetic oligonucleotide
uucaugacacagucuguuc

SEQ ID NO: 1884359 - RNA, 19 nt, Artificial Sequence
  Description of Artificial Sequence: Synthetic oligonucleotide
acgagcuuguauucuguca

SEQ ID NO: 1884360 - RNA, 19 nt, Artificial Sequence
  Description of Artificial Sequence: Synthetic oligonucleotide
ggcaaacacacagaggaag

SEQ ID NO: 1884361 - RNA, 19 nt, Artificial Sequence
  Description of Artificial Sequence: Synthetic oligonucleotide
ugucaggauagcacacacu

SEQ ID NO: 1884362 - RNA, 19 nt, Artificial Sequence
  Description of Artificial Sequence: Synthetic oligonucleotide
ccgaagggaacugagaggg

SEQ ID NO: 1884363 - RNA, 19 nt, Artificial Sequence
  Description of Artificial Sequence: Synthetic oligonucleotide
uccccugugcgcauguacu

SEQ ID NO: 1884364 - RNA, 19 nt, Artificial Sequence
  Description of Artificial Sequence: Synthetic oligonucleotide
ugaaguucaucuggcuagc

SEQ ID NO: 1884365 - RNA, 19 nt, Artificial Sequence
  Description of Artificial Sequence: Synthetic oligonucleotide
cacguccugagccugugcc

SEQ ID NO: 1884366 - RNA, 19 nt, Artificial Sequence
  Description of Artificial Sequence: Synthetic oligonucleotide
caucgucugagucuuucac

SEQ ID NO: 1884367 - RNA, 19 nt, Artificial Sequence
  Description of Artificial Sequence: Synthetic oligonucleotide
uaauucaaccugugcccca

SEQ ID NO: 1884368 - RNA, 19 nt, Artificial Sequence
  Description of Artificial Sequence: Synthetic oligonucleotide
cugcucccuguacugaugg

SEQ ID NO: 1884369 - RNA, 19 nt, Artificial Sequence
  Description of Artificial Sequence: Synthetic oligonucleotide
uccgguaggaguccucuau

SEQ ID NO: 1884370 - RNA, 19 nt, Artificial Sequence
  Description of Artificial Sequence: Synthetic oligonucleotide
ccaauuguccaugcgaagg

SEQ ID NO: 1884371 - RNA, 19 nt, Artificial Sequence
  Description of Artificial Sequence: Synthetic oligonucleotide
caugucuccccaucaauga

SEQ ID NO: 1884372 - RNA, 19 nt, Artificial Sequence
  Description of Artificial Sequence: Synthetic oligonucleotide
gccgagacucaacaguucg

SEQ ID NO: 1884373 - RNA, 19 nt, Artificial Sequence
  Description of Artificial Sequence: Synthetic oligonucleotide
acaugucuccccaucaaug

SEQ ID NO: 1884374 - RNA, 19 nt, Artificial Sequence
  Description of Artificial Sequence: Synthetic oligonucleotide
agcgcccaccaccacgagc

SEQ ID NO: 1884375 - RNA, 19 nt, Artificial Sequence
  Description of Artificial Sequence: Synthetic oligonucleotide
cucccuguacugauggaug

SEQ ID NO: 1884376 - RNA, 19 nt, Artificial Sequence
  Description of Artificial Sequence: Synthetic oligonucleotide
gacggcggggacucggccg

SEQ ID NO: 1884377 - RNA, 19 nt, Artificial Sequence
  Description of Artificial Sequence: Synthetic oligonucleotide
cuugaucugcucccuguac

SEQ ID NO: 1884378 - RNA, 19 nt, Artificial Sequence
  Description of Artificial Sequence: Synthetic oligonucleotide
caaaggacaccacugaccu

SEQ ID NO: 1884379 - RNA, 19 nt, Artificial Sequence
  Description of Artificial Sequence: Synthetic oligonucleotide
gacuggacuggcuccagca

SEQ ID NO: 1884380 - RNA, 19 nt, Artificial Sequence
  Description of Artificial Sequence: Synthetic oligonucleotide
uccguaguuuaugcugccg

SEQ ID NO: 1884381 - RNA, 19 nt, Artificial Sequence
  Description of Artificial Sequence: Synthetic oligonucleotide
caauagggacaguucauga

SEQ ID NO: 1884382 - RNA, 19 nt, Artificial Sequence
  Description of Artificial Sequence: Synthetic oligonucleotide
auaggcacccgaagggaac

SEQ ID NO: 1884383 - RNA, 19 nt, Artificial Sequence
  Description of Artificial Sequence: Synthetic oligonucleotide
caccacugaccucaggcag

SEQ ID NO: 1884384 - RNA, 19 nt, Artificial Sequence
  Description of Artificial Sequence: Synthetic oligonucleotide
aauucaaccugugccccau

SEQ ID NO: 1884385 - RNA, 19 nt, Artificial Sequence
  Description of Artificial Sequence: Synthetic oligonucleotide
agggacaucagaguggaua

SEQ ID NO: 1884386 - RNA, 19 nt, Artificial Sequence
  Description of Artificial Sequence: Synthetic oligonucleotide
guccaugcgaaggucuugg

SEQ ID NO: 1884387 - RNA, 19 nt, Artificial Sequence
  Description of Artificial Sequence: Synthetic oligonucleotide
guacuggucccucauggca

SEQ ID NO: 1884388 - RNA, 19 nt, Artificial Sequence
  Description of Artificial Sequence: Synthetic oligonucleotide
cucacguacuaguguguag

SEQ ID NO: 1884389 - RNA, 19 nt, Artificial Sequence
  Description of Artificial Sequence: Synthetic oligonucleotide
uuccgucugcaccuccucc

SEQ ID NO: 1884390 - RNA, 19 nt, Artificial Sequence
  Description of Artificial Sequence: Synthetic oligonucleotide
gaaucucacguacuagugu

SEQ ID NO: 1884391 - RNA, 19 nt, Artificial Sequence
  Description of Artificial Sequence: Synthetic oligonucleotide
ugcauccggcaccuccacg

SEQ ID NO: 1884392 - RNA, 19 nt, Artificial Sequence
  Description of Artificial Sequence: Synthetic oligonucleotide
uugaccugcugugucuaag

SEQ ID NO: 1884393 - RNA, 19 nt, Artificial Sequence
  Description of Artificial Sequence: Synthetic oligonucleotide
acguccugagccugugccg

SEQ ID NO: 1884394 - RNA, 19 nt, Artificial Sequence
  Description of Artificial Sequence: Synthetic oligonucleotide
cuauagaggcugccacucc

SEQ ID NO: 1884395 - RNA, 19 nt, Artificial Sequence
  Description of Artificial Sequence: Synthetic oligonucleotide
augcugccgaaucucacgu

SEQ ID NO: 1884396 - RNA, 19 nt, Artificial Sequence
  Description of Artificial Sequence: Synthetic oligonucleotide
cauagcugcgggcaagguc

SEQ ID NO: 1884397 - RNA, 19 nt, Artificial Sequence
  Description of Artificial Sequence: Synthetic oligonucleotide
cugugucuaagauguccag

SEQ ID NO: 1884398 - RNA, 19 nt, Artificial Sequence
  Description of Artificial Sequence: Synthetic oligonucleotide
uggugucaggauagcacac

SEQ ID NO: 1884399 - RNA, 19 nt, Artificial Sequence
  Description of Artificial Sequence: Synthetic oligonucleotide
caugacacagucuguucca

SEQ ID NO: 1884400 - RNA, 19 nt, Artificial Sequence
  Description of Artificial Sequence: Synthetic oligonucleotide
gucaggauagcacacacuu

SEQ ID NO: 1884401 - RNA, 19 nt, Artificial Sequence
  Description of Artificial Sequence: Synthetic oligonucleotide
ucuuucccacgccuccagc

SEQ ID NO: 1884402 - RNA, 19 nt, Artificial Sequence
  Description of Artificial Sequence: Synthetic oligonucleotide
agagggguugaggacuggg

SEQ ID NO: 1884403 - RNA, 19 nt, Artificial Sequence
  Description of Artificial Sequence: Synthetic oligonucleotide
ugccgaaucucacguacua

SEQ ID NO: 1884404 - RNA, 19 nt, Artificial Sequence
  Description of Artificial Sequence: Synthetic oligonucleotide
uuucaauguaggggaugcc

SEQ ID NO: 1884405 - RNA, 19 nt, Artificial Sequence
  Description of Artificial Sequence: Synthetic oligonucleotide
uuccguaguuuaugcugcc

SEQ ID NO: 1884406 - RNA, 19 nt, Artificial Sequence
  Description of Artificial Sequence: Synthetic oligonucleotide
ccuguuuccgguaggaguc

SEQ ID NO: 1884407 - RNA, 19 nt, Artificial Sequence
  Description of Artificial Sequence: Synthetic oligonucleotide
ucaacaguucgagcagcca

SEQ ID NO: 1884408 - RNA, 19 nt, Artificial Sequence
  Description of Artificial Sequence: Synthetic oligonucleotide
ccuggugucaggauagcac

SEQ ID NO: 1884409 - RNA, 19 nt, Artificial Sequence
  Description of Artificial Sequence: Synthetic oligonucleotide
cuguuccaauuguccaugc

SEQ ID NO: 1884410 - RNA, 19 nt, Artificial Sequence
  Description of Artificial Sequence: Synthetic oligonucleotide
acguacuaguguguagaag

SEQ ID NO: 1884411 - RNA, 19 nt, Artificial Sequence
  Description of Artificial Sequence: Synthetic oligonucleotide
cacuugcagcucaugcagc

SEQ ID NO: 1884412 - RNA, 19 nt, Artificial Sequence
  Description of Artificial Sequence: Synthetic oligonucleotide
ggagauuggcaggaugggg

SEQ ID NO: 1884413 - RNA, 19 nt, Artificial Sequence
  Description of Artificial Sequence: Synthetic oligonucleotide
guaggggaugccauagcug

SEQ ID NO: 1884414 - RNA, 19 nt, Artificial Sequence
  Description of Artificial Sequence: Synthetic oligonucleotide
gaagcccuccccugugcgc

SEQ ID NO: 1884415 - RNA, 19 nt, Artificial Sequence
  Description of Artificial Sequence: Synthetic oligonucleotide
gcaaacacacagaggaagc

SEQ ID NO: 1884416 - RNA, 19 nt, Artificial Sequence
  Description of Artificial Sequence: Synthetic oligonucleotide
cccauaggcacccgaaggg

SEQ ID NO: 1884417 - RNA, 19 nt, Artificial Sequence
  Description of Artificial Sequence: Synthetic oligonucleotide
uuguccaugcgaaggucuu

SEQ ID NO: 1884418 - RNA, 19 nt, Artificial Sequence
  Description of Artificial Sequence: Synthetic oligonucleotide
caucccuggacuggacugg

SEQ ID NO: 1884419 - RNA, 19 nt, Artificial Sequence
  Description of Artificial Sequence: Synthetic oligonucleotide
cuggacuggcuccagcauc

SEQ ID NO: 1884420 - RNA, 19 nt, Artificial Sequence
  Description of Artificial Sequence: Synthetic oligonucleotide
gagcuuguauucugucauc

SEQ ID NO: 1884421 - RNA, 19 nt, Artificial Sequence
  Description of Artificial Sequence: Synthetic oligonucleotide
caugagcuccguccgcggc

SEQ ID NO: 1884422 - RNA, 19 nt, Artificial Sequence
  Description of Artificial Sequence: Synthetic oligonucleotide
aagcccuccccugugcgca

SEQ ID NO: 1884423 - RNA, 19 nt, Artificial Sequence
  Description of Artificial Sequence: Synthetic oligonucleotide
ucgcuucuauagaggcugc

SEQ ID NO: 1884424 - RNA, 19 nt, Artificial Sequence
  Description of Artificial Sequence: Synthetic oligonucleotide
gcugccgaaucucacguac

SEQ ID NO: 1884425 - RNA, 19 nt, Artificial Sequence
  Description of Artificial Sequence: Synthetic oligonucleotide
ucucacguacuagugugua

SEQ ID NO: 1884426 - RNA, 19 nt, Artificial Sequence
  Description of Artificial Sequence: Synthetic oligonucleotide
ugccccauaggcacccgaa

SEQ ID NO: 1884427 - RNA, 19 nt, Artificial Sequence
  Description of Artificial Sequence: Synthetic oligonucleotide
cagggagauuggcaggaug

SEQ ID NO: 1884428 - RNA, 19 nt, Artificial Sequence
  Description of Artificial Sequence: Synthetic oligonucleotide
ugccucaccuggugucagg

SEQ ID NO: 1884429 - RNA, 19 nt, Artificial Sequence
  Description of Artificial Sequence: Synthetic oligonucleotide
uggguucagcuuccguagu

SEQ ID NO: 1884430 - RNA, 19 nt, Artificial Sequence
  Description of Artificial Sequence: Synthetic oligonucleotide
gcuuguauucugucaucgc

SEQ ID NO: 1884431 - RNA, 19 nt, Artificial Sequence
  Description of Artificial Sequence: Synthetic oligonucleotide
uguccaugcgaaggucuug

SEQ ID NO: 1884432 - RNA, 19 nt, Artificial Sequence
  Description of Artificial Sequence: Synthetic oligonucleotide
ugccccaccgcuugcugga

SEQ ID NO: 1884433 - RNA, 19 nt, Artificial Sequence
  Description of Artificial Sequence: Synthetic oligonucleotide
cacgagcuuguauucuguc

SEQ ID NO: 1884434 - RNA, 19 nt, Artificial Sequence
  Description of Artificial Sequence: Synthetic oligonucleotide
ggcugauguuucaauguag

SEQ ID NO: 1884435 - RNA, 19 nt, Artificial Sequence
  Description of Artificial Sequence: Synthetic oligonucleotide
gcaccauuggcacaucguc

SEQ ID NO: 1884436 - RNA, 19 nt, Artificial Sequence
  Description of Artificial Sequence: Synthetic oligonucleotide
ugccgagacucaacaguuc

SEQ ID NO: 1884437 - RNA, 19 nt, Artificial Sequence
  Description of Artificial Sequence: Synthetic oligonucleotide
gggguugaggacuggggug

SEQ ID NO: 1884438 - RNA, 19 nt, Artificial Sequence
  Description of Artificial Sequence: Synthetic oligonucleotide
cugaccucaggcagggaga

SEQ ID NO: 1884439 - RNA, 19 nt, Artificial Sequence
  Description of Artificial Sequence: Synthetic oligonucleotide
gguggguucagcuuccgua

SEQ ID NO: 1884440 - RNA, 19 nt, Artificial Sequence
  Description of Artificial Sequence: Synthetic oligonucleotide
gggacgggcacaaaggaca

SEQ ID NO: 1884441 - RNA, 19 nt, Artificial Sequence
  Description of Artificial Sequence: Synthetic oligonucleotide
cugagccugugccgggacg

SEQ ID NO: 1884442 - RNA, 19 nt, Artificial Sequence
  Description of Artificial Sequence: Synthetic oligonucleotide
cacaucgucugagucuuuc

SEQ ID NO: 1884443 - RNA, 19 nt, Artificial Sequence
  Description of Artificial Sequence: Synthetic oligonucleotide
agggacaguucaugacaca

SEQ ID NO: 1884444 - RNA, 19 nt, Artificial Sequence
  Description of Artificial Sequence: Synthetic oligonucleotide
cauaggcacccgaagggaa

SEQ ID NO: 1884445 - RNA, 19 nt, Artificial Sequence
  Description of Artificial Sequence: Synthetic oligonucleotide
cuccccugugcgcauguac

SEQ ID NO: 1884446 - RNA, 19 nt, Artificial Sequence
  Description of Artificial Sequence: Synthetic oligonucleotide
uccucccugcauccggcac

SEQ ID NO: 1884447 - RNA, 19 nt, Artificial Sequence
  Description of Artificial Sequence: Synthetic oligonucleotide
ccccauaggcacccgaagg

SEQ ID NO: 1884448 - RNA, 19 nt, Artificial Sequence
  Description of Artificial Sequence: Synthetic oligonucleotide
ccagcagacaugucucccc

SEQ ID NO: 1884449 - RNA, 19 nt, Artificial Sequence
  Description of Artificial Sequence: Synthetic oligonucleotide
agcaccauuggcacaucgu

SEQ ID NO: 1884450 - RNA, 19 nt, Artificial Sequence
  Description of Artificial Sequence: Synthetic oligonucleotide
gaccaucaaauaauuuacu

SEQ ID NO: 1884451 - RNA, 19 nt, Artificial Sequence
  Description of Artificial Sequence: Synthetic oligonucleotide
cucaccuggugucaggaua

SEQ ID NO: 1884452 - RNA, 19 nt, Artificial Sequence
  Description of Artificial Sequence: Synthetic oligonucleotide
ggguugaggacuggggugc

SEQ ID NO: 1884453 - RNA, 19 nt, Artificial Sequence
  Description of Artificial Sequence: Synthetic oligonucleotide
gggagauuggcaggauggg

SEQ ID NO: 1884454 - RNA, 19 nt, Artificial Sequence
  Description of Artificial Sequence: Synthetic oligonucleotide
uguuuccgguaggaguccu

SEQ ID NO: 1884455 - RNA, 19 nt, Artificial Sequence
  Description of Artificial Sequence: Synthetic oligonucleotide
uccaugcgaaggucuuggu

SEQ ID NO: 1884456 - RNA, 19 nt, Artificial Sequence
  Description of Artificial Sequence: Synthetic oligonucleotide
gacaugucuccccaucaau

SEQ ID NO: 1884457 - RNA, 19 nt, Artificial Sequence
  Description of Artificial Sequence: Synthetic oligonucleotide
caauuguccaugcgaaggu

SEQ ID NO: 1884458 - RNA, 19 nt, Artificial Sequence
  Description of Artificial Sequence: Synthetic oligonucleotide
cugcgggcaagguccuggg

SEQ ID NO: 1884459 - RNA, 19 nt, Artificial Sequence
  Description of Artificial Sequence: Synthetic oligonucleotide
ucccugccucaccuggugu

SEQ ID NO: 1884460 - RNA, 19 nt, Artificial Sequence
  Description of Artificial Sequence: Synthetic oligonucleotide
cgaaucucacguacuagug

SEQ ID NO: 1884461 - RNA, 19 nt, Artificial Sequence
  Description of Artificial Sequence: Synthetic oligonucleotide
ugugccgggacgggcacaa

SEQ ID NO: 1884462 - RNA, 19 nt, Artificial Sequence
  Description of Artificial Sequence: Synthetic oligonucleotide
uggucaccucuguccacca

SEQ ID NO: 1884463 - RNA, 19 nt, Artificial Sequence
  Description of Artificial Sequence: Synthetic oligonucleotide
cuguuuccgguaggagucc

SEQ ID NO: 1884464 - RNA, 19 nt, Artificial Sequence
  Description of Artificial Sequence: Synthetic oligonucleotide
aggauagcacacacuugca

SEQ ID NO: 1884465 - RNA, 19 nt, Artificial Sequence
  Description of Artificial Sequence: Synthetic oligonucleotide
gucccugccucaccuggug

SEQ ID NO: 1884466 - RNA, 19 nt, Artificial Sequence
  Description of Artificial Sequence: Synthetic oligonucleotide
ccgcgcaugagcuccgucc

SEQ ID NO: 1884467 - RNA, 19 nt, Artificial Sequence
  Description of Artificial Sequence: Synthetic oligonucleotide
cgguaggaguccucuaugg

SEQ ID NO: 1884468 - RNA, 19 nt, Artificial Sequence
  Description of Artificial Sequence: Synthetic oligonucleotide
aucucacguacuagugugu

SEQ ID NO: 1884469 - RNA, 19 nt, Artificial Sequence
  Description of Artificial Sequence: Synthetic oligonucleotide
uccacguccugagccugug

SEQ ID NO: 1884470 - RNA, 19 nt, Artificial Sequence
  Description of Artificial Sequence: Synthetic oligonucleotide
acaucagaguggauaugaa

SEQ ID NO: 1884471 - RNA, 19 nt, Artificial Sequence
  Description of Artificial Sequence: Synthetic oligonucleotide
cacgccuccagcgcccacc

SEQ ID NO: 1884472 - RNA, 19 nt, Artificial Sequence
  Description of Artificial Sequence: Synthetic oligonucleotide
accuggugucaggauagca

SEQ ID NO: 1884473 - RNA, 19 nt, Artificial Sequence
  Description of Artificial Sequence: Synthetic oligonucleotide
cacguacuaguguguagaa

SEQ ID NO: 1884474 - RNA, 19 nt, Artificial Sequence
  Description of Artificial Sequence: Synthetic oligonucleotide
uggacuggacuggcuccag

SEQ ID NO: 1884475 - RNA, 19 nt, Artificial Sequence
  Description of Artificial Sequence: Synthetic oligonucleotide
gccgggacgggcacaaagg

SEQ ID NO: 1884476 - RNA, 19 nt, Artificial Sequence
  Description of Artificial Sequence: Synthetic oligonucleotide
gcuucuauagaggcugcca

SEQ ID NO: 1884477 - RNA, 19 nt, Artificial Sequence
  Description of Artificial Sequence: Synthetic oligonucleotide
cgagacucaacaguucgag

SEQ ID NO: 1884478 - RNA, 19 nt, Artificial Sequence
  Description of Artificial Sequence: Synthetic oligonucleotide
cacagucuguuccaauugu

SEQ ID NO: 1884479 - RNA, 19 nt, Artificial Sequence
  Description of Artificial Sequence: Synthetic oligonucleotide
agcagacaugucuccccau

SEQ ID NO: 1884480 - RNA, 19 nt, Artificial Sequence
  Description of Artificial Sequence: Synthetic oligonucleotide
cucucaucggguggguuca

SEQ ID NO: 1884481 - RNA, 19 nt, Artificial Sequence
  Description of Artificial Sequence: Synthetic oligonucleotide
ugcgaaggucuuggucacc

SEQ ID NO: 1884482 - RNA, 19 nt, Artificial Sequence
  Description of Artificial Sequence: Synthetic oligonucleotide
gggacaucagaguggauau

SEQ ID NO: 1884483 - RNA, 19 nt, Artificial Sequence
  Description of Artificial Sequence: Synthetic oligonucleotide
cugagagggguugaggacu

SEQ ID NO: 1884484 - RNA, 19 nt, Artificial Sequence
  Description of Artificial Sequence: Synthetic oligonucleotide
ugugccccauaggcacccg

SEQ ID NO: 1884485 - RNA, 19 nt, Artificial Sequence
  Description of Artificial Sequence: Synthetic oligonucleotide
cucaucggguggguucagc

SEQ ID NO: 1884486 - RNA, 19 nt, Artificial Sequence
  Description of Artificial Sequence: Synthetic oligonucleotide
gucccucauggcacuauac

SEQ ID NO: 1884487 - RNA, 19 nt, Artificial Sequence
  Description of Artificial Sequence: Synthetic oligonucleotide
cacccgaagggaacugaga

SEQ ID NO: 1884488 - RNA, 19 nt, Artificial Sequence
  Description of Artificial Sequence: Synthetic oligonucleotide
gacgggcacaaaggacacc

SEQ ID NO: 1884489 - RNA, 19 nt, Artificial Sequence
  Description of Artificial Sequence: Synthetic oligonucleotide
caccgcuugcuggagugac

SEQ ID NO: 1884490 - RNA, 19 nt, Artificial Sequence
  Description of Artificial Sequence: Synthetic oligonucleotide
gcaugagcuccguccgcgg

SEQ ID NO: 1884491 - RNA, 19 nt, Artificial Sequence
  Description of Artificial Sequence: Synthetic oligonucleotide
gccgaaucucacguacuag

SEQ ID NO: 1884492 - RNA, 19 nt, Artificial Sequence
  Description of Artificial Sequence: Synthetic oligonucleotide
augccauagcugcgggcaa

SEQ ID NO: 1884493 - RNA, 19 nt, Artificial Sequence
  Description of Artificial Sequence: Synthetic oligonucleotide
ccaugcgaaggucuugguc

SEQ ID NO: 1884494 - RNA, 19 nt, Artificial Sequence
  Description of Artificial Sequence: Synthetic oligonucleotide
ugcugccgaaucucacgua

SEQ ID NO: 1884495 - RNA, 19 nt, Artificial Sequence
  Description of Artificial Sequence: Synthetic oligonucleotide
uagcugcgggcaagguccu

SEQ ID NO: 1884496 - RNA, 19 nt, Artificial Sequence
  Description of Artificial Sequence: Synthetic oligonucleotide
aucuggcuagcuggggcca

SEQ ID NO: 1884497 - RNA, 19 nt, Artificial Sequence
  Description of Artificial Sequence: Synthetic oligonucleotide
gcaucgcuuccuuccuucc

SEQ ID NO: 1884498 - RNA, 19 nt, Artificial Sequence
  Description of Artificial Sequence: Synthetic oligonucleotide
auguuucaauguaggggau

SEQ ID NO: 1884499 - RNA, 19 nt, Artificial Sequence
  Description of Artificial Sequence: Synthetic oligonucleotide
ucucaucggguggguucag

SEQ ID NO: 1884500 - RNA, 19 nt, Artificial Sequence
  Description of Artificial Sequence: Synthetic oligonucleotide
guaguuuaugcugccgaau

SEQ ID NO: 1884501 - RNA, 19 nt, Artificial Sequence
  Description of Artificial Sequence: Synthetic oligonucleotide
uggcuagcuggggccacug

SEQ ID NO: 1884502 - RNA, 19 nt, Artificial Sequence
  Description of Artificial Sequence: Synthetic oligonucleotide
uuccgguaggaguccucua

SEQ ID NO: 1884503 - RNA, 19 nt, Artificial Sequence
  Description of Artificial Sequence: Synthetic oligonucleotide
caucgcuucuauagaggcu

SEQ ID NO: 1884504 - RNA, 19 nt, Artificial Sequence
  Description of Artificial Sequence: Synthetic oligonucleotide
gccccauaggcacccgaag

SEQ ID NO: 1884505 - RNA, 19 nt, Artificial Sequence
  Description of Artificial Sequence: Synthetic oligonucleotide
caccucuguccaccauccc

SEQ ID NO: 1884506 - RNA, 19 nt, Artificial Sequence
  Description of Artificial Sequence: Synthetic oligonucleotide
cugcauccggcaccuccac

SEQ ID NO: 1884507 - RNA, 19 nt, Artificial Sequence
  Description of Artificial Sequence: Synthetic oligonucleotide
uggggccacugccccagau

SEQ ID NO: 1884508 - RNA, 19 nt, Artificial Sequence
  Description of Artificial Sequence: Synthetic oligonucleotide
uccguccgcggcgggugcg

SEQ ID NO: 1884509 - RNA, 19 nt, Artificial Sequence
  Description of Artificial Sequence: Synthetic oligonucleotide
ggucauacucguccacaaa

SEQ ID NO: 1884510 - RNA, 19 nt, Artificial Sequence
  Description of Artificial Sequence: Synthetic oligonucleotide
ugggccugccgagacucaa

SEQ ID NO: 1884511 - RNA, 19 nt, Artificial Sequence
  Description of Artificial Sequence: Synthetic oligonucleotide
ggccugccgagacucaaca

SEQ ID NO: 1884512 - RNA, 19 nt, Artificial Sequence
  Description of Artificial Sequence: Synthetic oligonucleotide
ucaugcagccagggccacu

SEQ ID NO: 1884513 - RNA, 19 nt, Artificial Sequence
  Description of Artificial Sequence: Synthetic oligonucleotide
gcacccgaagggaacugag

SEQ ID NO: 1884514 - RNA, 19 nt, Artificial Sequence
  Description of Artificial Sequence: Synthetic oligonucleotide
cugccgagacucaacaguu

SEQ ID NO: 1884515 - RNA, 19 nt, Artificial Sequence
  Description of Artificial Sequence: Synthetic oligonucleotide
ggagcuccugccccaccgc

SEQ ID NO: 1884516 - RNA, 19 nt, Artificial Sequence
  Description of Artificial Sequence: Synthetic oligonucleotide
ggacaucagaguggauaug

SEQ ID NO: 1884517 - RNA, 19 nt, Artificial Sequence
  Description of Artificial Sequence: Synthetic oligonucleotide
cgcgcaugagcuccguccg

SEQ ID NO: 1884518 - RNA, 19 nt, Artificial Sequence
  Description of Artificial Sequence: Synthetic oligonucleotide
gauguccagcagacauguc

SEQ ID NO: 1884519 - RNA, 19 nt, Artificial Sequence
  Description of Artificial Sequence: Synthetic oligonucleotide
gcucaugcagccagggcca

SEQ ID NO: 1884520 - RNA, 19 nt, Artificial Sequence
  Description of Artificial Sequence: Synthetic oligonucleotide
gaaguucaucuggcuagcu

SEQ ID NO: 1884521 - RNA, 19 nt, Artificial Sequence
  Description of Artificial Sequence: Synthetic oligonucleotide
gccugccgagacucaacag

SEQ ID NO: 1884522 - RNA, 19 nt, Artificial Sequence
  Description of Artificial Sequence: Synthetic oligonucleotide
cccugugcgcauguacugg

SEQ ID NO: 1884523 - RNA, 19 nt, Artificial Sequence
  Description of Artificial Sequence: Synthetic oligonucleotide
cugccucaccuggugucag

SEQ ID NO: 1884524 - RNA, 19 nt, Artificial Sequence
  Description of Artificial Sequence: Synthetic oligonucleotide
gggugccaguggcaauagg

SEQ ID NO: 1884525 - RNA, 19 nt, Artificial Sequence
  Description of Artificial Sequence: Synthetic oligonucleotide
ccgaaucucacguacuagu

SEQ ID NO: 1884526 - RNA, 19 nt, Artificial Sequence
  Description of Artificial Sequence: Synthetic oligonucleotide
caguucgagcagccagguc

SEQ ID NO: 1884527 - RNA, 19 nt, Artificial Sequence
  Description of Artificial Sequence: Synthetic oligonucleotide
ccgguaggaguccucuaug

SEQ ID NO: 1884528 - RNA, 19 nt, Artificial Sequence
  Description of Artificial Sequence: Synthetic oligonucleotide
uggucccucauggcacuau

SEQ ID NO: 1884529 - RNA, 19 nt, Artificial Sequence
  Description of Artificial Sequence: Synthetic oligonucleotide
guuuccgguaggaguccuc

SEQ ID NO: 1884530 - RNA, 19 nt, Artificial Sequence
  Description of Artificial Sequence: Synthetic oligonucleotide
gacuggcuccagcaucgcu

SEQ ID NO: 1884531 - RNA, 19 nt, Artificial Sequence
  Description of Artificial Sequence: Synthetic oligonucleotide
cgucugagucuuucacccg

SEQ ID NO: 1884532 - RNA, 19 nt, Artificial Sequence
  Description of Artificial Sequence: Synthetic oligonucleotide
ccuccucccugcauccggc

SEQ ID NO: 1884533 - RNA, 19 nt, Artificial Sequence
  Description of Artificial Sequence: Synthetic oligonucleotide
gcgggugcggcucgggcug

SEQ ID NO: 1884534 - RNA, 19 nt, Artificial Sequence
  Description of Artificial Sequence: Synthetic oligonucleotide
uucgagcagccaggucaca

SEQ ID NO: 1884535 - RNA, 19 nt, Artificial Sequence
  Description of Artificial Sequence: Synthetic oligonucleotide
cugcugugucuaagauguc

SEQ ID NO: 1884536 - RNA, 19 nt, Artificial Sequence
  Description of Artificial Sequence: Synthetic oligonucleotide
cguccugagccugugccgg

SEQ ID NO: 1884537 - RNA, 19 nt, Artificial Sequence
  Description of Artificial Sequence: Synthetic oligonucleotide
ccugugccccauaggcacc

SEQ ID NO: 1884538 - RNA, 19 nt, Artificial Sequence
  Description of Artificial Sequence: Synthetic oligonucleotide
ggacgggcacaaaggacac

SEQ ID NO: 1884539 - RNA, 19 nt, Artificial Sequence
  Description of Artificial Sequence: Synthetic oligonucleotide
ccgcuugcuggagugacug

SEQ ID NO: 1884540 - RNA, 19 nt, Artificial Sequence
  Description of Artificial Sequence: Synthetic oligonucleotide
augcagccagggccacucu

SEQ ID NO: 1884541 - RNA, 19 nt, Artificial Sequence
  Description of Artificial Sequence: Synthetic oligonucleotide
ccugccgagacucaacagu

SEQ ID NO: 1884542 - RNA, 19 nt, Artificial Sequence
  Description of Artificial Sequence: Synthetic oligonucleotide
gggcccgcgcaugagcucc

SEQ ID NO: 1884543 - RNA, 19 nt, Artificial Sequence
  Description of Artificial Sequence: Synthetic oligonucleotide
ugggcccgcgcaugagcuc

SEQ ID NO: 1884544 - RNA, 19 nt, Artificial Sequence
  Description of Artificial Sequence: Synthetic oligonucleotide
guugaggacuggggugcca

SEQ ID NO: 1884545 - RNA, 19 nt, Artificial Sequence
  Description of Artificial Sequence: Synthetic oligonucleotide
cucaugcagccagggccac

SEQ ID NO: 1884546 - RNA, 19 nt, Artificial Sequence
  Description of Artificial Sequence: Synthetic oligonucleotide
gcuugaucugcucccugua

SEQ ID NO: 1884547 - RNA, 19 nt, Artificial Sequence
  Description of Artificial Sequence: Synthetic oligonucleotide
cgcaugagcuccguccgcg

SEQ ID NO: 1884548 - RNA, 19 nt, Artificial Sequence
  Description of Artificial Sequence: Synthetic oligonucleotide
accgcuugcuggagugacu

SEQ ID NO: 1884549 - RNA, 19 nt, Artificial Sequence
  Description of Artificial Sequence: Synthetic oligonucleotide
gaguggauaugaaguucau

SEQ ID NO: 1884550 - RNA, 19 nt, Artificial Sequence
  Description of Artificial Sequence: Synthetic oligonucleotide
caucgcuuccuuccuuccu

SEQ ID NO: 1884551 - RNA, 19 nt, Artificial Sequence
  Description of Artificial Sequence: Synthetic oligonucleotide
gugccccauaggcacccga

SEQ ID NO: 1884552 - RNA, 19 nt, Artificial Sequence
  Description of Artificial Sequence: Synthetic oligonucleotide
uuccuuccgucugcaccuc

SEQ ID NO: 1884553 - RNA, 19 nt, Artificial Sequence
  Description of Artificial Sequence: Synthetic oligonucleotide
cugccgaaucucacguacu

SEQ ID NO: 1884554 - RNA, 19 nt, Artificial Sequence
  Description of Artificial Sequence: Synthetic oligonucleotide
cuccguccgcggcgggugc

SEQ ID NO: 1884555 - RNA, 19 nt, Artificial Sequence
  Description of Artificial Sequence: Synthetic oligonucleotide
ccagcgcccaccaccacga

SEQ ID NO: 1884556 - RNA, 19 nt, Artificial Sequence
  Description of Artificial Sequence: Synthetic oligonucleotide
cccugccucaccugguguc

SEQ ID NO: 1884557 - RNA, 19 nt, Artificial Sequence
  Description of Artificial Sequence: Synthetic oligonucleotide
cguaguuuaugcugccgaa

SEQ ID NO: 1884558 - RNA, 19 nt, Artificial Sequence
  Description of Artificial Sequence: Synthetic oligonucleotide
ggacaguucaugacacagu

SEQ ID NO: 1884559 - RNA, 19 nt, Artificial Sequence
  Description of Artificial Sequence: Synthetic oligonucleotide
ccgagacucaacaguucga

SEQ ID NO: 1884560 - RNA, 19 nt, Artificial Sequence
  Description of Artificial Sequence: Synthetic oligonucleotide
ggcacaucgucugagucuu

SEQ ID NO: 1884561 - RNA, 19 nt, Artificial Sequence
  Description of Artificial Sequence: Synthetic oligonucleotide
cgggacgggcacaaaggac

SEQ ID NO: 1884562 - RNA, 19 nt, Artificial Sequence
  Description of Artificial Sequence: Synthetic oligonucleotide
agcuccguccgcggcgggu

SEQ ID NO: 1884563 - RNA, 19 nt, Artificial Sequence
  Description of Artificial Sequence: Synthetic oligonucleotide
ggucccucauggcacuaua

SEQ ID NO: 1884564 - RNA, 19 nt, Artificial Sequence
  Description of Artificial Sequence: Synthetic oligonucleotide
ccauaggcacccgaaggga

SEQ ID NO: 1884565 - RNA, 19 nt, Artificial Sequence
  Description of Artificial Sequence: Synthetic oligonucleotide
ggcaauagggacaguucau

SEQ ID NO: 1884566 - RNA, 19 nt, Artificial Sequence
  Description of Artificial Sequence: Synthetic oligonucleotide
gcacucuuucccacgccuc

SEQ ID NO: 1884567 - RNA, 19 nt, Artificial Sequence
  Description of Artificial Sequence: Synthetic oligonucleotide
gcggacggcggggacucgg

SEQ ID NO: 1884568 - RNA, 19 nt, Artificial Sequence
  Description of Artificial Sequence: Synthetic oligonucleotide
gcggaccggcgcuggcugg

SEQ ID NO: 1884569 - RNA, 19 nt, Artificial Sequence
  Description of Artificial Sequence: Synthetic oligonucleotide
gccucaccuggugucagga

SEQ ID NO: 1884570 - RNA, 19 nt, Artificial Sequence
  Description of Artificial Sequence: Synthetic oligonucleotide
ccgggacgggcacaaagga

SEQ ID NO: 1884571 - RNA, 19 nt, Artificial Sequence
  Description of Artificial Sequence: Synthetic oligonucleotide
gcaagguccugggccugcc

SEQ ID NO: 1884572 - RNA, 19 nt, Artificial Sequence
  Description of Artificial Sequence: Synthetic oligonucleotide
gcuccguccgcggcgggug

SEQ ID NO: 1884573 - RNA, 19 nt, Artificial Sequence
  Description of Artificial Sequence: Synthetic oligonucleotide
ccacguccugagccugugc

SEQ ID NO: 1884574 - RNA, 19 nt, Artificial Sequence
  Description of Artificial Sequence: Synthetic oligonucleotide
caccacgagcuuguauucu

SEQ ID NO: 1884575 - RNA, 19 nt, Artificial Sequence
  Description of Artificial Sequence: Synthetic oligonucleotide
ccugugccgggacgggcac

SEQ ID NO: 1884576 - RNA, 19 nt, Artificial Sequence
  Description of Artificial Sequence: Synthetic oligonucleotide
ccauuggcacaucgucuga

SEQ ID NO: 1884577 - RNA, 19 nt, Artificial Sequence
  Description of Artificial Sequence: Synthetic oligonucleotide
agcugcgggcaagguccug

SEQ ID NO: 1884578 - RNA, 19 nt, Artificial Sequence
  Description of Artificial Sequence: Synthetic oligonucleotide
cgcuucuauagaggcugcc

SEQ ID NO: 1884579 - RNA, 19 nt, Artificial Sequence
  Description of Artificial Sequence: Synthetic oligonucleotide
ggcgggugcggcucgggcu

SEQ ID NO: 1884580 - RNA, 19 nt, Artificial Sequence
  Description of Artificial Sequence: Synthetic oligonucleotide
cagaugucugcuggucccu

SEQ ID NO: 1884581 - RNA, 19 nt, Artificial Sequence
  Description of Artificial Sequence: Synthetic oligonucleotide
ggguucagcuuccguaguu

SEQ ID NO: 1884582 - RNA, 19 nt, Artificial Sequence
  Description of Artificial Sequence: Synthetic oligonucleotide
gccugugccgggacgggca

SEQ ID NO: 1884583 - RNA, 19 nt, Artificial Sequence
  Description of Artificial Sequence: Synthetic oligonucleotide
cucccugcauccggcaccu

SEQ ID NO: 1884584 - RNA, 19 nt, Artificial Sequence
  Description of Artificial Sequence: Synthetic oligonucleotide
cuccacguccugagccugu

SEQ ID NO: 1884585 - RNA, 19 nt, Artificial Sequence
  Description of Artificial Sequence: Synthetic oligonucleotide
ccgcuugaucugcucccug

SEQ ID NO: 1884586 - RNA, 19 nt, Artificial Sequence
  Description of Artificial Sequence: Synthetic oligonucleotide
gggccugccgagacucaac

SEQ ID NO: 1884587 - RNA, 19 nt, Artificial Sequence
  Description of Artificial Sequence: Synthetic oligonucleotide
ccugccucaccugguguca

SEQ ID NO: 1884588 - RNA, 19 nt, Artificial Sequence
  Description of Artificial Sequence: Synthetic oligonucleotide
ccacgagcuuguauucugu

SEQ ID NO: 1884589 - RNA, 19 nt, Artificial Sequence
  Description of Artificial Sequence: Synthetic oligonucleotide
ggcgcggaccggcgcuggc

SEQ ID NO: 1884590 - RNA, 19 nt, Artificial Sequence
  Description of Artificial Sequence: Synthetic oligonucleotide
ccaccaucccuggacugga

SEQ ID NO: 1884591 - RNA, 19 nt, Artificial Sequence
  Description of Artificial Sequence: Synthetic oligonucleotide
ggcccgcgcaugagcuccg

SEQ ID NO: 1884592 - RNA, 19 nt, Artificial Sequence
  Description of Artificial Sequence: Synthetic oligonucleotide
ggaccggcgcuggcugggc

SEQ ID NO: 1884593 - RNA, 19 nt, Artificial Sequence
  Description of Artificial Sequence: Synthetic oligonucleotide
cgcggaccggcgcuggcug

SEQ ID NO: 1884594 - RNA, 19 nt, Artificial Sequence
  Description of Artificial Sequence: Synthetic oligonucleotide
gggugcggcucgggcugcg

SEQ ID NO: 1884595 - RNA, 19 nt, Artificial Sequence
  Description of Artificial Sequence: Synthetic oligonucleotide
cugugccgggacgggcaca

SEQ ID NO: 1884596 - RNA, 19 nt, Artificial Sequence
  Description of Artificial Sequence: Synthetic oligonucleotide
gcgcggacggcggggacuc

SEQ ID NO: 1884597 - RNA, 19 nt, Artificial Sequence
  Description of Artificial Sequence: Synthetic oligonucleotide
gggcgcggaccggcgcugg

SEQ ID NO: 1884598 - RNA, 19 nt, Artificial Sequence
  Description of Artificial Sequence: Synthetic oligonucleotide
cgcuugaucugcucccugu

SEQ ID NO: 1884599 - RNA, 19 nt, Artificial Sequence
  Description of Artificial Sequence: Synthetic oligonucleotide
cggaccggcgcuggcuggg

SEQ ID NO: 1884600 - RNA, 19 nt, Artificial Sequence
  Description of Artificial Sequence: Synthetic oligonucleotide
cuggcuagcuggggccacu

SEQ ID NO: 1884601 - RNA, 19 nt, Artificial Sequence
  Description of Artificial Sequence: Synthetic oligonucleotide
ggucaccucuguccaccau

SEQ ID NO: 1884602 - RNA, 19 nt, Artificial Sequence
  Description of Artificial Sequence: Synthetic oligonucleotide
cagcaucgcuuccuuccuu

SEQ ID NO: 1884603 - RNA, 19 nt, Artificial Sequence
  Description of Artificial Sequence: Synthetic oligonucleotide
gcgcuggcugggcccgcgc

SEQ ID NO: 1884604 - RNA, 19 nt, Artificial Sequence
  Description of Artificial Sequence: Synthetic oligonucleotide
ccguccgcggcgggugcgg

SEQ ID NO: 1884605 - RNA, 19 nt, Artificial Sequence
  Description of Artificial Sequence: Synthetic oligonucleotide
gaccucaggcagggagauu

SEQ ID NO: 1884606 - RNA, 19 nt, Artificial Sequence
  Description of Artificial Sequence: Synthetic oligonucleotide
ggcgcggacggcggggacu

SEQ ID NO: 1884607 - RNA, 19 nt, Artificial Sequence
  Description of Artificial Sequence: Synthetic oligonucleotide
cggguggguucagcuuccg

SEQ ID NO: 1884608 - RNA, 19 nt, Artificial Sequence
  Description of Artificial Sequence: Synthetic oligonucleotide
ccgucugcaccuccucccu

SEQ ID NO: 1884609 - RNA, 19 nt, Artificial Sequence
  Description of Artificial Sequence: Synthetic oligonucleotide
ggcgccgggcgcggacggc

SEQ ID NO: 1884610 - RNA, 19 nt, Artificial Sequence
  Description of Artificial Sequence: Synthetic oligonucleotide
ccaccgcuugcuggaguga

SEQ ID NO: 1884611 - RNA, 19 nt, Artificial Sequence
  Description of Artificial Sequence: Synthetic oligonucleotide
ccucaccuggugucaggau

SEQ ID NO: 1884612 - RNA, 19 nt, Artificial Sequence
  Description of Artificial Sequence: Synthetic oligonucleotide
gugccgggacgggcacaaa

SEQ ID NO: 1884613 - RNA, 19 nt, Artificial Sequence
  Description of Artificial Sequence: Synthetic oligonucleotide
cccuccccugugcgcaugu

SEQ ID NO: 1884614 - RNA, 19 nt, Artificial Sequence
  Description of Artificial Sequence: Synthetic oligonucleotide
ccccaccgcuugcuggagu

SEQ ID NO: 1884615 - RNA, 19 nt, Artificial Sequence
  Description of Artificial Sequence: Synthetic oligonucleotide
gcacaucgucugagucuuu

SEQ ID NO: 1884616 - RNA, 19 nt, Artificial Sequence
  Description of Artificial Sequence: Synthetic oligonucleotide
cggcgcuggcugggcccgc

SEQ ID NO: 1884617 - RNA, 19 nt, Artificial Sequence
  Description of Artificial Sequence: Synthetic oligonucleotide
agaauccuaauccagaacc

SEQ ID NO: 1884618 - RNA, 19 nt, Artificial Sequence
  Description of Artificial Sequence: Synthetic oligonucleotide
cuuauuauguuacagaaag

SEQ ID NO: 1884619 - RNA, 19 nt, Artificial Sequence
  Description of Artificial Sequence: Synthetic oligonucleotide
ucuucauagguauaaaacg

SEQ ID NO: 1884620 - RNA, 19 nt, Artificial Sequence
  Description of Artificial Sequence: Synthetic oligonucleotide
uuauguuacagaaagccag

SEQ ID NO: 1884621 - RNA, 19 nt, Artificial Sequence
  Description of Artificial Sequence: Synthetic oligonucleotide
auagguauaaaacguaggg

SEQ ID NO: 1884622 - RNA, 19 nt, Artificial Sequence
  Description of Artificial Sequence: Synthetic oligonucleotide
agagagauucuuuugauuc

SEQ ID NO: 1884623 - RNA, 19 nt, Artificial Sequence
  Description of Artificial Sequence: Synthetic oligonucleotide
uauuauguuacagaaagcc

SEQ ID NO: 1884624 - RNA, 19 nt, Artificial Sequence
  Description of Artificial Sequence: Synthetic oligonucleotide
uguacauuucaccucauag

SEQ ID NO: 1884625 - RNA, 19 nt, Artificial Sequence
  Description of Artificial Sequence: Synthetic oligonucleotide
uucaccauaacauacaaau

SEQ ID NO: 1884626 - RNA, 19 nt, Artificial Sequence
  Description of Artificial Sequence: Synthetic oligonucleotide
aaagcauuccuucuaaccu

SEQ ID NO: 1884627 - RNA, 19 nt, Artificial Sequence
  Description of Artificial Sequence: Synthetic oligonucleotide
uuugaggaagcucauugcg

SEQ ID NO: 1884628 - RNA, 19 nt, Artificial Sequence
  Description of Artificial Sequence: Synthetic oligonucleotide
acagcauguaaacuaaucg

SEQ ID NO: 1884629 - RNA, 19 nt, Artificial Sequence
  Description of Artificial Sequence: Synthetic oligonucleotide
uguuaaaugggacaguccu

SEQ ID NO: 1884630 - RNA, 19 nt, Artificial Sequence
  Description of Artificial Sequence: Synthetic oligonucleotide
agagguaccaaguucucgc

SEQ ID NO: 1884631 - RNA, 19 nt, Artificial Sequence
  Description of Artificial Sequence: Synthetic oligonucleotide
aaugggacaguccuucuuc

SEQ ID NO: 1884632 - RNA, 19 nt, Artificial Sequence
  Description of Artificial Sequence: Synthetic oligonucleotide
aauggguucaacaucauca

SEQ ID NO: 1884633 - RNA, 19 nt, Artificial Sequence
  Description of Artificial Sequence: Synthetic oligonucleotide
ucgaggauaagcauuuggg

SEQ ID NO: 1884634 - RNA, 19 nt, Artificial Sequence
  Description of Artificial Sequence: Synthetic oligonucleotide
ucuaaccucuccaaugugg

SEQ ID NO: 1884635 - RNA, 19 nt, Artificial Sequence
  Description of Artificial Sequence: Synthetic oligonucleotide
aaaacguagggaugucccc

SEQ ID NO: 1884636 - RNA, 19 nt, Artificial Sequence
  Description of Artificial Sequence: Synthetic oligonucleotide
aauguaaagggucccggag

SEQ ID NO: 1884637 - RNA, 19 nt, Artificial Sequence
  Description of Artificial Sequence: Synthetic oligonucleotide
uuuggcauucaccauaaca

SEQ ID NO: 1884638 - RNA, 19 nt, Artificial Sequence
  Description of Artificial Sequence: Synthetic oligonucleotide
agaaccaucuaaccaagac

SEQ ID NO: 1884639 - RNA, 19 nt, Artificial Sequence
  Description of Artificial Sequence: Synthetic oligonucleotide
cauacaaaugcucucgagg

SEQ ID NO: 1884640 - RNA, 19 nt, Artificial Sequence
  Description of Artificial Sequence: Synthetic oligonucleotide
acuuggaagacaccuagac

SEQ ID NO: 1884641 - RNA, 19 nt, Artificial Sequence
  Description of Artificial Sequence: Synthetic oligonucleotide
guuacagaaagccagugug

SEQ ID NO: 1884642 - RNA, 19 nt, Artificial Sequence
  Description of Artificial Sequence: Synthetic oligonucleotide
uuuaaaucaucucuucagu

SEQ ID NO: 1884643 - RNA, 19 nt, Artificial Sequence
  Description of Artificial Sequence: Synthetic oligonucleotide
aaguaaguuuuggagaagg

SEQ ID NO: 1884644 - RNA, 19 nt, Artificial Sequence
  Description of Artificial Sequence: Synthetic oligonucleotide
acugagaaagcauuccuuc

SEQ ID NO: 1884645 - RNA, 19 nt, Artificial Sequence
  Description of Artificial Sequence: Synthetic oligonucleotide
uaaaacguagggauguccc

SEQ ID NO: 1884646 - RNA, 19 nt, Artificial Sequence
  Description of Artificial Sequence: Synthetic oligonucleotide
uuacuuauuauguuacaga

SEQ ID NO: 1884647 - RNA, 19 nt, Artificial Sequence
  Description of Artificial Sequence: Synthetic oligonucleotide
guacauuucaccucauagg

SEQ ID NO: 1884648 - RNA, 19 nt, Artificial Sequence
  Description of Artificial Sequence: Synthetic oligonucleotide
uuacugaaucuucuguccg

SEQ ID NO: 1884649 - RNA, 19 nt, Artificial Sequence
  Description of Artificial Sequence: Synthetic oligonucleotide
uaacauacaaaugcucucg

SEQ ID NO: 1884650 - RNA, 19 nt, Artificial Sequence
  Description of Artificial Sequence: Synthetic oligonucleotide
aaucuaaauucagcaaugg

SEQ ID NO: 1884651 - RNA, 19 nt, Artificial Sequence
  Description of Artificial Sequence: Synthetic oligonucleotide
uuaaaucaucucuucagug

SEQ ID NO: 1884652 - RNA, 19 nt, Artificial Sequence
  Description of Artificial Sequence: Synthetic oligonucleotide
guugauaaaggucucaguc

SEQ ID NO: 1884653 - RNA, 19 nt, Artificial Sequence
  Description of Artificial Sequence: Synthetic oligonucleotide
uacuuauuauguuacagaa

SEQ ID NO: 1884654 - RNA, 19 nt, Artificial Sequence
  Description of Artificial Sequence: Synthetic oligonucleotide
agguauaaaacguagggau

SEQ ID NO: 1884655 - RNA, 19 nt, Artificial Sequence
  Description of Artificial Sequence: Synthetic oligonucleotide
cuggcauucacacauugcg

SEQ ID NO: 1884656 - RNA, 19 nt, Artificial Sequence
  Description of Artificial Sequence: Synthetic oligonucleotide
uguuuaaaucaucucuuca

SEQ ID NO: 1884657 - RNA, 19 nt, Artificial Sequence
  Description of Artificial Sequence: Synthetic oligonucleotide
auuacuuauuauguuacag

SEQ ID NO: 1884658 - RNA, 19 nt, Artificial Sequence
  Description of Artificial Sequence: Synthetic oligonucleotide
uccaaauuuggcauucacc

SEQ ID NO: 1884659 - RNA, 19 nt, Artificial Sequence
  Description of Artificial Sequence: Synthetic oligonucleotide
cuuacugaaucuucugucc

SEQ ID NO: 1884660 - RNA, 19 nt, Artificial Sequence
  Description of Artificial Sequence: Synthetic oligonucleotide
aaaacaucaagaguuacuu

SEQ ID NO: 1884661 - RNA, 19 nt, Artificial Sequence
  Description of Artificial Sequence: Synthetic oligonucleotide
aucuaaccaagacaggcgg

SEQ ID NO: 1884662 - RNA, 19 nt, Artificial Sequence
  Description of Artificial Sequence: Synthetic oligonucleotide
ucgccuacuguuauaagag

SEQ ID NO: 1884663 - RNA, 19 nt, Artificial Sequence
  Description of Artificial Sequence: Synthetic oligonucleotide
ugugguaucuaccuccaug

SEQ ID NO: 1884664 - RNA, 19 nt, Artificial Sequence
  Description of Artificial Sequence: Synthetic oligonucleotide
cauguaaacuaaucguggg

SEQ ID NO: 1884665 - RNA, 19 nt, Artificial Sequence
  Description of Artificial Sequence: Synthetic oligonucleotide
auacaaaugcucucgagga

SEQ ID NO: 1884666 - RNA, 19 nt, Artificial Sequence
  Description of Artificial Sequence: Synthetic oligonucleotide
augugcacacagcaaaggc

SEQ ID NO: 1884667 - RNA, 19 nt, Artificial Sequence
  Description of Artificial Sequence: Synthetic oligonucleotide
uugaggaagcucauugcgg

SEQ ID NO: 1884668 - RNA, 19 nt, Artificial Sequence
  Description of Artificial Sequence: Synthetic oligonucleotide
aucuaaauucagcaauggg

SEQ ID NO: 1884669 - RNA, 19 nt, Artificial Sequence
  Description of Artificial Sequence: Synthetic oligonucleotide
uguaaagggucccggagcc

SEQ ID NO: 1884670 - RNA, 19 nt, Artificial Sequence
  Description of Artificial Sequence: Synthetic oligonucleotide
auguaaacuaaucgugggg

SEQ ID NO: 1884671 - RNA, 19 nt, Artificial Sequence
  Description of Artificial Sequence: Synthetic oligonucleotide
agauuacuuauuauguuac

SEQ ID NO: 1884672 - RNA, 19 nt, Artificial Sequence
  Description of Artificial Sequence: Synthetic oligonucleotide
acuguuauaagagaauugu

SEQ ID NO: 1884673 - RNA, 19 nt, Artificial Sequence
  Description of Artificial Sequence: Synthetic oligonucleotide
uauagucugucuugcaaag

SEQ ID NO: 1884674 - RNA, 19 nt, Artificial Sequence
  Description of Artificial Sequence: Synthetic oligonucleotide
aaaucuaaauucagcaaug

SEQ ID NO: 1884675 - RNA, 19 nt, Artificial Sequence
  Description of Artificial Sequence: Synthetic oligonucleotide
uccuaauccagaaccaucu

SEQ ID NO: 1884676 - RNA, 19 nt, Artificial Sequence
  Description of Artificial Sequence: Synthetic oligonucleotide
cauaaucucuuacugaauc

SEQ ID NO: 1884677 - RNA, 19 nt, Artificial Sequence
  Description of Artificial Sequence: Synthetic oligonucleotide
uguaaacuaaucguggggu

SEQ ID NO: 1884678 - RNA, 19 nt, Artificial Sequence
  Description of Artificial Sequence: Synthetic oligonucleotide
uccagaaccaucuaaccaa

SEQ ID NO: 1884679 - RNA, 19 nt, Artificial Sequence
  Description of Artificial Sequence: Synthetic oligonucleotide
gaggauaagcauuuggguc

SEQ ID NO: 1884680 - RNA, 19 nt, Artificial Sequence
  Description of Artificial Sequence: Synthetic oligonucleotide
auaaaacguagggaugucc

SEQ ID NO: 1884681 - RNA, 19 nt, Artificial Sequence
  Description of Artificial Sequence: Synthetic oligonucleotide
uacuguuauaagagaauug

SEQ ID NO: 1884682 - RNA, 19 nt, Artificial Sequence
  Description of Artificial Sequence: Synthetic oligonucleotide
uuauaagagaauuguuuaa

SEQ ID NO: 1884683 - RNA, 19 nt, Artificial Sequence
  Description of Artificial Sequence: Synthetic oligonucleotide
ugcucacagacugagaaag

SEQ ID NO: 1884684 - RNA, 19 nt, Artificial Sequence
  Description of Artificial Sequence: Synthetic oligonucleotide
uaucgcugggcacaaaucu

SEQ ID NO: 1884685 - RNA, 19 nt, Artificial Sequence
  Description of Artificial Sequence: Synthetic oligonucleotide
uauaagagaauuguuuaaa

SEQ ID NO: 1884686 - RNA, 19 nt, Artificial Sequence
  Description of Artificial Sequence: Synthetic oligonucleotide
acuauuaacaaagaacaaa

SEQ ID NO: 1884687 - RNA, 19 nt, Artificial Sequence
  Description of Artificial Sequence: Synthetic oligonucleotide
cacauugcggugaacauug

SEQ ID NO: 1884688 - RNA, 19 nt, Artificial Sequence
  Description of Artificial Sequence: Synthetic oligonucleotide
caucuaaccaagacaggcg

SEQ ID NO: 1884689 - RNA, 19 nt, Artificial Sequence
  Description of Artificial Sequence: Synthetic oligonucleotide
uucagugaucaacaucugc

SEQ ID NO: 1884690 - RNA, 19 nt, Artificial Sequence
  Description of Artificial Sequence: Synthetic oligonucleotide
uuuugauucuucuccaaau

SEQ ID NO: 1884691 - RNA, 19 nt, Artificial Sequence
  Description of Artificial Sequence: Synthetic oligonucleotide
uacuuugcagacuucauua

SEQ ID NO: 1884692 - RNA, 19 nt, Artificial Sequence
  Description of Artificial Sequence: Synthetic oligonucleotide
uaagcauuugggucccugg

SEQ ID NO: 1884693 - RNA, 19 nt, Artificial Sequence
  Description of Artificial Sequence: Synthetic oligonucleotide
uuauagucugucuugcaaa

SEQ ID NO: 1884694 - RNA, 19 nt, Artificial Sequence
  Description of Artificial Sequence: Synthetic oligonucleotide
gacuggaagagguaccaag

SEQ ID NO: 1884695 - RNA, 19 nt, Artificial Sequence
  Description of Artificial Sequence: Synthetic oligonucleotide
agacccaggaaguuugggg

SEQ ID NO: 1884696 - RNA, 19 nt, Artificial Sequence
  Description of Artificial Sequence: Synthetic oligonucleotide
ucuuacugaaucuucuguc

SEQ ID NO: 1884697 - RNA, 19 nt, Artificial Sequence
  Description of Artificial Sequence: Synthetic oligonucleotide
ugggcacaaaucuaaauuc

SEQ ID NO: 1884698 - RNA, 19 nt, Artificial Sequence
  Description of Artificial Sequence: Synthetic oligonucleotide
uaaucgugggguauuccag

SEQ ID NO: 1884699 - RNA, 19 nt, Artificial Sequence
  Description of Artificial Sequence: Synthetic oligonucleotide
aggaucugggugcaaggcc

SEQ ID NO: 1884700 - RNA, 19 nt, Artificial Sequence
  Description of Artificial Sequence: Synthetic oligonucleotide
uauguuacagaaagccagu

SEQ ID NO: 1884701 - RNA, 19 nt, Artificial Sequence
  Description of Artificial Sequence: Synthetic oligonucleotide
aaggcaggaauuagaggcc

SEQ ID NO: 1884702 - RNA, 19 nt, Artificial Sequence
  Description of Artificial Sequence: Synthetic oligonucleotide
uggcauucacacauugcgg

SEQ ID NO: 1884703 - RNA, 19 nt, Artificial Sequence
  Description of Artificial Sequence: Synthetic oligonucleotide
gugguaucuaccuccaugc

SEQ ID NO: 1884704 - RNA, 19 nt, Artificial Sequence
  Description of Artificial Sequence: Synthetic oligonucleotide
auuauagucugucuugcaa

SEQ ID NO: 1884705 - RNA, 19 nt, Artificial Sequence
  Description of Artificial Sequence: Synthetic oligonucleotide
uccagugagaauccuaauc

SEQ ID NO: 1884706 - RNA, 19 nt, Artificial Sequence
  Description of Artificial Sequence: Synthetic oligonucleotide
uccaaugcugacuuaucgc

SEQ ID NO: 1884707 - RNA, 19 nt, Artificial Sequence
  Description of Artificial Sequence: Synthetic oligonucleotide
uguuauauuggcugcucac

SEQ ID NO: 1884708 - RNA, 19 nt, Artificial Sequence
  Description of Artificial Sequence: Synthetic oligonucleotide
gaaccaucuaaccaagaca

SEQ ID NO: 1884709 - RNA, 19 nt, Artificial Sequence
  Description of Artificial Sequence: Synthetic oligonucleotide
cuaaccucuccaauguggc

SEQ ID NO: 1884710 - RNA, 19 nt, Artificial Sequence
  Description of Artificial Sequence: Synthetic oligonucleotide
uuacagaaagccaguguga

SEQ ID NO: 1884711 - RNA, 19 nt, Artificial Sequence
  Description of Artificial Sequence: Synthetic oligonucleotide
ucaccauaacauacaaaug

SEQ ID NO: 1884712 - RNA, 19 nt, Artificial Sequence
  Description of Artificial Sequence: Synthetic oligonucleotide
ugagaaccacaaauacccg

SEQ ID NO: 1884713 - RNA, 19 nt, Artificial Sequence
  Description of Artificial Sequence: Synthetic oligonucleotide
uguuacagaaagccagugu

SEQ ID NO: 1884714 - RNA, 19 nt, Artificial Sequence
  Description of Artificial Sequence: Synthetic oligonucleotide
uggugugguaucuaccucc

SEQ ID NO: 1884715 - RNA, 19 nt, Artificial Sequence
  Description of Artificial Sequence: Synthetic oligonucleotide
uacugaaucuucuguccgg

SEQ ID NO: 1884716 - RNA, 19 nt, Artificial Sequence
  Description of Artificial Sequence: Synthetic oligonucleotide
gagcuuuguacauuucacc

SEQ ID NO: 1884717 - RNA, 19 nt, Artificial Sequence
  Description of Artificial Sequence: Synthetic oligonucleotide
aacauacaaaugcucucga

SEQ ID NO: 1884718 - RNA, 19 nt, Artificial Sequence
  Description of Artificial Sequence: Synthetic oligonucleotide
gacagaugugcacacagca

SEQ ID NO: 1884719 - RNA, 19 nt, Artificial Sequence
  Description of Artificial Sequence: Synthetic oligonucleotide
acaaaucuaaauucagcaa

SEQ ID NO: 1884720 - RNA, 19 nt, Artificial Sequence
  Description of Artificial Sequence: Synthetic oligonucleotide
cuuggaagacaccuagacc

SEQ ID NO: 1884721 - RNA, 19 nt, Artificial Sequence
  Description of Artificial Sequence: Synthetic oligonucleotide
aagagguaccaaguucucg

SEQ ID NO: 1884722 - RNA, 19 nt, Artificial Sequence
  Description of Artificial Sequence: Synthetic oligonucleotide
ucacacauugcggugaaca

SEQ ID NO: 1884723 - RNA, 19 nt, Artificial Sequence
  Description of Artificial Sequence: Synthetic oligonucleotide
ugucuugcaaaguaaguuu

SEQ ID NO: 1884724 - RNA, 19 nt, Artificial Sequence
  Description of Artificial Sequence: Synthetic oligonucleotide
cuccaaugcugacuuaucg

SEQ ID NO: 1884725 - RNA, 19 nt, Artificial Sequence
  Description of Artificial Sequence: Synthetic oligonucleotide
gaaucuucuguccggacuc

SEQ ID NO: 1884726 - RNA, 19 nt, Artificial Sequence
  Description of Artificial Sequence: Synthetic oligonucleotide
aaucgugggguauuccagu

SEQ ID NO: 1884727 - RNA, 19 nt, Artificial Sequence
  Description of Artificial Sequence: Synthetic oligonucleotide
uagguauaaaacguaggga

SEQ ID NO: 1884728 - RNA, 19 nt, Artificial Sequence
  Description of Artificial Sequence: Synthetic oligonucleotide
ggguucaacaucaucaccg

SEQ ID NO: 1884729 - RNA, 19 nt, Artificial Sequence
  Description of Artificial Sequence: Synthetic oligonucleotide
uugauucuucuccaaauuu

SEQ ID NO: 1884730 - RNA, 19 nt, Artificial Sequence
  Description of Artificial Sequence: Synthetic oligonucleotide
aguccuucuucauagguau

SEQ ID NO: 1884731 - RNA, 19 nt, Artificial Sequence
  Description of Artificial Sequence: Synthetic oligonucleotide
uuguucaugugcuuccaca

SEQ ID NO: 1884732 - RNA, 19 nt, Artificial Sequence
  Description of Artificial Sequence: Synthetic oligonucleotide
ucaguuaauucaccuuugu

SEQ ID NO: 1884733 - RNA, 19 nt, Artificial Sequence
  Description of Artificial Sequence: Synthetic oligonucleotide
uggaagagguaccaaguuc

SEQ ID NO: 1884734 - RNA, 19 nt, Artificial Sequence
  Description of Artificial Sequence: Synthetic oligonucleotide
cucgaggauaagcauuugg

SEQ ID NO: 1884735 - RNA, 19 nt, Artificial Sequence
  Description of Artificial Sequence: Synthetic oligonucleotide
ccagugagaauccuaaucc

SEQ ID NO: 1884736 - RNA, 19 nt, Artificial Sequence
  Description of Artificial Sequence: Synthetic oligonucleotide
acauacaaaugcucucgag

SEQ ID NO: 1884737 - RNA, 19 nt, Artificial Sequence
  Description of Artificial Sequence: Synthetic oligonucleotide
cauaacauacaaaugcucu

SEQ ID NO: 1884738 - RNA, 19 nt, Artificial Sequence
  Description of Artificial Sequence: Synthetic oligonucleotide
aggucucagucucuucugc

SEQ ID NO: 1884739 - RNA, 19 nt, Artificial Sequence
  Description of Artificial Sequence: Synthetic oligonucleotide
accacaaauacccgcucag

SEQ ID NO: 1884740 - RNA, 19 nt, Artificial Sequence
  Description of Artificial Sequence: Synthetic oligonucleotide
aagacaccuagacccagga

SEQ ID NO: 1884741 - RNA, 19 nt, Artificial Sequence
  Description of Artificial Sequence: Synthetic oligonucleotide
aaucuucuguccggacucc

SEQ ID NO: 1884742 - RNA, 19 nt, Artificial Sequence
  Description of Artificial Sequence: Synthetic oligonucleotide
auacccgcucaguuaauuc

SEQ ID NO: 1884743 - RNA, 19 nt, Artificial Sequence
  Description of Artificial Sequence: Synthetic oligonucleotide
ucuaaccaagacaggcggc

SEQ ID NO: 1884744 - RNA, 19 nt, Artificial Sequence
  Description of Artificial Sequence: Synthetic oligonucleotide
uguugauaaaggucucagu

SEQ ID NO: 1884745 - RNA, 19 nt, Artificial Sequence
  Description of Artificial Sequence: Synthetic oligonucleotide
gauuacuuauuauguuaca

SEQ ID NO: 1884746 - RNA, 19 nt, Artificial Sequence
  Description of Artificial Sequence: Synthetic oligonucleotide
aguuacuuugcagacuuca

SEQ ID NO: 1884747 - RNA, 19 nt, Artificial Sequence
  Description of Artificial Sequence: Synthetic oligonucleotide
agugagaauccuaauccag

SEQ ID NO: 1884748 - RNA, 19 nt, Artificial Sequence
  Description of Artificial Sequence: Synthetic oligonucleotide
aacuaaucgugggguauuc

SEQ ID NO: 1884749 - RNA, 19 nt, Artificial Sequence
  Description of Artificial Sequence: Synthetic oligonucleotide
aucguaaucaucagagucu

SEQ ID NO: 1884750 - RNA, 19 nt, Artificial Sequence
  Description of Artificial Sequence: Synthetic oligonucleotide
uaaauucagcaauggguuc

SEQ ID NO: 1884751 - RNA, 19 nt, Artificial Sequence
  Description of Artificial Sequence: Synthetic oligonucleotide
auugcggugaacauugccu

SEQ ID NO: 1884752 - RNA, 19 nt, Artificial Sequence
  Description of Artificial Sequence: Synthetic oligonucleotide
uacccgcucaguuaauuca

SEQ ID NO: 1884753 - RNA, 19 nt, Artificial Sequence
  Description of Artificial Sequence: Synthetic oligonucleotide
acaaauacccgcucaguua

SEQ ID NO: 1884754 - RNA, 19 nt, Artificial Sequence
  Description of Artificial Sequence: Synthetic oligonucleotide
ugacagaugugcacacagc

SEQ ID NO: 1884755 - RNA, 19 nt, Artificial Sequence
  Description of Artificial Sequence: Synthetic oligonucleotide
acagauuacuuauuauguu

SEQ ID NO: 1884756 - RNA, 19 nt, Artificial Sequence
  Description of Artificial Sequence: Synthetic oligonucleotide
ggacaguccuucuucauag

SEQ ID NO: 1884757 - RNA, 19 nt, Artificial Sequence
  Description of Artificial Sequence: Synthetic oligonucleotide
ugacuuaucgcugggcaca

SEQ ID NO: 1884758 - RNA, 19 nt, Artificial Sequence
  Description of Artificial Sequence: Synthetic oligonucleotide
cuguuaaaugggacagucc

SEQ ID NO: 1884759 - RNA, 19 nt, Artificial Sequence
  Description of Artificial Sequence: Synthetic oligonucleotide
cuucauagguauaaaacgu

SEQ ID NO: 1884760 - RNA, 19 nt, Artificial Sequence
  Description of Artificial Sequence: Synthetic oligonucleotide
gcaaaguaaguuuuggaga

SEQ ID NO: 1884761 - RNA, 19 nt, Artificial Sequence
  Description of Artificial Sequence: Synthetic oligonucleotide
aguuggugugguaucuacc

SEQ ID NO: 1884762 - RNA, 19 nt, Artificial Sequence
  Description of Artificial Sequence: Synthetic oligonucleotide
aaccaagacaggcggcucu

SEQ ID NO: 1884763 - RNA, 19 nt, Artificial Sequence
  Description of Artificial Sequence: Synthetic oligonucleotide
uggguucaacaucaucacc

SEQ ID NO: 1884764 - RNA, 19 nt, Artificial Sequence
  Description of Artificial Sequence: Synthetic oligonucleotide
aggccuacuuggaagacac

SEQ ID NO: 1884765 - RNA, 19 nt, Artificial Sequence
  Description of Artificial Sequence: Synthetic oligonucleotide
cucauaggcuuucuggcug

SEQ ID NO: 1884766 - RNA, 19 nt, Artificial Sequence
  Description of Artificial Sequence: Synthetic oligonucleotide
acuaaucgugggguauucc

SEQ ID NO: 1884767 - RNA, 19 nt, Artificial Sequence
  Description of Artificial Sequence: Synthetic oligonucleotide
cuucccguucagcacagcc

SEQ ID NO: 1884768 - RNA, 19 nt, Artificial Sequence
  Description of Artificial Sequence: Synthetic oligonucleotide
ucacagacugagaaagcau

SEQ ID NO: 1884769 - RNA, 19 nt, Artificial Sequence
  Description of Artificial Sequence: Synthetic oligonucleotide
ugucucauuauagucuguc

SEQ ID NO: 1884770 - RNA, 19 nt, Artificial Sequence
  Description of Artificial Sequence: Synthetic oligonucleotide
ggguauuccagugagaauc

SEQ ID NO: 1884771 - RNA, 19 nt, Artificial Sequence
  Description of Artificial Sequence: Synthetic oligonucleotide
cuaaucgugggguauucca

SEQ ID NO: 1884772 - RNA, 19 nt, Artificial Sequence
  Description of Artificial Sequence: Synthetic oligonucleotide
cuaaauucagcaauggguu

SEQ ID NO: 1884773 - RNA, 19 nt, Artificial Sequence
  Description of Artificial Sequence: Synthetic oligonucleotide
uuaucgcugggcacaaauc

SEQ ID NO: 1884774 - RNA, 19 nt, Artificial Sequence
  Description of Artificial Sequence: Synthetic oligonucleotide
aagaguuacuuugcagacu

SEQ ID NO: 1884775 - RNA, 19 nt, Artificial Sequence
  Description of Artificial Sequence: Synthetic oligonucleotide
agagaauuguuuaaaucau

SEQ ID NO: 1884776 - RNA, 19 nt, Artificial Sequence
  Description of Artificial Sequence: Synthetic oligonucleotide
agaaccacaaauacccgcu

SEQ ID NO: 1884777 - RNA, 19 nt, Artificial Sequence
  Description of Artificial Sequence: Synthetic oligonucleotide
aaaugggacaguccuucuu

SEQ ID NO: 1884778 - RNA, 19 nt, Artificial Sequence
  Description of Artificial Sequence: Synthetic oligonucleotide
caaaucuaaauucagcaau

SEQ ID NO: 1884779 - RNA, 19 nt, Artificial Sequence
  Description of Artificial Sequence: Synthetic oligonucleotide
auuagaggccuacuuggaa

SEQ ID NO: 1884780 - RNA, 19 nt, Artificial Sequence
  Description of Artificial Sequence: Synthetic oligonucleotide
auguuauauuggcugcuca

SEQ ID NO: 1884781 - RNA, 19 nt, Artificial Sequence
  Description of Artificial Sequence: Synthetic oligonucleotide
gugagcuuuguacauuuca

SEQ ID NO: 1884782 - RNA, 19 nt, Artificial Sequence
  Description of Artificial Sequence: Synthetic oligonucleotide
uucccguucagcacagccu

SEQ ID NO: 1884783 - RNA, 19 nt, Artificial Sequence
  Description of Artificial Sequence: Synthetic oligonucleotide
cauugcggugaacauugcc

SEQ ID NO: 1884784 - RNA, 19 nt, Artificial Sequence
  Description of Artificial Sequence: Synthetic oligonucleotide
ucccguucagcacagccuc

SEQ ID NO: 1884785 - RNA, 19 nt, Artificial Sequence
  Description of Artificial Sequence: Synthetic oligonucleotide
gagaauuguuuaaaucauc

SEQ ID NO: 1884786 - RNA, 19 nt, Artificial Sequence
  Description of Artificial Sequence: Synthetic oligonucleotide
auauucuucuccaucguaa

SEQ ID NO: 1884787 - RNA, 19 nt, Artificial Sequence
  Description of Artificial Sequence: Synthetic oligonucleotide
cuccgcaauguaaaggguc

SEQ ID NO: 1884788 - RNA, 19 nt, Artificial Sequence
  Description of Artificial Sequence: Synthetic oligonucleotide
ggagccgagacccuucccg

SEQ ID NO: 1884789 - RNA, 19 nt, Artificial Sequence
  Description of Artificial Sequence: Synthetic oligonucleotide
auccuaauccagaaccauc

SEQ ID NO: 1884790 - RNA, 19 nt, Artificial Sequence
  Description of Artificial Sequence: Synthetic oligonucleotide
uacaaaugcucucgaggau

SEQ ID NO: 1884791 - RNA, 19 nt, Artificial Sequence
  Description of Artificial Sequence: Synthetic oligonucleotide
gucugucuugcaaaguaag

SEQ ID NO: 1884792 - RNA, 19 nt, Artificial Sequence
  Description of Artificial Sequence: Synthetic oligonucleotide
ugguaucuaccuccaugcc

SEQ ID NO: 1884793 - RNA, 19 nt, Artificial Sequence
  Description of Artificial Sequence: Synthetic oligonucleotide
caaugcugacuuaucgcug

SEQ ID NO: 1884794 - RNA, 19 nt, Artificial Sequence
  Description of Artificial Sequence: Synthetic oligonucleotide
guuauauuggcugcucaca

SEQ ID NO: 1884795 - RNA, 19 nt, Artificial Sequence
  Description of Artificial Sequence: Synthetic oligonucleotide
uugcggugaacauugccuc

SEQ ID NO: 1884796 - RNA, 19 nt, Artificial Sequence
  Description of Artificial Sequence: Synthetic oligonucleotide
ugggucccuggaaacagca

SEQ ID NO: 1884797 - RNA, 19 nt, Artificial Sequence
  Description of Artificial Sequence: Synthetic oligonucleotide
cuuucuggcugacagaugu

SEQ ID NO: 1884798 - RNA, 19 nt, Artificial Sequence
  Description of Artificial Sequence: Synthetic oligonucleotide
guauaaaacguagggaugu

SEQ ID NO: 1884799 - RNA, 19 nt, Artificial Sequence
  Description of Artificial Sequence: Synthetic oligonucleotide
ucauuacagauuacuuauu

SEQ ID NO: 1884800 - RNA, 19 nt, Artificial Sequence
  Description of Artificial Sequence: Synthetic oligonucleotide
ucgcugggcacaaaucuaa

SEQ ID NO: 1884801 - RNA, 19 nt, Artificial Sequence
  Description of Artificial Sequence: Synthetic oligonucleotide
gguauaaaacguagggaug

SEQ ID NO: 1884802 - RNA, 19 nt, Artificial Sequence
  Description of Artificial Sequence: Synthetic oligonucleotide
ccaucuaaccaagacaggc

SEQ ID NO: 1884803 - RNA, 19 nt, Artificial Sequence
  Description of Artificial Sequence: Synthetic oligonucleotide
cuaauccagaaccaucuaa

SEQ ID NO: 1884804 - RNA, 19 nt, Artificial Sequence
  Description of Artificial Sequence: Synthetic oligonucleotide
cugacuuaucgcugggcac

SEQ ID NO: 1884805 - RNA, 19 nt, Artificial Sequence
  Description of Artificial Sequence: Synthetic oligonucleotide
aucgugggguauuccagug

SEQ ID NO: 1884806 - RNA, 19 nt, Artificial Sequence
  Description of Artificial Sequence: Synthetic oligonucleotide
uaaaugggacaguccuucu

SEQ ID NO: 1884807 - RNA, 19 nt, Artificial Sequence
  Description of Artificial Sequence: Synthetic oligonucleotide
acuggaagagguaccaagu

SEQ ID NO: 1884808 - RNA, 19 nt, Artificial Sequence
  Description of Artificial Sequence: Synthetic oligonucleotide
uucucgccuacuguuauaa

SEQ ID NO: 1884809 - RNA, 19 nt, Artificial Sequence
  Description of Artificial Sequence: Synthetic oligonucleotide
ggucccuggaaacagcaug

SEQ ID NO: 1884810 - RNA, 19 nt, Artificial Sequence
  Description of Artificial Sequence: Synthetic oligonucleotide
uggcauucaccauaacaua

SEQ ID NO: 1884811 - RNA, 19 nt, Artificial Sequence
  Description of Artificial Sequence: Synthetic oligonucleotide
ucuuccgacguaggcggcg

SEQ ID NO: 1884812 - RNA, 19 nt, Artificial Sequence
  Description of Artificial Sequence: Synthetic oligonucleotide
ucuaccuccaugccaucuu

SEQ ID NO: 1884813 - RNA, 19 nt, Artificial Sequence
  Description of Artificial Sequence: Synthetic oligonucleotide
ugcggugaacauugccucc

SEQ ID NO: 1884814 - RNA, 19 nt, Artificial Sequence
  Description of Artificial Sequence: Synthetic oligonucleotide
cuagacccaggaaguuugg

SEQ ID NO: 1884815 - RNA, 19 nt, Artificial Sequence
  Description of Artificial Sequence: Synthetic oligonucleotide
aguuaacuauuaacaaaga

SEQ ID NO: 1884816 - RNA, 19 nt, Artificial Sequence
  Description of Artificial Sequence: Synthetic oligonucleotide
ucuccgcaauguaaagggu

SEQ ID NO: 1884817 - RNA, 19 nt, Artificial Sequence
  Description of Artificial Sequence: Synthetic oligonucleotide
gguaucuaccuccaugcca

SEQ ID NO: 1884818 - RNA, 19 nt, Artificial Sequence
  Description of Artificial Sequence: Synthetic oligonucleotide
uauaaaacguagggauguc

SEQ ID NO: 1884819 - RNA, 19 nt, Artificial Sequence
  Description of Artificial Sequence: Synthetic oligonucleotide
agaugugcacacagcaaag

SEQ ID NO: 1884820 - RNA, 19 nt, Artificial Sequence
  Description of Artificial Sequence: Synthetic oligonucleotide
uuccuucuaaccucuccaa

SEQ ID NO: 1884821 - RNA, 19 nt, Artificial Sequence
  Description of Artificial Sequence: Synthetic oligonucleotide
aaacuaaucgugggguauu

SEQ ID NO: 1884822 - RNA, 19 nt, Artificial Sequence
  Description of Artificial Sequence: Synthetic oligonucleotide
uccuucuaaccucuccaau

SEQ ID NO: 1884823 - RNA, 19 nt, Artificial Sequence
  Description of Artificial Sequence: Synthetic oligonucleotide
uuguacauuucaccucaua

SEQ ID NO: 1884824 - RNA, 19 nt, Artificial Sequence
  Description of Artificial Sequence: Synthetic oligonucleotide
aauacccgcucaguuaauu

SEQ ID NO: 1884825 - RNA, 19 nt, Artificial Sequence
  Description of Artificial Sequence: Synthetic oligonucleotide
caguuggugugguaucuac

SEQ ID NO: 1884826 - RNA, 19 nt, Artificial Sequence
  Description of Artificial Sequence: Synthetic oligonucleotide
ggcacaaaucuaaauucag

SEQ ID NO: 1884827 - RNA, 19 nt, Artificial Sequence
  Description of Artificial Sequence: Synthetic oligonucleotide
auuuggcauucaccauaac

SEQ ID NO: 1884828 - RNA, 19 nt, Artificial Sequence
  Description of Artificial Sequence: Synthetic oligonucleotide
guccuucugcuguuaaaug

SEQ ID NO: 1884829 - RNA, 19 nt, Artificial Sequence
  Description of Artificial Sequence: Synthetic oligonucleotide
acuuauuauguuacagaaa

SEQ ID NO: 1884830 - RNA, 19 nt, Artificial Sequence
  Description of Artificial Sequence: Synthetic oligonucleotide
uauuggcugcucacagacu

SEQ ID NO: 1884831 - RNA, 19 nt, Artificial Sequence
  Description of Artificial Sequence: Synthetic oligonucleotide
aguucucgccuacuguuau

SEQ ID NO: 1884832 - RNA, 19 nt, Artificial Sequence
  Description of Artificial Sequence: Synthetic oligonucleotide
auaagcauuugggucccug

SEQ ID NO: 1884833 - RNA, 19 nt, Artificial Sequence
  Description of Artificial Sequence: Synthetic oligonucleotide
agacaggcggcucuccgca

SEQ ID NO: 1884834 - RNA, 19 nt, Artificial Sequence
  Description of Artificial Sequence: Synthetic oligonucleotide
uuggugugguaucuaccuc

SEQ ID NO: 1884835 - RNA, 19 nt, Artificial Sequence
  Description of Artificial Sequence: Synthetic oligonucleotide
cagcauguaaacuaaucgu

SEQ ID NO: 1884836 - RNA, 19 nt, Artificial Sequence
  Description of Artificial Sequence: Synthetic oligonucleotide
aguaaguuuuggagaagga

SEQ ID NO: 1884837 - RNA, 19 nt, Artificial Sequence
  Description of Artificial Sequence: Synthetic oligonucleotide
ucgugggguauuccaguga

SEQ ID NO: 1884838 - RNA, 19 nt, Artificial Sequence
  Description of Artificial Sequence: Synthetic oligonucleotide
aaagccagugugagcuuug

SEQ ID NO: 1884839 - RNA, 19 nt, Artificial Sequence
  Description of Artificial Sequence: Synthetic oligonucleotide
acugaaucuucuguccgga

SEQ ID NO: 1884840 - RNA, 19 nt, Artificial Sequence
  Description of Artificial Sequence: Synthetic oligonucleotide
gcacaaaucuaaauucagc

SEQ ID NO: 1884841 - RNA, 19 nt, Artificial Sequence
  Description of Artificial Sequence: Synthetic oligonucleotide
aggaagcucauugcgggug

SEQ ID NO: 1884842 - RNA, 19 nt, Artificial Sequence
  Description of Artificial Sequence: Synthetic oligonucleotide
ucguaaucaucagagucuu

SEQ ID NO: 1884843 - RNA, 19 nt, Artificial Sequence
  Description of Artificial Sequence: Synthetic oligonucleotide
cuuguucaugugcuuccac

SEQ ID NO: 1884844 - RNA, 19 nt, Artificial Sequence
  Description of Artificial Sequence: Synthetic oligonucleotide
cauucaccauaacauacaa

SEQ ID NO: 1884845 - RNA, 19 nt, Artificial Sequence
  Description of Artificial Sequence: Synthetic oligonucleotide
gccauguuauauuggcugc

SEQ ID NO: 1884846 - RNA, 19 nt, Artificial Sequence
  Description of Artificial Sequence: Synthetic oligonucleotide
cauguuauauuggcugcuc

SEQ ID NO: 1884847 - RNA, 19 nt, Artificial Sequence
  Description of Artificial Sequence: Synthetic oligonucleotide
acccgcucaguuaauucac

SEQ ID NO: 1884848 - RNA, 19 nt, Artificial Sequence
  Description of Artificial Sequence: Synthetic oligonucleotide
caacaguuggugugguauc

SEQ ID NO: 1884849 - RNA, 19 nt, Artificial Sequence
  Description of Artificial Sequence: Synthetic oligonucleotide
ucucgccuacuguuauaag

SEQ ID NO: 1884850 - RNA, 19 nt, Artificial Sequence
  Description of Artificial Sequence: Synthetic oligonucleotide
ccuagacccaggaaguuug

SEQ ID NO: 1884851 - RNA, 19 nt, Artificial Sequence
  Description of Artificial Sequence: Synthetic oligonucleotide
cagugagaauccuaaucca

SEQ ID NO: 1884852 - RNA, 19 nt, Artificial Sequence
  Description of Artificial Sequence: Synthetic oligonucleotide
gacguaggcggcgggaagc

SEQ ID NO: 1884853 - RNA, 19 nt, Artificial Sequence
  Description of Artificial Sequence: Synthetic oligonucleotide
acaccuagacccaggaagu

SEQ ID NO: 1884854 - RNA, 19 nt, Artificial Sequence
  Description of Artificial Sequence: Synthetic oligonucleotide
ccauaacauacaaaugcuc

SEQ ID NO: 1884855 - RNA, 19 nt, Artificial Sequence
  Description of Artificial Sequence: Synthetic oligonucleotide
caauguaaagggucccgga

SEQ ID NO: 1884856 - RNA, 19 nt, Artificial Sequence
  Description of Artificial Sequence: Synthetic oligonucleotide
ugcucucgaggauaagcau

SEQ ID NO: 1884857 - RNA, 19 nt, Artificial Sequence
  Description of Artificial Sequence: Synthetic oligonucleotide
augcucucgaggauaagca

SEQ ID NO: 1884858 - RNA, 19 nt, Artificial Sequence
  Description of Artificial Sequence: Synthetic oligonucleotide
cuucagugaucaacaucug

SEQ ID NO: 1884859 - RNA, 19 nt, Artificial Sequence
  Description of Artificial Sequence: Synthetic oligonucleotide
gcaauguaaagggucccgg

SEQ ID NO: 1884860 - RNA, 19 nt, Artificial Sequence
  Description of Artificial Sequence: Synthetic oligonucleotide
cauuauagucugucuugca

SEQ ID NO: 1884861 - RNA, 19 nt, Artificial Sequence
  Description of Artificial Sequence: Synthetic oligonucleotide
agguaccaaguucucgccu

SEQ ID NO: 1884862 - RNA, 19 nt, Artificial Sequence
  Description of Artificial Sequence: Synthetic oligonucleotide
guaaacuaaucguggggua

SEQ ID NO: 1884863 - RNA, 19 nt, Artificial Sequence
  Description of Artificial Sequence: Synthetic oligonucleotide
cauuucaccucauaggcuu

SEQ ID NO: 1884864 - RNA, 19 nt, Artificial Sequence
  Description of Artificial Sequence: Synthetic oligonucleotide
auaaaggucucagucucuu

SEQ ID NO: 1884865 - RNA, 19 nt, Artificial Sequence
  Description of Artificial Sequence: Synthetic oligonucleotide
cuggugacagcuugcuguc

SEQ ID NO: 1884866 - RNA, 19 nt, Artificial Sequence
  Description of Artificial Sequence: Synthetic oligonucleotide
gguauuccagugagaaucc

SEQ ID NO: 1884867 - RNA, 19 nt, Artificial Sequence
  Description of Artificial Sequence: Synthetic oligonucleotide
aaaugcucucgaggauaag

SEQ ID NO: 1884868 - RNA, 19 nt, Artificial Sequence
  Description of Artificial Sequence: Synthetic oligonucleotide
gacccuucccguucagcac

SEQ ID NO: 1884869 - RNA, 19 nt, Artificial Sequence
  Description of Artificial Sequence: Synthetic oligonucleotide
caggaucugggugcaaggc

SEQ ID NO: 1884870 - RNA, 19 nt, Artificial Sequence
  Description of Artificial Sequence: Synthetic oligonucleotide
auucacacauugcggugaa

SEQ ID NO: 1884871 - RNA, 19 nt, Artificial Sequence
  Description of Artificial Sequence: Synthetic oligonucleotide
ccacaucauauucuucucc

SEQ ID NO: 1884872 - RNA, 19 nt, Artificial Sequence
  Description of Artificial Sequence: Synthetic oligonucleotide
acauuucaccucauaggcu

SEQ ID NO: 1884873 - RNA, 19 nt, Artificial Sequence
  Description of Artificial Sequence: Synthetic oligonucleotide
gcuuuguacauuucaccuc

SEQ ID NO: 1884874 - RNA, 19 nt, Artificial Sequence
  Description of Artificial Sequence: Synthetic oligonucleotide
gcuguuaaaugggacaguc

SEQ ID NO: 1884875 - RNA, 19 nt, Artificial Sequence
  Description of Artificial Sequence: Synthetic oligonucleotide
gcugacuuaucgcugggca

SEQ ID NO: 1884876 - RNA, 19 nt, Artificial Sequence
  Description of Artificial Sequence: Synthetic oligonucleotide
cauucacacauugcgguga

SEQ ID NO: 1884877 - RNA, 19 nt, Artificial Sequence
  Description of Artificial Sequence: Synthetic oligonucleotide
accaucuaaccaagacagg

SEQ ID NO: 1884878 - RNA, 19 nt, Artificial Sequence
  Description of Artificial Sequence: Synthetic oligonucleotide
cugaaucuucuguccggac

SEQ ID NO: 1884879 - RNA, 19 nt, Artificial Sequence
  Description of Artificial Sequence: Synthetic oligonucleotide
gcuugcugucucauuauag

SEQ ID NO: 1884880 - RNA, 19 nt, Artificial Sequence
  Description of Artificial Sequence: Synthetic oligonucleotide
cuaccuccaugccaucuuc

SEQ ID NO: 1884881 - RNA, 19 nt, Artificial Sequence
  Description of Artificial Sequence: Synthetic oligonucleotide
ggaagagguaccaaguucu

SEQ ID NO: 1884882 - RNA, 19 nt, Artificial Sequence
  Description of Artificial Sequence: Synthetic oligonucleotide
ugcugacuuaucgcugggc

SEQ ID NO: 1884883 - RNA, 19 nt, Artificial Sequence
  Description of Artificial Sequence: Synthetic oligonucleotide
accaagacaggcggcucuc

SEQ ID NO: 1884884 - RNA, 19 nt, Artificial Sequence
  Description of Artificial Sequence: Synthetic oligonucleotide
uguccggacuccugccaug

SEQ ID NO: 1884885 - RNA, 19 nt, Artificial Sequence
  Description of Artificial Sequence: Synthetic oligonucleotide
cgucuuccgacguaggcgg

SEQ ID NO: 1884886 - RNA, 19 nt, Artificial Sequence
  Description of Artificial Sequence: Synthetic oligonucleotide
gaagagguaccaaguucuc

SEQ ID NO: 1884887 - RNA, 19 nt, Artificial Sequence
  Description of Artificial Sequence: Synthetic oligonucleotide
guaccaaguucucgccuac

SEQ ID NO: 1884888 - RNA, 19 nt, Artificial Sequence
  Description of Artificial Sequence: Synthetic oligonucleotide
ugggugcaaggccuggcau

SEQ ID NO: 1884889 - RNA, 19 nt, Artificial Sequence
  Description of Artificial Sequence: Synthetic oligonucleotide
gcauucacacauugcggug

SEQ ID NO: 1884890 - RNA, 19 nt, Artificial Sequence
  Description of Artificial Sequence: Synthetic oligonucleotide
cugggcacaaaucuaaauu

SEQ ID NO: 1884891 - RNA, 19 nt, Artificial Sequence
  Description of Artificial Sequence: Synthetic oligonucleotide
ggcauucacacauugcggu

SEQ ID NO: 1884892 - RNA, 19 nt, Artificial Sequence
  Description of Artificial Sequence: Synthetic oligonucleotide
cuuccgacguaggcggcgg

SEQ ID NO: 1884893 - RNA, 19 nt, Artificial Sequence
  Description of Artificial Sequence: Synthetic oligonucleotide
aaguucucgccuacuguua

SEQ ID NO: 1884894 - RNA, 19 nt, Artificial Sequence
  Description of Artificial Sequence: Synthetic oligonucleotide
ggugacagcuugcugucuc

SEQ ID NO: 1884895 - RNA, 19 nt, Artificial Sequence
  Description of Artificial Sequence: Synthetic oligonucleotide
uucaccucauaggcuuucu

SEQ ID NO: 1884896 - RNA, 19 nt, Artificial Sequence
  Description of Artificial Sequence: Synthetic oligonucleotide
ccuggcauucacacauugc

SEQ ID NO: 1884897 - RNA, 19 nt, Artificial Sequence
  Description of Artificial Sequence: Synthetic oligonucleotide
uuccgacguaggcggcggg

SEQ ID NO: 1884898 - RNA, 19 nt, Artificial Sequence
  Description of Artificial Sequence: Synthetic oligonucleotide
ucaucaccgucuuccucau

SEQ ID NO: 1884899 - RNA, 19 nt, Artificial Sequence
  Description of Artificial Sequence: Synthetic oligonucleotide
gucucauuauagucugucu

SEQ ID NO: 1884900 - RNA, 19 nt, Artificial Sequence
  Description of Artificial Sequence: Synthetic oligonucleotide
acauugcggugaacauugc

SEQ ID NO: 1884901 - RNA, 19 nt, Artificial Sequence
  Description of Artificial Sequence: Synthetic oligonucleotide
cuuaucgcugggcacaaau

SEQ ID NO: 1884902 - RNA, 19 nt, Artificial Sequence
  Description of Artificial Sequence: Synthetic oligonucleotide
agcccgucuuccgacguag

SEQ ID NO: 1884903 - RNA, 19 nt, Artificial Sequence
  Description of Artificial Sequence: Synthetic oligonucleotide
gaucugggugcaaggccug

SEQ ID NO: 1884904 - RNA, 19 nt, Artificial Sequence
  Description of Artificial Sequence: Synthetic oligonucleotide
uaaccaagacaggcggcuc

SEQ ID NO: 1884905 - RNA, 19 nt, Artificial Sequence
  Description of Artificial Sequence: Synthetic oligonucleotide
agacaccuagacccaggaa

SEQ ID NO: 1884906 - RNA, 19 nt, Artificial Sequence
  Description of Artificial Sequence: Synthetic oligonucleotide
gguaccaaguucucgccua

SEQ ID NO: 1884907 - RNA, 19 nt, Artificial Sequence
  Description of Artificial Sequence: Synthetic oligonucleotide
gcggcgggaagcuuuugag

SEQ ID NO: 1884908 - RNA, 19 nt, Artificial Sequence
  Description of Artificial Sequence: Synthetic oligonucleotide
gggcacaaaucuaaauuca

SEQ ID NO: 1884909 - RNA, 19 nt, Artificial Sequence
  Description of Artificial Sequence: Synthetic oligonucleotide
caaguucucgccuacuguu

SEQ ID NO: 1884910 - RNA, 19 nt, Artificial Sequence
  Description of Artificial Sequence: Synthetic oligonucleotide
cuacuguuauaagagaauu

SEQ ID NO: 1884911 - RNA, 19 nt, Artificial Sequence
  Description of Artificial Sequence: Synthetic oligonucleotide
gcauucaccauaacauaca

SEQ ID NO: 1884912 - RNA, 19 nt, Artificial Sequence
  Description of Artificial Sequence: Synthetic oligonucleotide
agccggagcccgucuuccg

SEQ ID NO: 1884913 - RNA, 19 nt, Artificial Sequence
  Description of Artificial Sequence: Synthetic oligonucleotide
cuaaccaagacaggcggcu

SEQ ID NO: 1884914 - RNA, 19 nt, Artificial Sequence
  Description of Artificial Sequence: Synthetic oligonucleotide
cgugggguauuccagugag

SEQ ID NO: 1884915 - RNA, 19 nt, Artificial Sequence
  Description of Artificial Sequence: Synthetic oligonucleotide
ggcucuccgcaauguaaag

SEQ ID NO: 1884916 - RNA, 19 nt, Artificial Sequence
  Description of Artificial Sequence: Synthetic oligonucleotide
gagucuucguccucaggau

SEQ ID NO: 1884917 - RNA, 19 nt, Artificial Sequence
  Description of Artificial Sequence: Synthetic oligonucleotide
ccgucuuccgacguaggcg

SEQ ID NO: 1884918 - RNA, 19 nt, Artificial Sequence
  Description of Artificial Sequence: Synthetic oligonucleotide
aagcucauugcgggugaaa

SEQ ID NO: 1884919 - RNA, 19 nt, Artificial Sequence
  Description of Artificial Sequence: Synthetic oligonucleotide
cuguuauaagagaauuguu

SEQ ID NO: 1884920 - RNA, 19 nt, Artificial Sequence
  Description of Artificial Sequence: Synthetic oligonucleotide
accuagacccaggaaguuu

SEQ ID NO: 1884921 - RNA, 19 nt, Artificial Sequence
  Description of Artificial Sequence: Synthetic oligonucleotide
cacaaauacccgcucaguu

SEQ ID NO: 1884922 - RNA, 19 nt, Artificial Sequence
  Description of Artificial Sequence: Synthetic oligonucleotide
uccgacguaggcggcggga

SEQ ID NO: 1884923 - RNA, 19 nt, Artificial Sequence
  Description of Artificial Sequence: Synthetic oligonucleotide
cuccaauguggcuuguccu

SEQ ID NO: 1884924 - RNA, 19 nt, Artificial Sequence
  Description of Artificial Sequence: Synthetic oligonucleotide
cucucgaggauaagcauuu

SEQ ID NO: 1884925 - RNA, 19 nt, Artificial Sequence
  Description of Artificial Sequence: Synthetic oligonucleotide
uaccaaguucucgccuacu

SEQ ID NO: 1884926 - RNA, 19 nt, Artificial Sequence
  Description of Artificial Sequence: Synthetic oligonucleotide
acaggcggcucuccgcaau

SEQ ID NO: 1884927 - RNA, 19 nt, Artificial Sequence
  Description of Artificial Sequence: Synthetic oligonucleotide
gcaggaauuagaggccuac

SEQ ID NO: 1884928 - RNA, 19 nt, Artificial Sequence
  Description of Artificial Sequence: Synthetic oligonucleotide
gccuacuguuauaagagaa

SEQ ID NO: 1884929 - RNA, 19 nt, Artificial Sequence
  Description of Artificial Sequence: Synthetic oligonucleotide
cugucuugcaaaguaaguu

SEQ ID NO: 1884930 - RNA, 19 nt, Artificial Sequence
  Description of Artificial Sequence: Synthetic oligonucleotide
gacuccugccauguuauau

SEQ ID NO: 1884931 - RNA, 19 nt, Artificial Sequence
  Description of Artificial Sequence: Synthetic oligonucleotide
aaauacccgcucaguuaau

SEQ ID NO: 1884932 - RNA, 19 nt, Artificial Sequence
  Description of Artificial Sequence: Synthetic oligonucleotide
ccaaugcugacuuaucgcu

SEQ ID NO: 1884933 - RNA, 19 nt, Artificial Sequence
  Description of Artificial Sequence: Synthetic oligonucleotide
gguucaacaucaucaccgu

SEQ ID NO: 1884934 - RNA, 19 nt, Artificial Sequence
  Description of Artificial Sequence: Synthetic oligonucleotide
gaggaagcucauugcgggu

SEQ ID NO: 1884935 - RNA, 19 nt, Artificial Sequence
  Description of Artificial Sequence: Synthetic oligonucleotide
uaggcggcgggaagcuuuu

SEQ ID NO: 1884936 - RNA, 19 nt, Artificial Sequence
  Description of Artificial Sequence: Synthetic oligonucleotide
uucacacauugcggugaac

SEQ ID NO: 1884937 - RNA, 19 nt, Artificial Sequence
  Description of Artificial Sequence: Synthetic oligonucleotide
aucgcugggcacaaaucua

SEQ ID NO: 1884938 - RNA, 19 nt, Artificial Sequence
  Description of Artificial Sequence: Synthetic oligonucleotide
ugcagccggagcccgucuu

SEQ ID NO: 1884939 - RNA, 19 nt, Artificial Sequence
  Description of Artificial Sequence: Synthetic oligonucleotide
gucuugcaaaguaaguuuu

SEQ ID NO: 1884940 - RNA, 19 nt, Artificial Sequence
  Description of Artificial Sequence: Synthetic oligonucleotide
gucccuggaaacagcaugu

SEQ ID NO: 1884941 - RNA, 19 nt, Artificial Sequence
  Description of Artificial Sequence: Synthetic oligonucleotide
gaguuacuuugcagacuuc

SEQ ID NO: 1884942 - RNA, 19 nt, Artificial Sequence
  Description of Artificial Sequence: Synthetic oligonucleotide
gagccgagacccuucccgu

SEQ ID NO: 1884943 - RNA, 19 nt, Artificial Sequence
  Description of Artificial Sequence: Synthetic oligonucleotide
caguuaauucaccuuuguu

SEQ ID NO: 1884944 - RNA, 19 nt, Artificial Sequence
  Description of Artificial Sequence: Synthetic oligonucleotide
uggugacagcuugcugucu

SEQ ID NO: 1884945 - RNA, 19 nt, Artificial Sequence
  Description of Artificial Sequence: Synthetic oligonucleotide
acaguuggugugguaucua

SEQ ID NO: 1884946 - RNA, 19 nt, Artificial Sequence
  Description of Artificial Sequence: Synthetic oligonucleotide
gccuacuuggaagacaccu

SEQ ID NO: 1884947 - RNA, 19 nt, Artificial Sequence
  Description of Artificial Sequence: Synthetic oligonucleotide
ucccuggaaacagcaugua

SEQ ID NO: 1884948 - RNA, 19 nt, Artificial Sequence
  Description of Artificial Sequence: Synthetic oligonucleotide
ccccacucuggacuggaag

SEQ ID NO: 1884949 - RNA, 19 nt, Artificial Sequence
  Description of Artificial Sequence: Synthetic oligonucleotide
cacacauugcggugaacau

SEQ ID NO: 1884950 - RNA, 19 nt, Artificial Sequence
  Description of Artificial Sequence: Synthetic oligonucleotide
gcaacaguuggugugguau

SEQ ID NO: 1884951 - RNA, 19 nt, Artificial Sequence
  Description of Artificial Sequence: Synthetic oligonucleotide
ggugugguaucuaccucca

SEQ ID NO: 1884952 - RNA, 19 nt, Artificial Sequence
  Description of Artificial Sequence: Synthetic oligonucleotide
cccgucuuccgacguaggc

SEQ ID NO: 1884953 - RNA, 19 nt, Artificial Sequence
  Description of Artificial Sequence: Synthetic oligonucleotide
cgcaauguaaagggucccg

SEQ ID NO: 1884954 - RNA, 19 nt, Artificial Sequence
  Description of Artificial Sequence: Synthetic oligonucleotide
gcucacagacugagaaagc

SEQ ID NO: 1884955 - RNA, 19 nt, Artificial Sequence
  Description of Artificial Sequence: Synthetic oligonucleotide
guuaaaugggacaguccuu

SEQ ID NO: 1884956 - RNA, 19 nt, Artificial Sequence
  Description of Artificial Sequence: Synthetic oligonucleotide
acguaggcggcgggaagcu

SEQ ID NO: 1884957 - RNA, 19 nt, Artificial Sequence
  Description of Artificial Sequence: Synthetic oligonucleotide
cggcgggaagcuuuugagg

SEQ ID NO: 1884958 - RNA, 19 nt, Artificial Sequence
  Description of Artificial Sequence: Synthetic oligonucleotide
guucucgccuacuguuaua

SEQ ID NO: 1884959 - RNA, 19 nt, Artificial Sequence
  Description of Artificial Sequence: Synthetic oligonucleotide
ccuacuguuauaagagaau

SEQ ID NO: 1884960 - RNA, 19 nt, Artificial Sequence
  Description of Artificial Sequence: Synthetic oligonucleotide
cagugugagcuuuguacau

SEQ ID NO: 1884961 - RNA, 19 nt, Artificial Sequence
  Description of Artificial Sequence: Synthetic oligonucleotide
agccgagacccuucccguu

SEQ ID NO: 1884962 - RNA, 19 nt, Artificial Sequence
  Description of Artificial Sequence: Synthetic oligonucleotide
ccguucagcacagccucgg

SEQ ID NO: 1884963 - RNA, 19 nt, Artificial Sequence
  Description of Artificial Sequence: Synthetic oligonucleotide
gccgagacccuucccguuc

SEQ ID NO: 1884964 - RNA, 19 nt, Artificial Sequence
  Description of Artificial Sequence: Synthetic oligonucleotide
ccaauguggcuuguccuuc

SEQ ID NO: 1884965 - RNA, 19 nt, Artificial Sequence
  Description of Artificial Sequence: Synthetic oligonucleotide
guccagcaacaguuggugu

SEQ ID NO: 1884966 - RNA, 19 nt, Artificial Sequence
  Description of Artificial Sequence: Synthetic oligonucleotide
cccguucagcacagccucg

SEQ ID NO: 1884967 - RNA, 19 nt, Artificial Sequence
  Description of Artificial Sequence: Synthetic oligonucleotide
uccggacuccugccauguu

SEQ ID NO: 1884968 - RNA, 19 nt, Artificial Sequence
  Description of Artificial Sequence: Synthetic oligonucleotide
cgaggauaagcauuugggu

SEQ ID NO: 1884969 - RNA, 19 nt, Artificial Sequence
  Description of Artificial Sequence: Synthetic oligonucleotide
gcugggcacaaaucuaaau

SEQ ID NO: 1884970 - RNA, 19 nt, Artificial Sequence
  Description of Artificial Sequence: Synthetic oligonucleotide
gucuuccgacguaggcggc

SEQ ID NO: 1884971 - RNA, 19 nt, Artificial Sequence
  Description of Artificial Sequence: Synthetic oligonucleotide
ccgcaauguaaaggguccc

SEQ ID NO: 1884972 - RNA, 19 nt, Artificial Sequence
  Description of Artificial Sequence: Synthetic oligonucleotide
ugccuccaaugcugacuua

SEQ ID NO: 1884973 - RNA, 19 nt, Artificial Sequence
  Description of Artificial Sequence: Synthetic oligonucleotide
gagcccgucuuccgacgua

SEQ ID NO: 1884974 - RNA, 19 nt, Artificial Sequence
  Description of Artificial Sequence: Synthetic oligonucleotide
gcgggaagcuuuugaggaa

SEQ ID NO: 1884975 - RNA, 19 nt, Artificial Sequence
  Description of Artificial Sequence: Synthetic oligonucleotide
caggaauuagaggccuacu

SEQ ID NO: 1884976 - RNA, 19 nt, Artificial Sequence
  Description of Artificial Sequence: Synthetic oligonucleotide
guaggcggcgggaagcuuu

SEQ ID NO: 1884977 - RNA, 19 nt, Artificial Sequence
  Description of Artificial Sequence: Synthetic oligonucleotide
ccggagcccgucuuccgac

SEQ ID NO: 1884978 - RNA, 19 nt, Artificial Sequence
  Description of Artificial Sequence: Synthetic oligonucleotide
cccuucccguucagcacag

SEQ ID NO: 1884979 - RNA, 19 nt, Artificial Sequence
  Description of Artificial Sequence: Synthetic oligonucleotide
ucccggagccgagacccuu

SEQ ID NO: 1884980 - RNA, 19 nt, Artificial Sequence
  Description of Artificial Sequence: Synthetic oligonucleotide
acuuaucgcugggcacaaa

SEQ ID NO: 1884981 - RNA, 19 nt, Artificial Sequence
  Description of Artificial Sequence: Synthetic oligonucleotide
ccggagccgagacccuucc

SEQ ID NO: 1884982 - RNA, 19 nt, Artificial Sequence
  Description of Artificial Sequence: Synthetic oligonucleotide
ccaaguucucgccuacugu

SEQ ID NO: 1884983 - RNA, 19 nt, Artificial Sequence
  Description of Artificial Sequence: Synthetic oligonucleotide
gcggcucuccgcaauguaa

SEQ ID NO: 1884984 - RNA, 19 nt, Artificial Sequence
  Description of Artificial Sequence: Synthetic oligonucleotide
gcaaggccuggcauucaca

SEQ ID NO: 1884985 - RNA, 19 nt, Artificial Sequence
  Description of Artificial Sequence: Synthetic oligonucleotide
ccuaauccagaaccaucua

SEQ ID NO: 1884986 - RNA, 19 nt, Artificial Sequence
  Description of Artificial Sequence: Synthetic oligonucleotide
guccggacuccugccaugu

SEQ ID NO: 1884987 - RNA, 19 nt, Artificial Sequence
  Description of Artificial Sequence: Synthetic oligonucleotide
gcucucgaggauaagcauu

SEQ ID NO: 1884988 - RNA, 19 nt, Artificial Sequence
  Description of Artificial Sequence: Synthetic oligonucleotide
ggccuacuuggaagacacc

SEQ ID NO: 1884989 - RNA, 19 nt, Artificial Sequence
  Description of Artificial Sequence: Synthetic oligonucleotide
gggguauuccagugagaau

SEQ ID NO: 1884990 - RNA, 19 nt, Artificial Sequence
  Description of Artificial Sequence: Synthetic oligonucleotide
cggagcccgucuuccgacg

SEQ ID NO: 1884991 - RNA, 19 nt, Artificial Sequence
  Description of Artificial Sequence: Synthetic oligonucleotide
ccggacuccugccauguua

SEQ ID NO: 1884992 - RNA, 19 nt, Artificial Sequence
  Description of Artificial Sequence: Synthetic oligonucleotide
cgccuacuguuauaagaga

SEQ ID NO: 1884993 - RNA, 19 nt, Artificial Sequence
  Description of Artificial Sequence: Synthetic oligonucleotide
ccgcucaguuaauucaccu

SEQ ID NO: 1884994 - RNA, 19 nt, Artificial Sequence
  Description of Artificial Sequence: Synthetic oligonucleotide
cccggagccgagacccuuc

SEQ ID NO: 1884995 - RNA, 19 nt, Artificial Sequence
  Description of Artificial Sequence: Synthetic oligonucleotide
cgacguaggcggcgggaag

SEQ ID NO: 1884996 - RNA, 19 nt, Artificial Sequence
  Description of Artificial Sequence: Synthetic oligonucleotide
gcccgucuuccgacguagg

SEQ ID NO: 1884997 - RNA, 19 nt, Artificial Sequence
  Description of Artificial Sequence: Synthetic oligonucleotide
ggagcccgucuuccgacgu

SEQ ID NO: 1884998 - RNA, 19 nt, Artificial Sequence
  Description of Artificial Sequence: Synthetic oligonucleotide
ggcggcucuccgcaaugua

SEQ ID NO: 1884999 - RNA, 19 nt, Artificial Sequence
  Description of Artificial Sequence: Synthetic oligonucleotide
ccauguuauauuggcugcu

SEQ ID NO: 1885000 - RNA, 19 nt, Artificial Sequence
  Description of Artificial Sequence: Synthetic oligonucleotide
cggcucuccgcaauguaaa

SEQ ID NO: 1885001 - RNA, 19 nt, Artificial Sequence
  Description of Artificial Sequence: Synthetic oligonucleotide
aggcggcgggaagcuuuug

SEQ ID NO: 1885002 - RNA, 19 nt, Artificial Sequence
  Description of Artificial Sequence: Synthetic oligonucleotide
ggacuccugccauguuaua

SEQ ID NO: 1885003 - RNA, 19 nt, Artificial Sequence
  Description of Artificial Sequence: Synthetic oligonucleotide
cagcaacaguugguguggu

SEQ ID NO: 1885004 - RNA, 19 nt, Artificial Sequence
  Description of Artificial Sequence: Synthetic oligonucleotide
cagcacagccucggugucu

SEQ ID NO: 1885005 - RNA, 19 nt, Artificial Sequence
  Description of Artificial Sequence: Synthetic oligonucleotide
cgagacccuucccguucag

SEQ ID NO: 1885006 - RNA, 19 nt, Artificial Sequence
  Description of Artificial Sequence: Synthetic oligonucleotide
cggacuccugccauguuau

SEQ ID NO: 1885007 - RNA, 19 nt, Artificial Sequence
  Description of Artificial Sequence: Synthetic oligonucleotide
caccuagacccaggaaguu

SEQ ID NO: 1885008 - RNA, 19 nt, Artificial Sequence
  Description of Artificial Sequence: Synthetic oligonucleotide
cgcugggcacaaaucuaaa

SEQ ID NO: 1885009 - RNA, 19 nt, Artificial Sequence
  Description of Artificial Sequence: Synthetic oligonucleotide
gcaauggguucaacaucau

SEQ ID NO: 1885010 - RNA, 19 nt, Artificial Sequence
  Description of Artificial Sequence: Synthetic oligonucleotide
ccgacguaggcggcgggaa

SEQ ID NO: 1885011 - RNA, 19 nt, Artificial Sequence
  Description of Artificial Sequence: Synthetic oligonucleotide
cguaggcggcgggaagcuu

SEQ ID NO: 1885012 - RNA, 19 nt, Artificial Sequence
  Description of Artificial Sequence: Synthetic oligonucleotide
aaaagcauaaaagagaggc

SEQ ID NO: 1885013 - RNA, 19 nt, Artificial Sequence
  Description of Artificial Sequence: Synthetic oligonucleotide
caaaauaugacccauuucc

SEQ ID NO: 1885014 - RNA, 19 nt, Artificial Sequence
  Description of Artificial Sequence: Synthetic oligonucleotide
ucuuaaaagaaacagaaua

SEQ ID NO: 1885015 - RNA, 19 nt, Artificial Sequence
  Description of Artificial Sequence: Synthetic oligonucleotide
aguaggaauaucuacgucg

SEQ ID NO: 1885016 - RNA, 19 nt, Artificial Sequence
  Description of Artificial Sequence: Synthetic oligonucleotide
aaucaguaggaauaucuac

SEQ ID NO: 1885017 - RNA, 19 nt, Artificial Sequence
  Description of Artificial Sequence: Synthetic oligonucleotide
ugugguaucucuuaaaaga

SEQ ID NO: 1885018 - RNA, 19 nt, Artificial Sequence
  Description of Artificial Sequence: Synthetic oligonucleotide
ucacuaaguaaaaugaagc

SEQ ID NO: 1885019 - RNA, 19 nt, Artificial Sequence
  Description of Artificial Sequence: Synthetic oligonucleotide
cuaucagcuauuaugaagc

SEQ ID NO: 1885020 - RNA, 19 nt, Artificial Sequence
  Description of Artificial Sequence: Synthetic oligonucleotide
auugugggaaaucucaugg

SEQ ID NO: 1885021 - RNA, 19 nt, Artificial Sequence
  Description of Artificial Sequence: Synthetic oligonucleotide
cauugaaugguuaaggcag

SEQ ID NO: 1885022 - RNA, 19 nt, Artificial Sequence
  Description of Artificial Sequence: Synthetic oligonucleotide
ucagcuauuaugaagcugu

SEQ ID NO: 1885023 - RNA, 19 nt, Artificial Sequence
  Description of Artificial Sequence: Synthetic oligonucleotide
auaggaccaaaauaugacc

SEQ ID NO: 1885024 - RNA, 19 nt, Artificial Sequence
  Description of Artificial Sequence: Synthetic oligonucleotide
auuccauagagcuuugugg

SEQ ID NO: 1885025 - RNA, 19 nt, Artificial Sequence
  Description of Artificial Sequence: Synthetic oligonucleotide
ucaucuuaagcuuaacaag

SEQ ID NO: 1885026 - RNA, 19 nt, Artificial Sequence
  Description of Artificial Sequence: Synthetic oligonucleotide
aaauaugacccauuuccag

SEQ ID NO: 1885027 - RNA, 19 nt, Artificial Sequence
  Description of Artificial Sequence: Synthetic oligonucleotide
aauauuccaaaccagcgau

SEQ ID NO: 1885028 - RNA, 19 nt, Artificial Sequence
  Description of Artificial Sequence: Synthetic oligonucleotide
uaacaguucaguuuauuag

SEQ ID NO: 1885029 - RNA, 19 nt, Artificial Sequence
  Description of Artificial Sequence: Synthetic oligonucleotide
uuuauaugaaggcugagua

SEQ ID NO: 1885030 - RNA, 19 nt, Artificial Sequence
  Description of Artificial Sequence: Synthetic oligonucleotide
uuauuaguuguuuuaauaa

SEQ ID NO: 1885031 - RNA, 19 nt, Artificial Sequence
  Description of Artificial Sequence: Synthetic oligonucleotide
ugauccauuucaaauuggg

SEQ ID NO: 1885032 - RNA, 19 nt, Artificial Sequence
  Description of Artificial Sequence: Synthetic oligonucleotide
ucuaucagcuauuaugaag

SEQ ID NO: 1885033 - RNA, 19 nt, Artificial Sequence
  Description of Artificial Sequence: Synthetic oligonucleotide
gaauauggaacucccaaag

SEQ ID NO: 1885034 - RNA, 19 nt, Artificial Sequence
  Description of Artificial Sequence: Synthetic oligonucleotide
aacaguucaguuuauuagu

SEQ ID NO: 1885035 - RNA, 19 nt, Artificial Sequence
  Description of Artificial Sequence: Synthetic oligonucleotide
ucucauucccuuuuggagg

SEQ ID NO: 1885036 - RNA, 19 nt, Artificial Sequence
  Description of Artificial Sequence: Synthetic oligonucleotide
aaauauuccaaaccagcga

SEQ ID NO: 1885037 - RNA, 19 nt, Artificial Sequence
  Description of Artificial Sequence: Synthetic oligonucleotide
aauaugacccauuuccagu

SEQ ID NO: 1885038 - RNA, 19 nt, Artificial Sequence
  Description of Artificial Sequence: Synthetic oligonucleotide
agcaucacucaucuuaagc

SEQ ID NO: 1885039 - RNA, 19 nt, Artificial Sequence
  Description of Artificial Sequence: Synthetic oligonucleotide
aacagaauauggaacuccc

SEQ ID NO: 1885040 - RNA, 19 nt, Artificial Sequence
  Description of Artificial Sequence: Synthetic oligonucleotide
ucagguuucaucaaggauu

SEQ ID NO: 1885041 - RNA, 19 nt, Artificial Sequence
  Description of Artificial Sequence: Synthetic oligonucleotide
uggacgagaagcaucacag

SEQ ID NO: 1885042 - RNA, 19 nt, Artificial Sequence
  Description of Artificial Sequence: Synthetic oligonucleotide
ugggaaaucucauggaucc

SEQ ID NO: 1885043 - RNA, 19 nt, Artificial Sequence
  Description of Artificial Sequence: Synthetic oligonucleotide
uaggaccaaaauaugaccc

SEQ ID NO: 1885044 - RNA, 19 nt, Artificial Sequence
  Description of Artificial Sequence: Synthetic oligonucleotide
aagaugaucuguaucacag

SEQ ID NO: 1885045 - RNA, 19 nt, Artificial Sequence
  Description of Artificial Sequence: Synthetic oligonucleotide
gaaugguuaaggcagcugc

SEQ ID NO: 1885046 - RNA, 19 nt, Artificial Sequence
  Description of Artificial Sequence: Synthetic oligonucleotide
aagacauaggaccaaaaua

SEQ ID NO: 1885047 - RNA, 19 nt, Artificial Sequence
  Description of Artificial Sequence: Synthetic oligonucleotide
auccauuucaaauuggggu

SEQ ID NO: 1885048 - RNA, 19 nt, Artificial Sequence
  Description of Artificial Sequence: Synthetic oligonucleotide
aagcauaaaagagaggcug

SEQ ID NO: 1885049 - RNA, 19 nt, Artificial Sequence
  Description of Artificial Sequence: Synthetic oligonucleotide
aaagacauaggaccaaaau

SEQ ID NO: 1885050 - RNA, 19 nt, Artificial Sequence
  Description of Artificial Sequence: Synthetic oligonucleotide
cacucuaucagcuauuaug

SEQ ID NO: 1885051 - RNA, 19 nt, Artificial Sequence
  Description of Artificial Sequence: Synthetic oligonucleotide
agaagcaucacaguuauga

SEQ ID NO: 1885052 - RNA, 19 nt, Artificial Sequence
  Description of Artificial Sequence: Synthetic oligonucleotide
cacuaaguaaaaugaagcc

SEQ ID NO: 1885053 - RNA, 19 nt, Artificial Sequence
  Description of Artificial Sequence: Synthetic oligonucleotide
uuauaugaaggcugaguag

SEQ ID NO: 1885054 - RNA, 19 nt, Artificial Sequence
  Description of Artificial Sequence: Synthetic oligonucleotide
aaggauuugaucucuggau

SEQ ID NO: 1885055 - RNA, 19 nt, Artificial Sequence
  Description of Artificial Sequence: Synthetic oligonucleotide
aguucaguuuauuaguugu

SEQ ID NO: 1885056 - RNA, 19 nt, Artificial Sequence
  Description of Artificial Sequence: Synthetic oligonucleotide
aauugugggaaaucucaug

SEQ ID NO: 1885057 - RNA, 19 nt, Artificial Sequence
  Description of Artificial Sequence: Synthetic oligonucleotide
aauaucuacgucgaugcca

SEQ ID NO: 1885058 - RNA, 19 nt, Artificial Sequence
  Description of Artificial Sequence: Synthetic oligonucleotide
uaguuguuuuaauaaagca

SEQ ID NO: 1885059 - RNA, 19 nt, Artificial Sequence
  Description of Artificial Sequence: Synthetic oligonucleotide
gucuaaaagcauaaaagag

SEQ ID NO: 1885060 - RNA, 19 nt, Artificial Sequence
  Description of Artificial Sequence: Synthetic oligonucleotide
aucaguaggaauaucuacg

SEQ ID NO: 1885061 - RNA, 19 nt, Artificial Sequence
  Description of Artificial Sequence: Synthetic oligonucleotide
aaagaugaucuguaucaca

SEQ ID NO: 1885062 - RNA, 19 nt, Artificial Sequence
  Description of Artificial Sequence: Synthetic oligonucleotide
aaucucauucccuuuugga

SEQ ID NO: 1885063 - RNA, 19 nt, Artificial Sequence
  Description of Artificial Sequence: Synthetic oligonucleotide
uaaaagcauaaaagagagg

SEQ ID NO: 1885064 - RNA, 19 nt, Artificial Sequence
  Description of Artificial Sequence: Synthetic oligonucleotide
auuacaccagugcagcuuc

SEQ ID NO: 1885065 - RNA, 19 nt, Artificial Sequence
  Description of Artificial Sequence: Synthetic oligonucleotide
aaugguuaaggcagcugcc

SEQ ID NO: 1885066 - RNA, 19 nt, Artificial Sequence
  Description of Artificial Sequence: Synthetic oligonucleotide
ugggcugugauauuuacuc

SEQ ID NO: 1885067 - RNA, 19 nt, Artificial Sequence
  Description of Artificial Sequence: Synthetic oligonucleotide
aaauccucucgggacacgc

SEQ ID NO: 1885068 - RNA, 19 nt, Artificial Sequence
  Description of Artificial Sequence: Synthetic oligonucleotide
ggaauaucuacgucgaugc

SEQ ID NO: 1885069 - RNA, 19 nt, Artificial Sequence
  Description of Artificial Sequence: Synthetic oligonucleotide
agucauugaaugguuaagg

SEQ ID NO: 1885070 - RNA, 19 nt, Artificial Sequence
  Description of Artificial Sequence: Synthetic oligonucleotide
uuaugauccauuucaaauu

SEQ ID NO: 1885071 - RNA, 19 nt, Artificial Sequence
  Description of Artificial Sequence: Synthetic oligonucleotide
aguauugaugauuuccaga

SEQ ID NO: 1885072 - RNA, 19 nt, Artificial Sequence
  Description of Artificial Sequence: Synthetic oligonucleotide
uuaacaguucaguuuauua

SEQ ID NO: 1885073 - RNA, 19 nt, Artificial Sequence
  Description of Artificial Sequence: Synthetic oligonucleotide
gaaauugugggaaaucuca

SEQ ID NO: 1885074 - RNA, 19 nt, Artificial Sequence
  Description of Artificial Sequence: Synthetic oligonucleotide
uccguauagacccacucga

SEQ ID NO: 1885075 - RNA, 19 nt, Artificial Sequence
  Description of Artificial Sequence: Synthetic oligonucleotide
uccauuucaaauugggguc

SEQ ID NO: 1885076 - RNA, 19 nt, Artificial Sequence
  Description of Artificial Sequence: Synthetic oligonucleotide
agacauaggaccaaaauau

SEQ ID NO: 1885077 - RNA, 19 nt, Artificial Sequence
  Description of Artificial Sequence: Synthetic oligonucleotide
auuggggucagguuucauc

SEQ ID NO: 1885078 - RNA, 19 nt, Artificial Sequence
  Description of Artificial Sequence: Synthetic oligonucleotide
augaaggcugaguagcuuc

SEQ ID NO: 1885079 - RNA, 19 nt, Artificial Sequence
  Description of Artificial Sequence: Synthetic oligonucleotide
uuucacuaaguaaaaugaa

SEQ ID NO: 1885080 - RNA, 19 nt, Artificial Sequence
  Description of Artificial Sequence: Synthetic oligonucleotide
aaaucauacaguacuuuga

SEQ ID NO: 1885081 - RNA, 19 nt, Artificial Sequence
  Description of Artificial Sequence: Synthetic oligonucleotide
ucaguaggaauaucuacgu

SEQ ID NO: 1885082 - RNA, 19 nt, Artificial Sequence
  Description of Artificial Sequence: Synthetic oligonucleotide
auagacccacucgaaaucc

SEQ ID NO: 1885083 - RNA, 19 nt, Artificial Sequence
  Description of Artificial Sequence: Synthetic oligonucleotide
caucuuaagcuuaacaaga

SEQ ID NO: 1885084 - RNA, 19 nt, Artificial Sequence
  Description of Artificial Sequence: Synthetic oligonucleotide
uugaugauuuccagagaag

SEQ ID NO: 1885085 - RNA, 19 nt, Artificial Sequence
  Description of Artificial Sequence: Synthetic oligonucleotide
agcccucaaaaucaguagg

SEQ ID NO: 1885086 - RNA, 19 nt, Artificial Sequence
  Description of Artificial Sequence: Synthetic oligonucleotide
ugaucuguaucacaguauu

SEQ ID NO: 1885087 - RNA, 19 nt, Artificial Sequence
  Description of Artificial Sequence: Synthetic oligonucleotide
uucugagcaucacucaucu

SEQ ID NO: 1885088 - RNA, 19 nt, Artificial Sequence
  Description of Artificial Sequence: Synthetic oligonucleotide
gaaucucauucccuuuugg

SEQ ID NO: 1885089 - RNA, 19 nt, Artificial Sequence
  Description of Artificial Sequence: Synthetic oligonucleotide
aucucauggauccccagag

SEQ ID NO: 1885090 - RNA, 19 nt, Artificial Sequence
  Description of Artificial Sequence: Synthetic oligonucleotide
uuacuccagaaucucauuc

SEQ ID NO: 1885091 - RNA, 19 nt, Artificial Sequence
  Description of Artificial Sequence: Synthetic oligonucleotide
gucauugaaugguuaaggc

SEQ ID NO: 1885092 - RNA, 19 nt, Artificial Sequence
  Description of Artificial Sequence: Synthetic oligonucleotide
cagguaccgaugaugaucc

SEQ ID NO: 1885093 - RNA, 19 nt, Artificial Sequence
  Description of Artificial Sequence: Synthetic oligonucleotide
aaucucauggauccccaga

SEQ ID NO: 1885094 - RNA, 19 nt, Artificial Sequence
  Description of Artificial Sequence: Synthetic oligonucleotide
aaaauaugacccauuucca

SEQ ID NO: 1885095 - RNA, 19 nt, Artificial Sequence
  Description of Artificial Sequence: Synthetic oligonucleotide
uauagacccacucgaaauc

SEQ ID NO: 1885096 - RNA, 19 nt, Artificial Sequence
  Description of Artificial Sequence: Synthetic oligonucleotide
agccaacuggacgagaagc

SEQ ID NO: 1885097 - RNA, 19 nt, Artificial Sequence
  Description of Artificial Sequence: Synthetic oligonucleotide
auuccaaaccagcgauucc

SEQ ID NO: 1885098 - RNA, 19 nt, Artificial Sequence
  Description of Artificial Sequence: Synthetic oligonucleotide
ugugggaaaucucauggau

SEQ ID NO: 1885099 - RNA, 19 nt, Artificial Sequence
  Description of Artificial Sequence: Synthetic oligonucleotide
aguuguuuuaauaaagcaa

SEQ ID NO: 1885100 - RNA, 19 nt, Artificial Sequence
  Description of Artificial Sequence: Synthetic oligonucleotide
aaguaaaaugaagccaacu

SEQ ID NO: 1885101 - RNA, 19 nt, Artificial Sequence
  Description of Artificial Sequence: Synthetic oligonucleotide
guggagaggaauuccuugg

SEQ ID NO: 1885102 - RNA, 19 nt, Artificial Sequence
  Description of Artificial Sequence: Synthetic oligonucleotide
gggucuaaaagcauaaaag

SEQ ID NO: 1885103 - RNA, 19 nt, Artificial Sequence
  Description of Artificial Sequence: Synthetic oligonucleotide
uggaacucccaaagggagg

SEQ ID NO: 1885104 - RNA, 19 nt, Artificial Sequence
  Description of Artificial Sequence: Synthetic oligonucleotide
aaaccagcgauuccauaga

SEQ ID NO: 1885105 - RNA, 19 nt, Artificial Sequence
  Description of Artificial Sequence: Synthetic oligonucleotide
acucaucuuaagcuuaaca

SEQ ID NO: 1885106 - RNA, 19 nt, Artificial Sequence
  Description of Artificial Sequence: Synthetic oligonucleotide
uacgucgaugccaucagcu

SEQ ID NO: 1885107 - RNA, 19 nt, Artificial Sequence
  Description of Artificial Sequence: Synthetic oligonucleotide
ccgaugaugauccaugugg

SEQ ID NO: 1885108 - RNA, 19 nt, Artificial Sequence
  Description of Artificial Sequence: Synthetic oligonucleotide
cucgaaauccucucgggac

SEQ ID NO: 1885109 - RNA, 19 nt, Artificial Sequence
  Description of Artificial Sequence: Synthetic oligonucleotide
ucacaaaaucauacaguac

SEQ ID NO: 1885110 - RNA, 19 nt, Artificial Sequence
  Description of Artificial Sequence: Synthetic oligonucleotide
aaaucucauggauccccag

SEQ ID NO: 1885111 - RNA, 19 nt, Artificial Sequence
  Description of Artificial Sequence: Synthetic oligonucleotide
aggaauaucuacgucgaug

SEQ ID NO: 1885112 - RNA, 19 nt, Artificial Sequence
  Description of Artificial Sequence: Synthetic oligonucleotide
aacuuuauaugaaggcuga

SEQ ID NO: 1885113 - RNA, 19 nt, Artificial Sequence
  Description of Artificial Sequence: Synthetic oligonucleotide
acucuaucagcuauuauga

SEQ ID NO: 1885114 - RNA, 19 nt, Artificial Sequence
  Description of Artificial Sequence: Synthetic oligonucleotide
uaaguaaaaugaagccaac

SEQ ID NO: 1885115 - RNA, 19 nt, Artificial Sequence
  Description of Artificial Sequence: Synthetic oligonucleotide
aaagcauaaaagagaggcu

SEQ ID NO: 1885116 - RNA, 19 nt, Artificial Sequence
  Description of Artificial Sequence: Synthetic oligonucleotide
auugaaugguuaaggcagc

SEQ ID NO: 1885117 - RNA, 19 nt, Artificial Sequence
  Description of Artificial Sequence: Synthetic oligonucleotide
uuccaaaccagcgauucca

SEQ ID NO: 1885118 - RNA, 19 nt, Artificial Sequence
  Description of Artificial Sequence: Synthetic oligonucleotide
ucccagguaccgaugauga

SEQ ID NO: 1885119 - RNA, 19 nt, Artificial Sequence
  Description of Artificial Sequence: Synthetic oligonucleotide
cucauucccuuuuggaggc

SEQ ID NO: 1885120 - RNA, 19 nt, Artificial Sequence
  Description of Artificial Sequence: Synthetic oligonucleotide
auacuuugccaggaucucc

SEQ ID NO: 1885121 - RNA, 19 nt, Artificial Sequence
  Description of Artificial Sequence: Synthetic oligonucleotide
ucuuaagcuuaacaagaua

SEQ ID NO: 1885122 - RNA, 19 nt, Artificial Sequence
  Description of Artificial Sequence: Synthetic oligonucleotide
aaauuacaccagugcagcu

SEQ ID NO: 1885123 - RNA, 19 nt, Artificial Sequence
  Description of Artificial Sequence: Synthetic oligonucleotide
guccguauagacccacucg

SEQ ID NO: 1885124 - RNA, 19 nt, Artificial Sequence
  Description of Artificial Sequence: Synthetic oligonucleotide
aacuggacgagaagcauca

SEQ ID NO: 1885125 - RNA, 19 nt, Artificial Sequence
  Description of Artificial Sequence: Synthetic oligonucleotide
auuccuugggcugugauau

SEQ ID NO: 1885126 - RNA, 19 nt, Artificial Sequence
  Description of Artificial Sequence: Synthetic oligonucleotide
ggaaauuacaccagugcag

SEQ ID NO: 1885127 - RNA, 19 nt, Artificial Sequence
  Description of Artificial Sequence: Synthetic oligonucleotide
agagucauugaaugguuaa

SEQ ID NO: 1885128 - RNA, 19 nt, Artificial Sequence
  Description of Artificial Sequence: Synthetic oligonucleotide
aauuacaccagugcagcuu

SEQ ID NO: 1885129 - RNA, 19 nt, Artificial Sequence
  Description of Artificial Sequence: Synthetic oligonucleotide
gaaccagcccucaaaauca

SEQ ID NO: 1885130 - RNA, 19 nt, Artificial Sequence
  Description of Artificial Sequence: Synthetic oligonucleotide
agaaucucauucccuuuug

SEQ ID NO: 1885131 - RNA, 19 nt, Artificial Sequence
  Description of Artificial Sequence: Synthetic oligonucleotide
uuaugaagcuguggagagg

SEQ ID NO: 1885132 - RNA, 19 nt, Artificial Sequence
  Description of Artificial Sequence: Synthetic oligonucleotide
gcaaauauuccaaaccagc

SEQ ID NO: 1885133 - RNA, 19 nt, Artificial Sequence
  Description of Artificial Sequence: Synthetic oligonucleotide
gagucauugaaugguuaag

SEQ ID NO: 1885134 - RNA, 19 nt, Artificial Sequence
  Description of Artificial Sequence: Synthetic oligonucleotide
caaauuggggucagguuuc

SEQ ID NO: 1885135 - RNA, 19 nt, Artificial Sequence
  Description of Artificial Sequence: Synthetic oligonucleotide
aggaccaaaauaugaccca

SEQ ID NO: 1885136 - RNA, 19 nt, Artificial Sequence
  Description of Artificial Sequence: Synthetic oligonucleotide
caguauugaugauuuccag

SEQ ID NO: 1885137 - RNA, 19 nt, Artificial Sequence
  Description of Artificial Sequence: Synthetic oligonucleotide
aaaucaguaggaauaucua

SEQ ID NO: 1885138 - RNA, 19 nt, Artificial Sequence
  Description of Artificial Sequence: Synthetic oligonucleotide
aagccaacuggacgagaag

SEQ ID NO: 1885139 - RNA, 19 nt, Artificial Sequence
  Description of Artificial Sequence: Synthetic oligonucleotide
cuuugugguggccgaaggg

SEQ ID NO: 1885140 - RNA, 19 nt, Artificial Sequence
  Description of Artificial Sequence: Synthetic oligonucleotide
uccagaaucucauucccuu

SEQ ID NO: 1885141 - RNA, 19 nt, Artificial Sequence
  Description of Artificial Sequence: Synthetic oligonucleotide
uuggaggccucuucauccg

SEQ ID NO: 1885142 - RNA, 19 nt, Artificial Sequence
  Description of Artificial Sequence: Synthetic oligonucleotide
gacauaggaccaaaauaug

SEQ ID NO: 1885143 - RNA, 19 nt, Artificial Sequence
  Description of Artificial Sequence: Synthetic oligonucleotide
gaauaucuacgucgaugcc

SEQ ID NO: 1885144 - RNA, 19 nt, Artificial Sequence
  Description of Artificial Sequence: Synthetic oligonucleotide
guuggaaauuacaccagug

SEQ ID NO: 1885145 - RNA, 19 nt, Artificial Sequence
  Description of Artificial Sequence: Synthetic oligonucleotide
aauuccacucuaucagcua

SEQ ID NO: 1885146 - RNA, 19 nt, Artificial Sequence
  Description of Artificial Sequence: Synthetic oligonucleotide
ccaucacaaaaucauacag

SEQ ID NO: 1885147 - RNA, 19 nt, Artificial Sequence
  Description of Artificial Sequence: Synthetic oligonucleotide
uaggggucuaaaagcauaa

SEQ ID NO: 1885148 - RNA, 19 nt, Artificial Sequence
  Description of Artificial Sequence: Synthetic oligonucleotide
aucucuggauacuuugcca

SEQ ID NO: 1885149 - RNA, 19 nt, Artificial Sequence
  Description of Artificial Sequence: Synthetic oligonucleotide
agcuauuaugaagcugugg

SEQ ID NO: 1885150 - RNA, 19 nt, Artificial Sequence
  Description of Artificial Sequence: Synthetic oligonucleotide
cucuggauacuuugccagg

SEQ ID NO: 1885151 - RNA, 19 nt, Artificial Sequence
  Description of Artificial Sequence: Synthetic oligonucleotide
uggauccccagagucauug

SEQ ID NO: 1885152 - RNA, 19 nt, Artificial Sequence
  Description of Artificial Sequence: Synthetic oligonucleotide
uugugggaaaucucaugga

SEQ ID NO: 1885153 - RNA, 19 nt, Artificial Sequence
  Description of Artificial Sequence: Synthetic oligonucleotide
cacucgaaauccucucggg

SEQ ID NO: 1885154 - RNA, 19 nt, Artificial Sequence
  Description of Artificial Sequence: Synthetic oligonucleotide
uucaaauuggggucagguu

SEQ ID NO: 1885155 - RNA, 19 nt, Artificial Sequence
  Description of Artificial Sequence: Synthetic oligonucleotide
acucgaaauccucucggga

SEQ ID NO: 1885156 - RNA, 19 nt, Artificial Sequence
  Description of Artificial Sequence: Synthetic oligonucleotide
uaucagcuauuaugaagcu

SEQ ID NO: 1885157 - RNA, 19 nt, Artificial Sequence
  Description of Artificial Sequence: Synthetic oligonucleotide
caguucaguuuauuaguug

SEQ ID NO: 1885158 - RNA, 19 nt, Artificial Sequence
  Description of Artificial Sequence: Synthetic oligonucleotide
ugucaaagaugaucuguau

SEQ ID NO: 1885159 - RNA, 19 nt, Artificial Sequence
  Description of Artificial Sequence: Synthetic oligonucleotide
uccaugugguaucucuuaa

SEQ ID NO: 1885160 - RNA, 19 nt, Artificial Sequence
  Description of Artificial Sequence: Synthetic oligonucleotide
ucacaguuaugauccauuu

SEQ ID NO: 1885161 - RNA, 19 nt, Artificial Sequence
  Description of Artificial Sequence: Synthetic oligonucleotide
aaauugugggaaaucucau

SEQ ID NO: 1885162 - RNA, 19 nt, Artificial Sequence
  Description of Artificial Sequence: Synthetic oligonucleotide
guaccgaugaugauccaug

SEQ ID NO: 1885163 - RNA, 19 nt, Artificial Sequence
  Description of Artificial Sequence: Synthetic oligonucleotide
uuggcgugcggcugguccg

SEQ ID NO: 1885164 - RNA, 19 nt, Artificial Sequence
  Description of Artificial Sequence: Synthetic oligonucleotide
cuucugagcaucacucauc

SEQ ID NO: 1885165 - RNA, 19 nt, Artificial Sequence
  Description of Artificial Sequence: Synthetic oligonucleotide
gagaggaauuccuugggcu

SEQ ID NO: 1885166 - RNA, 19 nt, Artificial Sequence
  Description of Artificial Sequence: Synthetic oligonucleotide
agaugaucuguaucacagu

SEQ ID NO: 1885167 - RNA, 19 nt, Artificial Sequence
  Description of Artificial Sequence: Synthetic oligonucleotide
ucucgggacacgcggcucc

SEQ ID NO: 1885168 - RNA, 19 nt, Artificial Sequence
  Description of Artificial Sequence: Synthetic oligonucleotide
caaggauuugaucucugga

SEQ ID NO: 1885169 - RNA, 19 nt, Artificial Sequence
  Description of Artificial Sequence: Synthetic oligonucleotide
guaggaauaucuacgucga

SEQ ID NO: 1885170 - RNA, 19 nt, Artificial Sequence
  Description of Artificial Sequence: Synthetic oligonucleotide
aucuacgucgaugccauca

SEQ ID NO: 1885171 - RNA, 19 nt, Artificial Sequence
  Description of Artificial Sequence: Synthetic oligonucleotide
accagcgauuccauagagc

SEQ ID NO: 1885172 - RNA, 19 nt, Artificial Sequence
  Description of Artificial Sequence: Synthetic oligonucleotide
guaucucuuaaaagaaaca

SEQ ID NO: 1885173 - RNA, 19 nt, Artificial Sequence
  Description of Artificial Sequence: Synthetic oligonucleotide
uuuacuccagaaucucauu

SEQ ID NO: 1885174 - RNA, 19 nt, Artificial Sequence
  Description of Artificial Sequence: Synthetic oligonucleotide
ccgaaggggaaauuguggg

SEQ ID NO: 1885175 - RNA, 19 nt, Artificial Sequence
  Description of Artificial Sequence: Synthetic oligonucleotide
caacuggacgagaagcauc

SEQ ID NO: 1885176 - RNA, 19 nt, Artificial Sequence
  Description of Artificial Sequence: Synthetic oligonucleotide
augauccauuucaaauugg

SEQ ID NO: 1885177 - RNA, 19 nt, Artificial Sequence
  Description of Artificial Sequence: Synthetic oligonucleotide
aauccucucgggacacgcg

SEQ ID NO: 1885178 - RNA, 19 nt, Artificial Sequence
  Description of Artificial Sequence: Synthetic oligonucleotide
auaucuacgucgaugccau

SEQ ID NO: 1885179 - RNA, 19 nt, Artificial Sequence
  Description of Artificial Sequence: Synthetic oligonucleotide
ugguuaaggcagcugccaa

SEQ ID NO: 1885180 - RNA, 19 nt, Artificial Sequence
  Description of Artificial Sequence: Synthetic oligonucleotide
agagcuuugugguggccga

SEQ ID NO: 1885181 - RNA, 19 nt, Artificial Sequence
  Description of Artificial Sequence: Synthetic oligonucleotide
ugaagcuguggagaggaau

SEQ ID NO: 1885182 - RNA, 19 nt, Artificial Sequence
  Description of Artificial Sequence: Synthetic oligonucleotide
aucagcuauuaugaagcug

SEQ ID NO: 1885183 - RNA, 19 nt, Artificial Sequence
  Description of Artificial Sequence: Synthetic oligonucleotide
cacaguuaugauccauuuc

SEQ ID NO: 1885184 - RNA, 19 nt, Artificial Sequence
  Description of Artificial Sequence: Synthetic oligonucleotide
gauacuuugccaggaucuc

SEQ ID NO: 1885185 - RNA, 19 nt, Artificial Sequence
  Description of Artificial Sequence: Synthetic oligonucleotide
gaugauuuccagagaagua

SEQ ID NO: 1885186 - RNA, 19 nt, Artificial Sequence
  Description of Artificial Sequence: Synthetic oligonucleotide
uaccgaugaugauccaugu

SEQ ID NO: 1885187 - RNA, 19 nt, Artificial Sequence
  Description of Artificial Sequence: Synthetic oligonucleotide
accgaugaugauccaugug

SEQ ID NO: 1885188 - RNA, 19 nt, Artificial Sequence
  Description of Artificial Sequence: Synthetic oligonucleotide
gacacgcggcuccccaugg

SEQ ID NO: 1885189 - RNA, 19 nt, Artificial Sequence
  Description of Artificial Sequence: Synthetic oligonucleotide
guauagacccacucgaaau

SEQ ID NO: 1885190 - RNA, 19 nt, Artificial Sequence
  Description of Artificial Sequence: Synthetic oligonucleotide
acuuuauaugaaggcugag

SEQ ID NO: 1885191 - RNA, 19 nt, Artificial Sequence
  Description of Artificial Sequence: Synthetic oligonucleotide
gacgagaagcaucacaguu

SEQ ID NO: 1885192 - RNA, 19 nt, Artificial Sequence
  Description of Artificial Sequence: Synthetic oligonucleotide
augacccauuuccagucca

SEQ ID NO: 1885193 - RNA, 19 nt, Artificial Sequence
  Description of Artificial Sequence: Synthetic oligonucleotide
uagacccacucgaaauccu

SEQ ID NO: 1885194 - RNA, 19 nt, Artificial Sequence
  Description of Artificial Sequence: Synthetic oligonucleotide
gaaaucucauggaucccca

SEQ ID NO: 1885195 - RNA, 19 nt, Artificial Sequence
  Description of Artificial Sequence: Synthetic oligonucleotide
auagagcuuugugguggcc

SEQ ID NO: 1885196 - RNA, 19 nt, Artificial Sequence
  Description of Artificial Sequence: Synthetic oligonucleotide
gaugaugauccauguggua

SEQ ID NO: 1885197 - RNA, 19 nt, Artificial Sequence
  Description of Artificial Sequence: Synthetic oligonucleotide
augguuaaggcagcugcca

SEQ ID NO: 1885198 - RNA, 19 nt, Artificial Sequence
  Description of Artificial Sequence: Synthetic oligonucleotide
gugguaucucuuaaaagaa

SEQ ID NO: 1885199 - RNA, 19 nt, Artificial Sequence
  Description of Artificial Sequence: Synthetic oligonucleotide
auccaugugguaucucuua

SEQ ID NO: 1885200 - RNA, 19 nt, Artificial Sequence
  Description of Artificial Sequence: Synthetic oligonucleotide
agguuagcaaauauuccaa

SEQ ID NO: 1885201 - RNA, 19 nt, Artificial Sequence
  Description of Artificial Sequence: Synthetic oligonucleotide
cacgcggcuccccauggcg

SEQ ID NO: 1885202 - RNA, 19 nt, Artificial Sequence
  Description of Artificial Sequence: Synthetic oligonucleotide
ggggucuaaaagcauaaaa

SEQ ID NO: 1885203 - RNA, 19 nt, Artificial Sequence
  Description of Artificial Sequence: Synthetic oligonucleotide
aucuuaagcuuaacaagau

SEQ ID NO: 1885204 - RNA, 19 nt, Artificial Sequence
  Description of Artificial Sequence: Synthetic oligonucleotide
uccucucgggacacgcggc

SEQ ID NO: 1885205 - RNA, 19 nt, Artificial Sequence
  Description of Artificial Sequence: Synthetic oligonucleotide
cuuuauaugaaggcugagu

SEQ ID NO: 1885206 - RNA, 19 nt, Artificial Sequence
  Description of Artificial Sequence: Synthetic oligonucleotide
agacccacucgaaauccuc

SEQ ID NO: 1885207 - RNA, 19 nt, Artificial Sequence
  Description of Artificial Sequence: Synthetic oligonucleotide
auaugaaggcugaguagcu

SEQ ID NO: 1885208 - RNA, 19 nt, Artificial Sequence
  Description of Artificial Sequence: Synthetic oligonucleotide
cccauuuccaguccaaguc

SEQ ID NO: 1885209 - RNA, 19 nt, Artificial Sequence
  Description of Artificial Sequence: Synthetic oligonucleotide
gugggaaaucucauggauc

SEQ ID NO: 1885210 - RNA, 19 nt, Artificial Sequence
  Description of Artificial Sequence: Synthetic oligonucleotide
aaauuggggucagguuuca

SEQ ID NO: 1885211 - RNA, 19 nt, Artificial Sequence
  Description of Artificial Sequence: Synthetic oligonucleotide
caguaggaauaucuacguc

SEQ ID NO: 1885212 - RNA, 19 nt, Artificial Sequence
  Description of Artificial Sequence: Synthetic oligonucleotide
acugagauccugguuggaa

SEQ ID NO: 1885213 - RNA, 19 nt, Artificial Sequence
  Description of Artificial Sequence: Synthetic oligonucleotide
cuggacgagaagcaucaca

SEQ ID NO: 1885214 - RNA, 19 nt, Artificial Sequence
  Description of Artificial Sequence: Synthetic oligonucleotide
cugagauccugguuggaaa

SEQ ID NO: 1885215 - RNA, 19 nt, Artificial Sequence
  Description of Artificial Sequence: Synthetic oligonucleotide
aucacaguuaugauccauu

SEQ ID NO: 1885216 - RNA, 19 nt, Artificial Sequence
  Description of Artificial Sequence: Synthetic oligonucleotide
uacaccagugcagcuucug

SEQ ID NO: 1885217 - RNA, 19 nt, Artificial Sequence
  Description of Artificial Sequence: Synthetic oligonucleotide
acacgcggcuccccauggc

SEQ ID NO: 1885218 - RNA, 19 nt, Artificial Sequence
  Description of Artificial Sequence: Synthetic oligonucleotide
uccacucuaucagcuauua

SEQ ID NO: 1885219 - RNA, 19 nt, Artificial Sequence
  Description of Artificial Sequence: Synthetic oligonucleotide
uaggaauaucuacgucgau

SEQ ID NO: 1885220 - RNA, 19 nt, Artificial Sequence
  Description of Artificial Sequence: Synthetic oligonucleotide
caaagacauaggaccaaaa

SEQ ID NO: 1885221 - RNA, 19 nt, Artificial Sequence
  Description of Artificial Sequence: Synthetic oligonucleotide
ccacucgaaauccucucgg

SEQ ID NO: 1885222 - RNA, 19 nt, Artificial Sequence
  Description of Artificial Sequence: Synthetic oligonucleotide
agauccugguuggaaauua

SEQ ID NO: 1885223 - RNA, 19 nt, Artificial Sequence
  Description of Artificial Sequence: Synthetic oligonucleotide
augaagccaacuggacgag

SEQ ID NO: 1885224 - RNA, 19 nt, Artificial Sequence
  Description of Artificial Sequence: Synthetic oligonucleotide
acgagaagcaucacaguua

SEQ ID NO: 1885225 - RNA, 19 nt, Artificial Sequence
  Description of Artificial Sequence: Synthetic oligonucleotide
ggaaauugugggaaaucuc

SEQ ID NO: 1885226 - RNA, 19 nt, Artificial Sequence
  Description of Artificial Sequence: Synthetic oligonucleotide
gcugugauauuuacuccag

SEQ ID NO: 1885227 - RNA, 19 nt, Artificial Sequence
  Description of Artificial Sequence: Synthetic oligonucleotide
cagcuauuaugaagcugug

SEQ ID NO: 1885228 - RNA, 19 nt, Artificial Sequence
  Description of Artificial Sequence: Synthetic oligonucleotide
gguuagcaaauauuccaaa

SEQ ID NO: 1885229 - RNA, 19 nt, Artificial Sequence
  Description of Artificial Sequence: Synthetic oligonucleotide
uuacaccagugcagcuucu

SEQ ID NO: 1885230 - RNA, 19 nt, Artificial Sequence
  Description of Artificial Sequence: Synthetic oligonucleotide
gaggccucuucauccguga

SEQ ID NO: 1885231 - RNA, 19 nt, Artificial Sequence
  Description of Artificial Sequence: Synthetic oligonucleotide
ugguccguauagacccacu

SEQ ID NO: 1885232 - RNA, 19 nt, Artificial Sequence
  Description of Artificial Sequence: Synthetic oligonucleotide
caucagcucccagguaccg

SEQ ID NO: 1885233 - RNA, 19 nt, Artificial Sequence
  Description of Artificial Sequence: Synthetic oligonucleotide
ccagcgauuccauagagcu

SEQ ID NO: 1885234 - RNA, 19 nt, Artificial Sequence
  Description of Artificial Sequence: Synthetic oligonucleotide
gggcugugauauuuacucc

SEQ ID NO: 1885235 - RNA, 19 nt, Artificial Sequence
  Description of Artificial Sequence: Synthetic oligonucleotide
ccacugagauccugguugg

SEQ ID NO: 1885236 - RNA, 19 nt, Artificial Sequence
  Description of Artificial Sequence: Synthetic oligonucleotide
ccagguaccgaugaugauc

SEQ ID NO: 1885237 - RNA, 19 nt, Artificial Sequence
  Description of Artificial Sequence: Synthetic oligonucleotide
uucccuuuuggaggccucu

SEQ ID NO: 1885238 - RNA, 19 nt, Artificial Sequence
  Description of Artificial Sequence: Synthetic oligonucleotide
cugugauauuuacuccaga

SEQ ID NO: 1885239 - RNA, 19 nt, Artificial Sequence
  Description of Artificial Sequence: Synthetic oligonucleotide
augauccaugugguaucuc

SEQ ID NO: 1885240 - RNA, 19 nt, Artificial Sequence
  Description of Artificial Sequence: Synthetic oligonucleotide
aggggaaauugugggaaau

SEQ ID NO: 1885241 - RNA, 19 nt, Artificial Sequence
  Description of Artificial Sequence: Synthetic oligonucleotide
gguccguauagacccacuc

SEQ ID NO: 1885242 - RNA, 19 nt, Artificial Sequence
  Description of Artificial Sequence: Synthetic oligonucleotide
cucuaucagcuauuaugaa

SEQ ID NO: 1885243 - RNA, 19 nt, Artificial Sequence
  Description of Artificial Sequence: Synthetic oligonucleotide
gaugauccaugugguaucu

SEQ ID NO: 1885244 - RNA, 19 nt, Artificial Sequence
  Description of Artificial Sequence: Synthetic oligonucleotide
gugcaaacccaggccaagc

SEQ ID NO: 1885245 - RNA, 19 nt, Artificial Sequence
  Description of Artificial Sequence: Synthetic oligonucleotide
cccacucgaaauccucucg

SEQ ID NO: 1885246 - RNA, 19 nt, Artificial Sequence
  Description of Artificial Sequence: Synthetic oligonucleotide
gggaaauugugggaaaucu

SEQ ID NO: 1885247 - RNA, 19 nt, Artificial Sequence
  Description of Artificial Sequence: Synthetic oligonucleotide
ccccagagucauugaaugg

SEQ ID NO: 1885248 - RNA, 19 nt, Artificial Sequence
  Description of Artificial Sequence: Synthetic oligonucleotide
gaguagcuucugaugccac

SEQ ID NO: 1885249 - RNA, 19 nt, Artificial Sequence
  Description of Artificial Sequence: Synthetic oligonucleotide
caucacucaucuuaagcuu

SEQ ID NO: 1885250 - RNA, 19 nt, Artificial Sequence
  Description of Artificial Sequence: Synthetic oligonucleotide
cagagucauugaaugguua

SEQ ID NO: 1885251 - RNA, 19 nt, Artificial Sequence
  Description of Artificial Sequence: Synthetic oligonucleotide
aggaauuccuugggcugug

SEQ ID NO: 1885252 - RNA, 19 nt, Artificial Sequence
  Description of Artificial Sequence: Synthetic oligonucleotide
gguuaaggcagcugccaaa

SEQ ID NO: 1885253 - RNA, 19 nt, Artificial Sequence
  Description of Artificial Sequence: Synthetic oligonucleotide
ucauucccuuuuggaggcc

SEQ ID NO: 1885254 - RNA, 19 nt, Artificial Sequence
  Description of Artificial Sequence: Synthetic oligonucleotide
ggugcaaacccaggccaag

SEQ ID NO: 1885255 - RNA, 19 nt, Artificial Sequence
  Description of Artificial Sequence: Synthetic oligonucleotide
ugcggcugguccguauaga

SEQ ID NO: 1885256 - RNA, 19 nt, Artificial Sequence
  Description of Artificial Sequence: Synthetic oligonucleotide
auauuccaaaccagcgauu

SEQ ID NO: 1885257 - RNA, 19 nt, Artificial Sequence
  Description of Artificial Sequence: Synthetic oligonucleotide
gaauuccuugggcugugau

SEQ ID NO: 1885258 - RNA, 19 nt, Artificial Sequence
  Description of Artificial Sequence: Synthetic oligonucleotide
ccaucagcucccagguacc

SEQ ID NO: 1885259 - RNA, 19 nt, Artificial Sequence
  Description of Artificial Sequence: Synthetic oligonucleotide
gagaagcaucacaguuaug

SEQ ID NO: 1885260 - RNA, 19 nt, Artificial Sequence
  Description of Artificial Sequence: Synthetic oligonucleotide
ggccgaaggggaaauugug

SEQ ID NO: 1885261 - RNA, 19 nt, Artificial Sequence
  Description of Artificial Sequence: Synthetic oligonucleotide
cacucaucuuaagcuuaac

SEQ ID NO: 1885262 - RNA, 19 nt, Artificial Sequence
  Description of Artificial Sequence: Synthetic oligonucleotide
ucugagcaucacucaucuu

SEQ ID NO: 1885263 - RNA, 19 nt, Artificial Sequence
  Description of Artificial Sequence: Synthetic oligonucleotide
ggggaaauugugggaaauc

SEQ ID NO: 1885264 - RNA, 19 nt, Artificial Sequence
  Description of Artificial Sequence: Synthetic oligonucleotide
cugguccguauagacccac

SEQ ID NO: 1885265 - RNA, 19 nt, Artificial Sequence
  Description of Artificial Sequence: Synthetic oligonucleotide
gcccucaaaaucaguagga

SEQ ID NO: 1885266 - RNA, 19 nt, Artificial Sequence
  Description of Artificial Sequence: Synthetic oligonucleotide
aggggucuaaaagcauaaa

SEQ ID NO: 1885267 - RNA, 19 nt, Artificial Sequence
  Description of Artificial Sequence: Synthetic oligonucleotide
cuuuuggaggccucuucau

SEQ ID NO: 1885268 - RNA, 19 nt, Artificial Sequence
  Description of Artificial Sequence: Synthetic oligonucleotide
ggaacucccaaagggaggu

SEQ ID NO: 1885269 - RNA, 19 nt, Artificial Sequence
  Description of Artificial Sequence: Synthetic oligonucleotide
ucucccggcgccgguuggc

SEQ ID NO: 1885270 - RNA, 19 nt, Artificial Sequence
  Description of Artificial Sequence: Synthetic oligonucleotide
cuccagaaucucauucccu

SEQ ID NO: 1885271 - RNA, 19 nt, Artificial Sequence
  Description of Artificial Sequence: Synthetic oligonucleotide
ggacacgcggcuccccaug

SEQ ID NO: 1885272 - RNA, 19 nt, Artificial Sequence
  Description of Artificial Sequence: Synthetic oligonucleotide
uaucuacgucgaugccauc

SEQ ID NO: 1885273 - RNA, 19 nt, Artificial Sequence
  Description of Artificial Sequence: Synthetic oligonucleotide
aggccucuucauccgugaa

SEQ ID NO: 1885274 - RNA, 19 nt, Artificial Sequence
  Description of Artificial Sequence: Synthetic oligonucleotide
cauggauccccagagucau

SEQ ID NO: 1885275 - RNA, 19 nt, Artificial Sequence
  Description of Artificial Sequence: Synthetic oligonucleotide
gcagcuucugagcaucacu

SEQ ID NO: 1885276 - RNA, 19 nt, Artificial Sequence
  Description of Artificial Sequence: Synthetic oligonucleotide
ugguggccgaaggggaaau

SEQ ID NO: 1885277 - RNA, 19 nt, Artificial Sequence
  Description of Artificial Sequence: Synthetic oligonucleotide
agguaccgaugaugaucca

SEQ ID NO: 1885278 - RNA, 19 nt, Artificial Sequence
  Description of Artificial Sequence: Synthetic oligonucleotide
gucuuucacuaaguaaaau

SEQ ID NO: 1885279 - RNA, 19 nt, Artificial Sequence
  Description of Artificial Sequence: Synthetic oligonucleotide
cucgggacacgcggcuccc

SEQ ID NO: 1885280 - RNA, 19 nt, Artificial Sequence
  Description of Artificial Sequence: Synthetic oligonucleotide
accagcccucaaaaucagu

SEQ ID NO: 1885281 - RNA, 19 nt, Artificial Sequence
  Description of Artificial Sequence: Synthetic oligonucleotide
ccauuuccaguccaagucu

SEQ ID NO: 1885282 - RNA, 19 nt, Artificial Sequence
  Description of Artificial Sequence: Synthetic oligonucleotide
cguauagacccacucgaaa

SEQ ID NO: 1885283 - RNA, 19 nt, Artificial Sequence
  Description of Artificial Sequence: Synthetic oligonucleotide
ccaugugguaucucuuaaa

SEQ ID NO: 1885284 - RNA, 19 nt, Artificial Sequence
  Description of Artificial Sequence: Synthetic oligonucleotide
uggcgugcggcugguccgu

SEQ ID NO: 1885285 - RNA, 19 nt, Artificial Sequence
  Description of Artificial Sequence: Synthetic oligonucleotide
gagauccugguuggaaauu

SEQ ID NO: 1885286 - RNA, 19 nt, Artificial Sequence
  Description of Artificial Sequence: Synthetic oligonucleotide
ucgggacacgcggcucccc

SEQ ID NO: 1885287 - RNA, 19 nt, Artificial Sequence
  Description of Artificial Sequence: Synthetic oligonucleotide
cucucgggacacgcggcuc

SEQ ID NO: 1885288 - RNA, 19 nt, Artificial Sequence
  Description of Artificial Sequence: Synthetic oligonucleotide
gguaccgaugaugauccau

SEQ ID NO: 1885289 - RNA, 19 nt, Artificial Sequence
  Description of Artificial Sequence: Synthetic oligonucleotide
cccagagucauugaauggu

SEQ ID NO: 1885290 - RNA, 19 nt, Artificial Sequence
  Description of Artificial Sequence: Synthetic oligonucleotide
ggacgagaagcaucacagu

SEQ ID NO: 1885291 - RNA, 19 nt, Artificial Sequence
  Description of Artificial Sequence: Synthetic oligonucleotide
ccaaagacauaggaccaaa

SEQ ID NO: 1885292 - RNA, 19 nt, Artificial Sequence
  Description of Artificial Sequence: Synthetic oligonucleotide
caucacaguuaugauccau

SEQ ID NO: 1885293 - RNA, 19 nt, Artificial Sequence
  Description of Artificial Sequence: Synthetic oligonucleotide
ucccggcgccgguuggcgu

SEQ ID NO: 1885294 - RNA, 19 nt, Artificial Sequence
  Description of Artificial Sequence: Synthetic oligonucleotide
cgaaauccucucgggacac

SEQ ID NO: 1885295 - RNA, 19 nt, Artificial Sequence
  Description of Artificial Sequence: Synthetic oligonucleotide
ccguauagacccacucgaa

SEQ ID NO: 1885296 - RNA, 19 nt, Artificial Sequence
  Description of Artificial Sequence: Synthetic oligonucleotide
cgaugaugauccauguggu

SEQ ID NO: 1885297 - RNA, 19 nt, Artificial Sequence
  Description of Artificial Sequence: Synthetic oligonucleotide
cacugagauccugguugga

SEQ ID NO: 1885298 - RNA, 19 nt, Artificial Sequence
  Description of Artificial Sequence: Synthetic oligonucleotide
gcgauuccauagagcuuug

SEQ ID NO: 1885299 - RNA, 19 nt, Artificial Sequence
  Description of Artificial Sequence: Synthetic oligonucleotide
gcgccgguuggcgugcggc

SEQ ID NO: 1885300 - RNA, 19 nt, Artificial Sequence
  Description of Artificial Sequence: Synthetic oligonucleotide
cccggcgccgguuggcgug

SEQ ID NO: 1885301 - RNA, 19 nt, Artificial Sequence
  Description of Artificial Sequence: Synthetic oligonucleotide
gccgguuggcgugcggcug

SEQ ID NO: 1885302 - RNA, 19 nt, Artificial Sequence
  Description of Artificial Sequence: Synthetic oligonucleotide
ccaguccaagucuuucacu

SEQ ID NO: 1885303 - RNA, 19 nt, Artificial Sequence
  Description of Artificial Sequence: Synthetic oligonucleotide
gggugcaaacccaggccaa

SEQ ID NO: 1885304 - RNA, 19 nt, Artificial Sequence
  Description of Artificial Sequence: Synthetic oligonucleotide
cagcgauuccauagagcuu

SEQ ID NO: 1885305 - RNA, 19 nt, Artificial Sequence
  Description of Artificial Sequence: Synthetic oligonucleotide
ccagagucauugaaugguu

SEQ ID NO: 1885306 - RNA, 19 nt, Artificial Sequence
  Description of Artificial Sequence: Synthetic oligonucleotide
ggcgccgguuggcgugcgg

SEQ ID NO: 1885307 - RNA, 19 nt, Artificial Sequence
  Description of Artificial Sequence: Synthetic oligonucleotide
auggauccccagagucauu

SEQ ID NO: 1885308 - RNA, 19 nt, Artificial Sequence
  Description of Artificial Sequence: Synthetic oligonucleotide
gcggcuccccauggcggcg

SEQ ID NO: 1885309 - RNA, 19 nt, Artificial Sequence
  Description of Artificial Sequence: Synthetic oligonucleotide
gcugguccguauagaccca

SEQ ID NO: 1885310 - RNA, 19 nt, Artificial Sequence
  Description of Artificial Sequence: Synthetic oligonucleotide
ccaacuggacgagaagcau

SEQ ID NO: 1885311 - RNA, 19 nt, Artificial Sequence
  Description of Artificial Sequence: Synthetic oligonucleotide
gcucccagguaccgaugau

SEQ ID NO: 1885312 - RNA, 19 nt, Artificial Sequence
  Description of Artificial Sequence: Synthetic oligonucleotide
ccucucgggacacgcggcu

SEQ ID NO: 1885313 - RNA, 19 nt, Artificial Sequence
  Description of Artificial Sequence: Synthetic oligonucleotide
gggacacgcggcuccccau

SEQ ID NO: 1885314 - RNA, 19 nt, Artificial Sequence
  Description of Artificial Sequence: Synthetic oligonucleotide
gguuggcgugcggcugguc

SEQ ID NO: 1885315 - RNA, 19 nt, Artificial Sequence
  Description of Artificial Sequence: Synthetic oligonucleotide
ccacucuaucagcuauuau

SEQ ID NO: 1885316 - RNA, 19 nt, Artificial Sequence
  Description of Artificial Sequence: Synthetic oligonucleotide
cgugcggcugguccguaua

SEQ ID NO: 1885317 - RNA, 19 nt, Artificial Sequence
  Description of Artificial Sequence: Synthetic oligonucleotide
ggaucucccggcgccgguu

SEQ ID NO: 1885318 - RNA, 19 nt, Artificial Sequence
  Description of Artificial Sequence: Synthetic oligonucleotide
cccagguaccgaugaugau

SEQ ID NO: 1885319 - RNA, 19 nt, Artificial Sequence
  Description of Artificial Sequence: Synthetic oligonucleotide
gguggccgaaggggaaauu

SEQ ID NO: 1885320 - RNA, 19 nt, Artificial Sequence
  Description of Artificial Sequence: Synthetic oligonucleotide
gcgugcggcugguccguau

SEQ ID NO: 1885321 - RNA, 19 nt, Artificial Sequence
  Description of Artificial Sequence: Synthetic oligonucleotide
cgauuccauagagcuuugu

SEQ ID NO: 1885322 - RNA, 19 nt, Artificial Sequence
  Description of Artificial Sequence: Synthetic oligonucleotide
ggcgugcggcugguccgua

SEQ ID NO: 1885323 - RNA, 19 nt, Artificial Sequence
  Description of Artificial Sequence: Synthetic oligonucleotide
cgccgguuggcgugcggcu

SEQ ID NO: 1885324 - RNA, 19 nt, Artificial Sequence
  Description of Artificial Sequence: Synthetic oligonucleotide
cgguuggcgugcggcuggu

SEQ ID NO: 1885325 - RNA, 19 nt, Artificial Sequence
  Description of Artificial Sequence: Synthetic oligonucleotide
aauuccucuaggucaaagc

SEQ ID NO: 1885326 - RNA, 19 nt, Artificial Sequence
  Description of Artificial Sequence: Synthetic oligonucleotide
uaggucaaagccaacaccg

SEQ ID NO: 1885327 - RNA, 19 nt, Artificial Sequence
  Description of Artificial Sequence: Synthetic oligonucleotide
aagccagucagccaggagg

SEQ ID NO: 1885328 - RNA, 19 nt, Artificial Sequence
  Description of Artificial Sequence: Synthetic oligonucleotide
ugccugaaaacacaggagg

SEQ ID NO: 1885329 - RNA, 19 nt, Artificial Sequence
  Description of Artificial Sequence: Synthetic oligonucleotide
gugacucugauguagaagg

SEQ ID NO: 1885330 - RNA, 19 nt, Artificial Sequence
  Description of Artificial Sequence: Synthetic oligonucleotide
aucagccacacccauaucg

SEQ ID NO: 1885331 - RNA, 19 nt, Artificial Sequence
  Description of Artificial Sequence: Synthetic oligonucleotide
ugggaaguaaggcagaacu

SEQ ID NO: 1885332 - RNA, 19 nt, Artificial Sequence
  Description of Artificial Sequence: Synthetic oligonucleotide
ugaaaggugggucugagau

SEQ ID NO: 1885333 - RNA, 19 nt, Artificial Sequence
  Description of Artificial Sequence: Synthetic oligonucleotide
gucauugucacuaagcacc

SEQ ID NO: 1885334 - RNA, 19 nt, Artificial Sequence
  Description of Artificial Sequence: Synthetic oligonucleotide
uuuaagaauuccucuaggu

SEQ ID NO: 1885335 - RNA, 19 nt, Artificial Sequence
  Description of Artificial Sequence: Synthetic oligonucleotide
gaguaacucaagcugagcc

SEQ ID NO: 1885336 - RNA, 19 nt, Artificial Sequence
  Description of Artificial Sequence: Synthetic oligonucleotide
uguccugacagcaaggcac

SEQ ID NO: 1885337 - RNA, 19 nt, Artificial Sequence
  Description of Artificial Sequence: Synthetic oligonucleotide
caucccuggaccuugaagc

SEQ ID NO: 1885338 - RNA, 19 nt, Artificial Sequence
  Description of Artificial Sequence: Synthetic oligonucleotide
gauuucacgcugcagagac

SEQ ID NO: 1885339 - RNA, 19 nt, Artificial Sequence
  Description of Artificial Sequence: Synthetic oligonucleotide
aaagauugguuuaagaauu

SEQ ID NO: 1885340 - RNA, 19 nt, Artificial Sequence
  Description of Artificial Sequence: Synthetic oligonucleotide
ugggcaaacaggcugggag

SEQ ID NO: 1885341 - RNA, 19 nt, Artificial Sequence
  Description of Artificial Sequence: Synthetic oligonucleotide
aaaggugggucugagauga

SEQ ID NO: 1885342 - RNA, 19 nt, Artificial Sequence
  Description of Artificial Sequence: Synthetic oligonucleotide
auugguuuaagaauuccuc

SEQ ID NO: 1885343 - RNA, 19 nt, Artificial Sequence
  Description of Artificial Sequence: Synthetic oligonucleotide
agacuuagacaguugcugg

SEQ ID NO: 1885344 - RNA, 19 nt, Artificial Sequence
  Description of Artificial Sequence: Synthetic oligonucleotide
caggcaacccacuaguugg

SEQ ID NO: 1885345 - RNA, 19 nt, Artificial Sequence
  Description of Artificial Sequence: Synthetic oligonucleotide
uggauugcaucccuggacc

SEQ ID NO: 1885346 - RNA, 19 nt, Artificial Sequence
  Description of Artificial Sequence: Synthetic oligonucleotide
ucaggugccuccaagggug

SEQ ID NO: 1885347 - RNA, 19 nt, Artificial Sequence
  Description of Artificial Sequence: Synthetic oligonucleotide
uuuggagugccugaaaaca

SEQ ID NO: 1885348 - RNA, 19 nt, Artificial Sequence
  Description of Artificial Sequence: Synthetic oligonucleotide
uugguuuaagaauuccucu

SEQ ID NO: 1885349 - RNA, 19 nt, Artificial Sequence
  Description of Artificial Sequence: Synthetic oligonucleotide
aggacuagcagguugggca

SEQ ID NO: 1885350 - RNA, 19 nt, Artificial Sequence
  Description of Artificial Sequence: Synthetic oligonucleotide
ucucuugucgccuccuacg

SEQ ID NO: 1885351 - RNA, 19 nt, Artificial Sequence
  Description of Artificial Sequence: Synthetic oligonucleotide
gagauacagggccaguggg

SEQ ID NO: 1885352 - RNA, 19 nt, Artificial Sequence
  Description of Artificial Sequence: Synthetic oligonucleotide
gacuuagacaguugcuggg

SEQ ID NO: 1885353 - RNA, 19 nt, Artificial Sequence
  Description of Artificial Sequence: Synthetic oligonucleotide
acuaguuggcacaagugac

SEQ ID NO: 1885354 - RNA, 19 nt, Artificial Sequence
  Description of Artificial Sequence: Synthetic oligonucleotide
gacagcaaggcacaagcug

SEQ ID NO: 1885355 - RNA, 19 nt, Artificial Sequence
  Description of Artificial Sequence: Synthetic oligonucleotide
uccuguuauggcucggugg

SEQ ID NO: 1885356 - RNA, 19 nt, Artificial Sequence
  Description of Artificial Sequence: Synthetic oligonucleotide
agauugguuuaagaauucc

SEQ ID NO: 1885357 - RNA, 19 nt, Artificial Sequence
  Description of Artificial Sequence: Synthetic oligonucleotide
ucggucauugucacuaagc

SEQ ID NO: 1885358 - RNA, 19 nt, Artificial Sequence
  Description of Artificial Sequence: Synthetic oligonucleotide
guaaggcagaacuucuggg

SEQ ID NO: 1885359 - RNA, 19 nt, Artificial Sequence
  Description of Artificial Sequence: Synthetic oligonucleotide
uguuauggcucgguggugg

SEQ ID NO: 1885360 - RNA, 19 nt, Artificial Sequence
  Description of Artificial Sequence: Synthetic oligonucleotide
gaaagauugguuuaagaau

SEQ ID NO: 1885361 - RNA, 19 nt, Artificial Sequence
  Description of Artificial Sequence: Synthetic oligonucleotide
gagacuuagacaguugcug

SEQ ID NO: 1885362 - RNA, 19 nt, Artificial Sequence
  Description of Artificial Sequence: Synthetic oligonucleotide
aguccaucuggauuucacg

SEQ ID NO: 1885363 - RNA, 19 nt, Artificial Sequence
  Description of Artificial Sequence: Synthetic oligonucleotide
aggaccagcagacugagau

SEQ ID NO: 1885364 - RNA, 19 nt, Artificial Sequence
  Description of Artificial Sequence: Synthetic oligonucleotide
ucacuaagcaccaguccag

SEQ ID NO: 1885365 - RNA, 19 nt, Artificial Sequence
  Description of Artificial Sequence: Synthetic oligonucleotide
caugccguggcccucaagc

SEQ ID NO: 1885366 - RNA, 19 nt, Artificial Sequence
  Description of Artificial Sequence: Synthetic oligonucleotide
agccucaccugccagugcc

SEQ ID NO: 1885367 - RNA, 19 nt, Artificial Sequence
  Description of Artificial Sequence: Synthetic oligonucleotide
acuaagcaccaguccagcc

SEQ ID NO: 1885368 - RNA, 19 nt, Artificial Sequence
  Description of Artificial Sequence: Synthetic oligonucleotide
ucaaagccaacaccguagc

SEQ ID NO: 1885369 - RNA, 19 nt, Artificial Sequence
  Description of Artificial Sequence: Synthetic oligonucleotide
caggaccaggaauagagcc

SEQ ID NO: 1885370 - RNA, 19 nt, Artificial Sequence
  Description of Artificial Sequence: Synthetic oligonucleotide
uaguggaaggggcaguuug

SEQ ID NO: 1885371 - RNA, 19 nt, Artificial Sequence
  Description of Artificial Sequence: Synthetic oligonucleotide
gaguccaccgcucuagcag

SEQ ID NO: 1885372 - RNA, 19 nt, Artificial Sequence
  Description of Artificial Sequence: Synthetic oligonucleotide
ugucacuaagcaccagucc

SEQ ID NO: 1885373 - RNA, 19 nt, Artificial Sequence
  Description of Artificial Sequence: Synthetic oligonucleotide
guuucagggcuccuggagg

SEQ ID NO: 1885374 - RNA, 19 nt, Artificial Sequence
  Description of Artificial Sequence: Synthetic oligonucleotide
cuaggucaaagccaacacc

SEQ ID NO: 1885375 - RNA, 19 nt, Artificial Sequence
  Description of Artificial Sequence: Synthetic oligonucleotide
uccuacgcuucucuucucg

SEQ ID NO: 1885376 - RNA, 19 nt, Artificial Sequence
  Description of Artificial Sequence: Synthetic oligonucleotide
uggcccucaagccagucag

SEQ ID NO: 1885377 - RNA, 19 nt, Artificial Sequence
  Description of Artificial Sequence: Synthetic oligonucleotide
gguuuaagaauuccucuag

SEQ ID NO: 1885378 - RNA, 19 nt, Artificial Sequence
  Description of Artificial Sequence: Synthetic oligonucleotide
ucgaaagauugguuuaaga

SEQ ID NO: 1885379 - RNA, 19 nt, Artificial Sequence
  Description of Artificial Sequence: Synthetic oligonucleotide
cacccauaucgaaagauug

SEQ ID NO: 1885380 - RNA, 19 nt, Artificial Sequence
  Description of Artificial Sequence: Synthetic oligonucleotide
gucacuaagcaccagucca

SEQ ID NO: 1885381 - RNA, 19 nt, Artificial Sequence
  Description of Artificial Sequence: Synthetic oligonucleotide
ugagacuuagacaguugcu

SEQ ID NO: 1885382 - RNA, 19 nt, Artificial Sequence
  Description of Artificial Sequence: Synthetic oligonucleotide
gagacucgaugucagccgg

SEQ ID NO: 1885383 - RNA, 19 nt, Artificial Sequence
  Description of Artificial Sequence: Synthetic oligonucleotide
ucagccacacccauaucga

SEQ ID NO: 1885384 - RNA, 19 nt, Artificial Sequence
  Description of Artificial Sequence: Synthetic oligonucleotide
guccaucuggauuucacgc

SEQ ID NO: 1885385 - RNA, 19 nt, Artificial Sequence
  Description of Artificial Sequence: Synthetic oligonucleotide
accagguugacaucuggug

SEQ ID NO: 1885386 - RNA, 19 nt, Artificial Sequence
  Description of Artificial Sequence: Synthetic oligonucleotide
cauuggggaguccaucugg

SEQ ID NO: 1885387 - RNA, 19 nt, Artificial Sequence
  Description of Artificial Sequence: Synthetic oligonucleotide
auaucgaaagauugguuua

SEQ ID NO: 1885388 - RNA, 19 nt, Artificial Sequence
  Description of Artificial Sequence: Synthetic oligonucleotide
ugguuuaagaauuccucua

SEQ ID NO: 1885389 - RNA, 19 nt, Artificial Sequence
  Description of Artificial Sequence: Synthetic oligonucleotide
uggagugccugaaaacaca

SEQ ID NO: 1885390 - RNA, 19 nt, Artificial Sequence
  Description of Artificial Sequence: Synthetic oligonucleotide
aggcuuucgagguucaggu

SEQ ID NO: 1885391 - RNA, 19 nt, Artificial Sequence
  Description of Artificial Sequence: Synthetic oligonucleotide
gaaccugcagaguaacuca

SEQ ID NO: 1885392 - RNA, 19 nt, Artificial Sequence
  Description of Artificial Sequence: Synthetic oligonucleotide
gagaugaaccugcagagua

SEQ ID NO: 1885393 - RNA, 19 nt, Artificial Sequence
  Description of Artificial Sequence: Synthetic oligonucleotide
gucaaagccaacaccguag

SEQ ID NO: 1885394 - RNA, 19 nt, Artificial Sequence
  Description of Artificial Sequence: Synthetic oligonucleotide
gcugcuuaaggcugaaagg

SEQ ID NO: 1885395 - RNA, 19 nt, Artificial Sequence
  Description of Artificial Sequence: Synthetic oligonucleotide
cuuuggagugccugaaaac

SEQ ID NO: 1885396 - RNA, 19 nt, Artificial Sequence
  Description of Artificial Sequence: Synthetic oligonucleotide
cuuggcucucucuugucgc

SEQ ID NO: 1885397 - RNA, 19 nt, Artificial Sequence
  Description of Artificial Sequence: Synthetic oligonucleotide
ggcugcuuaaggcugaaag

SEQ ID NO: 1885398 - RNA, 19 nt, Artificial Sequence
  Description of Artificial Sequence: Synthetic oligonucleotide
aguccaccgcucuagcagg

SEQ ID NO: 1885399 - RNA, 19 nt, Artificial Sequence
  Description of Artificial Sequence: Synthetic oligonucleotide
agccaugcgaguccaccgc

SEQ ID NO: 1885400 - RNA, 19 nt, Artificial Sequence
  Description of Artificial Sequence: Synthetic oligonucleotide
ucccaauccuguuauggcu

SEQ ID NO: 1885401 - RNA, 19 nt, Artificial Sequence
  Description of Artificial Sequence: Synthetic oligonucleotide
cugucacaggcuuucgagg

SEQ ID NO: 1885402 - RNA, 19 nt, Artificial Sequence
  Description of Artificial Sequence: Synthetic oligonucleotide
agaguaacucaagcugagc

SEQ ID NO: 1885403 - RNA, 19 nt, Artificial Sequence
  Description of Artificial Sequence: Synthetic oligonucleotide
uuucacgcugcagagacuc

SEQ ID NO: 1885404 - RNA, 19 nt, Artificial Sequence
  Description of Artificial Sequence: Synthetic oligonucleotide
cuuucgagguucaggugcc

SEQ ID NO: 1885405 - RNA, 19 nt, Artificial Sequence
  Description of Artificial Sequence: Synthetic oligonucleotide
cuggauuucacgcugcaga

SEQ ID NO: 1885406 - RNA, 19 nt, Artificial Sequence
  Description of Artificial Sequence: Synthetic oligonucleotide
gcuuucgagguucaggugc

SEQ ID NO: 1885407 - RNA, 19 nt, Artificial Sequence
  Description of Artificial Sequence: Synthetic oligonucleotide
gauaggguccaggaggcug

SEQ ID NO: 1885408 - RNA, 19 nt, Artificial Sequence
  Description of Artificial Sequence: Synthetic oligonucleotide
cagguugacaucuggugac

SEQ ID NO: 1885409 - RNA, 19 nt, Artificial Sequence
  Description of Artificial Sequence: Synthetic oligonucleotide
cucgaugucagccggguuc

SEQ ID NO: 1885410 - RNA, 19 nt, Artificial Sequence
  Description of Artificial Sequence: Synthetic oligonucleotide
gagccaugcgaguccaccg

SEQ ID NO: 1885411 - RNA, 19 nt, Artificial Sequence
  Description of Artificial Sequence: Synthetic oligonucleotide
uucaggugccuccaagggu

SEQ ID NO: 1885412 - RNA, 19 nt, Artificial Sequence
  Description of Artificial Sequence: Synthetic oligonucleotide
gaaggcuaguggaaggggc

SEQ ID NO: 1885413 - RNA, 19 nt, Artificial Sequence
  Description of Artificial Sequence: Synthetic oligonucleotide
caucuggugacucugaugu

SEQ ID NO: 1885414 - RNA, 19 nt, Artificial Sequence
  Description of Artificial Sequence: Synthetic oligonucleotide
aagcugagucugccuggcc

SEQ ID NO: 1885415 - RNA, 19 nt, Artificial Sequence
  Description of Artificial Sequence: Synthetic oligonucleotide
uucggucauugucacuaag

SEQ ID NO: 1885416 - RNA, 19 nt, Artificial Sequence
  Description of Artificial Sequence: Synthetic oligonucleotide
ucaagcugagccucaccug

SEQ ID NO: 1885417 - RNA, 19 nt, Artificial Sequence
  Description of Artificial Sequence: Synthetic oligonucleotide
cagaguaacucaagcugag

SEQ ID NO: 1885418 - RNA, 19 nt, Artificial Sequence
  Description of Artificial Sequence: Synthetic oligonucleotide
acaagugacugagaggcca

SEQ ID NO: 1885419 - RNA, 19 nt, Artificial Sequence
  Description of Artificial Sequence: Synthetic oligonucleotide
gguucaggugccuccaagg

SEQ ID NO: 1885420 - RNA, 19 nt, Artificial Sequence
  Description of Artificial Sequence: Synthetic oligonucleotide
aauagagccugcaggcugu

SEQ ID NO: 1885421 - RNA, 19 nt, Artificial Sequence
  Description of Artificial Sequence: Synthetic oligonucleotide
ucgagguucaggugccucc

SEQ ID NO: 1885422 - RNA, 19 nt, Artificial Sequence
  Description of Artificial Sequence: Synthetic oligonucleotide
acccauaucgaaagauugg

SEQ ID NO: 1885423 - RNA, 19 nt, Artificial Sequence
  Description of Artificial Sequence: Synthetic oligonucleotide
cacuaguuggcacaaguga

SEQ ID NO: 1885424 - RNA, 19 nt, Artificial Sequence
  Description of Artificial Sequence: Synthetic oligonucleotide
cuggauugcaucccuggac

SEQ ID NO: 1885425 - RNA, 19 nt, Artificial Sequence
  Description of Artificial Sequence: Synthetic oligonucleotide
accguagccagccccacug

SEQ ID NO: 1885426 - RNA, 19 nt, Artificial Sequence
  Description of Artificial Sequence: Synthetic oligonucleotide
uaucgaaagauugguuuaa

SEQ ID NO: 1885427 - RNA, 19 nt, Artificial Sequence
  Description of Artificial Sequence: Synthetic oligonucleotide
acaucuggugacucugaug

SEQ ID NO: 1885428 - RNA, 19 nt, Artificial Sequence
  Description of Artificial Sequence: Synthetic oligonucleotide
uagcagguugggcagggga

SEQ ID NO: 1885429 - RNA, 19 nt, Artificial Sequence
  Description of Artificial Sequence: Synthetic oligonucleotide
gugacugagaggccagaag

SEQ ID NO: 1885430 - RNA, 19 nt, Artificial Sequence
  Description of Artificial Sequence: Synthetic oligonucleotide
agcugagucugccuggcca

SEQ ID NO: 1885431 - RNA, 19 nt, Artificial Sequence
  Description of Artificial Sequence: Synthetic oligonucleotide
cuaagcaccaguccagcca

SEQ ID NO: 1885432 - RNA, 19 nt, Artificial Sequence
  Description of Artificial Sequence: Synthetic oligonucleotide
agaaggcuaguggaagggg

SEQ ID NO: 1885433 - RNA, 19 nt, Artificial Sequence
  Description of Artificial Sequence: Synthetic oligonucleotide
uccuccaccugagacuuag

SEQ ID NO: 1885434 - RNA, 19 nt, Artificial Sequence
  Description of Artificial Sequence: Synthetic oligonucleotide
cauaucgaaagauugguuu

SEQ ID NO: 1885435 - RNA, 19 nt, Artificial Sequence
  Description of Artificial Sequence: Synthetic oligonucleotide
cugagucggcuccucaggg

SEQ ID NO: 1885436 - RNA, 19 nt, Artificial Sequence
  Description of Artificial Sequence: Synthetic oligonucleotide
guaacucaagcugagccuc

SEQ ID NO: 1885437 - RNA, 19 nt, Artificial Sequence
  Description of Artificial Sequence: Synthetic oligonucleotide
aauccuguuauggcucggu

SEQ ID NO: 1885438 - RNA, 19 nt, Artificial Sequence
  Description of Artificial Sequence: Synthetic oligonucleotide
ugagcugucacaggcuuuc

SEQ ID NO: 1885439 - RNA, 19 nt, Artificial Sequence
  Description of Artificial Sequence: Synthetic oligonucleotide
gagucggcuccucagggac

SEQ ID NO: 1885440 - RNA, 19 nt, Artificial Sequence
  Description of Artificial Sequence: Synthetic oligonucleotide
ucagccggguucaugccgu

SEQ ID NO: 1885441 - RNA, 19 nt, Artificial Sequence
  Description of Artificial Sequence: Synthetic oligonucleotide
ggaaguaaggcagaacuuc

SEQ ID NO: 1885442 - RNA, 19 nt, Artificial Sequence
  Description of Artificial Sequence: Synthetic oligonucleotide
auaggguccaggaggcugg

SEQ ID NO: 1885443 - RNA, 19 nt, Artificial Sequence
  Description of Artificial Sequence: Synthetic oligonucleotide
ggagaagacugcucagggg

SEQ ID NO: 1885444 - RNA, 19 nt, Artificial Sequence
  Description of Artificial Sequence: Synthetic oligonucleotide
aagcugagccucaccugcc

SEQ ID NO: 1885445 - RNA, 19 nt, Artificial Sequence
  Description of Artificial Sequence: Synthetic oligonucleotide
aguggaaggggcaguuugg

SEQ ID NO: 1885446 - RNA, 19 nt, Artificial Sequence
  Description of Artificial Sequence: Synthetic oligonucleotide
ucuggauuucacgcugcag

SEQ ID NO: 1885447 - RNA, 19 nt, Artificial Sequence
  Description of Artificial Sequence: Synthetic oligonucleotide
agccaggcaacccacuagu

SEQ ID NO: 1885448 - RNA, 19 nt, Artificial Sequence
  Description of Artificial Sequence: Synthetic oligonucleotide
aggcuucggucauugucac

SEQ ID NO: 1885449 - RNA, 19 nt, Artificial Sequence
  Description of Artificial Sequence: Synthetic oligonucleotide
cucuugucgccuccuacgc

SEQ ID NO: 1885450 - RNA, 19 nt, Artificial Sequence
  Description of Artificial Sequence: Synthetic oligonucleotide
gucagccggguucaugccg

SEQ ID NO: 1885451 - RNA, 19 nt, Artificial Sequence
  Description of Artificial Sequence: Synthetic oligonucleotide
ugacagcaaggcacaagcu

SEQ ID NO: 1885452 - RNA, 19 nt, Artificial Sequence
  Description of Artificial Sequence: Synthetic oligonucleotide
ugcgaguccaccgcucuag

SEQ ID NO: 1885453 - RNA, 19 nt, Artificial Sequence
  Description of Artificial Sequence: Synthetic oligonucleotide
gauugguuuaagaauuccu

SEQ ID NO: 1885454 - RNA, 19 nt, Artificial Sequence
  Description of Artificial Sequence: Synthetic oligonucleotide
uucacgcugcagagacucg

SEQ ID NO: 1885455 - RNA, 19 nt, Artificial Sequence
  Description of Artificial Sequence: Synthetic oligonucleotide
agagugaagcugagucugc

SEQ ID NO: 1885456 - RNA, 19 nt, Artificial Sequence
  Description of Artificial Sequence: Synthetic oligonucleotide
gaucuggagguggugggcc

SEQ ID NO: 1885457 - RNA, 19 nt, Artificial Sequence
  Description of Artificial Sequence: Synthetic oligonucleotide
uagucucccaauccuguua

SEQ ID NO: 1885458 - RNA, 19 nt, Artificial Sequence
  Description of Artificial Sequence: Synthetic oligonucleotide
ucuagcaggcuucggucau

SEQ ID NO: 1885459 - RNA, 19 nt, Artificial Sequence
  Description of Artificial Sequence: Synthetic oligonucleotide
aucgaaagauugguuuaag

SEQ ID NO: 1885460 - RNA, 19 nt, Artificial Sequence
  Description of Artificial Sequence: Synthetic oligonucleotide
agguucaggugccuccaag

SEQ ID NO: 1885461 - RNA, 19 nt, Artificial Sequence
  Description of Artificial Sequence: Synthetic oligonucleotide
agccagucagccaggaggg

SEQ ID NO: 1885462 - RNA, 19 nt, Artificial Sequence
  Description of Artificial Sequence: Synthetic oligonucleotide
auacagggccagugggagg

SEQ ID NO: 1885463 - RNA, 19 nt, Artificial Sequence
  Description of Artificial Sequence: Synthetic oligonucleotide
ugagccucaccugccagug

SEQ ID NO: 1885464 - RNA, 19 nt, Artificial Sequence
  Description of Artificial Sequence: Synthetic oligonucleotide
caacaccguagccagcccc

SEQ ID NO: 1885465 - RNA, 19 nt, Artificial Sequence
  Description of Artificial Sequence: Synthetic oligonucleotide
cucuugucgucgcuucucc

SEQ ID NO: 1885466 - RNA, 19 nt, Artificial Sequence
  Description of Artificial Sequence: Synthetic oligonucleotide
acuuagacaguugcugggu

SEQ ID NO: 1885467 - RNA, 19 nt, Artificial Sequence
  Description of Artificial Sequence: Synthetic oligonucleotide
gaguagucucccaauccug

SEQ ID NO: 1885468 - RNA, 19 nt, Artificial Sequence
  Description of Artificial Sequence: Synthetic oligonucleotide
gguuucagggcuccuggag

SEQ ID NO: 1885469 - RNA, 19 nt, Artificial Sequence
  Description of Artificial Sequence: Synthetic oligonucleotide
aggugggucugagaugaac

SEQ ID NO: 1885470 - RNA, 19 nt, Artificial Sequence
  Description of Artificial Sequence: Synthetic oligonucleotide
ucuugucgucgcuucuccc

SEQ ID NO: 1885471 - RNA, 19 nt, Artificial Sequence
  Description of Artificial Sequence: Synthetic oligonucleotide
caaagccaacaccguagcc

SEQ ID NO: 1885472 - RNA, 19 nt, Artificial Sequence
  Description of Artificial Sequence: Synthetic oligonucleotide
agggucaguagagggcccc

SEQ ID NO: 1885473 - RNA, 19 nt, Artificial Sequence
  Description of Artificial Sequence: Synthetic oligonucleotide
ggucauugucacuaagcac

SEQ ID NO: 1885474 - RNA, 19 nt, Artificial Sequence
  Description of Artificial Sequence: Synthetic oligonucleotide
ggugggucugagaugaacc

SEQ ID NO: 1885475 - RNA, 19 nt, Artificial Sequence
  Description of Artificial Sequence: Synthetic oligonucleotide
acuagcagguugggcaggg

SEQ ID NO: 1885476 - RNA, 19 nt, Artificial Sequence
  Description of Artificial Sequence: Synthetic oligonucleotide
ucuugucgccuccuacgcu

SEQ ID NO: 1885477 - RNA, 19 nt, Artificial Sequence
  Description of Artificial Sequence: Synthetic oligonucleotide
aguagucucccaauccugu

SEQ ID NO: 1885478 - RNA, 19 nt, Artificial Sequence
  Description of Artificial Sequence: Synthetic oligonucleotide
gggaguagucucccaaucc

SEQ ID NO: 1885479 - RNA, 19 nt, Artificial Sequence
  Description of Artificial Sequence: Synthetic oligonucleotide
ugagucggcuccucaggga

SEQ ID NO: 1885480 - RNA, 19 nt, Artificial Sequence
  Description of Artificial Sequence: Synthetic oligonucleotide
gugccugaaaacacaggag

SEQ ID NO: 1885481 - RNA, 19 nt, Artificial Sequence
  Description of Artificial Sequence: Synthetic oligonucleotide
aucccuggaccuugaagcu

SEQ ID NO: 1885482 - RNA, 19 nt, Artificial Sequence
  Description of Artificial Sequence: Synthetic oligonucleotide
auccuguuauggcucggug

SEQ ID NO: 1885483 - RNA, 19 nt, Artificial Sequence
  Description of Artificial Sequence: Synthetic oligonucleotide
ucucugagucggcuccuca

SEQ ID NO: 1885484 - RNA, 19 nt, Artificial Sequence
  Description of Artificial Sequence: Synthetic oligonucleotide
aacaccguagccagcccca

SEQ ID NO: 1885485 - RNA, 19 nt, Artificial Sequence
  Description of Artificial Sequence: Synthetic oligonucleotide
uugucgucgcuucucccuc

SEQ ID NO: 1885486 - RNA, 19 nt, Artificial Sequence
  Description of Artificial Sequence: Synthetic oligonucleotide
ucuucucgcucucgcuggc

SEQ ID NO: 1885487 - RNA, 19 nt, Artificial Sequence
  Description of Artificial Sequence: Synthetic oligonucleotide
gucugagaugaaccugcag

SEQ ID NO: 1885488 - RNA, 19 nt, Artificial Sequence
  Description of Artificial Sequence: Synthetic oligonucleotide
ugagucugccuggccaucc

SEQ ID NO: 1885489 - RNA, 19 nt, Artificial Sequence
  Description of Artificial Sequence: Synthetic oligonucleotide
caacccacuaguuggcaca

SEQ ID NO: 1885490 - RNA, 19 nt, Artificial Sequence
  Description of Artificial Sequence: Synthetic oligonucleotide
ugcccuuuggagugccuga

SEQ ID NO: 1885491 - RNA, 19 nt, Artificial Sequence
  Description of Artificial Sequence: Synthetic oligonucleotide
cugccagugccaaggcugc

SEQ ID NO: 1885492 - RNA, 19 nt, Artificial Sequence
  Description of Artificial Sequence: Synthetic oligonucleotide
agcaaggcacaagcugugg

SEQ ID NO: 1885493 - RNA, 19 nt, Artificial Sequence
  Description of Artificial Sequence: Synthetic oligonucleotide
agcguccucucuccuugcg

SEQ ID NO: 1885494 - RNA, 19 nt, Artificial Sequence
  Description of Artificial Sequence: Synthetic oligonucleotide
cucuaggucaaagccaaca

SEQ ID NO: 1885495 - RNA, 19 nt, Artificial Sequence
  Description of Artificial Sequence: Synthetic oligonucleotide
agaagacugcucaggggag

SEQ ID NO: 1885496 - RNA, 19 nt, Artificial Sequence
  Description of Artificial Sequence: Synthetic oligonucleotide
cgaaagauugguuuaagaa

SEQ ID NO: 1885497 - RNA, 19 nt, Artificial Sequence
  Description of Artificial Sequence: Synthetic oligonucleotide
guuauggcucggugguggc

SEQ ID NO: 1885498 - RNA, 19 nt, Artificial Sequence
  Description of Artificial Sequence: Synthetic oligonucleotide
cucucuugucgccuccuac

SEQ ID NO: 1885499 - RNA, 19 nt, Artificial Sequence
  Description of Artificial Sequence: Synthetic oligonucleotide
gggucugagaugaaccugc

SEQ ID NO: 1885500 - RNA, 19 nt, Artificial Sequence
  Description of Artificial Sequence: Synthetic oligonucleotide
gggaggacuagcagguugg

SEQ ID NO: 1885501 - RNA, 19 nt, Artificial Sequence
  Description of Artificial Sequence: Synthetic oligonucleotide
ccagaaggcuaguggaagg

SEQ ID NO: 1885502 - RNA, 19 nt, Artificial Sequence
  Description of Artificial Sequence: Synthetic oligonucleotide
uuggcacaagugacugaga

SEQ ID NO: 1885503 - RNA, 19 nt, Artificial Sequence
  Description of Artificial Sequence: Synthetic oligonucleotide
ugucagccggguucaugcc

SEQ ID NO: 1885504 - RNA, 19 nt, Artificial Sequence
  Description of Artificial Sequence: Synthetic oligonucleotide
aggaccaggaauagagccu

SEQ ID NO: 1885505 - RNA, 19 nt, Artificial Sequence
  Description of Artificial Sequence: Synthetic oligonucleotide
cagccagcagcauugggga

SEQ ID NO: 1885506 - RNA, 19 nt, Artificial Sequence
  Description of Artificial Sequence: Synthetic oligonucleotide
agcugucacaggcuuucga

SEQ ID NO: 1885507 - RNA, 19 nt, Artificial Sequence
  Description of Artificial Sequence: Synthetic oligonucleotide
gaggacuagcagguugggc

SEQ ID NO: 1885508 - RNA, 19 nt, Artificial Sequence
  Description of Artificial Sequence: Synthetic oligonucleotide
ggagugccugaaaacacag

SEQ ID NO: 1885509 - RNA, 19 nt, Artificial Sequence
  Description of Artificial Sequence: Synthetic oligonucleotide
ucucgcuggcguuccugag

SEQ ID NO: 1885510 - RNA, 19 nt, Artificial Sequence
  Description of Artificial Sequence: Synthetic oligonucleotide
agccccacugcccuuugga

SEQ ID NO: 1885511 - RNA, 19 nt, Artificial Sequence
  Description of Artificial Sequence: Synthetic oligonucleotide
cuaguuggcacaagugacu

SEQ ID NO: 1885512 - RNA, 19 nt, Artificial Sequence
  Description of Artificial Sequence: Synthetic oligonucleotide
uggugacucugauguagaa

SEQ ID NO: 1885513 - RNA, 19 nt, Artificial Sequence
  Description of Artificial Sequence: Synthetic oligonucleotide
ggaccaggaauagagccug

SEQ ID NO: 1885514 - RNA, 19 nt, Artificial Sequence
  Description of Artificial Sequence: Synthetic oligonucleotide
gacuagcagguugggcagg

SEQ ID NO: 1885515 - RNA, 19 nt, Artificial Sequence
  Description of Artificial Sequence: Synthetic oligonucleotide
gaugggaaguaaggcagaa

SEQ ID NO: 1885516 - RNA, 19 nt, Artificial Sequence
  Description of Artificial Sequence: Synthetic oligonucleotide
cucuagcaggcuucgguca

SEQ ID NO: 1885517 - RNA, 19 nt, Artificial Sequence
  Description of Artificial Sequence: Synthetic oligonucleotide
acugcucaggggaguaguc

SEQ ID NO: 1885518 - RNA, 19 nt, Artificial Sequence
  Description of Artificial Sequence: Synthetic oligonucleotide
aaccugcagaguaacucaa

SEQ ID NO: 1885519 - RNA, 19 nt, Artificial Sequence
  Description of Artificial Sequence: Synthetic oligonucleotide
cagcaaggcacaagcugug

SEQ ID NO: 1885520 - RNA, 19 nt, Artificial Sequence
  Description of Artificial Sequence: Synthetic oligonucleotide
auuggggaguccaucugga

SEQ ID NO: 1885521 - RNA, 19 nt, Artificial Sequence
  Description of Artificial Sequence: Synthetic oligonucleotide
ccaauccuguuauggcucg

SEQ ID NO: 1885522 - RNA, 19 nt, Artificial Sequence
  Description of Artificial Sequence: Synthetic oligonucleotide
aagacugcucaggggagua

SEQ ID NO: 1885523 - RNA, 19 nt, Artificial Sequence
  Description of Artificial Sequence: Synthetic oligonucleotide
aggccgagccaugcgaguc

SEQ ID NO: 1885524 - RNA, 19 nt, Artificial Sequence
  Description of Artificial Sequence: Synthetic oligonucleotide
gccagaugggaaguaaggc

SEQ ID NO: 1885525 - RNA, 19 nt, Artificial Sequence
  Description of Artificial Sequence: Synthetic oligonucleotide
cuugcguucccucucuugu

SEQ ID NO: 1885526 - RNA, 19 nt, Artificial Sequence
  Description of Artificial Sequence: Synthetic oligonucleotide
gcagaguaacucaagcuga

SEQ ID NO: 1885527 - RNA, 19 nt, Artificial Sequence
  Description of Artificial Sequence: Synthetic oligonucleotide
cuggugacucugauguaga

SEQ ID NO: 1885528 - RNA, 19 nt, Artificial Sequence
  Description of Artificial Sequence: Synthetic oligonucleotide
ucccuggaccuugaagcug

SEQ ID NO: 1885529 - RNA, 19 nt, Artificial Sequence
  Description of Artificial Sequence: Synthetic oligonucleotide
aggaggaccagcagacuga

SEQ ID NO: 1885530 - RNA, 19 nt, Artificial Sequence
  Description of Artificial Sequence: Synthetic oligonucleotide
aagugacugagaggccaga

SEQ ID NO: 1885531 - RNA, 19 nt, Artificial Sequence
  Description of Artificial Sequence: Synthetic oligonucleotide
accgcucuagcaggcuucg

SEQ ID NO: 1885532 - RNA, 19 nt, Artificial Sequence
  Description of Artificial Sequence: Synthetic oligonucleotide
accugagacuuagacaguu

SEQ ID NO: 1885533 - RNA, 19 nt, Artificial Sequence
  Description of Artificial Sequence: Synthetic oligonucleotide
aacccacuaguuggcacaa

SEQ ID NO: 1885534 - RNA, 19 nt, Artificial Sequence
  Description of Artificial Sequence: Synthetic oligonucleotide
acacccauaucgaaagauu

SEQ ID NO: 1885535 - RNA, 19 nt, Artificial Sequence
  Description of Artificial Sequence: Synthetic oligonucleotide
cugcagaguaacucaagcu

SEQ ID NO: 1885536 - RNA, 19 nt, Artificial Sequence
  Description of Artificial Sequence: Synthetic oligonucleotide
aggcuaguggaaggggcag

SEQ ID NO: 1885537 - RNA, 19 nt, Artificial Sequence
  Description of Artificial Sequence: Synthetic oligonucleotide
ccacuaguuggcacaagug

SEQ ID NO: 1885538 - RNA, 19 nt, Artificial Sequence
  Description of Artificial Sequence: Synthetic oligonucleotide
gccaacaccguagccagcc

SEQ ID NO: 1885539 - RNA, 19 nt, Artificial Sequence
  Description of Artificial Sequence: Synthetic oligonucleotide
caggaggccgagccaugcg

SEQ ID NO: 1885540 - RNA, 19 nt, Artificial Sequence
  Description of Artificial Sequence: Synthetic oligonucleotide
ggaguagucucccaauccu

SEQ ID NO: 1885541 - RNA, 19 nt, Artificial Sequence
  Description of Artificial Sequence: Synthetic oligonucleotide
cuugucgucgcuucucccu

SEQ ID NO: 1885542 - RNA, 19 nt, Artificial Sequence
  Description of Artificial Sequence: Synthetic oligonucleotide
agugacugagaggccagaa

SEQ ID NO: 1885543 - RNA, 19 nt, Artificial Sequence
  Description of Artificial Sequence: Synthetic oligonucleotide
ccaggcaacccacuaguug

SEQ ID NO: 1885544 - RNA, 19 nt, Artificial Sequence
  Description of Artificial Sequence: Synthetic oligonucleotide
ucucucuugucgccuccua

SEQ ID NO: 1885545 - RNA, 19 nt, Artificial Sequence
  Description of Artificial Sequence: Synthetic oligonucleotide
caaggcacaagcugugggu

SEQ ID NO: 1885546 - RNA, 19 nt, Artificial Sequence
  Description of Artificial Sequence: Synthetic oligonucleotide
uuauggcucggugguggcu

SEQ ID NO: 1885547 - RNA, 19 nt, Artificial Sequence
  Description of Artificial Sequence: Synthetic oligonucleotide
cagaacuucuggggcacug

SEQ ID NO: 1885548 - RNA, 19 nt, Artificial Sequence
  Description of Artificial Sequence: Synthetic oligonucleotide
ugucgucgcuucucccucu

SEQ ID NO: 1885549 - RNA, 19 nt, Artificial Sequence
  Description of Artificial Sequence: Synthetic oligonucleotide
agacugagauacagggcca

SEQ ID NO: 1885550 - RNA, 19 nt, Artificial Sequence
  Description of Artificial Sequence: Synthetic oligonucleotide
uggagccaggcaacccacu

SEQ ID NO: 1885551 - RNA, 19 nt, Artificial Sequence
  Description of Artificial Sequence: Synthetic oligonucleotide
cccaauccuguuauggcuc

SEQ ID NO: 1885552 - RNA, 19 nt, Artificial Sequence
  Description of Artificial Sequence: Synthetic oligonucleotide
ugggccagaugggaaguaa

SEQ ID NO: 1885553 - RNA, 19 nt, Artificial Sequence
  Description of Artificial Sequence: Synthetic oligonucleotide
uucgagguucaggugccuc

SEQ ID NO: 1885554 - RNA, 19 nt, Artificial Sequence
  Description of Artificial Sequence: Synthetic oligonucleotide
gcucuagcaggcuucgguc

SEQ ID NO: 1885555 - RNA, 19 nt, Artificial Sequence
  Description of Artificial Sequence: Synthetic oligonucleotide
gcuucggucauugucacua

SEQ ID NO: 1885556 - RNA, 19 nt, Artificial Sequence
  Description of Artificial Sequence: Synthetic oligonucleotide
caauccuguuauggcucgg

SEQ ID NO: 1885557 - RNA, 19 nt, Artificial Sequence
  Description of Artificial Sequence: Synthetic oligonucleotide
caccgcucuagcaggcuuc

SEQ ID NO: 1885558 - RNA, 19 nt, Artificial Sequence
  Description of Artificial Sequence: Synthetic oligonucleotide
uugucgccuccuacgcuuc

SEQ ID NO: 1885559 - RNA, 19 nt, Artificial Sequence
  Description of Artificial Sequence: Synthetic oligonucleotide
agacucgaugucagccggg

SEQ ID NO: 1885560 - RNA, 19 nt, Artificial Sequence
  Description of Artificial Sequence: Synthetic oligonucleotide
gagcugucacaggcuuucg

SEQ ID NO: 1885561 - RNA, 19 nt, Artificial Sequence
  Description of Artificial Sequence: Synthetic oligonucleotide
cugagaggccagaaggcua

SEQ ID NO: 1885562 - RNA, 19 nt, Artificial Sequence
  Description of Artificial Sequence: Synthetic oligonucleotide
agguugacaucuggugacu

SEQ ID NO: 1885563 - RNA, 19 nt, Artificial Sequence
  Description of Artificial Sequence: Synthetic oligonucleotide
cugaaaggugggucugaga

SEQ ID NO: 1885564 - RNA, 19 nt, Artificial Sequence
  Description of Artificial Sequence: Synthetic oligonucleotide
ccuacgcuucucuucucgc

SEQ ID NO: 1885565 - RNA, 19 nt, Artificial Sequence
  Description of Artificial Sequence: Synthetic oligonucleotide
ggcaccagcguccucucuc

SEQ ID NO: 1885566 - RNA, 19 nt, Artificial Sequence
  Description of Artificial Sequence: Synthetic oligonucleotide
gcagacugagauacagggc

SEQ ID NO: 1885567 - RNA, 19 nt, Artificial Sequence
  Description of Artificial Sequence: Synthetic oligonucleotide
aggucaaagccaacaccgu

SEQ ID NO: 1885568 - RNA, 19 nt, Artificial Sequence
  Description of Artificial Sequence: Synthetic oligonucleotide
ugucgccuccuacgcuucu

SEQ ID NO: 1885569 - RNA, 19 nt, Artificial Sequence
  Description of Artificial Sequence: Synthetic oligonucleotide
agccacacccauaucgaaa

SEQ ID NO: 1885570 - RNA, 19 nt, Artificial Sequence
  Description of Artificial Sequence: Synthetic oligonucleotide
agcagguugggcaggggau

SEQ ID NO: 1885571 - RNA, 19 nt, Artificial Sequence
  Description of Artificial Sequence: Synthetic oligonucleotide
ggucaaagccaacaccgua

SEQ ID NO: 1885572 - RNA, 19 nt, Artificial Sequence
  Description of Artificial Sequence: Synthetic oligonucleotide
augaaccugcagaguaacu

SEQ ID NO: 1885573 - RNA, 19 nt, Artificial Sequence
  Description of Artificial Sequence: Synthetic oligonucleotide
gcauuggggaguccaucug

SEQ ID NO: 1885574 - RNA, 19 nt, Artificial Sequence
  Description of Artificial Sequence: Synthetic oligonucleotide
uguggcccaucagccacac

SEQ ID NO: 1885575 - RNA, 19 nt, Artificial Sequence
  Description of Artificial Sequence: Synthetic oligonucleotide
cacuggagccaggcaaccc

SEQ ID NO: 1885576 - RNA, 19 nt, Artificial Sequence
  Description of Artificial Sequence: Synthetic oligonucleotide
cucucgcuggcguuccuga

SEQ ID NO: 1885577 - RNA, 19 nt, Artificial Sequence
  Description of Artificial Sequence: Synthetic oligonucleotide
gccggguucaugccguggc

SEQ ID NO: 1885578 - RNA, 19 nt, Artificial Sequence
  Description of Artificial Sequence: Synthetic oligonucleotide
gagccucaccugccagugc

SEQ ID NO: 1885579 - RNA, 19 nt, Artificial Sequence
  Description of Artificial Sequence: Synthetic oligonucleotide
ugcaucccuggaccuugaa

SEQ ID NO: 1885580 - RNA, 19 nt, Artificial Sequence
  Description of Artificial Sequence: Synthetic oligonucleotide
gggcaguuuggaguggggc

SEQ ID NO: 1885581 - RNA, 19 nt, Artificial Sequence
  Description of Artificial Sequence: Synthetic oligonucleotide
gucaccagguugacaucug

SEQ ID NO: 1885582 - RNA, 19 nt, Artificial Sequence
  Description of Artificial Sequence: Synthetic oligonucleotide
uggaguggggcaggggaua

SEQ ID NO: 1885583 - RNA, 19 nt, Artificial Sequence
  Description of Artificial Sequence: Synthetic oligonucleotide
gagggaggcugagagugaa

SEQ ID NO: 1885584 - RNA, 19 nt, Artificial Sequence
  Description of Artificial Sequence: Synthetic oligonucleotide
gagggucaguagagggccc

SEQ ID NO: 1885585 - RNA, 19 nt, Artificial Sequence
  Description of Artificial Sequence: Synthetic oligonucleotide
cuugucgccuccuacgcuu

SEQ ID NO: 1885586 - RNA, 19 nt, Artificial Sequence
  Description of Artificial Sequence: Synthetic oligonucleotide
cacaagcuguggguuucag

SEQ ID NO: 1885587 - RNA, 19 nt, Artificial Sequence
  Description of Artificial Sequence: Synthetic oligonucleotide
gcaccagcguccucucucc

SEQ ID NO: 1885588 - RNA, 19 nt, Artificial Sequence
  Description of Artificial Sequence: Synthetic oligonucleotide
guccugacagcaaggcaca

SEQ ID NO: 1885589 - RNA, 19 nt, Artificial Sequence
  Description of Artificial Sequence: Synthetic oligonucleotide
agaggaggaccagcagacu

SEQ ID NO: 1885590 - RNA, 19 nt, Artificial Sequence
  Description of Artificial Sequence: Synthetic oligonucleotide
ggcuuucgagguucaggug

SEQ ID NO: 1885591 - RNA, 19 nt, Artificial Sequence
  Description of Artificial Sequence: Synthetic oligonucleotide
uuucgagguucaggugccu

SEQ ID NO: 1885592 - RNA, 19 nt, Artificial Sequence
  Description of Artificial Sequence: Synthetic oligonucleotide
accagcguccucucuccuu

SEQ ID NO: 1885593 - RNA, 19 nt, Artificial Sequence
  Description of Artificial Sequence: Synthetic oligonucleotide
ccagucagccaggagggag

SEQ ID NO: 1885594 - RNA, 19 nt, Artificial Sequence
  Description of Artificial Sequence: Synthetic oligonucleotide
ggaggacuagcagguuggg

SEQ ID NO: 1885595 - RNA, 19 nt, Artificial Sequence
  Description of Artificial Sequence: Synthetic oligonucleotide
cagcauuggggaguccauc

SEQ ID NO: 1885596 - RNA, 19 nt, Artificial Sequence
  Description of Artificial Sequence: Synthetic oligonucleotide
gcccucaagccagucagcc

SEQ ID NO: 1885597 - RNA, 19 nt, Artificial Sequence
  Description of Artificial Sequence: Synthetic oligonucleotide
cuggcguuccugagcuguc

SEQ ID NO: 1885598 - RNA, 19 nt, Artificial Sequence
  Description of Artificial Sequence: Synthetic oligonucleotide
agccaacaccguagccagc

SEQ ID NO: 1885599 - RNA, 19 nt, Artificial Sequence
  Description of Artificial Sequence: Synthetic oligonucleotide
auggcucggugguggcuca

SEQ ID NO: 1885600 - RNA, 19 nt, Artificial Sequence
  Description of Artificial Sequence: Synthetic oligonucleotide
ggaguuggggcaggaggcc

SEQ ID NO: 1885601 - RNA, 19 nt, Artificial Sequence
  Description of Artificial Sequence: Synthetic oligonucleotide
cuacgcuucucuucucgcu

SEQ ID NO: 1885602 - RNA, 19 nt, Artificial Sequence
  Description of Artificial Sequence: Synthetic oligonucleotide
gcaggaccaggaauagagc

SEQ ID NO: 1885603 - RNA, 19 nt, Artificial Sequence
  Description of Artificial Sequence: Synthetic oligonucleotide
gacugcucaggggaguagu

SEQ ID NO: 1885604 - RNA, 19 nt, Artificial Sequence
  Description of Artificial Sequence: Synthetic oligonucleotide
uguggguuucagggcuccu

SEQ ID NO: 1885605 - RNA, 19 nt, Artificial Sequence
  Description of Artificial Sequence: Synthetic oligonucleotide
cggucauugucacuaagca

SEQ ID NO: 1885606 - RNA, 19 nt, Artificial Sequence
  Description of Artificial Sequence: Synthetic oligonucleotide
ucucgcucucgcuggcguu

SEQ ID NO: 1885607 - RNA, 19 nt, Artificial Sequence
  Description of Artificial Sequence: Synthetic oligonucleotide
ggugggcaaacaggcuggg

SEQ ID NO: 1885608 - RNA, 19 nt, Artificial Sequence
  Description of Artificial Sequence: Synthetic oligonucleotide
agcaggcuucggucauugu

SEQ ID NO: 1885609 - RNA, 19 nt, Artificial Sequence
  Description of Artificial Sequence: Synthetic oligonucleotide
ccuugcguucccucucuug

SEQ ID NO: 1885610 - RNA, 19 nt, Artificial Sequence
  Description of Artificial Sequence: Synthetic oligonucleotide
ggccgagccaugcgagucc

SEQ ID NO: 1885611 - RNA, 19 nt, Artificial Sequence
  Description of Artificial Sequence: Synthetic oligonucleotide
gccguggcccucaagccag

SEQ ID NO: 1885612 - RNA, 19 nt, Artificial Sequence
  Description of Artificial Sequence: Synthetic oligonucleotide
gacucgaugucagccgggu

SEQ ID NO: 1885613 - RNA, 19 nt, Artificial Sequence
  Description of Artificial Sequence: Synthetic oligonucleotide
acucgaugucagccggguu

SEQ ID NO: 1885614 - RNA, 19 nt, Artificial Sequence
  Description of Artificial Sequence: Synthetic oligonucleotide
uucaugccguggcccucaa

SEQ ID NO: 1885615 - RNA, 19 nt, Artificial Sequence
  Description of Artificial Sequence: Synthetic oligonucleotide
cuucggucauugucacuaa

SEQ ID NO: 1885616 - RNA, 19 nt, Artificial Sequence
  Description of Artificial Sequence: Synthetic oligonucleotide
cacugcccuuuggagugcc

SEQ ID NO: 1885617 - RNA, 19 nt, Artificial Sequence
  Description of Artificial Sequence: Synthetic oligonucleotide
agggaggcugagagugaag

SEQ ID NO: 1885618 - RNA, 19 nt, Artificial Sequence
  Description of Artificial Sequence: Synthetic oligonucleotide
cacacccauaucgaaagau

SEQ ID NO: 1885619 - RNA, 19 nt, Artificial Sequence
  Description of Artificial Sequence: Synthetic oligonucleotide
caugcgaguccaccgcucu

SEQ ID NO: 1885620 - RNA, 19 nt, Artificial Sequence
  Description of Artificial Sequence: Synthetic oligonucleotide
gguugacaucuggugacuc

SEQ ID NO: 1885621 - RNA, 19 nt, Artificial Sequence
  Description of Artificial Sequence: Synthetic oligonucleotide
ggagguggugggccagaug

SEQ ID NO: 1885622 - RNA, 19 nt, Artificial Sequence
  Description of Artificial Sequence: Synthetic oligonucleotide
cacaggcuuucgagguuca

SEQ ID NO: 1885623 - RNA, 19 nt, Artificial Sequence
  Description of Artificial Sequence: Synthetic oligonucleotide
uccuugcguucccucucuu

SEQ ID NO: 1885624 - RNA, 19 nt, Artificial Sequence
  Description of Artificial Sequence: Synthetic oligonucleotide
gucgucgcuucucccucuc

SEQ ID NO: 1885625 - RNA, 19 nt, Artificial Sequence
  Description of Artificial Sequence: Synthetic oligonucleotide
aggcaggaccaggaauaga

SEQ ID NO: 1885626 - RNA, 19 nt, Artificial Sequence
  Description of Artificial Sequence: Synthetic oligonucleotide
cagccacacccauaucgaa

SEQ ID NO: 1885627 - RNA, 19 nt, Artificial Sequence
  Description of Artificial Sequence: Synthetic oligonucleotide
cagccccacugcccuuugg

SEQ ID NO: 1885628 - RNA, 19 nt, Artificial Sequence
  Description of Artificial Sequence: Synthetic oligonucleotide
cuccuacgcuucucuucuc

SEQ ID NO: 1885629 - RNA, 19 nt, Artificial Sequence
  Description of Artificial Sequence: Synthetic oligonucleotide
agaauuccucuaggucaaa

SEQ ID NO: 1885630 - RNA, 19 nt, Artificial Sequence
  Description of Artificial Sequence: Synthetic oligonucleotide
guccaccgcucuagcaggc

SEQ ID NO: 1885631 - RNA, 19 nt, Artificial Sequence
  Description of Artificial Sequence: Synthetic oligonucleotide
acccacuaguuggcacaag

SEQ ID NO: 1885632 - RNA, 19 nt, Artificial Sequence
  Description of Artificial Sequence: Synthetic oligonucleotide
guagucucccaauccuguu

SEQ ID NO: 1885633 - RNA, 19 nt, Artificial Sequence
  Description of Artificial Sequence: Synthetic oligonucleotide
agucggcuccucagggacu

SEQ ID NO: 1885634 - RNA, 19 nt, Artificial Sequence
  Description of Artificial Sequence: Synthetic oligonucleotide
cguagccagccccacugcc

SEQ ID NO: 1885635 - RNA, 19 nt, Artificial Sequence
  Description of Artificial Sequence: Synthetic oligonucleotide
cugagccucaccugccagu

SEQ ID NO: 1885636 - RNA, 19 nt, Artificial Sequence
  Description of Artificial Sequence: Synthetic oligonucleotide
agccaggagggaggcugag

SEQ ID NO: 1885637 - RNA, 19 nt, Artificial Sequence
  Description of Artificial Sequence: Synthetic oligonucleotide
gaggccgagccaugcgagu

SEQ ID NO: 1885638 - RNA, 19 nt, Artificial Sequence
  Description of Artificial Sequence: Synthetic oligonucleotide
guugcugggucaccagguu

SEQ ID NO: 1885639 - RNA, 19 nt, Artificial Sequence
  Description of Artificial Sequence: Synthetic oligonucleotide
aagggugcacugggcccau

SEQ ID NO: 1885640 - RNA, 19 nt, Artificial Sequence
  Description of Artificial Sequence: Synthetic oligonucleotide
ggauugcaucccuggaccu

SEQ ID NO: 1885641 - RNA, 19 nt, Artificial Sequence
  Description of Artificial Sequence: Synthetic oligonucleotide
gcgaguccaccgcucuagc

SEQ ID NO: 1885642 - RNA, 19 nt, Artificial Sequence
  Description of Artificial Sequence: Synthetic oligonucleotide
ccaacaccguagccagccc

SEQ ID NO: 1885643 - RNA, 19 nt, Artificial Sequence
  Description of Artificial Sequence: Synthetic oligonucleotide
cccauaucgaaagauuggu

SEQ ID NO: 1885644 - RNA, 19 nt, Artificial Sequence
  Description of Artificial Sequence: Synthetic oligonucleotide
agggccagugggaggacua

SEQ ID NO: 1885645 - RNA, 19 nt, Artificial Sequence
  Description of Artificial Sequence: Synthetic oligonucleotide
ccggguucaugccguggcc

SEQ ID NO: 1885646 - RNA, 19 nt, Artificial Sequence
  Description of Artificial Sequence: Synthetic oligonucleotide
ggucugagaugaaccugca

SEQ ID NO: 1885647 - RNA, 19 nt, Artificial Sequence
  Description of Artificial Sequence: Synthetic oligonucleotide
ccuccuacgcuucucuucu

SEQ ID NO: 1885648 - RNA, 19 nt, Artificial Sequence
  Description of Artificial Sequence: Synthetic oligonucleotide
ccaugcgaguccaccgcuc

SEQ ID NO: 1885649 - RNA, 19 nt, Artificial Sequence
  Description of Artificial Sequence: Synthetic oligonucleotide
cccacuaguuggcacaagu

SEQ ID NO: 1885650 - RNA, 19 nt, Artificial Sequence
  Description of Artificial Sequence: Synthetic oligonucleotide
gucgccuccuacgcuucuc

SEQ ID NO: 1885651 - RNA, 19 nt, Artificial Sequence
  Description of Artificial Sequence: Synthetic oligonucleotide
gugggcaaacaggcuggga

SEQ ID NO: 1885652 - RNA, 19 nt, Artificial Sequence
  Description of Artificial Sequence: Synthetic oligonucleotide
gaggaccagcagacugaga

SEQ ID NO: 1885653 - RNA, 19 nt, Artificial Sequence
  Description of Artificial Sequence: Synthetic oligonucleotide
gccauccuguggcccauca

SEQ ID NO: 1885654 - RNA, 19 nt, Artificial Sequence
  Description of Artificial Sequence: Synthetic oligonucleotide
cagccggguucaugccgug

SEQ ID NO: 1885655 - RNA, 19 nt, Artificial Sequence
  Description of Artificial Sequence: Synthetic oligonucleotide
gcuggcguuccugagcugu

SEQ ID NO: 1885656 - RNA, 19 nt, Artificial Sequence
  Description of Artificial Sequence: Synthetic oligonucleotide
ggcaacccacuaguuggca

SEQ ID NO: 1885657 - RNA, 19 nt, Artificial Sequence
  Description of Artificial Sequence: Synthetic oligonucleotide
cuucucccucuccuuggcu

SEQ ID NO: 1885658 - RNA, 19 nt, Artificial Sequence
  Description of Artificial Sequence: Synthetic oligonucleotide
cggguucaugccguggccc

SEQ ID NO: 1885659 - RNA, 19 nt, Artificial Sequence
  Description of Artificial Sequence: Synthetic oligonucleotide
gggugcacugggcccaucu

SEQ ID NO: 1885660 - RNA, 19 nt, Artificial Sequence
  Description of Artificial Sequence: Synthetic oligonucleotide
ccguagccagccccacugc

SEQ ID NO: 1885661 - RNA, 19 nt, Artificial Sequence
  Description of Artificial Sequence: Synthetic oligonucleotide
cacgcugcagagacucgau

SEQ ID NO: 1885662 - RNA, 19 nt, Artificial Sequence
  Description of Artificial Sequence: Synthetic oligonucleotide
gccuggccauccuguggcc

SEQ ID NO: 1885663 - RNA, 19 nt, Artificial Sequence
  Description of Artificial Sequence: Synthetic oligonucleotide
ccauaucgaaagauugguu

SEQ ID NO: 1885664 - RNA, 19 nt, Artificial Sequence
  Description of Artificial Sequence: Synthetic oligonucleotide
cccucaagccagucagcca

SEQ ID NO: 1885665 - RNA, 19 nt, Artificial Sequence
  Description of Artificial Sequence: Synthetic oligonucleotide
gccucuggauugcaucccu

SEQ ID NO: 1885666 - RNA, 19 nt, Artificial Sequence
  Description of Artificial Sequence: Synthetic oligonucleotide
cugagcugucacaggcuuu

SEQ ID NO: 1885667 - RNA, 19 nt, Artificial Sequence
  Description of Artificial Sequence: Synthetic oligonucleotide
gugggugggcaaacaggcu

SEQ ID NO: 1885668 - RNA, 19 nt, Artificial Sequence
  Description of Artificial Sequence: Synthetic oligonucleotide
ggcaggaggccgagccaug

SEQ ID NO: 1885669 - RNA, 19 nt, Artificial Sequence
  Description of Artificial Sequence: Synthetic oligonucleotide
gccaugcgaguccaccgcu

SEQ ID NO: 1885670 - RNA, 19 nt, Artificial Sequence
  Description of Artificial Sequence: Synthetic oligonucleotide
ggccagugggugggcaaac

SEQ ID NO: 1885671 - RNA, 19 nt, Artificial Sequence
  Description of Artificial Sequence: Synthetic oligonucleotide
gugggccagaugggaagua

SEQ ID NO: 1885672 - RNA, 19 nt, Artificial Sequence
  Description of Artificial Sequence: Synthetic oligonucleotide
ccacacccauaucgaaaga

SEQ ID NO: 1885673 - RNA, 19 nt, Artificial Sequence
  Description of Artificial Sequence: Synthetic oligonucleotide
gcuaguggaaggggcaguu

SEQ ID NO: 1885674 - RNA, 19 nt, Artificial Sequence
  Description of Artificial Sequence: Synthetic oligonucleotide
caucucugagucggcuccu

SEQ ID NO: 1885675 - RNA, 19 nt, Artificial Sequence
  Description of Artificial Sequence: Synthetic oligonucleotide
gagaggccagaaggcuagu

SEQ ID NO: 1885676 - RNA, 19 nt, Artificial Sequence
  Description of Artificial Sequence: Synthetic oligonucleotide
gcguccucucuccuugcgu

SEQ ID NO: 1885677 - RNA, 19 nt, Artificial Sequence
  Description of Artificial Sequence: Synthetic oligonucleotide
gcccuuuggagugccugaa

SEQ ID NO: 1885678 - RNA, 19 nt, Artificial Sequence
  Description of Artificial Sequence: Synthetic oligonucleotide
cuaguggaaggggcaguuu

SEQ ID NO: 1885679 - RNA, 19 nt, Artificial Sequence
  Description of Artificial Sequence: Synthetic oligonucleotide
cgcucuagcaggcuucggu

SEQ ID NO: 1885680 - RNA, 19 nt, Artificial Sequence
  Description of Artificial Sequence: Synthetic oligonucleotide
caccguagccagccccacu

SEQ ID NO: 1885681 - RNA, 19 nt, Artificial Sequence
  Description of Artificial Sequence: Synthetic oligonucleotide
cuggaccuugaagcugggu

SEQ ID NO: 1885682 - RNA, 19 nt, Artificial Sequence
  Description of Artificial Sequence: Synthetic oligonucleotide
gcguucccucucuugucgu

SEQ ID NO: 1885683 - RNA, 19 nt, Artificial Sequence
  Description of Artificial Sequence: Synthetic oligonucleotide
ggcuucggucauugucacu

SEQ ID NO: 1885684 - RNA, 19 nt, Artificial Sequence
  Description of Artificial Sequence: Synthetic oligonucleotide
cgagguucaggugccucca

SEQ ID NO: 1885685 - RNA, 19 nt, Artificial Sequence
  Description of Artificial Sequence: Synthetic oligonucleotide
gccucaccugccagugcca

SEQ ID NO: 1885686 - RNA, 19 nt, Artificial Sequence
  Description of Artificial Sequence: Synthetic oligonucleotide
ccuccaccugagacuuaga

SEQ ID NO: 1885687 - RNA, 19 nt, Artificial Sequence
  Description of Artificial Sequence: Synthetic oligonucleotide
caccagcguccucucuccu

SEQ ID NO: 1885688 - RNA, 19 nt, Artificial Sequence
  Description of Artificial Sequence: Synthetic oligonucleotide
ccgcucuagcaggcuucgg

SEQ ID NO: 1885689 - RNA, 19 nt, Artificial Sequence
  Description of Artificial Sequence: Synthetic oligonucleotide
gcccaucagccacacccau

SEQ ID NO: 1885690 - RNA, 19 nt, Artificial Sequence
  Description of Artificial Sequence: Synthetic oligonucleotide
ccccagggaucuggaggug

SEQ ID NO: 1885691 - RNA, 19 nt, Artificial Sequence
  Description of Artificial Sequence: Synthetic oligonucleotide
guccuccaccugagacuua

SEQ ID NO: 1885692 - RNA, 19 nt, Artificial Sequence
  Description of Artificial Sequence: Synthetic oligonucleotide
cguggcccucaagccaguc

SEQ ID NO: 1885693 - RNA, 19 nt, Artificial Sequence
  Description of Artificial Sequence: Synthetic oligonucleotide
gccaggcaacccacuaguu

SEQ ID NO: 1885694 - RNA, 19 nt, Artificial Sequence
  Description of Artificial Sequence: Synthetic oligonucleotide
cgcuggcguuccugagcug

SEQ ID NO: 1885695 - RNA, 19 nt, Artificial Sequence
  Description of Artificial Sequence: Synthetic oligonucleotide
ccaccgcucuagcaggcuu

SEQ ID NO: 1885696 - RNA, 19 nt, Artificial Sequence
  Description of Artificial Sequence: Synthetic oligonucleotide
ccguggcccucaagccagu

SEQ ID NO: 1885697 - RNA, 19 nt, Artificial Sequence
  Description of Artificial Sequence: Synthetic oligonucleotide
aagacugacccauugaccg

SEQ ID NO: 1885698 - RNA, 19 nt, Artificial Sequence
  Description of Artificial Sequence: Synthetic oligonucleotide
aguguaggaaguuucaggc

SEQ ID NO: 1885699 - RNA, 19 nt, Artificial Sequence
  Description of Artificial Sequence: Synthetic oligonucleotide
ugagauaauagcccaaggg

SEQ ID NO: 1885700 - RNA, 19 nt, Artificial Sequence
  Description of Artificial Sequence: Synthetic oligonucleotide
aaggaaugagauaauagcc

SEQ ID NO: 1885701 - RNA, 19 nt, Artificial Sequence
  Description of Artificial Sequence: Synthetic oligonucleotide
gagauaauagcccaagggg

SEQ ID NO: 1885702 - RNA, 19 nt, Artificial Sequence
  Description of Artificial Sequence: Synthetic oligonucleotide
aacauaucaccagaggugc

SEQ ID NO: 1885703 - RNA, 19 nt, Artificial Sequence
  Description of Artificial Sequence: Synthetic oligonucleotide
gaagaguagggcuagagcc

SEQ ID NO: 1885704 - RNA, 19 nt, Artificial Sequence
  Description of Artificial Sequence: Synthetic oligonucleotide
aaaacccucagcuuauuag

SEQ ID NO: 1885705 - RNA, 19 nt, Artificial Sequence
  Description of Artificial Sequence: Synthetic oligonucleotide
uuuugagcauuuaagaccu

SEQ ID NO: 1885706 - RNA, 19 nt, Artificial Sequence
  Description of Artificial Sequence: Synthetic oligonucleotide
aauaaagacugacccauug

SEQ ID NO: 1885707 - RNA, 19 nt, Artificial Sequence
  Description of Artificial Sequence: Synthetic oligonucleotide
acagaugggauccagaucu

SEQ ID NO: 1885708 - RNA, 19 nt, Artificial Sequence
  Description of Artificial Sequence: Synthetic oligonucleotide
aguuugugcaaacauauca

SEQ ID NO: 1885709 - RNA, 19 nt, Artificial Sequence
  Description of Artificial Sequence: Synthetic oligonucleotide
auggguaggaaucuguuuc

SEQ ID NO: 1885710 - RNA, 19 nt, Artificial Sequence
  Description of Artificial Sequence: Synthetic oligonucleotide
agcauuuaagaccuugagg

SEQ ID NO: 1885711 - RNA, 19 nt, Artificial Sequence
  Description of Artificial Sequence: Synthetic oligonucleotide
aaguacccgaagcuugucc

SEQ ID NO: 1885712 - RNA, 19 nt, Artificial Sequence
  Description of Artificial Sequence: Synthetic oligonucleotide
accaguacagcucccaugg

SEQ ID NO: 1885713 - RNA, 19 nt, Artificial Sequence
  Description of Artificial Sequence: Synthetic oligonucleotide
aguacccgaagcuuguccc

SEQ ID NO: 1885714 - RNA, 19 nt, Artificial Sequence
  Description of Artificial Sequence: Synthetic oligonucleotide
cuggauacaacgaacuacc

SEQ ID NO: 1885715 - RNA, 19 nt, Artificial Sequence
  Description of Artificial Sequence: Synthetic oligonucleotide
uaaagacugacccauugac

SEQ ID NO: 1885716 - RNA, 19 nt, Artificial Sequence
  Description of Artificial Sequence: Synthetic oligonucleotide
aaugagauaauagcccaag

SEQ ID NO: 1885717 - RNA, 19 nt, Artificial Sequence
  Description of Artificial Sequence: Synthetic oligonucleotide
uccaauaaauacagauggg

SEQ ID NO: 1885718 - RNA, 19 nt, Artificial Sequence
  Description of Artificial Sequence: Synthetic oligonucleotide
uuuugauacucauggguag

SEQ ID NO: 1885719 - RNA, 19 nt, Artificial Sequence
  Description of Artificial Sequence: Synthetic oligonucleotide
aaacauaucaccagaggug

SEQ ID NO: 1885720 - RNA, 19 nt, Artificial Sequence
  Description of Artificial Sequence: Synthetic oligonucleotide
agugcaauaaagacugacc

SEQ ID NO: 1885721 - RNA, 19 nt, Artificial Sequence
  Description of Artificial Sequence: Synthetic oligonucleotide
ucuuugguaagucgguucc

SEQ ID NO: 1885722 - RNA, 19 nt, Artificial Sequence
  Description of Artificial Sequence: Synthetic oligonucleotide
gaguguaggaaguuucagg

SEQ ID NO: 1885723 - RNA, 19 nt, Artificial Sequence
  Description of Artificial Sequence: Synthetic oligonucleotide
gauggggcaaguuuuccgg

SEQ ID NO: 1885724 - RNA, 19 nt, Artificial Sequence
  Description of Artificial Sequence: Synthetic oligonucleotide
gaaucuucgaagcagugca

SEQ ID NO: 1885725 - RNA, 19 nt, Artificial Sequence
  Description of Artificial Sequence: Synthetic oligonucleotide
gauacaacgaacuaccagu

SEQ ID NO: 1885726 - RNA, 19 nt, Artificial Sequence
  Description of Artificial Sequence: Synthetic oligonucleotide
cagcuuauuagacuggagg

SEQ ID NO: 1885727 - RNA, 19 nt, Artificial Sequence
  Description of Artificial Sequence: Synthetic oligonucleotide
aaacccucagcuuauuaga

SEQ ID NO: 1885728 - RNA, 19 nt, Artificial Sequence
  Description of Artificial Sequence: Synthetic oligonucleotide
ugcggugcuggauacaacg

SEQ ID NO: 1885729 - RNA, 19 nt, Artificial Sequence
  Description of Artificial Sequence: Synthetic oligonucleotide
uacuaugccagugaaagga

SEQ ID NO: 1885730 - RNA, 19 nt, Artificial Sequence
  Description of Artificial Sequence: Synthetic oligonucleotide
aagucgguuccgcuggagc

SEQ ID NO: 1885731 - RNA, 19 nt, Artificial Sequence
  Description of Artificial Sequence: Synthetic oligonucleotide
cucucuccaauaaauacag

SEQ ID NO: 1885732 - RNA, 19 nt, Artificial Sequence
  Description of Artificial Sequence: Synthetic oligonucleotide
uggauuuccucacuauucc

SEQ ID NO: 1885733 - RNA, 19 nt, Artificial Sequence
  Description of Artificial Sequence: Synthetic oligonucleotide
aagaguagggcuagagccc

SEQ ID NO: 1885734 - RNA, 19 nt, Artificial Sequence
  Description of Artificial Sequence: Synthetic oligonucleotide
agcagugcaauaaagacug

SEQ ID NO: 1885735 - RNA, 19 nt, Artificial Sequence
  Description of Artificial Sequence: Synthetic oligonucleotide
acaacgaacuaccaguaca

SEQ ID NO: 1885736 - RNA, 19 nt, Artificial Sequence
  Description of Artificial Sequence: Synthetic oligonucleotide
auauugaucucccuuuuga

SEQ ID NO: 1885737 - RNA, 19 nt, Artificial Sequence
  Description of Artificial Sequence: Synthetic oligonucleotide
uuggaaugcacauugugaa

SEQ ID NO: 1885738 - RNA, 19 nt, Artificial Sequence
  Description of Artificial Sequence: Synthetic oligonucleotide
aguuuuccgggucugagug

SEQ ID NO: 1885739 - RNA, 19 nt, Artificial Sequence
  Description of Artificial Sequence: Synthetic oligonucleotide
uuagacuggaggaaaaguu

SEQ ID NO: 1885740 - RNA, 19 nt, Artificial Sequence
  Description of Artificial Sequence: Synthetic oligonucleotide
cauugugaaccacagcugc

SEQ ID NO: 1885741 - RNA, 19 nt, Artificial Sequence
  Description of Artificial Sequence: Synthetic oligonucleotide
agucgguuccgcuggagcc

SEQ ID NO: 1885742 - RNA, 19 nt, Artificial Sequence
  Description of Artificial Sequence: Synthetic oligonucleotide
cagcagaugaaggagaagg

SEQ ID NO: 1885743 - RNA, 19 nt, Artificial Sequence
  Description of Artificial Sequence: Synthetic oligonucleotide
augugcacaaggaaguacc

SEQ ID NO: 1885744 - RNA, 19 nt, Artificial Sequence
  Description of Artificial Sequence: Synthetic oligonucleotide
agcuuauuagacuggagga

SEQ ID NO: 1885745 - RNA, 19 nt, Artificial Sequence
  Description of Artificial Sequence: Synthetic oligonucleotide
ugggccuccaccaaggaac

SEQ ID NO: 1885746 - RNA, 19 nt, Artificial Sequence
  Description of Artificial Sequence: Synthetic oligonucleotide
uuugauacucauggguagg

SEQ ID NO: 1885747 - RNA, 19 nt, Artificial Sequence
  Description of Artificial Sequence: Synthetic oligonucleotide
uggcacagacaucauauug

SEQ ID NO: 1885748 - RNA, 19 nt, Artificial Sequence
  Description of Artificial Sequence: Synthetic oligonucleotide
ugcacaaggaaguacccga

SEQ ID NO: 1885749 - RNA, 19 nt, Artificial Sequence
  Description of Artificial Sequence: Synthetic oligonucleotide
agccacaacaacaggaagc

SEQ ID NO: 1885750 - RNA, 19 nt, Artificial Sequence
  Description of Artificial Sequence: Synthetic oligonucleotide
aggucgcucgaauaaggcc

SEQ ID NO: 1885751 - RNA, 19 nt, Artificial Sequence
  Description of Artificial Sequence: Synthetic oligonucleotide
auuuaagaccuugagguca

SEQ ID NO: 1885752 - RNA, 19 nt, Artificial Sequence
  Description of Artificial Sequence: Synthetic oligonucleotide
ugcaauaaagacugaccca

SEQ ID NO: 1885753 - RNA, 19 nt, Artificial Sequence
  Description of Artificial Sequence: Synthetic oligonucleotide
ugagcauuuaagaccuuga

SEQ ID NO: 1885754 - RNA, 19 nt, Artificial Sequence
  Description of Artificial Sequence: Synthetic oligonucleotide
ucagaagcucauuggaaug

SEQ ID NO: 1885755 - RNA, 19 nt, Artificial Sequence
  Description of Artificial Sequence: Synthetic oligonucleotide
ucacuauuccacaccaugu

SEQ ID NO: 1885756 - RNA, 19 nt, Artificial Sequence
  Description of Artificial Sequence: Synthetic oligonucleotide
ucgaagcagugcaauaaag

SEQ ID NO: 1885757 - RNA, 19 nt, Artificial Sequence
  Description of Artificial Sequence: Synthetic oligonucleotide
uuccacaccauguucagaa

SEQ ID NO: 1885758 - RNA, 19 nt, Artificial Sequence
  Description of Artificial Sequence: Synthetic oligonucleotide
caacgaacuaccaguacag

SEQ ID NO: 1885759 - RNA, 19 nt, Artificial Sequence
  Description of Artificial Sequence: Synthetic oligonucleotide
gaacuaccaguacagcucc

SEQ ID NO: 1885760 - RNA, 19 nt, Artificial Sequence
  Description of Artificial Sequence: Synthetic oligonucleotide
augagauaauagcccaagg

SEQ ID NO: 1885761 - RNA, 19 nt, Artificial Sequence
  Description of Artificial Sequence: Synthetic oligonucleotide
gagcauuuaagaccuugag

SEQ ID NO: 1885762 - RNA, 19 nt, Artificial Sequence
  Description of Artificial Sequence: Synthetic oligonucleotide
ugcagucgaaucuucgaag

SEQ ID NO: 1885763 - RNA, 19 nt, Artificial Sequence
  Description of Artificial Sequence: Synthetic oligonucleotide
uauugucuggaaccagaag

SEQ ID NO: 1885764 - RNA, 19 nt, Artificial Sequence
  Description of Artificial Sequence: Synthetic oligonucleotide
auacucauggguaggaauc

SEQ ID NO: 1885765 - RNA, 19 nt, Artificial Sequence
  Description of Artificial Sequence: Synthetic oligonucleotide
aacgaacuaccaguacagc

SEQ ID NO: 1885766 - RNA, 19 nt, Artificial Sequence
  Description of Artificial Sequence: Synthetic oligonucleotide
uucuggaugggccuccacc

SEQ ID NO: 1885767 - RNA, 19 nt, Artificial Sequence
  Description of Artificial Sequence: Synthetic oligonucleotide
ucgaauaaggccucggaua

SEQ ID NO: 1885768 - RNA, 19 nt, Artificial Sequence
  Description of Artificial Sequence: Synthetic oligonucleotide
aggaaucuguuucaguugu

SEQ ID NO: 1885769 - RNA, 19 nt, Artificial Sequence
  Description of Artificial Sequence: Synthetic oligonucleotide
cacacagcggcugugauag

SEQ ID NO: 1885770 - RNA, 19 nt, Artificial Sequence
  Description of Artificial Sequence: Synthetic oligonucleotide
uguucuuugguaagucggu

SEQ ID NO: 1885771 - RNA, 19 nt, Artificial Sequence
  Description of Artificial Sequence: Synthetic oligonucleotide
ugacccauugaccggagcu

SEQ ID NO: 1885772 - RNA, 19 nt, Artificial Sequence
  Description of Artificial Sequence: Synthetic oligonucleotide
aaaaguuugugcaaacaua

SEQ ID NO: 1885773 - RNA, 19 nt, Artificial Sequence
  Description of Artificial Sequence: Synthetic oligonucleotide
gcauuuaagaccuugaggu

SEQ ID NO: 1885774 - RNA, 19 nt, Artificial Sequence
  Description of Artificial Sequence: Synthetic oligonucleotide
auaaagacugacccauuga

SEQ ID NO: 1885775 - RNA, 19 nt, Artificial Sequence
  Description of Artificial Sequence: Synthetic oligonucleotide
gauccagaucugcuguugg

SEQ ID NO: 1885776 - RNA, 19 nt, Artificial Sequence
  Description of Artificial Sequence: Synthetic oligonucleotide
ugugcuccgaggucgcucg

SEQ ID NO: 1885777 - RNA, 19 nt, Artificial Sequence
  Description of Artificial Sequence: Synthetic oligonucleotide
uccucacuauuccacacca

SEQ ID NO: 1885778 - RNA, 19 nt, Artificial Sequence
  Description of Artificial Sequence: Synthetic oligonucleotide
uauuagacuggaggaaaag

SEQ ID NO: 1885779 - RNA, 19 nt, Artificial Sequence
  Description of Artificial Sequence: Synthetic oligonucleotide
acgaacuaccaguacagcu

SEQ ID NO: 1885780 - RNA, 19 nt, Artificial Sequence
  Description of Artificial Sequence: Synthetic oligonucleotide
aaaccagcaguccuacuau

SEQ ID NO: 1885781 - RNA, 19 nt, Artificial Sequence
  Description of Artificial Sequence: Synthetic oligonucleotide
uuauuagacuggaggaaaa

SEQ ID NO: 1885782 - RNA, 19 nt, Artificial Sequence
  Description of Artificial Sequence: Synthetic oligonucleotide
cauugaccggagcugaggg

SEQ ID NO: 1885783 - RNA, 19 nt, Artificial Sequence
  Description of Artificial Sequence: Synthetic oligonucleotide
agauaauagcccaagggga

SEQ ID NO: 1885784 - RNA, 19 nt, Artificial Sequence
  Description of Artificial Sequence: Synthetic oligonucleotide
aaacuauugucuggaacca

SEQ ID NO: 1885785 - RNA, 19 nt, Artificial Sequence
  Description of Artificial Sequence: Synthetic oligonucleotide
auuggaaugcacauuguga

SEQ ID NO: 1885786 - RNA, 19 nt, Artificial Sequence
  Description of Artificial Sequence: Synthetic oligonucleotide
aaagaggugggaagaguag

SEQ ID NO: 1885787 - RNA, 19 nt, Artificial Sequence
  Description of Artificial Sequence: Synthetic oligonucleotide
aacccucagcuuauuagac

SEQ ID NO: 1885788 - RNA, 19 nt, Artificial Sequence
  Description of Artificial Sequence: Synthetic oligonucleotide
cauuggaaugcacauugug

SEQ ID NO: 1885789 - RNA, 19 nt, Artificial Sequence
  Description of Artificial Sequence: Synthetic oligonucleotide
aagcagugcaauaaagacu

SEQ ID NO: 1885790 - RNA, 19 nt, Artificial Sequence
  Description of Artificial Sequence: Synthetic oligonucleotide
aaaagaggugggaagagua

SEQ ID NO: 1885791 - RNA, 19 nt, Artificial Sequence
  Description of Artificial Sequence: Synthetic oligonucleotide
gguaagucgguuccgcugg

SEQ ID NO: 1885792 - RNA, 19 nt, Artificial Sequence
  Description of Artificial Sequence: Synthetic oligonucleotide
aggggaaacuauugucugg

SEQ ID NO: 1885793 - RNA, 19 nt, Artificial Sequence
  Description of Artificial Sequence: Synthetic oligonucleotide
gauuuccucacuauuccac

SEQ ID NO: 1885794 - RNA, 19 nt, Artificial Sequence
  Description of Artificial Sequence: Synthetic oligonucleotide
ccuacuaugccagugaaag

SEQ ID NO: 1885795 - RNA, 19 nt, Artificial Sequence
  Description of Artificial Sequence: Synthetic oligonucleotide
agucgaaucuucgaagcag

SEQ ID NO: 1885796 - RNA, 19 nt, Artificial Sequence
  Description of Artificial Sequence: Synthetic oligonucleotide
aaguuuuccgggucugagu

SEQ ID NO: 1885797 - RNA, 19 nt, Artificial Sequence
  Description of Artificial Sequence: Synthetic oligonucleotide
aagaccacgggugcugggg

SEQ ID NO: 1885798 - RNA, 19 nt, Artificial Sequence
  Description of Artificial Sequence: Synthetic oligonucleotide
gaggucaaaguugcagucg

SEQ ID NO: 1885799 - RNA, 19 nt, Artificial Sequence
  Description of Artificial Sequence: Synthetic oligonucleotide
uugagcauuuaagaccuug

SEQ ID NO: 1885800 - RNA, 19 nt, Artificial Sequence
  Description of Artificial Sequence: Synthetic oligonucleotide
gaugaaggagaaggugugg

SEQ ID NO: 1885801 - RNA, 19 nt, Artificial Sequence
  Description of Artificial Sequence: Synthetic oligonucleotide
aguagccacaacaacagga

SEQ ID NO: 1885802 - RNA, 19 nt, Artificial Sequence
  Description of Artificial Sequence: Synthetic oligonucleotide
cucggauaggggaugcucc

SEQ ID NO: 1885803 - RNA, 19 nt, Artificial Sequence
  Description of Artificial Sequence: Synthetic oligonucleotide
acccaaaagaggugggaag

SEQ ID NO: 1885804 - RNA, 19 nt, Artificial Sequence
  Description of Artificial Sequence: Synthetic oligonucleotide
cuauuccacaccauguuca

SEQ ID NO: 1885805 - RNA, 19 nt, Artificial Sequence
  Description of Artificial Sequence: Synthetic oligonucleotide
uccucauacucauccagac

SEQ ID NO: 1885806 - RNA, 19 nt, Artificial Sequence
  Description of Artificial Sequence: Synthetic oligonucleotide
uggaguguaggaaguuuca

SEQ ID NO: 1885807 - RNA, 19 nt, Artificial Sequence
  Description of Artificial Sequence: Synthetic oligonucleotide
uuugguaagucgguuccgc

SEQ ID NO: 1885808 - RNA, 19 nt, Artificial Sequence
  Description of Artificial Sequence: Synthetic oligonucleotide
gcaaacauaucaccagagg

SEQ ID NO: 1885809 - RNA, 19 nt, Artificial Sequence
  Description of Artificial Sequence: Synthetic oligonucleotide
cuuuugauacucaugggua

SEQ ID NO: 1885810 - RNA, 19 nt, Artificial Sequence
  Description of Artificial Sequence: Synthetic oligonucleotide
auuagacuggaggaaaagu

SEQ ID NO: 1885811 - RNA, 19 nt, Artificial Sequence
  Description of Artificial Sequence: Synthetic oligonucleotide
ggaaugcacauugugaacc

SEQ ID NO: 1885812 - RNA, 19 nt, Artificial Sequence
  Description of Artificial Sequence: Synthetic oligonucleotide
ggauacaacgaacuaccag

SEQ ID NO: 1885813 - RNA, 19 nt, Artificial Sequence
  Description of Artificial Sequence: Synthetic oligonucleotide
ugugaaccacagcugcacc

SEQ ID NO: 1885814 - RNA, 19 nt, Artificial Sequence
  Description of Artificial Sequence: Synthetic oligonucleotide
aauacagaugggauccaga

SEQ ID NO: 1885815 - RNA, 19 nt, Artificial Sequence
  Description of Artificial Sequence: Synthetic oligonucleotide
ugaggucaaaguugcaguc

SEQ ID NO: 1885816 - RNA, 19 nt, Artificial Sequence
  Description of Artificial Sequence: Synthetic oligonucleotide
ugguaagucgguuccgcug

SEQ ID NO: 1885817 - RNA, 19 nt, Artificial Sequence
  Description of Artificial Sequence: Synthetic oligonucleotide
uucuuugguaagucgguuc

SEQ ID NO: 1885818 - RNA, 19 nt, Artificial Sequence
  Description of Artificial Sequence: Synthetic oligonucleotide
uugcagucgaaucuucgaa

SEQ ID NO: 1885819 - RNA, 19 nt, Artificial Sequence
  Description of Artificial Sequence: Synthetic oligonucleotide
uucgaagcagugcaauaaa

SEQ ID NO: 1885820 - RNA, 19 nt, Artificial Sequence
  Description of Artificial Sequence: Synthetic oligonucleotide
uugaccggagcugagggug

SEQ ID NO: 1885821 - RNA, 19 nt, Artificial Sequence
  Description of Artificial Sequence: Synthetic oligonucleotide
uaagaccuugaggucaaag

SEQ ID NO: 1885822 - RNA, 19 nt, Artificial Sequence
  Description of Artificial Sequence: Synthetic oligonucleotide
uggacaggcuguuugcaga

SEQ ID NO: 1885823 - RNA, 19 nt, Artificial Sequence
  Description of Artificial Sequence: Synthetic oligonucleotide
uaggcaugugcacaaggaa

SEQ ID NO: 1885824 - RNA, 19 nt, Artificial Sequence
  Description of Artificial Sequence: Synthetic oligonucleotide
cuacuaugccagugaaagg

SEQ ID NO: 1885825 - RNA, 19 nt, Artificial Sequence
  Description of Artificial Sequence: Synthetic oligonucleotide
aguccuacuaugccaguga

SEQ ID NO: 1885826 - RNA, 19 nt, Artificial Sequence
  Description of Artificial Sequence: Synthetic oligonucleotide
caaacauaucaccagaggu

SEQ ID NO: 1885827 - RNA, 19 nt, Artificial Sequence
  Description of Artificial Sequence: Synthetic oligonucleotide
uccgaggucgcucgaauaa

SEQ ID NO: 1885828 - RNA, 19 nt, Artificial Sequence
  Description of Artificial Sequence: Synthetic oligonucleotide
cauuuaagaccuugagguc

SEQ ID NO: 1885829 - RNA, 19 nt, Artificial Sequence
  Description of Artificial Sequence: Synthetic oligonucleotide
agaugggauccagaucugc

SEQ ID NO: 1885830 - RNA, 19 nt, Artificial Sequence
  Description of Artificial Sequence: Synthetic oligonucleotide
aagcucauuggaaugcaca

SEQ ID NO: 1885831 - RNA, 19 nt, Artificial Sequence
  Description of Artificial Sequence: Synthetic oligonucleotide
uacaacgaacuaccaguac

SEQ ID NO: 1885832 - RNA, 19 nt, Artificial Sequence
  Description of Artificial Sequence: Synthetic oligonucleotide
gaaugcacauugugaacca

SEQ ID NO: 1885833 - RNA, 19 nt, Artificial Sequence
  Description of Artificial Sequence: Synthetic oligonucleotide
ucgaaucuucgaagcagug

SEQ ID NO: 1885834 - RNA, 19 nt, Artificial Sequence
  Description of Artificial Sequence: Synthetic oligonucleotide
uggguaggaaucuguuuca

SEQ ID NO: 1885835 - RNA, 19 nt, Artificial Sequence
  Description of Artificial Sequence: Synthetic oligonucleotide
ugcuguuggauuuccucac

SEQ ID NO: 1885836 - RNA, 19 nt, Artificial Sequence
  Description of Artificial Sequence: Synthetic oligonucleotide
uggaaugcacauugugaac

SEQ ID NO: 1885837 - RNA, 19 nt, Artificial Sequence
  Description of Artificial Sequence: Synthetic oligonucleotide
ggaaguuucaggccagggc

SEQ ID NO: 1885838 - RNA, 19 nt, Artificial Sequence
  Description of Artificial Sequence: Synthetic oligonucleotide
gguaaggcugaggaggucg

SEQ ID NO: 1885839 - RNA, 19 nt, Artificial Sequence
  Description of Artificial Sequence: Synthetic oligonucleotide
auggacaggcuguuugcag

SEQ ID NO: 1885840 - RNA, 19 nt, Artificial Sequence
  Description of Artificial Sequence: Synthetic oligonucleotide
cauauugaucucccuuuug

SEQ ID NO: 1885841 - RNA, 19 nt, Artificial Sequence
  Description of Artificial Sequence: Synthetic oligonucleotide
gaaccagaagcacccgggc

SEQ ID NO: 1885842 - RNA, 19 nt, Artificial Sequence
  Description of Artificial Sequence: Synthetic oligonucleotide
uguuggauuuccucacuau

SEQ ID NO: 1885843 - RNA, 19 nt, Artificial Sequence
  Description of Artificial Sequence: Synthetic oligonucleotide
agacugacccauugaccgg

SEQ ID NO: 1885844 - RNA, 19 nt, Artificial Sequence
  Description of Artificial Sequence: Synthetic oligonucleotide
ucauauugaucucccuuuu

SEQ ID NO: 1885845 - RNA, 19 nt, Artificial Sequence
  Description of Artificial Sequence: Synthetic oligonucleotide
aggcaugugcacaaggaag

SEQ ID NO: 1885846 - RNA, 19 nt, Artificial Sequence
  Description of Artificial Sequence: Synthetic oligonucleotide
uggauacaacgaacuacca

SEQ ID NO: 1885847 - RNA, 19 nt, Artificial Sequence
  Description of Artificial Sequence: Synthetic oligonucleotide
uacagaugggauccagauc

SEQ ID NO: 1885848 - RNA, 19 nt, Artificial Sequence
  Description of Artificial Sequence: Synthetic oligonucleotide
cuagggacccaaaagaggu

SEQ ID NO: 1885849 - RNA, 19 nt, Artificial Sequence
  Description of Artificial Sequence: Synthetic oligonucleotide
guguaggaaguuucaggcc

SEQ ID NO: 1885850 - RNA, 19 nt, Artificial Sequence
  Description of Artificial Sequence: Synthetic oligonucleotide
aaaguccaugcuggcauug

SEQ ID NO: 1885851 - RNA, 19 nt, Artificial Sequence
  Description of Artificial Sequence: Synthetic oligonucleotide
acuucucucuccaauaaau

SEQ ID NO: 1885852 - RNA, 19 nt, Artificial Sequence
  Description of Artificial Sequence: Synthetic oligonucleotide
guaggaaucuguuucaguu

SEQ ID NO: 1885853 - RNA, 19 nt, Artificial Sequence
  Description of Artificial Sequence: Synthetic oligonucleotide
acucugcacuucucucucc

SEQ ID NO: 1885854 - RNA, 19 nt, Artificial Sequence
  Description of Artificial Sequence: Synthetic oligonucleotide
ucggauaggggaugcuccc

SEQ ID NO: 1885855 - RNA, 19 nt, Artificial Sequence
  Description of Artificial Sequence: Synthetic oligonucleotide
uccgcuggagccguuugcg

SEQ ID NO: 1885856 - RNA, 19 nt, Artificial Sequence
  Description of Artificial Sequence: Synthetic oligonucleotide
caggaaagaccacgggugc

SEQ ID NO: 1885857 - RNA, 19 nt, Artificial Sequence
  Description of Artificial Sequence: Synthetic oligonucleotide
auggggcaaguuuuccggg

SEQ ID NO: 1885858 - RNA, 19 nt, Artificial Sequence
  Description of Artificial Sequence: Synthetic oligonucleotide
uugugaaccacagcugcac

SEQ ID NO: 1885859 - RNA, 19 nt, Artificial Sequence
  Description of Artificial Sequence: Synthetic oligonucleotide
ggaagaguagggcuagagc

SEQ ID NO: 1885860 - RNA, 19 nt, Artificial Sequence
  Description of Artificial Sequence: Synthetic oligonucleotide
aguugcagucgaaucuucg

SEQ ID NO: 1885861 - RNA, 19 nt, Artificial Sequence
  Description of Artificial Sequence: Synthetic oligonucleotide
ugcaggcauuuucuggaug

SEQ ID NO: 1885862 - RNA, 19 nt, Artificial Sequence
  Description of Artificial Sequence: Synthetic oligonucleotide
cauaucaccagaggugcug

SEQ ID NO: 1885863 - RNA, 19 nt, Artificial Sequence
  Description of Artificial Sequence: Synthetic oligonucleotide
aaggaaguacccgaagcuu

SEQ ID NO: 1885864 - RNA, 19 nt, Artificial Sequence
  Description of Artificial Sequence: Synthetic oligonucleotide
aaguuucaggccagggcag

SEQ ID NO: 1885865 - RNA, 19 nt, Artificial Sequence
  Description of Artificial Sequence: Synthetic oligonucleotide
guugcagucgaaucuucga

SEQ ID NO: 1885866 - RNA, 19 nt, Artificial Sequence
  Description of Artificial Sequence: Synthetic oligonucleotide
uuccgggucugagugagcc

SEQ ID NO: 1885867 - RNA, 19 nt, Artificial Sequence
  Description of Artificial Sequence: Synthetic oligonucleotide
aauagcccaaggggaaacu

SEQ ID NO: 1885868 - RNA, 19 nt, Artificial Sequence
  Description of Artificial Sequence: Synthetic oligonucleotide
aggaaguacccgaagcuug

SEQ ID NO: 1885869 - RNA, 19 nt, Artificial Sequence
  Description of Artificial Sequence: Synthetic oligonucleotide
gcagucgaaucuucgaagc

SEQ ID NO: 1885870 - RNA, 19 nt, Artificial Sequence
  Description of Artificial Sequence: Synthetic oligonucleotide
aaugggacugcaggcauuu

SEQ ID NO: 1885871 - RNA, 19 nt, Artificial Sequence
  Description of Artificial Sequence: Synthetic oligonucleotide
ugcaaaguccaugcuggca

SEQ ID NO: 1885872 - RNA, 19 nt, Artificial Sequence
  Description of Artificial Sequence: Synthetic oligonucleotide
ggcauuuucuggaugggcc

SEQ ID NO: 1885873 - RNA, 19 nt, Artificial Sequence
  Description of Artificial Sequence: Synthetic oligonucleotide
ucuucgaagcagugcaaua

SEQ ID NO: 1885874 - RNA, 19 nt, Artificial Sequence
  Description of Artificial Sequence: Synthetic oligonucleotide
gaaggcugcagggugcaug

SEQ ID NO: 1885875 - RNA, 19 nt, Artificial Sequence
  Description of Artificial Sequence: Synthetic oligonucleotide
gaauaaggccucggauagg

SEQ ID NO: 1885876 - RNA, 19 nt, Artificial Sequence
  Description of Artificial Sequence: Synthetic oligonucleotide
gaggaaaaguuugugcaaa

SEQ ID NO: 1885877 - RNA, 19 nt, Artificial Sequence
  Description of Artificial Sequence: Synthetic oligonucleotide
cagugcaauaaagacugac

SEQ ID NO: 1885878 - RNA, 19 nt, Artificial Sequence
  Description of Artificial Sequence: Synthetic oligonucleotide
uacucauggguaggaaucu

SEQ ID NO: 1885879 - RNA, 19 nt, Artificial Sequence
  Description of Artificial Sequence: Synthetic oligonucleotide
gaccccgauggacaggcug

SEQ ID NO: 1885880 - RNA, 19 nt, Artificial Sequence
  Description of Artificial Sequence: Synthetic oligonucleotide
cuugaguuucuuccuccug

SEQ ID NO: 1885881 - RNA, 19 nt, Artificial Sequence
  Description of Artificial Sequence: Synthetic oligonucleotide
aguccaugcuggcauugug

SEQ ID NO: 1885882 - RNA, 19 nt, Artificial Sequence
  Description of Artificial Sequence: Synthetic oligonucleotide
gagccguuugcggugcugg

SEQ ID NO: 1885883 - RNA, 19 nt, Artificial Sequence
  Description of Artificial Sequence: Synthetic oligonucleotide
gcauugugcuccgaggucg

SEQ ID NO: 1885884 - RNA, 19 nt, Artificial Sequence
  Description of Artificial Sequence: Synthetic oligonucleotide
uagcccaaggggaaacuau

SEQ ID NO: 1885885 - RNA, 19 nt, Artificial Sequence
  Description of Artificial Sequence: Synthetic oligonucleotide
aacuaccaguacagcuccc

SEQ ID NO: 1885886 - RNA, 19 nt, Artificial Sequence
  Description of Artificial Sequence: Synthetic oligonucleotide
acauugugaaccacagcug

SEQ ID NO: 1885887 - RNA, 19 nt, Artificial Sequence
  Description of Artificial Sequence: Synthetic oligonucleotide
uugguaagucgguuccgcu

SEQ ID NO: 1885888 - RNA, 19 nt, Artificial Sequence
  Description of Artificial Sequence: Synthetic oligonucleotide
agaucugcuguuggauuuc

SEQ ID NO: 1885889 - RNA, 19 nt, Artificial Sequence
  Description of Artificial Sequence: Synthetic oligonucleotide
gugcacaaggaaguacccg

SEQ ID NO: 1885890 - RNA, 19 nt, Artificial Sequence
  Description of Artificial Sequence: Synthetic oligonucleotide
gucuggaaccagaagcacc

SEQ ID NO: 1885891 - RNA, 19 nt, Artificial Sequence
  Description of Artificial Sequence: Synthetic oligonucleotide
cagggugcauggcagcggg

SEQ ID NO: 1885892 - RNA, 19 nt, Artificial Sequence
  Description of Artificial Sequence: Synthetic oligonucleotide
gaggucgcucgaauaaggc

SEQ ID NO: 1885893 - RNA, 19 nt, Artificial Sequence
  Description of Artificial Sequence: Synthetic oligonucleotide
cuuugguaagucgguuccg

SEQ ID NO: 1885894 - RNA, 19 nt, Artificial Sequence
  Description of Artificial Sequence: Synthetic oligonucleotide
uccuacuaugccagugaaa

SEQ ID NO: 1885895 - RNA, 19 nt, Artificial Sequence
  Description of Artificial Sequence: Synthetic oligonucleotide
gaggugggaagaguagggc

SEQ ID NO: 1885896 - RNA, 19 nt, Artificial Sequence
  Description of Artificial Sequence: Synthetic oligonucleotide
cacagcggcugugauaggc

SEQ ID NO: 1885897 - RNA, 19 nt, Artificial Sequence
  Description of Artificial Sequence: Synthetic oligonucleotide
acccucagcuuauuagacu

SEQ ID NO: 1885898 - RNA, 19 nt, Artificial Sequence
  Description of Artificial Sequence: Synthetic oligonucleotide
gcuggauacaacgaacuac

SEQ ID NO: 1885899 - RNA, 19 nt, Artificial Sequence
  Description of Artificial Sequence: Synthetic oligonucleotide
agcacaguagccacaacaa

SEQ ID NO: 1885900 - RNA, 19 nt, Artificial Sequence
  Description of Artificial Sequence: Synthetic oligonucleotide
cccucagcuuauuagacug

SEQ ID NO: 1885901 - RNA, 19 nt, Artificial Sequence
  Description of Artificial Sequence: Synthetic oligonucleotide
gcuagggacccaaaagagg

SEQ ID NO: 1885902 - RNA, 19 nt, Artificial Sequence
  Description of Artificial Sequence: Synthetic oligonucleotide
cauccagacagauggcaca

SEQ ID NO: 1885903 - RNA, 19 nt, Artificial Sequence
  Description of Artificial Sequence: Synthetic oligonucleotide
aucaccagaggugcuggag

SEQ ID NO: 1885904 - RNA, 19 nt, Artificial Sequence
  Description of Artificial Sequence: Synthetic oligonucleotide
auugaccggagcugagggu

SEQ ID NO: 1885905 - RNA, 19 nt, Artificial Sequence
  Description of Artificial Sequence: Synthetic oligonucleotide
caggcuguuugcagauggg

SEQ ID NO: 1885906 - RNA, 19 nt, Artificial Sequence
  Description of Artificial Sequence: Synthetic oligonucleotide
cauugugcuccgaggucgc

SEQ ID NO: 1885907 - RNA, 19 nt, Artificial Sequence
  Description of Artificial Sequence: Synthetic oligonucleotide
caccagaggugcuggagug

SEQ ID NO: 1885908 - RNA, 19 nt, Artificial Sequence
  Description of Artificial Sequence: Synthetic oligonucleotide
gauaggggaugcuccccac

SEQ ID NO: 1885909 - RNA, 19 nt, Artificial Sequence
  Description of Artificial Sequence: Synthetic oligonucleotide
uuccgcuggagccguuugc

SEQ ID NO: 1885910 - RNA, 19 nt, Artificial Sequence
  Description of Artificial Sequence: Synthetic oligonucleotide
ugauaggcaugugcacaag

SEQ ID NO: 1885911 - RNA, 19 nt, Artificial Sequence
  Description of Artificial Sequence: Synthetic oligonucleotide
agaguagggcuagagccca

SEQ ID NO: 1885912 - RNA, 19 nt, Artificial Sequence
  Description of Artificial Sequence: Synthetic oligonucleotide
ugcuccucauccccaggac

SEQ ID NO: 1885913 - RNA, 19 nt, Artificial Sequence
  Description of Artificial Sequence: Synthetic oligonucleotide
ucggagucccuccucgcuc

SEQ ID NO: 1885914 - RNA, 19 nt, Artificial Sequence
  Description of Artificial Sequence: Synthetic oligonucleotide
gcugugauaggcaugugca

SEQ ID NO: 1885915 - RNA, 19 nt, Artificial Sequence
  Description of Artificial Sequence: Synthetic oligonucleotide
auaggggaugcuccccaca

SEQ ID NO: 1885916 - RNA, 19 nt, Artificial Sequence
  Description of Artificial Sequence: Synthetic oligonucleotide
ggcacagacaucauauuga

SEQ ID NO: 1885917 - RNA, 19 nt, Artificial Sequence
  Description of Artificial Sequence: Synthetic oligonucleotide
ccccaaauagagcugggag

SEQ ID NO: 1885918 - RNA, 19 nt, Artificial Sequence
  Description of Artificial Sequence: Synthetic oligonucleotide
gaagcucauuggaaugcac

SEQ ID NO: 1885919 - RNA, 19 nt, Artificial Sequence
  Description of Artificial Sequence: Synthetic oligonucleotide
uguuugcagauggggcaag

SEQ ID NO: 1885920 - RNA, 19 nt, Artificial Sequence
  Description of Artificial Sequence: Synthetic oligonucleotide
cuucgaagcagugcaauaa

SEQ ID NO: 1885921 - RNA, 19 nt, Artificial Sequence
  Description of Artificial Sequence: Synthetic oligonucleotide
ugauacucauggguaggaa

SEQ ID NO: 1885922 - RNA, 19 nt, Artificial Sequence
  Description of Artificial Sequence: Synthetic oligonucleotide
cgaacuaccaguacagcuc

SEQ ID NO: 1885923 - RNA, 19 nt, Artificial Sequence
  Description of Artificial Sequence: Synthetic oligonucleotide
cuucucucuccaauaaaua

SEQ ID NO: 1885924 - RNA, 19 nt, Artificial Sequence
  Description of Artificial Sequence: Synthetic oligonucleotide
gggcuagggacccaaaaga

SEQ ID NO: 1885925 - RNA, 19 nt, Artificial Sequence
  Description of Artificial Sequence: Synthetic oligonucleotide
ggcuagggacccaaaagag

SEQ ID NO: 1885926 - RNA, 19 nt, Artificial Sequence
  Description of Artificial Sequence: Synthetic oligonucleotide
gagggcccaggaaagacca

SEQ ID NO: 1885927 - RNA, 19 nt, Artificial Sequence
  Description of Artificial Sequence: Synthetic oligonucleotide
gguacucugcacuucucuc

SEQ ID NO: 1885928 - RNA, 19 nt, Artificial Sequence
  Description of Artificial Sequence: Synthetic oligonucleotide
auugugaaccacagcugca

SEQ ID NO: 1885929 - RNA, 19 nt, Artificial Sequence
  Description of Artificial Sequence: Synthetic oligonucleotide
ucguagguacucugcacuu

SEQ ID NO: 1885930 - RNA, 19 nt, Artificial Sequence
  Description of Artificial Sequence: Synthetic oligonucleotide
cugcaaaguccaugcuggc

SEQ ID NO: 1885931 - RNA, 19 nt, Artificial Sequence
  Description of Artificial Sequence: Synthetic oligonucleotide
caaggaaguacccgaagcu

SEQ ID NO: 1885932 - RNA, 19 nt, Artificial Sequence
  Description of Artificial Sequence: Synthetic oligonucleotide
gcuggcauugugcuccgag

SEQ ID NO: 1885933 - RNA, 19 nt, Artificial Sequence
  Description of Artificial Sequence: Synthetic oligonucleotide
aaggccucggauaggggau

SEQ ID NO: 1885934 - RNA, 19 nt, Artificial Sequence
  Description of Artificial Sequence: Synthetic oligonucleotide
uaagucgguuccgcuggag

SEQ ID NO: 1885935 - RNA, 19 nt, Artificial Sequence
  Description of Artificial Sequence: Synthetic oligonucleotide
guucagaagcucauuggaa

SEQ ID NO: 1885936 - RNA, 19 nt, Artificial Sequence
  Description of Artificial Sequence: Synthetic oligonucleotide
uaucaccagaggugcugga

SEQ ID NO: 1885937 - RNA, 19 nt, Artificial Sequence
  Description of Artificial Sequence: Synthetic oligonucleotide
ggaguguaggaaguuucag

SEQ ID NO: 1885938 - RNA, 19 nt, Artificial Sequence
  Description of Artificial Sequence: Synthetic oligonucleotide
cagcaguccuacuaugcca

SEQ ID NO: 1885939 - RNA, 19 nt, Artificial Sequence
  Description of Artificial Sequence: Synthetic oligonucleotide
aaucuucgaagcagugcaa

SEQ ID NO: 1885940 - RNA, 19 nt, Artificial Sequence
  Description of Artificial Sequence: Synthetic oligonucleotide
aucuucgaagcagugcaau

SEQ ID NO: 1885941 - RNA, 19 nt, Artificial Sequence
  Description of Artificial Sequence: Synthetic oligonucleotide
ugcauggcagcgggagggg

SEQ ID NO: 1885942 - RNA, 19 nt, Artificial Sequence
  Description of Artificial Sequence: Synthetic oligonucleotide
guguggggucuguggaggg

SEQ ID NO: 1885943 - RNA, 19 nt, Artificial Sequence
  Description of Artificial Sequence: Synthetic oligonucleotide
ggcuguuugcagauggggc

SEQ ID NO: 1885944 - RNA, 19 nt, Artificial Sequence
  Description of Artificial Sequence: Synthetic oligonucleotide
guaaggcugaggaggucgc

SEQ ID NO: 1885945 - RNA, 19 nt, Artificial Sequence
  Description of Artificial Sequence: Synthetic oligonucleotide
auacaacgaacuaccagua

SEQ ID NO: 1885946 - RNA, 19 nt, Artificial Sequence
  Description of Artificial Sequence: Synthetic oligonucleotide
ggaugcuccccacagcaca

SEQ ID NO: 1885947 - RNA, 19 nt, Artificial Sequence
  Description of Artificial Sequence: Synthetic oligonucleotide
gguccauucugaagcaggc

SEQ ID NO: 1885948 - RNA, 19 nt, Artificial Sequence
  Description of Artificial Sequence: Synthetic oligonucleotide
ggaaagaccacgggugcug

SEQ ID NO: 1885949 - RNA, 19 nt, Artificial Sequence
  Description of Artificial Sequence: Synthetic oligonucleotide
cucagcuuauuagacugga

SEQ ID NO: 1885950 - RNA, 19 nt, Artificial Sequence
  Description of Artificial Sequence: Synthetic oligonucleotide
gaugggauccagaucugcu

SEQ ID NO: 1885951 - RNA, 19 nt, Artificial Sequence
  Description of Artificial Sequence: Synthetic oligonucleotide
uacccgaagcuugucccca

SEQ ID NO: 1885952 - RNA, 19 nt, Artificial Sequence
  Description of Artificial Sequence: Synthetic oligonucleotide
acucauggguaggaaucug

SEQ ID NO: 1885953 - RNA, 19 nt, Artificial Sequence
  Description of Artificial Sequence: Synthetic oligonucleotide
ggugcauggcagcgggagg

SEQ ID NO: 1885954 - RNA, 19 nt, Artificial Sequence
  Description of Artificial Sequence: Synthetic oligonucleotide
uccacacagcggcugugau

SEQ ID NO: 1885955 - RNA, 19 nt, Artificial Sequence
  Description of Artificial Sequence: Synthetic oligonucleotide
gaggugcuggaguguagga

SEQ ID NO: 1885956 - RNA, 19 nt, Artificial Sequence
  Description of Artificial Sequence: Synthetic oligonucleotide
guuggauuuccucacuauu

SEQ ID NO: 1885957 - RNA, 19 nt, Artificial Sequence
  Description of Artificial Sequence: Synthetic oligonucleotide
cucguagguacucugcacu

SEQ ID NO: 1885958 - RNA, 19 nt, Artificial Sequence
  Description of Artificial Sequence: Synthetic oligonucleotide
ggauuuccucacuauucca

SEQ ID NO: 1885959 - RNA, 19 nt, Artificial Sequence
  Description of Artificial Sequence: Synthetic oligonucleotide
acuaugccagugaaaggaa

SEQ ID NO: 1885960 - RNA, 19 nt, Artificial Sequence
  Description of Artificial Sequence: Synthetic oligonucleotide
ggggaaacuauugucugga

SEQ ID NO: 1885961 - RNA, 19 nt, Artificial Sequence
  Description of Artificial Sequence: Synthetic oligonucleotide
gggcccaggaaagaccacg

SEQ ID NO: 1885962 - RNA, 19 nt, Artificial Sequence
  Description of Artificial Sequence: Synthetic oligonucleotide
cagucgaaucuucgaagca

SEQ ID NO: 1885963 - RNA, 19 nt, Artificial Sequence
  Description of Artificial Sequence: Synthetic oligonucleotide
cccuuuugauacucauggg

SEQ ID NO: 1885964 - RNA, 19 nt, Artificial Sequence
  Description of Artificial Sequence: Synthetic oligonucleotide
ccaccaaggaaccccucgg

SEQ ID NO: 1885965 - RNA, 19 nt, Artificial Sequence
  Description of Artificial Sequence: Synthetic oligonucleotide
accauguucagaagcucau

SEQ ID NO: 1885966 - RNA, 19 nt, Artificial Sequence
  Description of Artificial Sequence: Synthetic oligonucleotide
guuccgcuggagccguuug

SEQ ID NO: 1885967 - RNA, 19 nt, Artificial Sequence
  Description of Artificial Sequence: Synthetic oligonucleotide
ccucagcuuauuagacugg

SEQ ID NO: 1885968 - RNA, 19 nt, Artificial Sequence
  Description of Artificial Sequence: Synthetic oligonucleotide
guuuuccgggucugaguga

SEQ ID NO: 1885969 - RNA, 19 nt, Artificial Sequence
  Description of Artificial Sequence: Synthetic oligonucleotide
cugacccauugaccggagc

SEQ ID NO: 1885970 - RNA, 19 nt, Artificial Sequence
  Description of Artificial Sequence: Synthetic oligonucleotide
ccuuuugauacucaugggu

SEQ ID NO: 1885971 - RNA, 19 nt, Artificial Sequence
  Description of Artificial Sequence: Synthetic oligonucleotide
guccuacuaugccagugaa

SEQ ID NO: 1885972 - RNA, 19 nt, Artificial Sequence
  Description of Artificial Sequence: Synthetic oligonucleotide
cucauggguaggaaucugu

SEQ ID NO: 1885973 - RNA, 19 nt, Artificial Sequence
  Description of Artificial Sequence: Synthetic oligonucleotide
uccgggucugagugagcca

SEQ ID NO: 1885974 - RNA, 19 nt, Artificial Sequence
  Description of Artificial Sequence: Synthetic oligonucleotide
uuugagcauuuaagaccuu

SEQ ID NO: 1885975 - RNA, 19 nt, Artificial Sequence
  Description of Artificial Sequence: Synthetic oligonucleotide
gcuuauuagacuggaggaa

SEQ ID NO: 1885976 - RNA, 19 nt, Artificial Sequence
  Description of Artificial Sequence: Synthetic oligonucleotide
cgaggucgcucgaauaagg

SEQ ID NO: 1885977 - RNA, 19 nt, Artificial Sequence
  Description of Artificial Sequence: Synthetic oligonucleotide
ccaaaagaggugggaagag

SEQ ID NO: 1885978 - RNA, 19 nt, Artificial Sequence
  Description of Artificial Sequence: Synthetic oligonucleotide
ggauaggggaugcucccca

SEQ ID NO: 1885979 - RNA, 19 nt, Artificial Sequence
  Description of Artificial Sequence: Synthetic oligonucleotide
uugugcuccgaggucgcuc

SEQ ID NO: 1885980 - RNA, 19 nt, Artificial Sequence
  Description of Artificial Sequence: Synthetic oligonucleotide
cuggaaccagaagcacccg

SEQ ID NO: 1885981 - RNA, 19 nt, Artificial Sequence
  Description of Artificial Sequence: Synthetic oligonucleotide
acagcggcugugauaggca

SEQ ID NO: 1885982 - RNA, 19 nt, Artificial Sequence
  Description of Artificial Sequence: Synthetic oligonucleotide
uuggcuccccuuccucauc

SEQ ID NO: 1885983 - RNA, 19 nt, Artificial Sequence
  Description of Artificial Sequence: Synthetic oligonucleotide
gaaguacccgaagcuuguc

SEQ ID NO: 1885984 - RNA, 19 nt, Artificial Sequence
  Description of Artificial Sequence: Synthetic oligonucleotide
ggauccagaucugcuguug

SEQ ID NO: 1885985 - RNA, 19 nt, Artificial Sequence
  Description of Artificial Sequence: Synthetic oligonucleotide
gggugcauggcagcgggag

SEQ ID NO: 1885986 - RNA, 19 nt, Artificial Sequence
  Description of Artificial Sequence: Synthetic oligonucleotide
ggucgcucgaauaaggccu

SEQ ID NO: 1885987 - RNA, 19 nt, Artificial Sequence
  Description of Artificial Sequence: Synthetic oligonucleotide
cucgaauaaggccucggau

SEQ ID NO: 1885988 - RNA, 19 nt, Artificial Sequence
  Description of Artificial Sequence: Synthetic oligonucleotide
accccgauggacaggcugu

SEQ ID NO: 1885989 - RNA, 19 nt, Artificial Sequence
  Description of Artificial Sequence: Synthetic oligonucleotide
ggguaggaaucuguuucag

SEQ ID NO: 1885990 - RNA, 19 nt, Artificial Sequence
  Description of Artificial Sequence: Synthetic oligonucleotide
cgaaucuucgaagcagugc

SEQ ID NO: 1885991 - RNA, 19 nt, Artificial Sequence
  Description of Artificial Sequence: Synthetic oligonucleotide
gacuggaggaaaaguuugu

SEQ ID NO: 1885992 - RNA, 19 nt, Artificial Sequence
  Description of Artificial Sequence: Synthetic oligonucleotide
ggagggcccaggaaagacc

SEQ ID NO: 1885993 - RNA, 19 nt, Artificial Sequence
  Description of Artificial Sequence: Synthetic oligonucleotide
ggcauugugcuccgagguc

SEQ ID NO: 1885994 - RNA, 19 nt, Artificial Sequence
  Description of Artificial Sequence: Synthetic oligonucleotide
gucgaaucuucgaagcagu

SEQ ID NO: 1885995 - RNA, 19 nt, Artificial Sequence
  Description of Artificial Sequence: Synthetic oligonucleotide
acauaucaccagaggugcu

SEQ ID NO: 1885996 - RNA, 19 nt, Artificial Sequence
  Description of Artificial Sequence: Synthetic oligonucleotide
gagugggguccauucugaa

SEQ ID NO: 1885997 - RNA, 19 nt, Artificial Sequence
  Description of Artificial Sequence: Synthetic oligonucleotide
cucagggcagccccaaaua

SEQ ID NO: 1885998 - RNA, 19 nt, Artificial Sequence
  Description of Artificial Sequence: Synthetic oligonucleotide
cacagcacaguagccacaa

SEQ ID NO: 1885999 - RNA, 19 nt, Artificial Sequence
  Description of Artificial Sequence: Synthetic oligonucleotide
ccauugaccggagcugagg

SEQ ID NO: 1886000 - RNA, 19 nt, Artificial Sequence
  Description of Artificial Sequence: Synthetic oligonucleotide
uccccaggaccccgaugga

SEQ ID NO: 1886001 - RNA, 19 nt, Artificial Sequence
  Description of Artificial Sequence: Synthetic oligonucleotide
gggacccaaaagagguggg

SEQ ID NO: 1886002 - RNA, 19 nt, Artificial Sequence
  Description of Artificial Sequence: Synthetic oligonucleotide
cauacucauccagacagau

SEQ ID NO: 1886003 - RNA, 19 nt, Artificial Sequence
  Description of Artificial Sequence: Synthetic oligonucleotide
acacagcggcugugauagg

SEQ ID NO: 1886004 - RNA, 19 nt, Artificial Sequence
  Description of Artificial Sequence: Synthetic oligonucleotide
agcccaaggggaaacuauu

SEQ ID NO: 1886005 - RNA, 19 nt, Artificial Sequence
  Description of Artificial Sequence: Synthetic oligonucleotide
agccguuugcggugcugga

SEQ ID NO: 1886006 - RNA, 19 nt, Artificial Sequence
  Description of Artificial Sequence: Synthetic oligonucleotide
caaaagaggugggaagagu

SEQ ID NO: 1886007 - RNA, 19 nt, Artificial Sequence
  Description of Artificial Sequence: Synthetic oligonucleotide
guaagucgguuccgcugga

SEQ ID NO: 1886008 - RNA, 19 nt, Artificial Sequence
  Description of Artificial Sequence: Synthetic oligonucleotide
ggcugaggaggucgcgucc

SEQ ID NO: 1886009 - RNA, 19 nt, Artificial Sequence
  Description of Artificial Sequence: Synthetic oligonucleotide
ggugggaagaguagggcua

SEQ ID NO: 1886010 - RNA, 19 nt, Artificial Sequence
  Description of Artificial Sequence: Synthetic oligonucleotide
guuucaggccagggcagca

SEQ ID NO: 1886011 - RNA, 19 nt, Artificial Sequence
  Description of Artificial Sequence: Synthetic oligonucleotide
ccucgcucagggcagcccc

SEQ ID NO: 1886012 - RNA, 19 nt, Artificial Sequence
  Description of Artificial Sequence: Synthetic oligonucleotide
cccucggagucccuccucg

SEQ ID NO: 1886013 - RNA, 19 nt, Artificial Sequence
  Description of Artificial Sequence: Synthetic oligonucleotide
cacuauuccacaccauguu

SEQ ID NO: 1886014 - RNA, 19 nt, Artificial Sequence
  Description of Artificial Sequence: Synthetic oligonucleotide
gaguagggcuagagcccag

SEQ ID NO: 1886015 - RNA, 19 nt, Artificial Sequence
  Description of Artificial Sequence: Synthetic oligonucleotide
aucucccuuuugauacuca

SEQ ID NO: 1886016 - RNA, 19 nt, Artificial Sequence
  Description of Artificial Sequence: Synthetic oligonucleotide
acugacccauugaccggag

SEQ ID NO: 1886017 - RNA, 19 nt, Artificial Sequence
  Description of Artificial Sequence: Synthetic oligonucleotide
ggaagcgggaaggcugcag

SEQ ID NO: 1886018 - RNA, 19 nt, Artificial Sequence
  Description of Artificial Sequence: Synthetic oligonucleotide
cuguuugcagauggggcaa

SEQ ID NO: 1886019 - RNA, 19 nt, Artificial Sequence
  Description of Artificial Sequence: Synthetic oligonucleotide
agugagccagggguccaca

SEQ ID NO: 1886020 - RNA, 19 nt, Artificial Sequence
  Description of Artificial Sequence: Synthetic oligonucleotide
gucgcucgaauaaggccuc

SEQ ID NO: 1886021 - RNA, 19 nt, Artificial Sequence
  Description of Artificial Sequence: Synthetic oligonucleotide
gagugagccagggguccac

SEQ ID NO: 1886022 - RNA, 19 nt, Artificial Sequence
  Description of Artificial Sequence: Synthetic oligonucleotide
cauggguaggaaucuguuu

SEQ ID NO: 1886023 - RNA, 19 nt, Artificial Sequence
  Description of Artificial Sequence: Synthetic oligonucleotide
ugggaagaguagggcuaga

SEQ ID NO: 1886024 - RNA, 19 nt, Artificial Sequence
  Description of Artificial Sequence: Synthetic oligonucleotide
gcccaaggggaaacuauug

SEQ ID NO: 1886025 - RNA, 19 nt, Artificial Sequence
  Description of Artificial Sequence: Synthetic oligonucleotide
cauggcagcgggaggggua

SEQ ID NO: 1886026 - RNA, 19 nt, Artificial Sequence
  Description of Artificial Sequence: Synthetic oligonucleotide
gaggaggucgcguccugau

SEQ ID NO: 1886027 - RNA, 19 nt, Artificial Sequence
  Description of Artificial Sequence: Synthetic oligonucleotide
aggccucggauaggggaug

SEQ ID NO: 1886028 - RNA, 19 nt, Artificial Sequence
  Description of Artificial Sequence: Synthetic oligonucleotide
ggacccaaaagagguggga

SEQ ID NO: 1886029 - RNA, 19 nt, Artificial Sequence
  Description of Artificial Sequence: Synthetic oligonucleotide
agggcccaggaaagaccac

SEQ ID NO: 1886030 - RNA, 19 nt, Artificial Sequence
  Description of Artificial Sequence: Synthetic oligonucleotide
cccaggaccccgauggaca

SEQ ID NO: 1886031 - RNA, 19 nt, Artificial Sequence
  Description of Artificial Sequence: Synthetic oligonucleotide
gggaaacuauugucuggaa

SEQ ID NO: 1886032 - RNA, 19 nt, Artificial Sequence
  Description of Artificial Sequence: Synthetic oligonucleotide
guuugcggugcuggauaca

SEQ ID NO: 1886033 - RNA, 19 nt, Artificial Sequence
  Description of Artificial Sequence: Synthetic oligonucleotide
gcccuugaguuucuuccuc

SEQ ID NO: 1886034 - RNA, 19 nt, Artificial Sequence
  Description of Artificial Sequence: Synthetic oligonucleotide
uggagccguuugcggugcu

SEQ ID NO: 1886035 - RNA, 19 nt, Artificial Sequence
  Description of Artificial Sequence: Synthetic oligonucleotide
caauaaagacugacccauu

SEQ ID NO: 1886036 - RNA, 19 nt, Artificial Sequence
  Description of Artificial Sequence: Synthetic oligonucleotide
cauucugaagcaggcuggu

SEQ ID NO: 1886037 - RNA, 19 nt, Artificial Sequence
  Description of Artificial Sequence: Synthetic oligonucleotide
cuccgaggucgcucgaaua

SEQ ID NO: 1886038 - RNA, 19 nt, Artificial Sequence
  Description of Artificial Sequence: Synthetic oligonucleotide
ggaaguacccgaagcuugu

SEQ ID NO: 1886039 - RNA, 19 nt, Artificial Sequence
  Description of Artificial Sequence: Synthetic oligonucleotide
ccucggauaggggaugcuc

SEQ ID NO: 1886040 - RNA, 19 nt, Artificial Sequence
  Description of Artificial Sequence: Synthetic oligonucleotide
gugaaaggaaugagauaau

SEQ ID NO: 1886041 - RNA, 19 nt, Artificial Sequence
  Description of Artificial Sequence: Synthetic oligonucleotide
ggagaagguguggggucug

SEQ ID NO: 1886042 - RNA, 19 nt, Artificial Sequence
  Description of Artificial Sequence: Synthetic oligonucleotide
cguuugcggugcuggauac

SEQ ID NO: 1886043 - RNA, 19 nt, Artificial Sequence
  Description of Artificial Sequence: Synthetic oligonucleotide
gaccacgggugcuggggcu

SEQ ID NO: 1886044 - RNA, 19 nt, Artificial Sequence
  Description of Artificial Sequence: Synthetic oligonucleotide
ccgaggucgcucgaauaag

SEQ ID NO: 1886045 - RNA, 19 nt, Artificial Sequence
  Description of Artificial Sequence: Synthetic oligonucleotide
ccaaggaaccccucggagu

SEQ ID NO: 1886046 - RNA, 19 nt, Artificial Sequence
  Description of Artificial Sequence: Synthetic oligonucleotide
guggagggcccaggaaaga

SEQ ID NO: 1886047 - RNA, 19 nt, Artificial Sequence
  Description of Artificial Sequence: Synthetic oligonucleotide
cagcucccauggccaaaac

SEQ ID NO: 1886048 - RNA, 19 nt, Artificial Sequence
  Description of Artificial Sequence: Synthetic oligonucleotide
caaaaccagcaguccuacu

SEQ ID NO: 1886049 - RNA, 19 nt, Artificial Sequence
  Description of Artificial Sequence: Synthetic oligonucleotide
cuaccaguacagcucccau

SEQ ID NO: 1886050 - RNA, 19 nt, Artificial Sequence
  Description of Artificial Sequence: Synthetic oligonucleotide
cucggagucccuccucgcu

SEQ ID NO: 1886051 - RNA, 19 nt, Artificial Sequence
  Description of Artificial Sequence: Synthetic oligonucleotide
ccucggagucccuccucgc

SEQ ID NO: 1886052 - RNA, 19 nt, Artificial Sequence
  Description of Artificial Sequence: Synthetic oligonucleotide
gcggcugugauaggcaugu

SEQ ID NO: 1886053 - RNA, 19 nt, Artificial Sequence
  Description of Artificial Sequence: Synthetic oligonucleotide
gcaaugggacugcaggcau

SEQ ID NO: 1886054 - RNA, 19 nt, Artificial Sequence
  Description of Artificial Sequence: Synthetic oligonucleotide
caggagugggguccauucu

SEQ ID NO: 1886055 - RNA, 19 nt, Artificial Sequence
  Description of Artificial Sequence: Synthetic oligonucleotide
ggacaggcuguuugcagau

SEQ ID NO: 1886056 - RNA, 19 nt, Artificial Sequence
  Description of Artificial Sequence: Synthetic oligonucleotide
caaaguccaugcuggcauu

SEQ ID NO: 1886057 - RNA, 19 nt, Artificial Sequence
  Description of Artificial Sequence: Synthetic oligonucleotide
aggaagcgggaaggcugca

SEQ ID NO: 1886058 - RNA, 19 nt, Artificial Sequence
  Description of Artificial Sequence: Synthetic oligonucleotide
cccaaggggaaacuauugu

SEQ ID NO: 1886059 - RNA, 19 nt, Artificial Sequence
  Description of Artificial Sequence: Synthetic oligonucleotide
accacgggugcuggggcua

SEQ ID NO: 1886060 - RNA, 19 nt, Artificial Sequence
  Description of Artificial Sequence: Synthetic oligonucleotide
gggcaaguuuuccgggucu

SEQ ID NO: 1886061 - RNA, 19 nt, Artificial Sequence
  Description of Artificial Sequence: Synthetic oligonucleotide
ggagccguuugcggugcug

SEQ ID NO: 1886062 - RNA, 19 nt, Artificial Sequence
  Description of Artificial Sequence: Synthetic oligonucleotide
cagcgggagggguaaggcu

SEQ ID NO: 1886063 - RNA, 19 nt, Artificial Sequence
  Description of Artificial Sequence: Synthetic oligonucleotide
ccguuugcggugcuggaua

SEQ ID NO: 1886064 - RNA, 19 nt, Artificial Sequence
  Description of Artificial Sequence: Synthetic oligonucleotide
cagcggcugugauaggcau

SEQ ID NO: 1886065 - RNA, 19 nt, Artificial Sequence
  Description of Artificial Sequence: Synthetic oligonucleotide
agggugcauggcagcggga

SEQ ID NO: 1886066 - RNA, 19 nt, Artificial Sequence
  Description of Artificial Sequence: Synthetic oligonucleotide
ccccaggaccccgauggac

SEQ ID NO: 1886067 - RNA, 19 nt, Artificial Sequence
  Description of Artificial Sequence: Synthetic oligonucleotide
ggcuggucccuuggcuccc

SEQ ID NO: 1886068 - RNA, 19 nt, Artificial Sequence
  Description of Artificial Sequence: Synthetic oligonucleotide
cggauaggggaugcucccc

SEQ ID NO: 1886069 - RNA, 19 nt, Artificial Sequence
  Description of Artificial Sequence: Synthetic oligonucleotide
gcuggggcuagggacccaa

SEQ ID NO: 1886070 - RNA, 19 nt, Artificial Sequence
  Description of Artificial Sequence: Synthetic oligonucleotide
gcagugcaauaaagacuga

SEQ ID NO: 1886071 - RNA, 19 nt, Artificial Sequence
  Description of Artificial Sequence: Synthetic oligonucleotide
ggccuccaccaaggaaccc

SEQ ID NO: 1886072 - RNA, 19 nt, Artificial Sequence
  Description of Artificial Sequence: Synthetic oligonucleotide
gcgggagggguaaggcuga

SEQ ID NO: 1886073 - RNA, 19 nt, Artificial Sequence
  Description of Artificial Sequence: Synthetic oligonucleotide
gugcuccgaggucgcucga

SEQ ID NO: 1886074 - RNA, 19 nt, Artificial Sequence
  Description of Artificial Sequence: Synthetic oligonucleotide
cggagucccuccucgcuca

SEQ ID NO: 1886075 - RNA, 19 nt, Artificial Sequence
  Description of Artificial Sequence: Synthetic oligonucleotide
gcuccgaggucgcucgaau

SEQ ID NO: 1886076 - RNA, 19 nt, Artificial Sequence
  Description of Artificial Sequence: Synthetic oligonucleotide
gcaguccuacuaugccagu

SEQ ID NO: 1886077 - RNA, 19 nt, Artificial Sequence
  Description of Artificial Sequence: Synthetic oligonucleotide
ccacgggugcuggggcuag

SEQ ID NO: 1886078 - RNA, 19 nt, Artificial Sequence
  Description of Artificial Sequence: Synthetic oligonucleotide
ggaaucuguuucaguuguu

SEQ ID NO: 1886079 - RNA, 19 nt, Artificial Sequence
  Description of Artificial Sequence: Synthetic oligonucleotide
ccccucggagucccuccuc

SEQ ID NO: 1886080 - RNA, 19 nt, Artificial Sequence
  Description of Artificial Sequence: Synthetic oligonucleotide
ccucacuauuccacaccau

SEQ ID NO: 1886081 - RNA, 19 nt, Artificial Sequence
  Description of Artificial Sequence: Synthetic oligonucleotide
gccguuugcggugcuggau

SEQ ID NO: 1886082 - RNA, 19 nt, Artificial Sequence
  Description of Artificial Sequence: Synthetic oligonucleotide
cgggagggguaaggcugag

SEQ ID NO: 1886083 - RNA, 19 nt, Artificial Sequence
  Description of Artificial Sequence: Synthetic oligonucleotide
ggaaccccucggagucccu

SEQ ID NO: 1886084 - RNA, 19 nt, Artificial Sequence
  Description of Artificial Sequence: Synthetic oligonucleotide
ggaccccgauggacaggcu

SEQ ID NO: 1886085 - RNA, 19 nt, Artificial Sequence
  Description of Artificial Sequence: Synthetic oligonucleotide
ccccgauggacaggcuguu

SEQ ID NO: 1886086 - RNA, 19 nt, Artificial Sequence
  Description of Artificial Sequence: Synthetic oligonucleotide
gcccaggagugggguccau

SEQ ID NO: 1886087 - RNA, 19 nt, Artificial Sequence
  Description of Artificial Sequence: Synthetic oligonucleotide
uuuaauggcacuuuugggg

SEQ ID NO: 1886088 - RNA, 19 nt, Artificial Sequence
  Description of Artificial Sequence: Synthetic oligonucleotide
ugaguaagaagucauaggc

SEQ ID NO: 1886089 - RNA, 19 nt, Artificial Sequence
  Description of Artificial Sequence: Synthetic oligonucleotide
auagauguaagugaggaac

SEQ ID NO: 1886090 - RNA, 19 nt, Artificial Sequence
  Description of Artificial Sequence: Synthetic oligonucleotide
acuaccaacacguucuugg

SEQ ID NO: 1886091 - RNA, 19 nt, Artificial Sequence
  Description of Artificial Sequence: Synthetic oligonucleotide
aacguuggguacuuggugg

SEQ ID NO: 1886092 - RNA, 19 nt, Artificial Sequence
  Description of Artificial Sequence: Synthetic oligonucleotide
ugaucugcggggcugaagg

SEQ ID NO: 1886093 - RNA, 19 nt, Artificial Sequence
  Description of Artificial Sequence: Synthetic oligonucleotide
aacggcuguggucaggagc

SEQ ID NO: 1886094 - RNA, 19 nt, Artificial Sequence
  Description of Artificial Sequence: Synthetic oligonucleotide
ugaaacguuggguacuugg

SEQ ID NO: 1886095 - RNA, 19 nt, Artificial Sequence
  Description of Artificial Sequence: Synthetic oligonucleotide
guucccguaacccagggcg

SEQ ID NO: 1886096 - RNA, 19 nt, Artificial Sequence
  Description of Artificial Sequence: Synthetic oligonucleotide
uacucuagcagguaguggc

SEQ ID NO: 1886097 - RNA, 19 nt, Artificial Sequence
  Description of Artificial Sequence: Synthetic oligonucleotide
uuuaguagcuugccgaacu

SEQ ID NO: 1886098 - RNA, 19 nt, Artificial Sequence
  Description of Artificial Sequence: Synthetic oligonucleotide
gguuuaauggcacuuuugg

SEQ ID NO: 1886099 - RNA, 19 nt, Artificial Sequence
  Description of Artificial Sequence: Synthetic oligonucleotide
uugucuggagaccuuagcc

SEQ ID NO: 1886100 - RNA, 19 nt, Artificial Sequence
  Description of Artificial Sequence: Synthetic oligonucleotide
auguaccacuccuuggucc

SEQ ID NO: 1886101 - RNA, 19 nt, Artificial Sequence
  Description of Artificial Sequence: Synthetic oligonucleotide
cuggaugacaucucgguag

SEQ ID NO: 1886102 - RNA, 19 nt, Artificial Sequence
  Description of Artificial Sequence: Synthetic oligonucleotide
aaacguuggguacuuggug

SEQ ID NO: 1886103 - RNA, 19 nt, Artificial Sequence
  Description of Artificial Sequence: Synthetic oligonucleotide
auaguguccugaucguccc

SEQ ID NO: 1886104 - RNA, 19 nt, Artificial Sequence
  Description of Artificial Sequence: Synthetic oligonucleotide
aagucaucaugaucugcgg

SEQ ID NO: 1886105 - RNA, 19 nt, Artificial Sequence
  Description of Artificial Sequence: Synthetic oligonucleotide
cacaguugucccuugaggc

SEQ ID NO: 1886106 - RNA, 19 nt, Artificial Sequence
  Description of Artificial Sequence: Synthetic oligonucleotide
aggguuguuacagucuucc

SEQ ID NO: 1886107 - RNA, 19 nt, Artificial Sequence
  Description of Artificial Sequence: Synthetic oligonucleotide
gugaguaagaagucauagg

SEQ ID NO: 1886108 - RNA, 19 nt, Artificial Sequence
  Description of Artificial Sequence: Synthetic oligonucleotide
ugucccuugaggcggaugc

SEQ ID NO: 1886109 - RNA, 19 nt, Artificial Sequence
  Description of Artificial Sequence: Synthetic oligonucleotide
gacgcauagauguaaguga

SEQ ID NO: 1886110 - RNA, 19 nt, Artificial Sequence
  Description of Artificial Sequence: Synthetic oligonucleotide
acaguugucccuugaggcg

SEQ ID NO: 1886111 - RNA, 19 nt, Artificial Sequence
  Description of Artificial Sequence: Synthetic oligonucleotide
gauaguguccugaucgucc

SEQ ID NO: 1886112 - RNA, 19 nt, Artificial Sequence
  Description of Artificial Sequence: Synthetic oligonucleotide
uagcuugccgaacuugagg

SEQ ID NO: 1886113 - RNA, 19 nt, Artificial Sequence
  Description of Artificial Sequence: Synthetic oligonucleotide
agucaucaugaucugcggg

SEQ ID NO: 1886114 - RNA, 19 nt, Artificial Sequence
  Description of Artificial Sequence: Synthetic oligonucleotide
ugcccggaugguuuaaugg

SEQ ID NO: 1886115 - RNA, 19 nt, Artificial Sequence
  Description of Artificial Sequence: Synthetic oligonucleotide
gagucugaccaccaggccc

SEQ ID NO: 1886116 - RNA, 19 nt, Artificial Sequence
  Description of Artificial Sequence: Synthetic oligonucleotide
uccugaucgucccugaccu

SEQ ID NO: 1886117 - RNA, 19 nt, Artificial Sequence
  Description of Artificial Sequence: Synthetic oligonucleotide
augagcaagguccgcacgg

SEQ ID NO: 1886118 - RNA, 19 nt, Artificial Sequence
  Description of Artificial Sequence: Synthetic oligonucleotide
uagauguaagugaggaacu

SEQ ID NO: 1886119 - RNA, 19 nt, Artificial Sequence
  Description of Artificial Sequence: Synthetic oligonucleotide
agcgaauucaccaggauca

SEQ ID NO: 1886120 - RNA, 19 nt, Artificial Sequence
  Description of Artificial Sequence: Synthetic oligonucleotide
gauaguagccgauguacca

SEQ ID NO: 1886121 - RNA, 19 nt, Artificial Sequence
  Description of Artificial Sequence: Synthetic oligonucleotide
acaaaguccuggaugaguc

SEQ ID NO: 1886122 - RNA, 19 nt, Artificial Sequence
  Description of Artificial Sequence: Synthetic oligonucleotide
uuguucugccucaccaccg

SEQ ID NO: 1886123 - RNA, 19 nt, Artificial Sequence
  Description of Artificial Sequence: Synthetic oligonucleotide
cuagugagcagcagggcag

SEQ ID NO: 1886124 - RNA, 19 nt, Artificial Sequence
  Description of Artificial Sequence: Synthetic oligonucleotide
gguggggagacucauaggc

SEQ ID NO: 1886125 - RNA, 19 nt, Artificial Sequence
  Description of Artificial Sequence: Synthetic oligonucleotide
ugguuuaauggcacuuuug

SEQ ID NO: 1886126 - RNA, 19 nt, Artificial Sequence
  Description of Artificial Sequence: Synthetic oligonucleotide
cuuguucugccucaccacc

SEQ ID NO: 1886127 - RNA, 19 nt, Artificial Sequence
  Description of Artificial Sequence: Synthetic oligonucleotide
acucagaucacaaagucau

SEQ ID NO: 1886128 - RNA, 19 nt, Artificial Sequence
  Description of Artificial Sequence: Synthetic oligonucleotide
gucuuuaguagcuugccga

SEQ ID NO: 1886129 - RNA, 19 nt, Artificial Sequence
  Description of Artificial Sequence: Synthetic oligonucleotide
guacuugguggugacaacg

SEQ ID NO: 1886130 - RNA, 19 nt, Artificial Sequence
  Description of Artificial Sequence: Synthetic oligonucleotide
uguaccacuccuuggucca

SEQ ID NO: 1886131 - RNA, 19 nt, Artificial Sequence
  Description of Artificial Sequence: Synthetic oligonucleotide
aacgaacggggacaagaug

SEQ ID NO: 1886132 - RNA, 19 nt, Artificial Sequence
  Description of Artificial Sequence: Synthetic oligonucleotide
uggaugacaucucgguagc

SEQ ID NO: 1886133 - RNA, 19 nt, Artificial Sequence
  Description of Artificial Sequence: Synthetic oligonucleotide
gaccuuagccagcuucucg

SEQ ID NO: 1886134 - RNA, 19 nt, Artificial Sequence
  Description of Artificial Sequence: Synthetic oligonucleotide
accaggaucagaguccccg

SEQ ID NO: 1886135 - RNA, 19 nt, Artificial Sequence
  Description of Artificial Sequence: Synthetic oligonucleotide
uuguugucaggguuguuac

SEQ ID NO: 1886136 - RNA, 19 nt, Artificial Sequence
  Description of Artificial Sequence: Synthetic oligonucleotide
gugaggaacuugcagggcc

SEQ ID NO: 1886137 - RNA, 19 nt, Artificial Sequence
  Description of Artificial Sequence: Synthetic oligonucleotide
gucuggagaccuuagccag

SEQ ID NO: 1886138 - RNA, 19 nt, Artificial Sequence
  Description of Artificial Sequence: Synthetic oligonucleotide
gaugacaucucgguagcug

SEQ ID NO: 1886139 - RNA, 19 nt, Artificial Sequence
  Description of Artificial Sequence: Synthetic oligonucleotide
ucuuuaguagcuugccgaa

SEQ ID NO: 1886140 - RNA, 19 nt, Artificial Sequence
  Description of Artificial Sequence: Synthetic oligonucleotide
ugcgucacccuucuuguac

SEQ ID NO: 1886141 - RNA, 19 nt, Artificial Sequence
  Description of Artificial Sequence: Synthetic oligonucleotide
acaucucgguagcuguccc

SEQ ID NO: 1886142 - RNA, 19 nt, Artificial Sequence
  Description of Artificial Sequence: Synthetic oligonucleotide
uccaucuguugucuggaga

SEQ ID NO: 1886143 - RNA, 19 nt, Artificial Sequence
  Description of Artificial Sequence: Synthetic oligonucleotide
aucgucccugaccugcacc

SEQ ID NO: 1886144 - RNA, 19 nt, Artificial Sequence
  Description of Artificial Sequence: Synthetic oligonucleotide
uguugucuggagaccuuag

SEQ ID NO: 1886145 - RNA, 19 nt, Artificial Sequence
  Description of Artificial Sequence: Synthetic oligonucleotide
ucaccaccgucuuuaguag

SEQ ID NO: 1886146 - RNA, 19 nt, Artificial Sequence
  Description of Artificial Sequence: Synthetic oligonucleotide
ggugaguaagaagucauag

SEQ ID NO: 1886147 - RNA, 19 nt, Artificial Sequence
  Description of Artificial Sequence: Synthetic oligonucleotide
acaacgaacggggacaaga

SEQ ID NO: 1886148 - RNA, 19 nt, Artificial Sequence
  Description of Artificial Sequence: Synthetic oligonucleotide
agaggcagguucccguaac

SEQ ID NO: 1886149 - RNA, 19 nt, Artificial Sequence
  Description of Artificial Sequence: Synthetic oligonucleotide
uucucggccaguucccucc

SEQ ID NO: 1886150 - RNA, 19 nt, Artificial Sequence
  Description of Artificial Sequence: Synthetic oligonucleotide
agaagucauaggcagguuu

SEQ ID NO: 1886151 - RNA, 19 nt, Artificial Sequence
  Description of Artificial Sequence: Synthetic oligonucleotide
acagacgccacccgcuccg

SEQ ID NO: 1886152 - RNA, 19 nt, Artificial Sequence
  Description of Artificial Sequence: Synthetic oligonucleotide
uugaggcuagacacggggc

SEQ ID NO: 1886153 - RNA, 19 nt, Artificial Sequence
  Description of Artificial Sequence: Synthetic oligonucleotide
agacucauaggcauccauc

SEQ ID NO: 1886154 - RNA, 19 nt, Artificial Sequence
  Description of Artificial Sequence: Synthetic oligonucleotide
acgaacggggacaagauga

SEQ ID NO: 1886155 - RNA, 19 nt, Artificial Sequence
  Description of Artificial Sequence: Synthetic oligonucleotide
uuccacauggccucacugu

SEQ ID NO: 1886156 - RNA, 19 nt, Artificial Sequence
  Description of Artificial Sequence: Synthetic oligonucleotide
uagccgauguaccacuccu

SEQ ID NO: 1886157 - RNA, 19 nt, Artificial Sequence
  Description of Artificial Sequence: Synthetic oligonucleotide
acugcgucacccuucuugu

SEQ ID NO: 1886158 - RNA, 19 nt, Artificial Sequence
  Description of Artificial Sequence: Synthetic oligonucleotide
uuccucgcugagcagggcc

SEQ ID NO: 1886159 - RNA, 19 nt, Artificial Sequence
  Description of Artificial Sequence: Synthetic oligonucleotide
ucugcggggcugaaggcug

SEQ ID NO: 1886160 - RNA, 19 nt, Artificial Sequence
  Description of Artificial Sequence: Synthetic oligonucleotide
augcguuccucgcugagca

SEQ ID NO: 1886161 - RNA, 19 nt, Artificial Sequence
  Description of Artificial Sequence: Synthetic oligonucleotide
gaguaagaagucauaggca

SEQ ID NO: 1886162 - RNA, 19 nt, Artificial Sequence
  Description of Artificial Sequence: Synthetic oligonucleotide
cuuuuccagaacagacgcc

SEQ ID NO: 1886163 - RNA, 19 nt, Artificial Sequence
  Description of Artificial Sequence: Synthetic oligonucleotide
uucccaaccucguucuucu

SEQ ID NO: 1886164 - RNA, 19 nt, Artificial Sequence
  Description of Artificial Sequence: Synthetic oligonucleotide
accgucuuuaguagcuugc

SEQ ID NO: 1886165 - RNA, 19 nt, Artificial Sequence
  Description of Artificial Sequence: Synthetic oligonucleotide
cuucuggaaggacuuccgg

SEQ ID NO: 1886166 - RNA, 19 nt, Artificial Sequence
  Description of Artificial Sequence: Synthetic oligonucleotide
uccagcgaauucaccagga

SEQ ID NO: 1886167 - RNA, 19 nt, Artificial Sequence
  Description of Artificial Sequence: Synthetic oligonucleotide
cucaccaccgucuuuagua

SEQ ID NO: 1886168 - RNA, 19 nt, Artificial Sequence
  Description of Artificial Sequence: Synthetic oligonucleotide
cacugcgucacccuucuug

SEQ ID NO: 1886169 - RNA, 19 nt, Artificial Sequence
  Description of Artificial Sequence: Synthetic oligonucleotide
uggggagacucauaggcau

SEQ ID NO: 1886170 - RNA, 19 nt, Artificial Sequence
  Description of Artificial Sequence: Synthetic oligonucleotide
ucgucccugaccugcaccc

SEQ ID NO: 1886171 - RNA, 19 nt, Artificial Sequence
  Description of Artificial Sequence: Synthetic oligonucleotide
acgcauagauguaagugag

SEQ ID NO: 1886172 - RNA, 19 nt, Artificial Sequence
  Description of Artificial Sequence: Synthetic oligonucleotide
ucuagcagguaguggcucu

SEQ ID NO: 1886173 - RNA, 19 nt, Artificial Sequence
  Description of Artificial Sequence: Synthetic oligonucleotide
ugguggugacaacgaacgg

SEQ ID NO: 1886174 - RNA, 19 nt, Artificial Sequence
  Description of Artificial Sequence: Synthetic oligonucleotide
gugaggugcuuccagcgcc

SEQ ID NO: 1886175 - RNA, 19 nt, Artificial Sequence
  Description of Artificial Sequence: Synthetic oligonucleotide
uaggcauccaucuguuguc

SEQ ID NO: 1886176 - RNA, 19 nt, Artificial Sequence
  Description of Artificial Sequence: Synthetic oligonucleotide
cagaacagacgccacccgc

SEQ ID NO: 1886177 - RNA, 19 nt, Artificial Sequence
  Description of Artificial Sequence: Synthetic oligonucleotide
caggccuaugugcagcucc

SEQ ID NO: 1886178 - RNA, 19 nt, Artificial Sequence
  Description of Artificial Sequence: Synthetic oligonucleotide
cuggaugagucugaccacc

SEQ ID NO: 1886179 - RNA, 19 nt, Artificial Sequence
  Description of Artificial Sequence: Synthetic oligonucleotide
uccaggugaguaagaaguc

SEQ ID NO: 1886180 - RNA, 19 nt, Artificial Sequence
  Description of Artificial Sequence: Synthetic oligonucleotide
caugagcaagguccgcacg

SEQ ID NO: 1886181 - RNA, 19 nt, Artificial Sequence
  Description of Artificial Sequence: Synthetic oligonucleotide
uguucugccucaccaccgu

SEQ ID NO: 1886182 - RNA, 19 nt, Artificial Sequence
  Description of Artificial Sequence: Synthetic oligonucleotide
uaguagccgauguaccacu

SEQ ID NO: 1886183 - RNA, 19 nt, Artificial Sequence
  Description of Artificial Sequence: Synthetic oligonucleotide
ucaacggcuguggucagga

SEQ ID NO: 1886184 - RNA, 19 nt, Artificial Sequence
  Description of Artificial Sequence: Synthetic oligonucleotide
uugccgaacuugaggcuag

SEQ ID NO: 1886185 - RNA, 19 nt, Artificial Sequence
  Description of Artificial Sequence: Synthetic oligonucleotide
uccgcacggacgcauagau

SEQ ID NO: 1886186 - RNA, 19 nt, Artificial Sequence
  Description of Artificial Sequence: Synthetic oligonucleotide
cagcgaauucaccaggauc

SEQ ID NO: 1886187 - RNA, 19 nt, Artificial Sequence
  Description of Artificial Sequence: Synthetic oligonucleotide
gacaucucgguagcugucc

SEQ ID NO: 1886188 - RNA, 19 nt, Artificial Sequence
  Description of Artificial Sequence: Synthetic oligonucleotide
aggaucagaguccccguga

SEQ ID NO: 1886189 - RNA, 19 nt, Artificial Sequence
  Description of Artificial Sequence: Synthetic oligonucleotide
guccagcgaauucaccagg

SEQ ID NO: 1886190 - RNA, 19 nt, Artificial Sequence
  Description of Artificial Sequence: Synthetic oligonucleotide
cacggggcgguccugaaac

SEQ ID NO: 1886191 - RNA, 19 nt, Artificial Sequence
  Description of Artificial Sequence: Synthetic oligonucleotide
uguugucaggguuguuaca

SEQ ID NO: 1886192 - RNA, 19 nt, Artificial Sequence
  Description of Artificial Sequence: Synthetic oligonucleotide
ggacgcauagauguaagug

SEQ ID NO: 1886193 - RNA, 19 nt, Artificial Sequence
  Description of Artificial Sequence: Synthetic oligonucleotide
agcaagguccgcacggacg

SEQ ID NO: 1886194 - RNA, 19 nt, Artificial Sequence
  Description of Artificial Sequence: Synthetic oligonucleotide
auaggcagguuuccacaug

SEQ ID NO: 1886195 - RNA, 19 nt, Artificial Sequence
  Description of Artificial Sequence: Synthetic oligonucleotide
guccugaucgucccugacc

SEQ ID NO: 1886196 - RNA, 19 nt, Artificial Sequence
  Description of Artificial Sequence: Synthetic oligonucleotide
gaggcuagacacggggcgg

SEQ ID NO: 1886197 - RNA, 19 nt, Artificial Sequence
  Description of Artificial Sequence: Synthetic oligonucleotide
aggauaguguccugaucgu

SEQ ID NO: 1886198 - RNA, 19 nt, Artificial Sequence
  Description of Artificial Sequence: Synthetic oligonucleotide
uuaguagcuugccgaacuu

SEQ ID NO: 1886199 - RNA, 19 nt, Artificial Sequence
  Description of Artificial Sequence: Synthetic oligonucleotide
gaugcguuccucgcugagc

SEQ ID NO: 1886200 - RNA, 19 nt, Artificial Sequence
  Description of Artificial Sequence: Synthetic oligonucleotide
uccgcgaaggcucgccagc

SEQ ID NO: 1886201 - RNA, 19 nt, Artificial Sequence
  Description of Artificial Sequence: Synthetic oligonucleotide
cacucagaucacaaaguca

SEQ ID NO: 1886202 - RNA, 19 nt, Artificial Sequence
  Description of Artificial Sequence: Synthetic oligonucleotide
agcucaggccccgagaaca

SEQ ID NO: 1886203 - RNA, 19 nt, Artificial Sequence
  Description of Artificial Sequence: Synthetic oligonucleotide
uaguagcuugccgaacuug

SEQ ID NO: 1886204 - RNA, 19 nt, Artificial Sequence
  Description of Artificial Sequence: Synthetic oligonucleotide
augguuuaauggcacuuuu

SEQ ID NO: 1886205 - RNA, 19 nt, Artificial Sequence
  Description of Artificial Sequence: Synthetic oligonucleotide
gcucuagugagcagcaggg

SEQ ID NO: 1886206 - RNA, 19 nt, Artificial Sequence
  Description of Artificial Sequence: Synthetic oligonucleotide
gcccucaagauguccagcg

SEQ ID NO: 1886207 - RNA, 19 nt, Artificial Sequence
  Description of Artificial Sequence: Synthetic oligonucleotide
aucaugaucugcggggcug

SEQ ID NO: 1886208 - RNA, 19 nt, Artificial Sequence
  Description of Artificial Sequence: Synthetic oligonucleotide
uugcccugauaguagccga

SEQ ID NO: 1886209 - RNA, 19 nt, Artificial Sequence
  Description of Artificial Sequence: Synthetic oligonucleotide
uccugaaacguuggguacu

SEQ ID NO: 1886210 - RNA, 19 nt, Artificial Sequence
  Description of Artificial Sequence: Synthetic oligonucleotide
guagccgauguaccacucc

SEQ ID NO: 1886211 - RNA, 19 nt, Artificial Sequence
  Description of Artificial Sequence: Synthetic oligonucleotide
ugaccugcacccucagggu

SEQ ID NO: 1886212 - RNA, 19 nt, Artificial Sequence
  Description of Artificial Sequence: Synthetic oligonucleotide
acacguucuuggugugcac

SEQ ID NO: 1886213 - RNA, 19 nt, Artificial Sequence
  Description of Artificial Sequence: Synthetic oligonucleotide
uggcugcggagucuggaca

SEQ ID NO: 1886214 - RNA, 19 nt, Artificial Sequence
  Description of Artificial Sequence: Synthetic oligonucleotide
agggcguccgcgaaggcuc

SEQ ID NO: 1886215 - RNA, 19 nt, Artificial Sequence
  Description of Artificial Sequence: Synthetic oligonucleotide
aguguccugaucgucccug

SEQ ID NO: 1886216 - RNA, 19 nt, Artificial Sequence
  Description of Artificial Sequence: Synthetic oligonucleotide
cuguccccaaucugguggc

SEQ ID NO: 1886217 - RNA, 19 nt, Artificial Sequence
  Description of Artificial Sequence: Synthetic oligonucleotide
gaucugcggggcugaaggc

SEQ ID NO: 1886218 - RNA, 19 nt, Artificial Sequence
  Description of Artificial Sequence: Synthetic oligonucleotide
gcaagguccgcacggacgc

SEQ ID NO: 1886219 - RNA, 19 nt, Artificial Sequence
  Description of Artificial Sequence: Synthetic oligonucleotide
guccugaaacguuggguac

SEQ ID NO: 1886220 - RNA, 19 nt, Artificial Sequence
  Description of Artificial Sequence: Synthetic oligonucleotide
ugacaucucgguagcuguc

SEQ ID NO: 1886221 - RNA, 19 nt, Artificial Sequence
  Description of Artificial Sequence: Synthetic oligonucleotide
cacguucuuggugugcacc

SEQ ID NO: 1886222 - RNA, 19 nt, Artificial Sequence
  Description of Artificial Sequence: Synthetic oligonucleotide
acggcuguggucaggagca

SEQ ID NO: 1886223 - RNA, 19 nt, Artificial Sequence
  Description of Artificial Sequence: Synthetic oligonucleotide
cagaguccccgugaggugc

SEQ ID NO: 1886224 - RNA, 19 nt, Artificial Sequence
  Description of Artificial Sequence: Synthetic oligonucleotide
uaacccagggcguccgcga

SEQ ID NO: 1886225 - RNA, 19 nt, Artificial Sequence
  Description of Artificial Sequence: Synthetic oligonucleotide
agcgcggugccaccucaac

SEQ ID NO: 1886226 - RNA, 19 nt, Artificial Sequence
  Description of Artificial Sequence: Synthetic oligonucleotide
guaacccagggcguccgcg

SEQ ID NO: 1886227 - RNA, 19 nt, Artificial Sequence
  Description of Artificial Sequence: Synthetic oligonucleotide
cuuuaguagcuugccgaac

SEQ ID NO: 1886228 - RNA, 19 nt, Artificial Sequence
  Description of Artificial Sequence: Synthetic oligonucleotide
gcccggaugguuuaauggc

SEQ ID NO: 1886229 - RNA, 19 nt, Artificial Sequence
  Description of Artificial Sequence: Synthetic oligonucleotide
uucccguaacccagggcgu

SEQ ID NO: 1886230 - RNA, 19 nt, Artificial Sequence
  Description of Artificial Sequence: Synthetic oligonucleotide
gcugcugauguucuccaug

SEQ ID NO: 1886231 - RNA, 19 nt, Artificial Sequence
  Description of Artificial Sequence: Synthetic oligonucleotide
uguccugaucgucccugac

SEQ ID NO: 1886232 - RNA, 19 nt, Artificial Sequence
  Description of Artificial Sequence: Synthetic oligonucleotide
gccuaugugcagcuccugg

SEQ ID NO: 1886233 - RNA, 19 nt, Artificial Sequence
  Description of Artificial Sequence: Synthetic oligonucleotide
ccgagaacaggcugggccg

SEQ ID NO: 1886234 - RNA, 19 nt, Artificial Sequence
  Description of Artificial Sequence: Synthetic oligonucleotide
gguccugaaacguugggua

SEQ ID NO: 1886235 - RNA, 19 nt, Artificial Sequence
  Description of Artificial Sequence: Synthetic oligonucleotide
caccgucuuuaguagcuug

SEQ ID NO: 1886236 - RNA, 19 nt, Artificial Sequence
  Description of Artificial Sequence: Synthetic oligonucleotide
cucagaucacaaagucauc

SEQ ID NO: 1886237 - RNA, 19 nt, Artificial Sequence
  Description of Artificial Sequence: Synthetic oligonucleotide
gaacagacgccacccgcuc

SEQ ID NO: 1886238 - RNA, 19 nt, Artificial Sequence
  Description of Artificial Sequence: Synthetic oligonucleotide
ugccucaccaccgucuuua

SEQ ID NO: 1886239 - RNA, 19 nt, Artificial Sequence
  Description of Artificial Sequence: Synthetic oligonucleotide
gaaacguuggguacuuggu

SEQ ID NO: 1886240 - RNA, 19 nt, Artificial Sequence
  Description of Artificial Sequence: Synthetic oligonucleotide
ucaugaucugcggggcuga

SEQ ID NO: 1886241 - RNA, 19 nt, Artificial Sequence
  Description of Artificial Sequence: Synthetic oligonucleotide
aggacuuccgguccuuguu

SEQ ID NO: 1886242 - RNA, 19 nt, Artificial Sequence
  Description of Artificial Sequence: Synthetic oligonucleotide
aguagccgauguaccacuc

SEQ ID NO: 1886243 - RNA, 19 nt, Artificial Sequence
  Description of Artificial Sequence: Synthetic oligonucleotide
gccgauguaccacuccuug

SEQ ID NO: 1886244 - RNA, 19 nt, Artificial Sequence
  Description of Artificial Sequence: Synthetic oligonucleotide
cuuugcccacuaccaacac

SEQ ID NO: 1886245 - RNA, 19 nt, Artificial Sequence
  Description of Artificial Sequence: Synthetic oligonucleotide
cucuagugagcagcagggc

SEQ ID NO: 1886246 - RNA, 19 nt, Artificial Sequence
  Description of Artificial Sequence: Synthetic oligonucleotide
ggaacuugcagggccggag

SEQ ID NO: 1886247 - RNA, 19 nt, Artificial Sequence
  Description of Artificial Sequence: Synthetic oligonucleotide
ccacucagaucacaaaguc

SEQ ID NO: 1886248 - RNA, 19 nt, Artificial Sequence
  Description of Artificial Sequence: Synthetic oligonucleotide
ucgccagcugcugauguuc

SEQ ID NO: 1886249 - RNA, 19 nt, Artificial Sequence
  Description of Artificial Sequence: Synthetic oligonucleotide
cugcccggaugguuuaaug

SEQ ID NO: 1886250 - RNA, 19 nt, Artificial Sequence
  Description of Artificial Sequence: Synthetic oligonucleotide
gagcaagguccgcacggac

SEQ ID NO: 1886251 - RNA, 19 nt, Artificial Sequence
  Description of Artificial Sequence: Synthetic oligonucleotide
ugaccuucccaaccucguu

SEQ ID NO: 1886252 - RNA, 19 nt, Artificial Sequence
  Description of Artificial Sequence: Synthetic oligonucleotide
ugucccgguggggagacuc

SEQ ID NO: 1886253 - RNA, 19 nt, Artificial Sequence
  Description of Artificial Sequence: Synthetic oligonucleotide
acggacgcauagauguaag

SEQ ID NO: 1886254 - RNA, 19 nt, Artificial Sequence
  Description of Artificial Sequence: Synthetic oligonucleotide
aucugcggggcugaaggcu

SEQ ID NO: 1886255 - RNA, 19 nt, Artificial Sequence
  Description of Artificial Sequence: Synthetic oligonucleotide
guccccgugaggugcuucc

SEQ ID NO: 1886256 - RNA, 19 nt, Artificial Sequence
  Description of Artificial Sequence: Synthetic oligonucleotide
guuccugucccggugggga

SEQ ID NO: 1886257 - RNA, 19 nt, Artificial Sequence
  Description of Artificial Sequence: Synthetic oligonucleotide
accaccaggcccugacagu

SEQ ID NO: 1886258 - RNA, 19 nt, Artificial Sequence
  Description of Artificial Sequence: Synthetic oligonucleotide
caccucaacggcugugguc

SEQ ID NO: 1886259 - RNA, 19 nt, Artificial Sequence
  Description of Artificial Sequence: Synthetic oligonucleotide
acggggcgguccugaaacg

SEQ ID NO: 1886260 - RNA, 19 nt, Artificial Sequence
  Description of Artificial Sequence: Synthetic oligonucleotide
caacacguucuuggugugc

SEQ ID NO: 1886261 - RNA, 19 nt, Artificial Sequence
  Description of Artificial Sequence: Synthetic oligonucleotide
gggacaagaugaccuuccc

SEQ ID NO: 1886262 - RNA, 19 nt, Artificial Sequence
  Description of Artificial Sequence: Synthetic oligonucleotide
ggggacaagaugaccuucc

SEQ ID NO: 1886263 - RNA, 19 nt, Artificial Sequence
  Description of Artificial Sequence: Synthetic oligonucleotide
acuugaggcuagacacggg

SEQ ID NO: 1886264 - RNA, 19 nt, Artificial Sequence
  Description of Artificial Sequence: Synthetic oligonucleotide
aacccagggcguccgcgaa

SEQ ID NO: 1886265 - RNA, 19 nt, Artificial Sequence
  Description of Artificial Sequence: Synthetic oligonucleotide
ggugagaggcagguucccg

SEQ ID NO: 1886266 - RNA, 19 nt, Artificial Sequence
  Description of Artificial Sequence: Synthetic oligonucleotide
guccgcgaaggcucgccag

SEQ ID NO: 1886267 - RNA, 19 nt, Artificial Sequence
  Description of Artificial Sequence: Synthetic oligonucleotide
ccgauguaccacuccuugg

SEQ ID NO: 1886268 - RNA, 19 nt, Artificial Sequence
  Description of Artificial Sequence: Synthetic oligonucleotide
gagaccuuagccagcuucu

SEQ ID NO: 1886269 - RNA, 19 nt, Artificial Sequence
  Description of Artificial Sequence: Synthetic oligonucleotide
gggccggaggaucugcucc

SEQ ID NO: 1886270 - RNA, 19 nt, Artificial Sequence
  Description of Artificial Sequence: Synthetic oligonucleotide
ccgugaggugcuuccagcg

SEQ ID NO: 1886271 - RNA, 19 nt, Artificial Sequence
  Description of Artificial Sequence: Synthetic oligonucleotide
gcgaaggcucgccagcugc

SEQ ID NO: 1886272 - RNA, 19 nt, Artificial Sequence
  Description of Artificial Sequence: Synthetic oligonucleotide
aagguccgcacggacgcau

SEQ ID NO: 1886273 - RNA, 19 nt, Artificial Sequence
  Description of Artificial Sequence: Synthetic oligonucleotide
ugcggagucuggacacaaa

SEQ ID NO: 1886274 - RNA, 19 nt, Artificial Sequence
  Description of Artificial Sequence: Synthetic oligonucleotide
augaucugcggggcugaag

SEQ ID NO: 1886275 - RNA, 19 nt, Artificial Sequence
  Description of Artificial Sequence: Synthetic oligonucleotide
augaccuucccaaccucgu

SEQ ID NO: 1886276 - RNA, 19 nt, Artificial Sequence
  Description of Artificial Sequence: Synthetic oligonucleotide
caaucugguggcuccaggu

SEQ ID NO: 1886277 - RNA, 19 nt, Artificial Sequence
  Description of Artificial Sequence: Synthetic oligonucleotide
ggcagguucccguaaccca

SEQ ID NO: 1886278 - RNA, 19 nt, Artificial Sequence
  Description of Artificial Sequence: Synthetic oligonucleotide
cacuccuugguccacaguu

SEQ ID NO: 1886279 - RNA, 19 nt, Artificial Sequence
  Description of Artificial Sequence: Synthetic oligonucleotide
cuugccgaacuugaggcua

SEQ ID NO: 1886280 - RNA, 19 nt, Artificial Sequence
  Description of Artificial Sequence: Synthetic oligonucleotide
cuucucggccaguucccuc

SEQ ID NO: 1886281 - RNA, 19 nt, Artificial Sequence
  Description of Artificial Sequence: Synthetic oligonucleotide
gagacucauaggcauccau

SEQ ID NO: 1886282 - RNA, 19 nt, Artificial Sequence
  Description of Artificial Sequence: Synthetic oligonucleotide
acggggacaagaugaccuu

SEQ ID NO: 1886283 - RNA, 19 nt, Artificial Sequence
  Description of Artificial Sequence: Synthetic oligonucleotide
ccaaccucguucuucuuca

SEQ ID NO: 1886284 - RNA, 19 nt, Artificial Sequence
  Description of Artificial Sequence: Synthetic oligonucleotide
caggugaguaagaagucau

SEQ ID NO: 1886285 - RNA, 19 nt, Artificial Sequence
  Description of Artificial Sequence: Synthetic oligonucleotide
aggcauccaucuguugucu

SEQ ID NO: 1886286 - RNA, 19 nt, Artificial Sequence
  Description of Artificial Sequence: Synthetic oligonucleotide
gacuuccgguccuuguugu

SEQ ID NO: 1886287 - RNA, 19 nt, Artificial Sequence
  Description of Artificial Sequence: Synthetic oligonucleotide
gccaccucaacggcugugg

SEQ ID NO: 1886288 - RNA, 19 nt, Artificial Sequence
  Description of Artificial Sequence: Synthetic oligonucleotide
gacaacgaacggggacaag

SEQ ID NO: 1886289 - RNA, 19 nt, Artificial Sequence
  Description of Artificial Sequence: Synthetic oligonucleotide
ccggaugguuuaauggcac

SEQ ID NO: 1886290 - RNA, 19 nt, Artificial Sequence
  Description of Artificial Sequence: Synthetic oligonucleotide
gucccuugaggcggaugcg

SEQ ID NO: 1886291 - RNA, 19 nt, Artificial Sequence
  Description of Artificial Sequence: Synthetic oligonucleotide
ccgggcuuugcccacuacc

SEQ ID NO: 1886292 - RNA, 19 nt, Artificial Sequence
  Description of Artificial Sequence: Synthetic oligonucleotide
ggggcugaaggcugcugcc

SEQ ID NO: 1886293 - RNA, 19 nt, Artificial Sequence
  Description of Artificial Sequence: Synthetic oligonucleotide
ggcugcggagucuggacac

SEQ ID NO: 1886294 - RNA, 19 nt, Artificial Sequence
  Description of Artificial Sequence: Synthetic oligonucleotide
ucaucuuguccaggccuau

SEQ ID NO: 1886295 - RNA, 19 nt, Artificial Sequence
  Description of Artificial Sequence: Synthetic oligonucleotide
cgcauagauguaagugagg

SEQ ID NO: 1886296 - RNA, 19 nt, Artificial Sequence
  Description of Artificial Sequence: Synthetic oligonucleotide
gcgcggugccaccucaacg

SEQ ID NO: 1886297 - RNA, 19 nt, Artificial Sequence
  Description of Artificial Sequence: Synthetic oligonucleotide
acccagggcguccgcgaag

SEQ ID NO: 1886298 - RNA, 19 nt, Artificial Sequence
  Description of Artificial Sequence: Synthetic oligonucleotide
gguucccguaacccagggc

SEQ ID NO: 1886299 - RNA, 19 nt, Artificial Sequence
  Description of Artificial Sequence: Synthetic oligonucleotide
cacuaccaacacguucuug

SEQ ID NO: 1886300 - RNA, 19 nt, Artificial Sequence
  Description of Artificial Sequence: Synthetic oligonucleotide
gguccgcacggacgcauag

SEQ ID NO: 1886301 - RNA, 19 nt, Artificial Sequence
  Description of Artificial Sequence: Synthetic oligonucleotide
gcggagucuggacacaaaa

SEQ ID NO: 1886302 - RNA, 19 nt, Artificial Sequence
  Description of Artificial Sequence: Synthetic oligonucleotide
ccuaugugcagcuccugga

SEQ ID NO: 1886303 - RNA, 19 nt, Artificial Sequence
  Description of Artificial Sequence: Synthetic oligonucleotide
ucucgguagcuguccccaa

SEQ ID NO: 1886304 - RNA, 19 nt, Artificial Sequence
  Description of Artificial Sequence: Synthetic oligonucleotide
ugccaccucaacggcugug

SEQ ID NO: 1886305 - RNA, 19 nt, Artificial Sequence
  Description of Artificial Sequence: Synthetic oligonucleotide
uccugucccgguggggaga

SEQ ID NO: 1886306 - RNA, 19 nt, Artificial Sequence
  Description of Artificial Sequence: Synthetic oligonucleotide
ggcauccaucuguugucug

SEQ ID NO: 1886307 - RNA, 19 nt, Artificial Sequence
  Description of Artificial Sequence: Synthetic oligonucleotide
ggccaguucccuccagcgc

SEQ ID NO: 1886308 - RNA, 19 nt, Artificial Sequence
  Description of Artificial Sequence: Synthetic oligonucleotide
cauaggcagguuuccacau

SEQ ID NO: 1886309 - RNA, 19 nt, Artificial Sequence
  Description of Artificial Sequence: Synthetic oligonucleotide
cuaugugcagcuccuggau

SEQ ID NO: 1886310 - RNA, 19 nt, Artificial Sequence
  Description of Artificial Sequence: Synthetic oligonucleotide
caacggcuguggucaggag

SEQ ID NO: 1886311 - RNA, 19 nt, Artificial Sequence
  Description of Artificial Sequence: Synthetic oligonucleotide
gcgguccugaaacguuggg

SEQ ID NO: 1886312 - RNA, 19 nt, Artificial Sequence
  Description of Artificial Sequence: Synthetic oligonucleotide
ucccguaacccagggcguc

SEQ ID NO: 1886313 - RNA, 19 nt, Artificial Sequence
  Description of Artificial Sequence: Synthetic oligonucleotide
aggugaguaagaagucaua

SEQ ID NO: 1886314 - RNA, 19 nt, Artificial Sequence
  Description of Artificial Sequence: Synthetic oligonucleotide
gguggcuccaggugaguaa

SEQ ID NO: 1886315 - RNA, 19 nt, Artificial Sequence
  Description of Artificial Sequence: Synthetic oligonucleotide
cccgugaggugcuuccagc

SEQ ID NO: 1886316 - RNA, 19 nt, Artificial Sequence
  Description of Artificial Sequence: Synthetic oligonucleotide
ggauaguguccugaucguc

SEQ ID NO: 1886317 - RNA, 19 nt, Artificial Sequence
  Description of Artificial Sequence: Synthetic oligonucleotide
ggcgguccugaaacguugg

SEQ ID NO: 1886318 - RNA, 19 nt, Artificial Sequence
  Description of Artificial Sequence: Synthetic oligonucleotide
ccgucuuuaguagcuugcc

SEQ ID NO: 1886319 - RNA, 19 nt, Artificial Sequence
  Description of Artificial Sequence: Synthetic oligonucleotide
agacacggggcgguccuga

SEQ ID NO: 1886320 - RNA, 19 nt, Artificial Sequence
  Description of Artificial Sequence: Synthetic oligonucleotide
gcccacuaccaacacguuc

SEQ ID NO: 1886321 - RNA, 19 nt, Artificial Sequence
  Description of Artificial Sequence: Synthetic oligonucleotide
caacgaacggggacaagau

SEQ ID NO: 1886322 - RNA, 19 nt, Artificial Sequence
  Description of Artificial Sequence: Synthetic oligonucleotide
gacgccacccgcuccgccu

SEQ ID NO: 1886323 - RNA, 19 nt, Artificial Sequence
  Description of Artificial Sequence: Synthetic oligonucleotide
guguccugaucgucccuga

SEQ ID NO: 1886324 - RNA, 19 nt, Artificial Sequence
  Description of Artificial Sequence: Synthetic oligonucleotide
acggaggugcucagcucag

SEQ ID NO: 1886325 - RNA, 19 nt, Artificial Sequence
  Description of Artificial Sequence: Synthetic oligonucleotide
aggcuagacacggggcggu

SEQ ID NO: 1886326 - RNA, 19 nt, Artificial Sequence
  Description of Artificial Sequence: Synthetic oligonucleotide
cugaaacguuggguacuug

SEQ ID NO: 1886327 - RNA, 19 nt, Artificial Sequence
  Description of Artificial Sequence: Synthetic oligonucleotide
cgcacggacgcauagaugu

SEQ ID NO: 1886328 - RNA, 19 nt, Artificial Sequence
  Description of Artificial Sequence: Synthetic oligonucleotide
cacggacgcauagauguaa

SEQ ID NO: 1886329 - RNA, 19 nt, Artificial Sequence
  Description of Artificial Sequence: Synthetic oligonucleotide
cuccuugguccacaguugu

SEQ ID NO: 1886330 - RNA, 19 nt, Artificial Sequence
  Description of Artificial Sequence: Synthetic oligonucleotide
gcgaauucaccaggaucag

SEQ ID NO: 1886331 - RNA, 19 nt, Artificial Sequence
  Description of Artificial Sequence: Synthetic oligonucleotide
cagcucaggccccgagaac

SEQ ID NO: 1886332 - RNA, 19 nt, Artificial Sequence
  Description of Artificial Sequence: Synthetic oligonucleotide
acacggggcgguccugaaa

SEQ ID NO: 1886333 - RNA, 19 nt, Artificial Sequence
  Description of Artificial Sequence: Synthetic oligonucleotide
caccaggaucagagucccc

SEQ ID NO: 1886334 - RNA, 19 nt, Artificial Sequence
  Description of Artificial Sequence: Synthetic oligonucleotide
cuccgcccggcagaagaag

SEQ ID NO: 1886335 - RNA, 19 nt, Artificial Sequence
  Description of Artificial Sequence: Synthetic oligonucleotide
cccggaugguuuaauggca

SEQ ID NO: 1886336 - RNA, 19 nt, Artificial Sequence
  Description of Artificial Sequence: Synthetic oligonucleotide
ugcccacuaccaacacguu

SEQ ID NO: 1886337 - RNA, 19 nt, Artificial Sequence
  Description of Artificial Sequence: Synthetic oligonucleotide
cuagacacggggcgguccu

SEQ ID NO: 1886338 - RNA, 19 nt, Artificial Sequence
  Description of Artificial Sequence: Synthetic oligonucleotide
aggaacuugcagggccgga

SEQ ID NO: 1886339 - RNA, 19 nt, Artificial Sequence
  Description of Artificial Sequence: Synthetic oligonucleotide
aguugucccuugaggcgga

SEQ ID NO: 1886340 - RNA, 19 nt, Artificial Sequence
  Description of Artificial Sequence: Synthetic oligonucleotide
gcuagacacggggcggucc

SEQ ID NO: 1886341 - RNA, 19 nt, Artificial Sequence
  Description of Artificial Sequence: Synthetic oligonucleotide
ggcugggccgggcuuugcc

SEQ ID NO: 1886342 - RNA, 19 nt, Artificial Sequence
  Description of Artificial Sequence: Synthetic oligonucleotide
ugccgaacuugaggcuaga

SEQ ID NO: 1886343 - RNA, 19 nt, Artificial Sequence
  Description of Artificial Sequence: Synthetic oligonucleotide
uccccgugaggugcuucca

SEQ ID NO: 1886344 - RNA, 19 nt, Artificial Sequence
  Description of Artificial Sequence: Synthetic oligonucleotide
ccugaccugcacccucagg

SEQ ID NO: 1886345 - RNA, 19 nt, Artificial Sequence
  Description of Artificial Sequence: Synthetic oligonucleotide
gggcugaaggcugcugccc

SEQ ID NO: 1886346 - RNA, 19 nt, Artificial Sequence
  Description of Artificial Sequence: Synthetic oligonucleotide
agaguccccgugaggugcu

SEQ ID NO: 1886347 - RNA, 19 nt, Artificial Sequence
  Description of Artificial Sequence: Synthetic oligonucleotide
gcucagcucaggccccgag

SEQ ID NO: 1886348 - RNA, 19 nt, Artificial Sequence
  Description of Artificial Sequence: Synthetic oligonucleotide
cucggccaguucccuccag

SEQ ID NO: 1886349 - RNA, 19 nt, Artificial Sequence
  Description of Artificial Sequence: Synthetic oligonucleotide
guuccucgcugagcagggc

SEQ ID NO: 1886350 - RNA, 19 nt, Artificial Sequence
  Description of Artificial Sequence: Synthetic oligonucleotide
ucccgguggggagacucau

SEQ ID NO: 1886351 - RNA, 19 nt, Artificial Sequence
  Description of Artificial Sequence: Synthetic oligonucleotide
uggagaccuuagccagcuu

SEQ ID NO: 1886352 - RNA, 19 nt, Artificial Sequence
  Description of Artificial Sequence: Synthetic oligonucleotide
gacacggggcgguccugaa

SEQ ID NO: 1886353 - RNA, 19 nt, Artificial Sequence
  Description of Artificial Sequence: Synthetic oligonucleotide
gcggugccaccucaacggc

SEQ ID NO: 1886354 - RNA, 19 nt, Artificial Sequence
  Description of Artificial Sequence: Synthetic oligonucleotide
caucaugaucugcggggcu

SEQ ID NO: 1886355 - RNA, 19 nt, Artificial Sequence
  Description of Artificial Sequence: Synthetic oligonucleotide
guaccacuccuugguccac

SEQ ID NO: 1886356 - RNA, 19 nt, Artificial Sequence
  Description of Artificial Sequence: Synthetic oligonucleotide
gccucaccaccgucuuuag

SEQ ID NO: 1886357 - RNA, 19 nt, Artificial Sequence
  Description of Artificial Sequence: Synthetic oligonucleotide
ggggagacucauaggcauc

SEQ ID NO: 1886358 - RNA, 19 nt, Artificial Sequence
  Description of Artificial Sequence: Synthetic oligonucleotide
ucccaaccucguucuucuu

SEQ ID NO: 1886359 - RNA, 19 nt, Artificial Sequence
  Description of Artificial Sequence: Synthetic oligonucleotide
agccgauguaccacuccuu

SEQ ID NO: 1886360 - RNA, 19 nt, Artificial Sequence
  Description of Artificial Sequence: Synthetic oligonucleotide
gucacccuucuuguacucu

SEQ ID NO: 1886361 - RNA, 19 nt, Artificial Sequence
  Description of Artificial Sequence: Synthetic oligonucleotide
guccgcacggacgcauaga

SEQ ID NO: 1886362 - RNA, 19 nt, Artificial Sequence
  Description of Artificial Sequence: Synthetic oligonucleotide
ccguuccugucccgguggg

SEQ ID NO: 1886363 - RNA, 19 nt, Artificial Sequence
  Description of Artificial Sequence: Synthetic oligonucleotide
cccugacaguccauuuuca

SEQ ID NO: 1886364 - RNA, 19 nt, Artificial Sequence
  Description of Artificial Sequence: Synthetic oligonucleotide
ccaccuugcccugauagua

SEQ ID NO: 1886365 - RNA, 19 nt, Artificial Sequence
  Description of Artificial Sequence: Synthetic oligonucleotide
ggagacucauaggcaucca

SEQ ID NO: 1886366 - RNA, 19 nt, Artificial Sequence
  Description of Artificial Sequence: Synthetic oligonucleotide
gcacggaggugcucagcuc

SEQ ID NO: 1886367 - RNA, 19 nt, Artificial Sequence
  Description of Artificial Sequence: Synthetic oligonucleotide
cgagaacaggcugggccgg

SEQ ID NO: 1886368 - RNA, 19 nt, Artificial Sequence
  Description of Artificial Sequence: Synthetic oligonucleotide
ccguaacccagggcguccg

SEQ ID NO: 1886369 - RNA, 19 nt, Artificial Sequence
  Description of Artificial Sequence: Synthetic oligonucleotide
cugcggagucuggacacaa

SEQ ID NO: 1886370 - RNA, 19 nt, Artificial Sequence
  Description of Artificial Sequence: Synthetic oligonucleotide
ccgcacggacgcauagaug

SEQ ID NO: 1886371 - RNA, 19 nt, Artificial Sequence
  Description of Artificial Sequence: Synthetic oligonucleotide
gcgucacccuucuuguacu

SEQ ID NO: 1886372 - RNA, 19 nt, Artificial Sequence
  Description of Artificial Sequence: Synthetic oligonucleotide
gcuugccgaacuugaggcu

SEQ ID NO: 1886373 - RNA, 19 nt, Artificial Sequence
  Description of Artificial Sequence: Synthetic oligonucleotide
cccguaacccagggcgucc

SEQ ID NO: 1886374 - RNA, 19 nt, Artificial Sequence
  Description of Artificial Sequence: Synthetic oligonucleotide
cucgguagcuguccccaau

SEQ ID NO: 1886375 - RNA, 19 nt, Artificial Sequence
  Description of Artificial Sequence: Synthetic oligonucleotide
cccucaagauguccagcga

SEQ ID NO: 1886376 - RNA, 19 nt, Artificial Sequence
  Description of Artificial Sequence: Synthetic oligonucleotide
gucccgguggggagacuca

SEQ ID NO: 1886377 - RNA, 19 nt, Artificial Sequence
  Description of Artificial Sequence: Synthetic oligonucleotide
cccaaucugguggcuccag

SEQ ID NO: 1886378 - RNA, 19 nt, Artificial Sequence
  Description of Artificial Sequence: Synthetic oligonucleotide
gccacugcgucacccuucu

SEQ ID NO: 1886379 - RNA, 19 nt, Artificial Sequence
  Description of Artificial Sequence: Synthetic oligonucleotide
ggccuaugugcagcuccug

SEQ ID NO: 1886380 - RNA, 19 nt, Artificial Sequence
  Description of Artificial Sequence: Synthetic oligonucleotide
cugcgucacccuucuugua

SEQ ID NO: 1886381 - RNA, 19 nt, Artificial Sequence
  Description of Artificial Sequence: Synthetic oligonucleotide
gggcguccgcgaaggcucg

SEQ ID NO: 1886382 - RNA, 19 nt, Artificial Sequence
  Description of Artificial Sequence: Synthetic oligonucleotide
ggcccugacaguccauuuu

SEQ ID NO: 1886383 - RNA, 19 nt, Artificial Sequence
  Description of Artificial Sequence: Synthetic oligonucleotide
ggccacugcgucacccuuc

SEQ ID NO: 1886384 - RNA, 19 nt, Artificial Sequence
  Description of Artificial Sequence: Synthetic oligonucleotide
ccccguuccugucccggug

SEQ ID NO: 1886385 - RNA, 19 nt, Artificial Sequence
  Description of Artificial Sequence: Synthetic oligonucleotide
gcucgccagcugcugaugu

SEQ ID NO: 1886386 - RNA, 19 nt, Artificial Sequence
  Description of Artificial Sequence: Synthetic oligonucleotide
caagguccgcacggacgca

SEQ ID NO: 1886387 - RNA, 19 nt, Artificial Sequence
  Description of Artificial Sequence: Synthetic oligonucleotide
gcguccgcgaaggcucgcc

SEQ ID NO: 1886388 - RNA, 19 nt, Artificial Sequence
  Description of Artificial Sequence: Synthetic oligonucleotide
gaaccuccucugcccggau

SEQ ID NO: 1886389 - RNA, 19 nt, Artificial Sequence
  Description of Artificial Sequence: Synthetic oligonucleotide
gcugcggagucuggacaca

SEQ ID NO: 1886390 - RNA, 19 nt, Artificial Sequence
  Description of Artificial Sequence: Synthetic oligonucleotide
cguaacccagggcguccgc

SEQ ID NO: 1886391 - RNA, 19 nt, Artificial Sequence
  Description of Artificial Sequence: Synthetic oligonucleotide
cucgccagcugcugauguu

SEQ ID NO: 1886392 - RNA, 19 nt, Artificial Sequence
  Description of Artificial Sequence: Synthetic oligonucleotide
cccugaccugcacccucag

SEQ ID NO: 1886393 - RNA, 19 nt, Artificial Sequence
  Description of Artificial Sequence: Synthetic oligonucleotide
agguccgcacggacgcaua

SEQ ID NO: 1886394 - RNA, 19 nt, Artificial Sequence
  Description of Artificial Sequence: Synthetic oligonucleotide
ccaccccguuccugucccg

SEQ ID NO: 1886395 - RNA, 19 nt, Artificial Sequence
  Description of Artificial Sequence: Synthetic oligonucleotide
cuagcagguaguggcucuu

SEQ ID NO: 1886396 - RNA, 19 nt, Artificial Sequence
  Description of Artificial Sequence: Synthetic oligonucleotide
cgaauucaccaggaucaga

SEQ ID NO: 1886397 - RNA, 19 nt, Artificial Sequence
  Description of Artificial Sequence: Synthetic oligonucleotide
cagcgcggugccaccucaa

SEQ ID NO: 1886398 - RNA, 19 nt, Artificial Sequence
  Description of Artificial Sequence: Synthetic oligonucleotide
gcuccgccucgcuguccag

SEQ ID NO: 1886399 - RNA, 19 nt, Artificial Sequence
  Description of Artificial Sequence: Synthetic oligonucleotide
ggcuagacacggggcgguc

SEQ ID NO: 1886400 - RNA, 19 nt, Artificial Sequence
  Description of Artificial Sequence: Synthetic oligonucleotide
cggggacaagaugaccuuc

SEQ ID NO: 1886401 - RNA, 19 nt, Artificial Sequence
  Description of Artificial Sequence: Synthetic oligonucleotide
ggaugacaucucgguagcu

SEQ ID NO: 1886402 - RNA, 19 nt, Artificial Sequence
  Description of Artificial Sequence: Synthetic oligonucleotide
ccagcgcggugccaccuca

SEQ ID NO: 1886403 - RNA, 19 nt, Artificial Sequence
  Description of Artificial Sequence: Synthetic oligonucleotide
cucugcccggaugguuuaa

SEQ ID NO: 1886404 - RNA, 19 nt, Artificial Sequence
  Description of Artificial Sequence: Synthetic oligonucleotide
cugcacccucagggugaag

SEQ ID NO: 1886405 - RNA, 19 nt, Artificial Sequence
  Description of Artificial Sequence: Synthetic oligonucleotide
gugccaccucaacggcugu

SEQ ID NO: 1886406 - RNA, 19 nt, Artificial Sequence
  Description of Artificial Sequence: Synthetic oligonucleotide
ccagggcguccgcgaaggc

SEQ ID NO: 1886407 - RNA, 19 nt, Artificial Sequence
  Description of Artificial Sequence: Synthetic oligonucleotide
gccgggcuuugcccacuac

SEQ ID NO: 1886408 - RNA, 19 nt, Artificial Sequence
  Description of Artificial Sequence: Synthetic oligonucleotide
gcggggcugaaggcugcug

SEQ ID NO: 1886409 - RNA, 19 nt, Artificial Sequence
  Description of Artificial Sequence: Synthetic oligonucleotide
cgcgaaggcucgccagcug

SEQ ID NO: 1886410 - RNA, 19 nt, Artificial Sequence
  Description of Artificial Sequence: Synthetic oligonucleotide
cagcuccgcccggcagaag

SEQ ID NO: 1886411 - RNA, 19 nt, Artificial Sequence
  Description of Artificial Sequence: Synthetic oligonucleotide
ccagcgaauucaccaggau

SEQ ID NO: 1886412 - RNA, 19 nt, Artificial Sequence
  Description of Artificial Sequence: Synthetic oligonucleotide
gcacggacgcauagaugua

SEQ ID NO: 1886413 - RNA, 19 nt, Artificial Sequence
  Description of Artificial Sequence: Synthetic oligonucleotide
gcuccgcccggcagaagaa

SEQ ID NO: 1886414 - RNA, 19 nt, Artificial Sequence
  Description of Artificial Sequence: Synthetic oligonucleotide
ccaggccuaugugcagcuc

SEQ ID NO: 1886415 - RNA, 19 nt, Artificial Sequence
  Description of Artificial Sequence: Synthetic oligonucleotide
ggcguccgcgaaggcucgc

SEQ ID NO: 1886416 - RNA, 19 nt, Artificial Sequence
  Description of Artificial Sequence: Synthetic oligonucleotide
cggaugguuuaauggcacu

SEQ ID NO: 1886417 - RNA, 19 nt, Artificial Sequence
  Description of Artificial Sequence: Synthetic oligonucleotide
cggacgcauagauguaagu

SEQ ID NO: 1886418 - RNA, 19 nt, Artificial Sequence
  Description of Artificial Sequence: Synthetic oligonucleotide
ccugaaacguuggguacuu

SEQ ID NO: 1886419 - RNA, 19 nt, Artificial Sequence
  Description of Artificial Sequence: Synthetic oligonucleotide
cggaugcguuccucgcuga

SEQ ID NO: 1886420 - RNA, 19 nt, Artificial Sequence
  Description of Artificial Sequence: Synthetic oligonucleotide
ccgcccggcagaagaaggu

SEQ ID NO: 1886421 - RNA, 19 nt, Artificial Sequence
  Description of Artificial Sequence: Synthetic oligonucleotide
ggggcgguccugaaacguu

SEQ ID NO: 1886422 - RNA, 19 nt, Artificial Sequence
  Description of Artificial Sequence: Synthetic oligonucleotide
guugucccuugaggcggau

SEQ ID NO: 1886423 - RNA, 19 nt, Artificial Sequence
  Description of Artificial Sequence: Synthetic oligonucleotide
ccucaccaccgucuuuagu

SEQ ID NO: 1886424 - RNA, 19 nt, Artificial Sequence
  Description of Artificial Sequence: Synthetic oligonucleotide
cguccgcgaaggcucgcca

SEQ ID NO: 1886425 - RNA, 19 nt, Artificial Sequence
  Description of Artificial Sequence: Synthetic oligonucleotide
ggccgggcuuugcccacua

SEQ ID NO: 1886426 - RNA, 19 nt, Artificial Sequence
  Description of Artificial Sequence: Synthetic oligonucleotide
cgaaggcucgccagcugcu

SEQ ID NO: 1886427 - RNA, 19 nt, Artificial Sequence
  Description of Artificial Sequence: Synthetic oligonucleotide
cccgguggggagacucaua

SEQ ID NO: 1886428 - RNA, 19 nt, Artificial Sequence
  Description of Artificial Sequence: Synthetic oligonucleotide
caguucccuccagcgcggu

SEQ ID NO: 1886429 - RNA, 19 nt, Artificial Sequence
  Description of Artificial Sequence: Synthetic oligonucleotide
gaguccccgugaggugcuu

SEQ ID NO: 1886430 - RNA, 19 nt, Artificial Sequence
  Description of Artificial Sequence: Synthetic oligonucleotide
cggugccaccucaacggcu

SEQ ID NO: 1886431 - RNA, 19 nt, Artificial Sequence
  Description of Artificial Sequence: Synthetic oligonucleotide
ccgcgaaggcucgccagcu

SEQ ID NO: 1886432 - RNA, 19 nt, Artificial Sequence
  Description of Artificial Sequence: Synthetic oligonucleotide
cggggcgguccugaaacgu

SEQ ID NO: 1886433 - RNA, 19 nt, Artificial Sequence
  Description of Artificial Sequence: Synthetic oligonucleotide
cugucccgguggggagacu

SEQ ID NO: 1886434 - RNA, 19 nt, Artificial Sequence
  Description of Artificial Sequence: Synthetic oligonucleotide
ccacugcgucacccuucuu

SEQ ID NO: 1886435 - RNA, 19 nt, Artificial Sequence
  Description of Artificial Sequence: Synthetic oligonucleotide
agauguauaaauuuguagg

SEQ ID NO: 1886436 - RNA, 19 nt, Artificial Sequence
  Description of Artificial Sequence: Synthetic oligonucleotide
uuaaagugggugaugaugg

SEQ ID NO: 1886437 - RNA, 19 nt, Artificial Sequence
  Description of Artificial Sequence: Synthetic oligonucleotide
gauguauaaauuuguaggg

SEQ ID NO: 1886438 - RNA, 19 nt, Artificial Sequence
  Description of Artificial Sequence: Synthetic oligonucleotide
aaacauuggaagaaggccc

SEQ ID NO: 1886439 - RNA, 19 nt, Artificial Sequence
  Description of Artificial Sequence: Synthetic oligonucleotide
uauagcagcacgcuguugg

SEQ ID NO: 1886440 - RNA, 19 nt, Artificial Sequence
  Description of Artificial Sequence: Synthetic oligonucleotide
uuugagauguauaaauuug

SEQ ID NO: 1886441 - RNA, 19 nt, Artificial Sequence
  Description of Artificial Sequence: Synthetic oligonucleotide
gaaaggauagaccccaugg

SEQ ID NO: 1886442 - RNA, 19 nt, Artificial Sequence
  Description of Artificial Sequence: Synthetic oligonucleotide
cuugacaagguccuggucg

SEQ ID NO: 1886443 - RNA, 19 nt, Artificial Sequence
  Description of Artificial Sequence: Synthetic oligonucleotide
aagaaccgagcccugauag

SEQ ID NO: 1886444 - RNA, 19 nt, Artificial Sequence
  Description of Artificial Sequence: Synthetic oligonucleotide
aaguccacgaagccguagc

SEQ ID NO: 1886445 - RNA, 19 nt, Artificial Sequence
  Description of Artificial Sequence: Synthetic oligonucleotide
uagguuagggcccauacca

SEQ ID NO: 1886446 - RNA, 19 nt, Artificial Sequence
  Description of Artificial Sequence: Synthetic oligonucleotide
auuuggaagagcugugugg

SEQ ID NO: 1886447 - RNA, 19 nt, Artificial Sequence
  Description of Artificial Sequence: Synthetic oligonucleotide
uguauaaauuuguaggguc

SEQ ID NO: 1886448 - RNA, 19 nt, Artificial Sequence
  Description of Artificial Sequence: Synthetic oligonucleotide
agcaaauuuacaaagcaag

SEQ ID NO: 1886449 - RNA, 19 nt, Artificial Sequence
  Description of Artificial Sequence: Synthetic oligonucleotide
ugaccaaaaggcuucagca

SEQ ID NO: 1886450 - RNA, 19 nt, Artificial Sequence
  Description of Artificial Sequence: Synthetic oligonucleotide
agauaaccugaccaaaagg

SEQ ID NO: 1886451 - RNA, 19 nt, Artificial Sequence
  Description of Artificial Sequence: Synthetic oligonucleotide
uuuuccuugguucugucgu

SEQ ID NO: 1886452 - RNA, 19 nt, Artificial Sequence
  Description of Artificial Sequence: Synthetic oligonucleotide
cacgcuguuggcaugaacg

SEQ ID NO: 1886453 - RNA, 19 nt, Artificial Sequence
  Description of Artificial Sequence: Synthetic oligonucleotide
agaaacauuggaagaaggc

SEQ ID NO: 1886454 - RNA, 19 nt, Artificial Sequence
  Description of Artificial Sequence: Synthetic oligonucleotide
aagaggaugguccaucccu

SEQ ID NO: 1886455 - RNA, 19 nt, Artificial Sequence
  Description of Artificial Sequence: Synthetic oligonucleotide
uacagguugguuuugcuca

SEQ ID NO: 1886456 - RNA, 19 nt, Artificial Sequence
  Description of Artificial Sequence: Synthetic oligonucleotide
auccuugcaaagccgaccc

SEQ ID NO: 1886457 - RNA, 19 nt, Artificial Sequence
  Description of Artificial Sequence: Synthetic oligonucleotide
ugaguaagaggucccauca

SEQ ID NO: 1886458 - RNA, 19 nt, Artificial Sequence
  Description of Artificial Sequence: Synthetic oligonucleotide
gagagaaagaggauggucc

SEQ ID NO: 1886459 - RNA, 19 nt, Artificial Sequence
  Description of Artificial Sequence: Synthetic oligonucleotide
uuuccauuaaaguggguga

SEQ ID NO: 1886460 - RNA, 19 nt, Artificial Sequence
  Description of Artificial Sequence: Synthetic oligonucleotide
accaaaaggcuucagcauc

SEQ ID NO: 1886461 - RNA, 19 nt, Artificial Sequence
  Description of Artificial Sequence: Synthetic oligonucleotide
cuccucaacagaaacauug

SEQ ID NO: 1886462 - RNA, 19 nt, Artificial Sequence
  Description of Artificial Sequence: Synthetic oligonucleotide
uuguuuguggucuugucca

SEQ ID NO: 1886463 - RNA, 19 nt, Artificial Sequence
  Description of Artificial Sequence: Synthetic oligonucleotide
aaaggauagaccccauggu

SEQ ID NO: 1886464 - RNA, 19 nt, Artificial Sequence
  Description of Artificial Sequence: Synthetic oligonucleotide
ucugucguuucuuuggccc

SEQ ID NO: 1886465 - RNA, 19 nt, Artificial Sequence
  Description of Artificial Sequence: Synthetic oligonucleotide
uccccgaauauacagguug

SEQ ID NO: 1886466 - RNA, 19 nt, Artificial Sequence
  Description of Artificial Sequence: Synthetic oligonucleotide
uccucaacagaaacauugg

SEQ ID NO: 1886467 - RNA, 19 nt, Artificial Sequence
  Description of Artificial Sequence: Synthetic oligonucleotide
auagguuagggcccauacc

SEQ ID NO: 1886468 - RNA, 19 nt, Artificial Sequence
  Description of Artificial Sequence: Synthetic oligonucleotide
cuugccauauggcugacag

SEQ ID NO: 1886469 - RNA, 19 nt, Artificial Sequence
  Description of Artificial Sequence: Synthetic oligonucleotide
aagccgaccccucugcugg

SEQ ID NO: 1886470 - RNA, 19 nt, Artificial Sequence
  Description of Artificial Sequence: Synthetic oligonucleotide
gagauaaccugaccaaaag

SEQ ID NO: 1886471 - RNA, 19 nt, Artificial Sequence
  Description of Artificial Sequence: Synthetic oligonucleotide
ucuuaauauacuuuccauu

SEQ ID NO: 1886472 - RNA, 19 nt, Artificial Sequence
  Description of Artificial Sequence: Synthetic oligonucleotide
cuuguuuguggucuugucc

SEQ ID NO: 1886473 - RNA, 19 nt, Artificial Sequence
  Description of Artificial Sequence: Synthetic oligonucleotide
uugguggagacaaucuugc

SEQ ID NO: 1886474 - RNA, 19 nt, Artificial Sequence
  Description of Artificial Sequence: Synthetic oligonucleotide
guuguaagggguuggguag

SEQ ID NO: 1886475 - RNA, 19 nt, Artificial Sequence
  Description of Artificial Sequence: Synthetic oligonucleotide
aguaagaggucccaucaug

SEQ ID NO: 1886476 - RNA, 19 nt, Artificial Sequence
  Description of Artificial Sequence: Synthetic oligonucleotide
aacauuggaagaaggcccg

SEQ ID NO: 1886477 - RNA, 19 nt, Artificial Sequence
  Description of Artificial Sequence: Synthetic oligonucleotide
ucgaaguccacgaagccgu

SEQ ID NO: 1886478 - RNA, 19 nt, Artificial Sequence
  Description of Artificial Sequence: Synthetic oligonucleotide
agguuugagauguauaaau

SEQ ID NO: 1886479 - RNA, 19 nt, Artificial Sequence
  Description of Artificial Sequence: Synthetic oligonucleotide
aauuuuccuugguucuguc

SEQ ID NO: 1886480 - RNA, 19 nt, Artificial Sequence
  Description of Artificial Sequence: Synthetic oligonucleotide
aagggguuggguagaaccc

SEQ ID NO: 1886481 - RNA, 19 nt, Artificial Sequence
  Description of Artificial Sequence: Synthetic oligonucleotide
aaaccucacuacuugcuga

SEQ ID NO: 1886482 - RNA, 19 nt, Artificial Sequence
  Description of Artificial Sequence: Synthetic oligonucleotide
uuggguagaaccccauuug

SEQ ID NO: 1886483 - RNA, 19 nt, Artificial Sequence
  Description of Artificial Sequence: Synthetic oligonucleotide
aacgugcccaggcuguugg

SEQ ID NO: 1886484 - RNA, 19 nt, Artificial Sequence
  Description of Artificial Sequence: Synthetic oligonucleotide
gauauggggagagagcagc

SEQ ID NO: 1886485 - RNA, 19 nt, Artificial Sequence
  Description of Artificial Sequence: Synthetic oligonucleotide
cagaaacauuggaagaagg

SEQ ID NO: 1886486 - RNA, 19 nt, Artificial Sequence
  Description of Artificial Sequence: Synthetic oligonucleotide
gaagccguagccuuugcac

SEQ ID NO: 1886487 - RNA, 19 nt, Artificial Sequence
  Description of Artificial Sequence: Synthetic oligonucleotide
uuuacaaagcaagggguca

SEQ ID NO: 1886488 - RNA, 19 nt, Artificial Sequence
  Description of Artificial Sequence: Synthetic oligonucleotide
acuagagucucgaaggauc

SEQ ID NO: 1886489 - RNA, 19 nt, Artificial Sequence
  Description of Artificial Sequence: Synthetic oligonucleotide
uguuguaagggguugggua

SEQ ID NO: 1886490 - RNA, 19 nt, Artificial Sequence
  Description of Artificial Sequence: Synthetic oligonucleotide
cuugguggagacaaucuug

SEQ ID NO: 1886491 - RNA, 19 nt, Artificial Sequence
  Description of Artificial Sequence: Synthetic oligonucleotide
uagaaccccauuuggaaga

SEQ ID NO: 1886492 - RNA, 19 nt, Artificial Sequence
  Description of Artificial Sequence: Synthetic oligonucleotide
guaagaggucccaucaugg

SEQ ID NO: 1886493 - RNA, 19 nt, Artificial Sequence
  Description of Artificial Sequence: Synthetic oligonucleotide
ucccacuagagucucgaag

SEQ ID NO: 1886494 - RNA, 19 nt, Artificial Sequence
  Description of Artificial Sequence: Synthetic oligonucleotide
gaaagaggaugguccaucc

SEQ ID NO: 1886495 - RNA, 19 nt, Artificial Sequence
  Description of Artificial Sequence: Synthetic oligonucleotide
agugccuggcugcaguccc

SEQ ID NO: 1886496 - RNA, 19 nt, Artificial Sequence
  Description of Artificial Sequence: Synthetic oligonucleotide
uugcacaaauuuuccuugg

SEQ ID NO: 1886497 - RNA, 19 nt, Artificial Sequence
  Description of Artificial Sequence: Synthetic oligonucleotide
ugccauuugggccugcaca

SEQ ID NO: 1886498 - RNA, 19 nt, Artificial Sequence
  Description of Artificial Sequence: Synthetic oligonucleotide
guagaaccccauuuggaag

SEQ ID NO: 1886499 - RNA, 19 nt, Artificial Sequence
  Description of Artificial Sequence: Synthetic oligonucleotide
gguucugucguuucuuugg

SEQ ID NO: 1886500 - RNA, 19 nt, Artificial Sequence
  Description of Artificial Sequence: Synthetic oligonucleotide
cugucgaaguccacgaagc

SEQ ID NO: 1886501 - RNA, 19 nt, Artificial Sequence
  Description of Artificial Sequence: Synthetic oligonucleotide
guugcugaguaagaggucc

SEQ ID NO: 1886502 - RNA, 19 nt, Artificial Sequence
  Description of Artificial Sequence: Synthetic oligonucleotide
ucuguggacuccauccuug

SEQ ID NO: 1886503 - RNA, 19 nt, Artificial Sequence
  Description of Artificial Sequence: Synthetic oligonucleotide
auguaagcuccuuguauag

SEQ ID NO: 1886504 - RNA, 19 nt, Artificial Sequence
  Description of Artificial Sequence: Synthetic oligonucleotide
gauguaagcuccuuguaua

SEQ ID NO: 1886505 - RNA, 19 nt, Artificial Sequence
  Description of Artificial Sequence: Synthetic oligonucleotide
ggggucauagguuagggcc

SEQ ID NO: 1886506 - RNA, 19 nt, Artificial Sequence
  Description of Artificial Sequence: Synthetic oligonucleotide
aaccugaccaaaaggcuuc

SEQ ID NO: 1886507 - RNA, 19 nt, Artificial Sequence
  Description of Artificial Sequence: Synthetic oligonucleotide
ugcuuugccauuugggccu

SEQ ID NO: 1886508 - RNA, 19 nt, Artificial Sequence
  Description of Artificial Sequence: Synthetic oligonucleotide
uccuuguauagcagcacgc

SEQ ID NO: 1886509 - RNA, 19 nt, Artificial Sequence
  Description of Artificial Sequence: Synthetic oligonucleotide
aguccacgaagccguagcc

SEQ ID NO: 1886510 - RNA, 19 nt, Artificial Sequence
  Description of Artificial Sequence: Synthetic oligonucleotide
agaaagaggaugguccauc

SEQ ID NO: 1886511 - RNA, 19 nt, Artificial Sequence
  Description of Artificial Sequence: Synthetic oligonucleotide
gauguuguaagggguuggg

SEQ ID NO: 1886512 - RNA, 19 nt, Artificial Sequence
  Description of Artificial Sequence: Synthetic oligonucleotide
aaauuuuccuugguucugu

SEQ ID NO: 1886513 - RNA, 19 nt, Artificial Sequence
  Description of Artificial Sequence: Synthetic oligonucleotide
cugaccaaaaggcuucagc

SEQ ID NO: 1886514 - RNA, 19 nt, Artificial Sequence
  Description of Artificial Sequence: Synthetic oligonucleotide
ggagacgggagauaugggg

SEQ ID NO: 1886515 - RNA, 19 nt, Artificial Sequence
  Description of Artificial Sequence: Synthetic oligonucleotide
acuggaaaggauagacccc

SEQ ID NO: 1886516 - RNA, 19 nt, Artificial Sequence
  Description of Artificial Sequence: Synthetic oligonucleotide
ugcuggucccacuagaguc

SEQ ID NO: 1886517 - RNA, 19 nt, Artificial Sequence
  Description of Artificial Sequence: Synthetic oligonucleotide
agagaaagaggauggucca

SEQ ID NO: 1886518 - RNA, 19 nt, Artificial Sequence
  Description of Artificial Sequence: Synthetic oligonucleotide
cuccuuguauagcagcacg

SEQ ID NO: 1886519 - RNA, 19 nt, Artificial Sequence
  Description of Artificial Sequence: Synthetic oligonucleotide
aagccguagccuuugcacu

SEQ ID NO: 1886520 - RNA, 19 nt, Artificial Sequence
  Description of Artificial Sequence: Synthetic oligonucleotide
ucacuacuugcugaacugg

SEQ ID NO: 1886521 - RNA, 19 nt, Artificial Sequence
  Description of Artificial Sequence: Synthetic oligonucleotide
cauagguuagggcccauac

SEQ ID NO: 1886522 - RNA, 19 nt, Artificial Sequence
  Description of Artificial Sequence: Synthetic oligonucleotide
cucaacagaaacauuggaa

SEQ ID NO: 1886523 - RNA, 19 nt, Artificial Sequence
  Description of Artificial Sequence: Synthetic oligonucleotide
cucacuacuugcugaacug

SEQ ID NO: 1886524 - RNA, 19 nt, Artificial Sequence
  Description of Artificial Sequence: Synthetic oligonucleotide
ucuuuggcccgccaucagc

SEQ ID NO: 1886525 - RNA, 19 nt, Artificial Sequence
  Description of Artificial Sequence: Synthetic oligonucleotide
aguccccgaauauacaggu

SEQ ID NO: 1886526 - RNA, 19 nt, Artificial Sequence
  Description of Artificial Sequence: Synthetic oligonucleotide
auauggcugacagagcuug

SEQ ID NO: 1886527 - RNA, 19 nt, Artificial Sequence
  Description of Artificial Sequence: Synthetic oligonucleotide
agagucucgaaggauccgg

SEQ ID NO: 1886528 - RNA, 19 nt, Artificial Sequence
  Description of Artificial Sequence: Synthetic oligonucleotide
cccacuagagucucgaagg

SEQ ID NO: 1886529 - RNA, 19 nt, Artificial Sequence
  Description of Artificial Sequence: Synthetic oligonucleotide
cuuguauagcagcacgcug

SEQ ID NO: 1886530 - RNA, 19 nt, Artificial Sequence
  Description of Artificial Sequence: Synthetic oligonucleotide
cacaccacuggcuuuucag

SEQ ID NO: 1886531 - RNA, 19 nt, Artificial Sequence
  Description of Artificial Sequence: Synthetic oligonucleotide
gguuuugcucagcuggucg

SEQ ID NO: 1886532 - RNA, 19 nt, Artificial Sequence
  Description of Artificial Sequence: Synthetic oligonucleotide
uauacagguugguuuugcu

SEQ ID NO: 1886533 - RNA, 19 nt, Artificial Sequence
  Description of Artificial Sequence: Synthetic oligonucleotide
gacccaguugcugaguaag

SEQ ID NO: 1886534 - RNA, 19 nt, Artificial Sequence
  Description of Artificial Sequence: Synthetic oligonucleotide
uaagaggucccaucaugga

SEQ ID NO: 1886535 - RNA, 19 nt, Artificial Sequence
  Description of Artificial Sequence: Synthetic oligonucleotide
agaaccgagcccugauagg

SEQ ID NO: 1886536 - RNA, 19 nt, Artificial Sequence
  Description of Artificial Sequence: Synthetic oligonucleotide
guuggcaugaacgugccca

SEQ ID NO: 1886537 - RNA, 19 nt, Artificial Sequence
  Description of Artificial Sequence: Synthetic oligonucleotide
agacgggagauauggggag

SEQ ID NO: 1886538 - RNA, 19 nt, Artificial Sequence
  Description of Artificial Sequence: Synthetic oligonucleotide
gacagugggagguuugaga

SEQ ID NO: 1886539 - RNA, 19 nt, Artificial Sequence
  Description of Artificial Sequence: Synthetic oligonucleotide
auuggaagaaggcccggga

SEQ ID NO: 1886540 - RNA, 19 nt, Artificial Sequence
  Description of Artificial Sequence: Synthetic oligonucleotide
gagcuugacaagguccugg

SEQ ID NO: 1886541 - RNA, 19 nt, Artificial Sequence
  Description of Artificial Sequence: Synthetic oligonucleotide
gaagacacaggagacggga

SEQ ID NO: 1886542 - RNA, 19 nt, Artificial Sequence
  Description of Artificial Sequence: Synthetic oligonucleotide
cauuuggaagagcugugug

SEQ ID NO: 1886543 - RNA, 19 nt, Artificial Sequence
  Description of Artificial Sequence: Synthetic oligonucleotide
uguuggagugacaggugac

SEQ ID NO: 1886544 - RNA, 19 nt, Artificial Sequence
  Description of Artificial Sequence: Synthetic oligonucleotide
aaccucacuacuugcugaa

SEQ ID NO: 1886545 - RNA, 19 nt, Artificial Sequence
  Description of Artificial Sequence: Synthetic oligonucleotide
cauuccugggccaggcccg

SEQ ID NO: 1886546 - RNA, 19 nt, Artificial Sequence
  Description of Artificial Sequence: Synthetic oligonucleotide
cagauggugcuguuacucc

SEQ ID NO: 1886547 - RNA, 19 nt, Artificial Sequence
  Description of Artificial Sequence: Synthetic oligonucleotide
cugugggcgauguuguaag

SEQ ID NO: 1886548 - RNA, 19 nt, Artificial Sequence
  Description of Artificial Sequence: Synthetic oligonucleotide
ggcgucuuaauauacuuuc

SEQ ID NO: 1886549 - RNA, 19 nt, Artificial Sequence
  Description of Artificial Sequence: Synthetic oligonucleotide
agggguuggguagaacccc

SEQ ID NO: 1886550 - RNA, 19 nt, Artificial Sequence
  Description of Artificial Sequence: Synthetic oligonucleotide
uggugcuguuacuccaggg

SEQ ID NO: 1886551 - RNA, 19 nt, Artificial Sequence
  Description of Artificial Sequence: Synthetic oligonucleotide
auaaccugaccaaaaggcu

SEQ ID NO: 1886552 - RNA, 19 nt, Artificial Sequence
  Description of Artificial Sequence: Synthetic oligonucleotide
uuggcaugaacgugcccag

SEQ ID NO: 1886553 - RNA, 19 nt, Artificial Sequence
  Description of Artificial Sequence: Synthetic oligonucleotide
agauggugcuguuacucca

SEQ ID NO: 1886554 - RNA, 19 nt, Artificial Sequence
  Description of Artificial Sequence: Synthetic oligonucleotide
caugaacgugcccaggcug

SEQ ID NO: 1886555 - RNA, 19 nt, Artificial Sequence
  Description of Artificial Sequence: Synthetic oligonucleotide
auggucugagggugucucc

SEQ ID NO: 1886556 - RNA, 19 nt, Artificial Sequence
  Description of Artificial Sequence: Synthetic oligonucleotide
uuggagugacaggugaccc

SEQ ID NO: 1886557 - RNA, 19 nt, Artificial Sequence
  Description of Artificial Sequence: Synthetic oligonucleotide
caaagcaaggggucagaug

SEQ ID NO: 1886558 - RNA, 19 nt, Artificial Sequence
  Description of Artificial Sequence: Synthetic oligonucleotide
caguccccgaauauacagg

SEQ ID NO: 1886559 - RNA, 19 nt, Artificial Sequence
  Description of Artificial Sequence: Synthetic oligonucleotide
cugaguaagaggucccauc

SEQ ID NO: 1886560 - RNA, 19 nt, Artificial Sequence
  Description of Artificial Sequence: Synthetic oligonucleotide
ggagguuugagauguauaa

SEQ ID NO: 1886561 - RNA, 19 nt, Artificial Sequence
  Description of Artificial Sequence: Synthetic oligonucleotide
gucucgaaggauccgggug

SEQ ID NO: 1886562 - RNA, 19 nt, Artificial Sequence
  Description of Artificial Sequence: Synthetic oligonucleotide
guucugucguuucuuuggc

SEQ ID NO: 1886563 - RNA, 19 nt, Artificial Sequence
  Description of Artificial Sequence: Synthetic oligonucleotide
ggucccaucauggaggcag

SEQ ID NO: 1886564 - RNA, 19 nt, Artificial Sequence
  Description of Artificial Sequence: Synthetic oligonucleotide
uugcugaguaagagguccc

SEQ ID NO: 1886565 - RNA, 19 nt, Artificial Sequence
  Description of Artificial Sequence: Synthetic oligonucleotide
auggggagagagcagccug

SEQ ID NO: 1886566 - RNA, 19 nt, Artificial Sequence
  Description of Artificial Sequence: Synthetic oligonucleotide
gauggugcuguuacuccag

SEQ ID NO: 1886567 - RNA, 19 nt, Artificial Sequence
  Description of Artificial Sequence: Synthetic oligonucleotide
aggcccguccguuuugcac

SEQ ID NO: 1886568 - RNA, 19 nt, Artificial Sequence
  Description of Artificial Sequence: Synthetic oligonucleotide
guuggagugacaggugacc

SEQ ID NO: 1886569 - RNA, 19 nt, Artificial Sequence
  Description of Artificial Sequence: Synthetic oligonucleotide
uccauuaaagugggugaug

SEQ ID NO: 1886570 - RNA, 19 nt, Artificial Sequence
  Description of Artificial Sequence: Synthetic oligonucleotide
uggcugacagagcuugaca

SEQ ID NO: 1886571 - RNA, 19 nt, Artificial Sequence
  Description of Artificial Sequence: Synthetic oligonucleotide
uucugucguuucuuuggcc

SEQ ID NO: 1886572 - RNA, 19 nt, Artificial Sequence
  Description of Artificial Sequence: Synthetic oligonucleotide
aagcacccugcugugggcg

SEQ ID NO: 1886573 - RNA, 19 nt, Artificial Sequence
  Description of Artificial Sequence: Synthetic oligonucleotide
uggaagagcuguguggggu

SEQ ID NO: 1886574 - RNA, 19 nt, Artificial Sequence
  Description of Artificial Sequence: Synthetic oligonucleotide
uguaagaaccgagcccuga

SEQ ID NO: 1886575 - RNA, 19 nt, Artificial Sequence
  Description of Artificial Sequence: Synthetic oligonucleotide
acagguugguuuugcucag

SEQ ID NO: 1886576 - RNA, 19 nt, Artificial Sequence
  Description of Artificial Sequence: Synthetic oligonucleotide
gucgguagugccuggcugc

SEQ ID NO: 1886577 - RNA, 19 nt, Artificial Sequence
  Description of Artificial Sequence: Synthetic oligonucleotide
ggucagauggugcuguuac

SEQ ID NO: 1886578 - RNA, 19 nt, Artificial Sequence
  Description of Artificial Sequence: Synthetic oligonucleotide
gaaccgagcccugauagga

SEQ ID NO: 1886579 - RNA, 19 nt, Artificial Sequence
  Description of Artificial Sequence: Synthetic oligonucleotide
accgagcccugauaggaag

SEQ ID NO: 1886580 - RNA, 19 nt, Artificial Sequence
  Description of Artificial Sequence: Synthetic oligonucleotide
ccugauaggaagacacagg

SEQ ID NO: 1886581 - RNA, 19 nt, Artificial Sequence
  Description of Artificial Sequence: Synthetic oligonucleotide
ggcuuuucagugcaguuac

SEQ ID NO: 1886582 - RNA, 19 nt, Artificial Sequence
  Description of Artificial Sequence: Synthetic oligonucleotide
uaagaaccgagcccugaua

SEQ ID NO: 1886583 - RNA, 19 nt, Artificial Sequence
  Description of Artificial Sequence: Synthetic oligonucleotide
uuugggccugcacaccacu

SEQ ID NO: 1886584 - RNA, 19 nt, Artificial Sequence
  Description of Artificial Sequence: Synthetic oligonucleotide
ugguucugucguuucuuug

SEQ ID NO: 1886585 - RNA, 19 nt, Artificial Sequence
  Description of Artificial Sequence: Synthetic oligonucleotide
uccacgaagccguagccuu

SEQ ID NO: 1886586 - RNA, 19 nt, Artificial Sequence
  Description of Artificial Sequence: Synthetic oligonucleotide
auggugcuguuacuccagg

SEQ ID NO: 1886587 - RNA, 19 nt, Artificial Sequence
  Description of Artificial Sequence: Synthetic oligonucleotide
gccaucagcaaauuuacaa

SEQ ID NO: 1886588 - RNA, 19 nt, Artificial Sequence
  Description of Artificial Sequence: Synthetic oligonucleotide
guuagggcccauaccaccc

SEQ ID NO: 1886589 - RNA, 19 nt, Artificial Sequence
  Description of Artificial Sequence: Synthetic oligonucleotide
gugggcgauguuguaaggg

SEQ ID NO: 1886590 - RNA, 19 nt, Artificial Sequence
  Description of Artificial Sequence: Synthetic oligonucleotide
gcaguccccgaauauacag

SEQ ID NO: 1886591 - RNA, 19 nt, Artificial Sequence
  Description of Artificial Sequence: Synthetic oligonucleotide
uggagugacaggugaccca

SEQ ID NO: 1886592 - RNA, 19 nt, Artificial Sequence
  Description of Artificial Sequence: Synthetic oligonucleotide
uugcugaacuggaaaggau

SEQ ID NO: 1886593 - RNA, 19 nt, Artificial Sequence
  Description of Artificial Sequence: Synthetic oligonucleotide
uguggacuccauccuugca

SEQ ID NO: 1886594 - RNA, 19 nt, Artificial Sequence
  Description of Artificial Sequence: Synthetic oligonucleotide
cauuggaagaaggcccggg

SEQ ID NO: 1886595 - RNA, 19 nt, Artificial Sequence
  Description of Artificial Sequence: Synthetic oligonucleotide
gagacgggagauaugggga

SEQ ID NO: 1886596 - RNA, 19 nt, Artificial Sequence
  Description of Artificial Sequence: Synthetic oligonucleotide
uagagucucgaaggauccg

SEQ ID NO: 1886597 - RNA, 19 nt, Artificial Sequence
  Description of Artificial Sequence: Synthetic oligonucleotide
caguugcugaguaagaggu

SEQ ID NO: 1886598 - RNA, 19 nt, Artificial Sequence
  Description of Artificial Sequence: Synthetic oligonucleotide
ugccgaagggcugucgaag

SEQ ID NO: 1886599 - RNA, 19 nt, Artificial Sequence
  Description of Artificial Sequence: Synthetic oligonucleotide
agcuugacaagguccuggu

SEQ ID NO: 1886600 - RNA, 19 nt, Artificial Sequence
  Description of Artificial Sequence: Synthetic oligonucleotide
uuagggcccauaccaccca

SEQ ID NO: 1886601 - RNA, 19 nt, Artificial Sequence
  Description of Artificial Sequence: Synthetic oligonucleotide
gcuguuggcaugaacgugc

SEQ ID NO: 1886602 - RNA, 19 nt, Artificial Sequence
  Description of Artificial Sequence: Synthetic oligonucleotide
uuccauuaaagugggugau

SEQ ID NO: 1886603 - RNA, 19 nt, Artificial Sequence
  Description of Artificial Sequence: Synthetic oligonucleotide
uuuugcucagcuggucgug

SEQ ID NO: 1886604 - RNA, 19 nt, Artificial Sequence
  Description of Artificial Sequence: Synthetic oligonucleotide
cuuuggcccgccaucagca

SEQ ID NO: 1886605 - RNA, 19 nt, Artificial Sequence
  Description of Artificial Sequence: Synthetic oligonucleotide
ccugguguaagaaccgagc

SEQ ID NO: 1886606 - RNA, 19 nt, Artificial Sequence
  Description of Artificial Sequence: Synthetic oligonucleotide
ugauucugcuggccacugc

SEQ ID NO: 1886607 - RNA, 19 nt, Artificial Sequence
  Description of Artificial Sequence: Synthetic oligonucleotide
uucuuuggcccgccaucag

SEQ ID NO: 1886608 - RNA, 19 nt, Artificial Sequence
  Description of Artificial Sequence: Synthetic oligonucleotide
ccguuuugcacaaauuuuc

SEQ ID NO: 1886609 - RNA, 19 nt, Artificial Sequence
  Description of Artificial Sequence: Synthetic oligonucleotide
guauaaauuuguagggucu

SEQ ID NO: 1886610 - RNA, 19 nt, Artificial Sequence
  Description of Artificial Sequence: Synthetic oligonucleotide
gguuagggcccauaccacc

SEQ ID NO: 1886611 - RNA, 19 nt, Artificial Sequence
  Description of Artificial Sequence: Synthetic oligonucleotide
acgcuguuggcaugaacgu

SEQ ID NO: 1886612 - RNA, 19 nt, Artificial Sequence
  Description of Artificial Sequence: Synthetic oligonucleotide
ugguggagacaaucuugcc

SEQ ID NO: 1886613 - RNA, 19 nt, Artificial Sequence
  Description of Artificial Sequence: Synthetic oligonucleotide
cuguuggcaugaacgugcc

SEQ ID NO: 1886614 - RNA, 19 nt, Artificial Sequence
  Description of Artificial Sequence: Synthetic oligonucleotide
cuggaaaggauagacccca

SEQ ID NO: 1886615 - RNA, 19 nt, Artificial Sequence
  Description of Artificial Sequence: Synthetic oligonucleotide
caguuacagccuucugugc

SEQ ID NO: 1886616 - RNA, 19 nt, Artificial Sequence
  Description of Artificial Sequence: Synthetic oligonucleotide
gaugguccaucccuggugu

SEQ ID NO: 1886617 - RNA, 19 nt, Artificial Sequence
  Description of Artificial Sequence: Synthetic oligonucleotide
auagaccccauggucugag

SEQ ID NO: 1886618 - RNA, 19 nt, Artificial Sequence
  Description of Artificial Sequence: Synthetic oligonucleotide
cuugcaaagccgaccccuc

SEQ ID NO: 1886619 - RNA, 19 nt, Artificial Sequence
  Description of Artificial Sequence: Synthetic oligonucleotide
gucuuaauauacuuuccau

SEQ ID NO: 1886620 - RNA, 19 nt, Artificial Sequence
  Description of Artificial Sequence: Synthetic oligonucleotide
cuguggacuccauccuugc

SEQ ID NO: 1886621 - RNA, 19 nt, Artificial Sequence
  Description of Artificial Sequence: Synthetic oligonucleotide
cuacuugcugaacuggaaa

SEQ ID NO: 1886622 - RNA, 19 nt, Artificial Sequence
  Description of Artificial Sequence: Synthetic oligonucleotide
uugggccugcacaccacug

SEQ ID NO: 1886623 - RNA, 19 nt, Artificial Sequence
  Description of Artificial Sequence: Synthetic oligonucleotide
uauggggagagagcagccu

SEQ ID NO: 1886624 - RNA, 19 nt, Artificial Sequence
  Description of Artificial Sequence: Synthetic oligonucleotide
uacaaagcaaggggucaga

SEQ ID NO: 1886625 - RNA, 19 nt, Artificial Sequence
  Description of Artificial Sequence: Synthetic oligonucleotide
ucagugcaguuacagccuu

SEQ ID NO: 1886626 - RNA, 19 nt, Artificial Sequence
  Description of Artificial Sequence: Synthetic oligonucleotide
aagguccuggucgguagug

SEQ ID NO: 1886627 - RNA, 19 nt, Artificial Sequence
  Description of Artificial Sequence: Synthetic oligonucleotide
uguuggcaugaacgugccc

SEQ ID NO: 1886628 - RNA, 19 nt, Artificial Sequence
  Description of Artificial Sequence: Synthetic oligonucleotide
ggagugacaggugacccag

SEQ ID NO: 1886629 - RNA, 19 nt, Artificial Sequence
  Description of Artificial Sequence: Synthetic oligonucleotide
cuguuggagugacagguga

SEQ ID NO: 1886630 - RNA, 19 nt, Artificial Sequence
  Description of Artificial Sequence: Synthetic oligonucleotide
ggaaaggauagaccccaug

SEQ ID NO: 1886631 - RNA, 19 nt, Artificial Sequence
  Description of Artificial Sequence: Synthetic oligonucleotide
uuguaagggguuggguaga

SEQ ID NO: 1886632 - RNA, 19 nt, Artificial Sequence
  Description of Artificial Sequence: Synthetic oligonucleotide
uccuggucgguagugccug

SEQ ID NO: 1886633 - RNA, 19 nt, Artificial Sequence
  Description of Artificial Sequence: Synthetic oligonucleotide
agguuagggcccauaccac

SEQ ID NO: 1886634 - RNA, 19 nt, Artificial Sequence
  Description of Artificial Sequence: Synthetic oligonucleotide
gaaggauccggguggagau

SEQ ID NO: 1886635 - RNA, 19 nt, Artificial Sequence
  Description of Artificial Sequence: Synthetic oligonucleotide
acgggagauauggggagag

SEQ ID NO: 1886636 - RNA, 19 nt, Artificial Sequence
  Description of Artificial Sequence: Synthetic oligonucleotide
uccauuccugggccaggcc

SEQ ID NO: 1886637 - RNA, 19 nt, Artificial Sequence
  Description of Artificial Sequence: Synthetic oligonucleotide
agaaccccauuuggaagag

SEQ ID NO: 1886638 - RNA, 19 nt, Artificial Sequence
  Description of Artificial Sequence: Synthetic oligonucleotide
uuugccauuugggccugca

SEQ ID NO: 1886639 - RNA, 19 nt, Artificial Sequence
  Description of Artificial Sequence: Synthetic oligonucleotide
aaggggucagauggugcug

SEQ ID NO: 1886640 - RNA, 19 nt, Artificial Sequence
  Description of Artificial Sequence: Synthetic oligonucleotide
uggucgguagugccuggcu

SEQ ID NO: 1886641 - RNA, 19 nt, Artificial Sequence
  Description of Artificial Sequence: Synthetic oligonucleotide
agauauggggagagagcag

SEQ ID NO: 1886642 - RNA, 19 nt, Artificial Sequence
  Description of Artificial Sequence: Synthetic oligonucleotide
cugagcaagcacccugcug

SEQ ID NO: 1886643 - RNA, 19 nt, Artificial Sequence
  Description of Artificial Sequence: Synthetic oligonucleotide
uggcccgccaucagcaaau

SEQ ID NO: 1886644 - RNA, 19 nt, Artificial Sequence
  Description of Artificial Sequence: Synthetic oligonucleotide
aagaaggcccgggagggua

SEQ ID NO: 1886645 - RNA, 19 nt, Artificial Sequence
  Description of Artificial Sequence: Synthetic oligonucleotide
auuugggccugcacaccac

SEQ ID NO: 1886646 - RNA, 19 nt, Artificial Sequence
  Description of Artificial Sequence: Synthetic oligonucleotide
agcuccuuguauagcagca

SEQ ID NO: 1886647 - RNA, 19 nt, Artificial Sequence
  Description of Artificial Sequence: Synthetic oligonucleotide
acccaugucuccauuccug

SEQ ID NO: 1886648 - RNA, 19 nt, Artificial Sequence
  Description of Artificial Sequence: Synthetic oligonucleotide
guuggguagaaccccauuu

SEQ ID NO: 1886649 - RNA, 19 nt, Artificial Sequence
  Description of Artificial Sequence: Synthetic oligonucleotide
uuggcccgccaucagcaaa

SEQ ID NO: 1886650 - RNA, 19 nt, Artificial Sequence
  Description of Artificial Sequence: Synthetic oligonucleotide
caagcacccugcugugggc

SEQ ID NO: 1886651 - RNA, 19 nt, Artificial Sequence
  Description of Artificial Sequence: Synthetic oligonucleotide
gaagggcugucgaagucca

SEQ ID NO: 1886652 - RNA, 19 nt, Artificial Sequence
  Description of Artificial Sequence: Synthetic oligonucleotide
uggucccacuagagucucg

SEQ ID NO: 1886653 - RNA, 19 nt, Artificial Sequence
  Description of Artificial Sequence: Synthetic oligonucleotide
ggagagaaagaggaugguc

SEQ ID NO: 1886654 - RNA, 19 nt, Artificial Sequence
  Description of Artificial Sequence: Synthetic oligonucleotide
ugucuccauuccugggcca

SEQ ID NO: 1886655 - RNA, 19 nt, Artificial Sequence
  Description of Artificial Sequence: Synthetic oligonucleotide
ccccgaauauacagguugg

SEQ ID NO: 1886656 - RNA, 19 nt, Artificial Sequence
  Description of Artificial Sequence: Synthetic oligonucleotide
augaacgugcccaggcugu

SEQ ID NO: 1886657 - RNA, 19 nt, Artificial Sequence
  Description of Artificial Sequence: Synthetic oligonucleotide
ugacccaguugcugaguaa

SEQ ID NO: 1886658 - RNA, 19 nt, Artificial Sequence
  Description of Artificial Sequence: Synthetic oligonucleotide
gguugguuuugcucagcug

SEQ ID NO: 1886659 - RNA, 19 nt, Artificial Sequence
  Description of Artificial Sequence: Synthetic oligonucleotide
ccauuccugggccaggccc

SEQ ID NO: 1886660 - RNA, 19 nt, Artificial Sequence
  Description of Artificial Sequence: Synthetic oligonucleotide
uggcaugaacgugcccagg

SEQ ID NO: 1886661 - RNA, 19 nt, Artificial Sequence
  Description of Artificial Sequence: Synthetic oligonucleotide
acuacuugcugaacuggaa

SEQ ID NO: 1886662 - RNA, 19 nt, Artificial Sequence
  Description of Artificial Sequence: Synthetic oligonucleotide
auguuguaagggguugggu

SEQ ID NO: 1886663 - RNA, 19 nt, Artificial Sequence
  Description of Artificial Sequence: Synthetic oligonucleotide
accucacuacuugcugaac

SEQ ID NO: 1886664 - RNA, 19 nt, Artificial Sequence
  Description of Artificial Sequence: Synthetic oligonucleotide
agaaggcccgggaggguac

SEQ ID NO: 1886665 - RNA, 19 nt, Artificial Sequence
  Description of Artificial Sequence: Synthetic oligonucleotide
cccugauaggaagacacag

SEQ ID NO: 1886666 - RNA, 19 nt, Artificial Sequence
  Description of Artificial Sequence: Synthetic oligonucleotide
ugguccaucccugguguaa

SEQ ID NO: 1886667 - RNA, 19 nt, Artificial Sequence
  Description of Artificial Sequence: Synthetic oligonucleotide
uagugccuggcugcagucc

SEQ ID NO: 1886668 - RNA, 19 nt, Artificial Sequence
  Description of Artificial Sequence: Synthetic oligonucleotide
gagggugucuccacugcca

SEQ ID NO: 1886669 - RNA, 19 nt, Artificial Sequence
  Description of Artificial Sequence: Synthetic oligonucleotide
guuuugcucagcuggucgu

SEQ ID NO: 1886670 - RNA, 19 nt, Artificial Sequence
  Description of Artificial Sequence: Synthetic oligonucleotide
ggucgguagugccuggcug

SEQ ID NO: 1886671 - RNA, 19 nt, Artificial Sequence
  Description of Artificial Sequence: Synthetic oligonucleotide
ucccugguguaagaaccga

SEQ ID NO: 1886672 - RNA, 19 nt, Artificial Sequence
  Description of Artificial Sequence: Synthetic oligonucleotide
ccgccaucagcaaauuuac

SEQ ID NO: 1886673 - RNA, 19 nt, Artificial Sequence
  Description of Artificial Sequence: Synthetic oligonucleotide
aggagacgggagauauggg

SEQ ID NO: 1886674 - RNA, 19 nt, Artificial Sequence
  Description of Artificial Sequence: Synthetic oligonucleotide
caaggggucagauggugcu

SEQ ID NO: 1886675 - RNA, 19 nt, Artificial Sequence
  Description of Artificial Sequence: Synthetic oligonucleotide
ccauuaaagugggugauga

SEQ ID NO: 1886676 - RNA, 19 nt, Artificial Sequence
  Description of Artificial Sequence: Synthetic oligonucleotide
gccacugcucuccucaaca

SEQ ID NO: 1886677 - RNA, 19 nt, Artificial Sequence
  Description of Artificial Sequence: Synthetic oligonucleotide
ucguuucuuuggcccgcca

SEQ ID NO: 1886678 - RNA, 19 nt, Artificial Sequence
  Description of Artificial Sequence: Synthetic oligonucleotide
ggauguaagcuccuuguau

SEQ ID NO: 1886679 - RNA, 19 nt, Artificial Sequence
  Description of Artificial Sequence: Synthetic oligonucleotide
guagugccuggcugcaguc

SEQ ID NO: 1886680 - RNA, 19 nt, Artificial Sequence
  Description of Artificial Sequence: Synthetic oligonucleotide
ugguuuugcucagcugguc

SEQ ID NO: 1886681 - RNA, 19 nt, Artificial Sequence
  Description of Artificial Sequence: Synthetic oligonucleotide
gaccccauggucugagggu

SEQ ID NO: 1886682 - RNA, 19 nt, Artificial Sequence
  Description of Artificial Sequence: Synthetic oligonucleotide
ccaugucuccauuccuggg

SEQ ID NO: 1886683 - RNA, 19 nt, Artificial Sequence
  Description of Artificial Sequence: Synthetic oligonucleotide
ucuugccauauggcugaca

SEQ ID NO: 1886684 - RNA, 19 nt, Artificial Sequence
  Description of Artificial Sequence: Synthetic oligonucleotide
ucauagguuagggcccaua

SEQ ID NO: 1886685 - RNA, 19 nt, Artificial Sequence
  Description of Artificial Sequence: Synthetic oligonucleotide
gcgucuuaauauacuuucc

SEQ ID NO: 1886686 - RNA, 19 nt, Artificial Sequence
  Description of Artificial Sequence: Synthetic oligonucleotide
ggaagacacaggagacggg

SEQ ID NO: 1886687 - RNA, 19 nt, Artificial Sequence
  Description of Artificial Sequence: Synthetic oligonucleotide
ucgguagugccuggcugca

SEQ ID NO: 1886688 - RNA, 19 nt, Artificial Sequence
  Description of Artificial Sequence: Synthetic oligonucleotide
gaacgugcccaggcuguug

SEQ ID NO: 1886689 - RNA, 19 nt, Artificial Sequence
  Description of Artificial Sequence: Synthetic oligonucleotide
ggggauguaagcuccuugu

SEQ ID NO: 1886690 - RNA, 19 nt, Artificial Sequence
  Description of Artificial Sequence: Synthetic oligonucleotide
guaagaaccgagcccugau

SEQ ID NO: 1886691 - RNA, 19 nt, Artificial Sequence
  Description of Artificial Sequence: Synthetic oligonucleotide
uagggcccauaccacccau

SEQ ID NO: 1886692 - RNA, 19 nt, Artificial Sequence
  Description of Artificial Sequence: Synthetic oligonucleotide
ugcugccgaagggcugucg

SEQ ID NO: 1886693 - RNA, 19 nt, Artificial Sequence
  Description of Artificial Sequence: Synthetic oligonucleotide
cugugcugccgaagggcug

SEQ ID NO: 1886694 - RNA, 19 nt, Artificial Sequence
  Description of Artificial Sequence: Synthetic oligonucleotide
cccaguugcugaguaagag

SEQ ID NO: 1886695 - RNA, 19 nt, Artificial Sequence
  Description of Artificial Sequence: Synthetic oligonucleotide
ggcccguccguuuugcaca

SEQ ID NO: 1886696 - RNA, 19 nt, Artificial Sequence
  Description of Artificial Sequence: Synthetic oligonucleotide
gauagaccccauggucuga

SEQ ID NO: 1886697 - RNA, 19 nt, Artificial Sequence
  Description of Artificial Sequence: Synthetic oligonucleotide
gucccaucauggaggcagg

SEQ ID NO: 1886698 - RNA, 19 nt, Artificial Sequence
  Description of Artificial Sequence: Synthetic oligonucleotide
aaccgagcccugauaggaa

SEQ ID NO: 1886699 - RNA, 19 nt, Artificial Sequence
  Description of Artificial Sequence: Synthetic oligonucleotide
cccgccaucagcaaauuua

SEQ ID NO: 1886700 - RNA, 19 nt, Artificial Sequence
  Description of Artificial Sequence: Synthetic oligonucleotide
guauagcagcacgcuguug

SEQ ID NO: 1886701 - RNA, 19 nt, Artificial Sequence
  Description of Artificial Sequence: Synthetic oligonucleotide
uggucuuguccaggauggc

SEQ ID NO: 1886702 - RNA, 19 nt, Artificial Sequence
  Description of Artificial Sequence: Synthetic oligonucleotide
gugacccaguugcugagua

SEQ ID NO: 1886703 - RNA, 19 nt, Artificial Sequence
  Description of Artificial Sequence: Synthetic oligonucleotide
ucgaaggauccggguggag

SEQ ID NO: 1886704 - RNA, 19 nt, Artificial Sequence
  Description of Artificial Sequence: Synthetic oligonucleotide
gacgggagauauggggaga

SEQ ID NO: 1886705 - RNA, 19 nt, Artificial Sequence
  Description of Artificial Sequence: Synthetic oligonucleotide
cccauuuggaagagcugug

SEQ ID NO: 1886706 - RNA, 19 nt, Artificial Sequence
  Description of Artificial Sequence: Synthetic oligonucleotide
cccugguguaagaaccgag

SEQ ID NO: 1886707 - RNA, 19 nt, Artificial Sequence
  Description of Artificial Sequence: Synthetic oligonucleotide
gacaagguccuggucggua

SEQ ID NO: 1886708 - RNA, 19 nt, Artificial Sequence
  Description of Artificial Sequence: Synthetic oligonucleotide
cagugcaguuacagccuuc

SEQ ID NO: 1886709 - RNA, 19 nt, Artificial Sequence
  Description of Artificial Sequence: Synthetic oligonucleotide
ggguggagauaaccugacc

SEQ ID NO: 1886710 - RNA, 19 nt, Artificial Sequence
  Description of Artificial Sequence: Synthetic oligonucleotide
cuggucgguagugccuggc

SEQ ID NO: 1886711 - RNA, 19 nt, Artificial Sequence
  Description of Artificial Sequence: Synthetic oligonucleotide
aagagcuguguggggucau

SEQ ID NO: 1886712 - RNA, 19 nt, Artificial Sequence
  Description of Artificial Sequence: Synthetic oligonucleotide
accccauuuggaagagcug

SEQ ID NO: 1886713 - RNA, 19 nt, Artificial Sequence
  Description of Artificial Sequence: Synthetic oligonucleotide
guaagggguuggguagaac

SEQ ID NO: 1886714 - RNA, 19 nt, Artificial Sequence
  Description of Artificial Sequence: Synthetic oligonucleotide
cagguugguuuugcucagc

SEQ ID NO: 1886715 - RNA, 19 nt, Artificial Sequence
  Description of Artificial Sequence: Synthetic oligonucleotide
ccucaacagaaacauugga

SEQ ID NO: 1886716 - RNA, 19 nt, Artificial Sequence
  Description of Artificial Sequence: Synthetic oligonucleotide
ggcccgggaggguacuggg

SEQ ID NO: 1886717 - RNA, 19 nt, Artificial Sequence
  Description of Artificial Sequence: Synthetic oligonucleotide
ccacugcucuccucaacag

SEQ ID NO: 1886718 - RNA, 19 nt, Artificial Sequence
  Description of Artificial Sequence: Synthetic oligonucleotide
gcgauguuguaagggguug

SEQ ID NO: 1886719 - RNA, 19 nt, Artificial Sequence
  Description of Artificial Sequence: Synthetic oligonucleotide
gucguuucuuuggcccgcc

SEQ ID NO: 1886720 - RNA, 19 nt, Artificial Sequence
  Description of Artificial Sequence: Synthetic oligonucleotide
gguuugagauguauaaauu

SEQ ID NO: 1886721 - RNA, 19 nt, Artificial Sequence
  Description of Artificial Sequence: Synthetic oligonucleotide
aaggcccgggaggguacug

SEQ ID NO: 1886722 - RNA, 19 nt, Artificial Sequence
  Description of Artificial Sequence: Synthetic oligonucleotide
ugacaagguccuggucggu

SEQ ID NO: 1886723 - RNA, 19 nt, Artificial Sequence
  Description of Artificial Sequence: Synthetic oligonucleotide
cgaauauacagguugguuu

SEQ ID NO: 1886724 - RNA, 19 nt, Artificial Sequence
  Description of Artificial Sequence: Synthetic oligonucleotide
accugaccaaaaggcuuca

SEQ ID NO: 1886725 - RNA, 19 nt, Artificial Sequence
  Description of Artificial Sequence: Synthetic oligonucleotide
ugcugugggcgauguugua

SEQ ID NO: 1886726 - RNA, 19 nt, Artificial Sequence
  Description of Artificial Sequence: Synthetic oligonucleotide
gguagugccuggcugcagu

SEQ ID NO: 1886727 - RNA, 19 nt, Artificial Sequence
  Description of Artificial Sequence: Synthetic oligonucleotide
cccauaccacccaugucuc

SEQ ID NO: 1886728 - RNA, 19 nt, Artificial Sequence
  Description of Artificial Sequence: Synthetic oligonucleotide
acccaguugcugaguaaga

SEQ ID NO: 1886729 - RNA, 19 nt, Artificial Sequence
  Description of Artificial Sequence: Synthetic oligonucleotide
ggucccacuagagucucga

SEQ ID NO: 1886730 - RNA, 19 nt, Artificial Sequence
  Description of Artificial Sequence: Synthetic oligonucleotide
gcuguuggagugacaggug

SEQ ID NO: 1886731 - RNA, 19 nt, Artificial Sequence
  Description of Artificial Sequence: Synthetic oligonucleotide
gcugccgaagggcugucga

SEQ ID NO: 1886732 - RNA, 19 nt, Artificial Sequence
  Description of Artificial Sequence: Synthetic oligonucleotide
gggagagagcagccugagc

SEQ ID NO: 1886733 - RNA, 19 nt, Artificial Sequence
  Description of Artificial Sequence: Synthetic oligonucleotide
guccaucccugguguaaga

SEQ ID NO: 1886734 - RNA, 19 nt, Artificial Sequence
  Description of Artificial Sequence: Synthetic oligonucleotide
cuggucccacuagagucuc

SEQ ID NO: 1886735 - RNA, 19 nt, Artificial Sequence
  Description of Artificial Sequence: Synthetic oligonucleotide
ccauaccacccaugucucc

SEQ ID NO: 1886736 - RNA, 19 nt, Artificial Sequence
  Description of Artificial Sequence: Synthetic oligonucleotide
gucagauggugcuguuacu

SEQ ID NO: 1886737 - RNA, 19 nt, Artificial Sequence
  Description of Artificial Sequence: Synthetic oligonucleotide
gggauguaagcuccuugua

SEQ ID NO: 1886738 - RNA, 19 nt, Artificial Sequence
  Description of Artificial Sequence: Synthetic oligonucleotide
ggccuugguggagacaauc

SEQ ID NO: 1886739 - RNA, 19 nt, Artificial Sequence
  Description of Artificial Sequence: Synthetic oligonucleotide
cugcucuccucaacagaaa

SEQ ID NO: 1886740 - RNA, 19 nt, Artificial Sequence
  Description of Artificial Sequence: Synthetic oligonucleotide
ggucauagguuagggccca

SEQ ID NO: 1886741 - RNA, 19 nt, Artificial Sequence
  Description of Artificial Sequence: Synthetic oligonucleotide
cuguguggggucauagguu

SEQ ID NO: 1886742 - RNA, 19 nt, Artificial Sequence
  Description of Artificial Sequence: Synthetic oligonucleotide
ggauggccuugguggagac

SEQ ID NO: 1886743 - RNA, 19 nt, Artificial Sequence
  Description of Artificial Sequence: Synthetic oligonucleotide
ugggccaggcccguccguu

SEQ ID NO: 1886744 - RNA, 19 nt, Artificial Sequence
  Description of Artificial Sequence: Synthetic oligonucleotide
gggagguuugagauguaua

SEQ ID NO: 1886745 - RNA, 19 nt, Artificial Sequence
  Description of Artificial Sequence: Synthetic oligonucleotide
cucgaaggauccgggugga

SEQ ID NO: 1886746 - RNA, 19 nt, Artificial Sequence
  Description of Artificial Sequence: Synthetic oligonucleotide
acacaggagacgggagaua

SEQ ID NO: 1886747 - RNA, 19 nt, Artificial Sequence
  Description of Artificial Sequence: Synthetic oligonucleotide
ccacuugauucugcuggcc

SEQ ID NO: 1886748 - RNA, 19 nt, Artificial Sequence
  Description of Artificial Sequence: Synthetic oligonucleotide
auuccugggccaggcccgu

SEQ ID NO: 1886749 - RNA, 19 nt, Artificial Sequence
  Description of Artificial Sequence: Synthetic oligonucleotide
gcugcaguccccgaauaua

SEQ ID NO: 1886750 - RNA, 19 nt, Artificial Sequence
  Description of Artificial Sequence: Synthetic oligonucleotide
gcugugggcgauguuguaa

SEQ ID NO: 1886751 - RNA, 19 nt, Artificial Sequence
  Description of Artificial Sequence: Synthetic oligonucleotide
ggggcgucuuaauauacuu

SEQ ID NO: 1886752 - RNA, 19 nt, Artificial Sequence
  Description of Artificial Sequence: Synthetic oligonucleotide
ccucacuacuugcugaacu

SEQ ID NO: 1886753 - RNA, 19 nt, Artificial Sequence
  Description of Artificial Sequence: Synthetic oligonucleotide
ggagacaaucuugccauau

SEQ ID NO: 1886754 - RNA, 19 nt, Artificial Sequence
  Description of Artificial Sequence: Synthetic oligonucleotide
gucccacuagagucucgaa

SEQ ID NO: 1886755 - RNA, 19 nt, Artificial Sequence
  Description of Artificial Sequence: Synthetic oligonucleotide
cugcuggucccacuagagu

SEQ ID NO: 1886756 - RNA, 19 nt, Artificial Sequence
  Description of Artificial Sequence: Synthetic oligonucleotide
agagcuguguggggucaua

SEQ ID NO: 1886757 - RNA, 19 nt, Artificial Sequence
  Description of Artificial Sequence: Synthetic oligonucleotide
gacaggugacccaguugcu

SEQ ID NO: 1886758 - RNA, 19 nt, Artificial Sequence
  Description of Artificial Sequence: Synthetic oligonucleotide
gcaugaacgugcccaggcu

SEQ ID NO: 1886759 - RNA, 19 nt, Artificial Sequence
  Description of Artificial Sequence: Synthetic oligonucleotide
gcacgcuguuggcaugaac

SEQ ID NO: 1886760 - RNA, 19 nt, Artificial Sequence
  Description of Artificial Sequence: Synthetic oligonucleotide
gaccccucugcugguccca

SEQ ID NO: 1886761 - RNA, 19 nt, Artificial Sequence
  Description of Artificial Sequence: Synthetic oligonucleotide
cggguggagauaaccugac

SEQ ID NO: 1886762 - RNA, 19 nt, Artificial Sequence
  Description of Artificial Sequence: Synthetic oligonucleotide
ccuggucgguagugccugg

SEQ ID NO: 1886763 - RNA, 19 nt, Artificial Sequence
  Description of Artificial Sequence: Synthetic oligonucleotide
agccgaccccucugcuggu

SEQ ID NO: 1886764 - RNA, 19 nt, Artificial Sequence
  Description of Artificial Sequence: Synthetic oligonucleotide
gggguuggguagaacccca

SEQ ID NO: 1886765 - RNA, 19 nt, Artificial Sequence
  Description of Artificial Sequence: Synthetic oligonucleotide
caaagccgaccccucugcu

SEQ ID NO: 1886766 - RNA, 19 nt, Artificial Sequence
  Description of Artificial Sequence: Synthetic oligonucleotide
ccgaagggcugucgaaguc

SEQ ID NO: 1886767 - RNA, 19 nt, Artificial Sequence
  Description of Artificial Sequence: Synthetic oligonucleotide
cacuagagucucgaaggau

SEQ ID NO: 1886768 - RNA, 19 nt, Artificial Sequence
  Description of Artificial Sequence: Synthetic oligonucleotide
cuggcugcaguccccgaau

SEQ ID NO: 1886769 - RNA, 19 nt, Artificial Sequence
  Description of Artificial Sequence: Synthetic oligonucleotide
cucuguggacuccauccuu

SEQ ID NO: 1886770 - RNA, 19 nt, Artificial Sequence
  Description of Artificial Sequence: Synthetic oligonucleotide
ccccauuuggaagagcugu

SEQ ID NO: 1886771 - RNA, 19 nt, Artificial Sequence
  Description of Artificial Sequence: Synthetic oligonucleotide
caagguccuggucgguagu

SEQ ID NO: 1886772 - RNA, 19 nt, Artificial Sequence
  Description of Artificial Sequence: Synthetic oligonucleotide
gggucuugcuccuguugcu

SEQ ID NO: 1886773 - RNA, 19 nt, Artificial Sequence
  Description of Artificial Sequence: Synthetic oligonucleotide
ccuuguauagcagcacgcu

SEQ ID NO: 1886774 - RNA, 19 nt, Artificial Sequence
  Description of Artificial Sequence: Synthetic oligonucleotide
cacccugcugugggcgaug

SEQ ID NO: 1886775 - RNA, 19 nt, Artificial Sequence
  Description of Artificial Sequence: Synthetic oligonucleotide
gccgaagggcugucgaagu

SEQ ID NO: 1886776 - RNA, 19 nt, Artificial Sequence
  Description of Artificial Sequence: Synthetic oligonucleotide
cgaaggauccggguggaga

SEQ ID NO: 1886777 - RNA, 19 nt, Artificial Sequence
  Description of Artificial Sequence: Synthetic oligonucleotide
gcacaccacuggcuuuuca

SEQ ID NO: 1886778 - RNA, 19 nt, Artificial Sequence
  Description of Artificial Sequence: Synthetic oligonucleotide
gccaggcccguccguuuug

SEQ ID NO: 1886779 - RNA, 19 nt, Artificial Sequence
  Description of Artificial Sequence: Synthetic oligonucleotide
ccgagcccugauaggaaga

SEQ ID NO: 1886780 - RNA, 19 nt, Artificial Sequence
  Description of Artificial Sequence: Synthetic oligonucleotide
caggcccguccguuuugca

SEQ ID NO: 1886781 - RNA, 19 nt, Artificial Sequence
  Description of Artificial Sequence: Synthetic oligonucleotide
guccuggucgguagugccu

SEQ ID NO: 1886782 - RNA, 19 nt, Artificial Sequence
  Description of Artificial Sequence: Synthetic oligonucleotide
aggucccaucauggaggca

SEQ ID NO: 1886783 - RNA, 19 nt, Artificial Sequence
  Description of Artificial Sequence: Synthetic oligonucleotide
ccaggcccguccguuuugc

SEQ ID NO: 1886784 - RNA, 19 nt, Artificial Sequence
  Description of Artificial Sequence: Synthetic oligonucleotide
cgcuguuggcaugaacgug

SEQ ID NO: 1886785 - RNA, 19 nt, Artificial Sequence
  Description of Artificial Sequence: Synthetic oligonucleotide
agcacgcuguuggcaugaa

SEQ ID NO: 1886786 - RNA, 19 nt, Artificial Sequence
  Description of Artificial Sequence: Synthetic oligonucleotide
gggcgauguuguaaggggu

SEQ ID NO: 1886787 - RNA, 19 nt, Artificial Sequence
  Description of Artificial Sequence: Synthetic oligonucleotide
gaaggcccgggaggguacu

SEQ ID NO: 1886788 - RNA, 19 nt, Artificial Sequence
  Description of Artificial Sequence: Synthetic oligonucleotide
ggcgauguuguaagggguu

SEQ ID NO: 1886789 - RNA, 19 nt, Artificial Sequence
  Description of Artificial Sequence: Synthetic oligonucleotide
cugcacaccacuggcuuuu

SEQ ID NO: 1886790 - RNA, 19 nt, Artificial Sequence
  Description of Artificial Sequence: Synthetic oligonucleotide
ccauuuggaagagcugugu

SEQ ID NO: 1886791 - RNA, 19 nt, Artificial Sequence
  Description of Artificial Sequence: Synthetic oligonucleotide
ggcugcaguccccgaauau

SEQ ID NO: 1886792 - RNA, 19 nt, Artificial Sequence
  Description of Artificial Sequence: Synthetic oligonucleotide
cccauggucugaggguguc

SEQ ID NO: 1886793 - RNA, 19 nt, Artificial Sequence
  Description of Artificial Sequence: Synthetic oligonucleotide
cgaagccguagccuuugca

SEQ ID NO: 1886794 - RNA, 19 nt, Artificial Sequence
  Description of Artificial Sequence: Synthetic oligonucleotide
gggucagauggugcuguua

SEQ ID NO: 1886795 - RNA, 19 nt, Artificial Sequence
  Description of Artificial Sequence: Synthetic oligonucleotide
ggauccggguggagauaac

SEQ ID NO: 1886796 - RNA, 19 nt, Artificial Sequence
  Description of Artificial Sequence: Synthetic oligonucleotide
gcugaguaagaggucccau

SEQ ID NO: 1886797 - RNA, 19 nt, Artificial Sequence
  Description of Artificial Sequence: Synthetic oligonucleotide
gggcgucuuaauauacuuu

SEQ ID NO: 1886798 - RNA, 19 nt, Artificial Sequence
  Description of Artificial Sequence: Synthetic oligonucleotide
ccgaauauacagguugguu

SEQ ID NO: 1886799 - RNA, 19 nt, Artificial Sequence
  Description of Artificial Sequence: Synthetic oligonucleotide
ggugacccaguugcugagu

SEQ ID NO: 1886800 - RNA, 19 nt, Artificial Sequence
  Description of Artificial Sequence: Synthetic oligonucleotide
gcccguccguuuugcacaa

SEQ ID NO: 1886801 - RNA, 19 nt, Artificial Sequence
  Description of Artificial Sequence: Synthetic oligonucleotide
guccccgaauauacagguu

SEQ ID NO: 1886802 - RNA, 19 nt, Artificial Sequence
  Description of Artificial Sequence: Synthetic oligonucleotide
gugggagguuugagaugua

SEQ ID NO: 1886803 - RNA, 19 nt, Artificial Sequence
  Description of Artificial Sequence: Synthetic oligonucleotide
cccgaauauacagguuggu

SEQ ID NO: 1886804 - RNA, 19 nt, Artificial Sequence
  Description of Artificial Sequence: Synthetic oligonucleotide
ggccugcacaccacuggcu

SEQ ID NO: 1886805 - RNA, 19 nt, Artificial Sequence
  Description of Artificial Sequence: Synthetic oligonucleotide
cguuucuuuggcccgccau

SEQ ID NO: 1886806 - RNA, 19 nt, Artificial Sequence
  Description of Artificial Sequence: Synthetic oligonucleotide
cagccugagcaagcacccu

SEQ ID NO: 1886807 - RNA, 19 nt, Artificial Sequence
  Description of Artificial Sequence: Synthetic oligonucleotide
gucauagguuagggcccau

SEQ ID NO: 1886808 - RNA, 19 nt, Artificial Sequence
  Description of Artificial Sequence: Synthetic oligonucleotide
cguccguuuugcacaaauu

SEQ ID NO: 1886809 - RNA, 19 nt, Artificial Sequence
  Description of Artificial Sequence: Synthetic oligonucleotide
cgguagugccuggcugcag

SEQ ID NO: 1886810 - RNA, 19 nt, Artificial Sequence
  Description of Artificial Sequence: Synthetic oligonucleotide
ggggucagauggugcuguu

SEQ ID NO: 1886811 - RNA, 19 nt, Artificial Sequence
  Description of Artificial Sequence: Synthetic oligonucleotide
cgggagauauggggagaga

SEQ ID NO: 1886812 - RNA, 19 nt, Artificial Sequence
  Description of Artificial Sequence: Synthetic oligonucleotide
gcccgccaucagcaaauuu

SEQ ID NO: 1886813 - RNA, 19 nt, Artificial Sequence
  Description of Artificial Sequence: Synthetic oligonucleotide
ccccauggucugagggugu

SEQ ID NO: 1886814 - RNA, 19 nt, Artificial Sequence
  Description of Artificial Sequence: Synthetic oligonucleotide
ccauggucugagggugucu

SEQ ID NO: 1886815 - RNA, 19 nt, Artificial Sequence
  Description of Artificial Sequence: Synthetic oligonucleotide
gcacccugcugugggcgau

SEQ ID NO: 1886816 - RNA, 19 nt, Artificial Sequence
  Description of Artificial Sequence: Synthetic oligonucleotide
ggcccgccaucagcaaauu

SEQ ID NO: 1886817 - RNA, 19 nt, Artificial Sequence
  Description of Artificial Sequence: Synthetic oligonucleotide
cccguccguuuugcacaaa

SEQ ID NO: 1886818 - RNA, 19 nt, Artificial Sequence
  Description of Artificial Sequence: Synthetic oligonucleotide
aaucaugaaagccagaaac

SEQ ID NO: 1886819 - RNA, 19 nt, Artificial Sequence
  Description of Artificial Sequence: Synthetic oligonucleotide
uuguguaugauaaacauag

SEQ ID NO: 1886820 - RNA, 19 nt, Artificial Sequence
  Description of Artificial Sequence: Synthetic oligonucleotide
aauauuauugcccacauuu

SEQ ID NO: 1886821 - RNA, 19 nt, Artificial Sequence
  Description of Artificial Sequence: Synthetic oligonucleotide
uuaaucauagcaauuagca

SEQ ID NO: 1886822 - RNA, 19 nt, Artificial Sequence
  Description of Artificial Sequence: Synthetic oligonucleotide
caaaaguucauaacgaagg

SEQ ID NO: 1886823 - RNA, 19 nt, Artificial Sequence
  Description of Artificial Sequence: Synthetic oligonucleotide
aaaacauaccguuuuauga

SEQ ID NO: 1886824 - RNA, 19 nt, Artificial Sequence
  Description of Artificial Sequence: Synthetic oligonucleotide
augucagugacauuaauac

SEQ ID NO: 1886825 - RNA, 19 nt, Artificial Sequence
  Description of Artificial Sequence: Synthetic oligonucleotide
aguuuaugaaucaagaugg

SEQ ID NO: 1886826 - RNA, 19 nt, Artificial Sequence
  Description of Artificial Sequence: Synthetic oligonucleotide
uguaauggaaaucauugcc

SEQ ID NO: 1886827 - RNA, 19 nt, Artificial Sequence
  Description of Artificial Sequence: Synthetic oligonucleotide
aaacauaccguuuuaugag

SEQ ID NO: 1886828 - RNA, 19 nt, Artificial Sequence
  Description of Artificial Sequence: Synthetic oligonucleotide
aauagcaugucacugcuug

SEQ ID NO: 1886829 - RNA, 19 nt, Artificial Sequence
  Description of Artificial Sequence: Synthetic oligonucleotide
aaauacaauagcaugucac

SEQ ID NO: 1886830 - RNA, 19 nt, Artificial Sequence
  Description of Artificial Sequence: Synthetic oligonucleotide
aagucuugaaacuuucuuc

SEQ ID NO: 1886831 - RNA, 19 nt, Artificial Sequence
  Description of Artificial Sequence: Synthetic oligonucleotide
ucaaguauuuccuacuuag

SEQ ID NO: 1886832 - RNA, 19 nt, Artificial Sequence
  Description of Artificial Sequence: Synthetic oligonucleotide
gaguuuaugaaucaagaug

SEQ ID NO: 1886833 - RNA, 19 nt, Artificial Sequence
  Description of Artificial Sequence: Synthetic oligonucleotide
acauaguuaacacuagaac

SEQ ID NO: 1886834 - RNA, 19 nt, Artificial Sequence
  Description of Artificial Sequence: Synthetic oligonucleotide
cauguaauggaaaucauug

SEQ ID NO: 1886835 - RNA, 19 nt, Artificial Sequence
  Description of Artificial Sequence: Synthetic oligonucleotide
aaggacauauccaauauuc

SEQ ID NO: 1886836 - RNA, 19 nt, Artificial Sequence
  Description of Artificial Sequence: Synthetic oligonucleotide
uguaugauaaacauaguua

SEQ ID NO: 1886837 - RNA, 19 nt, Artificial Sequence
  Description of Artificial Sequence: Synthetic oligonucleotide
aagguaguaagaauaaagg

SEQ ID NO: 1886838 - RNA, 19 nt, Artificial Sequence
  Description of Artificial Sequence: Synthetic oligonucleotide
uguauauuccauaaaggac

SEQ ID NO: 1886839 - RNA, 19 nt, Artificial Sequence
  Description of Artificial Sequence: Synthetic oligonucleotide
uuaauuuuaaaguugugua

SEQ ID NO: 1886840 - RNA, 19 nt, Artificial Sequence
  Description of Artificial Sequence: Synthetic oligonucleotide
aauacaauagcaugucacu

SEQ ID NO: 1886841 - RNA, 19 nt, Artificial Sequence
  Description of Artificial Sequence: Synthetic oligonucleotide
ugacgaaauaaacaaacug

SEQ ID NO: 1886842 - RNA, 19 nt, Artificial Sequence
  Description of Artificial Sequence: Synthetic oligonucleotide
uuagugauccgcaugacga

SEQ ID NO: 1886843 - RNA, 19 nt, Artificial Sequence
  Description of Artificial Sequence: Synthetic oligonucleotide
aaacaaccaccauaguuac

SEQ ID NO: 1886844 - RNA, 19 nt, Artificial Sequence
  Description of Artificial Sequence: Synthetic oligonucleotide
aguaaaacaaccaccauag

SEQ ID NO: 1886845 - RNA, 19 nt, Artificial Sequence
  Description of Artificial Sequence: Synthetic oligonucleotide
ugagugaagagguuuaacc

SEQ ID NO: 1886846 - RNA, 19 nt, Artificial Sequence
  Description of Artificial Sequence: Synthetic oligonucleotide
ucauuaucugcugauagcg

SEQ ID NO: 1886847 - RNA, 19 nt, Artificial Sequence
  Description of Artificial Sequence: Synthetic oligonucleotide
aagagguuuaaccuggacu

SEQ ID NO: 1886848 - RNA, 19 nt, Artificial Sequence
  Description of Artificial Sequence: Synthetic oligonucleotide
aaguaggauaaccaaaagu

SEQ ID NO: 1886849 - RNA, 19 nt, Artificial Sequence
  Description of Artificial Sequence: Synthetic oligonucleotide
  modified_base (7)..(7): a, c, u, g, unknown or other
aaggganaucugcaagggc

SEQ ID NO: 1886850 - RNA, 19 nt, Artificial Sequence
  Description of Artificial Sequence: Synthetic oligonucleotide
caagguaguaagaauaaag

SEQ ID NO: 1886851 - RNA, 19 nt, Artificial Sequence
  Description of Artificial Sequence: Synthetic oligonucleotide
cauguugaguaaaacaacc

SEQ ID NO: 1886852 - RNA, 19 nt, Artificial Sequence
  Description of Artificial Sequence: Synthetic oligonucleotide
uuaggaauauuauugccca

SEQ ID NO: 1886853 - RNA, 19 nt, Artificial Sequence
  Description of Artificial Sequence: Synthetic oligonucleotide
uuugagaacaacagaaguc

SEQ ID NO: 1886854 - RNA, 19 nt, Artificial Sequence
  Description of Artificial Sequence: Synthetic oligonucleotide
uaugagcuauuaaucauag

SEQ ID NO: 1886855 - RNA, 19 nt, Artificial Sequence
  Description of Artificial Sequence: Synthetic oligonucleotide
ucucgaguuagacugagug

SEQ ID NO: 1886856 - RNA, 19 nt, Artificial Sequence
  Description of Artificial Sequence: Synthetic oligonucleotide
uaugaauuugugaucauau

SEQ ID NO: 1886857 - RNA, 19 nt, Artificial Sequence
  Description of Artificial Sequence: Synthetic oligonucleotide
auguaauggaaaucauugc

SEQ ID NO: 1886858 - RNA, 19 nt, Artificial Sequence
  Description of Artificial Sequence: Synthetic oligonucleotide
uugugcuauagucagagcu

SEQ ID NO: 1886859 - RNA, 19 nt, Artificial Sequence
  Description of Artificial Sequence: Synthetic oligonucleotide
aaaucauugccaccuagcu

SEQ ID NO: 1886860 - RNA, 19 nt, Artificial Sequence
  Description of Artificial Sequence: Synthetic oligonucleotide
aacgugcaaacuuccauuc

SEQ ID NO: 1886861 - RNA, 19 nt, Artificial Sequence
  Description of Artificial Sequence: Synthetic oligonucleotide
aaaacaaccaccauaguua

SEQ ID NO: 1886862 - RNA, 19 nt, Artificial Sequence
  Description of Artificial Sequence: Synthetic oligonucleotide
  modified_base (6)..(6): a, c, u, g, unknown or other
aggganaucugcaagggcc

SEQ ID NO: 1886863 - RNA, 19 nt, Artificial Sequence
  Description of Artificial Sequence: Synthetic oligonucleotide
ugauaaacauaguuaacac

SEQ ID NO: 1886864 - RNA, 19 nt, Artificial Sequence
  Description of Artificial Sequence: Synthetic oligonucleotide
aauucuuccguugcuuggc

SEQ ID NO: 1886865 - RNA, 19 nt, Artificial Sequence
  Description of Artificial Sequence: Synthetic oligonucleotide
ugagaaugcuguuaaaacu

SEQ ID NO: 1886866 - RNA, 19 nt, Artificial Sequence
  Description of Artificial Sequence: Synthetic oligonucleotide
aaaacucucgaguuagacu

SEQ ID NO: 1886867 - RNA, 19 nt, Artificial Sequence
  Description of Artificial Sequence: Synthetic oligonucleotide
uauccaauauucucuauga

SEQ ID NO: 1886868 - RNA, 19 nt, Artificial Sequence
  Description of Artificial Sequence: Synthetic oligonucleotide
guaguaagaauaaaggaug

SEQ ID NO: 1886869 - RNA, 19 nt, Artificial Sequence
  Description of Artificial Sequence: Synthetic oligonucleotide
aaguuagugauccgcauga

SEQ ID NO: 1886870 - RNA, 19 nt, Artificial Sequence
  Description of Artificial Sequence: Synthetic oligonucleotide
  modified_base (10)..(10): a, c, u, g, unknown or other
uccaaggganaucugcaag

SEQ ID NO: 1886871 - RNA, 19 nt, Artificial Sequence
  Description of Artificial Sequence: Synthetic oligonucleotide
uauuccauaaaggacauau

SEQ ID NO: 1886872 - RNA, 19 nt, Artificial Sequence
  Description of Artificial Sequence: Synthetic oligonucleotide
auagucagagcuugacugc

SEQ ID NO: 1886873 - RNA, 19 nt, Artificial Sequence
  Description of Artificial Sequence: Synthetic oligonucleotide
aauacuggguuucuaaaua

SEQ ID NO: 1886874 - RNA, 19 nt, Artificial Sequence
  Description of Artificial Sequence: Synthetic oligonucleotide
gacgaaauaaacaaacuga

SEQ ID NO: 1886875 - RNA, 19 nt, Artificial Sequence
  Description of Artificial Sequence: Synthetic oligonucleotide
aauaaaggaugaacaugcc

SEQ ID NO: 1886876 - RNA, 19 nt, Artificial Sequence
  Description of Artificial Sequence: Synthetic oligonucleotide
auacuggguuucuaaauac

SEQ ID NO: 1886877 - RNA, 19 nt, Artificial Sequence
  Description of Artificial Sequence: Synthetic oligonucleotide
uuccuaucauucaaaguag

SEQ ID NO: 1886878 - RNA, 19 nt, Artificial Sequence
  Description of Artificial Sequence: Synthetic oligonucleotide
uuaacacuagaacuuuaca

SEQ ID NO: 1886879 - RNA, 19 nt, Artificial Sequence
  Description of Artificial Sequence: Synthetic oligonucleotide
aguaggauaaccaaaaguu

SEQ ID NO: 1886880 - RNA, 19 nt, Artificial Sequence
  Description of Artificial Sequence: Synthetic oligonucleotide
ucauuuucauguaauggaa

SEQ ID NO: 1886881 - RNA, 19 nt, Artificial Sequence
  Description of Artificial Sequence: Synthetic oligonucleotide
uccaauauucucuaugaau

SEQ ID NO: 1886882 - RNA, 19 nt, Artificial Sequence
  Description of Artificial Sequence: Synthetic oligonucleotide
auagcaauuagcauguuga

SEQ ID NO: 1886883 - RNA, 19 nt, Artificial Sequence
  Description of Artificial Sequence: Synthetic oligonucleotide
ugguaugagcuauuaauca

SEQ ID NO: 1886884 - RNA, 19 nt, Artificial Sequence
  Description of Artificial Sequence: Synthetic oligonucleotide
uaugaaucaagauggcuaa

SEQ ID NO: 1886885 - RNA, 19 nt, Artificial Sequence
  Description of Artificial Sequence: Synthetic oligonucleotide
uugguaugagcuauuaauc

SEQ ID NO: 1886886 - RNA, 19 nt, Artificial Sequence
  Description of Artificial Sequence: Synthetic oligonucleotide
uggaccaaaacaaagucuu

SEQ ID NO: 1886887 - RNA, 19 nt, Artificial Sequence
  Description of Artificial Sequence: Synthetic oligonucleotide
ugauugagaaugcuguuaa

SEQ ID NO: 1886888 - RNA, 19 nt, Artificial Sequence
  Description of Artificial Sequence: Synthetic oligonucleotide
uaugauaaacauaguuaac

SEQ ID NO: 1886889 - RNA, 19 nt, Artificial Sequence
  Description of Artificial Sequence: Synthetic oligonucleotide
aguuguguaugauaaacau

SEQ ID NO: 1886890 - RNA, 19 nt, Artificial Sequence
  Description of Artificial Sequence: Synthetic oligonucleotide
agaauaaaggaugaacaug

SEQ ID NO: 1886891 - RNA, 19 nt, Artificial Sequence
  Description of Artificial Sequence: Synthetic oligonucleotide
uuaaccuggacuuggaguu

SEQ ID NO: 1886892 - RNA, 19 nt, Artificial Sequence
  Description of Artificial Sequence: Synthetic oligonucleotide
uagcauguugaguaaaaca

SEQ ID NO: 1886893 - RNA, 19 nt, Artificial Sequence
  Description of Artificial Sequence: Synthetic oligonucleotide
aaccaaaaguuuugaacgu

SEQ ID NO: 1886894 - RNA, 19 nt, Artificial Sequence
  Description of Artificial Sequence: Synthetic oligonucleotide
auaaugaacagaaccauga

SEQ ID NO: 1886895 - RNA, 19 nt, Artificial Sequence
  Description of Artificial Sequence: Synthetic oligonucleotide
ucacaucucagcacacugg

SEQ ID NO: 1886896 - RNA, 19 nt, Artificial Sequence
  Description of Artificial Sequence: Synthetic oligonucleotide
aacauaccguuuuaugagu

SEQ ID NO: 1886897 - RNA, 19 nt, Artificial Sequence
  Description of Artificial Sequence: Synthetic oligonucleotide
guuagacugagugaagagg

SEQ ID NO: 1886898 - RNA, 19 nt, Artificial Sequence
  Description of Artificial Sequence: Synthetic oligonucleotide
auaaaggaugaacaugcca

SEQ ID NO: 1886899 - RNA, 19 nt, Artificial Sequence
  Description of Artificial Sequence: Synthetic oligonucleotide
cauucaaaguaggauaacc

SEQ ID NO: 1886900 - RNA, 19 nt, Artificial Sequence
  Description of Artificial Sequence: Synthetic oligonucleotide
guuagugauccgcaugacg

SEQ ID NO: 1886901 - RNA, 19 nt, Artificial Sequence
  Description of Artificial Sequence: Synthetic oligonucleotide
auaaacaaacugaagggug

SEQ ID NO: 1886902 - RNA, 19 nt, Artificial Sequence
  Description of Artificial Sequence: Synthetic oligonucleotide
auaaaggacauauccaaua

SEQ ID NO: 1886903 - RNA, 19 nt, Artificial Sequence
  Description of Artificial Sequence: Synthetic oligonucleotide
cauucccacuuccagaucc

SEQ ID NO: 1886904 - RNA, 19 nt, Artificial Sequence
  Description of Artificial Sequence: Synthetic oligonucleotide
aguuagacugagugaagag

SEQ ID NO: 1886905 - RNA, 19 nt, Artificial Sequence
  Description of Artificial Sequence: Synthetic oligonucleotide
uuuaugaaucaagauggcu

SEQ ID NO: 1886906 - RNA, 19 nt, Artificial Sequence
  Description of Artificial Sequence: Synthetic oligonucleotide
cauaaugaacagaaccaug

SEQ ID NO: 1886907 - RNA, 19 nt, Artificial Sequence
  Description of Artificial Sequence: Synthetic oligonucleotide
auagacaaacaugucagug

SEQ ID NO: 1886908 - RNA, 19 nt, Artificial Sequence
  Description of Artificial Sequence: Synthetic oligonucleotide
ugaguuuaugaaucaagau

SEQ ID NO: 1886909 - RNA, 19 nt, Artificial Sequence
  Description of Artificial Sequence: Synthetic oligonucleotide
gugaucauauuugagaaca

SEQ ID NO: 1886910 - RNA, 19 nt, Artificial Sequence
  Description of Artificial Sequence: Synthetic oligonucleotide
ucgaguuagacugagugaa

SEQ ID NO: 1886911 - RNA, 19 nt, Artificial Sequence
  Description of Artificial Sequence: Synthetic oligonucleotide
agauaucuugcuugauuuc

SEQ ID NO: 1886912 - RNA, 19 nt, Artificial Sequence
  Description of Artificial Sequence: Synthetic oligonucleotide
gaaaucauugccaccuagc

SEQ ID NO: 1886913 - RNA, 19 nt, Artificial Sequence
  Description of Artificial Sequence: Synthetic oligonucleotide
gguuucuaaauacaauagc

SEQ ID NO: 1886914 - RNA, 19 nt, Artificial Sequence
  Description of Artificial Sequence: Synthetic oligonucleotide
gaguaaaacaaccaccaua

SEQ ID NO: 1886915 - RNA, 19 nt, Artificial Sequence
  Description of Artificial Sequence: Synthetic oligonucleotide
cuugacugcggguugcugc

SEQ ID NO: 1886916 - RNA, 19 nt, Artificial Sequence
  Description of Artificial Sequence: Synthetic oligonucleotide
ucauguaauggaaaucauu

SEQ ID NO: 1886917 - RNA, 19 nt, Artificial Sequence
  Description of Artificial Sequence: Synthetic oligonucleotide
uucauaacgaaggcuggag

SEQ ID NO: 1886918 - RNA, 19 nt, Artificial Sequence
  Description of Artificial Sequence: Synthetic oligonucleotide
uccgcaugacgaaauaaac

SEQ ID NO: 1886919 - RNA, 19 nt, Artificial Sequence
  Description of Artificial Sequence: Synthetic oligonucleotide
agcauguugaguaaaacaa

SEQ ID NO: 1886920 - RNA, 19 nt, Artificial Sequence
  Description of Artificial Sequence: Synthetic oligonucleotide
uaauacuggguuucuaaau

SEQ ID NO: 1886921 - RNA, 19 nt, Artificial Sequence
  Description of Artificial Sequence: Synthetic oligonucleotide
ucauaacgaaggcuggaga

SEQ ID NO: 1886922 - RNA, 19 nt, Artificial Sequence
  Description of Artificial Sequence: Synthetic oligonucleotide
gacauuaauacuggguuuc

SEQ ID NO: 1886923 - RNA, 19 nt, Artificial Sequence
  Description of Artificial Sequence: Synthetic oligonucleotide
acugaguuuaugaaucaag

SEQ ID NO: 1886924 - RNA, 19 nt, Artificial Sequence
  Description of Artificial Sequence: Synthetic oligonucleotide
uuaucugcugauagcgugu

SEQ ID NO: 1886925 - RNA, 19 nt, Artificial Sequence
  Description of Artificial Sequence: Synthetic oligonucleotide
acaaccaccauaguuacau

SEQ ID NO: 1886926 - RNA, 19 nt, Artificial Sequence
  Description of Artificial Sequence: Synthetic oligonucleotide
acuuggaguuacccauucc

SEQ ID NO: 1886927 - RNA, 19 nt, Artificial Sequence
  Description of Artificial Sequence: Synthetic oligonucleotide
aaaggacauauccaauauu

SEQ ID NO: 1886928 - RNA, 19 nt, Artificial Sequence
  Description of Artificial Sequence: Synthetic oligonucleotide
ugugcuauagucagagcuu

SEQ ID NO: 1886929 - RNA, 19 nt, Artificial Sequence
  Description of Artificial Sequence: Synthetic oligonucleotide
auagcguguuggcugauug

SEQ ID NO: 1886930 - RNA, 19 nt, Artificial Sequence
  Description of Artificial Sequence: Synthetic oligonucleotide
uuucaaguauuuccuacuu

SEQ ID NO: 1886931 - RNA, 19 nt, Artificial Sequence
  Description of Artificial Sequence: Synthetic oligonucleotide
aaucauugccaccuagcuu

SEQ ID NO: 1886932 - RNA, 19 nt, Artificial Sequence
  Description of Artificial Sequence: Synthetic oligonucleotide
ugugaucauauuugagaac

SEQ ID NO: 1886933 - RNA, 19 nt, Artificial Sequence
  Description of Artificial Sequence: Synthetic oligonucleotide
uccuacuuaggaauauuau

SEQ ID NO: 1886934 - RNA, 19 nt, Artificial Sequence
  Description of Artificial Sequence: Synthetic oligonucleotide
uacuggguuucuaaauaca

SEQ ID NO: 1886935 - RNA, 19 nt, Artificial Sequence
  Description of Artificial Sequence: Synthetic oligonucleotide
gcaauuagcauguugagua

SEQ ID NO: 1886936 - RNA, 19 nt, Artificial Sequence
  Description of Artificial Sequence: Synthetic oligonucleotide
auauggaccaaaacaaagu

SEQ ID NO: 1886937 - RNA, 19 nt, Artificial Sequence
  Description of Artificial Sequence: Synthetic oligonucleotide
auacaauagcaugucacug

SEQ ID NO: 1886938 - RNA, 19 nt, Artificial Sequence
  Description of Artificial Sequence: Synthetic oligonucleotide
acaguccaaauauggacca

SEQ ID NO: 1886939 - RNA, 19 nt, Artificial Sequence
  Description of Artificial Sequence: Synthetic oligonucleotide
uuccuacuuaggaauauua

SEQ ID NO: 1886940 - RNA, 19 nt, Artificial Sequence
  Description of Artificial Sequence: Synthetic oligonucleotide
guuaacacuagaacuuuac

SEQ ID NO: 1886941 - RNA, 19 nt, Artificial Sequence
  Description of Artificial Sequence: Synthetic oligonucleotide
gaagucacuucagacaguc

SEQ ID NO: 1886942 - RNA, 19 nt, Artificial Sequence
  Description of Artificial Sequence: Synthetic oligonucleotide
ccugcauuuggaaaguuag

SEQ ID NO: 1886943 - RNA, 19 nt, Artificial Sequence
  Description of Artificial Sequence: Synthetic oligonucleotide
cuugguaugagcuauuaau

SEQ ID NO: 1886944 - RNA, 19 nt, Artificial Sequence
  Description of Artificial Sequence: Synthetic oligonucleotide
  modified_base (8)..(8): a, c, u, g, unknown or other
caaggganaucugcaaggg

SEQ ID NO: 1886945 - RNA, 19 nt, Artificial Sequence
  Description of Artificial Sequence: Synthetic oligonucleotide
acgaaauaaacaaacugaa

SEQ ID NO: 1886946 - RNA, 19 nt, Artificial Sequence
  Description of Artificial Sequence: Synthetic oligonucleotide
gacauauccaauauucucu

SEQ ID NO: 1886947 - RNA, 19 nt, Artificial Sequence
  Description of Artificial Sequence: Synthetic oligonucleotide
uccauucuacaucacuguc

SEQ ID NO: 1886948 - RNA, 19 nt, Artificial Sequence
  Description of Artificial Sequence: Synthetic oligonucleotide
agguuuaaccuggacuugg

SEQ ID NO: 1886949 - RNA, 19 nt, Artificial Sequence
  Description of Artificial Sequence: Synthetic oligonucleotide
aggaauauuauugcccaca

SEQ ID NO: 1886950 - RNA, 19 nt, Artificial Sequence
  Description of Artificial Sequence: Synthetic oligonucleotide
uucaaguauuuccuacuua

SEQ ID NO: 1886951 - RNA, 19 nt, Artificial Sequence
  Description of Artificial Sequence: Synthetic oligonucleotide
uguguaugauaaacauagu

SEQ ID NO: 1886952 - RNA, 19 nt, Artificial Sequence
  Description of Artificial Sequence: Synthetic oligonucleotide
uuggaaaguuagugauccg

SEQ ID NO: 1886953 - RNA, 19 nt, Artificial Sequence
  Description of Artificial Sequence: Synthetic oligonucleotide
  modified_base (16)..(16): a, c, u, g, unknown or other
aguccuuccaaggganauc

SEQ ID NO: 1886954 - RNA, 19 nt, Artificial Sequence
  Description of Artificial Sequence: Synthetic oligonucleotide
auugccaccuagcuuaauu

SEQ ID NO: 1886955 - RNA, 19 nt, Artificial Sequence
  Description of Artificial Sequence: Synthetic oligonucleotide
gcugauagcguguuggcug

SEQ ID NO: 1886956 - RNA, 19 nt, Artificial Sequence
  Description of Artificial Sequence: Synthetic oligonucleotide
uugaacgugcaaacuucca

SEQ ID NO: 1886957 - RNA, 19 nt, Artificial Sequence
  Description of Artificial Sequence: Synthetic oligonucleotide
acuagaacuuuacaccaua

SEQ ID NO: 1886958 - RNA, 19 nt, Artificial Sequence
  Description of Artificial Sequence: Synthetic oligonucleotide
uucauguaauggaaaucau

SEQ ID NO: 1886959 - RNA, 19 nt, Artificial Sequence
  Description of Artificial Sequence: Synthetic oligonucleotide
ugacauuaauacuggguuu

SEQ ID NO: 1886960 - RNA, 19 nt, Artificial Sequence
  Description of Artificial Sequence: Synthetic oligonucleotide
uuacccauucccacuucca

SEQ ID NO: 1886961 - RNA, 19 nt, Artificial Sequence
  Description of Artificial Sequence: Synthetic oligonucleotide
aguucauaacgaaggcugg

SEQ ID NO: 1886962 - RNA, 19 nt, Artificial Sequence
  Description of Artificial Sequence: Synthetic oligonucleotide
agauggcuaauucuuccgu

SEQ ID NO: 1886963 - RNA, 19 nt, Artificial Sequence
  Description of Artificial Sequence: Synthetic oligonucleotide
gacagguaauauaaagaca

SEQ ID NO: 1886964 - RNA, 19 nt, Artificial Sequence
  Description of Artificial Sequence: Synthetic oligonucleotide
ggacauauccaauauucuc

SEQ ID NO: 1886965 - RNA, 19 nt, Artificial Sequence
  Description of Artificial Sequence: Synthetic oligonucleotide
  modified_base (9)..(9): a, c, u, g, unknown or other
ccaaggganaucugcaagg

SEQ ID NO: 1886966 - RNA, 19 nt, Artificial Sequence
  Description of Artificial Sequence: Synthetic oligonucleotide
auauuauugcccacauuug

SEQ ID NO: 1886967 - RNA, 19 nt, Artificial Sequence
  Description of Artificial Sequence: Synthetic oligonucleotide
agggaggauguaugcaauc

SEQ ID NO: 1886968 - RNA, 19 nt, Artificial Sequence
  Description of Artificial Sequence: Synthetic oligonucleotide
auccucaauuucuugguau

SEQ ID NO: 1886969 - RNA, 19 nt, Artificial Sequence
  Description of Artificial Sequence: Synthetic oligonucleotide
ucuugguaugagcuauuaa

SEQ ID NO: 1886970 - RNA, 19 nt, Artificial Sequence
  Description of Artificial Sequence: Synthetic oligonucleotide
uaacgaaggcuggagauau

SEQ ID NO: 1886971 - RNA, 19 nt, Artificial Sequence
  Description of Artificial Sequence: Synthetic oligonucleotide
ugaguaaaacaaccaccau

SEQ ID NO: 1886972 - RNA, 19 nt, Artificial Sequence
  Description of Artificial Sequence: Synthetic oligonucleotide
aucauucaaaguaggauaa

SEQ ID NO: 1886973 - RNA, 19 nt, Artificial Sequence
  Description of Artificial Sequence: Synthetic oligonucleotide
gccgacagguaauauaaag

SEQ ID NO: 1886974 - RNA, 19 nt, Artificial Sequence
  Description of Artificial Sequence: Synthetic oligonucleotide
agcguguuggcugauugag

SEQ ID NO: 1886975 - RNA, 19 nt, Artificial Sequence
  Description of Artificial Sequence: Synthetic oligonucleotide
uguccuucacaguccuucc

SEQ ID NO: 1886976 - RNA, 19 nt, Artificial Sequence
  Description of Artificial Sequence: Synthetic oligonucleotide
acauaccguuuuaugaguc

SEQ ID NO: 1886977 - RNA, 19 nt, Artificial Sequence
  Description of Artificial Sequence: Synthetic oligonucleotide
aagucacuucagacagucc

SEQ ID NO: 1886978 - RNA, 19 nt, Artificial Sequence
  Description of Artificial Sequence: Synthetic oligonucleotide
gaagagguuuaaccuggac

SEQ ID NO: 1886979 - RNA, 19 nt, Artificial Sequence
  Description of Artificial Sequence: Synthetic oligonucleotide
uuugugcuauagucagagc

SEQ ID NO: 1886980 - RNA, 19 nt, Artificial Sequence
  Description of Artificial Sequence: Synthetic oligonucleotide
gaguuagacugagugaaga

SEQ ID NO: 1886981 - RNA, 19 nt, Artificial Sequence
  Description of Artificial Sequence: Synthetic oligonucleotide
caaaaguuuugaacgugca

SEQ ID NO: 1886982 - RNA, 19 nt, Artificial Sequence
  Description of Artificial Sequence: Synthetic oligonucleotide
ggguuucuaaauacaauag

SEQ ID NO: 1886983 - RNA, 19 nt, Artificial Sequence
  Description of Artificial Sequence: Synthetic oligonucleotide
cgacagguaauauaaagac

SEQ ID NO: 1886984 - RNA, 19 nt, Artificial Sequence
  Description of Artificial Sequence: Synthetic oligonucleotide
guuuaugaaucaagauggc

SEQ ID NO: 1886985 - RNA, 19 nt, Artificial Sequence
  Description of Artificial Sequence: Synthetic oligonucleotide
augacgaaauaaacaaacu

SEQ ID NO: 1886986 - RNA, 19 nt, Artificial Sequence
  Description of Artificial Sequence: Synthetic oligonucleotide
aguuuugaacgugcaaacu

SEQ ID NO: 1886987 - RNA, 19 nt, Artificial Sequence
  Description of Artificial Sequence: Synthetic oligonucleotide
ugaagagguuuaaccugga

SEQ ID NO: 1886988 - RNA, 19 nt, Artificial Sequence
  Description of Artificial Sequence: Synthetic oligonucleotide
  modified_base (11)..(11): a, c, u, g, unknown or other
uuccaaggganaucugcaa

SEQ ID NO: 1886989 - RNA, 19 nt, Artificial Sequence
  Description of Artificial Sequence: Synthetic oligonucleotide
auggaccaaaacaaagucu

SEQ ID NO: 1886990 - RNA, 19 nt, Artificial Sequence
  Description of Artificial Sequence: Synthetic oligonucleotide
agagcuugacugcggguug

SEQ ID NO: 1886991 - RNA, 19 nt, Artificial Sequence
  Description of Artificial Sequence: Synthetic oligonucleotide
guguaugauaaacauaguu

SEQ ID NO: 1886992 - RNA, 19 nt, Artificial Sequence
  Description of Artificial Sequence: Synthetic oligonucleotide
cuucagacaguccaaauau

SEQ ID NO: 1886993 - RNA, 19 nt, Artificial Sequence
  Description of Artificial Sequence: Synthetic oligonucleotide
ugguaaaagcaggauugac

SEQ ID NO: 1886994 - RNA, 19 nt, Artificial Sequence
  Description of Artificial Sequence: Synthetic oligonucleotide
cuuagaggccgacagguaa

SEQ ID NO: 1886995 - RNA, 19 nt, Artificial Sequence
  Description of Artificial Sequence: Synthetic oligonucleotide
aguaagaauaaaggaugaa

SEQ ID NO: 1886996 - RNA, 19 nt, Artificial Sequence
  Description of Artificial Sequence: Synthetic oligonucleotide
ucguucgcagggaggaugu

SEQ ID NO: 1886997 - RNA, 19 nt, Artificial Sequence
  Description of Artificial Sequence: Synthetic oligonucleotide
uugccaccuagcuuaauuu

SEQ ID NO: 1886998 - RNA, 19 nt, Artificial Sequence
  Description of Artificial Sequence: Synthetic oligonucleotide
aguuacccauucccacuuc

SEQ ID NO: 1886999 - RNA, 19 nt, Artificial Sequence
  Description of Artificial Sequence: Synthetic oligonucleotide
aguuagugauccgcaugac

SEQ ID NO: 1887000 - RNA, 19 nt, Artificial Sequence
  Description of Artificial Sequence: Synthetic oligonucleotide
  modified_base (2)..(2): a, c, u, g, unknown or other
anaucugcaagggcccaaa

SEQ ID NO: 1887001 - RNA, 19 nt, Artificial Sequence
  Description of Artificial Sequence: Synthetic oligonucleotide
auccaauauucucuaugaa

SEQ ID NO: 1887002 - RNA, 19 nt, Artificial Sequence
  Description of Artificial Sequence: Synthetic oligonucleotide
cguuuuaugagucuuuuca

SEQ ID NO: 1887003 - RNA, 19 nt, Artificial Sequence
  Description of Artificial Sequence: Synthetic oligonucleotide
cagacaguccaaauaugga

SEQ ID NO: 1887004 - RNA, 19 nt, Artificial Sequence
  Description of Artificial Sequence: Synthetic oligonucleotide
gucuacuugggcuuucaaa

SEQ ID NO: 1887005 - RNA, 19 nt, Artificial Sequence
  Description of Artificial Sequence: Synthetic oligonucleotide
cucgaguuagacugaguga

SEQ ID NO: 1887006 - RNA, 19 nt, Artificial Sequence
  Description of Artificial Sequence: Synthetic oligonucleotide
ucgcagggaggauguaugc

SEQ ID NO: 1887007 - RNA, 19 nt, Artificial Sequence
  Description of Artificial Sequence: Synthetic oligonucleotide
aggccgacagguaauauaa

SEQ ID NO: 1887008 - RNA, 19 nt, Artificial Sequence
  Description of Artificial Sequence: Synthetic oligonucleotide
cuggagaagcuuaguacca

SEQ ID NO: 1887009 - RNA, 19 nt, Artificial Sequence
  Description of Artificial Sequence: Synthetic oligonucleotide
cauucacaucucagcacac

SEQ ID NO: 1887010 - RNA, 19 nt, Artificial Sequence
  Description of Artificial Sequence: Synthetic oligonucleotide
guaugagcuauuaaucaua

SEQ ID NO: 1887011 - RNA, 19 nt, Artificial Sequence
  Description of Artificial Sequence: Synthetic oligonucleotide
uagugauccgcaugacgaa

SEQ ID NO: 1887012 - RNA, 19 nt, Artificial Sequence
  Description of Artificial Sequence: Synthetic oligonucleotide
ugccaccuagcuuaauuuu

SEQ ID NO: 1887013 - RNA, 19 nt, Artificial Sequence
  Description of Artificial Sequence: Synthetic oligonucleotide
auuuccuacuuaggaauau

SEQ ID NO: 1887014 - RNA, 19 nt, Artificial Sequence
  Description of Artificial Sequence: Synthetic oligonucleotide
cuacaucacugucauccuc

SEQ ID NO: 1887015 - RNA, 19 nt, Artificial Sequence
  Description of Artificial Sequence: Synthetic oligonucleotide
ugauccgcaugacgaaaua

SEQ ID NO: 1887016 - RNA, 19 nt, Artificial Sequence
  Description of Artificial Sequence: Synthetic oligonucleotide
auucuuccguugcuuggcu

SEQ ID NO: 1887017 - RNA, 19 nt, Artificial Sequence
  Description of Artificial Sequence: Synthetic oligonucleotide
gauugagaaugcuguuaaa

SEQ ID NO: 1887018 - RNA, 19 nt, Artificial Sequence
  Description of Artificial Sequence: Synthetic oligonucleotide
uagcguguuggcugauuga

SEQ ID NO: 1887019 - RNA, 19 nt, Artificial Sequence
  Description of Artificial Sequence: Synthetic oligonucleotide
auucacaucucagcacacu

SEQ ID NO: 1887020 - RNA, 19 nt, Artificial Sequence
  Description of Artificial Sequence: Synthetic oligonucleotide
acauuaauacuggguuucu

SEQ ID NO: 1887021 - RNA, 19 nt, Artificial Sequence
  Description of Artificial Sequence: Synthetic oligonucleotide
cauaacgaaggcuggagau

SEQ ID NO: 1887022 - RNA, 19 nt, Artificial Sequence
  Description of Artificial Sequence: Synthetic oligonucleotide
gggaggauguaugcaaucc

SEQ ID NO: 1887023 - RNA, 19 nt, Artificial Sequence
  Description of Artificial Sequence: Synthetic oligonucleotide
uaccguuuuaugagucuuu

SEQ ID NO: 1887024 - RNA, 19 nt, Artificial Sequence
  Description of Artificial Sequence: Synthetic oligonucleotide
cauucuacaucacugucau

SEQ ID NO: 1887025 - RNA, 19 nt, Artificial Sequence
  Description of Artificial Sequence: Synthetic oligonucleotide
guuacauuguauauuccau

SEQ ID NO: 1887026 - RNA, 19 nt, Artificial Sequence
  Description of Artificial Sequence: Synthetic oligonucleotide
gaacgugcaaacuuccauu

SEQ ID NO: 1887027 - RNA, 19 nt, Artificial Sequence
  Description of Artificial Sequence: Synthetic oligonucleotide
cugagugaagagguuuaac

SEQ ID NO: 1887028 - RNA, 19 nt, Artificial Sequence
  Description of Artificial Sequence: Synthetic oligonucleotide
ggauguaugcaauccugga

SEQ ID NO: 1887029 - RNA, 19 nt, Artificial Sequence
  Description of Artificial Sequence: Synthetic oligonucleotide
uuucuugguaugagcuauu

SEQ ID NO: 1887030 - RNA, 19 nt, Artificial Sequence
  Description of Artificial Sequence: Synthetic oligonucleotide
uuuggccccaagguaguaa

SEQ ID NO: 1887031 - RNA, 19 nt, Artificial Sequence
  Description of Artificial Sequence: Synthetic oligonucleotide
ugucuacuugggcuuucaa

SEQ ID NO: 1887032 - RNA, 19 nt, Artificial Sequence
  Description of Artificial Sequence: Synthetic oligonucleotide
gguaaaagcaggauugacu

SEQ ID NO: 1887033 - RNA, 19 nt, Artificial Sequence
  Description of Artificial Sequence: Synthetic oligonucleotide
auccgcaugacgaaauaaa

SEQ ID NO: 1887034 - RNA, 19 nt, Artificial Sequence
  Description of Artificial Sequence: Synthetic oligonucleotide
ggaaaguuagugauccgca

SEQ ID NO: 1887035 - RNA, 19 nt, Artificial Sequence
  Description of Artificial Sequence: Synthetic oligonucleotide
uugcccacauuugugcuau

SEQ ID NO: 1887036 - RNA, 19 nt, Artificial Sequence
  Description of Artificial Sequence: Synthetic oligonucleotide
cugcaagggcccaaagcuc

SEQ ID NO: 1887037 - RNA, 19 nt, Artificial Sequence
  Description of Artificial Sequence: Synthetic oligonucleotide
ggcucuugucuuccaaaag

SEQ ID NO: 1887038 - RNA, 19 nt, Artificial Sequence
  Description of Artificial Sequence: Synthetic oligonucleotide
guaugcaauccuggagaag

SEQ ID NO: 1887039 - RNA, 19 nt, Artificial Sequence
  Description of Artificial Sequence: Synthetic oligonucleotide
aaacugaaggguggaggua

SEQ ID NO: 1887040 - RNA, 19 nt, Artificial Sequence
  Description of Artificial Sequence: Synthetic oligonucleotide
  modified_base (5)..(5): a, c, u, g, unknown or other
ggganaucugcaagggccc

SEQ ID NO: 1887041 - RNA, 19 nt, Artificial Sequence
  Description of Artificial Sequence: Synthetic oligonucleotide
auaccguuuuaugagucuu

SEQ ID NO: 1887042 - RNA, 19 nt, Artificial Sequence
  Description of Artificial Sequence: Synthetic oligonucleotide
gauccgcaugacgaaauaa

SEQ ID NO: 1887043 - RNA, 19 nt, Artificial Sequence
  Description of Artificial Sequence: Synthetic oligonucleotide
ccgacagguaauauaaaga

SEQ ID NO: 1887044 - RNA, 19 nt, Artificial Sequence
  Description of Artificial Sequence: Synthetic oligonucleotide
cucguucgcagggaggaug

SEQ ID NO: 1887045 - RNA, 19 nt, Artificial Sequence
  Description of Artificial Sequence: Synthetic oligonucleotide
guucauaacgaaggcugga

SEQ ID NO: 1887046 - RNA, 19 nt, Artificial Sequence
  Description of Artificial Sequence: Synthetic oligonucleotide
uugucuacuugggcuuuca

SEQ ID NO: 1887047 - RNA, 19 nt, Artificial Sequence
  Description of Artificial Sequence: Synthetic oligonucleotide
agugauccgcaugacgaaa

SEQ ID NO: 1887048 - RNA, 19 nt, Artificial Sequence
  Description of Artificial Sequence: Synthetic oligonucleotide
gcuauagucagagcuugac

SEQ ID NO: 1887049 - RNA, 19 nt, Artificial Sequence
  Description of Artificial Sequence: Synthetic oligonucleotide
gcuguuaaaacugugugau

SEQ ID NO: 1887050 - RNA, 19 nt, Artificial Sequence
  Description of Artificial Sequence: Synthetic oligonucleotide
cauaaaggacauauccaau

SEQ ID NO: 1887051 - RNA, 19 nt, Artificial Sequence
  Description of Artificial Sequence: Synthetic oligonucleotide
gguaugagcuauuaaucau

SEQ ID NO: 1887052 - RNA, 19 nt, Artificial Sequence
  Description of Artificial Sequence: Synthetic oligonucleotide
aacucucgaguuagacuga

SEQ ID NO: 1887053 - RNA, 19 nt, Artificial Sequence
  Description of Artificial Sequence: Synthetic oligonucleotide
gauggcuaauucuuccguu

SEQ ID NO: 1887054 - RNA, 19 nt, Artificial Sequence
  Description of Artificial Sequence: Synthetic oligonucleotide
ccucauucacaucucagca

SEQ ID NO: 1887055 - RNA, 19 nt, Artificial Sequence
  Description of Artificial Sequence: Synthetic oligonucleotide
ggauaaccaaaaguuuuga

SEQ ID NO: 1887056 - RNA, 19 nt, Artificial Sequence
  Description of Artificial Sequence: Synthetic oligonucleotide
cucucguucgcagggagga

SEQ ID NO: 1887057 - RNA, 19 nt, Artificial Sequence
  Description of Artificial Sequence: Synthetic oligonucleotide
gagcuugacugcggguugc

SEQ ID NO: 1887058 - RNA, 19 nt, Artificial Sequence
  Description of Artificial Sequence: Synthetic oligonucleotide
gcuuaauuuuaaaguugug

SEQ ID NO: 1887059 - RNA, 19 nt, Artificial Sequence
  Description of Artificial Sequence: Synthetic oligonucleotide
cucuuagaggccgacaggu

SEQ ID NO: 1887060 - RNA, 19 nt, Artificial Sequence
  Description of Artificial Sequence: Synthetic oligonucleotide
  modified_base (3)..(3): a, c, u, g, unknown or other
ganaucugcaagggcccaa

SEQ ID NO: 1887061 - RNA, 19 nt, Artificial Sequence
  Description of Artificial Sequence: Synthetic oligonucleotide
uaucugcugauagcguguu

SEQ ID NO: 1887062 - RNA, 19 nt, Artificial Sequence
  Description of Artificial Sequence: Synthetic oligonucleotide
gaauauuauugcccacauu

SEQ ID NO: 1887063 - RNA, 19 nt, Artificial Sequence
  Description of Artificial Sequence: Synthetic oligonucleotide
ccuucacaguccuuccaag

SEQ ID NO: 1887064 - RNA, 19 nt, Artificial Sequence
  Description of Artificial Sequence: Synthetic oligonucleotide
ccgcaugacgaaauaaaca

SEQ ID NO: 1887065 - RNA, 19 nt, Artificial Sequence
  Description of Artificial Sequence: Synthetic oligonucleotide
ggaauauuauugcccacau

SEQ ID NO: 1887066 - RNA, 19 nt, Artificial Sequence
  Description of Artificial Sequence: Synthetic oligonucleotide
ggagauaucuugcuugauu

SEQ ID NO: 1887067 - RNA, 19 nt, Artificial Sequence
  Description of Artificial Sequence: Synthetic oligonucleotide
uauguccuucacaguccuu

SEQ ID NO: 1887068 - RNA, 19 nt, Artificial Sequence
  Description of Artificial Sequence: Synthetic oligonucleotide
gaguuacccauucccacuu

SEQ ID NO: 1887069 - RNA, 19 nt, Artificial Sequence
  Description of Artificial Sequence: Synthetic oligonucleotide
ggaccaaaacaaagucuug

SEQ ID NO: 1887070 - RNA, 19 nt, Artificial Sequence
  Description of Artificial Sequence: Synthetic oligonucleotide
uggagauaucuugcuugau

SEQ ID NO: 1887071 - RNA, 19 nt, Artificial Sequence
  Description of Artificial Sequence: Synthetic oligonucleotide
augaaucaagauggcuaau

SEQ ID NO: 1887072 - RNA, 19 nt, Artificial Sequence
  Description of Artificial Sequence: Synthetic oligonucleotide
ugcuugcaauguugagguc

SEQ ID NO: 1887073 - RNA, 19 nt, Artificial Sequence
  Description of Artificial Sequence: Synthetic oligonucleotide
caccauaguuacauuguau

SEQ ID NO: 1887074 - RNA, 19 nt, Artificial Sequence
  Description of Artificial Sequence: Synthetic oligonucleotide
ggaggauguaugcaauccu

SEQ ID NO: 1887075 - RNA, 19 nt, Artificial Sequence
  Description of Artificial Sequence: Synthetic oligonucleotide
ccccaagguaguaagaaua

SEQ ID NO: 1887076 - RNA, 19 nt, Artificial Sequence
  Description of Artificial Sequence: Synthetic oligonucleotide
ggaugaacaugccaaucau

SEQ ID NO: 1887077 - RNA, 19 nt, Artificial Sequence
  Description of Artificial Sequence: Synthetic oligonucleotide
cagugguaaaagcaggauu

SEQ ID NO: 1887078 - RNA, 19 nt, Artificial Sequence
  Description of Artificial Sequence: Synthetic oligonucleotide
ccuacuuaggaauauuauu

SEQ ID NO: 1887079 - RNA, 19 nt, Artificial Sequence
  Description of Artificial Sequence: Synthetic oligonucleotide
cccaagguaguaagaauaa

SEQ ID NO: 1887080 - RNA, 19 nt, Artificial Sequence
  Description of Artificial Sequence: Synthetic oligonucleotide
cacugaguuuaugaaucaa

SEQ ID NO: 1887081 - RNA, 19 nt, Artificial Sequence
  Description of Artificial Sequence: Synthetic oligonucleotide
gcaugacgaaauaaacaaa

SEQ ID NO: 1887082 - RNA, 19 nt, Artificial Sequence
  Description of Artificial Sequence: Synthetic oligonucleotide
cauauccaauauucucuau

SEQ ID NO: 1887083 - RNA, 19 nt, Artificial Sequence
  Description of Artificial Sequence: Synthetic oligonucleotide
  modified_base (4)..(4): a, c, u, g, unknown or other
gganaucugcaagggccca

SEQ ID NO: 1887084 - RNA, 19 nt, Artificial Sequence
  Description of Artificial Sequence: Synthetic oligonucleotide
ccguuuuaugagucuuuuc

SEQ ID NO: 1887085 - RNA, 19 nt, Artificial Sequence
  Description of Artificial Sequence: Synthetic oligonucleotide
auauuccauaaaggacaua

SEQ ID NO: 1887086 - RNA, 19 nt, Artificial Sequence
  Description of Artificial Sequence: Synthetic oligonucleotide
ugcggguugcugccucauu

SEQ ID NO: 1887087 - RNA, 19 nt, Artificial Sequence
  Description of Artificial Sequence: Synthetic oligonucleotide
gcuauuaaucauagcaauu

SEQ ID NO: 1887088 - RNA, 19 nt, Artificial Sequence
  Description of Artificial Sequence: Synthetic oligonucleotide
ucucguucgcagggaggau

SEQ ID NO: 1887089 - RNA, 19 nt, Artificial Sequence
  Description of Artificial Sequence: Synthetic oligonucleotide
ugauagcguguuggcugau

SEQ ID NO: 1887090 - RNA, 19 nt, Artificial Sequence
  Description of Artificial Sequence: Synthetic oligonucleotide
cagggaggauguaugcaau

SEQ ID NO: 1887091 - RNA, 19 nt, Artificial Sequence
  Description of Artificial Sequence: Synthetic oligonucleotide
uugcaauguugaggucaau

SEQ ID NO: 1887092 - RNA, 19 nt, Artificial Sequence
  Description of Artificial Sequence: Synthetic oligonucleotide
ggucaauugcugaaaucau

SEQ ID NO: 1887093 - RNA, 19 nt, Artificial Sequence
  Description of Artificial Sequence: Synthetic oligonucleotide
cagaaccaugaacuugaau

SEQ ID NO: 1887094 - RNA, 19 nt, Artificial Sequence
  Description of Artificial Sequence: Synthetic oligonucleotide
gcuaauucuuccguugcuu

SEQ ID NO: 1887095 - RNA, 19 nt, Artificial Sequence
  Description of Artificial Sequence: Synthetic oligonucleotide
gauagcguguuggcugauu

SEQ ID NO: 1887096 - RNA, 19 nt, Artificial Sequence
  Description of Artificial Sequence: Synthetic oligonucleotide
ccaccauaguuacauugua

SEQ ID NO: 1887097 - RNA, 19 nt, Artificial Sequence
  Description of Artificial Sequence: Synthetic oligonucleotide
gcaugucacugcuugcaau

SEQ ID NO: 1887098 - RNA, 19 nt, Artificial Sequence
  Description of Artificial Sequence: Synthetic oligonucleotide
ccaagguaguaagaauaaa

SEQ ID NO: 1887099 - RNA, 19 nt, Artificial Sequence
  Description of Artificial Sequence: Synthetic oligonucleotide
cucucgaguuagacugagu

SEQ ID NO: 1887100 - RNA, 19 nt, Artificial Sequence
  Description of Artificial Sequence: Synthetic oligonucleotide
gcguguuggcugauugaga

SEQ ID NO: 1887101 - RNA, 19 nt, Artificial Sequence
  Description of Artificial Sequence: Synthetic oligonucleotide
ggccgacagguaauauaaa

SEQ ID NO: 1887102 - RNA, 19 nt, Artificial Sequence
  Description of Artificial Sequence: Synthetic oligonucleotide
cugcggguugcugccucau

SEQ ID NO: 1887103 - RNA, 19 nt, Artificial Sequence
  Description of Artificial Sequence: Synthetic oligonucleotide
cguucgcagggaggaugua

SEQ ID NO: 1887104 - RNA, 19 nt, Artificial Sequence
  Description of Artificial Sequence: Synthetic oligonucleotide
  modified_base (1)..(1): a, c, u, g, unknown or other
naucugcaagggcccaaag

SEQ ID NO: 1887105 - RNA, 19 nt, Artificial Sequence
  Description of Artificial Sequence: Synthetic oligonucleotide
agaauuugaugucacacac

SEQ ID NO: 1887106 - RNA, 19 nt, Artificial Sequence
  Description of Artificial Sequence: Synthetic oligonucleotide
agauagucaccccagaagg

SEQ ID NO: 1887107 - RNA, 19 nt, Artificial Sequence
  Description of Artificial Sequence: Synthetic oligonucleotide
aguggcuugucccaaacac

SEQ ID NO: 1887108 - RNA, 19 nt, Artificial Sequence
  Description of Artificial Sequence: Synthetic oligonucleotide
cagggcaccacucagauag

SEQ ID NO: 1887109 - RNA, 19 nt, Artificial Sequence
  Description of Artificial Sequence: Synthetic oligonucleotide
acaguacucugcucgaacc

SEQ ID NO: 1887110 - RNA, 19 nt, Artificial Sequence
  Description of Artificial Sequence: Synthetic oligonucleotide
agcuccgagaauuugaugu

SEQ ID NO: 1887111 - RNA, 19 nt, Artificial Sequence
  Description of Artificial Sequence: Synthetic oligonucleotide
ugaugcaguccucagagcu

SEQ ID NO: 1887112 - RNA, 19 nt, Artificial Sequence
  Description of Artificial Sequence: Synthetic oligonucleotide
gagaagaacugcuuggcug

SEQ ID NO: 1887113 - RNA, 19 nt, Artificial Sequence
  Description of Artificial Sequence: Synthetic oligonucleotide
gacaagauggucuccuucc

SEQ ID NO: 1887114 - RNA, 19 nt, Artificial Sequence
  Description of Artificial Sequence: Synthetic oligonucleotide
agugguucaugccucaaag

SEQ ID NO: 1887115 - RNA, 19 nt, Artificial Sequence
  Description of Artificial Sequence: Synthetic oligonucleotide
gagggaauccaccugggag

SEQ ID NO: 1887116 - RNA, 19 nt, Artificial Sequence
  Description of Artificial Sequence: Synthetic oligonucleotide
agaacugcuuggcugucgc

SEQ ID NO: 1887117 - RNA, 19 nt, Artificial Sequence
  Description of Artificial Sequence: Synthetic oligonucleotide
accacucagauagucaccc

SEQ ID NO: 1887118 - RNA, 19 nt, Artificial Sequence
  Description of Artificial Sequence: Synthetic oligonucleotide
ugucacacaccacacgagc

SEQ ID NO: 1887119 - RNA, 19 nt, Artificial Sequence
  Description of Artificial Sequence: Synthetic oligonucleotide
ugcgcuuuuggaagaagag

SEQ ID NO: 1887120 - RNA, 19 nt, Artificial Sequence
  Description of Artificial Sequence: Synthetic oligonucleotide
uccacacugaccagcaagc

SEQ ID NO: 1887121 - RNA, 19 nt, Artificial Sequence
  Description of Artificial Sequence: Synthetic oligonucleotide
uccaucagcaaaaggcggc

SEQ ID NO: 1887122 - RNA, 19 nt, Artificial Sequence
  Description of Artificial Sequence: Synthetic oligonucleotide
gacgcugccguuugguugg

SEQ ID NO: 1887123 - RNA, 19 nt, Artificial Sequence
  Description of Artificial Sequence: Synthetic oligonucleotide
gagaauuugaugucacaca

SEQ ID NO: 1887124 - RNA, 19 nt, Artificial Sequence
  Description of Artificial Sequence: Synthetic oligonucleotide
gaagacgccccgaagagcc

SEQ ID NO: 1887125 - RNA, 19 nt, Artificial Sequence
  Description of Artificial Sequence: Synthetic oligonucleotide
auagucaccccagaaggcg

SEQ ID NO: 1887126 - RNA, 19 nt, Artificial Sequence
  Description of Artificial Sequence: Synthetic oligonucleotide
gaagugacagucguccagg

SEQ ID NO: 1887127 - RNA, 19 nt, Artificial Sequence
  Description of Artificial Sequence: Synthetic oligonucleotide
cuauaggagaggcuggcag

SEQ ID NO: 1887128 - RNA, 19 nt, Artificial Sequence
  Description of Artificial Sequence: Synthetic oligonucleotide
caggaguuggcucagcagc

SEQ ID NO: 1887129 - RNA, 19 nt, Artificial Sequence
  Description of Artificial Sequence: Synthetic oligonucleotide
aagcggacugcuucccggc

SEQ ID NO: 1887130 - RNA, 19 nt, Artificial Sequence
  Description of Artificial Sequence: Synthetic oligonucleotide
agcugggagugguucaugc

SEQ ID NO: 1887131 - RNA, 19 nt, Artificial Sequence
  Description of Artificial Sequence: Synthetic oligonucleotide
ucacacaccacacgagccc

SEQ ID NO: 1887132 - RNA, 19 nt, Artificial Sequence
  Description of Artificial Sequence: Synthetic oligonucleotide
uugucccaaacacauccag

SEQ ID NO: 1887133 - RNA, 19 nt, Artificial Sequence
  Description of Artificial Sequence: Synthetic oligonucleotide
cauccuauaggagaggcug

SEQ ID NO: 1887134 - RNA, 19 nt, Artificial Sequence
  Description of Artificial Sequence: Synthetic oligonucleotide
cagauagucaccccagaag

SEQ ID NO: 1887135 - RNA, 19 nt, Artificial Sequence
  Description of Artificial Sequence: Synthetic oligonucleotide
ucagauagucaccccagaa

SEQ ID NO: 1887136 - RNA, 19 nt, Artificial Sequence
  Description of Artificial Sequence: Synthetic oligonucleotide
gugacagucguccagggga

SEQ ID NO: 1887137 - RNA, 19 nt, Artificial Sequence
  Description of Artificial Sequence: Synthetic oligonucleotide
ugagaagaacugcuuggcu

SEQ ID NO: 1887138 - RNA, 19 nt, Artificial Sequence
  Description of Artificial Sequence: Synthetic oligonucleotide
accgcagcacagcaguggc

SEQ ID NO: 1887139 - RNA, 19 nt, Artificial Sequence
  Description of Artificial Sequence: Synthetic oligonucleotide
ucguuccagcuccagaagc

SEQ ID NO: 1887140 - RNA, 19 nt, Artificial Sequence
  Description of Artificial Sequence: Synthetic oligonucleotide
cacagcaguggcuuguccc

SEQ ID NO: 1887141 - RNA, 19 nt, Artificial Sequence
  Description of Artificial Sequence: Synthetic oligonucleotide
uccaaguaggagagcuccg

SEQ ID NO: 1887142 - RNA, 19 nt, Artificial Sequence
  Description of Artificial Sequence: Synthetic oligonucleotide
aguacucugcucgaacccg

SEQ ID NO: 1887143 - RNA, 19 nt, Artificial Sequence
  Description of Artificial Sequence: Synthetic oligonucleotide
ucuccgggaugccacaccc

SEQ ID NO: 1887144 - RNA, 19 nt, Artificial Sequence
  Description of Artificial Sequence: Synthetic oligonucleotide
ugcuucccggcccacagcc

SEQ ID NO: 1887145 - RNA, 19 nt, Artificial Sequence
  Description of Artificial Sequence: Synthetic oligonucleotide
ucagcaaaaggcggcgccg

SEQ ID NO: 1887146 - RNA, 19 nt, Artificial Sequence
  Description of Artificial Sequence: Synthetic oligonucleotide
cugccguuugguuggaggg

SEQ ID NO: 1887147 - RNA, 19 nt, Artificial Sequence
  Description of Artificial Sequence: Synthetic oligonucleotide
gaauuugaugucacacacc

SEQ ID NO: 1887148 - RNA, 19 nt, Artificial Sequence
  Description of Artificial Sequence: Synthetic oligonucleotide
agccggaugucacagguca

SEQ ID NO: 1887149 - RNA, 19 nt, Artificial Sequence
  Description of Artificial Sequence: Synthetic oligonucleotide
gggaguuugggauggaagc

SEQ ID NO: 1887150 - RNA, 19 nt, Artificial Sequence
  Description of Artificial Sequence: Synthetic oligonucleotide
uccgagaauuugaugucac

SEQ ID NO: 1887151 - RNA, 19 nt, Artificial Sequence
  Description of Artificial Sequence: Synthetic oligonucleotide
uugguuggaggggagcccg

SEQ ID NO: 1887152 - RNA, 19 nt, Artificial Sequence
  Description of Artificial Sequence: Synthetic oligonucleotide
uccgggaugccacacccug

SEQ ID NO: 1887153 - RNA, 19 nt, Artificial Sequence
  Description of Artificial Sequence: Synthetic oligonucleotide
cagauguggcagcaggucc

SEQ ID NO: 1887154 - RNA, 19 nt, Artificial Sequence
  Description of Artificial Sequence: Synthetic oligonucleotide
uggcaccacugcuagggcg

SEQ ID NO: 1887155 - RNA, 19 nt, Artificial Sequence
  Description of Artificial Sequence: Synthetic oligonucleotide
gucagccucguccacacug

SEQ ID NO: 1887156 - RNA, 19 nt, Artificial Sequence
  Description of Artificial Sequence: Synthetic oligonucleotide
caagcggacugcuucccgg

SEQ ID NO: 1887157 - RNA, 19 nt, Artificial Sequence
  Description of Artificial Sequence: Synthetic oligonucleotide
aggaguuggcucagcagcc

SEQ ID NO: 1887158 - RNA, 19 nt, Artificial Sequence
  Description of Artificial Sequence: Synthetic oligonucleotide
guccaaguaggagagcucc

SEQ ID NO: 1887159 - RNA, 19 nt, Artificial Sequence
  Description of Artificial Sequence: Synthetic oligonucleotide
acugcuucccggcccacag

SEQ ID NO: 1887160 - RNA, 19 nt, Artificial Sequence
  Description of Artificial Sequence: Synthetic oligonucleotide
cacauccuauaggagaggc

SEQ ID NO: 1887161 - RNA, 19 nt, Artificial Sequence
  Description of Artificial Sequence: Synthetic oligonucleotide
aggccucugucccacgacg

SEQ ID NO: 1887162 - RNA, 19 nt, Artificial Sequence
  Description of Artificial Sequence: Synthetic oligonucleotide
caguacucugcucgaaccc

SEQ ID NO: 1887163 - RNA, 19 nt, Artificial Sequence
  Description of Artificial Sequence: Synthetic oligonucleotide
aaggcuggcccgugcucac

SEQ ID NO: 1887164 - RNA, 19 nt, Artificial Sequence
  Description of Artificial Sequence: Synthetic oligonucleotide
accacugcuagggcggccc

SEQ ID NO: 1887165 - RNA, 19 nt, Artificial Sequence
  Description of Artificial Sequence: Synthetic oligonucleotide
ucacacucggucagcugcc

SEQ ID NO: 1887166 - RNA, 19 nt, Artificial Sequence
  Description of Artificial Sequence: Synthetic oligonucleotide
ucagccucguccacacuga

SEQ ID NO: 1887167 - RNA, 19 nt, Artificial Sequence
  Description of Artificial Sequence: Synthetic oligonucleotide
agcgccugaggucuccggg

SEQ ID NO: 1887168 - RNA, 19 nt, Artificial Sequence
  Description of Artificial Sequence: Synthetic oligonucleotide
gcucucgucgcacuggccg

SEQ ID NO: 1887169 - RNA, 19 nt, Artificial Sequence
  Description of Artificial Sequence: Synthetic oligonucleotide
ucccuugaccgcagcacag

SEQ ID NO: 1887170 - RNA, 19 nt, Artificial Sequence
  Description of Artificial Sequence: Synthetic oligonucleotide
caaguaggagagcuccgag

SEQ ID NO: 1887171 - RNA, 19 nt, Artificial Sequence
  Description of Artificial Sequence: Synthetic oligonucleotide
gugguucaugccucaaagc

SEQ ID NO: 1887172 - RNA, 19 nt, Artificial Sequence
  Description of Artificial Sequence: Synthetic oligonucleotide
ugacagucguccaggggac

SEQ ID NO: 1887173 - RNA, 19 nt, Artificial Sequence
  Description of Artificial Sequence: Synthetic oligonucleotide
ugucgggccagcacgcgca

SEQ ID NO: 1887174 - RNA, 19 nt, Artificial Sequence
  Description of Artificial Sequence: Synthetic oligonucleotide
uccuauaggagaggcuggc

SEQ ID NO: 1887175 - RNA, 19 nt, Artificial Sequence
  Description of Artificial Sequence: Synthetic oligonucleotide
gaugcaguccucagagcug

SEQ ID NO: 1887176 - RNA, 19 nt, Artificial Sequence
  Description of Artificial Sequence: Synthetic oligonucleotide
uuugguuggaggggagccc

SEQ ID NO: 1887177 - RNA, 19 nt, Artificial Sequence
  Description of Artificial Sequence: Synthetic oligonucleotide
uucugaugagggccugccc

SEQ ID NO: 1887178 - RNA, 19 nt, Artificial Sequence
  Description of Artificial Sequence: Synthetic oligonucleotide
cuugaccgcagcacagcag

SEQ ID NO: 1887179 - RNA, 19 nt, Artificial Sequence
  Description of Artificial Sequence: Synthetic oligonucleotide
cacaguacucugcucgaac

SEQ ID NO: 1887180 - RNA, 19 nt, Artificial Sequence
  Description of Artificial Sequence: Synthetic oligonucleotide
uagucaccccagaaggcgu

SEQ ID NO: 1887181 - RNA, 19 nt, Artificial Sequence
  Description of Artificial Sequence: Synthetic oligonucleotide
ggcacugccauuacuguag

SEQ ID NO: 1887182 - RNA, 19 nt, Artificial Sequence
  Description of Artificial Sequence: Synthetic oligonucleotide
cauuacuguagcgcucggg

SEQ ID NO: 1887183 - RNA, 19 nt, Artificial Sequence
  Description of Artificial Sequence: Synthetic oligonucleotide
acucagauagucaccccag

SEQ ID NO: 1887184 - RNA, 19 nt, Artificial Sequence
  Description of Artificial Sequence: Synthetic oligonucleotide
ugccguuugguuggagggg

SEQ ID NO: 1887185 - RNA, 19 nt, Artificial Sequence
  Description of Artificial Sequence: Synthetic oligonucleotide
agcggacugcuucccggcc

SEQ ID NO: 1887186 - RNA, 19 nt, Artificial Sequence
  Description of Artificial Sequence: Synthetic oligonucleotide
cacacgagccccagguccc

SEQ ID NO: 1887187 - RNA, 19 nt, Artificial Sequence
  Description of Artificial Sequence: Synthetic oligonucleotide
auuugaugucacacaccac

SEQ ID NO: 1887188 - RNA, 19 nt, Artificial Sequence
  Description of Artificial Sequence: Synthetic oligonucleotide
gagagcuccgagaauuuga

SEQ ID NO: 1887189 - RNA, 19 nt, Artificial Sequence
  Description of Artificial Sequence: Synthetic oligonucleotide
gucacacaccacacgagcc

SEQ ID NO: 1887190 - RNA, 19 nt, Artificial Sequence
  Description of Artificial Sequence: Synthetic oligonucleotide
gaguuggcucagcagccgc

SEQ ID NO: 1887191 - RNA, 19 nt, Artificial Sequence
  Description of Artificial Sequence: Synthetic oligonucleotide
uugcagaccugaugcaguc

SEQ ID NO: 1887192 - RNA, 19 nt, Artificial Sequence
  Description of Artificial Sequence: Synthetic oligonucleotide
gaccugaugcaguccucag

SEQ ID NO: 1887193 - RNA, 19 nt, Artificial Sequence
  Description of Artificial Sequence: Synthetic oligonucleotide
cacucagauagucacccca

SEQ ID NO: 1887194 - RNA, 19 nt, Artificial Sequence
  Description of Artificial Sequence: Synthetic oligonucleotide
cacucggucagcugcccgc

SEQ ID NO: 1887195 - RNA, 19 nt, Artificial Sequence
  Description of Artificial Sequence: Synthetic oligonucleotide
agcaagcggacugcuuccc

SEQ ID NO: 1887196 - RNA, 19 nt, Artificial Sequence
  Description of Artificial Sequence: Synthetic oligonucleotide
gcugccguuugguuggagg

SEQ ID NO: 1887197 - RNA, 19 nt, Artificial Sequence
  Description of Artificial Sequence: Synthetic oligonucleotide
gaagaagguggcccagaga

SEQ ID NO: 1887198 - RNA, 19 nt, Artificial Sequence
  Description of Artificial Sequence: Synthetic oligonucleotide
cucugucccacgacgcccc

SEQ ID NO: 1887199 - RNA, 19 nt, Artificial Sequence
  Description of Artificial Sequence: Synthetic oligonucleotide
gcaccacucagauagucac

SEQ ID NO: 1887200 - RNA, 19 nt, Artificial Sequence
  Description of Artificial Sequence: Synthetic oligonucleotide
caccacucagauagucacc

SEQ ID NO: 1887201 - RNA, 19 nt, Artificial Sequence
  Description of Artificial Sequence: Synthetic oligonucleotide
uccuuccaaggaagaaggu

SEQ ID NO: 1887202 - RNA, 19 nt, Artificial Sequence
  Description of Artificial Sequence: Synthetic oligonucleotide
cagcaagcggacugcuucc

SEQ ID NO: 1887203 - RNA, 19 nt, Artificial Sequence
  Description of Artificial Sequence: Synthetic oligonucleotide
ugaccagcaagcggacugc

SEQ ID NO: 1887204 - RNA, 19 nt, Artificial Sequence
  Description of Artificial Sequence: Synthetic oligonucleotide
ucugcgcuuuuggaagaag

SEQ ID NO: 1887205 - RNA, 19 nt, Artificial Sequence
  Description of Artificial Sequence: Synthetic oligonucleotide
ggcgccgggagccucaucc

SEQ ID NO: 1887206 - RNA, 19 nt, Artificial Sequence
  Description of Artificial Sequence: Synthetic oligonucleotide
acacucggucagcugcccg

SEQ ID NO: 1887207 - RNA, 19 nt, Artificial Sequence
  Description of Artificial Sequence: Synthetic oligonucleotide
guacucugcucgaacccgg

SEQ ID NO: 1887208 - RNA, 19 nt, Artificial Sequence
  Description of Artificial Sequence: Synthetic oligonucleotide
accacacgagccccagguc

SEQ ID NO: 1887209 - RNA, 19 nt, Artificial Sequence
  Description of Artificial Sequence: Synthetic oligonucleotide
gagcccgugucccacugac

SEQ ID NO: 1887210 - RNA, 19 nt, Artificial Sequence
  Description of Artificial Sequence: Synthetic oligonucleotide
cugcgcuuuuggaagaaga

SEQ ID NO: 1887211 - RNA, 19 nt, Artificial Sequence
  Description of Artificial Sequence: Synthetic oligonucleotide
gcgcuuuuggaagaagagg

SEQ ID NO: 1887212 - RNA, 19 nt, Artificial Sequence
  Description of Artificial Sequence: Synthetic oligonucleotide
augagggccugcccagcuc

SEQ ID NO: 1887213 - RNA, 19 nt, Artificial Sequence
  Description of Artificial Sequence: Synthetic oligonucleotide
gagcuccgagaauuugaug

SEQ ID NO: 1887214 - RNA, 19 nt, Artificial Sequence
  Description of Artificial Sequence: Synthetic oligonucleotide
aguucacacucggucagcu

SEQ ID NO: 1887215 - RNA, 19 nt, Artificial Sequence
  Description of Artificial Sequence: Synthetic oligonucleotide
agaccugaugcaguccuca

SEQ ID NO: 1887216 - RNA, 19 nt, Artificial Sequence
  Description of Artificial Sequence: Synthetic oligonucleotide
agauguggcagcagguccu

SEQ ID NO: 1887217 - RNA, 19 nt, Artificial Sequence
  Description of Artificial Sequence: Synthetic oligonucleotide
ucggucagcugcccgccca

SEQ ID NO: 1887218 - RNA, 19 nt, Artificial Sequence
  Description of Artificial Sequence: Synthetic oligonucleotide
ucgaacccggagccggaug

SEQ ID NO: 1887219 - RNA, 19 nt, Artificial Sequence
  Description of Artificial Sequence: Synthetic oligonucleotide
cucucgucgcacuggccgc

SEQ ID NO: 1887220 - RNA, 19 nt, Artificial Sequence
  Description of Artificial Sequence: Synthetic oligonucleotide
gaacugcuuggcugucgcc

SEQ ID NO: 1887221 - RNA, 19 nt, Artificial Sequence
  Description of Artificial Sequence: Synthetic oligonucleotide
cacccugcuccaaggcugg

SEQ ID NO: 1887222 - RNA, 19 nt, Artificial Sequence
  Description of Artificial Sequence: Synthetic oligonucleotide
ugaccgcagcacagcagug

SEQ ID NO: 1887223 - RNA, 19 nt, Artificial Sequence
  Description of Artificial Sequence: Synthetic oligonucleotide
agccucguccacacugacc

SEQ ID NO: 1887224 - RNA, 19 nt, Artificial Sequence
  Description of Artificial Sequence: Synthetic oligonucleotide
uggcugucgccgacgccgg

SEQ ID NO: 1887225 - RNA, 19 nt, Artificial Sequence
  Description of Artificial Sequence: Synthetic oligonucleotide
cccucugcgcuuuuggaag

SEQ ID NO: 1887226 - RNA, 19 nt, Artificial Sequence
  Description of Artificial Sequence: Synthetic oligonucleotide
cgagaauuugaugucacac

SEQ ID NO: 1887227 - RNA, 19 nt, Artificial Sequence
  Description of Artificial Sequence: Synthetic oligonucleotide
cugggagcggggaguuugg

SEQ ID NO: 1887228 - RNA, 19 nt, Artificial Sequence
  Description of Artificial Sequence: Synthetic oligonucleotide
aggggacaagauggucucc

SEQ ID NO: 1887229 - RNA, 19 nt, Artificial Sequence
  Description of Artificial Sequence: Synthetic oligonucleotide
ccacacgagccccaggucc

SEQ ID NO: 1887230 - RNA, 19 nt, Artificial Sequence
  Description of Artificial Sequence: Synthetic oligonucleotide
gagugguucaugccucaaa

SEQ ID NO: 1887231 - RNA, 19 nt, Artificial Sequence
  Description of Artificial Sequence: Synthetic oligonucleotide
ugcagaccugaugcagucc

SEQ ID NO: 1887232 - RNA, 19 nt, Artificial Sequence
  Description of Artificial Sequence: Synthetic oligonucleotide
gauguggcagcagguccug

SEQ ID NO: 1887233 - RNA, 19 nt, Artificial Sequence
  Description of Artificial Sequence: Synthetic oligonucleotide
augucacaggucacuuuuc

SEQ ID NO: 1887234 - RNA, 19 nt, Artificial Sequence
  Description of Artificial Sequence: Synthetic oligonucleotide
cagcaaaaggcggcgccgg

SEQ ID NO: 1887235 - RNA, 19 nt, Artificial Sequence
  Description of Artificial Sequence: Synthetic oligonucleotide
gcaggaguuggcucagcag

SEQ ID NO: 1887236 - RNA, 19 nt, Artificial Sequence
  Description of Artificial Sequence: Synthetic oligonucleotide
cucacaguacucugcucga

SEQ ID NO: 1887237 - RNA, 19 nt, Artificial Sequence
  Description of Artificial Sequence: Synthetic oligonucleotide
ggcggcacugccauuacug

SEQ ID NO: 1887238 - RNA, 19 nt, Artificial Sequence
  Description of Artificial Sequence: Synthetic oligonucleotide
cuucccggcccacagccuc

SEQ ID NO: 1887239 - RNA, 19 nt, Artificial Sequence
  Description of Artificial Sequence: Synthetic oligonucleotide
ggggaguuugggauggaag

SEQ ID NO: 1887240 - RNA, 19 nt, Artificial Sequence
  Description of Artificial Sequence: Synthetic oligonucleotide
ucccacugacucugcugag

SEQ ID NO: 1887241 - RNA, 19 nt, Artificial Sequence
  Description of Artificial Sequence: Synthetic oligonucleotide
caaaaggcggcgccggcca

SEQ ID NO: 1887242 - RNA, 19 nt, Artificial Sequence
  Description of Artificial Sequence: Synthetic oligonucleotide
cuggccgcgucguuccagc

SEQ ID NO: 1887243 - RNA, 19 nt, Artificial Sequence
  Description of Artificial Sequence: Synthetic oligonucleotide
ccuuccaaggaagaaggug

SEQ ID NO: 1887244 - RNA, 19 nt, Artificial Sequence
  Description of Artificial Sequence: Synthetic oligonucleotide
acaccacacgagccccagg

SEQ ID NO: 1887245 - RNA, 19 nt, Artificial Sequence
  Description of Artificial Sequence: Synthetic oligonucleotide
gucccuugaccgcagcaca

SEQ ID NO: 1887246 - RNA, 19 nt, Artificial Sequence
  Description of Artificial Sequence: Synthetic oligonucleotide
ggacaagauggucuccuuc

SEQ ID NO: 1887247 - RNA, 19 nt, Artificial Sequence
  Description of Artificial Sequence: Synthetic oligonucleotide
gccgcgucguuccagcucc

SEQ ID NO: 1887248 - RNA, 19 nt, Artificial Sequence
  Description of Artificial Sequence: Synthetic oligonucleotide
agucaccccagaaggcguc

SEQ ID NO: 1887249 - RNA, 19 nt, Artificial Sequence
  Description of Artificial Sequence: Synthetic oligonucleotide
gaagguggcccagagacuu

SEQ ID NO: 1887250 - RNA, 19 nt, Artificial Sequence
  Description of Artificial Sequence: Synthetic oligonucleotide
agucguccaggggacaaga

SEQ ID NO: 1887251 - RNA, 19 nt, Artificial Sequence
  Description of Artificial Sequence: Synthetic oligonucleotide
gaggccucugucccacgac

SEQ ID NO: 1887252 - RNA, 19 nt, Artificial Sequence
  Description of Artificial Sequence: Synthetic oligonucleotide
uucccggcccacagccucc

SEQ ID NO: 1887253 - RNA, 19 nt, Artificial Sequence
  Description of Artificial Sequence: Synthetic oligonucleotide
ccaguucacacucggucag

SEQ ID NO: 1887254 - RNA, 19 nt, Artificial Sequence
  Description of Artificial Sequence: Synthetic oligonucleotide
aggucccuugaccgcagca

SEQ ID NO: 1887255 - RNA, 19 nt, Artificial Sequence
  Description of Artificial Sequence: Synthetic oligonucleotide
acauccuauaggagaggcu

SEQ ID NO: 1887256 - RNA, 19 nt, Artificial Sequence
  Description of Artificial Sequence: Synthetic oligonucleotide
cagccucguagucagccuc

SEQ ID NO: 1887257 - RNA, 19 nt, Artificial Sequence
  Description of Artificial Sequence: Synthetic oligonucleotide
ccgcaggucgcucucgucg

SEQ ID NO: 1887258 - RNA, 19 nt, Artificial Sequence
  Description of Artificial Sequence: Synthetic oligonucleotide
gaagagccugcagcagggc

SEQ ID NO: 1887259 - RNA, 19 nt, Artificial Sequence
  Description of Artificial Sequence: Synthetic oligonucleotide
cagcacgcgcaggaguugg

SEQ ID NO: 1887260 - RNA, 19 nt, Artificial Sequence
  Description of Artificial Sequence: Synthetic oligonucleotide
guggcuugucccaaacaca

SEQ ID NO: 1887261 - RNA, 19 nt, Artificial Sequence
  Description of Artificial Sequence: Synthetic oligonucleotide
uccgacgcugccguuuggu

SEQ ID NO: 1887262 - RNA, 19 nt, Artificial Sequence
  Description of Artificial Sequence: Synthetic oligonucleotide
cugucgggccagcacgcgc

SEQ ID NO: 1887263 - RNA, 19 nt, Artificial Sequence
  Description of Artificial Sequence: Synthetic oligonucleotide
ugcucacaguacucugcuc

SEQ ID NO: 1887264 - RNA, 19 nt, Artificial Sequence
  Description of Artificial Sequence: Synthetic oligonucleotide
ggaguuugggauggaagca

SEQ ID NO: 1887265 - RNA, 19 nt, Artificial Sequence
  Description of Artificial Sequence: Synthetic oligonucleotide
uccaggggacaagaugguc

SEQ ID NO: 1887266 - RNA, 19 nt, Artificial Sequence
  Description of Artificial Sequence: Synthetic oligonucleotide
gucuccgggaugccacacc

SEQ ID NO: 1887267 - RNA, 19 nt, Artificial Sequence
  Description of Artificial Sequence: Synthetic oligonucleotide
cugcuccaaggcuggcccg

SEQ ID NO: 1887268 - RNA, 19 nt, Artificial Sequence
  Description of Artificial Sequence: Synthetic oligonucleotide
cucagauagucaccccaga

SEQ ID NO: 1887269 - RNA, 19 nt, Artificial Sequence
  Description of Artificial Sequence: Synthetic oligonucleotide
ggaucaggaggccucuguc

SEQ ID NO: 1887270 - RNA, 19 nt, Artificial Sequence
  Description of Artificial Sequence: Synthetic oligonucleotide
cugccauuacuguagcgcu

SEQ ID NO: 1887271 - RNA, 19 nt, Artificial Sequence
  Description of Artificial Sequence: Synthetic oligonucleotide
cugcugcugcugcugcucc

SEQ ID NO: 1887272 - RNA, 19 nt, Artificial Sequence
  Description of Artificial Sequence: Synthetic oligonucleotide
gcuagggcggccccgacuc

SEQ ID NO: 1887273 - RNA, 19 nt, Artificial Sequence
  Description of Artificial Sequence: Synthetic oligonucleotide
cacgcgcaggaguuggcuc

SEQ ID NO: 1887274 - RNA, 19 nt, Artificial Sequence
  Description of Artificial Sequence: Synthetic oligonucleotide
cuccgagaauuugauguca

SEQ ID NO: 1887275 - RNA, 19 nt, Artificial Sequence
  Description of Artificial Sequence: Synthetic oligonucleotide
cucaaagcccacauccuau

SEQ ID NO: 1887276 - RNA, 19 nt, Artificial Sequence
  Description of Artificial Sequence: Synthetic oligonucleotide
gcucagcaaaccuggcccc

SEQ ID NO: 1887277 - RNA, 19 nt, Artificial Sequence
  Description of Artificial Sequence: Synthetic oligonucleotide
ccaucagcaaaaggcggcg

SEQ ID NO: 1887278 - RNA, 19 nt, Artificial Sequence
  Description of Artificial Sequence: Synthetic oligonucleotide
gcaagcggacugcuucccg

SEQ ID NO: 1887279 - RNA, 19 nt, Artificial Sequence
  Description of Artificial Sequence: Synthetic oligonucleotide
uucaugccucaaagcccac

SEQ ID NO: 1887280 - RNA, 19 nt, Artificial Sequence
  Description of Artificial Sequence: Synthetic oligonucleotide
cuuggcugucgccgacgcc

SEQ ID NO: 1887281 - RNA, 19 nt, Artificial Sequence
  Description of Artificial Sequence: Synthetic oligonucleotide
cugucgccgacgccggcag

SEQ ID NO: 1887282 - RNA, 19 nt, Artificial Sequence
  Description of Artificial Sequence: Synthetic oligonucleotide
ugcuccaaggcuggcccgu

SEQ ID NO: 1887283 - RNA, 19 nt, Artificial Sequence
  Description of Artificial Sequence: Synthetic oligonucleotide
gcccgugucccacugacuc

SEQ ID NO: 1887284 - RNA, 19 nt, Artificial Sequence
  Description of Artificial Sequence: Synthetic oligonucleotide
gacgccggcagcugcccuc

SEQ ID NO: 1887285 - RNA, 19 nt, Artificial Sequence
  Description of Artificial Sequence: Synthetic oligonucleotide
ccagagacuuggagguggg

SEQ ID NO: 1887286 - RNA, 19 nt, Artificial Sequence
  Description of Artificial Sequence: Synthetic oligonucleotide
uggcaggaacuugcagacc

SEQ ID NO: 1887287 - RNA, 19 nt, Artificial Sequence
  Description of Artificial Sequence: Synthetic oligonucleotide
agcacgcgcaggaguuggc

SEQ ID NO: 1887288 - RNA, 19 nt, Artificial Sequence
  Description of Artificial Sequence: Synthetic oligonucleotide
ugcugcugcugcugcugcu

SEQ ID NO: 1887289 - RNA, 19 nt, Artificial Sequence
  Description of Artificial Sequence: Synthetic oligonucleotide
cauccagcugccgggccag

SEQ ID NO: 1887290 - RNA, 19 nt, Artificial Sequence
  Description of Artificial Sequence: Synthetic oligonucleotide
aagguggcccagagacuug

SEQ ID NO: 1887291 - RNA, 19 nt, Artificial Sequence
  Description of Artificial Sequence: Synthetic oligonucleotide
gugcugcugcugcugcugc

SEQ ID NO: 1887292 - RNA, 19 nt, Artificial Sequence
  Description of Artificial Sequence: Synthetic oligonucleotide
caguucacacucggucagc

SEQ ID NO: 1887293 - RNA, 19 nt, Artificial Sequence
  Description of Artificial Sequence: Synthetic oligonucleotide
ugcccgcccaccaccucga

SEQ ID NO: 1887294 - RNA, 19 nt, Artificial Sequence
  Description of Artificial Sequence: Synthetic oligonucleotide
agacgccccgaagagccug

SEQ ID NO: 1887295 - RNA, 19 nt, Artificial Sequence
  Description of Artificial Sequence: Synthetic oligonucleotide
acugcuagggcggccccga

SEQ ID NO: 1887296 - RNA, 19 nt, Artificial Sequence
  Description of Artificial Sequence: Synthetic oligonucleotide
ccaccucgaacacacggug

SEQ ID NO: 1887297 - RNA, 19 nt, Artificial Sequence
  Description of Artificial Sequence: Synthetic oligonucleotide
agcaguggcuugucccaaa

SEQ ID NO: 1887298 - RNA, 19 nt, Artificial Sequence
  Description of Artificial Sequence: Synthetic oligonucleotide
caccucgaacacacgguga

SEQ ID NO: 1887299 - RNA, 19 nt, Artificial Sequence
  Description of Artificial Sequence: Synthetic oligonucleotide
ggaagacgccccgaagagc

SEQ ID NO: 1887300 - RNA, 19 nt, Artificial Sequence
  Description of Artificial Sequence: Synthetic oligonucleotide
agcccacauccuauaggag

SEQ ID NO: 1887301 - RNA, 19 nt, Artificial Sequence
  Description of Artificial Sequence: Synthetic oligonucleotide
ggggacaccggccggcgcc

SEQ ID NO: 1887302 - RNA, 19 nt, Artificial Sequence
  Description of Artificial Sequence: Synthetic oligonucleotide
cagaccugaugcaguccuc

SEQ ID NO: 1887303 - RNA, 19 nt, Artificial Sequence
  Description of Artificial Sequence: Synthetic oligonucleotide
ccgcccaccaccucgaaca

SEQ ID NO: 1887304 - RNA, 19 nt, Artificial Sequence
  Description of Artificial Sequence: Synthetic oligonucleotide
gaggcggcacugccauuac

SEQ ID NO: 1887305 - RNA, 19 nt, Artificial Sequence
  Description of Artificial Sequence: Synthetic oligonucleotide
caaggcuggcccgugcuca

SEQ ID NO: 1887306 - RNA, 19 nt, Artificial Sequence
  Description of Artificial Sequence: Synthetic oligonucleotide
ggagcggggaguuugggau

SEQ ID NO: 1887307 - RNA, 19 nt, Artificial Sequence
  Description of Artificial Sequence: Synthetic oligonucleotide
aggucuccgggaugccaca

SEQ ID NO: 1887308 - RNA, 19 nt, Artificial Sequence
  Description of Artificial Sequence: Synthetic oligonucleotide
ggucccuugaccgcagcac

SEQ ID NO: 1887309 - RNA, 19 nt, Artificial Sequence
  Description of Artificial Sequence: Synthetic oligonucleotide
gcacuggccgcgucguucc

SEQ ID NO: 1887310 - RNA, 19 nt, Artificial Sequence
  Description of Artificial Sequence: Synthetic oligonucleotide
uccugcuuuggggcucagc

SEQ ID NO: 1887311 - RNA, 19 nt, Artificial Sequence
  Description of Artificial Sequence: Synthetic oligonucleotide
acugaccagcaagcggacu

SEQ ID NO: 1887312 - RNA, 19 nt, Artificial Sequence
  Description of Artificial Sequence: Synthetic oligonucleotide
cagcgccugaggucuccgg

SEQ ID NO: 1887313 - RNA, 19 nt, Artificial Sequence
  Description of Artificial Sequence: Synthetic oligonucleotide
gcgccggccagccucguag

SEQ ID NO: 1887314 - RNA, 19 nt, Artificial Sequence
  Description of Artificial Sequence: Synthetic oligonucleotide
ggugcugcugcugcugcug

SEQ ID NO: 1887315 - RNA, 19 nt, Artificial Sequence
  Description of Artificial Sequence: Synthetic oligonucleotide
gggccugcccagcuccugg

SEQ ID NO: 1887316 - RNA, 19 nt, Artificial Sequence
  Description of Artificial Sequence: Synthetic oligonucleotide
caccacacgagccccaggu

SEQ ID NO: 1887317 - RNA, 19 nt, Artificial Sequence
  Description of Artificial Sequence: Synthetic oligonucleotide
ugcgggcccugcucucugc

SEQ ID NO: 1887318 - RNA, 19 nt, Artificial Sequence
  Description of Artificial Sequence: Synthetic oligonucleotide
gcuuggcugucgccgacgc

SEQ ID NO: 1887319 - RNA, 19 nt, Artificial Sequence
  Description of Artificial Sequence: Synthetic oligonucleotide
ggagccggaugucacaggu

SEQ ID NO: 1887320 - RNA, 19 nt, Artificial Sequence
  Description of Artificial Sequence: Synthetic oligonucleotide
gguccugucgggccagcac

SEQ ID NO: 1887321 - RNA, 19 nt, Artificial Sequence
  Description of Artificial Sequence: Synthetic oligonucleotide
gcaaaaggcggcgccggcc

SEQ ID NO: 1887322 - RNA, 19 nt, Artificial Sequence
  Description of Artificial Sequence: Synthetic oligonucleotide
cugcuucccggcccacagc

SEQ ID NO: 1887323 - RNA, 19 nt, Artificial Sequence
  Description of Artificial Sequence: Synthetic oligonucleotide
ccggcagcugcccucugcg

SEQ ID NO: 1887324 - RNA, 19 nt, Artificial Sequence
  Description of Artificial Sequence: Synthetic oligonucleotide
ucucugccgccgccuggca

SEQ ID NO: 1887325 - RNA, 19 nt, Artificial Sequence
  Description of Artificial Sequence: Synthetic oligonucleotide
cacacucggucagcugccc

SEQ ID NO: 1887326 - RNA, 19 nt, Artificial Sequence
  Description of Artificial Sequence: Synthetic oligonucleotide
gcagaccugaugcaguccu

SEQ ID NO: 1887327 - RNA, 19 nt, Artificial Sequence
  Description of Artificial Sequence: Synthetic oligonucleotide
ggcaccacucagauaguca

SEQ ID NO: 1887328 - RNA, 19 nt, Artificial Sequence
  Description of Artificial Sequence: Synthetic oligonucleotide
gacgccccgaagagccugc

SEQ ID NO: 1887329 - RNA, 19 nt, Artificial Sequence
  Description of Artificial Sequence: Synthetic oligonucleotide
cagagcugcugaagugaca

SEQ ID NO: 1887330 - RNA, 19 nt, Artificial Sequence
  Description of Artificial Sequence: Synthetic oligonucleotide
cacugcuagggcggccccg

SEQ ID NO: 1887331 - RNA, 19 nt, Artificial Sequence
  Description of Artificial Sequence: Synthetic oligonucleotide
cugcuuuggggcucagcaa

SEQ ID NO: 1887332 - RNA, 19 nt, Artificial Sequence
  Description of Artificial Sequence: Synthetic oligonucleotide
aagacgccccgaagagccu

SEQ ID NO: 1887333 - RNA, 19 nt, Artificial Sequence
  Description of Artificial Sequence: Synthetic oligonucleotide
aggcggcacugccauuacu

SEQ ID NO: 1887334 - RNA, 19 nt, Artificial Sequence
  Description of Artificial Sequence: Synthetic oligonucleotide
aggaacuugcagaccugau

SEQ ID NO: 1887335 - RNA, 19 nt, Artificial Sequence
  Description of Artificial Sequence: Synthetic oligonucleotide
guuugggauggaagcagcu

SEQ ID NO: 1887336 - RNA, 19 nt, Artificial Sequence
  Description of Artificial Sequence: Synthetic oligonucleotide
ggccucagucaggaagacg

SEQ ID NO: 1887337 - RNA, 19 nt, Artificial Sequence
  Description of Artificial Sequence: Synthetic oligonucleotide
cuagggcggccccgacucc

SEQ ID NO: 1887338 - RNA, 19 nt, Artificial Sequence
  Description of Artificial Sequence: Synthetic oligonucleotide
ccugggagcggggaguuug

SEQ ID NO: 1887339 - RNA, 19 nt, Artificial Sequence
  Description of Artificial Sequence: Synthetic oligonucleotide
ccacacugaccagcaagcg

SEQ ID NO: 1887340 - RNA, 19 nt, Artificial Sequence
  Description of Artificial Sequence: Synthetic oligonucleotide
cagccucguccacacugac

SEQ ID NO: 1887341 - RNA, 19 nt, Artificial Sequence
  Description of Artificial Sequence: Synthetic oligonucleotide
ggucgcucucgucgcacug

SEQ ID NO: 1887342 - RNA, 19 nt, Artificial Sequence
  Description of Artificial Sequence: Synthetic oligonucleotide
cucggucagcugcccgccc

SEQ ID NO: 1887343 - RNA, 19 nt, Artificial Sequence
  Description of Artificial Sequence: Synthetic oligonucleotide
cugcucgaacccggagccg

SEQ ID NO: 1887344 - RNA, 19 nt, Artificial Sequence
  Description of Artificial Sequence: Synthetic oligonucleotide
gucgggccagcacgcgcag

SEQ ID NO: 1887345 - RNA, 19 nt, Artificial Sequence
  Description of Artificial Sequence: Synthetic oligonucleotide
caggucgcucucgucgcac

SEQ ID NO: 1887346 - RNA, 19 nt, Artificial Sequence
  Description of Artificial Sequence: Synthetic oligonucleotide
gagccccaggucccuugac

SEQ ID NO: 1887347 - RNA, 19 nt, Artificial Sequence
  Description of Artificial Sequence: Synthetic oligonucleotide
ccacucagauagucacccc

SEQ ID NO: 1887348 - RNA, 19 nt, Artificial Sequence
  Description of Artificial Sequence: Synthetic oligonucleotide
accggccggcgccgcuugc

SEQ ID NO: 1887349 - RNA, 19 nt, Artificial Sequence
  Description of Artificial Sequence: Synthetic oligonucleotide
cuggcccgugcucacagua

SEQ ID NO: 1887350 - RNA, 19 nt, Artificial Sequence
  Description of Artificial Sequence: Synthetic oligonucleotide
cgacgcugccguuugguug

SEQ ID NO: 1887351 - RNA, 19 nt, Artificial Sequence
  Description of Artificial Sequence: Synthetic oligonucleotide
gacagucguccaggggaca

SEQ ID NO: 1887352 - RNA, 19 nt, Artificial Sequence
  Description of Artificial Sequence: Synthetic oligonucleotide
cuccgacgcugccguuugg

SEQ ID NO: 1887353 - RNA, 19 nt, Artificial Sequence
  Description of Artificial Sequence: Synthetic oligonucleotide
gaacccggagccggauguc

SEQ ID NO: 1887354 - RNA, 19 nt, Artificial Sequence
  Description of Artificial Sequence: Synthetic oligonucleotide
cgucguuccagcuccagaa

SEQ ID NO: 1887355 - RNA, 19 nt, Artificial Sequence
  Description of Artificial Sequence: Synthetic oligonucleotide
ggaggccucugucccacga

SEQ ID NO: 1887356 - RNA, 19 nt, Artificial Sequence
  Description of Artificial Sequence: Synthetic oligonucleotide
uggccgcgucguuccagcu

SEQ ID NO: 1887357 - RNA, 19 nt, Artificial Sequence
  Description of Artificial Sequence: Synthetic oligonucleotide
gcccucugcgcuuuuggaa

SEQ ID NO: 1887358 - RNA, 19 nt, Artificial Sequence
  Description of Artificial Sequence: Synthetic oligonucleotide
ccacauccuauaggagagg

SEQ ID NO: 1887359 - RNA, 19 nt, Artificial Sequence
  Description of Artificial Sequence: Synthetic oligonucleotide
ccauuacuguagcgcucgg

SEQ ID NO: 1887360 - RNA, 19 nt, Artificial Sequence
  Description of Artificial Sequence: Synthetic oligonucleotide
ccgagaauuugaugucaca

SEQ ID NO: 1887361 - RNA, 19 nt, Artificial Sequence
  Description of Artificial Sequence: Synthetic oligonucleotide
gguuggaggggagcccgug

SEQ ID NO: 1887362 - RNA, 19 nt, Artificial Sequence
  Description of Artificial Sequence: Synthetic oligonucleotide
gccguuugguuggagggga

SEQ ID NO: 1887363 - RNA, 19 nt, Artificial Sequence
  Description of Artificial Sequence: Synthetic oligonucleotide
ccaaguaggagagcuccga

SEQ ID NO: 1887364 - RNA, 19 nt, Artificial Sequence
  Description of Artificial Sequence: Synthetic oligonucleotide
ccacugacucugcugagaa

SEQ ID NO: 1887365 - RNA, 19 nt, Artificial Sequence
  Description of Artificial Sequence: Synthetic oligonucleotide
ucgucgcacuggccgcguc

SEQ ID NO: 1887366 - RNA, 19 nt, Artificial Sequence
  Description of Artificial Sequence: Synthetic oligonucleotide
ccgugucccacugacucug

SEQ ID NO: 1887367 - RNA, 19 nt, Artificial Sequence
  Description of Artificial Sequence: Synthetic oligonucleotide
gggagcccgugucccacug

SEQ ID NO: 1887368 - RNA, 19 nt, Artificial Sequence
  Description of Artificial Sequence: Synthetic oligonucleotide
ccuugaccgcagcacagca

SEQ ID NO: 1887369 - RNA, 19 nt, Artificial Sequence
  Description of Artificial Sequence: Synthetic oligonucleotide
ccgggaugccacacccugc

SEQ ID NO: 1887370 - RNA, 19 nt, Artificial Sequence
  Description of Artificial Sequence: Synthetic oligonucleotide
ucgccgacgccggcagcug

SEQ ID NO: 1887371 - RNA, 19 nt, Artificial Sequence
  Description of Artificial Sequence: Synthetic oligonucleotide
cagccgcaggucgcucucg

SEQ ID NO: 1887372 - RNA, 19 nt, Artificial Sequence
  Description of Artificial Sequence: Synthetic oligonucleotide
cccgacuccgacgcugccg

SEQ ID NO: 1887373 - RNA, 19 nt, Artificial Sequence
  Description of Artificial Sequence: Synthetic oligonucleotide
cgcaggucgcucucgucgc

SEQ ID NO: 1887374 - RNA, 19 nt, Artificial Sequence
  Description of Artificial Sequence: Synthetic oligonucleotide
ccucgaacacacggugaag

SEQ ID NO: 1887375 - RNA, 19 nt, Artificial Sequence
  Description of Artificial Sequence: Synthetic oligonucleotide
ccgcuugcgggccagaugu

SEQ ID NO: 1887376 - RNA, 19 nt, Artificial Sequence
  Description of Artificial Sequence: Synthetic oligonucleotide
gcugcugcugcugcugcuc

SEQ ID NO: 1887377 - RNA, 19 nt, Artificial Sequence
  Description of Artificial Sequence: Synthetic oligonucleotide
gcugcuccgcugcgggccc

SEQ ID NO: 1887378 - RNA, 19 nt, Artificial Sequence
  Description of Artificial Sequence: Synthetic oligonucleotide
cccuugaccgcagcacagc

SEQ ID NO: 1887379 - RNA, 19 nt, Artificial Sequence
  Description of Artificial Sequence: Synthetic oligonucleotide
gcgucguuccagcuccaga

SEQ ID NO: 1887380 - RNA, 19 nt, Artificial Sequence
  Description of Artificial Sequence: Synthetic oligonucleotide
cgucgcacuggccgcgucg

SEQ ID NO: 1887381 - RNA, 19 nt, Artificial Sequence
  Description of Artificial Sequence: Synthetic oligonucleotide
ccguuugguuggaggggag

SEQ ID NO: 1887382 - RNA, 19 nt, Artificial Sequence
  Description of Artificial Sequence: Synthetic oligonucleotide
gggcaccacucagauaguc

SEQ ID NO: 1887383 - RNA, 19 nt, Artificial Sequence
  Description of Artificial Sequence: Synthetic oligonucleotide
agguccugucgggccagca

SEQ ID NO: 1887384 - RNA, 19 nt, Artificial Sequence
  Description of Artificial Sequence: Synthetic oligonucleotide
agcugcccgcccaccaccu

SEQ ID NO: 1887385 - RNA, 19 nt, Artificial Sequence
  Description of Artificial Sequence: Synthetic oligonucleotide
ccccaggucccuugaccgc

SEQ ID NO: 1887386 - RNA, 19 nt, Artificial Sequence
  Description of Artificial Sequence: Synthetic oligonucleotide
ugcuccgcugcgggcccug

SEQ ID NO: 1887387 - RNA, 19 nt, Artificial Sequence
  Description of Artificial Sequence: Synthetic oligonucleotide
acgccggcagcugcccucu

SEQ ID NO: 1887388 - RNA, 19 nt, Artificial Sequence
  Description of Artificial Sequence: Synthetic oligonucleotide
gcgccugaggucuccggga

SEQ ID NO: 1887389 - RNA, 19 nt, Artificial Sequence
  Description of Artificial Sequence: Synthetic oligonucleotide
ggccccgacuccgacgcug

SEQ ID NO: 1887390 - RNA, 19 nt, Artificial Sequence
  Description of Artificial Sequence: Synthetic oligonucleotide
ccgggagccucauccagca

SEQ ID NO: 1887391 - RNA, 19 nt, Artificial Sequence
  Description of Artificial Sequence: Synthetic oligonucleotide
cguccaaguaggagagcuc

SEQ ID NO: 1887392 - RNA, 19 nt, Artificial Sequence
  Description of Artificial Sequence: Synthetic oligonucleotide
accagcaagcggacugcuu

SEQ ID NO: 1887393 - RNA, 19 nt, Artificial Sequence
  Description of Artificial Sequence: Synthetic oligonucleotide
ggccgcgucguuccagcuc

SEQ ID NO: 1887394 - RNA, 19 nt, Artificial Sequence
  Description of Artificial Sequence: Synthetic oligonucleotide
ggcccgugcucacaguacu

SEQ ID NO: 1887395 - RNA, 19 nt, Artificial Sequence
  Description of Artificial Sequence: Synthetic oligonucleotide
cucugcgcuuuuggaagaa

SEQ ID NO: 1887396 - RNA, 19 nt, Artificial Sequence
  Description of Artificial Sequence: Synthetic oligonucleotide
gaccagcaagcggacugcu

SEQ ID NO: 1887397 - RNA, 19 nt, Artificial Sequence
  Description of Artificial Sequence: Synthetic oligonucleotide
cgccuggcaccacugcuag

SEQ ID NO: 1887398 - RNA, 19 nt, Artificial Sequence
  Description of Artificial Sequence: Synthetic oligonucleotide
ggcuugucccaaacacauc

SEQ ID NO: 1887399 - RNA, 19 nt, Artificial Sequence
  Description of Artificial Sequence: Synthetic oligonucleotide
gucgccgacgccggcagcu

SEQ ID NO: 1887400 - RNA, 19 nt, Artificial Sequence
  Description of Artificial Sequence: Synthetic oligonucleotide
cugcuagggcggccccgac

SEQ ID NO: 1887401 - RNA, 19 nt, Artificial Sequence
  Description of Artificial Sequence: Synthetic oligonucleotide
ccaaggcuggcccgugcuc

SEQ ID NO: 1887402 - RNA, 19 nt, Artificial Sequence
  Description of Artificial Sequence: Synthetic oligonucleotide
ggucuccgggaugccacac

SEQ ID NO: 1887403 - RNA, 19 nt, Artificial Sequence
  Description of Artificial Sequence: Synthetic oligonucleotide
ccucugcgcuuuuggaaga

SEQ ID NO: 1887404 - RNA, 19 nt, Artificial Sequence
  Description of Artificial Sequence: Synthetic oligonucleotide
ucgcacuggccgcgucguu

SEQ ID NO: 1887405 - RNA, 19 nt, Artificial Sequence
  Description of Artificial Sequence: Synthetic oligonucleotide
gagaggcuggcaggaacuu

SEQ ID NO: 1887406 - RNA, 19 nt, Artificial Sequence
  Description of Artificial Sequence: Synthetic oligonucleotide
caccggccggcgccgcuug

SEQ ID NO: 1887407 - RNA, 19 nt, Artificial Sequence
  Description of Artificial Sequence: Synthetic oligonucleotide
gcggcacugccauuacugu

SEQ ID NO: 1887408 - RNA, 19 nt, Artificial Sequence
  Description of Artificial Sequence: Synthetic oligonucleotide
guccaggggacaagauggu

SEQ ID NO: 1887409 - RNA, 19 nt, Artificial Sequence
  Description of Artificial Sequence: Synthetic oligonucleotide
cguagucagccucguccac

SEQ ID NO: 1887410 - RNA, 19 nt, Artificial Sequence
  Description of Artificial Sequence: Synthetic oligonucleotide
ggagcccgugucccacuga

SEQ ID NO: 1887411 - RNA, 19 nt, Artificial Sequence
  Description of Artificial Sequence: Synthetic oligonucleotide
ggucagcugcccgcccacc

SEQ ID NO: 1887412 - RNA, 19 nt, Artificial Sequence
  Description of Artificial Sequence: Synthetic oligonucleotide
gucgcacuggccgcgucgu

SEQ ID NO: 1887413 - RNA, 19 nt, Artificial Sequence
  Description of Artificial Sequence: Synthetic oligonucleotide
aggcuggcccgugcucaca

SEQ ID NO: 1887414 - RNA, 19 nt, Artificial Sequence
  Description of Artificial Sequence: Synthetic oligonucleotide
gccgggccagcgccugagg

SEQ ID NO: 1887415 - RNA, 19 nt, Artificial Sequence
  Description of Artificial Sequence: Synthetic oligonucleotide
ggagugguucaugccucaa

SEQ ID NO: 1887416 - RNA, 19 nt, Artificial Sequence
  Description of Artificial Sequence: Synthetic oligonucleotide
ccacugcuagggcggcccc

SEQ ID NO: 1887417 - RNA, 19 nt, Artificial Sequence
  Description of Artificial Sequence: Synthetic oligonucleotide
gcaggucgcucucgucgca

SEQ ID NO: 1887418 - RNA, 19 nt, Artificial Sequence
  Description of Artificial Sequence: Synthetic oligonucleotide
aggccgcugcgggcgcggg

SEQ ID NO: 1887419 - RNA, 19 nt, Artificial Sequence
  Description of Artificial Sequence: Synthetic oligonucleotide
ccugcagcagggcaccacu

SEQ ID NO: 1887420 - RNA, 19 nt, Artificial Sequence
  Description of Artificial Sequence: Synthetic oligonucleotide
cccgcccaccaccucgaac

SEQ ID NO: 1887421 - RNA, 19 nt, Artificial Sequence
  Description of Artificial Sequence: Synthetic oligonucleotide
gggccucagucaggaagac

SEQ ID NO: 1887422 - RNA, 19 nt, Artificial Sequence
  Description of Artificial Sequence: Synthetic oligonucleotide
cuccgggaugccacacccu

SEQ ID NO: 1887423 - RNA, 19 nt, Artificial Sequence
  Description of Artificial Sequence: Synthetic oligonucleotide
gccccgacuccgacgcugc

SEQ ID NO: 1887424 - RNA, 19 nt, Artificial Sequence
  Description of Artificial Sequence: Synthetic oligonucleotide
cgggccagcgccugagguc

SEQ ID NO: 1887425 - RNA, 19 nt, Artificial Sequence
  Description of Artificial Sequence: Synthetic oligonucleotide
gcccugcucucugccgccg

SEQ ID NO: 1887426 - RNA, 19 nt, Artificial Sequence
  Description of Artificial Sequence: Synthetic oligonucleotide
gccgccuggcaccacugcu

SEQ ID NO: 1887427 - RNA, 19 nt, Artificial Sequence
  Description of Artificial Sequence: Synthetic oligonucleotide
ccagcacgcgcaggaguug

SEQ ID NO: 1887428 - RNA, 19 nt, Artificial Sequence
  Description of Artificial Sequence: Synthetic oligonucleotide
gcggcgccggccagccucg

SEQ ID NO: 1887429 - RNA, 19 nt, Artificial Sequence
  Description of Artificial Sequence: Synthetic oligonucleotide
gccgcaggucgcucucguc

SEQ ID NO: 1887430 - RNA, 19 nt, Artificial Sequence
  Description of Artificial Sequence: Synthetic oligonucleotide
ccccaaggcugagggaauc

SEQ ID NO: 1887431 - RNA, 19 nt, Artificial Sequence
  Description of Artificial Sequence: Synthetic oligonucleotide
cccggagccggaugucaca

SEQ ID NO: 1887432 - RNA, 19 nt, Artificial Sequence
  Description of Artificial Sequence: Synthetic oligonucleotide
gcccgugcucacaguacuc

SEQ ID NO: 1887433 - RNA, 19 nt, Artificial Sequence
  Description of Artificial Sequence: Synthetic oligonucleotide
ccgacuccgacgcugccgu

SEQ ID NO: 1887434 - RNA, 19 nt, Artificial Sequence
  Description of Artificial Sequence: Synthetic oligonucleotide
gcgccgggagccucaucca

SEQ ID NO: 1887435 - RNA, 19 nt, Artificial Sequence
  Description of Artificial Sequence: Synthetic oligonucleotide
ggcgccgcuugcgggccag

SEQ ID NO: 1887436 - RNA, 19 nt, Artificial Sequence
  Description of Artificial Sequence: Synthetic oligonucleotide
cacuggccgcgucguucca

SEQ ID NO: 1887437 - RNA, 19 nt, Artificial Sequence
  Description of Artificial Sequence: Synthetic oligonucleotide
cgaacccggagccggaugu

SEQ ID NO: 1887438 - RNA, 19 nt, Artificial Sequence
  Description of Artificial Sequence: Synthetic oligonucleotide
ccggccggcgccgcuugcg

SEQ ID NO: 1887439 - RNA, 19 nt, Artificial Sequence
  Description of Artificial Sequence: Synthetic oligonucleotide
ggccgcugcgggcgcgggc

SEQ ID NO: 1887440 - RNA, 19 nt, Artificial Sequence
  Description of Artificial Sequence: Synthetic oligonucleotide
ccgccuggcaccacugcua

SEQ ID NO: 1887441 - RNA, 19 nt, Artificial Sequence
  Description of Artificial Sequence: Synthetic oligonucleotide
agcugcccucugcgcuuuu

SEQ ID NO: 1887442 - RNA, 19 nt, Artificial Sequence
  Description of Artificial Sequence: Synthetic oligonucleotide
ccggaugucacaggucacu

SEQ ID NO: 1887443 - RNA, 19 nt, Artificial Sequence
  Description of Artificial Sequence: Synthetic oligonucleotide
acgcugccguuugguugga

SEQ ID NO: 1887444 - RNA, 19 nt, Artificial Sequence
  Description of Artificial Sequence: Synthetic oligonucleotide
gcucgaacccggagccgga

SEQ ID NO: 1887445 - RNA, 19 nt, Artificial Sequence
  Description of Artificial Sequence: Synthetic oligonucleotide
gccagcacgcgcaggaguu

SEQ ID NO: 1887446 - RNA, 19 nt, Artificial Sequence
  Description of Artificial Sequence: Synthetic oligonucleotide
gcagcugggagugguucau

SEQ ID NO: 1887447 - RNA, 19 nt, Artificial Sequence
  Description of Artificial Sequence: Synthetic oligonucleotide
cggacugcuucccggccca

SEQ ID NO: 1887448 - RNA, 19 nt, Artificial Sequence
  Description of Artificial Sequence: Synthetic oligonucleotide
ggggucaguccugccagau

SEQ ID NO: 1887449 - RNA, 19 nt, Artificial Sequence
  Description of Artificial Sequence: Synthetic oligonucleotide
gcccaccaccucgaacaca

SEQ ID NO: 1887450 - RNA, 19 nt, Artificial Sequence
  Description of Artificial Sequence: Synthetic oligonucleotide
ggccugcccagcuccuggu

SEQ ID NO: 1887451 - RNA, 19 nt, Artificial Sequence
  Description of Artificial Sequence: Synthetic oligonucleotide
ccccgacuccgacgcugcc

SEQ ID NO: 1887452 - RNA, 19 nt, Artificial Sequence
  Description of Artificial Sequence: Synthetic oligonucleotide
cgcgcaggaguuggcucag

SEQ ID NO: 1887453 - RNA, 19 nt, Artificial Sequence
  Description of Artificial Sequence: Synthetic oligonucleotide
cucgaacccggagccggau

SEQ ID NO: 1887454 - RNA, 19 nt, Artificial Sequence
  Description of Artificial Sequence: Synthetic oligonucleotide
cgccgacgccggcagcugc

SEQ ID NO: 1887455 - RNA, 19 nt, Artificial Sequence
  Description of Artificial Sequence: Synthetic oligonucleotide
ggacugcuucccggcccac

SEQ ID NO: 1887456 - RNA, 19 nt, Artificial Sequence
  Description of Artificial Sequence: Synthetic oligonucleotide
gcgcaggaguuggcucagc

SEQ ID NO: 1887457 - RNA, 19 nt, Artificial Sequence
  Description of Artificial Sequence: Synthetic oligonucleotide
gccucccgcagggccucag

SEQ ID NO: 1887458 - RNA, 19 nt, Artificial Sequence
  Description of Artificial Sequence: Synthetic oligonucleotide
cgcgucguuccagcuccag

SEQ ID NO: 1887459 - RNA, 19 nt, Artificial Sequence
  Description of Artificial Sequence: Synthetic oligonucleotide
ccggcgccgcuugcgggcc

SEQ ID NO: 1887460 - RNA, 19 nt, Artificial Sequence
  Description of Artificial Sequence: Synthetic oligonucleotide
cuccgcugcgggcccugcu

SEQ ID NO: 1887461 - RNA, 19 nt, Artificial Sequence
  Description of Artificial Sequence: Synthetic oligonucleotide
ggggagcccgugucccacu

SEQ ID NO: 1887462 - RNA, 19 nt, Artificial Sequence
  Description of Artificial Sequence: Synthetic oligonucleotide
cccggcccacagccucccg

SEQ ID NO: 1887463 - RNA, 19 nt, Artificial Sequence
  Description of Artificial Sequence: Synthetic oligonucleotide
gcuggcccgugcucacagu

SEQ ID NO: 1887464 - RNA, 19 nt, Artificial Sequence
  Description of Artificial Sequence: Synthetic oligonucleotide
cgagccccaggucccuuga

SEQ ID NO: 1887465 - RNA, 19 nt, Artificial Sequence
  Description of Artificial Sequence: Synthetic oligonucleotide
gcugcgggcccugcucucu

SEQ ID NO: 1887466 - RNA, 19 nt, Artificial Sequence
  Description of Artificial Sequence: Synthetic oligonucleotide
cucgucgcacuggccgcgu

SEQ ID NO: 1887467 - RNA, 19 nt, Artificial Sequence
  Description of Artificial Sequence: Synthetic oligonucleotide
cgggccagauguggcagca

SEQ ID NO: 1887468 - RNA, 19 nt, Artificial Sequence
  Description of Artificial Sequence: Synthetic oligonucleotide
gccucguagucagccucgu

SEQ ID NO: 1887469 - RNA, 19 nt, Artificial Sequence
  Description of Artificial Sequence: Synthetic oligonucleotide
gcuucccggcccacagccu

SEQ ID NO: 1887470 - RNA, 19 nt, Artificial Sequence
  Description of Artificial Sequence: Synthetic oligonucleotide
ccgacgcugccguuugguu

SEQ ID NO: 1887471 - RNA, 19 nt, Artificial Sequence
  Description of Artificial Sequence: Synthetic oligonucleotide
gcggggaguuugggaugga

SEQ ID NO: 1887472 - RNA, 19 nt, Artificial Sequence
  Description of Artificial Sequence: Synthetic oligonucleotide
gggcgccgggagccucauc

SEQ ID NO: 1887473 - RNA, 19 nt, Artificial Sequence
  Description of Artificial Sequence: Synthetic oligonucleotide
ccgcugcgggcccugcucu

SEQ ID NO: 1887474 - RNA, 19 nt, Artificial Sequence
  Description of Artificial Sequence: Synthetic oligonucleotide
ccgcgucguuccagcucca

SEQ ID NO: 1887475 - RNA, 19 nt, Artificial Sequence
  Description of Artificial Sequence: Synthetic oligonucleotide
cacgagccccaggucccuu

SEQ ID NO: 1887476 - RNA, 19 nt, Artificial Sequence
  Description of Artificial Sequence: Synthetic oligonucleotide
cgccggccagccucguagu

SEQ ID NO: 1887477 - RNA, 19 nt, Artificial Sequence
  Description of Artificial Sequence: Synthetic oligonucleotide
cggcgccgcuugcgggcca

SEQ ID NO: 1887478 - RNA, 19 nt, Artificial Sequence
  Description of Artificial Sequence: Synthetic oligonucleotide
cgccgcuugcgggccagau

SEQ ID NO: 1887479 - RNA, 19 nt, Artificial Sequence
  Description of Artificial Sequence: Synthetic oligonucleotide
cgacuccgacgcugccguu

SEQ ID NO: 1887480 - RNA, 19 nt, Artificial Sequence
  Description of Artificial Sequence: Synthetic oligonucleotide
cggcgccggccagccucgu

SEQ ID NO: 1887481 - RNA, 19 nt, Artificial Sequence
  Description of Artificial Sequence: Synthetic oligonucleotide
  modified_base (7)..(7): a, c, u, g, unknown or other
uuuucunugagaaauggcu

SEQ ID NO: 1887482 - RNA, 19 nt, Artificial Sequence
  Description of Artificial Sequence: Synthetic oligonucleotide
aauaauuagcaauccacag

SEQ ID NO: 1887483 - RNA, 19 nt, Artificial Sequence
  Description of Artificial Sequence: Synthetic oligonucleotide
ugaauaauuagcaauccac

SEQ ID NO: 1887484 - RNA, 19 nt, Artificial Sequence
  Description of Artificial Sequence: Synthetic oligonucleotide
gaaacauugauuugccggg

SEQ ID NO: 1887485 - RNA, 19 nt, Artificial Sequence
  Description of Artificial Sequence: Synthetic oligonucleotide
uguguuauggccucgaaga

SEQ ID NO: 1887486 - RNA, 19 nt, Artificial Sequence
  Description of Artificial Sequence: Synthetic oligonucleotide
uaauuagcaauccacaguc

SEQ ID NO: 1887487 - RNA, 19 nt, Artificial Sequence
  Description of Artificial Sequence: Synthetic oligonucleotide
agaccggagagauuuaugc

SEQ ID NO: 1887488 - RNA, 19 nt, Artificial Sequence
  Description of Artificial Sequence: Synthetic oligonucleotide
agauuuaugcagcucuugc

SEQ ID NO: 1887489 - RNA, 19 nt, Artificial Sequence
  Description of Artificial Sequence: Synthetic oligonucleotide
uagcauuuuagaauugggg

SEQ ID NO: 1887490 - RNA, 19 nt, Artificial Sequence
  Description of Artificial Sequence: Synthetic oligonucleotide
agaauuggggacuaaagug

SEQ ID NO: 1887491 - RNA, 19 nt, Artificial Sequence
  Description of Artificial Sequence: Synthetic oligonucleotide
uuuuggacaagaaaacaug

SEQ ID NO: 1887492 - RNA, 19 nt, Artificial Sequence
  Description of Artificial Sequence: Synthetic oligonucleotide
aaauuauucaaagaccgga

SEQ ID NO: 1887493 - RNA, 19 nt, Artificial Sequence
  Description of Artificial Sequence: Synthetic oligonucleotide
uuagaauuggggacuaaag

SEQ ID NO: 1887494 - RNA, 19 nt, Artificial Sequence
  Description of Artificial Sequence: Synthetic oligonucleotide
uuaggauggaacacaauug

SEQ ID NO: 1887495 - RNA, 19 nt, Artificial Sequence
  Description of Artificial Sequence: Synthetic oligonucleotide
gauggaacacaauugcucc

SEQ ID NO: 1887496 - RNA, 19 nt, Artificial Sequence
  Description of Artificial Sequence: Synthetic oligonucleotide
aaugagacaguagauuuag

SEQ ID NO: 1887497 - RNA, 19 nt, Artificial Sequence
  Description of Artificial Sequence: Synthetic oligonucleotide
agauuggccgaucaucucc

SEQ ID NO: 1887498 - RNA, 19 nt, Artificial Sequence
  Description of Artificial Sequence: Synthetic oligonucleotide
uagaacacaacacuauucu

SEQ ID NO: 1887499 - RNA, 19 nt, Artificial Sequence
  Description of Artificial Sequence: Synthetic oligonucleotide
ugagacaguagauuuagga

SEQ ID NO: 1887500 - RNA, 19 nt, Artificial Sequence
  Description of Artificial Sequence: Synthetic oligonucleotide
  modified_base (2)..(2): a, c, u, g, unknown or other
unugagaaauggcuccucg

SEQ ID NO: 1887501 - RNA, 19 nt, Artificial Sequence
  Description of Artificial Sequence: Synthetic oligonucleotide
aaugucuaggcccauuacu

SEQ ID NO: 1887502 - RNA, 19 nt, Artificial Sequence
  Description of Artificial Sequence: Synthetic oligonucleotide
ggaaacauugauuugccgg

SEQ ID NO: 1887503 - RNA, 19 nt, Artificial Sequence
  Description of Artificial Sequence: Synthetic oligonucleotide
  modified_base (9)..(9): a, c, u, g, unknown or other
ucuuuucunugagaaaugg

SEQ ID NO: 1887504 - RNA, 19 nt, Artificial Sequence
  Description of Artificial Sequence: Synthetic oligonucleotide
ugguguagacacaacgucg

SEQ ID NO: 1887505 - RNA, 19 nt, Artificial Sequence
  Description of Artificial Sequence: Synthetic oligonucleotide
ugaagguccugucauauga

SEQ ID NO: 1887506 - RNA, 19 nt, Artificial Sequence
  Description of Artificial Sequence: Synthetic oligonucleotide
acuaaagugacaauaggag

SEQ ID NO: 1887507 - RNA, 19 nt, Artificial Sequence
  Description of Artificial Sequence: Synthetic oligonucleotide
uaucauaggcaccugugag

SEQ ID NO: 1887508 - RNA, 19 nt, Artificial Sequence
  Description of Artificial Sequence: Synthetic oligonucleotide
ucgaagagugugaaggagg

SEQ ID NO: 1887509 - RNA, 19 nt, Artificial Sequence
  Description of Artificial Sequence: Synthetic oligonucleotide
  modified_base (5)..(5): a, c, u, g, unknown or other
uucunugagaaauggcucc

SEQ ID NO: 1887510 - RNA, 19 nt, Artificial Sequence
  Description of Artificial Sequence: Synthetic oligonucleotide
agugaauaauuagcaaucc

SEQ ID NO: 1887511 - RNA, 19 nt, Artificial Sequence
  Description of Artificial Sequence: Synthetic oligonucleotide
gacaguagauuuaggaugg

SEQ ID NO: 1887512 - RNA, 19 nt, Artificial Sequence
  Description of Artificial Sequence: Synthetic oligonucleotide
aauuauucaaagaccggag

SEQ ID NO: 1887513 - RNA, 19 nt, Artificial Sequence
  Description of Artificial Sequence: Synthetic oligonucleotide
aaucuccuuauggagacgg

SEQ ID NO: 1887514 - RNA, 19 nt, Artificial Sequence
  Description of Artificial Sequence: Synthetic oligonucleotide
acauugguuauuuuggaca

SEQ ID NO: 1887515 - RNA, 19 nt, Artificial Sequence
  Description of Artificial Sequence: Synthetic oligonucleotide
uaugaguugcccaucagaa

SEQ ID NO: 1887516 - RNA, 19 nt, Artificial Sequence
  Description of Artificial Sequence: Synthetic oligonucleotide
aauauuucuuaaccuuucu

SEQ ID NO: 1887517 - RNA, 19 nt, Artificial Sequence
  Description of Artificial Sequence: Synthetic oligonucleotide
aaaugucuaggcccauuac

SEQ ID NO: 1887518 - RNA, 19 nt, Artificial Sequence
  Description of Artificial Sequence: Synthetic oligonucleotide
uacauuuguguuauggccu

SEQ ID NO: 1887519 - RNA, 19 nt, Artificial Sequence
  Description of Artificial Sequence: Synthetic oligonucleotide
uggggagugaauaauuagc

SEQ ID NO: 1887520 - RNA, 19 nt, Artificial Sequence
  Description of Artificial Sequence: Synthetic oligonucleotide
uagaauuggggacuaaagu

SEQ ID NO: 1887521 - RNA, 19 nt, Artificial Sequence
  Description of Artificial Sequence: Synthetic oligonucleotide
auaauuagcaauccacagu

SEQ ID NO: 1887522 - RNA, 19 nt, Artificial Sequence
  Description of Artificial Sequence: Synthetic oligonucleotide
aaccguauggccuucaaua

SEQ ID NO: 1887523 - RNA, 19 nt, Artificial Sequence
  Description of Artificial Sequence: Synthetic oligonucleotide
aaaagugugauagguucuc

SEQ ID NO: 1887524 - RNA, 19 nt, Artificial Sequence
  Description of Artificial Sequence: Synthetic oligonucleotide
uccuacauuuguguuaugg

SEQ ID NO: 1887525 - RNA, 19 nt, Artificial Sequence
  Description of Artificial Sequence: Synthetic oligonucleotide
auuagcaauccacagucug

SEQ ID NO: 1887526 - RNA, 19 nt, Artificial Sequence
  Description of Artificial Sequence: Synthetic oligonucleotide
uguguuaucauaggcaccu

SEQ ID NO: 1887527 - RNA, 19 nt, Artificial Sequence
  Description of Artificial Sequence: Synthetic oligonucleotide
cuaaguucugaugagcagg

SEQ ID NO: 1887528 - RNA, 19 nt, Artificial Sequence
  Description of Artificial Sequence: Synthetic oligonucleotide
cuagcauuuuagaauuggg

SEQ ID NO: 1887529 - RNA, 19 nt, Artificial Sequence
  Description of Artificial Sequence: Synthetic oligonucleotide
aauaucugccacugguuca

SEQ ID NO: 1887530 - RNA, 19 nt, Artificial Sequence
  Description of Artificial Sequence: Synthetic oligonucleotide
  modified_base (10)..(10): a, c, u, g, unknown or other
uucuuuucunugagaaaug

SEQ ID NO: 1887531 - RNA, 19 nt, Artificial Sequence
  Description of Artificial Sequence: Synthetic oligonucleotide
gcuauuuggcccuucaugg

SEQ ID NO: 1887532 - RNA, 19 nt, Artificial Sequence
  Description of Artificial Sequence: Synthetic oligonucleotide
  modified_base (6)..(6): a, c, u, g, unknown or other
uuucunugagaaauggcuc

SEQ ID NO: 1887533 - RNA, 19 nt, Artificial Sequence
  Description of Artificial Sequence: Synthetic oligonucleotide
gaaauuauucaaagaccgg

SEQ ID NO: 1887534 - RNA, 19 nt, Artificial Sequence
  Description of Artificial Sequence: Synthetic oligonucleotide
acucagugaaaauccaauc

SEQ ID NO: 1887535 - RNA, 19 nt, Artificial Sequence
  Description of Artificial Sequence: Synthetic oligonucleotide
auggagacgggccuccucc

SEQ ID NO: 1887536 - RNA, 19 nt, Artificial Sequence
  Description of Artificial Sequence: Synthetic oligonucleotide
aucagaagaaaugucuagg

SEQ ID NO: 1887537 - RNA, 19 nt, Artificial Sequence
  Description of Artificial Sequence: Synthetic oligonucleotide
acaugauagaacacaacac

SEQ ID NO: 1887538 - RNA, 19 nt, Artificial Sequence
  Description of Artificial Sequence: Synthetic oligonucleotide
accggagagauuuaugcag

SEQ ID NO: 1887539 - RNA, 19 nt, Artificial Sequence
  Description of Artificial Sequence: Synthetic oligonucleotide
ggacaagaaaacaugauag

SEQ ID NO: 1887540 - RNA, 19 nt, Artificial Sequence
  Description of Artificial Sequence: Synthetic oligonucleotide
aauuggggacuaaagugac

SEQ ID NO: 1887541 - RNA, 19 nt, Artificial Sequence
  Description of Artificial Sequence: Synthetic oligonucleotide
aaagugugauagguucucc

SEQ ID NO: 1887542 - RNA, 19 nt, Artificial Sequence
  Description of Artificial Sequence: Synthetic oligonucleotide
acaacgucguugucgaagg

SEQ ID NO: 1887543 - RNA, 19 nt, Artificial Sequence
  Description of Artificial Sequence: Synthetic oligonucleotide
ugagaaauggcuccucggu

SEQ ID NO: 1887544 - RNA, 19 nt, Artificial Sequence
  Description of Artificial Sequence: Synthetic oligonucleotide
aaacauugauuugccgggc

SEQ ID NO: 1887545 - RNA, 19 nt, Artificial Sequence
  Description of Artificial Sequence: Synthetic oligonucleotide
aaguugacauccuuuuggu

SEQ ID NO: 1887546 - RNA, 19 nt, Artificial Sequence
  Description of Artificial Sequence: Synthetic oligonucleotide
agcucuugcaucugggagg

SEQ ID NO: 1887547 - RNA, 19 nt, Artificial Sequence
  Description of Artificial Sequence: Synthetic oligonucleotide
auccuuuugguccaaugag

SEQ ID NO: 1887548 - RNA, 19 nt, Artificial Sequence
  Description of Artificial Sequence: Synthetic oligonucleotide
aauccuacacauugguuau

SEQ ID NO: 1887549 - RNA, 19 nt, Artificial Sequence
  Description of Artificial Sequence: Synthetic oligonucleotide
ugauagaacacaacacuau

SEQ ID NO: 1887550 - RNA, 19 nt, Artificial Sequence
  Description of Artificial Sequence: Synthetic oligonucleotide
  modified_base (8)..(8): a, c, u, g, unknown or other
cuuuucunugagaaauggc

SEQ ID NO: 1887551 - RNA, 19 nt, Artificial Sequence
  Description of Artificial Sequence: Synthetic oligonucleotide
cuucacagaaccaucagca

SEQ ID NO: 1887552 - RNA, 19 nt, Artificial Sequence
  Description of Artificial Sequence: Synthetic oligonucleotide
agugaaaauccaauccuac

SEQ ID NO: 1887553 - RNA, 19 nt, Artificial Sequence
  Description of Artificial Sequence: Synthetic oligonucleotide
uccguggaaacauugauuu

SEQ ID NO: 1887554 - RNA, 19 nt, Artificial Sequence
  Description of Artificial Sequence: Synthetic oligonucleotide
auuauucaaagaccggaga

SEQ ID NO: 1887555 - RNA, 19 nt, Artificial Sequence
  Description of Artificial Sequence: Synthetic oligonucleotide
auagaacacaacacuauuc

SEQ ID NO: 1887556 - RNA, 19 nt, Artificial Sequence
  Description of Artificial Sequence: Synthetic oligonucleotide
ugcagaaauuauucaaaga

SEQ ID NO: 1887557 - RNA, 19 nt, Artificial Sequence
  Description of Artificial Sequence: Synthetic oligonucleotide
  modified_base (14)..(14): a, c, u, g, unknown or other
acuauucuuuucunugaga

SEQ ID NO: 1887558 - RNA, 19 nt, Artificial Sequence
  Description of Artificial Sequence: Synthetic oligonucleotide
uuguguuauggccucgaag

SEQ ID NO: 1887559 - RNA, 19 nt, Artificial Sequence
  Description of Artificial Sequence: Synthetic oligonucleotide
agccacacgaaccguaugg

SEQ ID NO: 1887560 - RNA, 19 nt, Artificial Sequence
  Description of Artificial Sequence: Synthetic oligonucleotide
ugagcaaguggcuaugagu

SEQ ID NO: 1887561 - RNA, 19 nt, Artificial Sequence
  Description of Artificial Sequence: Synthetic oligonucleotide
uucuuuugacuucuuagau

SEQ ID NO: 1887562 - RNA, 19 nt, Artificial Sequence
  Description of Artificial Sequence: Synthetic oligonucleotide
ugugauagguucucccaag

SEQ ID NO: 1887563 - RNA, 19 nt, Artificial Sequence
  Description of Artificial Sequence: Synthetic oligonucleotide
cugccagucacauuacccg

SEQ ID NO: 1887564 - RNA, 19 nt, Artificial Sequence
  Description of Artificial Sequence: Synthetic oligonucleotide
guuucauugcccuggggag

SEQ ID NO: 1887565 - RNA, 19 nt, Artificial Sequence
  Description of Artificial Sequence: Synthetic oligonucleotide
uuaugcagcucuugcaucu

SEQ ID NO: 1887566 - RNA, 19 nt, Artificial Sequence
  Description of Artificial Sequence: Synthetic oligonucleotide
aagcguuucauugcccugg

SEQ ID NO: 1887567 - RNA, 19 nt, Artificial Sequence
  Description of Artificial Sequence: Synthetic oligonucleotide
acauuuguguuauggccuc

SEQ ID NO: 1887568 - RNA, 19 nt, Artificial Sequence
  Description of Artificial Sequence: Synthetic oligonucleotide
ugauacucuucuuuugacu

SEQ ID NO: 1887569 - RNA, 19 nt, Artificial Sequence
  Description of Artificial Sequence: Synthetic oligonucleotide
caucagaagaaaugucuag

SEQ ID NO: 1887570 - RNA, 19 nt, Artificial Sequence
  Description of Artificial Sequence: Synthetic oligonucleotide
uguggcuagcauuuuagaa

SEQ ID NO: 1887571 - RNA, 19 nt, Artificial Sequence
  Description of Artificial Sequence: Synthetic oligonucleotide
uccuuuugguccaaugaga

SEQ ID NO: 1887572 - RNA, 19 nt, Artificial Sequence
  Description of Artificial Sequence: Synthetic oligonucleotide
cagaagaaaugucuaggcc

SEQ ID NO: 1887573 - RNA, 19 nt, Artificial Sequence
  Description of Artificial Sequence: Synthetic oligonucleotide
uugguuauuuuggacaaga

SEQ ID NO: 1887574 - RNA, 19 nt, Artificial Sequence
  Description of Artificial Sequence: Synthetic oligonucleotide
acuaaguucugaugagcag

SEQ ID NO: 1887575 - RNA, 19 nt, Artificial Sequence
  Description of Artificial Sequence: Synthetic oligonucleotide
cauuacuuugcccucauga

SEQ ID NO: 1887576 - RNA, 19 nt, Artificial Sequence
  Description of Artificial Sequence: Synthetic oligonucleotide
uauucaaagaccggagaga

SEQ ID NO: 1887577 - RNA, 19 nt, Artificial Sequence
  Description of Artificial Sequence: Synthetic oligonucleotide
gauaggcucaaacuugaca

SEQ ID NO: 1887578 - RNA, 19 nt, Artificial Sequence
  Description of Artificial Sequence: Synthetic oligonucleotide
gauuuaugcagcucuugca

SEQ ID NO: 1887579 - RNA, 19 nt, Artificial Sequence
  Description of Artificial Sequence: Synthetic oligonucleotide
gagugaauaauuagcaauc

SEQ ID NO: 1887580 - RNA, 19 nt, Artificial Sequence
  Description of Artificial Sequence: Synthetic oligonucleotide
agacacaacgucguugucg

SEQ ID NO: 1887581 - RNA, 19 nt, Artificial Sequence
  Description of Artificial Sequence: Synthetic oligonucleotide
uccaauccuacacauuggu

SEQ ID NO: 1887582 - RNA, 19 nt, Artificial Sequence
  Description of Artificial Sequence: Synthetic oligonucleotide
cuaaagugacaauaggaga

SEQ ID NO: 1887583 - RNA, 19 nt, Artificial Sequence
  Description of Artificial Sequence: Synthetic oligonucleotide
aacgucguugucgaagguc

SEQ ID NO: 1887584 - RNA, 19 nt, Artificial Sequence
  Description of Artificial Sequence: Synthetic oligonucleotide
guuauggccucgaagagug

SEQ ID NO: 1887585 - RNA, 19 nt, Artificial Sequence
  Description of Artificial Sequence: Synthetic oligonucleotide
accagguuugcugauacuc

SEQ ID NO: 1887586 - RNA, 19 nt, Artificial Sequence
  Description of Artificial Sequence: Synthetic oligonucleotide
gaauuggggacuaaaguga

SEQ ID NO: 1887587 - RNA, 19 nt, Artificial Sequence
  Description of Artificial Sequence: Synthetic oligonucleotide
caucagcagcacaagaagc

SEQ ID NO: 1887588 - RNA, 19 nt, Artificial Sequence
  Description of Artificial Sequence: Synthetic oligonucleotide
uggaaacauugauuugccg

SEQ ID NO: 1887589 - RNA, 19 nt, Artificial Sequence
  Description of Artificial Sequence: Synthetic oligonucleotide
ucauaggcaccugugagca

SEQ ID NO: 1887590 - RNA, 19 nt, Artificial Sequence
  Description of Artificial Sequence: Synthetic oligonucleotide
caggaaucuccuuauggag

SEQ ID NO: 1887591 - RNA, 19 nt, Artificial Sequence
  Description of Artificial Sequence: Synthetic oligonucleotide
cacuccaacaagcuguggc

SEQ ID NO: 1887592 - RNA, 19 nt, Artificial Sequence
  Description of Artificial Sequence: Synthetic oligonucleotide
aggcccauuacuuugcccu

SEQ ID NO: 1887593 - RNA, 19 nt, Artificial Sequence
  Description of Artificial Sequence: Synthetic oligonucleotide
uuuagaauuggggacuaaa

SEQ ID NO: 1887594 - RNA, 19 nt, Artificial Sequence
  Description of Artificial Sequence: Synthetic oligonucleotide
acgucguugucgaaggucc

SEQ ID NO: 1887595 - RNA, 19 nt, Artificial Sequence
  Description of Artificial Sequence: Synthetic oligonucleotide
ucuaggcccauuacuuugc

SEQ ID NO: 1887596 - RNA, 19 nt, Artificial Sequence
  Description of Artificial Sequence: Synthetic oligonucleotide
aacauugauuugccgggcu

SEQ ID NO: 1887597 - RNA, 19 nt, Artificial Sequence
  Description of Artificial Sequence: Synthetic oligonucleotide
agugugauagguucuccca

SEQ ID NO: 1887598 - RNA, 19 nt, Artificial Sequence
  Description of Artificial Sequence: Synthetic oligonucleotide
caccuuuaggcuauuuggc

SEQ ID NO: 1887599 - RNA, 19 nt, Artificial Sequence
  Description of Artificial Sequence: Synthetic oligonucleotide
agccaaagucuucaauggg

SEQ ID NO: 1887600 - RNA, 19 nt, Artificial Sequence
  Description of Artificial Sequence: Synthetic oligonucleotide
ugucucaggaaucuccuua

SEQ ID NO: 1887601 - RNA, 19 nt, Artificial Sequence
  Description of Artificial Sequence: Synthetic oligonucleotide
acauugauuugccgggcuc

SEQ ID NO: 1887602 - RNA, 19 nt, Artificial Sequence
  Description of Artificial Sequence: Synthetic oligonucleotide
cagaccagagcuugcaaag

SEQ ID NO: 1887603 - RNA, 19 nt, Artificial Sequence
  Description of Artificial Sequence: Synthetic oligonucleotide
gacacaacgucguugucga

SEQ ID NO: 1887604 - RNA, 19 nt, Artificial Sequence
  Description of Artificial Sequence: Synthetic oligonucleotide
caauccuacacauugguua

SEQ ID NO: 1887605 - RNA, 19 nt, Artificial Sequence
  Description of Artificial Sequence: Synthetic oligonucleotide
cuuagauuucucaucaucu

SEQ ID NO: 1887606 - RNA, 19 nt, Artificial Sequence
  Description of Artificial Sequence: Synthetic oligonucleotide
ucuuuugacuucuuagauu

SEQ ID NO: 1887607 - RNA, 19 nt, Artificial Sequence
  Description of Artificial Sequence: Synthetic oligonucleotide
agauuuaggauggaacaca

SEQ ID NO: 1887608 - RNA, 19 nt, Artificial Sequence
  Description of Artificial Sequence: Synthetic oligonucleotide
aggagauuggccgaucauc

SEQ ID NO: 1887609 - RNA, 19 nt, Artificial Sequence
  Description of Artificial Sequence: Synthetic oligonucleotide
cuucaugguaccagguuug

SEQ ID NO: 1887610 - RNA, 19 nt, Artificial Sequence
  Description of Artificial Sequence: Synthetic oligonucleotide
uuggacaagaaaacaugau

SEQ ID NO: 1887611 - RNA, 19 nt, Artificial Sequence
  Description of Artificial Sequence: Synthetic oligonucleotide
uuggggacuaaagugacaa

SEQ ID NO: 1887612 - RNA, 19 nt, Artificial Sequence
  Description of Artificial Sequence: Synthetic oligonucleotide
uagauuuaggauggaacac

SEQ ID NO: 1887613 - RNA, 19 nt, Artificial Sequence
  Description of Artificial Sequence: Synthetic oligonucleotide
ucauccguggaaacauuga

SEQ ID NO: 1887614 - RNA, 19 nt, Artificial Sequence
  Description of Artificial Sequence: Synthetic oligonucleotide
gaauauuucuuaaccuuuc

SEQ ID NO: 1887615 - RNA, 19 nt, Artificial Sequence
  Description of Artificial Sequence: Synthetic oligonucleotide
ugacugcagaaauuauuca

SEQ ID NO: 1887616 - RNA, 19 nt, Artificial Sequence
  Description of Artificial Sequence: Synthetic oligonucleotide
agucacauuacccgagcca

SEQ ID NO: 1887617 - RNA, 19 nt, Artificial Sequence
  Description of Artificial Sequence: Synthetic oligonucleotide
acuccaacaagcuguggcu

SEQ ID NO: 1887618 - RNA, 19 nt, Artificial Sequence
  Description of Artificial Sequence: Synthetic oligonucleotide
caauaucugccacugguuc

SEQ ID NO: 1887619 - RNA, 19 nt, Artificial Sequence
  Description of Artificial Sequence: Synthetic oligonucleotide
uggccgaucaucuccaauc

SEQ ID NO: 1887620 - RNA, 19 nt, Artificial Sequence
  Description of Artificial Sequence: Synthetic oligonucleotide
cuggggagugaauaauuag

SEQ ID NO: 1887621 - RNA, 19 nt, Artificial Sequence
  Description of Artificial Sequence: Synthetic oligonucleotide
ccaccuuuaggcuauuugg

SEQ ID NO: 1887622 - RNA, 19 nt, Artificial Sequence
  Description of Artificial Sequence: Synthetic oligonucleotide
ggacuaaagugacaauagg

SEQ ID NO: 1887623 - RNA, 19 nt, Artificial Sequence
  Description of Artificial Sequence: Synthetic oligonucleotide
guuaucauaggcaccugug

SEQ ID NO: 1887624 - RNA, 19 nt, Artificial Sequence
  Description of Artificial Sequence: Synthetic oligonucleotide
aggcucaaacuugacaccg

SEQ ID NO: 1887625 - RNA, 19 nt, Artificial Sequence
  Description of Artificial Sequence: Synthetic oligonucleotide
auaggcaccugugagcaag

SEQ ID NO: 1887626 - RNA, 19 nt, Artificial Sequence
  Description of Artificial Sequence: Synthetic oligonucleotide
gugauagguucucccaagg

SEQ ID NO: 1887627 - RNA, 19 nt, Artificial Sequence
  Description of Artificial Sequence: Synthetic oligonucleotide
uggcuagcauuuuagaauu

SEQ ID NO: 1887628 - RNA, 19 nt, Artificial Sequence
  Description of Artificial Sequence: Synthetic oligonucleotide
acaauaggagauuggccga

SEQ ID NO: 1887629 - RNA, 19 nt, Artificial Sequence
  Description of Artificial Sequence: Synthetic oligonucleotide
  modified_base (4)..(4): a, c, u, g, unknown or other
ucunugagaaauggcuccu

SEQ ID NO: 1887630 - RNA, 19 nt, Artificial Sequence
  Description of Artificial Sequence: Synthetic oligonucleotide
uugaccucugagucauccg

SEQ ID NO: 1887631 - RNA, 19 nt, Artificial Sequence
  Description of Artificial Sequence: Synthetic oligonucleotide
augaguugcccaucagaag

SEQ ID NO: 1887632 - RNA, 19 nt, Artificial Sequence
  Description of Artificial Sequence: Synthetic oligonucleotide
uggucuugccuacucugcc

SEQ ID NO: 1887633 - RNA, 19 nt, Artificial Sequence
  Description of Artificial Sequence: Synthetic oligonucleotide
ucggugagagcacaagguc

SEQ ID NO: 1887634 - RNA, 19 nt, Artificial Sequence
  Description of Artificial Sequence: Synthetic oligonucleotide
guucugaugagcagggaug

SEQ ID NO: 1887635 - RNA, 19 nt, Artificial Sequence
  Description of Artificial Sequence: Synthetic oligonucleotide
gcuguguuaucauaggcac

SEQ ID NO: 1887636 - RNA, 19 nt, Artificial Sequence
  Description of Artificial Sequence: Synthetic oligonucleotide
aaguggcuaugaguugccc

SEQ ID NO: 1887637 - RNA, 19 nt, Artificial Sequence
  Description of Artificial Sequence: Synthetic oligonucleotide
cuugccuacucugccaucc

SEQ ID NO: 1887638 - RNA, 19 nt, Artificial Sequence
  Description of Artificial Sequence: Synthetic oligonucleotide
auuugccgggcucucuuuc

SEQ ID NO: 1887639 - RNA, 19 nt, Artificial Sequence
  Description of Artificial Sequence: Synthetic oligonucleotide
acacauugguuauuuugga

SEQ ID NO: 1887640 - RNA, 19 nt, Artificial Sequence
  Description of Artificial Sequence: Synthetic oligonucleotide
aaacuugacaccggucacu

SEQ ID NO: 1887641 - RNA, 19 nt, Artificial Sequence
  Description of Artificial Sequence: Synthetic oligonucleotide
auaggagauuggccgauca

SEQ ID NO: 1887642 - RNA, 19 nt, Artificial Sequence
  Description of Artificial Sequence: Synthetic oligonucleotide
gucuaggcccauuacuuug

SEQ ID NO: 1887643 - RNA, 19 nt, Artificial Sequence
  Description of Artificial Sequence: Synthetic oligonucleotide
uguuauggccucgaagagu

SEQ ID NO: 1887644 - RNA, 19 nt, Artificial Sequence
  Description of Artificial Sequence: Synthetic oligonucleotide
cacuaaguucugaugagca

SEQ ID NO: 1887645 - RNA, 19 nt, Artificial Sequence
  Description of Artificial Sequence: Synthetic oligonucleotide
uuacccgagccacacgaac

SEQ ID NO: 1887646 - RNA, 19 nt, Artificial Sequence
  Description of Artificial Sequence: Synthetic oligonucleotide
agaccagagcuugcaaagc

SEQ ID NO: 1887647 - RNA, 19 nt, Artificial Sequence
  Description of Artificial Sequence: Synthetic oligonucleotide
uauggccucgaagagugug

SEQ ID NO: 1887648 - RNA, 19 nt, Artificial Sequence
  Description of Artificial Sequence: Synthetic oligonucleotide
acccgagccacacgaaccg

SEQ ID NO: 1887649 - RNA, 19 nt, Artificial Sequence
  Description of Artificial Sequence: Synthetic oligonucleotide
guugucaccacugccaguc

SEQ ID NO: 1887650 - RNA, 19 nt, Artificial Sequence
  Description of Artificial Sequence: Synthetic oligonucleotide
gaaaugucuaggcccauua

SEQ ID NO: 1887651 - RNA, 19 nt, Artificial Sequence
  Description of Artificial Sequence: Synthetic oligonucleotide
auggauaggcucaaacuug

SEQ ID NO: 1887652 - RNA, 19 nt, Artificial Sequence
  Description of Artificial Sequence: Synthetic oligonucleotide
gagacaguagauuuaggau

SEQ ID NO: 1887653 - RNA, 19 nt, Artificial Sequence
  Description of Artificial Sequence: Synthetic oligonucleotide
acauccuuuugguccaaug

SEQ ID NO: 1887654 - RNA, 19 nt, Artificial Sequence
  Description of Artificial Sequence: Synthetic oligonucleotide
aaagugacaauaggagauu

SEQ ID NO: 1887655 - RNA, 19 nt, Artificial Sequence
  Description of Artificial Sequence: Synthetic oligonucleotide
cugugagcaagaagucucc

SEQ ID NO: 1887656 - RNA, 19 nt, Artificial Sequence
  Description of Artificial Sequence: Synthetic oligonucleotide
gucacauuacccgagccac

SEQ ID NO: 1887657 - RNA, 19 nt, Artificial Sequence
  Description of Artificial Sequence: Synthetic oligonucleotide
cacaacgucguugucgaag

SEQ ID NO: 1887658 - RNA, 19 nt, Artificial Sequence
  Description of Artificial Sequence: Synthetic oligonucleotide
caagaagccaaguugacau

SEQ ID NO: 1887659 - RNA, 19 nt, Artificial Sequence
  Description of Artificial Sequence: Synthetic oligonucleotide
ggaaucuccuuauggagac

SEQ ID NO: 1887660 - RNA, 19 nt, Artificial Sequence
  Description of Artificial Sequence: Synthetic oligonucleotide
acacaacacuauucuuuuc

SEQ ID NO: 1887661 - RNA, 19 nt, Artificial Sequence
  Description of Artificial Sequence: Synthetic oligonucleotide
gggacuaaagugacaauag

SEQ ID NO: 1887662 - RNA, 19 nt, Artificial Sequence
  Description of Artificial Sequence: Synthetic oligonucleotide
guugucgaaggucccacac

SEQ ID NO: 1887663 - RNA, 19 nt, Artificial Sequence
  Description of Artificial Sequence: Synthetic oligonucleotide
ggcuauuuggcccuucaug

SEQ ID NO: 1887664 - RNA, 19 nt, Artificial Sequence
  Description of Artificial Sequence: Synthetic oligonucleotide
uaggcuauuuggcccuuca

SEQ ID NO: 1887665 - RNA, 19 nt, Artificial Sequence
  Description of Artificial Sequence: Synthetic oligonucleotide
cuguguuaucauaggcacc

SEQ ID NO: 1887666 - RNA, 19 nt, Artificial Sequence
  Description of Artificial Sequence: Synthetic oligonucleotide
ugguuauuuuggacaagaa

SEQ ID NO: 1887667 - RNA, 19 nt, Artificial Sequence
  Description of Artificial Sequence: Synthetic oligonucleotide
cauugguuauuuuggacaa

SEQ ID NO: 1887668 - RNA, 19 nt, Artificial Sequence
  Description of Artificial Sequence: Synthetic oligonucleotide
cuaugaguugcccaucaga

SEQ ID NO: 1887669 - RNA, 19 nt, Artificial Sequence
  Description of Artificial Sequence: Synthetic oligonucleotide
uuuaaggcaucaguuccaa

SEQ ID NO: 1887670 - RNA, 19 nt, Artificial Sequence
  Description of Artificial Sequence: Synthetic oligonucleotide
gacaccggucacuaaguuc

SEQ ID NO: 1887671 - RNA, 19 nt, Artificial Sequence
  Description of Artificial Sequence: Synthetic oligonucleotide
ugcuccuacauuuguguua

SEQ ID NO: 1887672 - RNA, 19 nt, Artificial Sequence
  Description of Artificial Sequence: Synthetic oligonucleotide
aaagaccggagagauuuau

SEQ ID NO: 1887673 - RNA, 19 nt, Artificial Sequence
  Description of Artificial Sequence: Synthetic oligonucleotide
caaacuugacaccggucac

SEQ ID NO: 1887674 - RNA, 19 nt, Artificial Sequence
  Description of Artificial Sequence: Synthetic oligonucleotide
gaagguccugucauaugag

SEQ ID NO: 1887675 - RNA, 19 nt, Artificial Sequence
  Description of Artificial Sequence: Synthetic oligonucleotide
ccuuuaggcuauuuggccc

SEQ ID NO: 1887676 - RNA, 19 nt, Artificial Sequence
  Description of Artificial Sequence: Synthetic oligonucleotide
uugaagguccugucauaug

SEQ ID NO: 1887677 - RNA, 19 nt, Artificial Sequence
  Description of Artificial Sequence: Synthetic oligonucleotide
ucauaugagcaaguggcua

SEQ ID NO: 1887678 - RNA, 19 nt, Artificial Sequence
  Description of Artificial Sequence: Synthetic oligonucleotide
uggggaccagccugggugg

SEQ ID NO: 1887679 - RNA, 19 nt, Artificial Sequence
  Description of Artificial Sequence: Synthetic oligonucleotide
  modified_base (19)..(19): a, c, u, g, unknown or other
acaacacuauucuuuucun

SEQ ID NO: 1887680 - RNA, 19 nt, Artificial Sequence
  Description of Artificial Sequence: Synthetic oligonucleotide
aauuagcaauccacagucu

SEQ ID NO: 1887681 - RNA, 19 nt, Artificial Sequence
  Description of Artificial Sequence: Synthetic oligonucleotide
gauuuaggauggaacacaa

SEQ ID NO: 1887682 - RNA, 19 nt, Artificial Sequence
  Description of Artificial Sequence: Synthetic oligonucleotide
ugccagucacauuacccga

SEQ ID NO: 1887683 - RNA, 19 nt, Artificial Sequence
  Description of Artificial Sequence: Synthetic oligonucleotide
cuucaauaucugccacugg

SEQ ID NO: 1887684 - RNA, 19 nt, Artificial Sequence
  Description of Artificial Sequence: Synthetic oligonucleotide
guggaaacauugauuugcc

SEQ ID NO: 1887685 - RNA, 19 nt, Artificial Sequence
  Description of Artificial Sequence: Synthetic oligonucleotide
augauagaacacaacacua

SEQ ID NO: 1887686 - RNA, 19 nt, Artificial Sequence
  Description of Artificial Sequence: Synthetic oligonucleotide
ugucaccacugccagucac

SEQ ID NO: 1887687 - RNA, 19 nt, Artificial Sequence
  Description of Artificial Sequence: Synthetic oligonucleotide
uuuguguuauggccucgaa

SEQ ID NO: 1887688 - RNA, 19 nt, Artificial Sequence
  Description of Artificial Sequence: Synthetic oligonucleotide
ccuuuugguccaaugagac

SEQ ID NO: 1887689 - RNA, 19 nt, Artificial Sequence
  Description of Artificial Sequence: Synthetic oligonucleotide
ugccuacucugccauccag

SEQ ID NO: 1887690 - RNA, 19 nt, Artificial Sequence
  Description of Artificial Sequence: Synthetic oligonucleotide
uccaagcguuucauugccc

SEQ ID NO: 1887691 - RNA, 19 nt, Artificial Sequence
  Description of Artificial Sequence: Synthetic oligonucleotide
gaccggagagauuuaugca

SEQ ID NO: 1887692 - RNA, 19 nt, Artificial Sequence
  Description of Artificial Sequence: Synthetic oligonucleotide
agauuucucaucaucuuuu

SEQ ID NO: 1887693 - RNA, 19 nt, Artificial Sequence
  Description of Artificial Sequence: Synthetic oligonucleotide
caaacucagugaaaaucca

SEQ ID NO: 1887694 - RNA, 19 nt, Artificial Sequence
  Description of Artificial Sequence: Synthetic oligonucleotide
accguauggccuucaauau

SEQ ID NO: 1887695 - RNA, 19 nt, Artificial Sequence
  Description of Artificial Sequence: Synthetic oligonucleotide
auugauuugccgggcucuc

SEQ ID NO: 1887696 - RNA, 19 nt, Artificial Sequence
  Description of Artificial Sequence: Synthetic oligonucleotide
caaguggcuaugaguugcc

SEQ ID NO: 1887697 - RNA, 19 nt, Artificial Sequence
  Description of Artificial Sequence: Synthetic oligonucleotide
uuuugacuucuuagauuuc

SEQ ID NO: 1887698 - RNA, 19 nt, Artificial Sequence
  Description of Artificial Sequence: Synthetic oligonucleotide
cuuauggagacgggccucc

SEQ ID NO: 1887699 - RNA, 19 nt, Artificial Sequence
  Description of Artificial Sequence: Synthetic oligonucleotide
aagaccggagagauuuaug

SEQ ID NO: 1887700 - RNA, 19 nt, Artificial Sequence
  Description of Artificial Sequence: Synthetic oligonucleotide
ucacauuacccgagccaca

SEQ ID NO: 1887701 - RNA, 19 nt, Artificial Sequence
  Description of Artificial Sequence: Synthetic oligonucleotide
agcaaguggcuaugaguug

SEQ ID NO: 1887702 - RNA, 19 nt, Artificial Sequence
  Description of Artificial Sequence: Synthetic oligonucleotide
ggagugaauaauuagcaau

SEQ ID NO: 1887703 - RNA, 19 nt, Artificial Sequence
  Description of Artificial Sequence: Synthetic oligonucleotide
guggcuagcauuuuagaau

SEQ ID NO: 1887704 - RNA, 19 nt, Artificial Sequence
  Description of Artificial Sequence: Synthetic oligonucleotide
gguugucucaggaaucucc

SEQ ID NO: 1887705 - RNA, 19 nt, Artificial Sequence
  Description of Artificial Sequence: Synthetic oligonucleotide
aauggggaccagccugggu

SEQ ID NO: 1887706 - RNA, 19 nt, Artificial Sequence
  Description of Artificial Sequence: Synthetic oligonucleotide
gagcuugcaaagcccacuc

SEQ ID NO: 1887707 - RNA, 19 nt, Artificial Sequence
  Description of Artificial Sequence: Synthetic oligonucleotide
acauuacccgagccacacg

SEQ ID NO: 1887708 - RNA, 19 nt, Artificial Sequence
  Description of Artificial Sequence: Synthetic oligonucleotide
ucuggccaccuuuaggcua

SEQ ID NO: 1887709 - RNA, 19 nt, Artificial Sequence
  Description of Artificial Sequence: Synthetic oligonucleotide
uuugccgggcucucuuucu

SEQ ID NO: 1887710 - RNA, 19 nt, Artificial Sequence
  Description of Artificial Sequence: Synthetic oligonucleotide
aacuugacaccggucacua

SEQ ID NO: 1887711 - RNA, 19 nt, Artificial Sequence
  Description of Artificial Sequence: Synthetic oligonucleotide
gaaggcaagccuugaccuc

SEQ ID NO: 1887712 - RNA, 19 nt, Artificial Sequence
  Description of Artificial Sequence: Synthetic oligonucleotide
uccugucauaugagcaagu

SEQ ID NO: 1887713 - RNA, 19 nt, Artificial Sequence
  Description of Artificial Sequence: Synthetic oligonucleotide
uaugagcaaguggcuauga

SEQ ID NO: 1887714 - RNA, 19 nt, Artificial Sequence
  Description of Artificial Sequence: Synthetic oligonucleotide
uccgaaggcaagccuugac

SEQ ID NO: 1887715 - RNA, 19 nt, Artificial Sequence
  Description of Artificial Sequence: Synthetic oligonucleotide
auccaauccuacacauugg

SEQ ID NO: 1887716 - RNA, 19 nt, Artificial Sequence
  Description of Artificial Sequence: Synthetic oligonucleotide
ggauggaacacaauugcuc

SEQ ID NO: 1887717 - RNA, 19 nt, Artificial Sequence
  Description of Artificial Sequence: Synthetic oligonucleotide
ccugugagcaagaagucuc

SEQ ID NO: 1887718 - RNA, 19 nt, Artificial Sequence
  Description of Artificial Sequence: Synthetic oligonucleotide
uucaugguaccagguuugc

SEQ ID NO: 1887719 - RNA, 19 nt, Artificial Sequence
  Description of Artificial Sequence: Synthetic oligonucleotide
auaugagcaaguggcuaug

SEQ ID NO: 1887720 - RNA, 19 nt, Artificial Sequence
  Description of Artificial Sequence: Synthetic oligonucleotide
aagguccaaguccuuccau

SEQ ID NO: 1887721 - RNA, 19 nt, Artificial Sequence
  Description of Artificial Sequence: Synthetic oligonucleotide
uaggcccauuacuuugccc

SEQ ID NO: 1887722 - RNA, 19 nt, Artificial Sequence
  Description of Artificial Sequence: Synthetic oligonucleotide
ugucuaggcccauuacuuu

SEQ ID NO: 1887723 - RNA, 19 nt, Artificial Sequence
  Description of Artificial Sequence: Synthetic oligonucleotide
uggaacacaauugcuccua

SEQ ID NO: 1887724 - RNA, 19 nt, Artificial Sequence
  Description of Artificial Sequence: Synthetic oligonucleotide
uaggagauuggccgaucau

SEQ ID NO: 1887725 - RNA, 19 nt, Artificial Sequence
  Description of Artificial Sequence: Synthetic oligonucleotide
cuuuugguccaaugagaca

SEQ ID NO: 1887726 - RNA, 19 nt, Artificial Sequence
  Description of Artificial Sequence: Synthetic oligonucleotide
uccaaccacugagagaaua

SEQ ID NO: 1887727 - RNA, 19 nt, Artificial Sequence
  Description of Artificial Sequence: Synthetic oligonucleotide
ucuuaaccuuucucuucgu

SEQ ID NO: 1887728 - RNA, 19 nt, Artificial Sequence
  Description of Artificial Sequence: Synthetic oligonucleotide
agagcuugcaaagcccacu

SEQ ID NO: 1887729 - RNA, 19 nt, Artificial Sequence
  Description of Artificial Sequence: Synthetic oligonucleotide
cauggauaggcucaaacuu

SEQ ID NO: 1887730 - RNA, 19 nt, Artificial Sequence
  Description of Artificial Sequence: Synthetic oligonucleotide
auuuguguuauggccucga

SEQ ID NO: 1887731 - RNA, 19 nt, Artificial Sequence
  Description of Artificial Sequence: Synthetic oligonucleotide
agcagcacaagaagccaag

SEQ ID NO: 1887732 - RNA, 19 nt, Artificial Sequence
  Description of Artificial Sequence: Synthetic oligonucleotide
augucuaggcccauuacuu

SEQ ID NO: 1887733 - RNA, 19 nt, Artificial Sequence
  Description of Artificial Sequence: Synthetic oligonucleotide
agguccugucauaugagca

SEQ ID NO: 1887734 - RNA, 19 nt, Artificial Sequence
  Description of Artificial Sequence: Synthetic oligonucleotide
cuaggcccauuacuuugcc

SEQ ID NO: 1887735 - RNA, 19 nt, Artificial Sequence
  Description of Artificial Sequence: Synthetic oligonucleotide
gauuggccgaucaucucca

SEQ ID NO: 1887736 - RNA, 19 nt, Artificial Sequence
  Description of Artificial Sequence: Synthetic oligonucleotide
caaggcuccgaaggcaagc

SEQ ID NO: 1887737 - RNA, 19 nt, Artificial Sequence
  Description of Artificial Sequence: Synthetic oligonucleotide
cauuuuagaauuggggacu

SEQ ID NO: 1887738 - RNA, 19 nt, Artificial Sequence
  Description of Artificial Sequence: Synthetic oligonucleotide
uccucggugagagcacaag

SEQ ID NO: 1887739 - RNA, 19 nt, Artificial Sequence
  Description of Artificial Sequence: Synthetic oligonucleotide
gagcaaguggcuaugaguu

SEQ ID NO: 1887740 - RNA, 19 nt, Artificial Sequence
  Description of Artificial Sequence: Synthetic oligonucleotide
agguucugguugucucagg

SEQ ID NO: 1887741 - RNA, 19 nt, Artificial Sequence
  Description of Artificial Sequence: Synthetic oligonucleotide
gagauuggccgaucaucuc

SEQ ID NO: 1887742 - RNA, 19 nt, Artificial Sequence
  Description of Artificial Sequence: Synthetic oligonucleotide
cagugaaaauccaauccua

SEQ ID NO: 1887743 - RNA, 19 nt, Artificial Sequence
  Description of Artificial Sequence: Synthetic oligonucleotide
gccaccuuuaggcuauuug

SEQ ID NO: 1887744 - RNA, 19 nt, Artificial Sequence
  Description of Artificial Sequence: Synthetic oligonucleotide
augagacaguagauuuagg

SEQ ID NO: 1887745 - RNA, 19 nt, Artificial Sequence
  Description of Artificial Sequence: Synthetic oligonucleotide
ccgaaggcaagccuugacc

SEQ ID NO: 1887746 - RNA, 19 nt, Artificial Sequence
  Description of Artificial Sequence: Synthetic oligonucleotide
agccuugaccucugaguca

SEQ ID NO: 1887747 - RNA, 19 nt, Artificial Sequence
  Description of Artificial Sequence: Synthetic oligonucleotide
uucaaagaccggagagauu

SEQ ID NO: 1887748 - RNA, 19 nt, Artificial Sequence
  Description of Artificial Sequence: Synthetic oligonucleotide
cacacgaaccguauggccu

SEQ ID NO: 1887749 - RNA, 19 nt, Artificial Sequence
  Description of Artificial Sequence: Synthetic oligonucleotide
auuuuagaauuggggacua

SEQ ID NO: 1887750 - RNA, 19 nt, Artificial Sequence
  Description of Artificial Sequence: Synthetic oligonucleotide
ccuccaagcguuucauugc

SEQ ID NO: 1887751 - RNA, 19 nt, Artificial Sequence
  Description of Artificial Sequence: Synthetic oligonucleotide
cauaugagcaaguggcuau

SEQ ID NO: 1887752 - RNA, 19 nt, Artificial Sequence
  Description of Artificial Sequence: Synthetic oligonucleotide
cuuuaggcuauuuggcccu

SEQ ID NO: 1887753 - RNA, 19 nt, Artificial Sequence
  Description of Artificial Sequence: Synthetic oligonucleotide
ggcccuucaugguaccagg

SEQ ID NO: 1887754 - RNA, 19 nt, Artificial Sequence
  Description of Artificial Sequence: Synthetic oligonucleotide
uguugucaccacugccagu

SEQ ID NO: 1887755 - RNA, 19 nt, Artificial Sequence
  Description of Artificial Sequence: Synthetic oligonucleotide
uugccuacucugccaucca

SEQ ID NO: 1887756 - RNA, 19 nt, Artificial Sequence
  Description of Artificial Sequence: Synthetic oligonucleotide
uuggccgaucaucuccaau

SEQ ID NO: 1887757 - RNA, 19 nt, Artificial Sequence
  Description of Artificial Sequence: Synthetic oligonucleotide
ugacaccggucacuaaguu

SEQ ID NO: 1887758 - RNA, 19 nt, Artificial Sequence
  Description of Artificial Sequence: Synthetic oligonucleotide
gaggcugcagucagggaca

SEQ ID NO: 1887759 - RNA, 19 nt, Artificial Sequence
  Description of Artificial Sequence: Synthetic oligonucleotide
cacugccagucacauuacc

SEQ ID NO: 1887760 - RNA, 19 nt, Artificial Sequence
  Description of Artificial Sequence: Synthetic oligonucleotide
ucaugguaccagguuugcu

SEQ ID NO: 1887761 - RNA, 19 nt, Artificial Sequence
  Description of Artificial Sequence: Synthetic oligonucleotide
cacuuugcagguguuguca

SEQ ID NO: 1887762 - RNA, 19 nt, Artificial Sequence
  Description of Artificial Sequence: Synthetic oligonucleotide
uuuuagaauuggggacuaa

SEQ ID NO: 1887763 - RNA, 19 nt, Artificial Sequence
  Description of Artificial Sequence: Synthetic oligonucleotide
caccugugagcaagaaguc

SEQ ID NO: 1887764 - RNA, 19 nt, Artificial Sequence
  Description of Artificial Sequence: Synthetic oligonucleotide
  modified_base (3)..(3): a, c, u, g, unknown or other
cunugagaaauggcuccuc

SEQ ID NO: 1887765 - RNA, 19 nt, Artificial Sequence
  Description of Artificial Sequence: Synthetic oligonucleotide
ccucggugagagcacaagg

SEQ ID NO: 1887766 - RNA, 19 nt, Artificial Sequence
  Description of Artificial Sequence: Synthetic oligonucleotide
gagccacacgaaccguaug

SEQ ID NO: 1887767 - RNA, 19 nt, Artificial Sequence
  Description of Artificial Sequence: Synthetic oligonucleotide
cagagcuugcaaagcccac

SEQ ID NO: 1887768 - RNA, 19 nt, Artificial Sequence
  Description of Artificial Sequence: Synthetic oligonucleotide
cucggugagagcacaaggu

SEQ ID NO: 1887769 - RNA, 19 nt, Artificial Sequence
  Description of Artificial Sequence: Synthetic oligonucleotide
ggugagagcacaaggucca

SEQ ID NO: 1887770 - RNA, 19 nt, Artificial Sequence
  Description of Artificial Sequence: Synthetic oligonucleotide
guggcuaugaguugcccau

SEQ ID NO: 1887771 - RNA, 19 nt, Artificial Sequence
  Description of Artificial Sequence: Synthetic oligonucleotide
uugauuugccgggcucucu

SEQ ID NO: 1887772 - RNA, 19 nt, Artificial Sequence
  Description of Artificial Sequence: Synthetic oligonucleotide
gcagguguugucaccacug

SEQ ID NO: 1887773 - RNA, 19 nt, Artificial Sequence
  Description of Artificial Sequence: Synthetic oligonucleotide
caucaguuccaaccacuga

SEQ ID NO: 1887774 - RNA, 19 nt, Artificial Sequence
  Description of Artificial Sequence: Synthetic oligonucleotide
ggaacacaauugcuccuac

SEQ ID NO: 1887775 - RNA, 19 nt, Artificial Sequence
  Description of Artificial Sequence: Synthetic oligonucleotide
ugggagguucugguugucu

SEQ ID NO: 1887776 - RNA, 19 nt, Artificial Sequence
  Description of Artificial Sequence: Synthetic oligonucleotide
uggagacgggccuccucca

SEQ ID NO: 1887777 - RNA, 19 nt, Artificial Sequence
  Description of Artificial Sequence: Synthetic oligonucleotide
ccacacgaaccguauggcc

SEQ ID NO: 1887778 - RNA, 19 nt, Artificial Sequence
  Description of Artificial Sequence: Synthetic oligonucleotide
ucguucagcagggccuucu

SEQ ID NO: 1887779 - RNA, 19 nt, Artificial Sequence
  Description of Artificial Sequence: Synthetic oligonucleotide
gaugagcagggauggugua

SEQ ID NO: 1887780 - RNA, 19 nt, Artificial Sequence
  Description of Artificial Sequence: Synthetic oligonucleotide
ggagguucugguugucuca

SEQ ID NO: 1887781 - RNA, 19 nt, Artificial Sequence
  Description of Artificial Sequence: Synthetic oligonucleotide
auccguggaaacauugauu

SEQ ID NO: 1887782 - RNA, 19 nt, Artificial Sequence
  Description of Artificial Sequence: Synthetic oligonucleotide
uugucucaggaaucuccuu

SEQ ID NO: 1887783 - RNA, 19 nt, Artificial Sequence
  Description of Artificial Sequence: Synthetic oligonucleotide
uggggacuaaagugacaau

SEQ ID NO: 1887784 - RNA, 19 nt, Artificial Sequence
  Description of Artificial Sequence: Synthetic oligonucleotide
aucuccaaucugacugcag

SEQ ID NO: 1887785 - RNA, 19 nt, Artificial Sequence
  Description of Artificial Sequence: Synthetic oligonucleotide
auuggggacuaaagugaca

SEQ ID NO: 1887786 - RNA, 19 nt, Artificial Sequence
  Description of Artificial Sequence: Synthetic oligonucleotide
ggcuaugaguugcccauca

SEQ ID NO: 1887787 - RNA, 19 nt, Artificial Sequence
  Description of Artificial Sequence: Synthetic oligonucleotide
auuuaggauggaacacaau

SEQ ID NO: 1887788 - RNA, 19 nt, Artificial Sequence
  Description of Artificial Sequence: Synthetic oligonucleotide
aggcuauuuggcccuucau

SEQ ID NO: 1887789 - RNA, 19 nt, Artificial Sequence
  Description of Artificial Sequence: Synthetic oligonucleotide
ggcucaaacuugacaccgg

SEQ ID NO: 1887790 - RNA, 19 nt, Artificial Sequence
  Description of Artificial Sequence: Synthetic oligonucleotide
ccagucacauuacccgagc

SEQ ID NO: 1887791 - RNA, 19 nt, Artificial Sequence
  Description of Artificial Sequence: Synthetic oligonucleotide
guauggccuucaauaucug

SEQ ID NO: 1887792 - RNA, 19 nt, Artificial Sequence
  Description of Artificial Sequence: Synthetic oligonucleotide
gucaccacugccagucaca

SEQ ID NO: 1887793 - RNA, 19 nt, Artificial Sequence
  Description of Artificial Sequence: Synthetic oligonucleotide
agguucucccaaggcuccg

SEQ ID NO: 1887794 - RNA, 19 nt, Artificial Sequence
  Description of Artificial Sequence: Synthetic oligonucleotide
ggagauuggccgaucaucu

SEQ ID NO: 1887795 - RNA, 19 nt, Artificial Sequence
  Description of Artificial Sequence: Synthetic oligonucleotide
caguagauuuaggauggaa

SEQ ID NO: 1887796 - RNA, 19 nt, Artificial Sequence
  Description of Artificial Sequence: Synthetic oligonucleotide
gaaccguauggccuucaau

SEQ ID NO: 1887797 - RNA, 19 nt, Artificial Sequence
  Description of Artificial Sequence: Synthetic oligonucleotide
uugccgggcucucuuucuu

SEQ ID NO: 1887798 - RNA, 19 nt, Artificial Sequence
  Description of Artificial Sequence: Synthetic oligonucleotide
cauccguggaaacauugau

SEQ ID NO: 1887799 - RNA, 19 nt, Artificial Sequence
  Description of Artificial Sequence: Synthetic oligonucleotide
ccaaugagacaguagauuu

SEQ ID NO: 1887800 - RNA, 19 nt, Artificial Sequence
  Description of Artificial Sequence: Synthetic oligonucleotide
ucucuucguucagcagggc

SEQ ID NO: 1887801 - RNA, 19 nt, Artificial Sequence
  Description of Artificial Sequence: Synthetic oligonucleotide
uuaggcuauuuggcccuuc

SEQ ID NO: 1887802 - RNA, 19 nt, Artificial Sequence
  Description of Artificial Sequence: Synthetic oligonucleotide
ggagagauuuaugcagcuc

SEQ ID NO: 1887803 - RNA, 19 nt, Artificial Sequence
  Description of Artificial Sequence: Synthetic oligonucleotide
cgaucaucuccaaucugac

SEQ ID NO: 1887804 - RNA, 19 nt, Artificial Sequence
  Description of Artificial Sequence: Synthetic oligonucleotide
cauugauuugccgggcucu

SEQ ID NO: 1887805 - RNA, 19 nt, Artificial Sequence
  Description of Artificial Sequence: Synthetic oligonucleotide
acuugacaccggucacuaa

SEQ ID NO: 1887806 - RNA, 19 nt, Artificial Sequence
  Description of Artificial Sequence: Synthetic oligonucleotide
ccagagcuugcaaagccca

SEQ ID NO: 1887807 - RNA, 19 nt, Artificial Sequence
  Description of Artificial Sequence: Synthetic oligonucleotide
auuggccgaucaucuccaa

SEQ ID NO: 1887808 - RNA, 19 nt, Artificial Sequence
  Description of Artificial Sequence: Synthetic oligonucleotide
cguauggccuucaauaucu

SEQ ID NO: 1887809 - RNA, 19 nt, Artificial Sequence
  Description of Artificial Sequence: Synthetic oligonucleotide
uuuaggcuauuuggcccuu

SEQ ID NO: 1887810 - RNA, 19 nt, Artificial Sequence
  Description of Artificial Sequence: Synthetic oligonucleotide
ccauggauaggcucaaacu

SEQ ID NO: 1887811 - RNA, 19 nt, Artificial Sequence
  Description of Artificial Sequence: Synthetic oligonucleotide
gccgaucaucuccaaucug

SEQ ID NO: 1887812 - RNA, 19 nt, Artificial Sequence
  Description of Artificial Sequence: Synthetic oligonucleotide
auuacccgagccacacgaa

SEQ ID NO: 1887813 - RNA, 19 nt, Artificial Sequence
  Description of Artificial Sequence: Synthetic oligonucleotide
gccacacgaaccguauggc

SEQ ID NO: 1887814 - RNA, 19 nt, Artificial Sequence
  Description of Artificial Sequence: Synthetic oligonucleotide
uggcuaugaguugcccauc

SEQ ID NO: 1887815 - RNA, 19 nt, Artificial Sequence
  Description of Artificial Sequence: Synthetic oligonucleotide
ccguauggccuucaauauc

SEQ ID NO: 1887816 - RNA, 19 nt, Artificial Sequence
  Description of Artificial Sequence: Synthetic oligonucleotide
caucuccaaucugacugca

SEQ ID NO: 1887817 - RNA, 19 nt, Artificial Sequence
  Description of Artificial Sequence: Synthetic oligonucleotide
cuucaauggggaccagccu

SEQ ID NO: 1887818 - RNA, 19 nt, Artificial Sequence
  Description of Artificial Sequence: Synthetic oligonucleotide
ccguggaaacauugauuug

SEQ ID NO: 1887819 - RNA, 19 nt, Artificial Sequence
  Description of Artificial Sequence: Synthetic oligonucleotide
gcucaaacuugacaccggu

SEQ ID NO: 1887820 - RNA, 19 nt, Artificial Sequence
  Description of Artificial Sequence: Synthetic oligonucleotide
ggcuagcauuuuagaauug

SEQ ID NO: 1887821 - RNA, 19 nt, Artificial Sequence
  Description of Artificial Sequence: Synthetic oligonucleotide
gcguuucauugcccugggg

SEQ ID NO: 1887822 - RNA, 19 nt, Artificial Sequence
  Description of Artificial Sequence: Synthetic oligonucleotide
gcuccgaaggcaagccuug

SEQ ID NO: 1887823 - RNA, 19 nt, Artificial Sequence
  Description of Artificial Sequence: Synthetic oligonucleotide
ccacugguucaucacuguc

SEQ ID NO: 1887824 - RNA, 19 nt, Artificial Sequence
  Description of Artificial Sequence: Synthetic oligonucleotide
caaagaccggagagauuua

SEQ ID NO: 1887825 - RNA, 19 nt, Artificial Sequence
  Description of Artificial Sequence: Synthetic oligonucleotide
gauuugccgggcucucuuu

SEQ ID NO: 1887826 - RNA, 19 nt, Artificial Sequence
  Description of Artificial Sequence: Synthetic oligonucleotide
ccuggggagugaauaauua

SEQ ID NO: 1887827 - RNA, 19 nt, Artificial Sequence
  Description of Artificial Sequence: Synthetic oligonucleotide
cuccuacauuuguguuaug

SEQ ID NO: 1887828 - RNA, 19 nt, Artificial Sequence
  Description of Artificial Sequence: Synthetic oligonucleotide
ggcccauuacuuugcccuc

SEQ ID NO: 1887829 - RNA, 19 nt, Artificial Sequence
  Description of Artificial Sequence: Synthetic oligonucleotide
ccaaggcuccgaaggcaag

SEQ ID NO: 1887830 - RNA, 19 nt, Artificial Sequence
  Description of Artificial Sequence: Synthetic oligonucleotide
cuggccaccuuuaggcuau

SEQ ID NO: 1887831 - RNA, 19 nt, Artificial Sequence
  Description of Artificial Sequence: Synthetic oligonucleotide
cuccaacaagcuguggcua

SEQ ID NO: 1887832 - RNA, 19 nt, Artificial Sequence
  Description of Artificial Sequence: Synthetic oligonucleotide
ccauccagagcuugaaggu

SEQ ID NO: 1887833 - RNA, 19 nt, Artificial Sequence
  Description of Artificial Sequence: Synthetic oligonucleotide
ggauaggcucaaacuugac

SEQ ID NO: 1887834 - RNA, 19 nt, Artificial Sequence
  Description of Artificial Sequence: Synthetic oligonucleotide
aagcuguggcuagcauuuu

SEQ ID NO: 1887835 - RNA, 19 nt, Artificial Sequence
  Description of Artificial Sequence: Synthetic oligonucleotide
ggccgaucaucuccaaucu

SEQ ID NO: 1887836 - RNA, 19 nt, Artificial Sequence
  Description of Artificial Sequence: Synthetic oligonucleotide
acacaacgucguugucgaa

SEQ ID NO: 1887837 - RNA, 19 nt, Artificial Sequence
  Description of Artificial Sequence: Synthetic oligonucleotide
gcuccuacauuuguguuau

SEQ ID NO: 1887838 - RNA, 19 nt, Artificial Sequence
  Description of Artificial Sequence: Synthetic oligonucleotide
guuugcugauacucuucuu

SEQ ID NO: 1887839 - RNA, 19 nt, Artificial Sequence
  Description of Artificial Sequence: Synthetic oligonucleotide
acgaaccguauggccuuca

SEQ ID NO: 1887840 - RNA, 19 nt, Artificial Sequence
  Description of Artificial Sequence: Synthetic oligonucleotide
cgaaggcaagccuugaccu

SEQ ID NO: 1887841 - RNA, 19 nt, Artificial Sequence
  Description of Artificial Sequence: Synthetic oligonucleotide
cauaggcaccugugagcaa

SEQ ID NO: 1887842 - RNA, 19 nt, Artificial Sequence
  Description of Artificial Sequence: Synthetic oligonucleotide
ccuuauggagacgggccuc

SEQ ID NO: 1887843 - RNA, 19 nt, Artificial Sequence
  Description of Artificial Sequence: Synthetic oligonucleotide
ccacacuuugcagguguug

SEQ ID NO: 1887844 - RNA, 19 nt, Artificial Sequence
  Description of Artificial Sequence: Synthetic oligonucleotide
ccauuacuuugcccucaug

SEQ ID NO: 1887845 - RNA, 19 nt, Artificial Sequence
  Description of Artificial Sequence: Synthetic oligonucleotide
caauaggagauuggccgau

SEQ ID NO: 1887846 - RNA, 19 nt, Artificial Sequence
  Description of Artificial Sequence: Synthetic oligonucleotide
cacgaaccguauggccuuc

SEQ ID NO: 1887847 - RNA, 19 nt, Artificial Sequence
  Description of Artificial Sequence: Synthetic oligonucleotide
ggaccagccuggguggguc

SEQ ID NO: 1887848 - RNA, 19 nt, Artificial Sequence
  Description of Artificial Sequence: Synthetic oligonucleotide
caaccacugagagaauauu

SEQ ID NO: 1887849 - RNA, 19 nt, Artificial Sequence
  Description of Artificial Sequence: Synthetic oligonucleotide
cgucguugucgaagguccc

SEQ ID NO: 1887850 - RNA, 19 nt, Artificial Sequence
  Description of Artificial Sequence: Synthetic oligonucleotide
cuccucggugagagcacaa

SEQ ID NO: 1887851 - RNA, 19 nt, Artificial Sequence
  Description of Artificial Sequence: Synthetic oligonucleotide
gguucucccaaggcuccga

SEQ ID NO: 1887852 - RNA, 19 nt, Artificial Sequence
  Description of Artificial Sequence: Synthetic oligonucleotide
gguccagaucuuggcugug

SEQ ID NO: 1887853 - RNA, 19 nt, Artificial Sequence
  Description of Artificial Sequence: Synthetic oligonucleotide
guguagacacaacgucguu

SEQ ID NO: 1887854 - RNA, 19 nt, Artificial Sequence
  Description of Artificial Sequence: Synthetic oligonucleotide
gcccauuacuuugcccuca

SEQ ID NO: 1887855 - RNA, 19 nt, Artificial Sequence
  Description of Artificial Sequence: Synthetic oligonucleotide
gacauccuuuugguccaau

SEQ ID NO: 1887856 - RNA, 19 nt, Artificial Sequence
  Description of Artificial Sequence: Synthetic oligonucleotide
ggcaagccuugaccucuga

SEQ ID NO: 1887857 - RNA, 19 nt, Artificial Sequence
  Description of Artificial Sequence: Synthetic oligonucleotide
ccacuccaacaagcugugg

SEQ ID NO: 1887858 - RNA, 19 nt, Artificial Sequence
  Description of Artificial Sequence: Synthetic oligonucleotide
cuucguucagcagggccuu

SEQ ID NO: 1887859 - RNA, 19 nt, Artificial Sequence
  Description of Artificial Sequence: Synthetic oligonucleotide
caacgucguugucgaaggu

SEQ ID NO: 1887860 - RNA, 19 nt, Artificial Sequence
  Description of Artificial Sequence: Synthetic oligonucleotide
gcagcacaagaagccaagu

SEQ ID NO: 1887861 - RNA, 19 nt, Artificial Sequence
  Description of Artificial Sequence: Synthetic oligonucleotide
ccaauccuacacauugguu

SEQ ID NO: 1887862 - RNA, 19 nt, Artificial Sequence
  Description of Artificial Sequence: Synthetic oligonucleotide
ccggucacuaaguucugau

SEQ ID NO: 1887863 - RNA, 19 nt, Artificial Sequence
  Description of Artificial Sequence: Synthetic oligonucleotide
ggcuccgaaggcaagccuu

SEQ ID NO: 1887864 - RNA, 19 nt, Artificial Sequence
  Description of Artificial Sequence: Synthetic oligonucleotide
ccgagccacacgaaccgua

SEQ ID NO: 1887865 - RNA, 19 nt, Artificial Sequence
  Description of Artificial Sequence: Synthetic oligonucleotide
cuccauggauaggcucaaa

SEQ ID NO: 1887866 - RNA, 19 nt, Artificial Sequence
  Description of Artificial Sequence: Synthetic oligonucleotide
cguugucgaaggucccaca

SEQ ID NO: 1887867 - RNA, 19 nt, Artificial Sequence
  Description of Artificial Sequence: Synthetic oligonucleotide
cccuggggagugaauaauu

SEQ ID NO: 1887868 - RNA, 19 nt, Artificial Sequence
  Description of Artificial Sequence: Synthetic oligonucleotide
cccuucaugguaccagguu

SEQ ID NO: 1887869 - RNA, 19 nt, Artificial Sequence
  Description of Artificial Sequence: Synthetic oligonucleotide
uggccaccuuuaggcuauu

SEQ ID NO: 1887870 - RNA, 19 nt, Artificial Sequence
  Description of Artificial Sequence: Synthetic oligonucleotide
gcccuucaugguaccaggu

SEQ ID NO: 1887871 - RNA, 19 nt, Artificial Sequence
  Description of Artificial Sequence: Synthetic oligonucleotide
cgaaccguauggccuucaa

SEQ ID NO: 1887872 - RNA, 19 nt, Artificial Sequence
  Description of Artificial Sequence: Synthetic oligonucleotide
gcccuggggagugaauaau

SEQ ID NO: 1887873 - RNA, 19 nt, Artificial Sequence
  Description of Artificial Sequence: Synthetic oligonucleotide
caccacugccagucacauu

SEQ ID NO: 1887874 - RNA, 19 nt, Artificial Sequence
  Description of Artificial Sequence: Synthetic oligonucleotide
cccauuacuuugcccucau

SEQ ID NO: 1887875 - RNA, 19 nt, Artificial Sequence
  Description of Artificial Sequence: Synthetic oligonucleotide
cgagccacacgaaccguau

SEQ ID NO: 1887876 - RNA, 19 nt, Artificial Sequence
  Description of Artificial Sequence: Synthetic oligonucleotide
gggaccagccugggugggu

SEQ ID NO: 1887877 - RNA, 19 nt, Artificial Sequence
  Description of Artificial Sequence: Synthetic oligonucleotide
ggccaccuuuaggcuauuu

SEQ ID NO: 1887878 - RNA, 19 nt, Artificial Sequence
  Description of Artificial Sequence: Synthetic oligonucleotide
cccgagccacacgaaccgu

SEQ ID NO: 1887879 - RNA, 19 nt, Artificial Sequence
  Description of Artificial Sequence: Synthetic oligonucleotide
  modified_base (1)..(1): a, c, u, g, unknown or other
nugagaaauggcuccucgg

SEQ ID NO: 1887880 - RNA, 19 nt, Artificial Sequence
  Description of Artificial Sequence: Synthetic oligonucleotide
aacaccuucauccucagac

SEQ ID NO: 1887881 - RNA, 19 nt, Artificial Sequence
  Description of Artificial Sequence: Synthetic oligonucleotide
gauauaguaguauucuugg

SEQ ID NO: 1887882 - RNA, 19 nt, Artificial Sequence
  Description of Artificial Sequence: Synthetic oligonucleotide
uuugguaccaaacauuacc

SEQ ID NO: 1887883 - RNA, 19 nt, Artificial Sequence
  Description of Artificial Sequence: Synthetic oligonucleotide
gaaagaaggauguaggccc

SEQ ID NO: 1887884 - RNA, 19 nt, Artificial Sequence
  Description of Artificial Sequence: Synthetic oligonucleotide
ucuuccaacacguugaucu

SEQ ID NO: 1887885 - RNA, 19 nt, Artificial Sequence
  Description of Artificial Sequence: Synthetic oligonucleotide
uaaauaucgagauagucgu

SEQ ID NO: 1887886 - RNA, 19 nt, Artificial Sequence
  Description of Artificial Sequence: Synthetic oligonucleotide
acaguaaauaucgagauag

SEQ ID NO: 1887887 - RNA, 19 nt, Artificial Sequence
  Description of Artificial Sequence: Synthetic oligonucleotide
guaaauaucgagauagucg

SEQ ID NO: 1887888 - RNA, 19 nt, Artificial Sequence
  Description of Artificial Sequence: Synthetic oligonucleotide
auaguaguauucuuggccg

SEQ ID NO: 1887889 - RNA, 19 nt, Artificial Sequence
  Description of Artificial Sequence: Synthetic oligonucleotide
agauguaccgugcaggccc

SEQ ID NO: 1887890 - RNA, 19 nt, Artificial Sequence
  Description of Artificial Sequence: Synthetic oligonucleotide
auugcuguaaaacagggga

SEQ ID NO: 1887891 - RNA, 19 nt, Artificial Sequence
  Description of Artificial Sequence: Synthetic oligonucleotide
cagacgaacaccuucaucc

SEQ ID NO: 1887892 - RNA, 19 nt, Artificial Sequence
  Description of Artificial Sequence: Synthetic oligonucleotide
gaauucauaucccagcgag

SEQ ID NO: 1887893 - RNA, 19 nt, Artificial Sequence
  Description of Artificial Sequence: Synthetic oligonucleotide
aauaucgagauagucguuc

SEQ ID NO: 1887894 - RNA, 19 nt, Artificial Sequence
  Description of Artificial Sequence: Synthetic oligonucleotide
uuauugcuguaaaacaggg

SEQ ID NO: 1887895 - RNA, 19 nt, Artificial Sequence
  Description of Artificial Sequence: Synthetic oligonucleotide
aacuugauggggcugugcg

SEQ ID NO: 1887896 - RNA, 19 nt, Artificial Sequence
  Description of Artificial Sequence: Synthetic oligonucleotide
ucauaucccagcgagaagg

SEQ ID NO: 1887897 - RNA, 19 nt, Artificial Sequence
  Description of Artificial Sequence: Synthetic oligonucleotide
uggaauucauaucccagcg

SEQ ID NO: 1887898 - RNA, 19 nt, Artificial Sequence
  Description of Artificial Sequence: Synthetic oligonucleotide
aagagcagagcuaggaggc

SEQ ID NO: 1887899 - RNA, 19 nt, Artificial Sequence
  Description of Artificial Sequence: Synthetic oligonucleotide
gguacagauagacagacag

SEQ ID NO: 1887900 - RNA, 19 nt, Artificial Sequence
  Description of Artificial Sequence: Synthetic oligonucleotide
caaacauuaccaaagccac

SEQ ID NO: 1887901 - RNA, 19 nt, Artificial Sequence
  Description of Artificial Sequence: Synthetic oligonucleotide
accaaacauuaccaaagcc

SEQ ID NO: 1887902 - RNA, 19 nt, Artificial Sequence
  Description of Artificial Sequence: Synthetic oligonucleotide
ugucauagcaagagcagag

SEQ ID NO: 1887903 - RNA, 19 nt, Artificial Sequence
  Description of Artificial Sequence: Synthetic oligonucleotide
gagcuguuccaauauaccg

SEQ ID NO: 1887904 - RNA, 19 nt, Artificial Sequence
  Description of Artificial Sequence: Synthetic oligonucleotide
aaggauguaggccccacag

SEQ ID NO: 1887905 - RNA, 19 nt, Artificial Sequence
  Description of Artificial Sequence: Synthetic oligonucleotide
auauaguaguauucuuggc

SEQ ID NO: 1887906 - RNA, 19 nt, Artificial Sequence
  Description of Artificial Sequence: Synthetic oligonucleotide
aguaaauaucgagauaguc

SEQ ID NO: 1887907 - RNA, 19 nt, Artificial Sequence
  Description of Artificial Sequence: Synthetic oligonucleotide
acagauguaccgugcaggc

SEQ ID NO: 1887908 - RNA, 19 nt, Artificial Sequence
  Description of Artificial Sequence: Synthetic oligonucleotide
uccaauauaccgcaugccu

SEQ ID NO: 1887909 - RNA, 19 nt, Artificial Sequence
  Description of Artificial Sequence: Synthetic oligonucleotide
auuaccaaagccacaggcc

SEQ ID NO: 1887910 - RNA, 19 nt, Artificial Sequence
  Description of Artificial Sequence: Synthetic oligonucleotide
uauugcuguaaaacagggg

SEQ ID NO: 1887911 - RNA, 19 nt, Artificial Sequence
  Description of Artificial Sequence: Synthetic oligonucleotide
augcuuauugcuguaaaac

SEQ ID NO: 1887912 - RNA, 19 nt, Artificial Sequence
  Description of Artificial Sequence: Synthetic oligonucleotide
cauuaccaaagccacaggc

SEQ ID NO: 1887913 - RNA, 19 nt, Artificial Sequence
  Description of Artificial Sequence: Synthetic oligonucleotide
aacgcuuggagccuuggcu

SEQ ID NO: 1887914 - RNA, 19 nt, Artificial Sequence
  Description of Artificial Sequence: Synthetic oligonucleotide
gagauagucguucacguuc

SEQ ID NO: 1887915 - RNA, 19 nt, Artificial Sequence
  Description of Artificial Sequence: Synthetic oligonucleotide
auagcaagagcagagcuag

SEQ ID NO: 1887916 - RNA, 19 nt, Artificial Sequence
  Description of Artificial Sequence: Synthetic oligonucleotide
agcgagaaggcgcuguagc

SEQ ID NO: 1887917 - RNA, 19 nt, Artificial Sequence
  Description of Artificial Sequence: Synthetic oligonucleotide
ugucaugaggaagaaggcg

SEQ ID NO: 1887918 - RNA, 19 nt, Artificial Sequence
  Description of Artificial Sequence: Synthetic oligonucleotide
agguguucccgcuuggggc

SEQ ID NO: 1887919 - RNA, 19 nt, Artificial Sequence
  Description of Artificial Sequence: Synthetic oligonucleotide
gagagagugggcaaagagg

SEQ ID NO: 1887920 - RNA, 19 nt, Artificial Sequence
  Description of Artificial Sequence: Synthetic oligonucleotide
uaucccagcgagaaggcgc

SEQ ID NO: 1887921 - RNA, 19 nt, Artificial Sequence
  Description of Artificial Sequence: Synthetic oligonucleotide
agagcuaggaggccaagag

SEQ ID NO: 1887922 - RNA, 19 nt, Artificial Sequence
  Description of Artificial Sequence: Synthetic oligonucleotide
agauauaguaguauucuug

SEQ ID NO: 1887923 - RNA, 19 nt, Artificial Sequence
  Description of Artificial Sequence: Synthetic oligonucleotide
agcuguuccaauauaccgc

SEQ ID NO: 1887924 - RNA, 19 nt, Artificial Sequence
  Description of Artificial Sequence: Synthetic oligonucleotide
gaugcccacggccagaggc

SEQ ID NO: 1887925 - RNA, 19 nt, Artificial Sequence
  Description of Artificial Sequence: Synthetic oligonucleotide
aagagugucaugaggaaga

SEQ ID NO: 1887926 - RNA, 19 nt, Artificial Sequence
  Description of Artificial Sequence: Synthetic oligonucleotide
gacagauguaccgugcagg

SEQ ID NO: 1887927 - RNA, 19 nt, Artificial Sequence
  Description of Artificial Sequence: Synthetic oligonucleotide
uggagauauaguaguauuc

SEQ ID NO: 1887928 - RNA, 19 nt, Artificial Sequence
  Description of Artificial Sequence: Synthetic oligonucleotide
uaccaaacauuaccaaagc

SEQ ID NO: 1887929 - RNA, 19 nt, Artificial Sequence
  Description of Artificial Sequence: Synthetic oligonucleotide
uggagcuguuccaauauac

SEQ ID NO: 1887930 - RNA, 19 nt, Artificial Sequence
  Description of Artificial Sequence: Synthetic oligonucleotide
augccuguuucccagcgcg

SEQ ID NO: 1887931 - RNA, 19 nt, Artificial Sequence
  Description of Artificial Sequence: Synthetic oligonucleotide
uauaccgcaugccuguuuc

SEQ ID NO: 1887932 - RNA, 19 nt, Artificial Sequence
  Description of Artificial Sequence: Synthetic oligonucleotide
aucgagauagucguucacg

SEQ ID NO: 1887933 - RNA, 19 nt, Artificial Sequence
  Description of Artificial Sequence: Synthetic oligonucleotide
gugcggacaguaaauaucg

SEQ ID NO: 1887934 - RNA, 19 nt, Artificial Sequence
  Description of Artificial Sequence: Synthetic oligonucleotide
ucggagaacuugauggggc

SEQ ID NO: 1887935 - RNA, 19 nt, Artificial Sequence
  Description of Artificial Sequence: Synthetic oligonucleotide
aguaguauucuuggccggc

SEQ ID NO: 1887936 - RNA, 19 nt, Artificial Sequence
  Description of Artificial Sequence: Synthetic oligonucleotide
uguagugcggacaguaaau

SEQ ID NO: 1887937 - RNA, 19 nt, Artificial Sequence
  Description of Artificial Sequence: Synthetic oligonucleotide
agggcagguacagauagac

SEQ ID NO: 1887938 - RNA, 19 nt, Artificial Sequence
  Description of Artificial Sequence: Synthetic oligonucleotide
gagaggagaugcuuauugc

SEQ ID NO: 1887939 - RNA, 19 nt, Artificial Sequence
  Description of Artificial Sequence: Synthetic oligonucleotide
agugcggacaguaaauauc

SEQ ID NO: 1887940 - RNA, 19 nt, Artificial Sequence
  Description of Artificial Sequence: Synthetic oligonucleotide
uuccagugcagguugugag

SEQ ID NO: 1887941 - RNA, 19 nt, Artificial Sequence
  Description of Artificial Sequence: Synthetic oligonucleotide
uccaacacguugaucuuca

SEQ ID NO: 1887942 - RNA, 19 nt, Artificial Sequence
  Description of Artificial Sequence: Synthetic oligonucleotide
gagcgcugccuuuuaaagg

SEQ ID NO: 1887943 - RNA, 19 nt, Artificial Sequence
  Description of Artificial Sequence: Synthetic oligonucleotide
uaguaguauucuuggccgg

SEQ ID NO: 1887944 - RNA, 19 nt, Artificial Sequence
  Description of Artificial Sequence: Synthetic oligonucleotide
aggauguaggccccacagc

SEQ ID NO: 1887945 - RNA, 19 nt, Artificial Sequence
  Description of Artificial Sequence: Synthetic oligonucleotide
cacguugaucuucacauug

SEQ ID NO: 1887946 - RNA, 19 nt, Artificial Sequence
  Description of Artificial Sequence: Synthetic oligonucleotide
ucgagauagucguucacgu

SEQ ID NO: 1887947 - RNA, 19 nt, Artificial Sequence
  Description of Artificial Sequence: Synthetic oligonucleotide
agcacguacugcuccgccc

SEQ ID NO: 1887948 - RNA, 19 nt, Artificial Sequence
  Description of Artificial Sequence: Synthetic oligonucleotide
cuguaaaacaggggaaggg

SEQ ID NO: 1887949 - RNA, 19 nt, Artificial Sequence
  Description of Artificial Sequence: Synthetic oligonucleotide
gcauaugugccucuugggg

SEQ ID NO: 1887950 - RNA, 19 nt, Artificial Sequence
  Description of Artificial Sequence: Synthetic oligonucleotide
agcuaggaggccaagagug

SEQ ID NO: 1887951 - RNA, 19 nt, Artificial Sequence
  Description of Artificial Sequence: Synthetic oligonucleotide
ugugccugauccaccgcgg

SEQ ID NO: 1887952 - RNA, 19 nt, Artificial Sequence
  Description of Artificial Sequence: Synthetic oligonucleotide
ggagaggagaugcuuauug

SEQ ID NO: 1887953 - RNA, 19 nt, Artificial Sequence
  Description of Artificial Sequence: Synthetic oligonucleotide
ugggcguggagauauagua

SEQ ID NO: 1887954 - RNA, 19 nt, Artificial Sequence
  Description of Artificial Sequence: Synthetic oligonucleotide
ugagcuguuguagugcgga

SEQ ID NO: 1887955 - RNA, 19 nt, Artificial Sequence
  Description of Artificial Sequence: Synthetic oligonucleotide
cucagguuugguaccaaac

SEQ ID NO: 1887956 - RNA, 19 nt, Artificial Sequence
  Description of Artificial Sequence: Synthetic oligonucleotide
accucucucugucauagca

SEQ ID NO: 1887957 - RNA, 19 nt, Artificial Sequence
  Description of Artificial Sequence: Synthetic oligonucleotide
ggaaagaaggauguaggcc

SEQ ID NO: 1887958 - RNA, 19 nt, Artificial Sequence
  Description of Artificial Sequence: Synthetic oligonucleotide
uugcuguaaaacaggggaa

SEQ ID NO: 1887959 - RNA, 19 nt, Artificial Sequence
  Description of Artificial Sequence: Synthetic oligonucleotide
uucuuggccggcauggaau

SEQ ID NO: 1887960 - RNA, 19 nt, Artificial Sequence
  Description of Artificial Sequence: Synthetic oligonucleotide
uguuguagugcggacagua

SEQ ID NO: 1887961 - RNA, 19 nt, Artificial Sequence
  Description of Artificial Sequence: Synthetic oligonucleotide
aucuacgucccuuucccca

SEQ ID NO: 1887962 - RNA, 19 nt, Artificial Sequence
  Description of Artificial Sequence: Synthetic oligonucleotide
acauuaccaaagccacagg

SEQ ID NO: 1887963 - RNA, 19 nt, Artificial Sequence
  Description of Artificial Sequence: Synthetic oligonucleotide
agcagcagcagcagcagcg

SEQ ID NO: 1887964 - RNA, 19 nt, Artificial Sequence
  Description of Artificial Sequence: Synthetic oligonucleotide
aguauucuuggccggcaug

SEQ ID NO: 1887965 - RNA, 19 nt, Artificial Sequence
  Description of Artificial Sequence: Synthetic oligonucleotide
cauucccaacgcuuggagc

SEQ ID NO: 1887966 - RNA, 19 nt, Artificial Sequence
  Description of Artificial Sequence: Synthetic oligonucleotide
uuccccauguucugccccg

SEQ ID NO: 1887967 - RNA, 19 nt, Artificial Sequence
  Description of Artificial Sequence: Synthetic oligonucleotide
accguguagcccucucgcc

SEQ ID NO: 1887968 - RNA, 19 nt, Artificial Sequence
  Description of Artificial Sequence: Synthetic oligonucleotide
gucguucacguucaccugc

SEQ ID NO: 1887969 - RNA, 19 nt, Artificial Sequence
  Description of Artificial Sequence: Synthetic oligonucleotide
cugugccugauccaccgcg

SEQ ID NO: 1887970 - RNA, 19 nt, Artificial Sequence
  Description of Artificial Sequence: Synthetic oligonucleotide
ugugagugggcguggagau

SEQ ID NO: 1887971 - RNA, 19 nt, Artificial Sequence
  Description of Artificial Sequence: Synthetic oligonucleotide
auaccgcaugccuguuucc

SEQ ID NO: 1887972 - RNA, 19 nt, Artificial Sequence
  Description of Artificial Sequence: Synthetic oligonucleotide
cauaucccagcgagaaggc

SEQ ID NO: 1887973 - RNA, 19 nt, Artificial Sequence
  Description of Artificial Sequence: Synthetic oligonucleotide
gggcauaugugccucuugg

SEQ ID NO: 1887974 - RNA, 19 nt, Artificial Sequence
  Description of Artificial Sequence: Synthetic oligonucleotide
aggccucagguuugguacc

SEQ ID NO: 1887975 - RNA, 19 nt, Artificial Sequence
  Description of Artificial Sequence: Synthetic oligonucleotide
uaucgagauagucguucac

SEQ ID NO: 1887976 - RNA, 19 nt, Artificial Sequence
  Description of Artificial Sequence: Synthetic oligonucleotide
uuccaauauaccgcaugcc

SEQ ID NO: 1887977 - RNA, 19 nt, Artificial Sequence
  Description of Artificial Sequence: Synthetic oligonucleotide
guagcccucucgccgaagg

SEQ ID NO: 1887978 - RNA, 19 nt, Artificial Sequence
  Description of Artificial Sequence: Synthetic oligonucleotide
agaugcuuauugcuguaaa

SEQ ID NO: 1887979 - RNA, 19 nt, Artificial Sequence
  Description of Artificial Sequence: Synthetic oligonucleotide
cugcccuagagagaguggg

SEQ ID NO: 1887980 - RNA, 19 nt, Artificial Sequence
  Description of Artificial Sequence: Synthetic oligonucleotide
gcuguuguagugcggacag

SEQ ID NO: 1887981 - RNA, 19 nt, Artificial Sequence
  Description of Artificial Sequence: Synthetic oligonucleotide
agcaagagcagagcuagga

SEQ ID NO: 1887982 - RNA, 19 nt, Artificial Sequence
  Description of Artificial Sequence: Synthetic oligonucleotide
gcggacaguaaauaucgag

SEQ ID NO: 1887983 - RNA, 19 nt, Artificial Sequence
  Description of Artificial Sequence: Synthetic oligonucleotide
gaaggugcugguuggagcu

SEQ ID NO: 1887984 - RNA, 19 nt, Artificial Sequence
  Description of Artificial Sequence: Synthetic oligonucleotide
cucggagaacuugaugggg

SEQ ID NO: 1887985 - RNA, 19 nt, Artificial Sequence
  Description of Artificial Sequence: Synthetic oligonucleotide
ugugcgaggcaugcugccg

SEQ ID NO: 1887986 - RNA, 19 nt, Artificial Sequence
  Description of Artificial Sequence: Synthetic oligonucleotide
ucagcccugccccaccucu

SEQ ID NO: 1887987 - RNA, 19 nt, Artificial Sequence
  Description of Artificial Sequence: Synthetic oligonucleotide
cccaaccauggaaagaagg

SEQ ID NO: 1887988 - RNA, 19 nt, Artificial Sequence
  Description of Artificial Sequence: Synthetic oligonucleotide
agacgaacaccuucauccu

SEQ ID NO: 1887989 - RNA, 19 nt, Artificial Sequence
  Description of Artificial Sequence: Synthetic oligonucleotide
caccuucauccucagacac

SEQ ID NO: 1887990 - RNA, 19 nt, Artificial Sequence
  Description of Artificial Sequence: Synthetic oligonucleotide
uagugcggacaguaaauau

SEQ ID NO: 1887991 - RNA, 19 nt, Artificial Sequence
  Description of Artificial Sequence: Synthetic oligonucleotide
cagguguucccgcuugggg

SEQ ID NO: 1887992 - RNA, 19 nt, Artificial Sequence
  Description of Artificial Sequence: Synthetic oligonucleotide
agacacuuccagugcaggu

SEQ ID NO: 1887993 - RNA, 19 nt, Artificial Sequence
  Description of Artificial Sequence: Synthetic oligonucleotide
uagccugaggcuccgccca

SEQ ID NO: 1887994 - RNA, 19 nt, Artificial Sequence
  Description of Artificial Sequence: Synthetic oligonucleotide
ugccuuuuaaaggccucag

SEQ ID NO: 1887995 - RNA, 19 nt, Artificial Sequence
  Description of Artificial Sequence: Synthetic oligonucleotide
cuucucggagaacuugaug

SEQ ID NO: 1887996 - RNA, 19 nt, Artificial Sequence
  Description of Artificial Sequence: Synthetic oligonucleotide
ucguucacguucaccugca

SEQ ID NO: 1887997 - RNA, 19 nt, Artificial Sequence
  Description of Artificial Sequence: Synthetic oligonucleotide
ucccaaccauggaaagaag

SEQ ID NO: 1887998 - RNA, 19 nt, Artificial Sequence
  Description of Artificial Sequence: Synthetic oligonucleotide
ggcauaugugccucuuggg

SEQ ID NO: 1887999 - RNA, 19 nt, Artificial Sequence
  Description of Artificial Sequence: Synthetic oligonucleotide
gacaguaaauaucgagaua

SEQ ID NO: 1888000 - RNA, 19 nt, Artificial Sequence
  Description of Artificial Sequence: Synthetic oligonucleotide
caccguguagcccucucgc

SEQ ID NO: 1888001 - RNA, 19 nt, Artificial Sequence
  Description of Artificial Sequence: Synthetic oligonucleotide
agaaggauguaggccccac

SEQ ID NO: 1888002 - RNA, 19 nt, Artificial Sequence
  Description of Artificial Sequence: Synthetic oligonucleotide
gucauagcaagagcagagc

SEQ ID NO: 1888003 - RNA, 19 nt, Artificial Sequence
  Description of Artificial Sequence: Synthetic oligonucleotide
auaucccagcgagaaggcg

SEQ ID NO: 1888004 - RNA, 19 nt, Artificial Sequence
  Description of Artificial Sequence: Synthetic oligonucleotide
ugcccuagagagagugggc

SEQ ID NO: 1888005 - RNA, 19 nt, Artificial Sequence
  Description of Artificial Sequence: Synthetic oligonucleotide
gugcgaggcaugcugccgg

SEQ ID NO: 1888006 - RNA, 19 nt, Artificial Sequence
  Description of Artificial Sequence: Synthetic oligonucleotide
agucguucacguucaccug

SEQ ID NO: 1888007 - RNA, 19 nt, Artificial Sequence
  Description of Artificial Sequence: Synthetic oligonucleotide
guagccugaggcuccgccc

SEQ ID NO: 1888008 - RNA, 19 nt, Artificial Sequence
  Description of Artificial Sequence: Synthetic oligonucleotide
ucuacgucccuuuccccau

SEQ ID NO: 1888009 - RNA, 19 nt, Artificial Sequence
  Description of Artificial Sequence: Synthetic oligonucleotide
cggcauggaauucauaucc

SEQ ID NO: 1888010 - RNA, 19 nt, Artificial Sequence
  Description of Artificial Sequence: Synthetic oligonucleotide
ggccaagagugucaugagg

SEQ ID NO: 1888011 - RNA, 19 nt, Artificial Sequence
  Description of Artificial Sequence: Synthetic oligonucleotide
uucugccccgaggagagug

SEQ ID NO: 1888012 - RNA, 19 nt, Artificial Sequence
  Description of Artificial Sequence: Synthetic oligonucleotide
accucccggcuucaugugg

SEQ ID NO: 1888013 - RNA, 19 nt, Artificial Sequence
  Description of Artificial Sequence: Synthetic oligonucleotide
gaggcaugcugccgguugc

SEQ ID NO: 1888014 - RNA, 19 nt, Artificial Sequence
  Description of Artificial Sequence: Synthetic oligonucleotide
uuggccggcauggaauuca

SEQ ID NO: 1888015 - RNA, 19 nt, Artificial Sequence
  Description of Artificial Sequence: Synthetic oligonucleotide
ccaucuacgucccuuuccc

SEQ ID NO: 1888016 - RNA, 19 nt, Artificial Sequence
  Description of Artificial Sequence: Synthetic oligonucleotide
uaccgcaugccuguuuccc

SEQ ID NO: 1888017 - RNA, 19 nt, Artificial Sequence
  Description of Artificial Sequence: Synthetic oligonucleotide
gcuguuccaauauaccgca

SEQ ID NO: 1888018 - RNA, 19 nt, Artificial Sequence
  Description of Artificial Sequence: Synthetic oligonucleotide
agauagucguucacguuca

SEQ ID NO: 1888019 - RNA, 19 nt, Artificial Sequence
  Description of Artificial Sequence: Synthetic oligonucleotide
uuggagcuguuccaauaua

SEQ ID NO: 1888020 - RNA, 19 nt, Artificial Sequence
  Description of Artificial Sequence: Synthetic oligonucleotide
cacucccaaccauggaaag

SEQ ID NO: 1888021 - RNA, 19 nt, Artificial Sequence
  Description of Artificial Sequence: Synthetic oligonucleotide
caauauaccgcaugccugu

SEQ ID NO: 1888022 - RNA, 19 nt, Artificial Sequence
  Description of Artificial Sequence: Synthetic oligonucleotide
cauguucugccccgaggag

SEQ ID NO: 1888023 - RNA, 19 nt, Artificial Sequence
  Description of Artificial Sequence: Synthetic oligonucleotide
ucccgcuuggggcugguuc

SEQ ID NO: 1888024 - RNA, 19 nt, Artificial Sequence
  Description of Artificial Sequence: Synthetic oligonucleotide
ugcggacaguaaauaucga

SEQ ID NO: 1888025 - RNA, 19 nt, Artificial Sequence
  Description of Artificial Sequence: Synthetic oligonucleotide
ugcgauguggaggcgcagc

SEQ ID NO: 1888026 - RNA, 19 nt, Artificial Sequence
  Description of Artificial Sequence: Synthetic oligonucleotide
acagcacguacugcuccgc

SEQ ID NO: 1888027 - RNA, 19 nt, Artificial Sequence
  Description of Artificial Sequence: Synthetic oligonucleotide
agcagcagcagcagcagca

SEQ ID NO: 1888028 - RNA, 19 nt, Artificial Sequence
  Description of Artificial Sequence: Synthetic oligonucleotide
cagacacuuccagugcagg

SEQ ID NO: 1888029 - RNA, 19 nt, Artificial Sequence
  Description of Artificial Sequence: Synthetic oligonucleotide
gcgagaaggcgcuguagcg

SEQ ID NO: 1888030 - RNA, 19 nt, Artificial Sequence
  Description of Artificial Sequence: Synthetic oligonucleotide
acagauagacagacagaug

SEQ ID NO: 1888031 - RNA, 19 nt, Artificial Sequence
  Description of Artificial Sequence: Synthetic oligonucleotide
uccccggagugcgaugugg

SEQ ID NO: 1888032 - RNA, 19 nt, Artificial Sequence
  Description of Artificial Sequence: Synthetic oligonucleotide
ggagcuguuccaauauacc

SEQ ID NO: 1888033 - RNA, 19 nt, Artificial Sequence
  Description of Artificial Sequence: Synthetic oligonucleotide
caucuacgucccuuucccc

SEQ ID NO: 1888034 - RNA, 19 nt, Artificial Sequence
  Description of Artificial Sequence: Synthetic oligonucleotide
gaaggauguaggccccaca

SEQ ID NO: 1888035 - RNA, 19 nt, Artificial Sequence
  Description of Artificial Sequence: Synthetic oligonucleotide
ggagauauaguaguauucu

SEQ ID NO: 1888036 - RNA, 19 nt, Artificial Sequence
  Description of Artificial Sequence: Synthetic oligonucleotide
gagugucaugaggaagaag

SEQ ID NO: 1888037 - RNA, 19 nt, Artificial Sequence
  Description of Artificial Sequence: Synthetic oligonucleotide
ggaccuauggcugucccug

SEQ ID NO: 1888038 - RNA, 19 nt, Artificial Sequence
  Description of Artificial Sequence: Synthetic oligonucleotide
guggaggcgcagcagacga

SEQ ID NO: 1888039 - RNA, 19 nt, Artificial Sequence
  Description of Artificial Sequence: Synthetic oligonucleotide
cucccaaccauggaaagaa

SEQ ID NO: 1888040 - RNA, 19 nt, Artificial Sequence
  Description of Artificial Sequence: Synthetic oligonucleotide
auguucugccccgaggaga

SEQ ID NO: 1888041 - RNA, 19 nt, Artificial Sequence
  Description of Artificial Sequence: Synthetic oligonucleotide
ccauguacagcacguacug

SEQ ID NO: 1888042 - RNA, 19 nt, Artificial Sequence
  Description of Artificial Sequence: Synthetic oligonucleotide
ggcgcuguagcgcuggaac

SEQ ID NO: 1888043 - RNA, 19 nt, Artificial Sequence
  Description of Artificial Sequence: Synthetic oligonucleotide
gggcaaagagggcagguac

SEQ ID NO: 1888044 - RNA, 19 nt, Artificial Sequence
  Description of Artificial Sequence: Synthetic oligonucleotide
ucuuggccggcauggaauu

SEQ ID NO: 1888045 - RNA, 19 nt, Artificial Sequence
  Description of Artificial Sequence: Synthetic oligonucleotide
ggauguaggccccacagcu

SEQ ID NO: 1888046 - RNA, 19 nt, Artificial Sequence
  Description of Artificial Sequence: Synthetic oligonucleotide
ccaaccauggaaagaagga

SEQ ID NO: 1888047 - RNA, 19 nt, Artificial Sequence
  Description of Artificial Sequence: Synthetic oligonucleotide
cagcagacgaacaccuuca

SEQ ID NO: 1888048 - RNA, 19 nt, Artificial Sequence
  Description of Artificial Sequence: Synthetic oligonucleotide
agcuguuguagugcggaca

SEQ ID NO: 1888049 - RNA, 19 nt, Artificial Sequence
  Description of Artificial Sequence: Synthetic oligonucleotide
auuggggcccauggugaac

SEQ ID NO: 1888050 - RNA, 19 nt, Artificial Sequence
  Description of Artificial Sequence: Synthetic oligonucleotide
gagaaggcgcuguagcgcu

SEQ ID NO: 1888051 - RNA, 19 nt, Artificial Sequence
  Description of Artificial Sequence: Synthetic oligonucleotide
gguuugguaccaaacauua

SEQ ID NO: 1888052 - RNA, 19 nt, Artificial Sequence
  Description of Artificial Sequence: Synthetic oligonucleotide
caaagagggagggcaccgg

SEQ ID NO: 1888053 - RNA, 19 nt, Artificial Sequence
  Description of Artificial Sequence: Synthetic oligonucleotide
caugccuguuucccagcgc

SEQ ID NO: 1888054 - RNA, 19 nt, Artificial Sequence
  Description of Artificial Sequence: Synthetic oligonucleotide
ugucccugugccugaucca

SEQ ID NO: 1888055 - RNA, 19 nt, Artificial Sequence
  Description of Artificial Sequence: Synthetic oligonucleotide
gcaaagagggcagguacag

SEQ ID NO: 1888056 - RNA, 19 nt, Artificial Sequence
  Description of Artificial Sequence: Synthetic oligonucleotide
accggcuucuccccggagu

SEQ ID NO: 1888057 - RNA, 19 nt, Artificial Sequence
  Description of Artificial Sequence: Synthetic oligonucleotide
cucucgccgaaggugcugg

SEQ ID NO: 1888058 - RNA, 19 nt, Artificial Sequence
  Description of Artificial Sequence: Synthetic oligonucleotide
uacgucccuuuccccaugu

SEQ ID NO: 1888059 - RNA, 19 nt, Artificial Sequence
  Description of Artificial Sequence: Synthetic oligonucleotide
ugccuguuucccagcgcgc

SEQ ID NO: 1888060 - RNA, 19 nt, Artificial Sequence
  Description of Artificial Sequence: Synthetic oligonucleotide
cugugcgaggcaugcugcc

SEQ ID NO: 1888061 - RNA, 19 nt, Artificial Sequence
  Description of Artificial Sequence: Synthetic oligonucleotide
guuugguaccaaacauuac

SEQ ID NO: 1888062 - RNA, 19 nt, Artificial Sequence
  Description of Artificial Sequence: Synthetic oligonucleotide
aagaaggauguaggcccca

SEQ ID NO: 1888063 - RNA, 19 nt, Artificial Sequence
  Description of Artificial Sequence: Synthetic oligonucleotide
gauagucguucacguucac

SEQ ID NO: 1888064 - RNA, 19 nt, Artificial Sequence
  Description of Artificial Sequence: Synthetic oligonucleotide
ugcaggugcgguagccgcu

SEQ ID NO: 1888065 - RNA, 19 nt, Artificial Sequence
  Description of Artificial Sequence: Synthetic oligonucleotide
gcagcagacgaacaccuuc

SEQ ID NO: 1888066 - RNA, 19 nt, Artificial Sequence
  Description of Artificial Sequence: Synthetic oligonucleotide
ggcugugcgaggcaugcug

SEQ ID NO: 1888067 - RNA, 19 nt, Artificial Sequence
  Description of Artificial Sequence: Synthetic oligonucleotide
aaauaucgagauagucguu

SEQ ID NO: 1888068 - RNA, 19 nt, Artificial Sequence
  Description of Artificial Sequence: Synthetic oligonucleotide
ggacaguaaauaucgagau

SEQ ID NO: 1888069 - RNA, 19 nt, Artificial Sequence
  Description of Artificial Sequence: Synthetic oligonucleotide
gauguaccgugcaggcccc

SEQ ID NO: 1888070 - RNA, 19 nt, Artificial Sequence
  Description of Artificial Sequence: Synthetic oligonucleotide
ucuccccggagugcgaugu

SEQ ID NO: 1888071 - RNA, 19 nt, Artificial Sequence
  Description of Artificial Sequence: Synthetic oligonucleotide
gcgguagccgcucagguuc

SEQ ID NO: 1888072 - RNA, 19 nt, Artificial Sequence
  Description of Artificial Sequence: Synthetic oligonucleotide
gguagccugaggcuccgcc

SEQ ID NO: 1888073 - RNA, 19 nt, Artificial Sequence
  Description of Artificial Sequence: Synthetic oligonucleotide
caacgcuuggagccuuggc

SEQ ID NO: 1888074 - RNA, 19 nt, Artificial Sequence
  Description of Artificial Sequence: Synthetic oligonucleotide
accgcaugccuguuuccca

SEQ ID NO: 1888075 - RNA, 19 nt, Artificial Sequence
  Description of Artificial Sequence: Synthetic oligonucleotide
gagagugggcaaagagggc

SEQ ID NO: 1888076 - RNA, 19 nt, Artificial Sequence
  Description of Artificial Sequence: Synthetic oligonucleotide
acucccaaccauggaaaga

SEQ ID NO: 1888077 - RNA, 19 nt, Artificial Sequence
  Description of Artificial Sequence: Synthetic oligonucleotide
ccgcccaucacccaucuac

SEQ ID NO: 1888078 - RNA, 19 nt, Artificial Sequence
  Description of Artificial Sequence: Synthetic oligonucleotide
gacucccugcuccuucuca

SEQ ID NO: 1888079 - RNA, 19 nt, Artificial Sequence
  Description of Artificial Sequence: Synthetic oligonucleotide
aauauaccgcaugccuguu

SEQ ID NO: 1888080 - RNA, 19 nt, Artificial Sequence
  Description of Artificial Sequence: Synthetic oligonucleotide
gcucagguucaccauguac

SEQ ID NO: 1888081 - RNA, 19 nt, Artificial Sequence
  Description of Artificial Sequence: Synthetic oligonucleotide
auauaccgcaugccuguuu

SEQ ID NO: 1888082 - RNA, 19 nt, Artificial Sequence
  Description of Artificial Sequence: Synthetic oligonucleotide
gagcagcagcagcagcagc

SEQ ID NO: 1888083 - RNA, 19 nt, Artificial Sequence
  Description of Artificial Sequence: Synthetic oligonucleotide
guuggagcuguuccaauau

SEQ ID NO: 1888084 - RNA, 19 nt, Artificial Sequence
  Description of Artificial Sequence: Synthetic oligonucleotide
cagaggcagguguucccgc

SEQ ID NO: 1888085 - RNA, 19 nt, Artificial Sequence
  Description of Artificial Sequence: Synthetic oligonucleotide
gggcugguuccgcugaugc

SEQ ID NO: 1888086 - RNA, 19 nt, Artificial Sequence
  Description of Artificial Sequence: Synthetic oligonucleotide
gcacguacugcuccgcccc

SEQ ID NO: 1888087 - RNA, 19 nt, Artificial Sequence
  Description of Artificial Sequence: Synthetic oligonucleotide
gagcuguuguagugcggac

SEQ ID NO: 1888088 - RNA, 19 nt, Artificial Sequence
  Description of Artificial Sequence: Synthetic oligonucleotide
ggcauggaauucauauccc

SEQ ID NO: 1888089 - RNA, 19 nt, Artificial Sequence
  Description of Artificial Sequence: Synthetic oligonucleotide
ggcguggagauauaguagu

SEQ ID NO: 1888090 - RNA, 19 nt, Artificial Sequence
  Description of Artificial Sequence: Synthetic oligonucleotide
guaguauucuuggccggca

SEQ ID NO: 1888091 - RNA, 19 nt, Artificial Sequence
  Description of Artificial Sequence: Synthetic oligonucleotide
agauagacagacagaugua

SEQ ID NO: 1888092 - RNA, 19 nt, Artificial Sequence
  Description of Artificial Sequence: Synthetic oligonucleotide
cagcacguacugcuccgcc

SEQ ID NO: 1888093 - RNA, 19 nt, Artificial Sequence
  Description of Artificial Sequence: Synthetic oligonucleotide
cggagugcgauguggaggc

SEQ ID NO: 1888094 - RNA, 19 nt, Artificial Sequence
  Description of Artificial Sequence: Synthetic oligonucleotide
ccguguagcccucucgccg

SEQ ID NO: 1888095 - RNA, 19 nt, Artificial Sequence
  Description of Artificial Sequence: Synthetic oligonucleotide
ugcuccgccccgccgccag

SEQ ID NO: 1888096 - RNA, 19 nt, Artificial Sequence
  Description of Artificial Sequence: Synthetic oligonucleotide
agugcgauguggaggcgca

SEQ ID NO: 1888097 - RNA, 19 nt, Artificial Sequence
  Description of Artificial Sequence: Synthetic oligonucleotide
agcagacgaacaccuucau

SEQ ID NO: 1888098 - RNA, 19 nt, Artificial Sequence
  Description of Artificial Sequence: Synthetic oligonucleotide
guacugcuccgccccgccg

SEQ ID NO: 1888099 - RNA, 19 nt, Artificial Sequence
  Description of Artificial Sequence: Synthetic oligonucleotide
cagguucaccauguacagc

SEQ ID NO: 1888100 - RNA, 19 nt, Artificial Sequence
  Description of Artificial Sequence: Synthetic oligonucleotide
acguacugcuccgccccgc

SEQ ID NO: 1888101 - RNA, 19 nt, Artificial Sequence
  Description of Artificial Sequence: Synthetic oligonucleotide
uagcccucucgccgaaggu

SEQ ID NO: 1888102 - RNA, 19 nt, Artificial Sequence
  Description of Artificial Sequence: Synthetic oligonucleotide
ugguuggagcuguuccaau

SEQ ID NO: 1888103 - RNA, 19 nt, Artificial Sequence
  Description of Artificial Sequence: Synthetic oligonucleotide
gucccugugccugauccac

SEQ ID NO: 1888104 - RNA, 19 nt, Artificial Sequence
  Description of Artificial Sequence: Synthetic oligonucleotide
gagggagaggagaugcuua

SEQ ID NO: 1888105 - RNA, 19 nt, Artificial Sequence
  Description of Artificial Sequence: Synthetic oligonucleotide
agagugucaugaggaagaa

SEQ ID NO: 1888106 - RNA, 19 nt, Artificial Sequence
  Description of Artificial Sequence: Synthetic oligonucleotide
augcugccgguugcauucc

SEQ ID NO: 1888107 - RNA, 19 nt, Artificial Sequence
  Description of Artificial Sequence: Synthetic oligonucleotide
gggcguggagauauaguag

SEQ ID NO: 1888108 - RNA, 19 nt, Artificial Sequence
  Description of Artificial Sequence: Synthetic oligonucleotide
cacguucaccugcaccgug

SEQ ID NO: 1888109 - RNA, 19 nt, Artificial Sequence
  Description of Artificial Sequence: Synthetic oligonucleotide
ggcguugcaggugcgguag

SEQ ID NO: 1888110 - RNA, 19 nt, Artificial Sequence
  Description of Artificial Sequence: Synthetic oligonucleotide
cccaucuacgucccuuucc

SEQ ID NO: 1888111 - RNA, 19 nt, Artificial Sequence
  Description of Artificial Sequence: Synthetic oligonucleotide
ccucagacacuuccagugc

SEQ ID NO: 1888112 - RNA, 19 nt, Artificial Sequence
  Description of Artificial Sequence: Synthetic oligonucleotide
guagugcggacaguaaaua

SEQ ID NO: 1888113 - RNA, 19 nt, Artificial Sequence
  Description of Artificial Sequence: Synthetic oligonucleotide
gcaccguguagcccucucg

SEQ ID NO: 1888114 - RNA, 19 nt, Artificial Sequence
  Description of Artificial Sequence: Synthetic oligonucleotide
gccugauccaccgcggugc

SEQ ID NO: 1888115 - RNA, 19 nt, Artificial Sequence
  Description of Artificial Sequence: Synthetic oligonucleotide
cacguacugcuccgccccg

SEQ ID NO: 1888116 - RNA, 19 nt, Artificial Sequence
  Description of Artificial Sequence: Synthetic oligonucleotide
aggugcgguagccgcucag

SEQ ID NO: 1888117 - RNA, 19 nt, Artificial Sequence
  Description of Artificial Sequence: Synthetic oligonucleotide
cuuccagugcagguuguga

SEQ ID NO: 1888118 - RNA, 19 nt, Artificial Sequence
  Description of Artificial Sequence: Synthetic oligonucleotide
ggcgcagcagacgaacacc

SEQ ID NO: 1888119 - RNA, 19 nt, Artificial Sequence
  Description of Artificial Sequence: Synthetic oligonucleotide
uucuccccggagugcgaug

SEQ ID NO: 1888120 - RNA, 19 nt, Artificial Sequence
  Description of Artificial Sequence: Synthetic oligonucleotide
uguucccgcuuggggcugg

SEQ ID NO: 1888121 - RNA, 19 nt, Artificial Sequence
  Description of Artificial Sequence: Synthetic oligonucleotide
gaacaccuucauccucaga

SEQ ID NO: 1888122 - RNA, 19 nt, Artificial Sequence
  Description of Artificial Sequence: Synthetic oligonucleotide
gccggcauggaauucauau

SEQ ID NO: 1888123 - RNA, 19 nt, Artificial Sequence
  Description of Artificial Sequence: Synthetic oligonucleotide
ugcgaggcaugcugccggu

SEQ ID NO: 1888124 - RNA, 19 nt, Artificial Sequence
  Description of Artificial Sequence: Synthetic oligonucleotide
guuguagugcggacaguaa

SEQ ID NO: 1888125 - RNA, 19 nt, Artificial Sequence
  Description of Artificial Sequence: Synthetic oligonucleotide
aucccagcgagaaggcgcu

SEQ ID NO: 1888126 - RNA, 19 nt, Artificial Sequence
  Description of Artificial Sequence: Synthetic oligonucleotide
gauccaccgcggugccugc

SEQ ID NO: 1888127 - RNA, 19 nt, Artificial Sequence
  Description of Artificial Sequence: Synthetic oligonucleotide
cagcagcagcagcagcagc

SEQ ID NO: 1888128 - RNA, 19 nt, Artificial Sequence
  Description of Artificial Sequence: Synthetic oligonucleotide
caguaaauaucgagauagu

SEQ ID NO: 1888129 - RNA, 19 nt, Artificial Sequence
  Description of Artificial Sequence: Synthetic oligonucleotide
ccggagugcgauguggagg

SEQ ID NO: 1888130 - RNA, 19 nt, Artificial Sequence
  Description of Artificial Sequence: Synthetic oligonucleotide
acguucaccugcaccgugu

SEQ ID NO: 1888131 - RNA, 19 nt, Artificial Sequence
  Description of Artificial Sequence: Synthetic oligonucleotide
uggaggcgcagcagacgaa

SEQ ID NO: 1888132 - RNA, 19 nt, Artificial Sequence
  Description of Artificial Sequence: Synthetic oligonucleotide
gcagcagcagcagcagcgg

SEQ ID NO: 1888133 - RNA, 19 nt, Artificial Sequence
  Description of Artificial Sequence: Synthetic oligonucleotide
uaaaggccucagguuuggu

SEQ ID NO: 1888134 - RNA, 19 nt, Artificial Sequence
  Description of Artificial Sequence: Synthetic oligonucleotide
uggccggcauggaauucau

SEQ ID NO: 1888135 - RNA, 19 nt, Artificial Sequence
  Description of Artificial Sequence: Synthetic oligonucleotide
guagccgcucagguucacc

SEQ ID NO: 1888136 - RNA, 19 nt, Artificial Sequence
  Description of Artificial Sequence: Synthetic oligonucleotide
gcagacgaacaccuucauc

SEQ ID NO: 1888137 - RNA, 19 nt, Artificial Sequence
  Description of Artificial Sequence: Synthetic oligonucleotide
uggcguugcaggugcggua

SEQ ID NO: 1888138 - RNA, 19 nt, Artificial Sequence
  Description of Artificial Sequence: Synthetic oligonucleotide
cuacgucccuuuccccaug

SEQ ID NO: 1888139 - RNA, 19 nt, Artificial Sequence
  Description of Artificial Sequence: Synthetic oligonucleotide
ggaggcgcagcagacgaac

SEQ ID NO: 1888140 - RNA, 19 nt, Artificial Sequence
  Description of Artificial Sequence: Synthetic oligonucleotide
ggcagguguucccgcuugg

SEQ ID NO: 1888141 - RNA, 19 nt, Artificial Sequence
  Description of Artificial Sequence: Synthetic oligonucleotide
acuucucggagaacuugau

SEQ ID NO: 1888142 - RNA, 19 nt, Artificial Sequence
  Description of Artificial Sequence: Synthetic oligonucleotide
ccgaggagagugacagggg

SEQ ID NO: 1888143 - RNA, 19 nt, Artificial Sequence
  Description of Artificial Sequence: Synthetic oligonucleotide
ucccggcuucauguggucu

SEQ ID NO: 1888144 - RNA, 19 nt, Artificial Sequence
  Description of Artificial Sequence: Synthetic oligonucleotide
cccaucacccaucuacguc

SEQ ID NO: 1888145 - RNA, 19 nt, Artificial Sequence
  Description of Artificial Sequence: Synthetic oligonucleotide
caaccauggaaagaaggau

SEQ ID NO: 1888146 - RNA, 19 nt, Artificial Sequence
  Description of Artificial Sequence: Synthetic oligonucleotide
cagcgagaaggcgcuguag

SEQ ID NO: 1888147 - RNA, 19 nt, Artificial Sequence
  Description of Artificial Sequence: Synthetic oligonucleotide
uccugagcgcugccuuuua

SEQ ID NO: 1888148 - RNA, 19 nt, Artificial Sequence
  Description of Artificial Sequence: Synthetic oligonucleotide
ggcaaagagggcagguaca

SEQ ID NO: 1888149 - RNA, 19 nt, Artificial Sequence
  Description of Artificial Sequence: Synthetic oligonucleotide
gcagguacagauagacaga

SEQ ID NO: 1888150 - RNA, 19 nt, Artificial Sequence
  Description of Artificial Sequence: Synthetic oligonucleotide
ucucaagcuugggcaccug

SEQ ID NO: 1888151 - RNA, 19 nt, Artificial Sequence
  Description of Artificial Sequence: Synthetic oligonucleotide
gccugcccuagagagagug

SEQ ID NO: 1888152 - RNA, 19 nt, Artificial Sequence
  Description of Artificial Sequence: Synthetic oligonucleotide
auccaccgcggugccugcc

SEQ ID NO: 1888153 - RNA, 19 nt, Artificial Sequence
  Description of Artificial Sequence: Synthetic oligonucleotide
accgcggugccugcccuag

SEQ ID NO: 1888154 - RNA, 19 nt, Artificial Sequence
  Description of Artificial Sequence: Synthetic oligonucleotide
ggggcauaugugccucuug

SEQ ID NO: 1888155 - RNA, 19 nt, Artificial Sequence
  Description of Artificial Sequence: Synthetic oligonucleotide
gggcaccggggucagggag

SEQ ID NO: 1888156 - RNA, 19 nt, Artificial Sequence
  Description of Artificial Sequence: Synthetic oligonucleotide
gcugugcgaggcaugcugc

SEQ ID NO: 1888157 - RNA, 19 nt, Artificial Sequence
  Description of Artificial Sequence: Synthetic oligonucleotide
cugccgguugcauucccaa

SEQ ID NO: 1888158 - RNA, 19 nt, Artificial Sequence
  Description of Artificial Sequence: Synthetic oligonucleotide
gcagguguucccgcuuggg

SEQ ID NO: 1888159 - RNA, 19 nt, Artificial Sequence
  Description of Artificial Sequence: Synthetic oligonucleotide
ccgcaugccuguuucccag

SEQ ID NO: 1888160 - RNA, 19 nt, Artificial Sequence
  Description of Artificial Sequence: Synthetic oligonucleotide
gcagcagcagcagcagcag

SEQ ID NO: 1888161 - RNA, 19 nt, Artificial Sequence
  Description of Artificial Sequence: Synthetic oligonucleotide
gaccggcuucuccccggag

SEQ ID NO: 1888162 - RNA, 19 nt, Artificial Sequence
  Description of Artificial Sequence: Synthetic oligonucleotide
caccucccggcuucaugug

SEQ ID NO: 1888163 - RNA, 19 nt, Artificial Sequence
  Description of Artificial Sequence: Synthetic oligonucleotide
cgcccaucacccaucuacg

SEQ ID NO: 1888164 - RNA, 19 nt, Artificial Sequence
  Description of Artificial Sequence: Synthetic oligonucleotide
cagagcuaggaggccaaga

SEQ ID NO: 1888165 - RNA, 19 nt, Artificial Sequence
  Description of Artificial Sequence: Synthetic oligonucleotide
cgagaaggcgcuguagcgc

SEQ ID NO: 1888166 - RNA, 19 nt, Artificial Sequence
  Description of Artificial Sequence: Synthetic oligonucleotide
gaggcgcagcagacgaaca

SEQ ID NO: 1888167 - RNA, 19 nt, Artificial Sequence
  Description of Artificial Sequence: Synthetic oligonucleotide
uggucucucuggggcauau

SEQ ID NO: 1888168 - RNA, 19 nt, Artificial Sequence
  Description of Artificial Sequence: Synthetic oligonucleotide
gugcagguugugagugggc

SEQ ID NO: 1888169 - RNA, 19 nt, Artificial Sequence
  Description of Artificial Sequence: Synthetic oligonucleotide
gcccuagagagagugggca

SEQ ID NO: 1888170 - RNA, 19 nt, Artificial Sequence
  Description of Artificial Sequence: Synthetic oligonucleotide
ggagaugcuuauugcugua

SEQ ID NO: 1888171 - RNA, 19 nt, Artificial Sequence
  Description of Artificial Sequence: Synthetic oligonucleotide
cugaggcuccgcccaucac

SEQ ID NO: 1888172 - RNA, 19 nt, Artificial Sequence
  Description of Artificial Sequence: Synthetic oligonucleotide
gcgauguggaggcgcagca

SEQ ID NO: 1888173 - RNA, 19 nt, Artificial Sequence
  Description of Artificial Sequence: Synthetic oligonucleotide
cuuggccggcauggaauuc

SEQ ID NO: 1888174 - RNA, 19 nt, Artificial Sequence
  Description of Artificial Sequence: Synthetic oligonucleotide
cgucccuuuccccauguuc

SEQ ID NO: 1888175 - RNA, 19 nt, Artificial Sequence
  Description of Artificial Sequence: Synthetic oligonucleotide
gcaccucccggcuucaugu

SEQ ID NO: 1888176 - RNA, 19 nt, Artificial Sequence
  Description of Artificial Sequence: Synthetic oligonucleotide
ggggaccggcuucuccccg

SEQ ID NO: 1888177 - RNA, 19 nt, Artificial Sequence
  Description of Artificial Sequence: Synthetic oligonucleotide
ccgugcaggccccacuccc

SEQ ID NO: 1888178 - RNA, 19 nt, Artificial Sequence
  Description of Artificial Sequence: Synthetic oligonucleotide
cucccggcuucaugugguc

SEQ ID NO: 1888179 - RNA, 19 nt, Artificial Sequence
  Description of Artificial Sequence: Synthetic oligonucleotide
aggccccacucccaaccau

SEQ ID NO: 1888180 - RNA, 19 nt, Artificial Sequence
  Description of Artificial Sequence: Synthetic oligonucleotide
ggggacaaagagggagggc

SEQ ID NO: 1888181 - RNA, 19 nt, Artificial Sequence
  Description of Artificial Sequence: Synthetic oligonucleotide
uccccauguucugccccga

SEQ ID NO: 1888182 - RNA, 19 nt, Artificial Sequence
  Description of Artificial Sequence: Synthetic oligonucleotide
ggcccauggugaacugggg

SEQ ID NO: 1888183 - RNA, 19 nt, Artificial Sequence
  Description of Artificial Sequence: Synthetic oligonucleotide
gcuguagcgcuggaacuuc

SEQ ID NO: 1888184 - RNA, 19 nt, Artificial Sequence
  Description of Artificial Sequence: Synthetic oligonucleotide
cugccccgaggagagugac

SEQ ID NO: 1888185 - RNA, 19 nt, Artificial Sequence
  Description of Artificial Sequence: Synthetic oligonucleotide
ccugauccaccgcggugcc

SEQ ID NO: 1888186 - RNA, 19 nt, Artificial Sequence
  Description of Artificial Sequence: Synthetic oligonucleotide
cuuccaacacguugaucuu

SEQ ID NO: 1888187 - RNA, 19 nt, Artificial Sequence
  Description of Artificial Sequence: Synthetic oligonucleotide
cccggagugcgauguggag

SEQ ID NO: 1888188 - RNA, 19 nt, Artificial Sequence
  Description of Artificial Sequence: Synthetic oligonucleotide
gcgaugcccacggccagag

SEQ ID NO: 1888189 - RNA, 19 nt, Artificial Sequence
  Description of Artificial Sequence: Synthetic oligonucleotide
gugcaggccccacucccaa

SEQ ID NO: 1888190 - RNA, 19 nt, Artificial Sequence
  Description of Artificial Sequence: Synthetic oligonucleotide
ccaacgcuuggagccuugg

SEQ ID NO: 1888191 - RNA, 19 nt, Artificial Sequence
  Description of Artificial Sequence: Synthetic oligonucleotide
gugcgauguggaggcgcag

SEQ ID NO: 1888192 - RNA, 19 nt, Artificial Sequence
  Description of Artificial Sequence: Synthetic oligonucleotide
ccaacacguugaucuucac

SEQ ID NO: 1888193 - RNA, 19 nt, Artificial Sequence
  Description of Artificial Sequence: Synthetic oligonucleotide
guaccgugcaggccccacu

SEQ ID NO: 1888194 - RNA, 19 nt, Artificial Sequence
  Description of Artificial Sequence: Synthetic oligonucleotide
gccgccaggcccugagcug

SEQ ID NO: 1888195 - RNA, 19 nt, Artificial Sequence
  Description of Artificial Sequence: Synthetic oligonucleotide
ggagugcgauguggaggcg

SEQ ID NO: 1888196 - RNA, 19 nt, Artificial Sequence
  Description of Artificial Sequence: Synthetic oligonucleotide
ggugccugcccuagagaga

SEQ ID NO: 1888197 - RNA, 19 nt, Artificial Sequence
  Description of Artificial Sequence: Synthetic oligonucleotide
gggguagccugaggcuccg

SEQ ID NO: 1888198 - RNA, 19 nt, Artificial Sequence
  Description of Artificial Sequence: Synthetic oligonucleotide
uccgcccaucacccaucua

SEQ ID NO: 1888199 - RNA, 19 nt, Artificial Sequence
  Description of Artificial Sequence: Synthetic oligonucleotide
cuccccggagugcgaugug

SEQ ID NO: 1888200 - RNA, 19 nt, Artificial Sequence
  Description of Artificial Sequence: Synthetic oligonucleotide
ccuagagagagugggcaaa

SEQ ID NO: 1888201 - RNA, 19 nt, Artificial Sequence
  Description of Artificial Sequence: Synthetic oligonucleotide
gguugugagugggcgugga

SEQ ID NO: 1888202 - RNA, 19 nt, Artificial Sequence
  Description of Artificial Sequence: Synthetic oligonucleotide
acgucccuuuccccauguu

SEQ ID NO: 1888203 - RNA, 19 nt, Artificial Sequence
  Description of Artificial Sequence: Synthetic oligonucleotide
ccugugccugauccaccgc

SEQ ID NO: 1888204 - RNA, 19 nt, Artificial Sequence
  Description of Artificial Sequence: Synthetic oligonucleotide
cuguagcgcuggaacuucu

SEQ ID NO: 1888205 - RNA, 19 nt, Artificial Sequence
  Description of Artificial Sequence: Synthetic oligonucleotide
cguacugcuccgccccgcc

SEQ ID NO: 1888206 - RNA, 19 nt, Artificial Sequence
  Description of Artificial Sequence: Synthetic oligonucleotide
cgcggugccugcccuagag

SEQ ID NO: 1888207 - RNA, 19 nt, Artificial Sequence
  Description of Artificial Sequence: Synthetic oligonucleotide
ggcccugagcuguuguagu

SEQ ID NO: 1888208 - RNA, 19 nt, Artificial Sequence
  Description of Artificial Sequence: Synthetic oligonucleotide
ucccagcgagaaggcgcug

SEQ ID NO: 1888209 - RNA, 19 nt, Artificial Sequence
  Description of Artificial Sequence: Synthetic oligonucleotide
guaggccccacagcugacu

SEQ ID NO: 1888210 - RNA, 19 nt, Artificial Sequence
  Description of Artificial Sequence: Synthetic oligonucleotide
cgagcagcagcagcagcag

SEQ ID NO: 1888211 - RNA, 19 nt, Artificial Sequence
  Description of Artificial Sequence: Synthetic oligonucleotide
gcgcugccuuuuaaaggcc

SEQ ID NO: 1888212 - RNA, 19 nt, Artificial Sequence
  Description of Artificial Sequence: Synthetic oligonucleotide
cguguagcccucucgccga

SEQ ID NO: 1888213 - RNA, 19 nt, Artificial Sequence
  Description of Artificial Sequence: Synthetic oligonucleotide
ggccucagguuugguacca

SEQ ID NO: 1888214 - RNA, 19 nt, Artificial Sequence
  Description of Artificial Sequence: Synthetic oligonucleotide
guguagcccucucgccgaa

SEQ ID NO: 1888215 - RNA, 19 nt, Artificial Sequence
  Description of Artificial Sequence: Synthetic oligonucleotide
gggaccuauggcugucccu

SEQ ID NO: 1888216 - RNA, 19 nt, Artificial Sequence
  Description of Artificial Sequence: Synthetic oligonucleotide
cuggcguugcaggugcggu

SEQ ID NO: 1888217 - RNA, 19 nt, Artificial Sequence
  Description of Artificial Sequence: Synthetic oligonucleotide
gcaggugcgguagccgcuc

SEQ ID NO: 1888218 - RNA, 19 nt, Artificial Sequence
  Description of Artificial Sequence: Synthetic oligonucleotide
ccccgaggagagugacagg

SEQ ID NO: 1888219 - RNA, 19 nt, Artificial Sequence
  Description of Artificial Sequence: Synthetic oligonucleotide
auguaccgugcaggcccca

SEQ ID NO: 1888220 - RNA, 19 nt, Artificial Sequence
  Description of Artificial Sequence: Synthetic oligonucleotide
gcugccgguugcauuccca

SEQ ID NO: 1888221 - RNA, 19 nt, Artificial Sequence
  Description of Artificial Sequence: Synthetic oligonucleotide
gcguugcaggugcgguagc

SEQ ID NO: 1888222 - RNA, 19 nt, Artificial Sequence
  Description of Artificial Sequence: Synthetic oligonucleotide
gcuaggaggccaagagugu

SEQ ID NO: 1888223 - RNA, 19 nt, Artificial Sequence
  Description of Artificial Sequence: Synthetic oligonucleotide
gcggugccugcccuagaga

SEQ ID NO: 1888224 - RNA, 19 nt, Artificial Sequence
  Description of Artificial Sequence: Synthetic oligonucleotide
gcggcacgggcacgagcag

SEQ ID NO: 1888225 - RNA, 19 nt, Artificial Sequence
  Description of Artificial Sequence: Synthetic oligonucleotide
cuguuccaauauaccgcau

SEQ ID NO: 1888226 - RNA, 19 nt, Artificial Sequence
  Description of Artificial Sequence: Synthetic oligonucleotide
gcgcuguagcgcuggaacu

SEQ ID NO: 1888227 - RNA, 19 nt, Artificial Sequence
  Description of Artificial Sequence: Synthetic oligonucleotide
ggaccggcuucuccccgga

SEQ ID NO: 1888228 - RNA, 19 nt, Artificial Sequence
  Description of Artificial Sequence: Synthetic oligonucleotide
gugagugggcguggagaua

SEQ ID NO: 1888229 - RNA, 19 nt, Artificial Sequence
  Description of Artificial Sequence: Synthetic oligonucleotide
ccccauguucugccccgag

SEQ ID NO: 1888230 - RNA, 19 nt, Artificial Sequence
  Description of Artificial Sequence: Synthetic oligonucleotide
gcguggagauauaguagua

SEQ ID NO: 1888231 - RNA, 19 nt, Artificial Sequence
  Description of Artificial Sequence: Synthetic oligonucleotide
caggugcgguagccgcuca

SEQ ID NO: 1888232 - RNA, 19 nt, Artificial Sequence
  Description of Artificial Sequence: Synthetic oligonucleotide
gcccaucacccaucuacgu

SEQ ID NO: 1888233 - RNA, 19 nt, Artificial Sequence
  Description of Artificial Sequence: Synthetic oligonucleotide
ccccggagugcgaugugga

SEQ ID NO: 1888234 - RNA, 19 nt, Artificial Sequence
  Description of Artificial Sequence: Synthetic oligonucleotide
gcgcagcagacgaacaccu

SEQ ID NO: 1888235 - RNA, 19 nt, Artificial Sequence
  Description of Artificial Sequence: Synthetic oligonucleotide
ccugcaccguguagcccuc

SEQ ID NO: 1888236 - RNA, 19 nt, Artificial Sequence
  Description of Artificial Sequence: Synthetic oligonucleotide
ggcuccgcccaucacccau

SEQ ID NO: 1888237 - RNA, 19 nt, Artificial Sequence
  Description of Artificial Sequence: Synthetic oligonucleotide
gguagccgcucagguucac

SEQ ID NO: 1888238 - RNA, 19 nt, Artificial Sequence
  Description of Artificial Sequence: Synthetic oligonucleotide
ccucucgccgaaggugcug

SEQ ID NO: 1888239 - RNA, 19 nt, Artificial Sequence
  Description of Artificial Sequence: Synthetic oligonucleotide
caggccaccugggaccuau

SEQ ID NO: 1888240 - RNA, 19 nt, Artificial Sequence
  Description of Artificial Sequence: Synthetic oligonucleotide
ccugagcgcugccuuuuaa

SEQ ID NO: 1888241 - RNA, 19 nt, Artificial Sequence
  Description of Artificial Sequence: Synthetic oligonucleotide
caccggggucagggagggg

SEQ ID NO: 1888242 - RNA, 19 nt, Artificial Sequence
  Description of Artificial Sequence: Synthetic oligonucleotide
ccucccggcuucauguggu

SEQ ID NO: 1888243 - RNA, 19 nt, Artificial Sequence
  Description of Artificial Sequence: Synthetic oligonucleotide
uucccgcuuggggcugguu

SEQ ID NO: 1888244 - RNA, 19 nt, Artificial Sequence
  Description of Artificial Sequence: Synthetic oligonucleotide
gcaugcugccgguugcauu

SEQ ID NO: 1888245 - RNA, 19 nt, Artificial Sequence
  Description of Artificial Sequence: Synthetic oligonucleotide
gcccacggccagaggcagg

SEQ ID NO: 1888246 - RNA, 19 nt, Artificial Sequence
  Description of Artificial Sequence: Synthetic oligonucleotide
guccugagcgcugccuuuu

SEQ ID NO: 1888247 - RNA, 19 nt, Artificial Sequence
  Description of Artificial Sequence: Synthetic oligonucleotide
cguggagauauaguaguau

SEQ ID NO: 1888248 - RNA, 19 nt, Artificial Sequence
  Description of Artificial Sequence: Synthetic oligonucleotide
cuguuguagugcggacagu

SEQ ID NO: 1888249 - RNA, 19 nt, Artificial Sequence
  Description of Artificial Sequence: Synthetic oligonucleotide
cggagaacuugauggggcu

SEQ ID NO: 1888250 - RNA, 19 nt, Artificial Sequence
  Description of Artificial Sequence: Synthetic oligonucleotide
ccauggaaagaaggaugua

SEQ ID NO: 1888251 - RNA, 19 nt, Artificial Sequence
  Description of Artificial Sequence: Synthetic oligonucleotide
cggcacgggcacgagcagc

SEQ ID NO: 1888252 - RNA, 19 nt, Artificial Sequence
  Description of Artificial Sequence: Synthetic oligonucleotide
ggguagccugaggcuccgc

SEQ ID NO: 1888253 - RNA, 19 nt, Artificial Sequence
  Description of Artificial Sequence: Synthetic oligonucleotide
caccgcggugccugcccua

SEQ ID NO: 1888254 - RNA, 19 nt, Artificial Sequence
  Description of Artificial Sequence: Synthetic oligonucleotide
cucgccgaaggugcugguu

SEQ ID NO: 1888255 - RNA, 19 nt, Artificial Sequence
  Description of Artificial Sequence: Synthetic oligonucleotide
cgagauagucguucacguu

SEQ ID NO: 1888256 - RNA, 19 nt, Artificial Sequence
  Description of Artificial Sequence: Synthetic oligonucleotide
gccucagguuugguaccaa

SEQ ID NO: 1888257 - RNA, 19 nt, Artificial Sequence
  Description of Artificial Sequence: Synthetic oligonucleotide
acaggccaccugggaccua

SEQ ID NO: 1888258 - RNA, 19 nt, Artificial Sequence
  Description of Artificial Sequence: Synthetic oligonucleotide
guucugccccgaggagagu

SEQ ID NO: 1888259 - RNA, 19 nt, Artificial Sequence
  Description of Artificial Sequence: Synthetic oligonucleotide
ggcaugcugccgguugcau

SEQ ID NO: 1888260 - RNA, 19 nt, Artificial Sequence
  Description of Artificial Sequence: Synthetic oligonucleotide
guucccgcuuggggcuggu

SEQ ID NO: 1888261 - RNA, 19 nt, Artificial Sequence
  Description of Artificial Sequence: Synthetic oligonucleotide
ccccaccucucucugucau

SEQ ID NO: 1888262 - RNA, 19 nt, Artificial Sequence
  Description of Artificial Sequence: Synthetic oligonucleotide
ggccggcauggaauucaua

SEQ ID NO: 1888263 - RNA, 19 nt, Artificial Sequence
  Description of Artificial Sequence: Synthetic oligonucleotide
gggcugugcgaggcaugcu

SEQ ID NO: 1888264 - RNA, 19 nt, Artificial Sequence
  Description of Artificial Sequence: Synthetic oligonucleotide
ccgcggugccugcccuaga

SEQ ID NO: 1888265 - RNA, 19 nt, Artificial Sequence
  Description of Artificial Sequence: Synthetic oligonucleotide
gcgaggcaugcugccgguu

SEQ ID NO: 1888266 - RNA, 19 nt, Artificial Sequence
  Description of Artificial Sequence: Synthetic oligonucleotide
aagacuauugaucugcccc

SEQ ID NO: 1888267 - RNA, 19 nt, Artificial Sequence
  Description of Artificial Sequence: Synthetic oligonucleotide
uuuaacagccccacaaagg

SEQ ID NO: 1888268 - RNA, 19 nt, Artificial Sequence
  Description of Artificial Sequence: Synthetic oligonucleotide
cacauuaaagaacuggugg

SEQ ID NO: 1888269 - RNA, 19 nt, Artificial Sequence
  Description of Artificial Sequence: Synthetic oligonucleotide
uguguuucgaguuggggcg

SEQ ID NO: 1888270 - RNA, 19 nt, Artificial Sequence
  Description of Artificial Sequence: Synthetic oligonucleotide
aaagacaccgucuggcuuc

SEQ ID NO: 1888271 - RNA, 19 nt, Artificial Sequence
  Description of Artificial Sequence: Synthetic oligonucleotide
agaugguaaaacugggugc

SEQ ID NO: 1888272 - RNA, 19 nt, Artificial Sequence
  Description of Artificial Sequence: Synthetic oligonucleotide
uuggcuguuagagagaagg

SEQ ID NO: 1888273 - RNA, 19 nt, Artificial Sequence
  Description of Artificial Sequence: Synthetic oligonucleotide
gaaucagccauuuaacagc

SEQ ID NO: 1888274 - RNA, 19 nt, Artificial Sequence
  Description of Artificial Sequence: Synthetic oligonucleotide
gauacaucagccucuuugg

SEQ ID NO: 1888275 - RNA, 19 nt, Artificial Sequence
  Description of Artificial Sequence: Synthetic oligonucleotide
uucccgaugauguagcugg

SEQ ID NO: 1888276 - RNA, 19 nt, Artificial Sequence
  Description of Artificial Sequence: Synthetic oligonucleotide
uaggaguagaccuucacag

SEQ ID NO: 1888277 - RNA, 19 nt, Artificial Sequence
  Description of Artificial Sequence: Synthetic oligonucleotide
uuaacagccccacaaagga

SEQ ID NO: 1888278 - RNA, 19 nt, Artificial Sequence
  Description of Artificial Sequence: Synthetic oligonucleotide
aauaggaguagaccuucac

SEQ ID NO: 1888279 - RNA, 19 nt, Artificial Sequence
  Description of Artificial Sequence: Synthetic oligonucleotide
uuguaauaggaguagaccu

SEQ ID NO: 1888280 - RNA, 19 nt, Artificial Sequence
  Description of Artificial Sequence: Synthetic oligonucleotide
ugagaucuuuucuagguag

SEQ ID NO: 1888281 - RNA, 19 nt, Artificial Sequence
  Description of Artificial Sequence: Synthetic oligonucleotide
auuucauuguggcagagcu

SEQ ID NO: 1888282 - RNA, 19 nt, Artificial Sequence
  Description of Artificial Sequence: Synthetic oligonucleotide
uguagagugaauacagcug

SEQ ID NO: 1888283 - RNA, 19 nt, Artificial Sequence
  Description of Artificial Sequence: Synthetic oligonucleotide
ugacuugaugaccugcucg

SEQ ID NO: 1888284 - RNA, 19 nt, Artificial Sequence
  Description of Artificial Sequence: Synthetic oligonucleotide
uagaccuucacagagccgg

SEQ ID NO: 1888285 - RNA, 19 nt, Artificial Sequence
  Description of Artificial Sequence: Synthetic oligonucleotide
aaucagccauuuaacagcc

SEQ ID NO: 1888286 - RNA, 19 nt, Artificial Sequence
  Description of Artificial Sequence: Synthetic oligonucleotide
gaagcuuuauuggagggcg

SEQ ID NO: 1888287 - RNA, 19 nt, Artificial Sequence
  Description of Artificial Sequence: Synthetic oligonucleotide
gaagaccuugaccacauag

SEQ ID NO: 1888288 - RNA, 19 nt, Artificial Sequence
  Description of Artificial Sequence: Synthetic oligonucleotide
cauuucuuggugaaucacg

SEQ ID NO: 1888289 - RNA, 19 nt, Artificial Sequence
  Description of Artificial Sequence: Synthetic oligonucleotide
ugugccugaugcaugaagc

SEQ ID NO: 1888290 - RNA, 19 nt, Artificial Sequence
  Description of Artificial Sequence: Synthetic oligonucleotide
uucauuguggcagagcuug

SEQ ID NO: 1888291 - RNA, 19 nt, Artificial Sequence
  Description of Artificial Sequence: Synthetic oligonucleotide
ugugagggauacaucagcc

SEQ ID NO: 1888292 - RNA, 19 nt, Artificial Sequence
  Description of Artificial Sequence: Synthetic oligonucleotide
acauuaaagaacuggugga

SEQ ID NO: 1888293 - RNA, 19 nt, Artificial Sequence
  Description of Artificial Sequence: Synthetic oligonucleotide
cuuugaaggacagacauuc

SEQ ID NO: 1888294 - RNA, 19 nt, Artificial Sequence
  Description of Artificial Sequence: Synthetic oligonucleotide
uucuagguagaugaugagg

SEQ ID NO: 1888295 - RNA, 19 nt, Artificial Sequence
  Description of Artificial Sequence: Synthetic oligonucleotide
aggcugucagaccaggugc

SEQ ID NO: 1888296 - RNA, 19 nt, Artificial Sequence
  Description of Artificial Sequence: Synthetic oligonucleotide
auccuggcauucuucagcc

SEQ ID NO: 1888297 - RNA, 19 nt, Artificial Sequence
  Description of Artificial Sequence: Synthetic oligonucleotide
aucagucccacauuaaaga

SEQ ID NO: 1888298 - RNA, 19 nt, Artificial Sequence
  Description of Artificial Sequence: Synthetic oligonucleotide
agugcgaugaggacgaagg

SEQ ID NO: 1888299 - RNA, 19 nt, Artificial Sequence
  Description of Artificial Sequence: Synthetic oligonucleotide
ugcucagccauuccguccg

SEQ ID NO: 1888300 - RNA, 19 nt, Artificial Sequence
  Description of Artificial Sequence: Synthetic oligonucleotide
ucccacauuaaagaacugg

SEQ ID NO: 1888301 - RNA, 19 nt, Artificial Sequence
  Description of Artificial Sequence: Synthetic oligonucleotide
ucugagccugacuugauga

SEQ ID NO: 1888302 - RNA, 19 nt, Artificial Sequence
  Description of Artificial Sequence: Synthetic oligonucleotide
auuucuuggugaaucacgg

SEQ ID NO: 1888303 - RNA, 19 nt, Artificial Sequence
  Description of Artificial Sequence: Synthetic oligonucleotide
acaagccuuuuccagucgc

SEQ ID NO: 1888304 - RNA, 19 nt, Artificial Sequence
  Description of Artificial Sequence: Synthetic oligonucleotide
uuauuggagggcgugggcg

SEQ ID NO: 1888305 - RNA, 19 nt, Artificial Sequence
  Description of Artificial Sequence: Synthetic oligonucleotide
acuggcuucgauguacucc

SEQ ID NO: 1888306 - RNA, 19 nt, Artificial Sequence
  Description of Artificial Sequence: Synthetic oligonucleotide
guuguaauaggaguagacc

SEQ ID NO: 1888307 - RNA, 19 nt, Artificial Sequence
  Description of Artificial Sequence: Synthetic oligonucleotide
uaaugcuucccuuucugca

SEQ ID NO: 1888308 - RNA, 19 nt, Artificial Sequence
  Description of Artificial Sequence: Synthetic oligonucleotide
cagaugguaaaacugggug

SEQ ID NO: 1888309 - RNA, 19 nt, Artificial Sequence
  Description of Artificial Sequence: Synthetic oligonucleotide
auacaucagccucuuuggc

SEQ ID NO: 1888310 - RNA, 19 nt, Artificial Sequence
  Description of Artificial Sequence: Synthetic oligonucleotide
uccugaaagacaccgucug

SEQ ID NO: 1888311 - RNA, 19 nt, Artificial Sequence
  Description of Artificial Sequence: Synthetic oligonucleotide
aaggccucguuuugguaac

SEQ ID NO: 1888312 - RNA, 19 nt, Artificial Sequence
  Description of Artificial Sequence: Synthetic oligonucleotide
uugguaacuggcuucgaug

SEQ ID NO: 1888313 - RNA, 19 nt, Artificial Sequence
  Description of Artificial Sequence: Synthetic oligonucleotide
uccgucgugacuagcuugg

SEQ ID NO: 1888314 - RNA, 19 nt, Artificial Sequence
  Description of Artificial Sequence: Synthetic oligonucleotide
aaucacggguccauccucc

SEQ ID NO: 1888315 - RNA, 19 nt, Artificial Sequence
  Description of Artificial Sequence: Synthetic oligonucleotide
guacacguaguccacuccg

SEQ ID NO: 1888316 - RNA, 19 nt, Artificial Sequence
  Description of Artificial Sequence: Synthetic oligonucleotide
uguaauaggaguagaccuu

SEQ ID NO: 1888317 - RNA, 19 nt, Artificial Sequence
  Description of Artificial Sequence: Synthetic oligonucleotide
ugugccuuggccuuuuccu

SEQ ID NO: 1888318 - RNA, 19 nt, Artificial Sequence
  Description of Artificial Sequence: Synthetic oligonucleotide
gaucagucccacauuaaag

SEQ ID NO: 1888319 - RNA, 19 nt, Artificial Sequence
  Description of Artificial Sequence: Synthetic oligonucleotide
ugagugugagaucuuuucu

SEQ ID NO: 1888320 - RNA, 19 nt, Artificial Sequence
  Description of Artificial Sequence: Synthetic oligonucleotide
guguguuucgaguuggggc

SEQ ID NO: 1888321 - RNA, 19 nt, Artificial Sequence
  Description of Artificial Sequence: Synthetic oligonucleotide
uguuuucuccagaaucagc

SEQ ID NO: 1888322 - RNA, 19 nt, Artificial Sequence
  Description of Artificial Sequence: Synthetic oligonucleotide
ggauacaucagccucuuug

SEQ ID NO: 1888323 - RNA, 19 nt, Artificial Sequence
  Description of Artificial Sequence: Synthetic oligonucleotide
cugggugcaugauucaucc

SEQ ID NO: 1888324 - RNA, 19 nt, Artificial Sequence
  Description of Artificial Sequence: Synthetic oligonucleotide
auaggaguagaccuucaca

SEQ ID NO: 1888325 - RNA, 19 nt, Artificial Sequence
  Description of Artificial Sequence: Synthetic oligonucleotide
gauguaucuguccacucca

SEQ ID NO: 1888326 - RNA, 19 nt, Artificial Sequence
  Description of Artificial Sequence: Synthetic oligonucleotide
aacgccccgagguucucgc

SEQ ID NO: 1888327 - RNA, 19 nt, Artificial Sequence
  Description of Artificial Sequence: Synthetic oligonucleotide
ucaucucauacuuggagau

SEQ ID NO: 1888328 - RNA, 19 nt, Artificial Sequence
  Description of Artificial Sequence: Synthetic oligonucleotide
uuucuuggugaaucacggg

SEQ ID NO: 1888329 - RNA, 19 nt, Artificial Sequence
  Description of Artificial Sequence: Synthetic oligonucleotide
uaggcugucagaccaggug

SEQ ID NO: 1888330 - RNA, 19 nt, Artificial Sequence
  Description of Artificial Sequence: Synthetic oligonucleotide
agcuugcucagccauuccg

SEQ ID NO: 1888331 - RNA, 19 nt, Artificial Sequence
  Description of Artificial Sequence: Synthetic oligonucleotide
gaugguaaaacugggugca

SEQ ID NO: 1888332 - RNA, 19 nt, Artificial Sequence
  Description of Artificial Sequence: Synthetic oligonucleotide
augcaugaagcaguucucc

SEQ ID NO: 1888333 - RNA, 19 nt, Artificial Sequence
  Description of Artificial Sequence: Synthetic oligonucleotide
uuguuaaugcucccgggaa

SEQ ID NO: 1888334 - RNA, 19 nt, Artificial Sequence
  Description of Artificial Sequence: Synthetic oligonucleotide
uuuauuggagggcgugggc

SEQ ID NO: 1888335 - RNA, 19 nt, Artificial Sequence
  Description of Artificial Sequence: Synthetic oligonucleotide
ggaguagaccuucacagag

SEQ ID NO: 1888336 - RNA, 19 nt, Artificial Sequence
  Description of Artificial Sequence: Synthetic oligonucleotide
cugaagcuuuauuggaggg

SEQ ID NO: 1888337 - RNA, 19 nt, Artificial Sequence
  Description of Artificial Sequence: Synthetic oligonucleotide
uacacguaguccacuccgg

SEQ ID NO: 1888338 - RNA, 19 nt, Artificial Sequence
  Description of Artificial Sequence: Synthetic oligonucleotide
uccugcagugcgaugagga

SEQ ID NO: 1888339 - RNA, 19 nt, Artificial Sequence
  Description of Artificial Sequence: Synthetic oligonucleotide
ugaaucacggguccauccu

SEQ ID NO: 1888340 - RNA, 19 nt, Artificial Sequence
  Description of Artificial Sequence: Synthetic oligonucleotide
uugaaggacagacauucuu

SEQ ID NO: 1888341 - RNA, 19 nt, Artificial Sequence
  Description of Artificial Sequence: Synthetic oligonucleotide
caaaugagguaaugcuucc

SEQ ID NO: 1888342 - RNA, 19 nt, Artificial Sequence
  Description of Artificial Sequence: Synthetic oligonucleotide
uaaaacugggugcaugauu

SEQ ID NO: 1888343 - RNA, 19 nt, Artificial Sequence
  Description of Artificial Sequence: Synthetic oligonucleotide
uuccagucgcucauucagg

SEQ ID NO: 1888344 - RNA, 19 nt, Artificial Sequence
  Description of Artificial Sequence: Synthetic oligonucleotide
cuagcuuggucuuguacac

SEQ ID NO: 1888345 - RNA, 19 nt, Artificial Sequence
  Description of Artificial Sequence: Synthetic oligonucleotide
cugaaagacaccgucuggc

SEQ ID NO: 1888346 - RNA, 19 nt, Artificial Sequence
  Description of Artificial Sequence: Synthetic oligonucleotide
agucccacauuaaagaacu

SEQ ID NO: 1888347 - RNA, 19 nt, Artificial Sequence
  Description of Artificial Sequence: Synthetic oligonucleotide
cuuggugaaucacgggucc

SEQ ID NO: 1888348 - RNA, 19 nt, Artificial Sequence
  Description of Artificial Sequence: Synthetic oligonucleotide
uauugaucugccccucaca

SEQ ID NO: 1888349 - RNA, 19 nt, Artificial Sequence
  Description of Artificial Sequence: Synthetic oligonucleotide
gauggucaugauguacucg

SEQ ID NO: 1888350 - RNA, 19 nt, Artificial Sequence
  Description of Artificial Sequence: Synthetic oligonucleotide
uuucuagguagaugaugag

SEQ ID NO: 1888351 - RNA, 19 nt, Artificial Sequence
  Description of Artificial Sequence: Synthetic oligonucleotide
uuugguaacuggcuucgau

SEQ ID NO: 1888352 - RNA, 19 nt, Artificial Sequence
  Description of Artificial Sequence: Synthetic oligonucleotide
cuucuccugugccugaugc

SEQ ID NO: 1888353 - RNA, 19 nt, Artificial Sequence
  Description of Artificial Sequence: Synthetic oligonucleotide
gaagacuauugaucugccc

SEQ ID NO: 1888354 - RNA, 19 nt, Artificial Sequence
  Description of Artificial Sequence: Synthetic oligonucleotide
ugaagcuuuauuggagggc

SEQ ID NO: 1888355 - RNA, 19 nt, Artificial Sequence
  Description of Artificial Sequence: Synthetic oligonucleotide
uguuagagagaaggccucg

SEQ ID NO: 1888356 - RNA, 19 nt, Artificial Sequence
  Description of Artificial Sequence: Synthetic oligonucleotide
acaccggcacauuucauug

SEQ ID NO: 1888357 - RNA, 19 nt, Artificial Sequence
  Description of Artificial Sequence: Synthetic oligonucleotide
accaaucauuucuugguga

SEQ ID NO: 1888358 - RNA, 19 nt, Artificial Sequence
  Description of Artificial Sequence: Synthetic oligonucleotide
ugaaagacaccgucuggcu

SEQ ID NO: 1888359 - RNA, 19 nt, Artificial Sequence
  Description of Artificial Sequence: Synthetic oligonucleotide
cauuccguccgccuugucc

SEQ ID NO: 1888360 - RNA, 19 nt, Artificial Sequence
  Description of Artificial Sequence: Synthetic oligonucleotide
ucgucaaaaucaucagaca

SEQ ID NO: 1888361 - RNA, 19 nt, Artificial Sequence
  Description of Artificial Sequence: Synthetic oligonucleotide
agacuauugaucugccccu

SEQ ID NO: 1888362 - RNA, 19 nt, Artificial Sequence
  Description of Artificial Sequence: Synthetic oligonucleotide
ucagucccacauuaaagaa

SEQ ID NO: 1888363 - RNA, 19 nt, Artificial Sequence
  Description of Artificial Sequence: Synthetic oligonucleotide
guaggaguaggcuuugguc

SEQ ID NO: 1888364 - RNA, 19 nt, Artificial Sequence
  Description of Artificial Sequence: Synthetic oligonucleotide
guaaugcuucccuuucugc

SEQ ID NO: 1888365 - RNA, 19 nt, Artificial Sequence
  Description of Artificial Sequence: Synthetic oligonucleotide
ucaucugagccugacuuga

SEQ ID NO: 1888366 - RNA, 19 nt, Artificial Sequence
  Description of Artificial Sequence: Synthetic oligonucleotide
agcuuggucuuguacacgu

SEQ ID NO: 1888367 - RNA, 19 nt, Artificial Sequence
  Description of Artificial Sequence: Synthetic oligonucleotide
gggugcaugauucauccag

SEQ ID NO: 1888368 - RNA, 19 nt, Artificial Sequence
  Description of Artificial Sequence: Synthetic oligonucleotide
gauguagcugguguugggc

SEQ ID NO: 1888369 - RNA, 19 nt, Artificial Sequence
  Description of Artificial Sequence: Synthetic oligonucleotide
cugugagggauacaucagc

SEQ ID NO: 1888370 - RNA, 19 nt, Artificial Sequence
  Description of Artificial Sequence: Synthetic oligonucleotide
agagagaaggccucguuuu

SEQ ID NO: 1888371 - RNA, 19 nt, Artificial Sequence
  Description of Artificial Sequence: Synthetic oligonucleotide
acucgucaaaaucaucaga

SEQ ID NO: 1888372 - RNA, 19 nt, Artificial Sequence
  Description of Artificial Sequence: Synthetic oligonucleotide
ucuuguacacguaguccac

SEQ ID NO: 1888373 - RNA, 19 nt, Artificial Sequence
  Description of Artificial Sequence: Synthetic oligonucleotide
cacaaaggaccugagaguc

SEQ ID NO: 1888374 - RNA, 19 nt, Artificial Sequence
  Description of Artificial Sequence: Synthetic oligonucleotide
agagugaauacagcugaag

SEQ ID NO: 1888375 - RNA, 19 nt, Artificial Sequence
  Description of Artificial Sequence: Synthetic oligonucleotide
gaggucggaggacaggccc

SEQ ID NO: 1888376 - RNA, 19 nt, Artificial Sequence
  Description of Artificial Sequence: Synthetic oligonucleotide
gaagcaguucuccucggca

SEQ ID NO: 1888377 - RNA, 19 nt, Artificial Sequence
  Description of Artificial Sequence: Synthetic oligonucleotide
gaggacgaaggcugugagg

SEQ ID NO: 1888378 - RNA, 19 nt, Artificial Sequence
  Description of Artificial Sequence: Synthetic oligonucleotide
guaggcuuuggucaucuca

SEQ ID NO: 1888379 - RNA, 19 nt, Artificial Sequence
  Description of Artificial Sequence: Synthetic oligonucleotide
aaugcucccgggaagacua

SEQ ID NO: 1888380 - RNA, 19 nt, Artificial Sequence
  Description of Artificial Sequence: Synthetic oligonucleotide
uaauaggaguagaccuuca

SEQ ID NO: 1888381 - RNA, 19 nt, Artificial Sequence
  Description of Artificial Sequence: Synthetic oligonucleotide
uagagagaaggccucguuu

SEQ ID NO: 1888382 - RNA, 19 nt, Artificial Sequence
  Description of Artificial Sequence: Synthetic oligonucleotide
gcauucuucagccucgggc

SEQ ID NO: 1888383 - RNA, 19 nt, Artificial Sequence
  Description of Artificial Sequence: Synthetic oligonucleotide
aacuggcuucgauguacuc

SEQ ID NO: 1888384 - RNA, 19 nt, Artificial Sequence
  Description of Artificial Sequence: Synthetic oligonucleotide
ugcaugaagcaguucuccu

SEQ ID NO: 1888385 - RNA, 19 nt, Artificial Sequence
  Description of Artificial Sequence: Synthetic oligonucleotide
ccaaaugagguaaugcuuc

SEQ ID NO: 1888386 - RNA, 19 nt, Artificial Sequence
  Description of Artificial Sequence: Synthetic oligonucleotide
guaacuggcuucgauguac

SEQ ID NO: 1888387 - RNA, 19 nt, Artificial Sequence
  Description of Artificial Sequence: Synthetic oligonucleotide
ugagccugacuugaugacc

SEQ ID NO: 1888388 - RNA, 19 nt, Artificial Sequence
  Description of Artificial Sequence: Synthetic oligonucleotide
ugccuuguuaaugcucccg

SEQ ID NO: 1888389 - RNA, 19 nt, Artificial Sequence
  Description of Artificial Sequence: Synthetic oligonucleotide
uggcuguuagagagaaggc

SEQ ID NO: 1888390 - RNA, 19 nt, Artificial Sequence
  Description of Artificial Sequence: Synthetic oligonucleotide
ugcgaugaggacgaaggcu

SEQ ID NO: 1888391 - RNA, 19 nt, Artificial Sequence
  Description of Artificial Sequence: Synthetic oligonucleotide
cuucgauguacuccccugc

SEQ ID NO: 1888392 - RNA, 19 nt, Artificial Sequence
  Description of Artificial Sequence: Synthetic oligonucleotide
ugccugaugcaugaagcag

SEQ ID NO: 1888393 - RNA, 19 nt, Artificial Sequence
  Description of Artificial Sequence: Synthetic oligonucleotide
guucucgcacuguuucugg

SEQ ID NO: 1888394 - RNA, 19 nt, Artificial Sequence
  Description of Artificial Sequence: Synthetic oligonucleotide
cuuguuaaugcucccggga

SEQ ID NO: 1888395 - RNA, 19 nt, Artificial Sequence
  Description of Artificial Sequence: Synthetic oligonucleotide
aaggaccugagagucgaug

SEQ ID NO: 1888396 - RNA, 19 nt, Artificial Sequence
  Description of Artificial Sequence: Synthetic oligonucleotide
ugauucauccagguuguaa

SEQ ID NO: 1888397 - RNA, 19 nt, Artificial Sequence
  Description of Artificial Sequence: Synthetic oligonucleotide
gagguaaugcuucccuuuc

SEQ ID NO: 1888398 - RNA, 19 nt, Artificial Sequence
  Description of Artificial Sequence: Synthetic oligonucleotide
gauguacuccccugccuug

SEQ ID NO: 1888399 - RNA, 19 nt, Artificial Sequence
  Description of Artificial Sequence: Synthetic oligonucleotide
aaacugggugcaugauuca

SEQ ID NO: 1888400 - RNA, 19 nt, Artificial Sequence
  Description of Artificial Sequence: Synthetic oligonucleotide
acugguggacuuugaagga

SEQ ID NO: 1888401 - RNA, 19 nt, Artificial Sequence
  Description of Artificial Sequence: Synthetic oligonucleotide
gggaagacuauugaucugc

SEQ ID NO: 1888402 - RNA, 19 nt, Artificial Sequence
  Description of Artificial Sequence: Synthetic oligonucleotide
gagugugagaucuuuucua

SEQ ID NO: 1888403 - RNA, 19 nt, Artificial Sequence
  Description of Artificial Sequence: Synthetic oligonucleotide
ucucugugaacgccccgag

SEQ ID NO: 1888404 - RNA, 19 nt, Artificial Sequence
  Description of Artificial Sequence: Synthetic oligonucleotide
cugcagugcgaugaggacg

SEQ ID NO: 1888405 - RNA, 19 nt, Artificial Sequence
  Description of Artificial Sequence: Synthetic oligonucleotide
uauuggagggcgugggcgu

SEQ ID NO: 1888406 - RNA, 19 nt, Artificial Sequence
  Description of Artificial Sequence: Synthetic oligonucleotide
gagagaaggccucguuuug

SEQ ID NO: 1888407 - RNA, 19 nt, Artificial Sequence
  Description of Artificial Sequence: Synthetic oligonucleotide
ugguaaaacugggugcaug

SEQ ID NO: 1888408 - RNA, 19 nt, Artificial Sequence
  Description of Artificial Sequence: Synthetic oligonucleotide
gguaaaacugggugcauga

SEQ ID NO: 1888409 - RNA, 19 nt, Artificial Sequence
  Description of Artificial Sequence: Synthetic oligonucleotide
cgucaaaaucaucagacag

SEQ ID NO: 1888410 - RNA, 19 nt, Artificial Sequence
  Description of Artificial Sequence: Synthetic oligonucleotide
uaacagccccacaaaggac

SEQ ID NO: 1888411 - RNA, 19 nt, Artificial Sequence
  Description of Artificial Sequence: Synthetic oligonucleotide
uuguacacguaguccacuc

SEQ ID NO: 1888412 - RNA, 19 nt, Artificial Sequence
  Description of Artificial Sequence: Synthetic oligonucleotide
guaauaggaguagaccuuc

SEQ ID NO: 1888413 - RNA, 19 nt, Artificial Sequence
  Description of Artificial Sequence: Synthetic oligonucleotide
ccugccuuguuaaugcucc

SEQ ID NO: 1888414 - RNA, 19 nt, Artificial Sequence
  Description of Artificial Sequence: Synthetic oligonucleotide
cuauugaucugccccucac

SEQ ID NO: 1888415 - RNA, 19 nt, Artificial Sequence
  Description of Artificial Sequence: Synthetic oligonucleotide
uaacuggcuucgauguacu

SEQ ID NO: 1888416 - RNA, 19 nt, Artificial Sequence
  Description of Artificial Sequence: Synthetic oligonucleotide
uucgaguuggggcgggcca

SEQ ID NO: 1888417 - RNA, 19 nt, Artificial Sequence
  Description of Artificial Sequence: Synthetic oligonucleotide
cagguuguaauaggaguag

SEQ ID NO: 1888418 - RNA, 19 nt, Artificial Sequence
  Description of Artificial Sequence: Synthetic oligonucleotide
uccugugccugaugcauga

SEQ ID NO: 1888419 - RNA, 19 nt, Artificial Sequence
  Description of Artificial Sequence: Synthetic oligonucleotide
aucugagccugacuugaug

SEQ ID NO: 1888420 - RNA, 19 nt, Artificial Sequence
  Description of Artificial Sequence: Synthetic oligonucleotide
uuagagagaaggccucguu

SEQ ID NO: 1888421 - RNA, 19 nt, Artificial Sequence
  Description of Artificial Sequence: Synthetic oligonucleotide
aggaguagaccuucacaga

SEQ ID NO: 1888422 - RNA, 19 nt, Artificial Sequence
  Description of Artificial Sequence: Synthetic oligonucleotide
gguuccaccaaucauuucu

SEQ ID NO: 1888423 - RNA, 19 nt, Artificial Sequence
  Description of Artificial Sequence: Synthetic oligonucleotide
caccaaucauuucuuggug

SEQ ID NO: 1888424 - RNA, 19 nt, Artificial Sequence
  Description of Artificial Sequence: Synthetic oligonucleotide
aaucaucagacagcuccgu

SEQ ID NO: 1888425 - RNA, 19 nt, Artificial Sequence
  Description of Artificial Sequence: Synthetic oligonucleotide
cacguaguccacuccgggc

SEQ ID NO: 1888426 - RNA, 19 nt, Artificial Sequence
  Description of Artificial Sequence: Synthetic oligonucleotide
cuguuagagagaaggccuc

SEQ ID NO: 1888427 - RNA, 19 nt, Artificial Sequence
  Description of Artificial Sequence: Synthetic oligonucleotide
cauuucauuguggcagagc

SEQ ID NO: 1888428 - RNA, 19 nt, Artificial Sequence
  Description of Artificial Sequence: Synthetic oligonucleotide
uuccaccaaucauuucuug

SEQ ID NO: 1888429 - RNA, 19 nt, Artificial Sequence
  Description of Artificial Sequence: Synthetic oligonucleotide
uagagugaauacagcugaa

SEQ ID NO: 1888430 - RNA, 19 nt, Artificial Sequence
  Description of Artificial Sequence: Synthetic oligonucleotide
gaaucacggguccauccuc

SEQ ID NO: 1888431 - RNA, 19 nt, Artificial Sequence
  Description of Artificial Sequence: Synthetic oligonucleotide
agagcuccacccauguguc

SEQ ID NO: 1888432 - RNA, 19 nt, Artificial Sequence
  Description of Artificial Sequence: Synthetic oligonucleotide
cugugccugaugcaugaag

SEQ ID NO: 1888433 - RNA, 19 nt, Artificial Sequence
  Description of Artificial Sequence: Synthetic oligonucleotide
guuaaugcucccgggaaga

SEQ ID NO: 1888434 - RNA, 19 nt, Artificial Sequence
  Description of Artificial Sequence: Synthetic oligonucleotide
cagaggucggaggacaggc

SEQ ID NO: 1888435 - RNA, 19 nt, Artificial Sequence
  Description of Artificial Sequence: Synthetic oligonucleotide
ccagaaucagccauuuaac

SEQ ID NO: 1888436 - RNA, 19 nt, Artificial Sequence
  Description of Artificial Sequence: Synthetic oligonucleotide
acuauugaucugccccuca

SEQ ID NO: 1888437 - RNA, 19 nt, Artificial Sequence
  Description of Artificial Sequence: Synthetic oligonucleotide
ccucguuuugguaacuggc

SEQ ID NO: 1888438 - RNA, 19 nt, Artificial Sequence
  Description of Artificial Sequence: Synthetic oligonucleotide
gccuuguuaaugcucccgg

SEQ ID NO: 1888439 - RNA, 19 nt, Artificial Sequence
  Description of Artificial Sequence: Synthetic oligonucleotide
gagauguaucuguccacuc

SEQ ID NO: 1888440 - RNA, 19 nt, Artificial Sequence
  Description of Artificial Sequence: Synthetic oligonucleotide
ccaaagaccaccauggucu

SEQ ID NO: 1888441 - RNA, 19 nt, Artificial Sequence
  Description of Artificial Sequence: Synthetic oligonucleotide
uggucucugugaacgcccc

SEQ ID NO: 1888442 - RNA, 19 nt, Artificial Sequence
  Description of Artificial Sequence: Synthetic oligonucleotide
ggcuguuagagagaaggcc

SEQ ID NO: 1888443 - RNA, 19 nt, Artificial Sequence
  Description of Artificial Sequence: Synthetic oligonucleotide
uucuccagaaucagccauu

SEQ ID NO: 1888444 - RNA, 19 nt, Artificial Sequence
  Description of Artificial Sequence: Synthetic oligonucleotide
acaaaggaccugagagucg

SEQ ID NO: 1888445 - RNA, 19 nt, Artificial Sequence
  Description of Artificial Sequence: Synthetic oligonucleotide
uccacuccgggcucacaag

SEQ ID NO: 1888446 - RNA, 19 nt, Artificial Sequence
  Description of Artificial Sequence: Synthetic oligonucleotide
ggugcaugauucauccagg

SEQ ID NO: 1888447 - RNA, 19 nt, Artificial Sequence
  Description of Artificial Sequence: Synthetic oligonucleotide
uguguccuucccgaugaug

SEQ ID NO: 1888448 - RNA, 19 nt, Artificial Sequence
  Description of Artificial Sequence: Synthetic oligonucleotide
gggcucacaagccuuuucc

SEQ ID NO: 1888449 - RNA, 19 nt, Artificial Sequence
  Description of Artificial Sequence: Synthetic oligonucleotide
aucugccccucacagauuu

SEQ ID NO: 1888450 - RNA, 19 nt, Artificial Sequence
  Description of Artificial Sequence: Synthetic oligonucleotide
agguaaugcuucccuuucu

SEQ ID NO: 1888451 - RNA, 19 nt, Artificial Sequence
  Description of Artificial Sequence: Synthetic oligonucleotide
ugagguuggcagccagaga

SEQ ID NO: 1888452 - RNA, 19 nt, Artificial Sequence
  Description of Artificial Sequence: Synthetic oligonucleotide
ucgggccagagcuccaccc

SEQ ID NO: 1888453 - RNA, 19 nt, Artificial Sequence
  Description of Artificial Sequence: Synthetic oligonucleotide
gacagcuccgucgugacua

SEQ ID NO: 1888454 - RNA, 19 nt, Artificial Sequence
  Description of Artificial Sequence: Synthetic oligonucleotide
uugggcuuuucuccccaga

SEQ ID NO: 1888455 - RNA, 19 nt, Artificial Sequence
  Description of Artificial Sequence: Synthetic oligonucleotide
gagaucuuuucuagguaga

SEQ ID NO: 1888456 - RNA, 19 nt, Artificial Sequence
  Description of Artificial Sequence: Synthetic oligonucleotide
ggucuuguacacguagucc

SEQ ID NO: 1888457 - RNA, 19 nt, Artificial Sequence
  Description of Artificial Sequence: Synthetic oligonucleotide
uuucgaguuggggcgggcc

SEQ ID NO: 1888458 - RNA, 19 nt, Artificial Sequence
  Description of Artificial Sequence: Synthetic oligonucleotide
uguuucgaguuggggcggg

SEQ ID NO: 1888459 - RNA, 19 nt, Artificial Sequence
  Description of Artificial Sequence: Synthetic oligonucleotide
agaucuuuucuagguagau

SEQ ID NO: 1888460 - RNA, 19 nt, Artificial Sequence
  Description of Artificial Sequence: Synthetic oligonucleotide
uguccacuccacugcucag

SEQ ID NO: 1888461 - RNA, 19 nt, Artificial Sequence
  Description of Artificial Sequence: Synthetic oligonucleotide
uaaugcucccgggaagacu

SEQ ID NO: 1888462 - RNA, 19 nt, Artificial Sequence
  Description of Artificial Sequence: Synthetic oligonucleotide
ggcuuuggucaucucauac

SEQ ID NO: 1888463 - RNA, 19 nt, Artificial Sequence
  Description of Artificial Sequence: Synthetic oligonucleotide
cuccgucgugacuagcuug

SEQ ID NO: 1888464 - RNA, 19 nt, Artificial Sequence
  Description of Artificial Sequence: Synthetic oligonucleotide
ugggcguguguuucgaguu

SEQ ID NO: 1888465 - RNA, 19 nt, Artificial Sequence
  Description of Artificial Sequence: Synthetic oligonucleotide
agccauuccguccgccuug

SEQ ID NO: 1888466 - RNA, 19 nt, Artificial Sequence
  Description of Artificial Sequence: Synthetic oligonucleotide
agaggucggaggacaggcc

SEQ ID NO: 1888467 - RNA, 19 nt, Artificial Sequence
  Description of Artificial Sequence: Synthetic oligonucleotide
gaugaccugcucgaugguc

SEQ ID NO: 1888468 - RNA, 19 nt, Artificial Sequence
  Description of Artificial Sequence: Synthetic oligonucleotide
caaaggaccugagagucga

SEQ ID NO: 1888469 - RNA, 19 nt, Artificial Sequence
  Description of Artificial Sequence: Synthetic oligonucleotide
uggcgaugagguuggcagc

SEQ ID NO: 1888470 - RNA, 19 nt, Artificial Sequence
  Description of Artificial Sequence: Synthetic oligonucleotide
caugauucauccagguugu

SEQ ID NO: 1888471 - RNA, 19 nt, Artificial Sequence
  Description of Artificial Sequence: Synthetic oligonucleotide
gcgaugaggacgaaggcug

SEQ ID NO: 1888472 - RNA, 19 nt, Artificial Sequence
  Description of Artificial Sequence: Synthetic oligonucleotide
uucucgcacuguuucuggu

SEQ ID NO: 1888473 - RNA, 19 nt, Artificial Sequence
  Description of Artificial Sequence: Synthetic oligonucleotide
uccaggucugugccuuggc

SEQ ID NO: 1888474 - RNA, 19 nt, Artificial Sequence
  Description of Artificial Sequence: Synthetic oligonucleotide
uccgccuuguccagauggu

SEQ ID NO: 1888475 - RNA, 19 nt, Artificial Sequence
  Description of Artificial Sequence: Synthetic oligonucleotide
auacagcugaagcuuuauu

SEQ ID NO: 1888476 - RNA, 19 nt, Artificial Sequence
  Description of Artificial Sequence: Synthetic oligonucleotide
uuaaugcucccgggaagac

SEQ ID NO: 1888477 - RNA, 19 nt, Artificial Sequence
  Description of Artificial Sequence: Synthetic oligonucleotide
gccucguuuugguaacugg

SEQ ID NO: 1888478 - RNA, 19 nt, Artificial Sequence
  Description of Artificial Sequence: Synthetic oligonucleotide
ucccgggaagacuauugau

SEQ ID NO: 1888479 - RNA, 19 nt, Artificial Sequence
  Description of Artificial Sequence: Synthetic oligonucleotide
gggcuuuucuccccagagg

SEQ ID NO: 1888480 - RNA, 19 nt, Artificial Sequence
  Description of Artificial Sequence: Synthetic oligonucleotide
aggucggaggacaggcccc

SEQ ID NO: 1888481 - RNA, 19 nt, Artificial Sequence
  Description of Artificial Sequence: Synthetic oligonucleotide
ugaugagggugcuccuggu

SEQ ID NO: 1888482 - RNA, 19 nt, Artificial Sequence
  Description of Artificial Sequence: Synthetic oligonucleotide
ucucgcacuguuucugguu

SEQ ID NO: 1888483 - RNA, 19 nt, Artificial Sequence
  Description of Artificial Sequence: Synthetic oligonucleotide
cuucagggcuucucugcac

SEQ ID NO: 1888484 - RNA, 19 nt, Artificial Sequence
  Description of Artificial Sequence: Synthetic oligonucleotide
uucugagugugagaucuuu

SEQ ID NO: 1888485 - RNA, 19 nt, Artificial Sequence
  Description of Artificial Sequence: Synthetic oligonucleotide
agcuccacccauguguccu

SEQ ID NO: 1888486 - RNA, 19 nt, Artificial Sequence
  Description of Artificial Sequence: Synthetic oligonucleotide
ccuuguuaaugcucccggg

SEQ ID NO: 1888487 - RNA, 19 nt, Artificial Sequence
  Description of Artificial Sequence: Synthetic oligonucleotide
uuccugcagugcgaugagg

SEQ ID NO: 1888488 - RNA, 19 nt, Artificial Sequence
  Description of Artificial Sequence: Synthetic oligonucleotide
cuuccugcagugcgaugag

SEQ ID NO: 1888489 - RNA, 19 nt, Artificial Sequence
  Description of Artificial Sequence: Synthetic oligonucleotide
ugaugaccugcucgauggu

SEQ ID NO: 1888490 - RNA, 19 nt, Artificial Sequence
  Description of Artificial Sequence: Synthetic oligonucleotide
gaaccugcguuccugcccu

SEQ ID NO: 1888491 - RNA, 19 nt, Artificial Sequence
  Description of Artificial Sequence: Synthetic oligonucleotide
gugccugaugcaugaagca

SEQ ID NO: 1888492 - RNA, 19 nt, Artificial Sequence
  Description of Artificial Sequence: Synthetic oligonucleotide
ggaucagucccacauuaaa

SEQ ID NO: 1888493 - RNA, 19 nt, Artificial Sequence
  Description of Artificial Sequence: Synthetic oligonucleotide
cauccuccugaaagacacc

SEQ ID NO: 1888494 - RNA, 19 nt, Artificial Sequence
  Description of Artificial Sequence: Synthetic oligonucleotide
gugcgaugaggacgaaggc

SEQ ID NO: 1888495 - RNA, 19 nt, Artificial Sequence
  Description of Artificial Sequence: Synthetic oligonucleotide
cccgggaagacuauugauc

SEQ ID NO: 1888496 - RNA, 19 nt, Artificial Sequence
  Description of Artificial Sequence: Synthetic oligonucleotide
cuuuggcuguuagagagaa

SEQ ID NO: 1888497 - RNA, 19 nt, Artificial Sequence
  Description of Artificial Sequence: Synthetic oligonucleotide
uggcauucuucagccucgg

SEQ ID NO: 1888498 - RNA, 19 nt, Artificial Sequence
  Description of Artificial Sequence: Synthetic oligonucleotide
gcuucgauguacuccccug

SEQ ID NO: 1888499 - RNA, 19 nt, Artificial Sequence
  Description of Artificial Sequence: Synthetic oligonucleotide
cacggguccauccuccuga

SEQ ID NO: 1888500 - RNA, 19 nt, Artificial Sequence
  Description of Artificial Sequence: Synthetic oligonucleotide
cucguuuugguaacuggcu

SEQ ID NO: 1888501 - RNA, 19 nt, Artificial Sequence
  Description of Artificial Sequence: Synthetic oligonucleotide
gugagaucuuuucuaggua

SEQ ID NO: 1888502 - RNA, 19 nt, Artificial Sequence
  Description of Artificial Sequence: Synthetic oligonucleotide
ccugaaagacaccgucugg

SEQ ID NO: 1888503 - RNA, 19 nt, Artificial Sequence
  Description of Artificial Sequence: Synthetic oligonucleotide
cagacagcuccgucgugac

SEQ ID NO: 1888504 - RNA, 19 nt, Artificial Sequence
  Description of Artificial Sequence: Synthetic oligonucleotide
gcugaugaaccugcguucc

SEQ ID NO: 1888505 - RNA, 19 nt, Artificial Sequence
  Description of Artificial Sequence: Synthetic oligonucleotide
uuggugaaucacgggucca

SEQ ID NO: 1888506 - RNA, 19 nt, Artificial Sequence
  Description of Artificial Sequence: Synthetic oligonucleotide
aguuccaggucugugccuu

SEQ ID NO: 1888507 - RNA, 19 nt, Artificial Sequence
  Description of Artificial Sequence: Synthetic oligonucleotide
ucggcacaccggcacauuu

SEQ ID NO: 1888508 - RNA, 19 nt, Artificial Sequence
  Description of Artificial Sequence: Synthetic oligonucleotide
gaccaccauggucucugug

SEQ ID NO: 1888509 - RNA, 19 nt, Artificial Sequence
  Description of Artificial Sequence: Synthetic oligonucleotide
uuuugguaacuggcuucga

SEQ ID NO: 1888510 - RNA, 19 nt, Artificial Sequence
  Description of Artificial Sequence: Synthetic oligonucleotide
cugccuuguuaaugcuccc

SEQ ID NO: 1888511 - RNA, 19 nt, Artificial Sequence
  Description of Artificial Sequence: Synthetic oligonucleotide
gaacgccccgagguucucg

SEQ ID NO: 1888512 - RNA, 19 nt, Artificial Sequence
  Description of Artificial Sequence: Synthetic oligonucleotide
ccuggcauucuucagccuc

SEQ ID NO: 1888513 - RNA, 19 nt, Artificial Sequence
  Description of Artificial Sequence: Synthetic oligonucleotide
ggaggacaggccccaaaug

SEQ ID NO: 1888514 - RNA, 19 nt, Artificial Sequence
  Description of Artificial Sequence: Synthetic oligonucleotide
gagcuugcucagccauucc

SEQ ID NO: 1888515 - RNA, 19 nt, Artificial Sequence
  Description of Artificial Sequence: Synthetic oligonucleotide
aagacaccgucuggcuucu

SEQ ID NO: 1888516 - RNA, 19 nt, Artificial Sequence
  Description of Artificial Sequence: Synthetic oligonucleotide
guguuucgaguuggggcgg

SEQ ID NO: 1888517 - RNA, 19 nt, Artificial Sequence
  Description of Artificial Sequence: Synthetic oligonucleotide
aagcuuuauuggagggcgu

SEQ ID NO: 1888518 - RNA, 19 nt, Artificial Sequence
  Description of Artificial Sequence: Synthetic oligonucleotide
gacuauugaucugccccuc

SEQ ID NO: 1888519 - RNA, 19 nt, Artificial Sequence
  Description of Artificial Sequence: Synthetic oligonucleotide
ucggaggacaggccccaaa

SEQ ID NO: 1888520 - RNA, 19 nt, Artificial Sequence
  Description of Artificial Sequence: Synthetic oligonucleotide
cagccauuuaacagcccca

SEQ ID NO: 1888521 - RNA, 19 nt, Artificial Sequence
  Description of Artificial Sequence: Synthetic oligonucleotide
ugggugcaugauucaucca

SEQ ID NO: 1888522 - RNA, 19 nt, Artificial Sequence
  Description of Artificial Sequence: Synthetic oligonucleotide
gcuuccugcagugcgauga

SEQ ID NO: 1888523 - RNA, 19 nt, Artificial Sequence
  Description of Artificial Sequence: Synthetic oligonucleotide
gagccugacuugaugaccu

SEQ ID NO: 1888524 - RNA, 19 nt, Artificial Sequence
  Description of Artificial Sequence: Synthetic oligonucleotide
cuccccugccuuguuaaug

SEQ ID NO: 1888525 - RNA, 19 nt, Artificial Sequence
  Description of Artificial Sequence: Synthetic oligonucleotide
cacuccacugcucagcagu

SEQ ID NO: 1888526 - RNA, 19 nt, Artificial Sequence
  Description of Artificial Sequence: Synthetic oligonucleotide
ggcgaugagguuggcagcc

SEQ ID NO: 1888527 - RNA, 19 nt, Artificial Sequence
  Description of Artificial Sequence: Synthetic oligonucleotide
aucacggguccauccuccu

SEQ ID NO: 1888528 - RNA, 19 nt, Artificial Sequence
  Description of Artificial Sequence: Synthetic oligonucleotide
guucuccucggcacaccgg

SEQ ID NO: 1888529 - RNA, 19 nt, Artificial Sequence
  Description of Artificial Sequence: Synthetic oligonucleotide
agaccuucacagagccggg

SEQ ID NO: 1888530 - RNA, 19 nt, Artificial Sequence
  Description of Artificial Sequence: Synthetic oligonucleotide
gacaccgucuggcuucugu

SEQ ID NO: 1888531 - RNA, 19 nt, Artificial Sequence
  Description of Artificial Sequence: Synthetic oligonucleotide
ugccccucacagauuucuc

SEQ ID NO: 1888532 - RNA, 19 nt, Artificial Sequence
  Description of Artificial Sequence: Synthetic oligonucleotide
gcuguuagagagaaggccu

SEQ ID NO: 1888533 - RNA, 19 nt, Artificial Sequence
  Description of Artificial Sequence: Synthetic oligonucleotide
gccccaaaugagguaaugc

SEQ ID NO: 1888534 - RNA, 19 nt, Artificial Sequence
  Description of Artificial Sequence: Synthetic oligonucleotide
gaauacagcugaagcuuua

SEQ ID NO: 1888535 - RNA, 19 nt, Artificial Sequence
  Description of Artificial Sequence: Synthetic oligonucleotide
uuccgggguuccaccaauc

SEQ ID NO: 1888536 - RNA, 19 nt, Artificial Sequence
  Description of Artificial Sequence: Synthetic oligonucleotide
uggcuucgauguacucccc

SEQ ID NO: 1888537 - RNA, 19 nt, Artificial Sequence
  Description of Artificial Sequence: Synthetic oligonucleotide
uuccguccgccuuguccag

SEQ ID NO: 1888538 - RNA, 19 nt, Artificial Sequence
  Description of Artificial Sequence: Synthetic oligonucleotide
ucccgaugauguagcuggu

SEQ ID NO: 1888539 - RNA, 19 nt, Artificial Sequence
  Description of Artificial Sequence: Synthetic oligonucleotide
cagugcgaugaggacgaag

SEQ ID NO: 1888540 - RNA, 19 nt, Artificial Sequence
  Description of Artificial Sequence: Synthetic oligonucleotide
ccucuuuggcguuccgggg

SEQ ID NO: 1888541 - RNA, 19 nt, Artificial Sequence
  Description of Artificial Sequence: Synthetic oligonucleotide
gcauccuggcauucuucag

SEQ ID NO: 1888542 - RNA, 19 nt, Artificial Sequence
  Description of Artificial Sequence: Synthetic oligonucleotide
auguacuccccugccuugu

SEQ ID NO: 1888543 - RNA, 19 nt, Artificial Sequence
  Description of Artificial Sequence: Synthetic oligonucleotide
cucccgggaagacuauuga

SEQ ID NO: 1888544 - RNA, 19 nt, Artificial Sequence
  Description of Artificial Sequence: Synthetic oligonucleotide
gaccuugaccacauaggcu

SEQ ID NO: 1888545 - RNA, 19 nt, Artificial Sequence
  Description of Artificial Sequence: Synthetic oligonucleotide
uccgggcucacaagccuuu

SEQ ID NO: 1888546 - RNA, 19 nt, Artificial Sequence
  Description of Artificial Sequence: Synthetic oligonucleotide
ccaaucauuucuuggugaa

SEQ ID NO: 1888547 - RNA, 19 nt, Artificial Sequence
  Description of Artificial Sequence: Synthetic oligonucleotide
ggcucacaagccuuuucca

SEQ ID NO: 1888548 - RNA, 19 nt, Artificial Sequence
  Description of Artificial Sequence: Synthetic oligonucleotide
cccacauuaaagaacuggu

SEQ ID NO: 1888549 - RNA, 19 nt, Artificial Sequence
  Description of Artificial Sequence: Synthetic oligonucleotide
ucgcucauucaggcugacc

SEQ ID NO: 1888550 - RNA, 19 nt, Artificial Sequence
  Description of Artificial Sequence: Synthetic oligonucleotide
gguucucugcauccuggca

SEQ ID NO: 1888551 - RNA, 19 nt, Artificial Sequence
  Description of Artificial Sequence: Synthetic oligonucleotide
guagaugaugagggugcuc

SEQ ID NO: 1888552 - RNA, 19 nt, Artificial Sequence
  Description of Artificial Sequence: Synthetic oligonucleotide
ccacuccgggcucacaagc

SEQ ID NO: 1888553 - RNA, 19 nt, Artificial Sequence
  Description of Artificial Sequence: Synthetic oligonucleotide
gacgaaggcugugagggau

SEQ ID NO: 1888554 - RNA, 19 nt, Artificial Sequence
  Description of Artificial Sequence: Synthetic oligonucleotide
auaggcugucagaccaggu

SEQ ID NO: 1888555 - RNA, 19 nt, Artificial Sequence
  Description of Artificial Sequence: Synthetic oligonucleotide
ucgaguuggggcgggccaa

SEQ ID NO: 1888556 - RNA, 19 nt, Artificial Sequence
  Description of Artificial Sequence: Synthetic oligonucleotide
guuccaggucugugccuug

SEQ ID NO: 1888557 - RNA, 19 nt, Artificial Sequence
  Description of Artificial Sequence: Synthetic oligonucleotide
ugacuagcuuggucuugua

SEQ ID NO: 1888558 - RNA, 19 nt, Artificial Sequence
  Description of Artificial Sequence: Synthetic oligonucleotide
cucgggccagagcuccacc

SEQ ID NO: 1888559 - RNA, 19 nt, Artificial Sequence
  Description of Artificial Sequence: Synthetic oligonucleotide
acagccccacaaaggaccu

SEQ ID NO: 1888560 - RNA, 19 nt, Artificial Sequence
  Description of Artificial Sequence: Synthetic oligonucleotide
ggcgugggcguguguuucg

SEQ ID NO: 1888561 - RNA, 19 nt, Artificial Sequence
  Description of Artificial Sequence: Synthetic oligonucleotide
cugguaggaguaggcuuug

SEQ ID NO: 1888562 - RNA, 19 nt, Artificial Sequence
  Description of Artificial Sequence: Synthetic oligonucleotide
agucgauggcgaugagguu

SEQ ID NO: 1888563 - RNA, 19 nt, Artificial Sequence
  Description of Artificial Sequence: Synthetic oligonucleotide
aaccugcguuccugcccug

SEQ ID NO: 1888564 - RNA, 19 nt, Artificial Sequence
  Description of Artificial Sequence: Synthetic oligonucleotide
agaccaccauggucucugu

SEQ ID NO: 1888565 - RNA, 19 nt, Artificial Sequence
  Description of Artificial Sequence: Synthetic oligonucleotide
ggagauguaucuguccacu

SEQ ID NO: 1888566 - RNA, 19 nt, Artificial Sequence
  Description of Artificial Sequence: Synthetic oligonucleotide
gugggcguguguuucgagu

SEQ ID NO: 1888567 - RNA, 19 nt, Artificial Sequence
  Description of Artificial Sequence: Synthetic oligonucleotide
uggcguuccgggguuccac

SEQ ID NO: 1888568 - RNA, 19 nt, Artificial Sequence
  Description of Artificial Sequence: Synthetic oligonucleotide
guuagagagaaggccucgu

SEQ ID NO: 1888569 - RNA, 19 nt, Artificial Sequence
  Description of Artificial Sequence: Synthetic oligonucleotide
ggcguuccgggguuccacc

SEQ ID NO: 1888570 - RNA, 19 nt, Artificial Sequence
  Description of Artificial Sequence: Synthetic oligonucleotide
ccgggaagacuauugaucu

SEQ ID NO: 1888571 - RNA, 19 nt, Artificial Sequence
  Description of Artificial Sequence: Synthetic oligonucleotide
augguaaaacugggugcau

SEQ ID NO: 1888572 - RNA, 19 nt, Artificial Sequence
  Description of Artificial Sequence: Synthetic oligonucleotide
gugacuagcuuggucuugu

SEQ ID NO: 1888573 - RNA, 19 nt, Artificial Sequence
  Description of Artificial Sequence: Synthetic oligonucleotide
gcucccgggaagacuauug

SEQ ID NO: 1888574 - RNA, 19 nt, Artificial Sequence
  Description of Artificial Sequence: Synthetic oligonucleotide
ccauggucucugugaacgc

SEQ ID NO: 1888575 - RNA, 19 nt, Artificial Sequence
  Description of Artificial Sequence: Synthetic oligonucleotide
aaaggaccugagagucgau

SEQ ID NO: 1888576 - RNA, 19 nt, Artificial Sequence
  Description of Artificial Sequence: Synthetic oligonucleotide
caccucaucugagccugac

SEQ ID NO: 1888577 - RNA, 19 nt, Artificial Sequence
  Description of Artificial Sequence: Synthetic oligonucleotide
guuucgaguuggggcgggc

SEQ ID NO: 1888578 - RNA, 19 nt, Artificial Sequence
  Description of Artificial Sequence: Synthetic oligonucleotide
gucccacauuaaagaacug

SEQ ID NO: 1888579 - RNA, 19 nt, Artificial Sequence
  Description of Artificial Sequence: Synthetic oligonucleotide
cccuuucugcagcuucagg

SEQ ID NO: 1888580 - RNA, 19 nt, Artificial Sequence
  Description of Artificial Sequence: Synthetic oligonucleotide
agggcgugggcguguguuu

SEQ ID NO: 1888581 - RNA, 19 nt, Artificial Sequence
  Description of Artificial Sequence: Synthetic oligonucleotide
cgggccaaagaccaccaug

SEQ ID NO: 1888582 - RNA, 19 nt, Artificial Sequence
  Description of Artificial Sequence: Synthetic oligonucleotide
guggcugaugaaccugcgu

SEQ ID NO: 1888583 - RNA, 19 nt, Artificial Sequence
  Description of Artificial Sequence: Synthetic oligonucleotide
acggguccauccuccugaa

SEQ ID NO: 1888584 - RNA, 19 nt, Artificial Sequence
  Description of Artificial Sequence: Synthetic oligonucleotide
cuuguacacguaguccacu

SEQ ID NO: 1888585 - RNA, 19 nt, Artificial Sequence
  Description of Artificial Sequence: Synthetic oligonucleotide
gccauuuaacagccccaca

SEQ ID NO: 1888586 - RNA, 19 nt, Artificial Sequence
  Description of Artificial Sequence: Synthetic oligonucleotide
gaaggcugugagggauaca

SEQ ID NO: 1888587 - RNA, 19 nt, Artificial Sequence
  Description of Artificial Sequence: Synthetic oligonucleotide
guaaaacugggugcaugau

SEQ ID NO: 1888588 - RNA, 19 nt, Artificial Sequence
  Description of Artificial Sequence: Synthetic oligonucleotide
gggcgggccaaagaccacc

SEQ ID NO: 1888589 - RNA, 19 nt, Artificial Sequence
  Description of Artificial Sequence: Synthetic oligonucleotide
guaguccacuccgggcuca

SEQ ID NO: 1888590 - RNA, 19 nt, Artificial Sequence
  Description of Artificial Sequence: Synthetic oligonucleotide
cccugccuuguuaaugcuc

SEQ ID NO: 1888591 - RNA, 19 nt, Artificial Sequence
  Description of Artificial Sequence: Synthetic oligonucleotide
ggcugaccuucuccugugc

SEQ ID NO: 1888592 - RNA, 19 nt, Artificial Sequence
  Description of Artificial Sequence: Synthetic oligonucleotide
uccguccgccuuguccaga

SEQ ID NO: 1888593 - RNA, 19 nt, Artificial Sequence
  Description of Artificial Sequence: Synthetic oligonucleotide
ggccucguuuugguaacug

SEQ ID NO: 1888594 - RNA, 19 nt, Artificial Sequence
  Description of Artificial Sequence: Synthetic oligonucleotide
uaguccacuccgggcucac

SEQ ID NO: 1888595 - RNA, 19 nt, Artificial Sequence
  Description of Artificial Sequence: Synthetic oligonucleotide
cuuuggcguuccgggguuc

SEQ ID NO: 1888596 - RNA, 19 nt, Artificial Sequence
  Description of Artificial Sequence: Synthetic oligonucleotide
ggacgaaggcugugaggga

SEQ ID NO: 1888597 - RNA, 19 nt, Artificial Sequence
  Description of Artificial Sequence: Synthetic oligonucleotide
gcugucagaccaggugcug

SEQ ID NO: 1888598 - RNA, 19 nt, Artificial Sequence
  Description of Artificial Sequence: Synthetic oligonucleotide
ccagaugguaaaacugggu

SEQ ID NO: 1888599 - RNA, 19 nt, Artificial Sequence
  Description of Artificial Sequence: Synthetic oligonucleotide
ccugacuugaugaccugcu

SEQ ID NO: 1888600 - RNA, 19 nt, Artificial Sequence
  Description of Artificial Sequence: Synthetic oligonucleotide
guuccgggguuccaccaau

SEQ ID NO: 1888601 - RNA, 19 nt, Artificial Sequence
  Description of Artificial Sequence: Synthetic oligonucleotide
cagccucgggccagagcuc

SEQ ID NO: 1888602 - RNA, 19 nt, Artificial Sequence
  Description of Artificial Sequence: Synthetic oligonucleotide
ugaacgccccgagguucuc

SEQ ID NO: 1888603 - RNA, 19 nt, Artificial Sequence
  Description of Artificial Sequence: Synthetic oligonucleotide
acgccccgagguucucgca

SEQ ID NO: 1888604 - RNA, 19 nt, Artificial Sequence
  Description of Artificial Sequence: Synthetic oligonucleotide
gcacuugauguggcugaug

SEQ ID NO: 1888605 - RNA, 19 nt, Artificial Sequence
  Description of Artificial Sequence: Synthetic oligonucleotide
aggccucguuuugguaacu

SEQ ID NO: 1888606 - RNA, 19 nt, Artificial Sequence
  Description of Artificial Sequence: Synthetic oligonucleotide
gcuugcucagccauuccgu

SEQ ID NO: 1888607 - RNA, 19 nt, Artificial Sequence
  Description of Artificial Sequence: Synthetic oligonucleotide
ggcuucgauguacuccccu

SEQ ID NO: 1888608 - RNA, 19 nt, Artificial Sequence
  Description of Artificial Sequence: Synthetic oligonucleotide
aguccacuccgggcucaca

SEQ ID NO: 1888609 - RNA, 19 nt, Artificial Sequence
  Description of Artificial Sequence: Synthetic oligonucleotide
ggccagagcuccacccaug

SEQ ID NO: 1888610 - RNA, 19 nt, Artificial Sequence
  Description of Artificial Sequence: Synthetic oligonucleotide
ggaguaggcuuuggucauc

SEQ ID NO: 1888611 - RNA, 19 nt, Artificial Sequence
  Description of Artificial Sequence: Synthetic oligonucleotide
cagcuccgucgugacuagc

SEQ ID NO: 1888612 - RNA, 19 nt, Artificial Sequence
  Description of Artificial Sequence: Synthetic oligonucleotide
caccggcacauuucauugu

SEQ ID NO: 1888613 - RNA, 19 nt, Artificial Sequence
  Description of Artificial Sequence: Synthetic oligonucleotide
gguagaugaugagggugcu

SEQ ID NO: 1888614 - RNA, 19 nt, Artificial Sequence
  Description of Artificial Sequence: Synthetic oligonucleotide
cgucgugacuagcuugguc

SEQ ID NO: 1888615 - RNA, 19 nt, Artificial Sequence
  Description of Artificial Sequence: Synthetic oligonucleotide
gucgcucauucaggcugac

SEQ ID NO: 1888616 - RNA, 19 nt, Artificial Sequence
  Description of Artificial Sequence: Synthetic oligonucleotide
ggucggaggacaggcccca

SEQ ID NO: 1888617 - RNA, 19 nt, Artificial Sequence
  Description of Artificial Sequence: Synthetic oligonucleotide
gcguuccgggguuccacca

SEQ ID NO: 1888618 - RNA, 19 nt, Artificial Sequence
  Description of Artificial Sequence: Synthetic oligonucleotide
cgaaggcugugagggauac

SEQ ID NO: 1888619 - RNA, 19 nt, Artificial Sequence
  Description of Artificial Sequence: Synthetic oligonucleotide
caucugagccugacuugau

SEQ ID NO: 1888620 - RNA, 19 nt, Artificial Sequence
  Description of Artificial Sequence: Synthetic oligonucleotide
ggcgggccaaagaccacca

SEQ ID NO: 1888621 - RNA, 19 nt, Artificial Sequence
  Description of Artificial Sequence: Synthetic oligonucleotide
cggcacaccggcacauuuc

SEQ ID NO: 1888622 - RNA, 19 nt, Artificial Sequence
  Description of Artificial Sequence: Synthetic oligonucleotide
ggcugucagaccaggugcu

SEQ ID NO: 1888623 - RNA, 19 nt, Artificial Sequence
  Description of Artificial Sequence: Synthetic oligonucleotide
cugugaacgccccgagguu

SEQ ID NO: 1888624 - RNA, 19 nt, Artificial Sequence
  Description of Artificial Sequence: Synthetic oligonucleotide
cagagcuugcucagccauu

SEQ ID NO: 1888625 - RNA, 19 nt, Artificial Sequence
  Description of Artificial Sequence: Synthetic oligonucleotide
cuucugagugugagaucuu

SEQ ID NO: 1888626 - RNA, 19 nt, Artificial Sequence
  Description of Artificial Sequence: Synthetic oligonucleotide
ccugaugcaugaagcaguu

SEQ ID NO: 1888627 - RNA, 19 nt, Artificial Sequence
  Description of Artificial Sequence: Synthetic oligonucleotide
cgugggcguguguuucgag

SEQ ID NO: 1888628 - RNA, 19 nt, Artificial Sequence
  Description of Artificial Sequence: Synthetic oligonucleotide
cgccccgagguucucgcac

SEQ ID NO: 1888629 - RNA, 19 nt, Artificial Sequence
  Description of Artificial Sequence: Synthetic oligonucleotide
ccuuguccagaugguaaaa

SEQ ID NO: 1888630 - RNA, 19 nt, Artificial Sequence
  Description of Artificial Sequence: Synthetic oligonucleotide
cuccgggcucacaagccuu

SEQ ID NO: 1888631 - RNA, 19 nt, Artificial Sequence
  Description of Artificial Sequence: Synthetic oligonucleotide
cgggguuccaccaaucauu

SEQ ID NO: 1888632 - RNA, 19 nt, Artificial Sequence
  Description of Artificial Sequence: Synthetic oligonucleotide
cagccauuccguccgccuu

SEQ ID NO: 1888633 - RNA, 19 nt, Artificial Sequence
  Description of Artificial Sequence: Synthetic oligonucleotide
ccccgagguucucgcacug

SEQ ID NO: 1888634 - RNA, 19 nt, Artificial Sequence
  Description of Artificial Sequence: Synthetic oligonucleotide
ccccagaggucggaggaca

SEQ ID NO: 1888635 - RNA, 19 nt, Artificial Sequence
  Description of Artificial Sequence: Synthetic oligonucleotide
gaucugccccucacagauu

SEQ ID NO: 1888636 - RNA, 19 nt, Artificial Sequence
  Description of Artificial Sequence: Synthetic oligonucleotide
ccucgggccagagcuccac

SEQ ID NO: 1888637 - RNA, 19 nt, Artificial Sequence
  Description of Artificial Sequence: Synthetic oligonucleotide
gccccgagguucucgcacu

SEQ ID NO: 1888638 - RNA, 19 nt, Artificial Sequence
  Description of Artificial Sequence: Synthetic oligonucleotide
gcuccgucgugacuagcuu

SEQ ID NO: 1888639 - RNA, 19 nt, Artificial Sequence
  Description of Artificial Sequence: Synthetic oligonucleotide
gcgugggcguguguuucga

SEQ ID NO: 1888640 - RNA, 19 nt, Artificial Sequence
  Description of Artificial Sequence: Synthetic oligonucleotide
gucggaggacaggccccaa

SEQ ID NO: 1888641 - RNA, 19 nt, Artificial Sequence
  Description of Artificial Sequence: Synthetic oligonucleotide
ggggcgggccaaagaccac

SEQ ID NO: 1888642 - RNA, 19 nt, Artificial Sequence
  Description of Artificial Sequence: Synthetic oligonucleotide
gucugugccuuggccuuuu

SEQ ID NO: 1888643 - RNA, 19 nt, Artificial Sequence
  Description of Artificial Sequence: Synthetic oligonucleotide
ccgggguuccaccaaucau

SEQ ID NO: 1888644 - RNA, 19 nt, Artificial Sequence
  Description of Artificial Sequence: Synthetic oligonucleotide
ccgagguucucgcacuguu

SEQ ID NO: 1888645 - RNA, 19 nt, Artificial Sequence
  Description of Artificial Sequence: Synthetic oligonucleotide
cguuccgggguuccaccaa

SEQ ID NO: 1888646 - RNA, 19 nt, Artificial Sequence
  Description of Artificial Sequence: Synthetic oligonucleotide
ccauuccguccgccuuguc

SEQ ID NO: 1888647 - RNA, 19 nt, Artificial Sequence
  Description of Artificial Sequence: Synthetic oligonucleotide
gccauuccguccgccuugu

SEQ ID NO: 1888648 - RNA, 19 nt, Artificial Sequence
  Description of Artificial Sequence: Synthetic oligonucleotide
gcuccacccauguguccuu

SEQ ID NO: 1888649 - RNA, 19 nt, Artificial Sequence
  Description of Artificial Sequence: Synthetic oligonucleotide
ccguccgccuuguccagau

SEQ ID NO: 1888650 - RNA, 19 nt, Artificial Sequence
  Description of Artificial Sequence: Synthetic oligonucleotide
gcgggccaaagaccaccau

SEQ ID NO: 1888651 - RNA, 19 nt, Artificial Sequence
  Description of Artificial Sequence: Synthetic oligonucleotide
gcagugcgaugaggacgaa

SEQ ID NO: 1888652 - RNA, 19 nt, Artificial Sequence
  Description of Artificial Sequence: Synthetic oligonucleotide
cgaguuggggcgggccaaa

SEQ ID NO: 1888653 - RNA, 19 nt, Artificial Sequence
  Description of Artificial Sequence: Synthetic oligonucleotide
cccgagguucucgcacugu

SEQ ID NO: 1888654 - RNA, 19 nt, Artificial Sequence
  Description of Artificial Sequence: Synthetic oligonucleotide
ccgucgugacuagcuuggu

SEQ ID NO: 1888655 - RNA, 19 nt, Artificial Sequence
  Description of Artificial Sequence: Synthetic oligonucleotide
ccgggcucacaagccuuuu

SEQ ID NO: 1888656 - RNA, 19 nt, Artificial Sequence
  Description of Artificial Sequence: Synthetic oligonucleotide
ucuauaauaauccagaggc

SEQ ID NO: 1888657 - RNA, 19 nt, Artificial Sequence
  Description of Artificial Sequence: Synthetic oligonucleotide
aacacgagauucuucaccc

SEQ ID NO: 1888658 - RNA, 19 nt, Artificial Sequence
  Description of Artificial Sequence: Synthetic oligonucleotide
accaaagacauucagggcc

SEQ ID NO: 1888659 - RNA, 19 nt, Artificial Sequence
  Description of Artificial Sequence: Synthetic oligonucleotide
auugaaguagcguagcagc

SEQ ID NO: 1888660 - RNA, 19 nt, Artificial Sequence
  Description of Artificial Sequence: Synthetic oligonucleotide
aaagcugugcuucuuaaag

SEQ ID NO: 1888661 - RNA, 19 nt, Artificial Sequence
  Description of Artificial Sequence: Synthetic oligonucleotide
aaucccuuacaccugugcc

SEQ ID NO: 1888662 - RNA, 19 nt, Artificial Sequence
  Description of Artificial Sequence: Synthetic oligonucleotide
uccacgaauggcauuaugg

SEQ ID NO: 1888663 - RNA, 19 nt, Artificial Sequence
  Description of Artificial Sequence: Synthetic oligonucleotide
uguaucauagucaccacca

SEQ ID NO: 1888664 - RNA, 19 nt, Artificial Sequence
  Description of Artificial Sequence: Synthetic oligonucleotide
guuaacucuauaauaaucc

SEQ ID NO: 1888665 - RNA, 19 nt, Artificial Sequence
  Description of Artificial Sequence: Synthetic oligonucleotide
accacaugaauguaauccc

SEQ ID NO: 1888666 - RNA, 19 nt, Artificial Sequence
  Description of Artificial Sequence: Synthetic oligonucleotide
uagguuaacucuauaauaa

SEQ ID NO: 1888667 - RNA, 19 nt, Artificial Sequence
  Description of Artificial Sequence: Synthetic oligonucleotide
uaacucuauaauaauccag

SEQ ID NO: 1888668 - RNA, 19 nt, Artificial Sequence
  Description of Artificial Sequence: Synthetic oligonucleotide
uagggcaugagguuguugg

SEQ ID NO: 1888669 - RNA, 19 nt, Artificial Sequence
  Description of Artificial Sequence: Synthetic oligonucleotide
ucgaugaagaacuuggacu

SEQ ID NO: 1888670 - RNA, 19 nt, Artificial Sequence
  Description of Artificial Sequence: Synthetic oligonucleotide
uggggauucccauacacgg

SEQ ID NO: 1888671 - RNA, 19 nt, Artificial Sequence
  Description of Artificial Sequence: Synthetic oligonucleotide
agauucuucaccccguggg

SEQ ID NO: 1888672 - RNA, 19 nt, Artificial Sequence
  Description of Artificial Sequence: Synthetic oligonucleotide
agagcaugaggguacaggg

SEQ ID NO: 1888673 - RNA, 19 nt, Artificial Sequence
  Description of Artificial Sequence: Synthetic oligonucleotide
acuuggacuuuccauaggg

SEQ ID NO: 1888674 - RNA, 19 nt, Artificial Sequence
  Description of Artificial Sequence: Synthetic oligonucleotide
aacucuauaauaauccaga

SEQ ID NO: 1888675 - RNA, 19 nt, Artificial Sequence
  Description of Artificial Sequence: Synthetic oligonucleotide
uuaacucuauaauaaucca

SEQ ID NO: 1888676 - RNA, 19 nt, Artificial Sequence
  Description of Artificial Sequence: Synthetic oligonucleotide
uuagguuaacucuauaaua

SEQ ID NO: 1888677 - RNA, 19 nt, Artificial Sequence
  Description of Artificial Sequence: Synthetic oligonucleotide
guugucgaugaccacaggg

SEQ ID NO: 1888678 - RNA, 19 nt, Artificial Sequence
  Description of Artificial Sequence: Synthetic oligonucleotide
agauccggcaaccacauug

SEQ ID NO: 1888679 - RNA, 19 nt, Artificial Sequence
  Description of Artificial Sequence: Synthetic oligonucleotide
cucuauaauaauccagagg

SEQ ID NO: 1888680 - RNA, 19 nt, Artificial Sequence
  Description of Artificial Sequence: Synthetic oligonucleotide
uguagauccggcaaccaca

SEQ ID NO: 1888681 - RNA, 19 nt, Artificial Sequence
  Description of Artificial Sequence: Synthetic oligonucleotide
uguuagguuaacucuauaa

SEQ ID NO: 1888682 - RNA, 19 nt, Artificial Sequence
  Description of Artificial Sequence: Synthetic oligonucleotide
guggaugacagccuuaaag

SEQ ID NO: 1888683 - RNA, 19 nt, Artificial Sequence
  Description of Artificial Sequence: Synthetic oligonucleotide
agauccaccacaugaaugu

SEQ ID NO: 1888684 - RNA, 19 nt, Artificial Sequence
  Description of Artificial Sequence: Synthetic oligonucleotide
cuugagcccagcaaagugg

SEQ ID NO: 1888685 - RNA, 19 nt, Artificial Sequence
  Description of Artificial Sequence: Synthetic oligonucleotide
cuuaaagaggugcuguagc

SEQ ID NO: 1888686 - RNA, 19 nt, Artificial Sequence
  Description of Artificial Sequence: Synthetic oligonucleotide
uggaccaucugcaggacag

SEQ ID NO: 1888687 - RNA, 19 nt, Artificial Sequence
  Description of Artificial Sequence: Synthetic oligonucleotide
aucugcaggacagaguagc

SEQ ID NO: 1888688 - RNA, 19 nt, Artificial Sequence
  Description of Artificial Sequence: Synthetic oligonucleotide
ugugccauccucuguauca

SEQ ID NO: 1888689 - RNA, 19 nt, Artificial Sequence
  Description of Artificial Sequence: Synthetic oligonucleotide
uaugggaucuucuucccug

SEQ ID NO: 1888690 - RNA, 19 nt, Artificial Sequence
  Description of Artificial Sequence: Synthetic oligonucleotide
uauaauaauccagaggcuu

SEQ ID NO: 1888691 - RNA, 19 nt, Artificial Sequence
  Description of Artificial Sequence: Synthetic oligonucleotide
gaacacgagauucuucacc

SEQ ID NO: 1888692 - RNA, 19 nt, Artificial Sequence
  Description of Artificial Sequence: Synthetic oligonucleotide
uuuccauagggguugguac

SEQ ID NO: 1888693 - RNA, 19 nt, Artificial Sequence
  Description of Artificial Sequence: Synthetic oligonucleotide
cauugcuuggaccaucugc

SEQ ID NO: 1888694 - RNA, 19 nt, Artificial Sequence
  Description of Artificial Sequence: Synthetic oligonucleotide
ugggguuggcauaacaggc

SEQ ID NO: 1888695 - RNA, 19 nt, Artificial Sequence
  Description of Artificial Sequence: Synthetic oligonucleotide
augaauguaaucccuuaca

SEQ ID NO: 1888696 - RNA, 19 nt, Artificial Sequence
  Description of Artificial Sequence: Synthetic oligonucleotide
gaacuuggacuuuccauag

SEQ ID NO: 1888697 - RNA, 19 nt, Artificial Sequence
  Description of Artificial Sequence: Synthetic oligonucleotide
guaaggaggucuuuaggcc

SEQ ID NO: 1888698 - RNA, 19 nt, Artificial Sequence
  Description of Artificial Sequence: Synthetic oligonucleotide
uccucuguaucauagucac

SEQ ID NO: 1888699 - RNA, 19 nt, Artificial Sequence
  Description of Artificial Sequence: Synthetic oligonucleotide
gauugaaguagcguagcag

SEQ ID NO: 1888700 - RNA, 19 nt, Artificial Sequence
  Description of Artificial Sequence: Synthetic oligonucleotide
ugcgauguggcccuucgcc

SEQ ID NO: 1888701 - RNA, 19 nt, Artificial Sequence
  Description of Artificial Sequence: Synthetic oligonucleotide
ucguaaggaggucuuuagg

SEQ ID NO: 1888702 - RNA, 19 nt, Artificial Sequence
  Description of Artificial Sequence: Synthetic oligonucleotide
agaacuuggacuuuccaua

SEQ ID NO: 1888703 - RNA, 19 nt, Artificial Sequence
  Description of Artificial Sequence: Synthetic oligonucleotide
uguaaucccuuacaccugu

SEQ ID NO: 1888704 - RNA, 19 nt, Artificial Sequence
  Description of Artificial Sequence: Synthetic oligonucleotide
uaauccagaggcuucugca

SEQ ID NO: 1888705 - RNA, 19 nt, Artificial Sequence
  Description of Artificial Sequence: Synthetic oligonucleotide
acagccuuaaagcugugcu

SEQ ID NO: 1888706 - RNA, 19 nt, Artificial Sequence
  Description of Artificial Sequence: Synthetic oligonucleotide
aaccacauugcuccuucag

SEQ ID NO: 1888707 - RNA, 19 nt, Artificial Sequence
  Description of Artificial Sequence: Synthetic oligonucleotide
auaauaauccagaggcuuc

SEQ ID NO: 1888708 - RNA, 19 nt, Artificial Sequence
  Description of Artificial Sequence: Synthetic oligonucleotide
uucguaaggaggucuuuag

SEQ ID NO: 1888709 - RNA, 19 nt, Artificial Sequence
  Description of Artificial Sequence: Synthetic oligonucleotide
gaaggguucugcuucugcc

SEQ ID NO: 1888710 - RNA, 19 nt, Artificial Sequence
  Description of Artificial Sequence: Synthetic oligonucleotide
ucuuaaagaggugcuguag

SEQ ID NO: 1888711 - RNA, 19 nt, Artificial Sequence
  Description of Artificial Sequence: Synthetic oligonucleotide
ggcauuauggaaguugucg

SEQ ID NO: 1888712 - RNA, 19 nt, Artificial Sequence
  Description of Artificial Sequence: Synthetic oligonucleotide
auaacaggcugccacguca

SEQ ID NO: 1888713 - RNA, 19 nt, Artificial Sequence
  Description of Artificial Sequence: Synthetic oligonucleotide
uucaaggcugcgauguggc

SEQ ID NO: 1888714 - RNA, 19 nt, Artificial Sequence
  Description of Artificial Sequence: Synthetic oligonucleotide
cauagucaccaccaaagac

SEQ ID NO: 1888715 - RNA, 19 nt, Artificial Sequence
  Description of Artificial Sequence: Synthetic oligonucleotide
cugggguuggcauaacagg

SEQ ID NO: 1888716 - RNA, 19 nt, Artificial Sequence
  Description of Artificial Sequence: Synthetic oligonucleotide
uaaggaggucuuuaggccu

SEQ ID NO: 1888717 - RNA, 19 nt, Artificial Sequence
  Description of Artificial Sequence: Synthetic oligonucleotide
ggagacauagggcaugagg

SEQ ID NO: 1888718 - RNA, 19 nt, Artificial Sequence
  Description of Artificial Sequence: Synthetic oligonucleotide
uggcauaacaggcugccac

SEQ ID NO: 1888719 - RNA, 19 nt, Artificial Sequence
  Description of Artificial Sequence: Synthetic oligonucleotide
uaaucccuuacaccugugc

SEQ ID NO: 1888720 - RNA, 19 nt, Artificial Sequence
  Description of Artificial Sequence: Synthetic oligonucleotide
ugguccaagauguccaucu

SEQ ID NO: 1888721 - RNA, 19 nt, Artificial Sequence
  Description of Artificial Sequence: Synthetic oligonucleotide
aggucuuuaggccugugcu

SEQ ID NO: 1888722 - RNA, 19 nt, Artificial Sequence
  Description of Artificial Sequence: Synthetic oligonucleotide
ggaucuucuucccugaagc

SEQ ID NO: 1888723 - RNA, 19 nt, Artificial Sequence
  Description of Artificial Sequence: Synthetic oligonucleotide
uugaaguagcguagcagca

SEQ ID NO: 1888724 - RNA, 19 nt, Artificial Sequence
  Description of Artificial Sequence: Synthetic oligonucleotide
auagggguugguacaaccc

SEQ ID NO: 1888725 - RNA, 19 nt, Artificial Sequence
  Description of Artificial Sequence: Synthetic oligonucleotide
cugaacacgagauucuuca

SEQ ID NO: 1888726 - RNA, 19 nt, Artificial Sequence
  Description of Artificial Sequence: Synthetic oligonucleotide
cuuggacuuuccauagggg

SEQ ID NO: 1888727 - RNA, 19 nt, Artificial Sequence
  Description of Artificial Sequence: Synthetic oligonucleotide
agguuguagauccggcaac

SEQ ID NO: 1888728 - RNA, 19 nt, Artificial Sequence
  Description of Artificial Sequence: Synthetic oligonucleotide
ucugccagcgccauagauc

SEQ ID NO: 1888729 - RNA, 19 nt, Artificial Sequence
  Description of Artificial Sequence: Synthetic oligonucleotide
guggccgucagcuuggccc

SEQ ID NO: 1888730 - RNA, 19 nt, Artificial Sequence
  Description of Artificial Sequence: Synthetic oligonucleotide
cacgagauucuucaccccg

SEQ ID NO: 1888731 - RNA, 19 nt, Artificial Sequence
  Description of Artificial Sequence: Synthetic oligonucleotide
uguugagguaggguggccg

SEQ ID NO: 1888732 - RNA, 19 nt, Artificial Sequence
  Description of Artificial Sequence: Synthetic oligonucleotide
cauagggguugguacaacc

SEQ ID NO: 1888733 - RNA, 19 nt, Artificial Sequence
  Description of Artificial Sequence: Synthetic oligonucleotide
gacugagcuguugagguag

SEQ ID NO: 1888734 - RNA, 19 nt, Artificial Sequence
  Description of Artificial Sequence: Synthetic oligonucleotide
uccaguaccguguggcugc

SEQ ID NO: 1888735 - RNA, 19 nt, Artificial Sequence
  Description of Artificial Sequence: Synthetic oligonucleotide
uuuugguccuucguaagga

SEQ ID NO: 1888736 - RNA, 19 nt, Artificial Sequence
  Description of Artificial Sequence: Synthetic oligonucleotide
caugaauguaaucccuuac

SEQ ID NO: 1888737 - RNA, 19 nt, Artificial Sequence
  Description of Artificial Sequence: Synthetic oligonucleotide
aguagcguagcagcacugc

SEQ ID NO: 1888738 - RNA, 19 nt, Artificial Sequence
  Description of Artificial Sequence: Synthetic oligonucleotide
ucccuguuagguuaacucu

SEQ ID NO: 1888739 - RNA, 19 nt, Artificial Sequence
  Description of Artificial Sequence: Synthetic oligonucleotide
gauucuucaccccgugggc

SEQ ID NO: 1888740 - RNA, 19 nt, Artificial Sequence
  Description of Artificial Sequence: Synthetic oligonucleotide
agcgccauagaucuucaca

SEQ ID NO: 1888741 - RNA, 19 nt, Artificial Sequence
  Description of Artificial Sequence: Synthetic oligonucleotide
uuguagauccggcaaccac

SEQ ID NO: 1888742 - RNA, 19 nt, Artificial Sequence
  Description of Artificial Sequence: Synthetic oligonucleotide
agacauucagggccucucg

SEQ ID NO: 1888743 - RNA, 19 nt, Artificial Sequence
  Description of Artificial Sequence: Synthetic oligonucleotide
uacaggguucuguggaugc

SEQ ID NO: 1888744 - RNA, 19 nt, Artificial Sequence
  Description of Artificial Sequence: Synthetic oligonucleotide
cuggggauucccauacacg

SEQ ID NO: 1888745 - RNA, 19 nt, Artificial Sequence
  Description of Artificial Sequence: Synthetic oligonucleotide
uaauaauccagaggcuucu

SEQ ID NO: 1888746 - RNA, 19 nt, Artificial Sequence
  Description of Artificial Sequence: Synthetic oligonucleotide
uccaccacaugaauguaau

SEQ ID NO: 1888747 - RNA, 19 nt, Artificial Sequence
  Description of Artificial Sequence: Synthetic oligonucleotide
ucgcccaauugccaccugg

SEQ ID NO: 1888748 - RNA, 19 nt, Artificial Sequence
  Description of Artificial Sequence: Synthetic oligonucleotide
guagcguagcagcacugcg

SEQ ID NO: 1888749 - RNA, 19 nt, Artificial Sequence
  Description of Artificial Sequence: Synthetic oligonucleotide
uggggauccucgccgaugc

SEQ ID NO: 1888750 - RNA, 19 nt, Artificial Sequence
  Description of Artificial Sequence: Synthetic oligonucleotide
cauggaauccccuccacga

SEQ ID NO: 1888751 - RNA, 19 nt, Artificial Sequence
  Description of Artificial Sequence: Synthetic oligonucleotide
ucugcaggacagaguagcc

SEQ ID NO: 1888752 - RNA, 19 nt, Artificial Sequence
  Description of Artificial Sequence: Synthetic oligonucleotide
cagauccaccacaugaaug

SEQ ID NO: 1888753 - RNA, 19 nt, Artificial Sequence
  Description of Artificial Sequence: Synthetic oligonucleotide
agcaugaggguacaggguu

SEQ ID NO: 1888754 - RNA, 19 nt, Artificial Sequence
  Description of Artificial Sequence: Synthetic oligonucleotide
augagguuguuggggacgc

SEQ ID NO: 1888755 - RNA, 19 nt, Artificial Sequence
  Description of Artificial Sequence: Synthetic oligonucleotide
cucucgucgcccaauugcc

SEQ ID NO: 1888756 - RNA, 19 nt, Artificial Sequence
  Description of Artificial Sequence: Synthetic oligonucleotide
aggggcguagccugccucc

SEQ ID NO: 1888757 - RNA, 19 nt, Artificial Sequence
  Description of Artificial Sequence: Synthetic oligonucleotide
aucccuuacaccugugcca

SEQ ID NO: 1888758 - RNA, 19 nt, Artificial Sequence
  Description of Artificial Sequence: Synthetic oligonucleotide
gagacauagggcaugaggu

SEQ ID NO: 1888759 - RNA, 19 nt, Artificial Sequence
  Description of Artificial Sequence: Synthetic oligonucleotide
guuagguuaacucuauaau

SEQ ID NO: 1888760 - RNA, 19 nt, Artificial Sequence
  Description of Artificial Sequence: Synthetic oligonucleotide
gauucccauacacgguggc

SEQ ID NO: 1888761 - RNA, 19 nt, Artificial Sequence
  Description of Artificial Sequence: Synthetic oligonucleotide
uggauggucccuguuaggu

SEQ ID NO: 1888762 - RNA, 19 nt, Artificial Sequence
  Description of Artificial Sequence: Synthetic oligonucleotide
cuucaaggcugcgaugugg

SEQ ID NO: 1888763 - RNA, 19 nt, Artificial Sequence
  Description of Artificial Sequence: Synthetic oligonucleotide
gauggucccuguuagguua

SEQ ID NO: 1888764 - RNA, 19 nt, Artificial Sequence
  Description of Artificial Sequence: Synthetic oligonucleotide
caauguagccagcuccgcc

SEQ ID NO: 1888765 - RNA, 19 nt, Artificial Sequence
  Description of Artificial Sequence: Synthetic oligonucleotide
agguuaacucuauaauaau

SEQ ID NO: 1888766 - RNA, 19 nt, Artificial Sequence
  Description of Artificial Sequence: Synthetic oligonucleotide
gaagaacuuggacuuucca

SEQ ID NO: 1888767 - RNA, 19 nt, Artificial Sequence
  Description of Artificial Sequence: Synthetic oligonucleotide
gucccuguuagguuaacuc

SEQ ID NO: 1888768 - RNA, 19 nt, Artificial Sequence
  Description of Artificial Sequence: Synthetic oligonucleotide
caugagguuguuggggacg

SEQ ID NO: 1888769 - RNA, 19 nt, Artificial Sequence
  Description of Artificial Sequence: Synthetic oligonucleotide
uaaagcugugcuucuuaaa

SEQ ID NO: 1888770 - RNA, 19 nt, Artificial Sequence
  Description of Artificial Sequence: Synthetic oligonucleotide
ugaaguagcguagcagcac

SEQ ID NO: 1888771 - RNA, 19 nt, Artificial Sequence
  Description of Artificial Sequence: Synthetic oligonucleotide
uucuucaccccgugggccc

SEQ ID NO: 1888772 - RNA, 19 nt, Artificial Sequence
  Description of Artificial Sequence: Synthetic oligonucleotide
uggggugggccucauccag

SEQ ID NO: 1888773 - RNA, 19 nt, Artificial Sequence
  Description of Artificial Sequence: Synthetic oligonucleotide
uagcguagcagcacugcgu

SEQ ID NO: 1888774 - RNA, 19 nt, Artificial Sequence
  Description of Artificial Sequence: Synthetic oligonucleotide
aaguggaugacagccuuaa

SEQ ID NO: 1888775 - RNA, 19 nt, Artificial Sequence
  Description of Artificial Sequence: Synthetic oligonucleotide
gaugcggccagaggcgugg

SEQ ID NO: 1888776 - RNA, 19 nt, Artificial Sequence
  Description of Artificial Sequence: Synthetic oligonucleotide
augaccacaggggcguagc

SEQ ID NO: 1888777 - RNA, 19 nt, Artificial Sequence
  Description of Artificial Sequence: Synthetic oligonucleotide
caccgacucgcccacagcc

SEQ ID NO: 1888778 - RNA, 19 nt, Artificial Sequence
  Description of Artificial Sequence: Synthetic oligonucleotide
ccucaugaucuccagaagc

SEQ ID NO: 1888779 - RNA, 19 nt, Artificial Sequence
  Description of Artificial Sequence: Synthetic oligonucleotide
gauccggcaaccacauugc

SEQ ID NO: 1888780 - RNA, 19 nt, Artificial Sequence
  Description of Artificial Sequence: Synthetic oligonucleotide
ggacagaguagccugugcc

SEQ ID NO: 1888781 - RNA, 19 nt, Artificial Sequence
  Description of Artificial Sequence: Synthetic oligonucleotide
ugaacacgagauucuucac

SEQ ID NO: 1888782 - RNA, 19 nt, Artificial Sequence
  Description of Artificial Sequence: Synthetic oligonucleotide
caggcauggaauccccucc

SEQ ID NO: 1888783 - RNA, 19 nt, Artificial Sequence
  Description of Artificial Sequence: Synthetic oligonucleotide
guggcccuucgccagaucc

SEQ ID NO: 1888784 - RNA, 19 nt, Artificial Sequence
  Description of Artificial Sequence: Synthetic oligonucleotide
gguuaacucuauaauaauc

SEQ ID NO: 1888785 - RNA, 19 nt, Artificial Sequence
  Description of Artificial Sequence: Synthetic oligonucleotide
caaggcugcgauguggccc

SEQ ID NO: 1888786 - RNA, 19 nt, Artificial Sequence
  Description of Artificial Sequence: Synthetic oligonucleotide
agcuguugagguagggugg

SEQ ID NO: 1888787 - RNA, 19 nt, Artificial Sequence
  Description of Artificial Sequence: Synthetic oligonucleotide
ucuucaaggcugcgaugug

SEQ ID NO: 1888788 - RNA, 19 nt, Artificial Sequence
  Description of Artificial Sequence: Synthetic oligonucleotide
gaggcgugggcacccgugg

SEQ ID NO: 1888789 - RNA, 19 nt, Artificial Sequence
  Description of Artificial Sequence: Synthetic oligonucleotide
gucgaugaccacaggggcg

SEQ ID NO: 1888790 - RNA, 19 nt, Artificial Sequence
  Description of Artificial Sequence: Synthetic oligonucleotide
guuggggacgcccugggga

SEQ ID NO: 1888791 - RNA, 19 nt, Artificial Sequence
  Description of Artificial Sequence: Synthetic oligonucleotide
gagguuguuggggacgccc

SEQ ID NO: 1888792 - RNA, 19 nt, Artificial Sequence
  Description of Artificial Sequence: Synthetic oligonucleotide
aguaccguguggcugccaa

SEQ ID NO: 1888793 - RNA, 19 nt, Artificial Sequence
  Description of Artificial Sequence: Synthetic oligonucleotide
gaaucugcccggcacaggu

SEQ ID NO: 1888794 - RNA, 19 nt, Artificial Sequence
  Description of Artificial Sequence: Synthetic oligonucleotide
uuggaccaucugcaggaca

SEQ ID NO: 1888795 - RNA, 19 nt, Artificial Sequence
  Description of Artificial Sequence: Synthetic oligonucleotide
gcauuauggaaguugucga

SEQ ID NO: 1888796 - RNA, 19 nt, Artificial Sequence
  Description of Artificial Sequence: Synthetic oligonucleotide
gaaguagcguagcagcacu

SEQ ID NO: 1888797 - RNA, 19 nt, Artificial Sequence
  Description of Artificial Sequence: Synthetic oligonucleotide
cucgucgcccaauugccac

SEQ ID NO: 1888798 - RNA, 19 nt, Artificial Sequence
  Description of Artificial Sequence: Synthetic oligonucleotide
agccuucuccauugcuugg

SEQ ID NO: 1888799 - RNA, 19 nt, Artificial Sequence
  Description of Artificial Sequence: Synthetic oligonucleotide
ucucgucgcccaauugcca

SEQ ID NO: 1888800 - RNA, 19 nt, Artificial Sequence
  Description of Artificial Sequence: Synthetic oligonucleotide
guagccugugccugugccc

SEQ ID NO: 1888801 - RNA, 19 nt, Artificial Sequence
  Description of Artificial Sequence: Synthetic oligonucleotide
uucugccagcgccauagau

SEQ ID NO: 1888802 - RNA, 19 nt, Artificial Sequence
  Description of Artificial Sequence: Synthetic oligonucleotide
aguugucgaugaccacagg

SEQ ID NO: 1888803 - RNA, 19 nt, Artificial Sequence
  Description of Artificial Sequence: Synthetic oligonucleotide
aaacuccacagagcggccu

SEQ ID NO: 1888804 - RNA, 19 nt, Artificial Sequence
  Description of Artificial Sequence: Synthetic oligonucleotide
accccgugggcccucauga

SEQ ID NO: 1888805 - RNA, 19 nt, Artificial Sequence
  Description of Artificial Sequence: Synthetic oligonucleotide
gcauggaauccccuccacg

SEQ ID NO: 1888806 - RNA, 19 nt, Artificial Sequence
  Description of Artificial Sequence: Synthetic oligonucleotide
gacagaguagccugugccu

SEQ ID NO: 1888807 - RNA, 19 nt, Artificial Sequence
  Description of Artificial Sequence: Synthetic oligonucleotide
uggccgucagcuuggcccc

SEQ ID NO: 1888808 - RNA, 19 nt, Artificial Sequence
  Description of Artificial Sequence: Synthetic oligonucleotide
ucgccgaugcggccagagg

SEQ ID NO: 1888809 - RNA, 19 nt, Artificial Sequence
  Description of Artificial Sequence: Synthetic oligonucleotide
aaucugcccggcacagguc

SEQ ID NO: 1888810 - RNA, 19 nt, Artificial Sequence
  Description of Artificial Sequence: Synthetic oligonucleotide
caucuccucgaugaagaac

SEQ ID NO: 1888811 - RNA, 19 nt, Artificial Sequence
  Description of Artificial Sequence: Synthetic oligonucleotide
guggcugccaauguagcca

SEQ ID NO: 1888812 - RNA, 19 nt, Artificial Sequence
  Description of Artificial Sequence: Synthetic oligonucleotide
cccaauugccaccugggag

SEQ ID NO: 1888813 - RNA, 19 nt, Artificial Sequence
  Description of Artificial Sequence: Synthetic oligonucleotide
ucuuuaggccugugcucca

SEQ ID NO: 1888814 - RNA, 19 nt, Artificial Sequence
  Description of Artificial Sequence: Synthetic oligonucleotide
cuauaauaauccagaggcu

SEQ ID NO: 1888815 - RNA, 19 nt, Artificial Sequence
  Description of Artificial Sequence: Synthetic oligonucleotide
aaguagcguagcagcacug

SEQ ID NO: 1888816 - RNA, 19 nt, Artificial Sequence
  Description of Artificial Sequence: Synthetic oligonucleotide
ucccuuacaccugugccau

SEQ ID NO: 1888817 - RNA, 19 nt, Artificial Sequence
  Description of Artificial Sequence: Synthetic oligonucleotide
uggcccuucgccagaucca

SEQ ID NO: 1888818 - RNA, 19 nt, Artificial Sequence
  Description of Artificial Sequence: Synthetic oligonucleotide
uccuucguaaggaggucuu

SEQ ID NO: 1888819 - RNA, 19 nt, Artificial Sequence
  Description of Artificial Sequence: Synthetic oligonucleotide
ccaauugccaccugggaga

SEQ ID NO: 1888820 - RNA, 19 nt, Artificial Sequence
  Description of Artificial Sequence: Synthetic oligonucleotide
ccucucgucgcccaauugc

SEQ ID NO: 1888821 - RNA, 19 nt, Artificial Sequence
  Description of Artificial Sequence: Synthetic oligonucleotide
gacgcccuggggauccucg

SEQ ID NO: 1888822 - RNA, 19 nt, Artificial Sequence
  Description of Artificial Sequence: Synthetic oligonucleotide
cugccagcgccauagaucu

SEQ ID NO: 1888823 - RNA, 19 nt, Artificial Sequence
  Description of Artificial Sequence: Synthetic oligonucleotide
ucgucgcccaauugccacc

SEQ ID NO: 1888824 - RNA, 19 nt, Artificial Sequence
  Description of Artificial Sequence: Synthetic oligonucleotide
gccaauguagccagcuccg

SEQ ID NO: 1888825 - RNA, 19 nt, Artificial Sequence
  Description of Artificial Sequence: Synthetic oligonucleotide
ugcccagguuguagauccg

SEQ ID NO: 1888826 - RNA, 19 nt, Artificial Sequence
  Description of Artificial Sequence: Synthetic oligonucleotide
auggaauccccuccacgaa

SEQ ID NO: 1888827 - RNA, 19 nt, Artificial Sequence
  Description of Artificial Sequence: Synthetic oligonucleotide
auacacgguggcugagcug

SEQ ID NO: 1888828 - RNA, 19 nt, Artificial Sequence
  Description of Artificial Sequence: Synthetic oligonucleotide
cauaacaggcugccacguc

SEQ ID NO: 1888829 - RNA, 19 nt, Artificial Sequence
  Description of Artificial Sequence: Synthetic oligonucleotide
uuggggacgcccuggggau

SEQ ID NO: 1888830 - RNA, 19 nt, Artificial Sequence
  Description of Artificial Sequence: Synthetic oligonucleotide
auguaaucccuuacaccug

SEQ ID NO: 1888831 - RNA, 19 nt, Artificial Sequence
  Description of Artificial Sequence: Synthetic oligonucleotide
cagguuguagauccggcaa

SEQ ID NO: 1888832 - RNA, 19 nt, Artificial Sequence
  Description of Artificial Sequence: Synthetic oligonucleotide
cauccagaggcagguacug

SEQ ID NO: 1888833 - RNA, 19 nt, Artificial Sequence
  Description of Artificial Sequence: Synthetic oligonucleotide
cuguggaugcuggaaagca

SEQ ID NO: 1888834 - RNA, 19 nt, Artificial Sequence
  Description of Artificial Sequence: Synthetic oligonucleotide
auucccauacacgguggcu

SEQ ID NO: 1888835 - RNA, 19 nt, Artificial Sequence
  Description of Artificial Sequence: Synthetic oligonucleotide
guacaggguucuguggaug

SEQ ID NO: 1888836 - RNA, 19 nt, Artificial Sequence
  Description of Artificial Sequence: Synthetic oligonucleotide
acgguggcugagcugcuga

SEQ ID NO: 1888837 - RNA, 19 nt, Artificial Sequence
  Description of Artificial Sequence: Synthetic oligonucleotide
gcugcgauguggcccuucg

SEQ ID NO: 1888838 - RNA, 19 nt, Artificial Sequence
  Description of Artificial Sequence: Synthetic oligonucleotide
aaaguggaugacagccuua

SEQ ID NO: 1888839 - RNA, 19 nt, Artificial Sequence
  Description of Artificial Sequence: Synthetic oligonucleotide
ggauugaaguagcguagca

SEQ ID NO: 1888840 - RNA, 19 nt, Artificial Sequence
  Description of Artificial Sequence: Synthetic oligonucleotide
ucugcccggcacagguccc

SEQ ID NO: 1888841 - RNA, 19 nt, Artificial Sequence
  Description of Artificial Sequence: Synthetic oligonucleotide
gauccucgccgaugcggcc

SEQ ID NO: 1888842 - RNA, 19 nt, Artificial Sequence
  Description of Artificial Sequence: Synthetic oligonucleotide
uccucgccgaugcggccag

SEQ ID NO: 1888843 - RNA, 19 nt, Artificial Sequence
  Description of Artificial Sequence: Synthetic oligonucleotide
ggaugacagccuuaaagcu

SEQ ID NO: 1888844 - RNA, 19 nt, Artificial Sequence
  Description of Artificial Sequence: Synthetic oligonucleotide
auagaucuucacacauccu

SEQ ID NO: 1888845 - RNA, 19 nt, Artificial Sequence
  Description of Artificial Sequence: Synthetic oligonucleotide
aggcgugggcacccguggg

SEQ ID NO: 1888846 - RNA, 19 nt, Artificial Sequence
  Description of Artificial Sequence: Synthetic oligonucleotide
gacauucagggccucucgu

SEQ ID NO: 1888847 - RNA, 19 nt, Artificial Sequence
  Description of Artificial Sequence: Synthetic oligonucleotide
cuccaguaccguguggcug

SEQ ID NO: 1888848 - RNA, 19 nt, Artificial Sequence
  Description of Artificial Sequence: Synthetic oligonucleotide
ggaauccccuccacgaaug

SEQ ID NO: 1888849 - RNA, 19 nt, Artificial Sequence
  Description of Artificial Sequence: Synthetic oligonucleotide
ggauucccauacacggugg

SEQ ID NO: 1888850 - RNA, 19 nt, Artificial Sequence
  Description of Artificial Sequence: Synthetic oligonucleotide
cuccacgaauggcauuaug

SEQ ID NO: 1888851 - RNA, 19 nt, Artificial Sequence
  Description of Artificial Sequence: Synthetic oligonucleotide
uuggcauaacaggcugcca

SEQ ID NO: 1888852 - RNA, 19 nt, Artificial Sequence
  Description of Artificial Sequence: Synthetic oligonucleotide
cauuauggaaguugucgau

SEQ ID NO: 1888853 - RNA, 19 nt, Artificial Sequence
  Description of Artificial Sequence: Synthetic oligonucleotide
ccauagaucuucacacauc

SEQ ID NO: 1888854 - RNA, 19 nt, Artificial Sequence
  Description of Artificial Sequence: Synthetic oligonucleotide
ggcuucugcaccgacucgc

SEQ ID NO: 1888855 - RNA, 19 nt, Artificial Sequence
  Description of Artificial Sequence: Synthetic oligonucleotide
ccacgaauggcauuaugga

SEQ ID NO: 1888856 - RNA, 19 nt, Artificial Sequence
  Description of Artificial Sequence: Synthetic oligonucleotide
uccccuccacgaauggcau

SEQ ID NO: 1888857 - RNA, 19 nt, Artificial Sequence
  Description of Artificial Sequence: Synthetic oligonucleotide
gcaaccacauugcuccuuc

SEQ ID NO: 1888858 - RNA, 19 nt, Artificial Sequence
  Description of Artificial Sequence: Synthetic oligonucleotide
agaguagccugugccugug

SEQ ID NO: 1888859 - RNA, 19 nt, Artificial Sequence
  Description of Artificial Sequence: Synthetic oligonucleotide
aguggaugacagccuuaaa

SEQ ID NO: 1888860 - RNA, 19 nt, Artificial Sequence
  Description of Artificial Sequence: Synthetic oligonucleotide
ucgccagauccaccacaug

SEQ ID NO: 1888861 - RNA, 19 nt, Artificial Sequence
  Description of Artificial Sequence: Synthetic oligonucleotide
caggcucucaggcauggaa

SEQ ID NO: 1888862 - RNA, 19 nt, Artificial Sequence
  Description of Artificial Sequence: Synthetic oligonucleotide
cugccaauguagccagcuc

SEQ ID NO: 1888863 - RNA, 19 nt, Artificial Sequence
  Description of Artificial Sequence: Synthetic oligonucleotide
ugacagccuuaaagcugug

SEQ ID NO: 1888864 - RNA, 19 nt, Artificial Sequence
  Description of Artificial Sequence: Synthetic oligonucleotide
acgagauucuucaccccgu

SEQ ID NO: 1888865 - RNA, 19 nt, Artificial Sequence
  Description of Artificial Sequence: Synthetic oligonucleotide
caccuuguaugggaucuuc

SEQ ID NO: 1888866 - RNA, 19 nt, Artificial Sequence
  Description of Artificial Sequence: Synthetic oligonucleotide
gcagguacuggggauuccc

SEQ ID NO: 1888867 - RNA, 19 nt, Artificial Sequence
  Description of Artificial Sequence: Synthetic oligonucleotide
cauacacgguggcugagcu

SEQ ID NO: 1888868 - RNA, 19 nt, Artificial Sequence
  Description of Artificial Sequence: Synthetic oligonucleotide
accuucccgccgugccacc

SEQ ID NO: 1888869 - RNA, 19 nt, Artificial Sequence
  Description of Artificial Sequence: Synthetic oligonucleotide
ggauccucgccgaugcggc

SEQ ID NO: 1888870 - RNA, 19 nt, Artificial Sequence
  Description of Artificial Sequence: Synthetic oligonucleotide
guugagguaggguggccgu

SEQ ID NO: 1888871 - RNA, 19 nt, Artificial Sequence
  Description of Artificial Sequence: Synthetic oligonucleotide
aggcucucaggcauggaau

SEQ ID NO: 1888872 - RNA, 19 nt, Artificial Sequence
  Description of Artificial Sequence: Synthetic oligonucleotide
cuucguaaggaggucuuua

SEQ ID NO: 1888873 - RNA, 19 nt, Artificial Sequence
  Description of Artificial Sequence: Synthetic oligonucleotide
cuuggccccagagcaugag

SEQ ID NO: 1888874 - RNA, 19 nt, Artificial Sequence
  Description of Artificial Sequence: Synthetic oligonucleotide
guaaucccuuacaccugug

SEQ ID NO: 1888875 - RNA, 19 nt, Artificial Sequence
  Description of Artificial Sequence: Synthetic oligonucleotide
ggcguagccugccuccagc

SEQ ID NO: 1888876 - RNA, 19 nt, Artificial Sequence
  Description of Artificial Sequence: Synthetic oligonucleotide
gguacuggggauucccaua

SEQ ID NO: 1888877 - RNA, 19 nt, Artificial Sequence
  Description of Artificial Sequence: Synthetic oligonucleotide
agaggcgugggcacccgug

SEQ ID NO: 1888878 - RNA, 19 nt, Artificial Sequence
  Description of Artificial Sequence: Synthetic oligonucleotide
caaagccugaaggguucug

SEQ ID NO: 1888879 - RNA, 19 nt, Artificial Sequence
  Description of Artificial Sequence: Synthetic oligonucleotide
uugagguaggguggccguc

SEQ ID NO: 1888880 - RNA, 19 nt, Artificial Sequence
  Description of Artificial Sequence: Synthetic oligonucleotide
ggccgaaucugcccggcac

SEQ ID NO: 1888881 - RNA, 19 nt, Artificial Sequence
  Description of Artificial Sequence: Synthetic oligonucleotide
cugcgauguggcccuucgc

SEQ ID NO: 1888882 - RNA, 19 nt, Artificial Sequence
  Description of Artificial Sequence: Synthetic oligonucleotide
cucgccgaugcggccagag

SEQ ID NO: 1888883 - RNA, 19 nt, Artificial Sequence
  Description of Artificial Sequence: Synthetic oligonucleotide
cugccacgucaccuucccg

SEQ ID NO: 1888884 - RNA, 19 nt, Artificial Sequence
  Description of Artificial Sequence: Synthetic oligonucleotide
acaggggcguagccugccu

SEQ ID NO: 1888885 - RNA, 19 nt, Artificial Sequence
  Description of Artificial Sequence: Synthetic oligonucleotide
cagaggcuucugcaccgac

SEQ ID NO: 1888886 - RNA, 19 nt, Artificial Sequence
  Description of Artificial Sequence: Synthetic oligonucleotide
gcucucaggcauggaaucc

SEQ ID NO: 1888887 - RNA, 19 nt, Artificial Sequence
  Description of Artificial Sequence: Synthetic oligonucleotide
cuguugagguaggguggcc

SEQ ID NO: 1888888 - RNA, 19 nt, Artificial Sequence
  Description of Artificial Sequence: Synthetic oligonucleotide
auccucgccgaugcggcca

SEQ ID NO: 1888889 - RNA, 19 nt, Artificial Sequence
  Description of Artificial Sequence: Synthetic oligonucleotide
cuggacccgccgcaggcuc

SEQ ID NO: 1888890 - RNA, 19 nt, Artificial Sequence
  Description of Artificial Sequence: Synthetic oligonucleotide
caccuucccgccgugccac

SEQ ID NO: 1888891 - RNA, 19 nt, Artificial Sequence
  Description of Artificial Sequence: Synthetic oligonucleotide
cuucccgccgugccaccac

SEQ ID NO: 1888892 - RNA, 19 nt, Artificial Sequence
  Description of Artificial Sequence: Synthetic oligonucleotide
gcccagguuguagauccgg

SEQ ID NO: 1888893 - RNA, 19 nt, Artificial Sequence
  Description of Artificial Sequence: Synthetic oligonucleotide
gccagcgccauagaucuuc

SEQ ID NO: 1888894 - RNA, 19 nt, Artificial Sequence
  Description of Artificial Sequence: Synthetic oligonucleotide
cgcccaauugccaccuggg

SEQ ID NO: 1888895 - RNA, 19 nt, Artificial Sequence
  Description of Artificial Sequence: Synthetic oligonucleotide
ccucuguaucauagucacc

SEQ ID NO: 1888896 - RNA, 19 nt, Artificial Sequence
  Description of Artificial Sequence: Synthetic oligonucleotide
gagcaugaggguacagggu

SEQ ID NO: 1888897 - RNA, 19 nt, Artificial Sequence
  Description of Artificial Sequence: Synthetic oligonucleotide
ggcauggaauccccuccac

SEQ ID NO: 1888898 - RNA, 19 nt, Artificial Sequence
  Description of Artificial Sequence: Synthetic oligonucleotide
gacucgcccacagccuuga

SEQ ID NO: 1888899 - RNA, 19 nt, Artificial Sequence
  Description of Artificial Sequence: Synthetic oligonucleotide
guagauccggcaaccacau

SEQ ID NO: 1888900 - RNA, 19 nt, Artificial Sequence
  Description of Artificial Sequence: Synthetic oligonucleotide
uagcgcugccugguccaag

SEQ ID NO: 1888901 - RNA, 19 nt, Artificial Sequence
  Description of Artificial Sequence: Synthetic oligonucleotide
ccgugggauugaaguagcg

SEQ ID NO: 1888902 - RNA, 19 nt, Artificial Sequence
  Description of Artificial Sequence: Synthetic oligonucleotide
cgccagauccaccacauga

SEQ ID NO: 1888903 - RNA, 19 nt, Artificial Sequence
  Description of Artificial Sequence: Synthetic oligonucleotide
gcugaacacgagauucuuc

SEQ ID NO: 1888904 - RNA, 19 nt, Artificial Sequence
  Description of Artificial Sequence: Synthetic oligonucleotide
caaccacauugcuccuuca

SEQ ID NO: 1888905 - RNA, 19 nt, Artificial Sequence
  Description of Artificial Sequence: Synthetic oligonucleotide
caggggcguagccugccuc

SEQ ID NO: 1888906 - RNA, 19 nt, Artificial Sequence
  Description of Artificial Sequence: Synthetic oligonucleotide
agccugugccugugcccag

SEQ ID NO: 1888907 - RNA, 19 nt, Artificial Sequence
  Description of Artificial Sequence: Synthetic oligonucleotide
aggccgaaucugcccggca

SEQ ID NO: 1888908 - RNA, 19 nt, Artificial Sequence
  Description of Artificial Sequence: Synthetic oligonucleotide
acugcguuccaggccgaau

SEQ ID NO: 1888909 - RNA, 19 nt, Artificial Sequence
  Description of Artificial Sequence: Synthetic oligonucleotide
cagcgccauagaucuucac

SEQ ID NO: 1888910 - RNA, 19 nt, Artificial Sequence
  Description of Artificial Sequence: Synthetic oligonucleotide
caggccgaaucugcccggc

SEQ ID NO: 1888911 - RNA, 19 nt, Artificial Sequence
  Description of Artificial Sequence: Synthetic oligonucleotide
ccauacacgguggcugagc

SEQ ID NO: 1888912 - RNA, 19 nt, Artificial Sequence
  Description of Artificial Sequence: Synthetic oligonucleotide
cacccgugggauugaagua

SEQ ID NO: 1888913 - RNA, 19 nt, Artificial Sequence
  Description of Artificial Sequence: Synthetic oligonucleotide
cccuguuagguuaacucua

SEQ ID NO: 1888914 - RNA, 19 nt, Artificial Sequence
  Description of Artificial Sequence: Synthetic oligonucleotide
uagauccggcaaccacauu

SEQ ID NO: 1888915 - RNA, 19 nt, Artificial Sequence
  Description of Artificial Sequence: Synthetic oligonucleotide
caugaggguacaggguucu

SEQ ID NO: 1888916 - RNA, 19 nt, Artificial Sequence
  Description of Artificial Sequence: Synthetic oligonucleotide
gccgaaucugcccggcaca

SEQ ID NO: 1888917 - RNA, 19 nt, Artificial Sequence
  Description of Artificial Sequence: Synthetic oligonucleotide
cugccugguccaagauguc

SEQ ID NO: 1888918 - RNA, 19 nt, Artificial Sequence
  Description of Artificial Sequence: Synthetic oligonucleotide
agcggccugucaguuccug

SEQ ID NO: 1888919 - RNA, 19 nt, Artificial Sequence
  Description of Artificial Sequence: Synthetic oligonucleotide
gccagauccaccacaugaa

SEQ ID NO: 1888920 - RNA, 19 nt, Artificial Sequence
  Description of Artificial Sequence: Synthetic oligonucleotide
ugcuucugccagcgccaua

SEQ ID NO: 1888921 - RNA, 19 nt, Artificial Sequence
  Description of Artificial Sequence: Synthetic oligonucleotide
ggcugggguuggcauaaca

SEQ ID NO: 1888922 - RNA, 19 nt, Artificial Sequence
  Description of Artificial Sequence: Synthetic oligonucleotide
guccuucguaaggaggucu

SEQ ID NO: 1888923 - RNA, 19 nt, Artificial Sequence
  Description of Artificial Sequence: Synthetic oligonucleotide
ccaauguagccagcuccgc

SEQ ID NO: 1888924 - RNA, 19 nt, Artificial Sequence
  Description of Artificial Sequence: Synthetic oligonucleotide
ccaggccgaaucugcccgg

SEQ ID NO: 1888925 - RNA, 19 nt, Artificial Sequence
  Description of Artificial Sequence: Synthetic oligonucleotide
ccacaugaauguaaucccu

SEQ ID NO: 1888926 - RNA, 19 nt, Artificial Sequence
  Description of Artificial Sequence: Synthetic oligonucleotide
cagaguagccugugccugu

SEQ ID NO: 1888927 - RNA, 19 nt, Artificial Sequence
  Description of Artificial Sequence: Synthetic oligonucleotide
gcccaauugccaccuggga

SEQ ID NO: 1888928 - RNA, 19 nt, Artificial Sequence
  Description of Artificial Sequence: Synthetic oligonucleotide
ggggauccucgccgaugcg

SEQ ID NO: 1888929 - RNA, 19 nt, Artificial Sequence
  Description of Artificial Sequence: Synthetic oligonucleotide
cacauugcuccuucagcuu

SEQ ID NO: 1888930 - RNA, 19 nt, Artificial Sequence
  Description of Artificial Sequence: Synthetic oligonucleotide
ggcccuucgccagauccac

SEQ ID NO: 1888931 - RNA, 19 nt, Artificial Sequence
  Description of Artificial Sequence: Synthetic oligonucleotide
cccgccgcaggcucucagg

SEQ ID NO: 1888932 - RNA, 19 nt, Artificial Sequence
  Description of Artificial Sequence: Synthetic oligonucleotide
ggcgugggcacccguggga

SEQ ID NO: 1888933 - RNA, 19 nt, Artificial Sequence
  Description of Artificial Sequence: Synthetic oligonucleotide
gguggccgucagcuuggcc

SEQ ID NO: 1888934 - RNA, 19 nt, Artificial Sequence
  Description of Artificial Sequence: Synthetic oligonucleotide
ccgaaucugcccggcacag

SEQ ID NO: 1888935 - RNA, 19 nt, Artificial Sequence
  Description of Artificial Sequence: Synthetic oligonucleotide
cugcaggacagaguagccu

SEQ ID NO: 1888936 - RNA, 19 nt, Artificial Sequence
  Description of Artificial Sequence: Synthetic oligonucleotide
cuccacagagcggccuguc

SEQ ID NO: 1888937 - RNA, 19 nt, Artificial Sequence
  Description of Artificial Sequence: Synthetic oligonucleotide
gccucucgucgcccaauug

SEQ ID NO: 1888938 - RNA, 19 nt, Artificial Sequence
  Description of Artificial Sequence: Synthetic oligonucleotide
ccggcacaggucccggacc

SEQ ID NO: 1888939 - RNA, 19 nt, Artificial Sequence
  Description of Artificial Sequence: Synthetic oligonucleotide
augcggccagaggcguggg

SEQ ID NO: 1888940 - RNA, 19 nt, Artificial Sequence
  Description of Artificial Sequence: Synthetic oligonucleotide
ccagcuccgccugugacca

SEQ ID NO: 1888941 - RNA, 19 nt, Artificial Sequence
  Description of Artificial Sequence: Synthetic oligonucleotide
gucgcccaauugccaccug

SEQ ID NO: 1888942 - RNA, 19 nt, Artificial Sequence
  Description of Artificial Sequence: Synthetic oligonucleotide
gcguagccugccuccagca

SEQ ID NO: 1888943 - RNA, 19 nt, Artificial Sequence
  Description of Artificial Sequence: Synthetic oligonucleotide
ggacugagcuguugaggua

SEQ ID NO: 1888944 - RNA, 19 nt, Artificial Sequence
  Description of Artificial Sequence: Synthetic oligonucleotide
gcaccgacucgcccacagc

SEQ ID NO: 1888945 - RNA, 19 nt, Artificial Sequence
  Description of Artificial Sequence: Synthetic oligonucleotide
aggcugggguuggcauaac

SEQ ID NO: 1888946 - RNA, 19 nt, Artificial Sequence
  Description of Artificial Sequence: Synthetic oligonucleotide
cccgugggcccucaugauc

SEQ ID NO: 1888947 - RNA, 19 nt, Artificial Sequence
  Description of Artificial Sequence: Synthetic oligonucleotide
agggccucucgucgcccaa

SEQ ID NO: 1888948 - RNA, 19 nt, Artificial Sequence
  Description of Artificial Sequence: Synthetic oligonucleotide
gggcguagccugccuccag

SEQ ID NO: 1888949 - RNA, 19 nt, Artificial Sequence
  Description of Artificial Sequence: Synthetic oligonucleotide
gggagacauagggcaugag

SEQ ID NO: 1888950 - RNA, 19 nt, Artificial Sequence
  Description of Artificial Sequence: Synthetic oligonucleotide
gggguuggcauaacaggcu

SEQ ID NO: 1888951 - RNA, 19 nt, Artificial Sequence
  Description of Artificial Sequence: Synthetic oligonucleotide
uugccaccugggagacaua

SEQ ID NO: 1888952 - RNA, 19 nt, Artificial Sequence
  Description of Artificial Sequence: Synthetic oligonucleotide
ccgugggcccucaugaucu

SEQ ID NO: 1888953 - RNA, 19 nt, Artificial Sequence
  Description of Artificial Sequence: Synthetic oligonucleotide
ccuucgccagauccaccac

SEQ ID NO: 1888954 - RNA, 19 nt, Artificial Sequence
  Description of Artificial Sequence: Synthetic oligonucleotide
ggauggucccuguuagguu

SEQ ID NO: 1888955 - RNA, 19 nt, Artificial Sequence
  Description of Artificial Sequence: Synthetic oligonucleotide
ccuguuagguuaacucuau

SEQ ID NO: 1888956 - RNA, 19 nt, Artificial Sequence
  Description of Artificial Sequence: Synthetic oligonucleotide
ccgccugugaccagcaccu

SEQ ID NO: 1888957 - RNA, 19 nt, Artificial Sequence
  Description of Artificial Sequence: Synthetic oligonucleotide
gcauaacaggcugccacgu

SEQ ID NO: 1888958 - RNA, 19 nt, Artificial Sequence
  Description of Artificial Sequence: Synthetic oligonucleotide
cugugcccagguuguagau

SEQ ID NO: 1888959 - RNA, 19 nt, Artificial Sequence
  Description of Artificial Sequence: Synthetic oligonucleotide
gaauggcauuauggaaguu

SEQ ID NO: 1888960 - RNA, 19 nt, Artificial Sequence
  Description of Artificial Sequence: Synthetic oligonucleotide
ccagagcaugaggguacag

SEQ ID NO: 1888961 - RNA, 19 nt, Artificial Sequence
  Description of Artificial Sequence: Synthetic oligonucleotide
ccagcgccauagaucuuca

SEQ ID NO: 1888962 - RNA, 19 nt, Artificial Sequence
  Description of Artificial Sequence: Synthetic oligonucleotide
guaccguguggcugccaau

SEQ ID NO: 1888963 - RNA, 19 nt, Artificial Sequence
  Description of Artificial Sequence: Synthetic oligonucleotide
ggucccuguuagguuaacu

SEQ ID NO: 1888964 - RNA, 19 nt, Artificial Sequence
  Description of Artificial Sequence: Synthetic oligonucleotide
cccauacacgguggcugag

SEQ ID NO: 1888965 - RNA, 19 nt, Artificial Sequence
  Description of Artificial Sequence: Synthetic oligonucleotide
guagcgcugccugguccaa

SEQ ID NO: 1888966 - RNA, 19 nt, Artificial Sequence
  Description of Artificial Sequence: Synthetic oligonucleotide
gccccagagcaugagggua

SEQ ID NO: 1888967 - RNA, 19 nt, Artificial Sequence
  Description of Artificial Sequence: Synthetic oligonucleotide
ggucuccugccuggaggac

SEQ ID NO: 1888968 - RNA, 19 nt, Artificial Sequence
  Description of Artificial Sequence: Synthetic oligonucleotide
ccagauccaccacaugaau

SEQ ID NO: 1888969 - RNA, 19 nt, Artificial Sequence
  Description of Artificial Sequence: Synthetic oligonucleotide
cuucaccccgugggcccuc

SEQ ID NO: 1888970 - RNA, 19 nt, Artificial Sequence
  Description of Artificial Sequence: Synthetic oligonucleotide
cgacucgcccacagccuug

SEQ ID NO: 1888971 - RNA, 19 nt, Artificial Sequence
  Description of Artificial Sequence: Synthetic oligonucleotide
ccgcaggcucucaggcaug

SEQ ID NO: 1888972 - RNA, 19 nt, Artificial Sequence
  Description of Artificial Sequence: Synthetic oligonucleotide
gcccuucgccagauccacc

SEQ ID NO: 1888973 - RNA, 19 nt, Artificial Sequence
  Description of Artificial Sequence: Synthetic oligonucleotide
cagcuuggccccagagcau

SEQ ID NO: 1888974 - RNA, 19 nt, Artificial Sequence
  Description of Artificial Sequence: Synthetic oligonucleotide
ggggcguagccugccucca

SEQ ID NO: 1888975 - RNA, 19 nt, Artificial Sequence
  Description of Artificial Sequence: Synthetic oligonucleotide
ccguguggcugccaaugua

SEQ ID NO: 1888976 - RNA, 19 nt, Artificial Sequence
  Description of Artificial Sequence: Synthetic oligonucleotide
cgaugcggccagaggcgug

SEQ ID NO: 1888977 - RNA, 19 nt, Artificial Sequence
  Description of Artificial Sequence: Synthetic oligonucleotide
cccuuacaccugugccauc

SEQ ID NO: 1888978 - RNA, 19 nt, Artificial Sequence
  Description of Artificial Sequence: Synthetic oligonucleotide
cccagagcaugaggguaca

SEQ ID NO: 1888979 - RNA, 19 nt, Artificial Sequence
  Description of Artificial Sequence: Synthetic oligonucleotide
caguaccguguggcugcca

SEQ ID NO: 1888980 - RNA, 19 nt, Artificial Sequence
  Description of Artificial Sequence: Synthetic oligonucleotide
cauagggcaugagguuguu

SEQ ID NO: 1888981 - RNA, 19 nt, Artificial Sequence
  Description of Artificial Sequence: Synthetic oligonucleotide
gacccgccgcaggcucuca

SEQ ID NO: 1888982 - RNA, 19 nt, Artificial Sequence
  Description of Artificial Sequence: Synthetic oligonucleotide
cagaggcgugggcacccgu

SEQ ID NO: 1888983 - RNA, 19 nt, Artificial Sequence
  Description of Artificial Sequence: Synthetic oligonucleotide
ggguggccgucagcuuggc

SEQ ID NO: 1888984 - RNA, 19 nt, Artificial Sequence
  Description of Artificial Sequence: Synthetic oligonucleotide
ggacgcccuggggauccuc

SEQ ID NO: 1888985 - RNA, 19 nt, Artificial Sequence
  Description of Artificial Sequence: Synthetic oligonucleotide
cccugaagccuucuccauu

SEQ ID NO: 1888986 - RNA, 19 nt, Artificial Sequence
  Description of Artificial Sequence: Synthetic oligonucleotide
gagcggccugucaguuccu

SEQ ID NO: 1888987 - RNA, 19 nt, Artificial Sequence
  Description of Artificial Sequence: Synthetic oligonucleotide
cugcaccgacucgcccaca

SEQ ID NO: 1888988 - RNA, 19 nt, Artificial Sequence
  Description of Artificial Sequence: Synthetic oligonucleotide
ccaaagccugaaggguucu

SEQ ID NO: 1888989 - RNA, 19 nt, Artificial Sequence
  Description of Artificial Sequence: Synthetic oligonucleotide
cgccgugccaccaccuugu

SEQ ID NO: 1888990 - RNA, 19 nt, Artificial Sequence
  Description of Artificial Sequence: Synthetic oligonucleotide
ccuucccgccgugccacca

SEQ ID NO: 1888991 - RNA, 19 nt, Artificial Sequence
  Description of Artificial Sequence: Synthetic oligonucleotide
gcgugggcacccgugggau

SEQ ID NO: 1888992 - RNA, 19 nt, Artificial Sequence
  Description of Artificial Sequence: Synthetic oligonucleotide
gcacugcguuccaggccga

SEQ ID NO: 1888993 - RNA, 19 nt, Artificial Sequence
  Description of Artificial Sequence: Synthetic oligonucleotide
ccgacucgcccacagccuu

SEQ ID NO: 1888994 - RNA, 19 nt, Artificial Sequence
  Description of Artificial Sequence: Synthetic oligonucleotide
gccgugccaccaccuugua

SEQ ID NO: 1888995 - RNA, 19 nt, Artificial Sequence
  Description of Artificial Sequence: Synthetic oligonucleotide
gggcacccgugggauugaa

SEQ ID NO: 1888996 - RNA, 19 nt, Artificial Sequence
  Description of Artificial Sequence: Synthetic oligonucleotide
gcgcugccugguccaagau

SEQ ID NO: 1888997 - RNA, 19 nt, Artificial Sequence
  Description of Artificial Sequence: Synthetic oligonucleotide
ccuucguaaggaggucuuu

SEQ ID NO: 1888998 - RNA, 19 nt, Artificial Sequence
  Description of Artificial Sequence: Synthetic oligonucleotide
guccagccccaaggcugcu

SEQ ID NO: 1888999 - RNA, 19 nt, Artificial Sequence
  Description of Artificial Sequence: Synthetic oligonucleotide
aggcugcgauguggcccuu

SEQ ID NO: 1889000 - RNA, 19 nt, Artificial Sequence
  Description of Artificial Sequence: Synthetic oligonucleotide
ccgugccaccaccuuguau

SEQ ID NO: 1889001 - RNA, 19 nt, Artificial Sequence
  Description of Artificial Sequence: Synthetic oligonucleotide
ggcacaggucccggaccau

SEQ ID NO: 1889002 - RNA, 19 nt, Artificial Sequence
  Description of Artificial Sequence: Synthetic oligonucleotide
cccgguggggugggccuca

SEQ ID NO: 1889003 - RNA, 19 nt, Artificial Sequence
  Description of Artificial Sequence: Synthetic oligonucleotide
cccggaccaucuccucgau

SEQ ID NO: 1889004 - RNA, 19 nt, Artificial Sequence
  Description of Artificial Sequence: Synthetic oligonucleotide
ccccuccacgaauggcauu

SEQ ID NO: 1889005 - RNA, 19 nt, Artificial Sequence
  Description of Artificial Sequence: Synthetic oligonucleotide
cggcaaccacauugcuccu

SEQ ID NO: 1889006 - RNA, 19 nt, Artificial Sequence
  Description of Artificial Sequence: Synthetic oligonucleotide
cgugggcacccgugggauu

SEQ ID NO: 1889007 - RNA, 19 nt, Artificial Sequence
  Description of Artificial Sequence: Synthetic oligonucleotide
ccucgccgaugcggccaga

SEQ ID NO: 1889008 - RNA, 19 nt, Artificial Sequence
  Description of Artificial Sequence: Synthetic oligonucleotide
aaguacacaaauuuuacuc

SEQ ID NO: 1889009 - RNA, 19 nt, Artificial Sequence
  Description of Artificial Sequence: Synthetic oligonucleotide
aaaggaacccuauaaauag

SEQ ID NO: 1889010 - RNA, 19 nt, Artificial Sequence
  Description of Artificial Sequence: Synthetic oligonucleotide
uuauauauauauaugugug

SEQ ID NO: 1889011 - RNA, 19 nt, Artificial Sequence
  Description of Artificial Sequence: Synthetic oligonucleotide
uuuauuacagguauuagaa

SEQ ID NO: 1889012 - RNA, 19 nt, Artificial Sequence
  Description of Artificial Sequence: Synthetic oligonucleotide
agaguauuuagacagacag

SEQ ID NO: 1889013 - RNA, 19 nt, Artificial Sequence
  Description of Artificial Sequence: Synthetic oligonucleotide
uuuauuagugaaacaauag

SEQ ID NO: 1889014 - RNA, 19 nt, Artificial Sequence
  Description of Artificial Sequence: Synthetic oligonucleotide
uaaucuucaaccuuguugc

SEQ ID NO: 1889015 - RNA, 19 nt, Artificial Sequence
  Description of Artificial Sequence: Synthetic oligonucleotide
uuuaauuuuaagcaugccu

SEQ ID NO: 1889016 - RNA, 19 nt, Artificial Sequence
  Description of Artificial Sequence: Synthetic oligonucleotide
uuugucuuaguaaugagca

SEQ ID NO: 1889017 - RNA, 19 nt, Artificial Sequence
  Description of Artificial Sequence: Synthetic oligonucleotide
ugaucuauaguguagaccu

SEQ ID NO: 1889018 - RNA, 19 nt, Artificial Sequence
  Description of Artificial Sequence: Synthetic oligonucleotide
uauuauauauauauaugug

SEQ ID NO: 1889019 - RNA, 19 nt, Artificial Sequence
  Description of Artificial Sequence: Synthetic oligonucleotide
auuauauauauauaugugu

SEQ ID NO: 1889020 - RNA, 19 nt, Artificial Sequence
  Description of Artificial Sequence: Synthetic oligonucleotide
ucuauuauauauauauaug

SEQ ID NO: 1889021 - RNA, 19 nt, Artificial Sequence
  Description of Artificial Sequence: Synthetic oligonucleotide
aacaaauuaucuuucuuug

SEQ ID NO: 1889022 - RNA, 19 nt, Artificial Sequence
  Description of Artificial Sequence: Synthetic oligonucleotide
agaggauaacuuuuaaccc

SEQ ID NO: 1889023 - RNA, 19 nt, Artificial Sequence
  Description of Artificial Sequence: Synthetic oligonucleotide
cuucagaguauuuagacag

SEQ ID NO: 1889024 - RNA, 19 nt, Artificial Sequence
  Description of Artificial Sequence: Synthetic oligonucleotide
uaacuuuuaacccagcuuc

SEQ ID NO: 1889025 - RNA, 19 nt, Artificial Sequence
  Description of Artificial Sequence: Synthetic oligonucleotide
ucucaaaguaguaggaagg

SEQ ID NO: 1889026 - RNA, 19 nt, Artificial Sequence
  Description of Artificial Sequence: Synthetic oligonucleotide
ucuguaaacaagguaaagg

SEQ ID NO: 1889027 - RNA, 19 nt, Artificial Sequence
  Description of Artificial Sequence: Synthetic oligonucleotide
uuaauuuuaagcaugccuu

SEQ ID NO: 1889028 - RNA, 19 nt, Artificial Sequence
  Description of Artificial Sequence: Synthetic oligonucleotide
uuauuacuagccuaguucc

SEQ ID NO: 1889029 - RNA, 19 nt, Artificial Sequence
  Description of Artificial Sequence: Synthetic oligonucleotide
auaguguagaccuauagga

SEQ ID NO: 1889030 - RNA, 19 nt, Artificial Sequence
  Description of Artificial Sequence: Synthetic oligonucleotide
uucaccauaaguuuacuca

SEQ ID NO: 1889031 - RNA, 19 nt, Artificial Sequence
  Description of Artificial Sequence: Synthetic oligonucleotide
uuauuagugaaacaauagu

SEQ ID NO: 1889032 - RNA, 19 nt, Artificial Sequence
  Description of Artificial Sequence: Synthetic oligonucleotide
uaagugacuaauaccauug

SEQ ID NO: 1889033 - RNA, 19 nt, Artificial Sequence
  Description of Artificial Sequence: Synthetic oligonucleotide
uuugacagcagaaaccuca

SEQ ID NO: 1889034 - RNA, 19 nt, Artificial Sequence
  Description of Artificial Sequence: Synthetic oligonucleotide
aaucuuacaucaauguaac

SEQ ID NO: 1889035 - RNA, 19 nt, Artificial Sequence
  Description of Artificial Sequence: Synthetic oligonucleotide
uauuuagacagacaguuuc

SEQ ID NO: 1889036 - RNA, 19 nt, Artificial Sequence
  Description of Artificial Sequence: Synthetic oligonucleotide
uuuacucaauuuauuagug

SEQ ID NO: 1889037 - RNA, 19 nt, Artificial Sequence
  Description of Artificial Sequence: Synthetic oligonucleotide
aucuauuauauauauauau

SEQ ID NO: 1889038 - RNA, 19 nt, Artificial Sequence
  Description of Artificial Sequence: Synthetic oligonucleotide
uauauaugugugaauaacu

SEQ ID NO: 1889039 - RNA, 19 nt, Artificial Sequence
  Description of Artificial Sequence: Synthetic oligonucleotide
uuaguaaugagcauaucuc

SEQ ID NO: 1889040 - RNA, 19 nt, Artificial Sequence
  Description of Artificial Sequence: Synthetic oligonucleotide
uuuugucuuaguaaugagc

SEQ ID NO: 1889041 - RNA, 19 nt, Artificial Sequence
  Description of Artificial Sequence: Synthetic oligonucleotide
aaaagggagaaccaaugcu

SEQ ID NO: 1889042 - RNA, 19 nt, Artificial Sequence
  Description of Artificial Sequence: Synthetic oligonucleotide
auaucucuuccauaguggc

SEQ ID NO: 1889043 - RNA, 19 nt, Artificial Sequence
  Description of Artificial Sequence: Synthetic oligonucleotide
aauaguuuaugcauagaag

SEQ ID NO: 1889044 - RNA, 19 nt, Artificial Sequence
  Description of Artificial Sequence: Synthetic oligonucleotide
caauucucaaaguaguagg

SEQ ID NO: 1889045 - RNA, 19 nt, Artificial Sequence
  Description of Artificial Sequence: Synthetic oligonucleotide
uuuacucagaaauguaacc

SEQ ID NO: 1889046 - RNA, 19 nt, Artificial Sequence
  Description of Artificial Sequence: Synthetic oligonucleotide
aauaaaggccuucauaaua

SEQ ID NO: 1889047 - RNA, 19 nt, Artificial Sequence
  Description of Artificial Sequence: Synthetic oligonucleotide
uuuaaucagcagcauuugg

SEQ ID NO: 1889048 - RNA, 19 nt, Artificial Sequence
  Description of Artificial Sequence: Synthetic oligonucleotide
uuaucuuucuuugacagca

SEQ ID NO: 1889049 - RNA, 19 nt, Artificial Sequence
  Description of Artificial Sequence: Synthetic oligonucleotide
uauauauauauauguguga

SEQ ID NO: 1889050 - RNA, 19 nt, Artificial Sequence
  Description of Artificial Sequence: Synthetic oligonucleotide
acuaauaccauugugcuca

SEQ ID NO: 1889051 - RNA, 19 nt, Artificial Sequence
  Description of Artificial Sequence: Synthetic oligonucleotide
agguauuagaauucuauug

SEQ ID NO: 1889052 - RNA, 19 nt, Artificial Sequence
  Description of Artificial Sequence: Synthetic oligonucleotide
uuaaucagcagcauuuggu

SEQ ID NO: 1889053 - RNA, 19 nt, Artificial Sequence
  Description of Artificial Sequence: Synthetic oligonucleotide
cuauaggaaaacacaacgg

SEQ ID NO: 1889054 - RNA, 19 nt, Artificial Sequence
  Description of Artificial Sequence: Synthetic oligonucleotide
aauucuauugccacgugag

SEQ ID NO: 1889055 - RNA, 19 nt, Artificial Sequence
  Description of Artificial Sequence: Synthetic oligonucleotide
agcuucagaguauuuagac

SEQ ID NO: 1889056 - RNA, 19 nt, Artificial Sequence
  Description of Artificial Sequence: Synthetic oligonucleotide
uuagaauucuauugccacg

SEQ ID NO: 1889057 - RNA, 19 nt, Artificial Sequence
  Description of Artificial Sequence: Synthetic oligonucleotide
uugcauuuauuauucauca

SEQ ID NO: 1889058 - RNA, 19 nt, Artificial Sequence
  Description of Artificial Sequence: Synthetic oligonucleotide
uauuacagguauuagaauu

SEQ ID NO: 1889059 - RNA, 19 nt, Artificial Sequence
  Description of Artificial Sequence: Synthetic oligonucleotide
uauuagaauucuauugcca

SEQ ID NO: 1889060 - RNA, 19 nt, Artificial Sequence
  Description of Artificial Sequence: Synthetic oligonucleotide
ugcauuuaaagcuugguua

SEQ ID NO: 1889061 - RNA, 19 nt, Artificial Sequence
  Description of Artificial Sequence: Synthetic oligonucleotide
aauguaacuggucauugau

SEQ ID NO: 1889062 - RNA, 19 nt, Artificial Sequence
  Description of Artificial Sequence: Synthetic oligonucleotide
ugucuuuaugaaaaggacu

SEQ ID NO: 1889063 - RNA, 19 nt, Artificial Sequence
  Description of Artificial Sequence: Synthetic oligonucleotide
uguuuguuacaagaguugg

SEQ ID NO: 1889064 - RNA, 19 nt, Artificial Sequence
  Description of Artificial Sequence: Synthetic oligonucleotide
uucucaguuauuuauucca

SEQ ID NO: 1889065 - RNA, 19 nt, Artificial Sequence
  Description of Artificial Sequence: Synthetic oligonucleotide
gguauuagaauucuauugc

SEQ ID NO: 1889066 - RNA, 19 nt, Artificial Sequence
  Description of Artificial Sequence: Synthetic oligonucleotide
caaauuaucuuucuuugac

SEQ ID NO: 1889067 - RNA, 19 nt, Artificial Sequence
  Description of Artificial Sequence: Synthetic oligonucleotide
uacaagaguuggcacaagg

SEQ ID NO: 1889068 - RNA, 19 nt, Artificial Sequence
  Description of Artificial Sequence: Synthetic oligonucleotide
agugaaacaauaguuccac

SEQ ID NO: 1889069 - RNA, 19 nt, Artificial Sequence
  Description of Artificial Sequence: Synthetic oligonucleotide
aauguaaccaccccugcau

SEQ ID NO: 1889070 - RNA, 19 nt, Artificial Sequence
  Description of Artificial Sequence: Synthetic oligonucleotide
acaagguaaagguacuuag

SEQ ID NO: 1889071 - RNA, 19 nt, Artificial Sequence
  Description of Artificial Sequence: Synthetic oligonucleotide
auaaguacacaaauuuuac

SEQ ID NO: 1889072 - RNA, 19 nt, Artificial Sequence
  Description of Artificial Sequence: Synthetic oligonucleotide
uugauauaacuacagaauu

SEQ ID NO: 1889073 - RNA, 19 nt, Artificial Sequence
  Description of Artificial Sequence: Synthetic oligonucleotide
agaaccaaugcuccauggc

SEQ ID NO: 1889074 - RNA, 19 nt, Artificial Sequence
  Description of Artificial Sequence: Synthetic oligonucleotide
uuuaguuauucuuuugaaa

SEQ ID NO: 1889075 - RNA, 19 nt, Artificial Sequence
  Description of Artificial Sequence: Synthetic oligonucleotide
gcuuauaacaucuuuaaca

SEQ ID NO: 1889076 - RNA, 19 nt, Artificial Sequence
  Description of Artificial Sequence: Synthetic oligonucleotide
cauaucucuuccauagugg

SEQ ID NO: 1889077 - RNA, 19 nt, Artificial Sequence
  Description of Artificial Sequence: Synthetic oligonucleotide
ugcauuuugucuuaguaau

SEQ ID NO: 1889078 - RNA, 19 nt, Artificial Sequence
  Description of Artificial Sequence: Synthetic oligonucleotide
uccaaauugcuuauaacau

SEQ ID NO: 1889079 - RNA, 19 nt, Artificial Sequence
  Description of Artificial Sequence: Synthetic oligonucleotide
gaaccaaugcuccauggcc

SEQ ID NO: 1889080 - RNA, 19 nt, Artificial Sequence
  Description of Artificial Sequence: Synthetic oligonucleotide
ugaaaagcaccuuagguuu

SEQ ID NO: 1889081 - RNA, 19 nt, Artificial Sequence
  Description of Artificial Sequence: Synthetic oligonucleotide
uagaccuauaggaaaacac

SEQ ID NO: 1889082 - RNA, 19 nt, Artificial Sequence
  Description of Artificial Sequence: Synthetic oligonucleotide
ugacuaauaccauugugcu

SEQ ID NO: 1889083 - RNA, 19 nt, Artificial Sequence
  Description of Artificial Sequence: Synthetic oligonucleotide
uaaaacauauuacacuguu

SEQ ID NO: 1889084 - RNA, 19 nt, Artificial Sequence
  Description of Artificial Sequence: Synthetic oligonucleotide
uacucaauuuauuagugaa

SEQ ID NO: 1889085 - RNA, 19 nt, Artificial Sequence
  Description of Artificial Sequence: Synthetic oligonucleotide
aaaguaguaggaagguacg

SEQ ID NO: 1889086 - RNA, 19 nt, Artificial Sequence
  Description of Artificial Sequence: Synthetic oligonucleotide
cucaauuuauuagugaaac

SEQ ID NO: 1889087 - RNA, 19 nt, Artificial Sequence
  Description of Artificial Sequence: Synthetic oligonucleotide
gugacuaauaccauugugc

SEQ ID NO: 1889088 - RNA, 19 nt, Artificial Sequence
  Description of Artificial Sequence: Synthetic oligonucleotide
aguauuuagacagacaguu

SEQ ID NO: 1889089 - RNA, 19 nt, Artificial Sequence
  Description of Artificial Sequence: Synthetic oligonucleotide
uuccauguaucuauuauau

SEQ ID NO: 1889090 - RNA, 19 nt, Artificial Sequence
  Description of Artificial Sequence: Synthetic oligonucleotide
uaaugagcauaucucuucc

SEQ ID NO: 1889091 - RNA, 19 nt, Artificial Sequence
  Description of Artificial Sequence: Synthetic oligonucleotide
agcaguuacagcuaauagu

SEQ ID NO: 1889092 - RNA, 19 nt, Artificial Sequence
  Description of Artificial Sequence: Synthetic oligonucleotide
acgugagcaaucaagaggg

SEQ ID NO: 1889093 - RNA, 19 nt, Artificial Sequence
  Description of Artificial Sequence: Synthetic oligonucleotide
caguauugcuguuuuagcc

SEQ ID NO: 1889094 - RNA, 19 nt, Artificial Sequence
  Description of Artificial Sequence: Synthetic oligonucleotide
cauaguggcucauuaaaac

SEQ ID NO: 1889095 - RNA, 19 nt, Artificial Sequence
  Description of Artificial Sequence: Synthetic oligonucleotide
aagcaugccuuuauuuucc

SEQ ID NO: 1889096 - RNA, 19 nt, Artificial Sequence
  Description of Artificial Sequence: Synthetic oligonucleotide
ucauugauauaacuacaga

SEQ ID NO: 1889097 - RNA, 19 nt, Artificial Sequence
  Description of Artificial Sequence: Synthetic oligonucleotide
cuaguguuuguuacaagag

SEQ ID NO: 1889098 - RNA, 19 nt, Artificial Sequence
  Description of Artificial Sequence: Synthetic oligonucleotide
uaugugugaauaacuaaaa

SEQ ID NO: 1889099 - RNA, 19 nt, Artificial Sequence
  Description of Artificial Sequence: Synthetic oligonucleotide
cuauuauauauauauaugu

SEQ ID NO: 1889100 - RNA, 19 nt, Artificial Sequence
  Description of Artificial Sequence: Synthetic oligonucleotide
aggaaaacacaacggcagc

SEQ ID NO: 1889101 - RNA, 19 nt, Artificial Sequence
  Description of Artificial Sequence: Synthetic oligonucleotide
uaguaaugagcauaucucu

SEQ ID NO: 1889102 - RNA, 19 nt, Artificial Sequence
  Description of Artificial Sequence: Synthetic oligonucleotide
cacgugagcaaucaagagg

SEQ ID NO: 1889103 - RNA, 19 nt, Artificial Sequence
  Description of Artificial Sequence: Synthetic oligonucleotide
uuaaaacauauuacacugu

SEQ ID NO: 1889104 - RNA, 19 nt, Artificial Sequence
  Description of Artificial Sequence: Synthetic oligonucleotide
aauugcuuauaacaucuuu

SEQ ID NO: 1889105 - RNA, 19 nt, Artificial Sequence
  Description of Artificial Sequence: Synthetic oligonucleotide
cauugauauaacuacagaa

SEQ ID NO: 1889106 - RNA, 19 nt, Artificial Sequence
  Description of Artificial Sequence: Synthetic oligonucleotide
uauaugugugaauaacuaa

SEQ ID NO: 1889107 - RNA, 19 nt, Artificial Sequence
  Description of Artificial Sequence: Synthetic oligonucleotide
uuuuaacccagcuucuaga

SEQ ID NO: 1889108 - RNA, 19 nt, Artificial Sequence
  Description of Artificial Sequence: Synthetic oligonucleotide
uagcccagaacaauuuuag

SEQ ID NO: 1889109 - RNA, 19 nt, Artificial Sequence
  Description of Artificial Sequence: Synthetic oligonucleotide
ugaagaacacaguauugcu

SEQ ID NO: 1889110 - RNA, 19 nt, Artificial Sequence
  Description of Artificial Sequence: Synthetic oligonucleotide
cagcauuugguauuaaaac

SEQ ID NO: 1889111 - RNA, 19 nt, Artificial Sequence
  Description of Artificial Sequence: Synthetic oligonucleotide
uuuaaaagcuucagaguau

SEQ ID NO: 1889112 - RNA, 19 nt, Artificial Sequence
  Description of Artificial Sequence: Synthetic oligonucleotide
gaggauaacuuuuaaccca

SEQ ID NO: 1889113 - RNA, 19 nt, Artificial Sequence
  Description of Artificial Sequence: Synthetic oligonucleotide
uauugaacggaugaagaac

SEQ ID NO: 1889114 - RNA, 19 nt, Artificial Sequence
  Description of Artificial Sequence: Synthetic oligonucleotide
accuuguugcccuaaaaug

SEQ ID NO: 1889115 - RNA, 19 nt, Artificial Sequence
  Description of Artificial Sequence: Synthetic oligonucleotide
aaauguaaccaccccugca

SEQ ID NO: 1889116 - RNA, 19 nt, Artificial Sequence
  Description of Artificial Sequence: Synthetic oligonucleotide
auaguggcucauuaaaaca

SEQ ID NO: 1889117 - RNA, 19 nt, Artificial Sequence
  Description of Artificial Sequence: Synthetic oligonucleotide
auugauauaacuacagaau

SEQ ID NO: 1889118 - RNA, 19 nt, Artificial Sequence
  Description of Artificial Sequence: Synthetic oligonucleotide
uuuaacccagcuucuagac

SEQ ID NO: 1889119 - RNA, 19 nt, Artificial Sequence
  Description of Artificial Sequence: Synthetic oligonucleotide
caacacaucuguaaacaag

SEQ ID NO: 1889120 - RNA, 19 nt, Artificial Sequence
  Description of Artificial Sequence: Synthetic oligonucleotide
uuauugaacggaugaagaa

SEQ ID NO: 1889121 - RNA, 19 nt, Artificial Sequence
  Description of Artificial Sequence: Synthetic oligonucleotide
uguaaacaagguaaaggua

SEQ ID NO: 1889122 - RNA, 19 nt, Artificial Sequence
  Description of Artificial Sequence: Synthetic oligonucleotide
aaaaggaacccuauaaaua

SEQ ID NO: 1889123 - RNA, 19 nt, Artificial Sequence
  Description of Artificial Sequence: Synthetic oligonucleotide
auauauauauaugugugaa

SEQ ID NO: 1889124 - RNA, 19 nt, Artificial Sequence
  Description of Artificial Sequence: Synthetic oligonucleotide
uggcacaaggguuuaaucu

SEQ ID NO: 1889125 - RNA, 19 nt, Artificial Sequence
  Description of Artificial Sequence: Synthetic oligonucleotide
uucccgaaggaaaggagag

SEQ ID NO: 1889126 - RNA, 19 nt, Artificial Sequence
  Description of Artificial Sequence: Synthetic oligonucleotide
uguucuuauugaacggaug

SEQ ID NO: 1889127 - RNA, 19 nt, Artificial Sequence
  Description of Artificial Sequence: Synthetic oligonucleotide
uagugaaacaauaguucca

SEQ ID NO: 1889128 - RNA, 19 nt, Artificial Sequence
  Description of Artificial Sequence: Synthetic oligonucleotide
agcugcuaguguuuguuac

SEQ ID NO: 1889129 - RNA, 19 nt, Artificial Sequence
  Description of Artificial Sequence: Synthetic oligonucleotide
cuauaguguagaccuauag

SEQ ID NO: 1889130 - RNA, 19 nt, Artificial Sequence
  Description of Artificial Sequence: Synthetic oligonucleotide
uuugcaauaaaggccuuca

SEQ ID NO: 1889131 - RNA, 19 nt, Artificial Sequence
  Description of Artificial Sequence: Synthetic oligonucleotide
agugacuaauaccauugug

SEQ ID NO: 1889132 - RNA, 19 nt, Artificial Sequence
  Description of Artificial Sequence: Synthetic oligonucleotide
cauaaguacacaaauuuua

SEQ ID NO: 1889133 - RNA, 19 nt, Artificial Sequence
  Description of Artificial Sequence: Synthetic oligonucleotide
auaccauugugcucauugg

SEQ ID NO: 1889134 - RNA, 19 nt, Artificial Sequence
  Description of Artificial Sequence: Synthetic oligonucleotide
aacccuauaaauaguaaaa

SEQ ID NO: 1889135 - RNA, 19 nt, Artificial Sequence
  Description of Artificial Sequence: Synthetic oligonucleotide
ugcaauaaaggccuucaua

SEQ ID NO: 1889136 - RNA, 19 nt, Artificial Sequence
  Description of Artificial Sequence: Synthetic oligonucleotide
acucagaaauguaaccacc

SEQ ID NO: 1889137 - RNA, 19 nt, Artificial Sequence
  Description of Artificial Sequence: Synthetic oligonucleotide
aaggccuucauaauaauuu

SEQ ID NO: 1889138 - RNA, 19 nt, Artificial Sequence
  Description of Artificial Sequence: Synthetic oligonucleotide
uucuauugccacgugagca

SEQ ID NO: 1889139 - RNA, 19 nt, Artificial Sequence
  Description of Artificial Sequence: Synthetic oligonucleotide
aguuuaugcauagaaguga

SEQ ID NO: 1889140 - RNA, 19 nt, Artificial Sequence
  Description of Artificial Sequence: Synthetic oligonucleotide
cuagccuaguuccaggccc

SEQ ID NO: 1889141 - RNA, 19 nt, Artificial Sequence
  Description of Artificial Sequence: Synthetic oligonucleotide
uaucuauuauauauauaua

SEQ ID NO: 1889142 - RNA, 19 nt, Artificial Sequence
  Description of Artificial Sequence: Synthetic oligonucleotide
acuagccuaguuccaggcc

SEQ ID NO: 1889143 - RNA, 19 nt, Artificial Sequence
  Description of Artificial Sequence: Synthetic oligonucleotide
uacacuguuuucaccauaa

SEQ ID NO: 1889144 - RNA, 19 nt, Artificial Sequence
  Description of Artificial Sequence: Synthetic oligonucleotide
aguguagaccuauaggaaa

SEQ ID NO: 1889145 - RNA, 19 nt, Artificial Sequence
  Description of Artificial Sequence: Synthetic oligonucleotide
uguuuucaccauaaguuua

SEQ ID NO: 1889146 - RNA, 19 nt, Artificial Sequence
  Description of Artificial Sequence: Synthetic oligonucleotide
augagcugcaguuauugca

SEQ ID NO: 1889147 - RNA, 19 nt, Artificial Sequence
  Description of Artificial Sequence: Synthetic oligonucleotide
augcauagaagugaaagga

SEQ ID NO: 1889148 - RNA, 19 nt, Artificial Sequence
  Description of Artificial Sequence: Synthetic oligonucleotide
uaguggcucauuaaaacau

SEQ ID NO: 1889149 - RNA, 19 nt, Artificial Sequence
  Description of Artificial Sequence: Synthetic oligonucleotide
acacaaauuuuacucagaa

SEQ ID NO: 1889150 - RNA, 19 nt, Artificial Sequence
  Description of Artificial Sequence: Synthetic oligonucleotide
cuuuuaacccagcuucuag

SEQ ID NO: 1889151 - RNA, 19 nt, Artificial Sequence
  Description of Artificial Sequence: Synthetic oligonucleotide
uucuagacugaucuauagu

SEQ ID NO: 1889152 - RNA, 19 nt, Artificial Sequence
  Description of Artificial Sequence: Synthetic oligonucleotide
uaaguuuacucaauuuauu

SEQ ID NO: 1889153 - RNA, 19 nt, Artificial Sequence
  Description of Artificial Sequence: Synthetic oligonucleotide
uuacuagccuaguuccagg

SEQ ID NO: 1889154 - RNA, 19 nt, Artificial Sequence
  Description of Artificial Sequence: Synthetic oligonucleotide
uuuuauuacuagccuaguu

SEQ ID NO: 1889155 - RNA, 19 nt, Artificial Sequence
  Description of Artificial Sequence: Synthetic oligonucleotide
uuaagugacuaauaccauu

SEQ ID NO: 1889156 - RNA, 19 nt, Artificial Sequence
  Description of Artificial Sequence: Synthetic oligonucleotide
uagaauucuauugccacgu

SEQ ID NO: 1889157 - RNA, 19 nt, Artificial Sequence
  Description of Artificial Sequence: Synthetic oligonucleotide
ugagcaaucaagagggcuu

SEQ ID NO: 1889158 - RNA, 19 nt, Artificial Sequence
  Description of Artificial Sequence: Synthetic oligonucleotide
cuucuagacugaucuauag

SEQ ID NO: 1889159 - RNA, 19 nt, Artificial Sequence
  Description of Artificial Sequence: Synthetic oligonucleotide
ucaauguaacuggucauug

SEQ ID NO: 1889160 - RNA, 19 nt, Artificial Sequence
  Description of Artificial Sequence: Synthetic oligonucleotide
ucaccauaaguuuacucaa

SEQ ID NO: 1889161 - RNA, 19 nt, Artificial Sequence
  Description of Artificial Sequence: Synthetic oligonucleotide
gagaaccaaugcuccaugg

SEQ ID NO: 1889162 - RNA, 19 nt, Artificial Sequence
  Description of Artificial Sequence: Synthetic oligonucleotide
auugaacggaugaagaaca

SEQ ID NO: 1889163 - RNA, 19 nt, Artificial Sequence
  Description of Artificial Sequence: Synthetic oligonucleotide
guaaugagcauaucucuuc

SEQ ID NO: 1889164 - RNA, 19 nt, Artificial Sequence
  Description of Artificial Sequence: Synthetic oligonucleotide
gcaauaaaggccuucauaa

SEQ ID NO: 1889165 - RNA, 19 nt, Artificial Sequence
  Description of Artificial Sequence: Synthetic oligonucleotide
cuuauaacaucuuuaacau

SEQ ID NO: 1889166 - RNA, 19 nt, Artificial Sequence
  Description of Artificial Sequence: Synthetic oligonucleotide
auaugugugaauaacuaaa

SEQ ID NO: 1889167 - RNA, 19 nt, Artificial Sequence
  Description of Artificial Sequence: Synthetic oligonucleotide
gaaauguaaccaccccugc

SEQ ID NO: 1889168 - RNA, 19 nt, Artificial Sequence
  Description of Artificial Sequence: Synthetic oligonucleotide
auuacuagccuaguuccag

SEQ ID NO: 1889169 - RNA, 19 nt, Artificial Sequence
  Description of Artificial Sequence: Synthetic oligonucleotide
aaagguacuuagcccguga

SEQ ID NO: 1889170 - RNA, 19 nt, Artificial Sequence
  Description of Artificial Sequence: Synthetic oligonucleotide
ugcucauuggucuucccga

SEQ ID NO: 1889171 - RNA, 19 nt, Artificial Sequence
  Description of Artificial Sequence: Synthetic oligonucleotide
caaggguuuaaucuucaac

SEQ ID NO: 1889172 - RNA, 19 nt, Artificial Sequence
  Description of Artificial Sequence: Synthetic oligonucleotide
guuuacucaauuuauuagu

SEQ ID NO: 1889173 - RNA, 19 nt, Artificial Sequence
  Description of Artificial Sequence: Synthetic oligonucleotide
ugcuuauaacaucuuuaac

SEQ ID NO: 1889174 - RNA, 19 nt, Artificial Sequence
  Description of Artificial Sequence: Synthetic oligonucleotide
ucuucccgaaggaaaggag

SEQ ID NO: 1889175 - RNA, 19 nt, Artificial Sequence
  Description of Artificial Sequence: Synthetic oligonucleotide
uaguaggaagguacgaaaa

SEQ ID NO: 1889176 - RNA, 19 nt, Artificial Sequence
  Description of Artificial Sequence: Synthetic oligonucleotide
gcuaauaguuuaugcauag

SEQ ID NO: 1889177 - RNA, 19 nt, Artificial Sequence
  Description of Artificial Sequence: Synthetic oligonucleotide
ugcauagaagugaaaggau

SEQ ID NO: 1889178 - RNA, 19 nt, Artificial Sequence
  Description of Artificial Sequence: Synthetic oligonucleotide
acaagaguuggcacaaggg

SEQ ID NO: 1889179 - RNA, 19 nt, Artificial Sequence
  Description of Artificial Sequence: Synthetic oligonucleotide
aggguuuaaucuucaaccu

SEQ ID NO: 1889180 - RNA, 19 nt, Artificial Sequence
  Description of Artificial Sequence: Synthetic oligonucleotide
aggcccauuuauuacaggu

SEQ ID NO: 1889181 - RNA, 19 nt, Artificial Sequence
  Description of Artificial Sequence: Synthetic oligonucleotide
uaguguagaccuauaggaa

SEQ ID NO: 1889182 - RNA, 19 nt, Artificial Sequence
  Description of Artificial Sequence: Synthetic oligonucleotide
ucuauugccacgugagcaa

SEQ ID NO: 1889183 - RNA, 19 nt, Artificial Sequence
  Description of Artificial Sequence: Synthetic oligonucleotide
ugucuuaguaaugagcaua

SEQ ID NO: 1889184 - RNA, 19 nt, Artificial Sequence
  Description of Artificial Sequence: Synthetic oligonucleotide
uuacaucaauguaacuggu

SEQ ID NO: 1889185 - RNA, 19 nt, Artificial Sequence
  Description of Artificial Sequence: Synthetic oligonucleotide
uauuacuagccuaguucca

SEQ ID NO: 1889186 - RNA, 19 nt, Artificial Sequence
  Description of Artificial Sequence: Synthetic oligonucleotide
uuggucuucccgaaggaaa

SEQ ID NO: 1889187 - RNA, 19 nt, Artificial Sequence
  Description of Artificial Sequence: Synthetic oligonucleotide
aagugacuaauaccauugu

SEQ ID NO: 1889188 - RNA, 19 nt, Artificial Sequence
  Description of Artificial Sequence: Synthetic oligonucleotide
ucagaguauuuagacagac

SEQ ID NO: 1889189 - RNA, 19 nt, Artificial Sequence
  Description of Artificial Sequence: Synthetic oligonucleotide
ccacuguucuuauugaacg

SEQ ID NO: 1889190 - RNA, 19 nt, Artificial Sequence
  Description of Artificial Sequence: Synthetic oligonucleotide
uuauuacagguauuagaau

SEQ ID NO: 1889191 - RNA, 19 nt, Artificial Sequence
  Description of Artificial Sequence: Synthetic oligonucleotide
uuuuagcccagaacaauuu

SEQ ID NO: 1889192 - RNA, 19 nt, Artificial Sequence
  Description of Artificial Sequence: Synthetic oligonucleotide
cuuccaaauugcuuauaac

SEQ ID NO: 1889193 - RNA, 19 nt, Artificial Sequence
  Description of Artificial Sequence: Synthetic oligonucleotide
acuggucauugauauaacu

SEQ ID NO: 1889194 - RNA, 19 nt, Artificial Sequence
  Description of Artificial Sequence: Synthetic oligonucleotide
acaacggcagcaguuacag

SEQ ID NO: 1889195 - RNA, 19 nt, Artificial Sequence
  Description of Artificial Sequence: Synthetic oligonucleotide
agugcaacggaccaauguu

SEQ ID NO: 1889196 - RNA, 19 nt, Artificial Sequence
  Description of Artificial Sequence: Synthetic oligonucleotide
ucaagagggcuuagaagac

SEQ ID NO: 1889197 - RNA, 19 nt, Artificial Sequence
  Description of Artificial Sequence: Synthetic oligonucleotide
uuucaccauaaguuuacuc

SEQ ID NO: 1889198 - RNA, 19 nt, Artificial Sequence
  Description of Artificial Sequence: Synthetic oligonucleotide
cugaucuauaguguagacc

SEQ ID NO: 1889199 - RNA, 19 nt, Artificial Sequence
  Description of Artificial Sequence: Synthetic oligonucleotide
gaaaccucagugcaacgga

SEQ ID NO: 1889200 - RNA, 19 nt, Artificial Sequence
  Description of Artificial Sequence: Synthetic oligonucleotide
uacaucaauguaacugguc

SEQ ID NO: 1889201 - RNA, 19 nt, Artificial Sequence
  Description of Artificial Sequence: Synthetic oligonucleotide
uuaacccagcuucuagacu

SEQ ID NO: 1889202 - RNA, 19 nt, Artificial Sequence
  Description of Artificial Sequence: Synthetic oligonucleotide
uuagcccgugauaaugcug

SEQ ID NO: 1889203 - RNA, 19 nt, Artificial Sequence
  Description of Artificial Sequence: Synthetic oligonucleotide
acggaugaagaacacagua

SEQ ID NO: 1889204 - RNA, 19 nt, Artificial Sequence
  Description of Artificial Sequence: Synthetic oligonucleotide
uucagaguauuuagacaga

SEQ ID NO: 1889205 - RNA, 19 nt, Artificial Sequence
  Description of Artificial Sequence: Synthetic oligonucleotide
auaaaggccuucauaauaa

SEQ ID NO: 1889206 - RNA, 19 nt, Artificial Sequence
  Description of Artificial Sequence: Synthetic oligonucleotide
gauaacuuuuaacccagcu

SEQ ID NO: 1889207 - RNA, 19 nt, Artificial Sequence
  Description of Artificial Sequence: Synthetic oligonucleotide
cauuuauuacagguauuag

SEQ ID NO: 1889208 - RNA, 19 nt, Artificial Sequence
  Description of Artificial Sequence: Synthetic oligonucleotide
ggcucauuaaaacauauua

SEQ ID NO: 1889209 - RNA, 19 nt, Artificial Sequence
  Description of Artificial Sequence: Synthetic oligonucleotide
auuuaaucagcagcauuug

SEQ ID NO: 1889210 - RNA, 19 nt, Artificial Sequence
  Description of Artificial Sequence: Synthetic oligonucleotide
aggauaacuuuuaacccag

SEQ ID NO: 1889211 - RNA, 19 nt, Artificial Sequence
  Description of Artificial Sequence: Synthetic oligonucleotide
uacuagccuaguuccaggc

SEQ ID NO: 1889212 - RNA, 19 nt, Artificial Sequence
  Description of Artificial Sequence: Synthetic oligonucleotide
acagguauuagaauucuau

SEQ ID NO: 1889213 - RNA, 19 nt, Artificial Sequence
  Description of Artificial Sequence: Synthetic oligonucleotide
gcaguuauugcauuuauua

SEQ ID NO: 1889214 - RNA, 19 nt, Artificial Sequence
  Description of Artificial Sequence: Synthetic oligonucleotide
uuaaaagcuucagaguauu

SEQ ID NO: 1889215 - RNA, 19 nt, Artificial Sequence
  Description of Artificial Sequence: Synthetic oligonucleotide
aacaagguaaagguacuua

SEQ ID NO: 1889216 - RNA, 19 nt, Artificial Sequence
  Description of Artificial Sequence: Synthetic oligonucleotide
gcuaguguuuguuacaaga

SEQ ID NO: 1889217 - RNA, 19 nt, Artificial Sequence
  Description of Artificial Sequence: Synthetic oligonucleotide
auauaugugugaauaacua

SEQ ID NO: 1889218 - RNA, 19 nt, Artificial Sequence
  Description of Artificial Sequence: Synthetic oligonucleotide
uuuagcccagaacaauuuu

SEQ ID NO: 1889219 - RNA, 19 nt, Artificial Sequence
  Description of Artificial Sequence: Synthetic oligonucleotide
uuuagacagacaguuucuc

SEQ ID NO: 1889220 - RNA, 19 nt, Artificial Sequence
  Description of Artificial Sequence: Synthetic oligonucleotide
uuuaugcauagaagugaaa

SEQ ID NO: 1889221 - RNA, 19 nt, Artificial Sequence
  Description of Artificial Sequence: Synthetic oligonucleotide
ugaacggaugaagaacaca

SEQ ID NO: 1889222 - RNA, 19 nt, Artificial Sequence
  Description of Artificial Sequence: Synthetic oligonucleotide
aaccaaugcuccauggcca

SEQ ID NO: 1889223 - RNA, 19 nt, Artificial Sequence
  Description of Artificial Sequence: Synthetic oligonucleotide
aaaacauauuacacuguuu

SEQ ID NO: 1889224 - RNA, 19 nt, Artificial Sequence
  Description of Artificial Sequence: Synthetic oligonucleotide
uguuuuagcccagaacaau

SEQ ID NO: 1889225 - RNA, 19 nt, Artificial Sequence
  Description of Artificial Sequence: Synthetic oligonucleotide
accauaaguuuacucaauu

SEQ ID NO: 1889226 - RNA, 19 nt, Artificial Sequence
  Description of Artificial Sequence: Synthetic oligonucleotide
cagcaguuacagcuaauag

SEQ ID NO: 1889227 - RNA, 19 nt, Artificial Sequence
  Description of Artificial Sequence: Synthetic oligonucleotide
aagaguuggcacaaggguu

SEQ ID NO: 1889228 - RNA, 19 nt, Artificial Sequence
  Description of Artificial Sequence: Synthetic oligonucleotide
acacaacggcagcaguuac

SEQ ID NO: 1889229 - RNA, 19 nt, Artificial Sequence
  Description of Artificial Sequence: Synthetic oligonucleotide
ucuuuaugaaaaggacugu

SEQ ID NO: 1889230 - RNA, 19 nt, Artificial Sequence
  Description of Artificial Sequence: Synthetic oligonucleotide
aucuguaaacaagguaaag

SEQ ID NO: 1889231 - RNA, 19 nt, Artificial Sequence
  Description of Artificial Sequence: Synthetic oligonucleotide
ucccauaaguacacaaauu

SEQ ID NO: 1889232 - RNA, 19 nt, Artificial Sequence
  Description of Artificial Sequence: Synthetic oligonucleotide
uguugcccuaaaauggcua

SEQ ID NO: 1889233 - RNA, 19 nt, Artificial Sequence
  Description of Artificial Sequence: Synthetic oligonucleotide
uuauaacaucuuuaacauu

SEQ ID NO: 1889234 - RNA, 19 nt, Artificial Sequence
  Description of Artificial Sequence: Synthetic oligonucleotide
guuuguuacaagaguuggc

SEQ ID NO: 1889235 - RNA, 19 nt, Artificial Sequence
  Description of Artificial Sequence: Synthetic oligonucleotide
aagguacuuagcccgugau

SEQ ID NO: 1889236 - RNA, 19 nt, Artificial Sequence
  Description of Artificial Sequence: Synthetic oligonucleotide
uugaacggaugaagaacac

SEQ ID NO: 1889237 - RNA, 19 nt, Artificial Sequence
  Description of Artificial Sequence: Synthetic oligonucleotide
guaguaggaagguacgaaa

SEQ ID NO: 1889238 - RNA, 19 nt, Artificial Sequence
  Description of Artificial Sequence: Synthetic oligonucleotide
aggaaaggagaggauaacu

SEQ ID NO: 1889239 - RNA, 19 nt, Artificial Sequence
  Description of Artificial Sequence: Synthetic oligonucleotide
uccauggccagaagcuaug

SEQ ID NO: 1889240 - RNA, 19 nt, Artificial Sequence
  Description of Artificial Sequence: Synthetic oligonucleotide
auuuagacagacaguuucu

SEQ ID NO: 1889241 - RNA, 19 nt, Artificial Sequence
  Description of Artificial Sequence: Synthetic oligonucleotide
cuggucauugauauaacua

SEQ ID NO: 1889242 - RNA, 19 nt, Artificial Sequence
  Description of Artificial Sequence: Synthetic oligonucleotide
ugccaacacaucuguaaac

SEQ ID NO: 1889243 - RNA, 19 nt, Artificial Sequence
  Description of Artificial Sequence: Synthetic oligonucleotide
aacuuuuaacccagcuucu

SEQ ID NO: 1889244 - RNA, 19 nt, Artificial Sequence
  Description of Artificial Sequence: Synthetic oligonucleotide
ucuauaguguagaccuaua

SEQ ID NO: 1889245 - RNA, 19 nt, Artificial Sequence
  Description of Artificial Sequence: Synthetic oligonucleotide
accaaugcuccauggccag

SEQ ID NO: 1889246 - RNA, 19 nt, Artificial Sequence
  Description of Artificial Sequence: Synthetic oligonucleotide
aacacaacggcagcaguua

SEQ ID NO: 1889247 - RNA, 19 nt, Artificial Sequence
  Description of Artificial Sequence: Synthetic oligonucleotide
gaacaauuuuaguuauucu

SEQ ID NO: 1889248 - RNA, 19 nt, Artificial Sequence
  Description of Artificial Sequence: Synthetic oligonucleotide
uuguugcccuaaaauggcu

SEQ ID NO: 1889249 - RNA, 19 nt, Artificial Sequence
  Description of Artificial Sequence: Synthetic oligonucleotide
gacugaucuauaguguaga

SEQ ID NO: 1889250 - RNA, 19 nt, Artificial Sequence
  Description of Artificial Sequence: Synthetic oligonucleotide
cuucccgaaggaaaggaga

SEQ ID NO: 1889251 - RNA, 19 nt, Artificial Sequence
  Description of Artificial Sequence: Synthetic oligonucleotide
uuuaaucuucaaccuuguu

SEQ ID NO: 1889252 - RNA, 19 nt, Artificial Sequence
  Description of Artificial Sequence: Synthetic oligonucleotide
auggcuaaauucucaguua

SEQ ID NO: 1889253 - RNA, 19 nt, Artificial Sequence
  Description of Artificial Sequence: Synthetic oligonucleotide
ugcaacggaccaauguuuu

SEQ ID NO: 1889254 - RNA, 19 nt, Artificial Sequence
  Description of Artificial Sequence: Synthetic oligonucleotide
uuggcacaaggguuuaauc

SEQ ID NO: 1889255 - RNA, 19 nt, Artificial Sequence
  Description of Artificial Sequence: Synthetic oligonucleotide
ugcuaguguuuguuacaag

SEQ ID NO: 1889256 - RNA, 19 nt, Artificial Sequence
  Description of Artificial Sequence: Synthetic oligonucleotide
uguagaccuauaggaaaac

SEQ ID NO: 1889257 - RNA, 19 nt, Artificial Sequence
  Description of Artificial Sequence: Synthetic oligonucleotide
cugcauuuugucuuaguaa

SEQ ID NO: 1889258 - RNA, 19 nt, Artificial Sequence
  Description of Artificial Sequence: Synthetic oligonucleotide
ugcaguuauugcauuuauu

SEQ ID NO: 1889259 - RNA, 19 nt, Artificial Sequence
  Description of Artificial Sequence: Synthetic oligonucleotide
agacugaucuauaguguag

SEQ ID NO: 1889260 - RNA, 19 nt, Artificial Sequence
  Description of Artificial Sequence: Synthetic oligonucleotide
caaucaagagggcuuagaa

SEQ ID NO: 1889261 - RNA, 19 nt, Artificial Sequence
  Description of Artificial Sequence: Synthetic oligonucleotide
gguacuuagcccgugauaa

SEQ ID NO: 1889262 - RNA, 19 nt, Artificial Sequence
  Description of Artificial Sequence: Synthetic oligonucleotide
accucagugcaacggacca

SEQ ID NO: 1889263 - RNA, 19 nt, Artificial Sequence
  Description of Artificial Sequence: Synthetic oligonucleotide
uuccauaguggcucauuaa

SEQ ID NO: 1889264 - RNA, 19 nt, Artificial Sequence
  Description of Artificial Sequence: Synthetic oligonucleotide
agcuucuagacugaucuau

SEQ ID NO: 1889265 - RNA, 19 nt, Artificial Sequence
  Description of Artificial Sequence: Synthetic oligonucleotide
agaauucuauugccacgug

SEQ ID NO: 1889266 - RNA, 19 nt, Artificial Sequence
  Description of Artificial Sequence: Synthetic oligonucleotide
aucuauaguguagaccuau

SEQ ID NO: 1889267 - RNA, 19 nt, Artificial Sequence
  Description of Artificial Sequence: Synthetic oligonucleotide
aaggaacccuauaaauagu

SEQ ID NO: 1889268 - RNA, 19 nt, Artificial Sequence
  Description of Artificial Sequence: Synthetic oligonucleotide
auugccacgugagcaauca

SEQ ID NO: 1889269 - RNA, 19 nt, Artificial Sequence
  Description of Artificial Sequence: Synthetic oligonucleotide
auucucaaaguaguaggaa

SEQ ID NO: 1889270 - RNA, 19 nt, Artificial Sequence
  Description of Artificial Sequence: Synthetic oligonucleotide
aaacaagguaaagguacuu

SEQ ID NO: 1889271 - RNA, 19 nt, Artificial Sequence
  Description of Artificial Sequence: Synthetic oligonucleotide
uguaaccaccccugcauuu

SEQ ID NO: 1889272 - RNA, 19 nt, Artificial Sequence
  Description of Artificial Sequence: Synthetic oligonucleotide
uacagguauuagaauucua

SEQ ID NO: 1889273 - RNA, 19 nt, Artificial Sequence
  Description of Artificial Sequence: Synthetic oligonucleotide
uccauguaucuauuauaua

SEQ ID NO: 1889274 - RNA, 19 nt, Artificial Sequence
  Description of Artificial Sequence: Synthetic oligonucleotide
guuacaagaguuggcacaa

SEQ ID NO: 1889275 - RNA, 19 nt, Artificial Sequence
  Description of Artificial Sequence: Synthetic oligonucleotide
aguaaugagcauaucucuu

SEQ ID NO: 1889276 - RNA, 19 nt, Artificial Sequence
  Description of Artificial Sequence: Synthetic oligonucleotide
auuauucaucagaaaaguu

SEQ ID NO: 1889277 - RNA, 19 nt, Artificial Sequence
  Description of Artificial Sequence: Synthetic oligonucleotide
cagaaaccucagugcaacg

SEQ ID NO: 1889278 - RNA, 19 nt, Artificial Sequence
  Description of Artificial Sequence: Synthetic oligonucleotide
aaggagaggauaacuuuua

SEQ ID NO: 1889279 - RNA, 19 nt, Artificial Sequence
  Description of Artificial Sequence: Synthetic oligonucleotide
uaaagguacuuagcccgug

SEQ ID NO: 1889280 - RNA, 19 nt, Artificial Sequence
  Description of Artificial Sequence: Synthetic oligonucleotide
agcuauggugccaacacau

SEQ ID NO: 1889281 - RNA, 19 nt, Artificial Sequence
  Description of Artificial Sequence: Synthetic oligonucleotide
auagaagugaaaggauuuu

SEQ ID NO: 1889282 - RNA, 19 nt, Artificial Sequence
  Description of Artificial Sequence: Synthetic oligonucleotide
ugcccuaaaauggcuaaau

SEQ ID NO: 1889283 - RNA, 19 nt, Artificial Sequence
  Description of Artificial Sequence: Synthetic oligonucleotide
auaguuccacuguucuuau

SEQ ID NO: 1889284 - RNA, 19 nt, Artificial Sequence
  Description of Artificial Sequence: Synthetic oligonucleotide
uagccuaguuccaggccca

SEQ ID NO: 1889285 - RNA, 19 nt, Artificial Sequence
  Description of Artificial Sequence: Synthetic oligonucleotide
acucaauuuauuagugaaa

SEQ ID NO: 1889286 - RNA, 19 nt, Artificial Sequence
  Description of Artificial Sequence: Synthetic oligonucleotide
uggcucauuaaaacauauu

SEQ ID NO: 1889287 - RNA, 19 nt, Artificial Sequence
  Description of Artificial Sequence: Synthetic oligonucleotide
aucuuacaucaauguaacu

SEQ ID NO: 1889288 - RNA, 19 nt, Artificial Sequence
  Description of Artificial Sequence: Synthetic oligonucleotide
caagaguuggcacaagggu

SEQ ID NO: 1889289 - RNA, 19 nt, Artificial Sequence
  Description of Artificial Sequence: Synthetic oligonucleotide
guugcccuaaaauggcuaa

SEQ ID NO: 1889290 - RNA, 19 nt, Artificial Sequence
  Description of Artificial Sequence: Synthetic oligonucleotide
cacaaauuuuacucagaaa

SEQ ID NO: 1889291 - RNA, 19 nt, Artificial Sequence
  Description of Artificial Sequence: Synthetic oligonucleotide
caucuguaaacaagguaaa

SEQ ID NO: 1889292 - RNA, 19 nt, Artificial Sequence
  Description of Artificial Sequence: Synthetic oligonucleotide
uauugccacgugagcaauc

SEQ ID NO: 1889293 - RNA, 19 nt, Artificial Sequence
  Description of Artificial Sequence: Synthetic oligonucleotide
aggagaggauaacuuuuaa

SEQ ID NO: 1889294 - RNA, 19 nt, Artificial Sequence
  Description of Artificial Sequence: Synthetic oligonucleotide
cuagacugaucuauagugu

SEQ ID NO: 1889295 - RNA, 19 nt, Artificial Sequence
  Description of Artificial Sequence: Synthetic oligonucleotide
agcccagaacaauuuuagu

SEQ ID NO: 1889296 - RNA, 19 nt, Artificial Sequence
  Description of Artificial Sequence: Synthetic oligonucleotide
cagaguauuuagacagaca

SEQ ID NO: 1889297 - RNA, 19 nt, Artificial Sequence
  Description of Artificial Sequence: Synthetic oligonucleotide
caccccugcauuuaaagcu

SEQ ID NO: 1889298 - RNA, 19 nt, Artificial Sequence
  Description of Artificial Sequence: Synthetic oligonucleotide
agaguuggcacaaggguuu

SEQ ID NO: 1889299 - RNA, 19 nt, Artificial Sequence
  Description of Artificial Sequence: Synthetic oligonucleotide
gguuaucauuaacaaauua

SEQ ID NO: 1889300 - RNA, 19 nt, Artificial Sequence
  Description of Artificial Sequence: Synthetic oligonucleotide
uaaccaccccugcauuuaa

SEQ ID NO: 1889301 - RNA, 19 nt, Artificial Sequence
  Description of Artificial Sequence: Synthetic oligonucleotide
cagcuaauaguuuaugcau

SEQ ID NO: 1889302 - RNA, 19 nt, Artificial Sequence
  Description of Artificial Sequence: Synthetic oligonucleotide
agagggcuuagaagacagc

SEQ ID NO: 1889303 - RNA, 19 nt, Artificial Sequence
  Description of Artificial Sequence: Synthetic oligonucleotide
uugcuguuuuagcccagaa

SEQ ID NO: 1889304 - RNA, 19 nt, Artificial Sequence
  Description of Artificial Sequence: Synthetic oligonucleotide
aggaacccuauaaauagua

SEQ ID NO: 1889305 - RNA, 19 nt, Artificial Sequence
  Description of Artificial Sequence: Synthetic oligonucleotide
agcuaauaguuuaugcaua

SEQ ID NO: 1889306 - RNA, 19 nt, Artificial Sequence
  Description of Artificial Sequence: Synthetic oligonucleotide
acaaggguuuaaucuucaa

SEQ ID NO: 1889307 - RNA, 19 nt, Artificial Sequence
  Description of Artificial Sequence: Synthetic oligonucleotide
uuacaagaguuggcacaag

SEQ ID NO: 1889308 - RNA, 19 nt, Artificial Sequence
  Description of Artificial Sequence: Synthetic oligonucleotide
cuauggugccaacacaucu

SEQ ID NO: 1889309 - RNA, 19 nt, Artificial Sequence
  Description of Artificial Sequence: Synthetic oligonucleotide
cuguuuuagcccagaacaa

SEQ ID NO: 1889310 - RNA, 19 nt, Artificial Sequence
  Description of Artificial Sequence: Synthetic oligonucleotide
uucuacaguuugucuuuau

SEQ ID NO: 1889311 - RNA, 19 nt, Artificial Sequence
  Description of Artificial Sequence: Synthetic oligonucleotide
ggaugaagaacacaguauu

SEQ ID NO: 1889312 - RNA, 19 nt, Artificial Sequence
  Description of Artificial Sequence: Synthetic oligonucleotide
guguagaccuauaggaaaa

SEQ ID NO: 1889313 - RNA, 19 nt, Artificial Sequence
  Description of Artificial Sequence: Synthetic oligonucleotide
cccagaacaauuuuaguua

SEQ ID NO: 1889314 - RNA, 19 nt, Artificial Sequence
  Description of Artificial Sequence: Synthetic oligonucleotide
caggcccauuuauuacagg

SEQ ID NO: 1889315 - RNA, 19 nt, Artificial Sequence
  Description of Artificial Sequence: Synthetic oligonucleotide
augccuuuauuuucccaua

SEQ ID NO: 1889316 - RNA, 19 nt, Artificial Sequence
  Description of Artificial Sequence: Synthetic oligonucleotide
cacaaggguuuaaucuuca

SEQ ID NO: 1889317 - RNA, 19 nt, Artificial Sequence
  Description of Artificial Sequence: Synthetic oligonucleotide
agguacuuagcccgugaua

SEQ ID NO: 1889318 - RNA, 19 nt, Artificial Sequence
  Description of Artificial Sequence: Synthetic oligonucleotide
cuuccauaguggcucauua

SEQ ID NO: 1889319 - RNA, 19 nt, Artificial Sequence
  Description of Artificial Sequence: Synthetic oligonucleotide
ucccuuccaaauugcuuau

SEQ ID NO: 1889320 - RNA, 19 nt, Artificial Sequence
  Description of Artificial Sequence: Synthetic oligonucleotide
gcuuagaagacagcuggac

SEQ ID NO: 1889321 - RNA, 19 nt, Artificial Sequence
  Description of Artificial Sequence: Synthetic oligonucleotide
auguaaccaccccugcauu

SEQ ID NO: 1889322 - RNA, 19 nt, Artificial Sequence
  Description of Artificial Sequence: Synthetic oligonucleotide
gaguauuuagacagacagu

SEQ ID NO: 1889323 - RNA, 19 nt, Artificial Sequence
  Description of Artificial Sequence: Synthetic oligonucleotide
gcaguuacagcuaauaguu

SEQ ID NO: 1889324 - RNA, 19 nt, Artificial Sequence
  Description of Artificial Sequence: Synthetic oligonucleotide
caguuauugcauuuauuau

SEQ ID NO: 1889325 - RNA, 19 nt, Artificial Sequence
  Description of Artificial Sequence: Synthetic oligonucleotide
acagcuggacacauuuuau

SEQ ID NO: 1889326 - RNA, 19 nt, Artificial Sequence
  Description of Artificial Sequence: Synthetic oligonucleotide
cacaacggcagcaguuaca

SEQ ID NO: 1889327 - RNA, 19 nt, Artificial Sequence
  Description of Artificial Sequence: Synthetic oligonucleotide
gcauuuugucuuaguaaug

SEQ ID NO: 1889328 - RNA, 19 nt, Artificial Sequence
  Description of Artificial Sequence: Synthetic oligonucleotide
aguggcucauuaaaacaua

SEQ ID NO: 1889329 - RNA, 19 nt, Artificial Sequence
  Description of Artificial Sequence: Synthetic oligonucleotide
agcaaucaagagggcuuag

SEQ ID NO: 1889330 - RNA, 19 nt, Artificial Sequence
  Description of Artificial Sequence: Synthetic oligonucleotide
gcugcuaguguuuguuaca

SEQ ID NO: 1889331 - RNA, 19 nt, Artificial Sequence
  Description of Artificial Sequence: Synthetic oligonucleotide
ccaugagcugcaguuauug

SEQ ID NO: 1889332 - RNA, 19 nt, Artificial Sequence
  Description of Artificial Sequence: Synthetic oligonucleotide
guaacuggucauugauaua

SEQ ID NO: 1889333 - RNA, 19 nt, Artificial Sequence
  Description of Artificial Sequence: Synthetic oligonucleotide
uugcccuaaaauggcuaaa

SEQ ID NO: 1889334 - RNA, 19 nt, Artificial Sequence
  Description of Artificial Sequence: Synthetic oligonucleotide
cucaaaguaguaggaaggu

SEQ ID NO: 1889335 - RNA, 19 nt, Artificial Sequence
  Description of Artificial Sequence: Synthetic oligonucleotide
ggucuucccgaaggaaagg

SEQ ID NO: 1889336 - RNA, 19 nt, Artificial Sequence
  Description of Artificial Sequence: Synthetic oligonucleotide
caauaaaggccuucauaau

SEQ ID NO: 1889337 - RNA, 19 nt, Artificial Sequence
  Description of Artificial Sequence: Synthetic oligonucleotide
ccauuuauuacagguauua

SEQ ID NO: 1889338 - RNA, 19 nt, Artificial Sequence
  Description of Artificial Sequence: Synthetic oligonucleotide
gcccagaacaauuuuaguu

SEQ ID NO: 1889339 - RNA, 19 nt, Artificial Sequence
  Description of Artificial Sequence: Synthetic oligonucleotide
cugcauuuaaagcuugguu

SEQ ID NO: 1889340 - RNA, 19 nt, Artificial Sequence
  Description of Artificial Sequence: Synthetic oligonucleotide
caucaauguaacuggucau

SEQ ID NO: 1889341 - RNA, 19 nt, Artificial Sequence
  Description of Artificial Sequence: Synthetic oligonucleotide
cccgugauaaugcugcaga

SEQ ID NO: 1889342 - RNA, 19 nt, Artificial Sequence
  Description of Artificial Sequence: Synthetic oligonucleotide
uugccacgugagcaaucaa

SEQ ID NO: 1889343 - RNA, 19 nt, Artificial Sequence
  Description of Artificial Sequence: Synthetic oligonucleotide
gccacgugagcaaucaaga

SEQ ID NO: 1889344 - RNA, 19 nt, Artificial Sequence
  Description of Artificial Sequence: Synthetic oligonucleotide
cccauaaguacacaaauuu

SEQ ID NO: 1889345 - RNA, 19 nt, Artificial Sequence
  Description of Artificial Sequence: Synthetic oligonucleotide
cuguucuuauugaacggau

SEQ ID NO: 1889346 - RNA, 19 nt, Artificial Sequence
  Description of Artificial Sequence: Synthetic oligonucleotide
guaaccaccccugcauuua

SEQ ID NO: 1889347 - RNA, 19 nt, Artificial Sequence
  Description of Artificial Sequence: Synthetic oligonucleotide
guuaagugacuaauaccau

SEQ ID NO: 1889348 - RNA, 19 nt, Artificial Sequence
  Description of Artificial Sequence: Synthetic oligonucleotide
ggcacaaggguuuaaucuu

SEQ ID NO: 1889349 - RNA, 19 nt, Artificial Sequence
  Description of Artificial Sequence: Synthetic oligonucleotide
cuuagcccgugauaaugcu

SEQ ID NO: 1889350 - RNA, 19 nt, Artificial Sequence
  Description of Artificial Sequence: Synthetic oligonucleotide
caaugcuccauggccagaa

SEQ ID NO: 1889351 - RNA, 19 nt, Artificial Sequence
  Description of Artificial Sequence: Synthetic oligonucleotide
gcccauuuauuacagguau

SEQ ID NO: 1889352 - RNA, 19 nt, Artificial Sequence
  Description of Artificial Sequence: Synthetic oligonucleotide
ccauaguggcucauuaaaa

SEQ ID NO: 1889353 - RNA, 19 nt, Artificial Sequence
  Description of Artificial Sequence: Synthetic oligonucleotide
gaucuauaguguagaccua

SEQ ID NO: 1889354 - RNA, 19 nt, Artificial Sequence
  Description of Artificial Sequence: Synthetic oligonucleotide
ggaacccuauaaauaguaa

SEQ ID NO: 1889355 - RNA, 19 nt, Artificial Sequence
  Description of Artificial Sequence: Synthetic oligonucleotide
cagacaguuucucauccau

SEQ ID NO: 1889356 - RNA, 19 nt, Artificial Sequence
  Description of Artificial Sequence: Synthetic oligonucleotide
ccgugauaaugcugcagac

SEQ ID NO: 1889357 - RNA, 19 nt, Artificial Sequence
  Description of Artificial Sequence: Synthetic oligonucleotide
ggauaacuuuuaacccagc

SEQ ID NO: 1889358 - RNA, 19 nt, Artificial Sequence
  Description of Artificial Sequence: Synthetic oligonucleotide
ggaaaggagaggauaacuu

SEQ ID NO: 1889359 - RNA, 19 nt, Artificial Sequence
  Description of Artificial Sequence: Synthetic oligonucleotide
agcccgugauaaugcugca

SEQ ID NO: 1889360 - RNA, 19 nt, Artificial Sequence
  Description of Artificial Sequence: Synthetic oligonucleotide
accccugcauuuaaagcuu

SEQ ID NO: 1889361 - RNA, 19 nt, Artificial Sequence
  Description of Artificial Sequence: Synthetic oligonucleotide
guuggcacaaggguuuaau

SEQ ID NO: 1889362 - RNA, 19 nt, Artificial Sequence
  Description of Artificial Sequence: Synthetic oligonucleotide
aaccaccccugcauuuaaa

SEQ ID NO: 1889363 - RNA, 19 nt, Artificial Sequence
  Description of Artificial Sequence: Synthetic oligonucleotide
cuaguuccaggcccauuua

SEQ ID NO: 1889364 - RNA, 19 nt, Artificial Sequence
  Description of Artificial Sequence: Synthetic oligonucleotide
caccauaaguuuacucaau

SEQ ID NO: 1889365 - RNA, 19 nt, Artificial Sequence
  Description of Artificial Sequence: Synthetic oligonucleotide
ccauaaguacacaaauuuu

SEQ ID NO: 1889366 - RNA, 19 nt, Artificial Sequence
  Description of Artificial Sequence: Synthetic oligonucleotide
gcuauggugccaacacauc

SEQ ID NO: 1889367 - RNA, 19 nt, Artificial Sequence
  Description of Artificial Sequence: Synthetic oligonucleotide
gcucauuggucuucccgaa

SEQ ID NO: 1889368 - RNA, 19 nt, Artificial Sequence
  Description of Artificial Sequence: Synthetic oligonucleotide
aguuggcacaaggguuuaa

SEQ ID NO: 1889369 - RNA, 19 nt, Artificial Sequence
  Description of Artificial Sequence: Synthetic oligonucleotide
ccagaacaauuuuaguuau

SEQ ID NO: 1889370 - RNA, 19 nt, Artificial Sequence
  Description of Artificial Sequence: Synthetic oligonucleotide
acggcagcaguuacagcua

SEQ ID NO: 1889371 - RNA, 19 nt, Artificial Sequence
  Description of Artificial Sequence: Synthetic oligonucleotide
gcccgugauaaugcugcag

SEQ ID NO: 1889372 - RNA, 19 nt, Artificial Sequence
  Description of Artificial Sequence: Synthetic oligonucleotide
ggcccauuuauuacaggua

SEQ ID NO: 1889373 - RNA, 19 nt, Artificial Sequence
  Description of Artificial Sequence: Synthetic oligonucleotide
ccauaaguuuacucaauuu

SEQ ID NO: 1889374 - RNA, 19 nt, Artificial Sequence
  Description of Artificial Sequence: Synthetic oligonucleotide
gcuucuagacugaucuaua

SEQ ID NO: 1889375 - RNA, 19 nt, Artificial Sequence
  Description of Artificial Sequence: Synthetic oligonucleotide
gaguuggcacaaggguuua

SEQ ID NO: 1889376 - RNA, 19 nt, Artificial Sequence
  Description of Artificial Sequence: Synthetic oligonucleotide
ccccugcauuuaaagcuug

SEQ ID NO: 1889377 - RNA, 19 nt, Artificial Sequence
  Description of Artificial Sequence: Synthetic oligonucleotide
gugcaacggaccaauguuu

SEQ ID NO: 1889378 - RNA, 19 nt, Artificial Sequence
  Description of Artificial Sequence: Synthetic oligonucleotide
cgugagcaaucaagagggc

SEQ ID NO: 1889379 - RNA, 19 nt, Artificial Sequence
  Description of Artificial Sequence: Synthetic oligonucleotide
caguuacagcuaauaguuu

SEQ ID NO: 1889380 - RNA, 19 nt, Artificial Sequence
  Description of Artificial Sequence: Synthetic oligonucleotide
ccuaguuccaggcccauuu

SEQ ID NO: 1889381 - RNA, 19 nt, Artificial Sequence
  Description of Artificial Sequence: Synthetic oligonucleotide
cgaaggaaaggagaggaua

SEQ ID NO: 1889382 - RNA, 19 nt, Artificial Sequence
  Description of Artificial Sequence: Synthetic oligonucleotide
cuucaaccuuguugcccua

SEQ ID NO: 1889383 - RNA, 19 nt, Artificial Sequence
  Description of Artificial Sequence: Synthetic oligonucleotide
cuauugccacgugagcaau

SEQ ID NO: 1889384 - RNA, 19 nt, Artificial Sequence
  Description of Artificial Sequence: Synthetic oligonucleotide
cagcagcauuugguauuaa

SEQ ID NO: 1889385 - RNA, 19 nt, Artificial Sequence
  Description of Artificial Sequence: Synthetic oligonucleotide
ccucagugcaacggaccaa

SEQ ID NO: 1889386 - RNA, 19 nt, Artificial Sequence
  Description of Artificial Sequence: Synthetic oligonucleotide
ccaaugcuccauggccaga

SEQ ID NO: 1889387 - RNA, 19 nt, Artificial Sequence
  Description of Artificial Sequence: Synthetic oligonucleotide
cccuuccaaauugcuuaua

SEQ ID NO: 1889388 - RNA, 19 nt, Artificial Sequence
  Description of Artificial Sequence: Synthetic oligonucleotide
gccuaguuccaggcccauu

SEQ ID NO: 1889389 - RNA, 19 nt, Artificial Sequence
  Description of Artificial Sequence: Synthetic oligonucleotide
ugagguagguaucugagac

SEQ ID NO: 1889390 - RNA, 19 nt, Artificial Sequence
  Description of Artificial Sequence: Synthetic oligonucleotide
ucugcggugagcuccagcg

SEQ ID NO: 1889391 - RNA, 19 nt, Artificial Sequence
  Description of Artificial Sequence: Synthetic oligonucleotide
augcugauguaucacggcc

SEQ ID NO: 1889392 - RNA, 19 nt, Artificial Sequence
  Description of Artificial Sequence: Synthetic oligonucleotide
ucaugcugauguaucacgg

SEQ ID NO: 1889393 - RNA, 19 nt, Artificial Sequence
  Description of Artificial Sequence: Synthetic oligonucleotide
guagguaucugagacaucc

SEQ ID NO: 1889394 - RNA, 19 nt, Artificial Sequence
  Description of Artificial Sequence: Synthetic oligonucleotide
uuuauugaggucagcucca

SEQ ID NO: 1889395 - RNA, 19 nt, Artificial Sequence
  Description of Artificial Sequence: Synthetic oligonucleotide
cucaugcugauguaucacg

SEQ ID NO: 1889396 - RNA, 19 nt, Artificial Sequence
  Description of Artificial Sequence: Synthetic oligonucleotide
ucuaccgccaggugcagag

SEQ ID NO: 1889397 - RNA, 19 nt, Artificial Sequence
  Description of Artificial Sequence: Synthetic oligonucleotide
ugauguaucacggccaagu

SEQ ID NO: 1889398 - RNA, 19 nt, Artificial Sequence
  Description of Artificial Sequence: Synthetic oligonucleotide
guaucugagacaucccuug

SEQ ID NO: 1889399 - RNA, 19 nt, Artificial Sequence
  Description of Artificial Sequence: Synthetic oligonucleotide
cugcauacaacuucucuac

SEQ ID NO: 1889400 - RNA, 19 nt, Artificial Sequence
  Description of Artificial Sequence: Synthetic oligonucleotide
acucggauccucuucgauc

SEQ ID NO: 1889401 - RNA, 19 nt, Artificial Sequence
  Description of Artificial Sequence: Synthetic oligonucleotide
ugagacaucccuugggcgu

SEQ ID NO: 1889402 - RNA, 19 nt, Artificial Sequence
  Description of Artificial Sequence: Synthetic oligonucleotide
uuuggccuaggucauucug

SEQ ID NO: 1889403 - RNA, 19 nt, Artificial Sequence
  Description of Artificial Sequence: Synthetic oligonucleotide
caaggaugggauugggccg

SEQ ID NO: 1889404 - RNA, 19 nt, Artificial Sequence
  Description of Artificial Sequence: Synthetic oligonucleotide
aucugagacaucccuuggg

SEQ ID NO: 1889405 - RNA, 19 nt, Artificial Sequence
  Description of Artificial Sequence: Synthetic oligonucleotide
cuaggugcaaggcuguuug

SEQ ID NO: 1889406 - RNA, 19 nt, Artificial Sequence
  Description of Artificial Sequence: Synthetic oligonucleotide
gcaaggaugggauugggcc

SEQ ID NO: 1889407 - RNA, 19 nt, Artificial Sequence
  Description of Artificial Sequence: Synthetic oligonucleotide
gcauacaacuucucuaccg

SEQ ID NO: 1889408 - RNA, 19 nt, Artificial Sequence
  Description of Artificial Sequence: Synthetic oligonucleotide
cuuuguggaugacagcuac

SEQ ID NO: 1889409 - RNA, 19 nt, Artificial Sequence
  Description of Artificial Sequence: Synthetic oligonucleotide
aagggccgagcuuaucauc

SEQ ID NO: 1889410 - RNA, 19 nt, Artificial Sequence
  Description of Artificial Sequence: Synthetic oligonucleotide
uggaugacagcuacaugga

SEQ ID NO: 1889411 - RNA, 19 nt, Artificial Sequence
  Description of Artificial Sequence: Synthetic oligonucleotide
ucacuaucgcugcugcugc

SEQ ID NO: 1889412 - RNA, 19 nt, Artificial Sequence
  Description of Artificial Sequence: Synthetic oligonucleotide
acuguggaccacaaugucg

SEQ ID NO: 1889413 - RNA, 19 nt, Artificial Sequence
  Description of Artificial Sequence: Synthetic oligonucleotide
agcuccaguacguuggcug

SEQ ID NO: 1889414 - RNA, 19 nt, Artificial Sequence
  Description of Artificial Sequence: Synthetic oligonucleotide
ugcugauguaucacggcca

SEQ ID NO: 1889415 - RNA, 19 nt, Artificial Sequence
  Description of Artificial Sequence: Synthetic oligonucleotide
ucugccgucacugucacua

SEQ ID NO: 1889416 - RNA, 19 nt, Artificial Sequence
  Description of Artificial Sequence: Synthetic oligonucleotide
agguagccaguuuuggcuc

SEQ ID NO: 1889417 - RNA, 19 nt, Artificial Sequence
  Description of Artificial Sequence: Synthetic oligonucleotide
acaaugucgucauauucau

SEQ ID NO: 1889418 - RNA, 19 nt, Artificial Sequence
  Description of Artificial Sequence: Synthetic oligonucleotide
auggagugggguguggccc

SEQ ID NO: 1889419 - RNA, 19 nt, Artificial Sequence
  Description of Artificial Sequence: Synthetic oligonucleotide
ucgacguccgcgcuuuucc

SEQ ID NO: 1889420 - RNA, 19 nt, Artificial Sequence
  Description of Artificial Sequence: Synthetic oligonucleotide
agggccgagcuuaucaucc

SEQ ID NO: 1889421 - RNA, 19 nt, Artificial Sequence
  Description of Artificial Sequence: Synthetic oligonucleotide
cuggcucugagugagguag

SEQ ID NO: 1889422 - RNA, 19 nt, Artificial Sequence
  Description of Artificial Sequence: Synthetic oligonucleotide
cugagacaucccuugggcg

SEQ ID NO: 1889423 - RNA, 19 nt, Artificial Sequence
  Description of Artificial Sequence: Synthetic oligonucleotide
agguaucugagacaucccu

SEQ ID NO: 1889424 - RNA, 19 nt, Artificial Sequence
  Description of Artificial Sequence: Synthetic oligonucleotide
ugggcuccgguuuauugag

SEQ ID NO: 1889425 - RNA, 19 nt, Artificial Sequence
  Description of Artificial Sequence: Synthetic oligonucleotide
aggugcaaggcuguuuggc

SEQ ID NO: 1889426 - RNA, 19 nt, Artificial Sequence
  Description of Artificial Sequence: Synthetic oligonucleotide
augggauugggccggagca

SEQ ID NO: 1889427 - RNA, 19 nt, Artificial Sequence
  Description of Artificial Sequence: Synthetic oligonucleotide
aguacguuggcugccuggg

SEQ ID NO: 1889428 - RNA, 19 nt, Artificial Sequence
  Description of Artificial Sequence: Synthetic oligonucleotide
caugcugauguaucacggc

SEQ ID NO: 1889429 - RNA, 19 nt, Artificial Sequence
  Description of Artificial Sequence: Synthetic oligonucleotide
gaagcccaagaggaaaucc

SEQ ID NO: 1889430 - RNA, 19 nt, Artificial Sequence
  Description of Artificial Sequence: Synthetic oligonucleotide
uacguuggcugccugggcu

SEQ ID NO: 1889431 - RNA, 19 nt, Artificial Sequence
  Description of Artificial Sequence: Synthetic oligonucleotide
auacaacuucucuaccgug

SEQ ID NO: 1889432 - RNA, 19 nt, Artificial Sequence
  Description of Artificial Sequence: Synthetic oligonucleotide
uucucuaccguggaugccu

SEQ ID NO: 1889433 - RNA, 19 nt, Artificial Sequence
  Description of Artificial Sequence: Synthetic oligonucleotide
uuuuccccaagcacgcgac

SEQ ID NO: 1889434 - RNA, 19 nt, Artificial Sequence
  Description of Artificial Sequence: Synthetic oligonucleotide
cauucgucgacguccgcgc

SEQ ID NO: 1889435 - RNA, 19 nt, Artificial Sequence
  Description of Artificial Sequence: Synthetic oligonucleotide
auugggccggagcagagca

SEQ ID NO: 1889436 - RNA, 19 nt, Artificial Sequence
  Description of Artificial Sequence: Synthetic oligonucleotide
uccgguuuauugaggucag

SEQ ID NO: 1889437 - RNA, 19 nt, Artificial Sequence
  Description of Artificial Sequence: Synthetic oligonucleotide
aagcacgcgaccccggcca

SEQ ID NO: 1889438 - RNA, 19 nt, Artificial Sequence
  Description of Artificial Sequence: Synthetic oligonucleotide
cauacaugcgggcgguagg

SEQ ID NO: 1889439 - RNA, 19 nt, Artificial Sequence
  Description of Artificial Sequence: Synthetic oligonucleotide
agcugcauacaacuucucu

SEQ ID NO: 1889440 - RNA, 19 nt, Artificial Sequence
  Description of Artificial Sequence: Synthetic oligonucleotide
agugccggcggagaagccc

SEQ ID NO: 1889441 - RNA, 19 nt, Artificial Sequence
  Description of Artificial Sequence: Synthetic oligonucleotide
gguccagguacucagugcc

SEQ ID NO: 1889442 - RNA, 19 nt, Artificial Sequence
  Description of Artificial Sequence: Synthetic oligonucleotide
agagguuugggugccgggg

SEQ ID NO: 1889443 - RNA, 19 nt, Artificial Sequence
  Description of Artificial Sequence: Synthetic oligonucleotide
gucacuaucgcugcugcug

SEQ ID NO: 1889444 - RNA, 19 nt, Artificial Sequence
  Description of Artificial Sequence: Synthetic oligonucleotide
acaacuucucuaccgugga

SEQ ID NO: 1889445 - RNA, 19 nt, Artificial Sequence
  Description of Artificial Sequence: Synthetic oligonucleotide
gaagggcucaugcugaugu

SEQ ID NO: 1889446 - RNA, 19 nt, Artificial Sequence
  Description of Artificial Sequence: Synthetic oligonucleotide
ugucgcaccauucgucgac

SEQ ID NO: 1889447 - RNA, 19 nt, Artificial Sequence
  Description of Artificial Sequence: Synthetic oligonucleotide
ucugagugagguagguauc

SEQ ID NO: 1889448 - RNA, 19 nt, Artificial Sequence
  Description of Artificial Sequence: Synthetic oligonucleotide
auacaugcgggcgguaggg

SEQ ID NO: 1889449 - RNA, 19 nt, Artificial Sequence
  Description of Artificial Sequence: Synthetic oligonucleotide
gaagagguuugggugccgg

SEQ ID NO: 1889450 - RNA, 19 nt, Artificial Sequence
  Description of Artificial Sequence: Synthetic oligonucleotide
uuagccaccucgguggaac

SEQ ID NO: 1889451 - RNA, 19 nt, Artificial Sequence
  Description of Artificial Sequence: Synthetic oligonucleotide
uauucaucgcccucaucuc

SEQ ID NO: 1889452 - RNA, 19 nt, Artificial Sequence
  Description of Artificial Sequence: Synthetic oligonucleotide
uggaccacaaugucgucau

SEQ ID NO: 1889453 - RNA, 19 nt, Artificial Sequence
  Description of Artificial Sequence: Synthetic oligonucleotide
cacgugugugcccucaccc

SEQ ID NO: 1889454 - RNA, 19 nt, Artificial Sequence
  Description of Artificial Sequence: Synthetic oligonucleotide
uggcccuuagccaccucgg

SEQ ID NO: 1889455 - RNA, 19 nt, Artificial Sequence
  Description of Artificial Sequence: Synthetic oligonucleotide
acaugcgggcgguaggguc

SEQ ID NO: 1889456 - RNA, 19 nt, Artificial Sequence
  Description of Artificial Sequence: Synthetic oligonucleotide
agguacucagugccggcgg

SEQ ID NO: 1889457 - RNA, 19 nt, Artificial Sequence
  Description of Artificial Sequence: Synthetic oligonucleotide
aggcuguuuggccuagguc

SEQ ID NO: 1889458 - RNA, 19 nt, Artificial Sequence
  Description of Artificial Sequence: Synthetic oligonucleotide
gagguagccaguuuuggcu

SEQ ID NO: 1889459 - RNA, 19 nt, Artificial Sequence
  Description of Artificial Sequence: Synthetic oligonucleotide
aagcccaagaggaaaucca

SEQ ID NO: 1889460 - RNA, 19 nt, Artificial Sequence
  Description of Artificial Sequence: Synthetic oligonucleotide
uagguaucugagacauccc

SEQ ID NO: 1889461 - RNA, 19 nt, Artificial Sequence
  Description of Artificial Sequence: Synthetic oligonucleotide
guugaggguucacagcaac

SEQ ID NO: 1889462 - RNA, 19 nt, Artificial Sequence
  Description of Artificial Sequence: Synthetic oligonucleotide
aagaccaggggcgcccacg

SEQ ID NO: 1889463 - RNA, 19 nt, Artificial Sequence
  Description of Artificial Sequence: Synthetic oligonucleotide
ucuaccguggaugccuccc

SEQ ID NO: 1889464 - RNA, 19 nt, Artificial Sequence
  Description of Artificial Sequence: Synthetic oligonucleotide
aaagaccaggggcgcccac

SEQ ID NO: 1889465 - RNA, 19 nt, Artificial Sequence
  Description of Artificial Sequence: Synthetic oligonucleotide
gagugagguagguaucuga

SEQ ID NO: 1889466 - RNA, 19 nt, Artificial Sequence
  Description of Artificial Sequence: Synthetic oligonucleotide
guucaggggcuccaugugc

SEQ ID NO: 1889467 - RNA, 19 nt, Artificial Sequence
  Description of Artificial Sequence: Synthetic oligonucleotide
acgugugugcccucacccg

SEQ ID NO: 1889468 - RNA, 19 nt, Artificial Sequence
  Description of Artificial Sequence: Synthetic oligonucleotide
acacuccggcgccagcugc

SEQ ID NO: 1889469 - RNA, 19 nt, Artificial Sequence
  Description of Artificial Sequence: Synthetic oligonucleotide
gcugucgcaccauucgucg

SEQ ID NO: 1889470 - RNA, 19 nt, Artificial Sequence
  Description of Artificial Sequence: Synthetic oligonucleotide
aacacuccggcgccagcug

SEQ ID NO: 1889471 - RNA, 19 nt, Artificial Sequence
  Description of Artificial Sequence: Synthetic oligonucleotide
agucaggcgggguuggagu

SEQ ID NO: 1889472 - RNA, 19 nt, Artificial Sequence
  Description of Artificial Sequence: Synthetic oligonucleotide
ggagucaucaggaagaggu

SEQ ID NO: 1889473 - RNA, 19 nt, Artificial Sequence
  Description of Artificial Sequence: Synthetic oligonucleotide
ucgucauauucaucgcccu

SEQ ID NO: 1889474 - RNA, 19 nt, Artificial Sequence
  Description of Artificial Sequence: Synthetic oligonucleotide
uccggcgccagcugcauac

SEQ ID NO: 1889475 - RNA, 19 nt, Artificial Sequence
  Description of Artificial Sequence: Synthetic oligonucleotide
ggugcaaggcuguuuggcc

SEQ ID NO: 1889476 - RNA, 19 nt, Artificial Sequence
  Description of Artificial Sequence: Synthetic oligonucleotide
aagucaggcgggguuggag

SEQ ID NO: 1889477 - RNA, 19 nt, Artificial Sequence
  Description of Artificial Sequence: Synthetic oligonucleotide
caccauucgucgacguccg

SEQ ID NO: 1889478 - RNA, 19 nt, Artificial Sequence
  Description of Artificial Sequence: Synthetic oligonucleotide
uguuuggccuaggucauuc

SEQ ID NO: 1889479 - RNA, 19 nt, Artificial Sequence
  Description of Artificial Sequence: Synthetic oligonucleotide
uaggugcaaggcuguuugg

SEQ ID NO: 1889480 - RNA, 19 nt, Artificial Sequence
  Description of Artificial Sequence: Synthetic oligonucleotide
gccaccaacacuccggcgc

SEQ ID NO: 1889481 - RNA, 19 nt, Artificial Sequence
  Description of Artificial Sequence: Synthetic oligonucleotide
caguacguuggcugccugg

SEQ ID NO: 1889482 - RNA, 19 nt, Artificial Sequence
  Description of Artificial Sequence: Synthetic oligonucleotide
uccccauccucagugacgu

SEQ ID NO: 1889483 - RNA, 19 nt, Artificial Sequence
  Description of Artificial Sequence: Synthetic oligonucleotide
gauggcugcuaggugcaag

SEQ ID NO: 1889484 - RNA, 19 nt, Artificial Sequence
  Description of Artificial Sequence: Synthetic oligonucleotide
gacguccgcgcuuuucccc

SEQ ID NO: 1889485 - RNA, 19 nt, Artificial Sequence
  Description of Artificial Sequence: Synthetic oligonucleotide
agcagagcacugccaagug

SEQ ID NO: 1889486 - RNA, 19 nt, Artificial Sequence
  Description of Artificial Sequence: Synthetic oligonucleotide
cuccgguuuauugagguca

SEQ ID NO: 1889487 - RNA, 19 nt, Artificial Sequence
  Description of Artificial Sequence: Synthetic oligonucleotide
ucgaucucuggguuggguu

SEQ ID NO: 1889488 - RNA, 19 nt, Artificial Sequence
  Description of Artificial Sequence: Synthetic oligonucleotide
uuuccccaagcacgcgacc

SEQ ID NO: 1889489 - RNA, 19 nt, Artificial Sequence
  Description of Artificial Sequence: Synthetic oligonucleotide
ccggccauggcccuuagcc

SEQ ID NO: 1889490 - RNA, 19 nt, Artificial Sequence
  Description of Artificial Sequence: Synthetic oligonucleotide
cccacgacaacuccgggcc

SEQ ID NO: 1889491 - RNA, 19 nt, Artificial Sequence
  Description of Artificial Sequence: Synthetic oligonucleotide
uccccaagcacgcgacccc

SEQ ID NO: 1889492 - RNA, 19 nt, Artificial Sequence
  Description of Artificial Sequence: Synthetic oligonucleotide
agcccaagaggaaauccag

SEQ ID NO: 1889493 - RNA, 19 nt, Artificial Sequence
  Description of Artificial Sequence: Synthetic oligonucleotide
gcgcuuuuccccaagcacg

SEQ ID NO: 1889494 - RNA, 19 nt, Artificial Sequence
  Description of Artificial Sequence: Synthetic oligonucleotide
uggcccucauaguuuucag

SEQ ID NO: 1889495 - RNA, 19 nt, Artificial Sequence
  Description of Artificial Sequence: Synthetic oligonucleotide
gcuccugccacuguggacc

SEQ ID NO: 1889496 - RNA, 19 nt, Artificial Sequence
  Description of Artificial Sequence: Synthetic oligonucleotide
ucaucgcccucaucucugc

SEQ ID NO: 1889497 - RNA, 19 nt, Artificial Sequence
  Description of Artificial Sequence: Synthetic oligonucleotide
gcaccauucgucgacgucc

SEQ ID NO: 1889498 - RNA, 19 nt, Artificial Sequence
  Description of Artificial Sequence: Synthetic oligonucleotide
cauacaacuucucuaccgu

SEQ ID NO: 1889499 - RNA, 19 nt, Artificial Sequence
  Description of Artificial Sequence: Synthetic oligonucleotide
cuguggaccacaaugucgu

SEQ ID NO: 1889500 - RNA, 19 nt, Artificial Sequence
  Description of Artificial Sequence: Synthetic oligonucleotide
uguggucgcccgcccgacg

SEQ ID NO: 1889501 - RNA, 19 nt, Artificial Sequence
  Description of Artificial Sequence: Synthetic oligonucleotide
gugggcuccgguuuauuga

SEQ ID NO: 1889502 - RNA, 19 nt, Artificial Sequence
  Description of Artificial Sequence: Synthetic oligonucleotide
ugacagcuacauggagugg

SEQ ID NO: 1889503 - RNA, 19 nt, Artificial Sequence
  Description of Artificial Sequence: Synthetic oligonucleotide
ggaugacagcuacauggag

SEQ ID NO: 1889504 - RNA, 19 nt, Artificial Sequence
  Description of Artificial Sequence: Synthetic oligonucleotide
cucggauccucuucgaucu

SEQ ID NO: 1889505 - RNA, 19 nt, Artificial Sequence
  Description of Artificial Sequence: Synthetic oligonucleotide
gagguuugggugccgggga

SEQ ID NO: 1889506 - RNA, 19 nt, Artificial Sequence
  Description of Artificial Sequence: Synthetic oligonucleotide
uccgcgcuuuuccccaagc

SEQ ID NO: 1889507 - RNA, 19 nt, Artificial Sequence
  Description of Artificial Sequence: Synthetic oligonucleotide
cagguacucagugccggcg

SEQ ID NO: 1889508 - RNA, 19 nt, Artificial Sequence
  Description of Artificial Sequence: Synthetic oligonucleotide
gcugcauacaacuucucua

SEQ ID NO: 1889509 - RNA, 19 nt, Artificial Sequence
  Description of Artificial Sequence: Synthetic oligonucleotide
agagggguccggccacacg

SEQ ID NO: 1889510 - RNA, 19 nt, Artificial Sequence
  Description of Artificial Sequence: Synthetic oligonucleotide
cacggccaagugcagggcc

SEQ ID NO: 1889511 - RNA, 19 nt, Artificial Sequence
  Description of Artificial Sequence: Synthetic oligonucleotide
aucucugccgucacuguca

SEQ ID NO: 1889512 - RNA, 19 nt, Artificial Sequence
  Description of Artificial Sequence: Synthetic oligonucleotide
cagccaccaacacuccggc

SEQ ID NO: 1889513 - RNA, 19 nt, Artificial Sequence
  Description of Artificial Sequence: Synthetic oligonucleotide
agccaccucgguggaaccc

SEQ ID NO: 1889514 - RNA, 19 nt, Artificial Sequence
  Description of Artificial Sequence: Synthetic oligonucleotide
cuaccguggaugccucccc

SEQ ID NO: 1889515 - RNA, 19 nt, Artificial Sequence
  Description of Artificial Sequence: Synthetic oligonucleotide
gagggguccggccacacgu

SEQ ID NO: 1889516 - RNA, 19 nt, Artificial Sequence
  Description of Artificial Sequence: Synthetic oligonucleotide
ucugcgcccagcccugguc

SEQ ID NO: 1889517 - RNA, 19 nt, Artificial Sequence
  Description of Artificial Sequence: Synthetic oligonucleotide
cugggcuucuaccgccagg

SEQ ID NO: 1889518 - RNA, 19 nt, Artificial Sequence
  Description of Artificial Sequence: Synthetic oligonucleotide
accauucgucgacguccgc

SEQ ID NO: 1889519 - RNA, 19 nt, Artificial Sequence
  Description of Artificial Sequence: Synthetic oligonucleotide
ucucuaccguggaugccuc

SEQ ID NO: 1889520 - RNA, 19 nt, Artificial Sequence
  Description of Artificial Sequence: Synthetic oligonucleotide
uucgaucucuggguugggu

SEQ ID NO: 1889521 - RNA, 19 nt, Artificial Sequence
  Description of Artificial Sequence: Synthetic oligonucleotide
ugggccggagcagagcacu

SEQ ID NO: 1889522 - RNA, 19 nt, Artificial Sequence
  Description of Artificial Sequence: Synthetic oligonucleotide
caugcgggcgguaggguca

SEQ ID NO: 1889523 - RNA, 19 nt, Artificial Sequence
  Description of Artificial Sequence: Synthetic oligonucleotide
guggucgcccgcccgacgc

SEQ ID NO: 1889524 - RNA, 19 nt, Artificial Sequence
  Description of Artificial Sequence: Synthetic oligonucleotide
uacucagugccggcggaga

SEQ ID NO: 1889525 - RNA, 19 nt, Artificial Sequence
  Description of Artificial Sequence: Synthetic oligonucleotide
cugcgcccagcccuggucc

SEQ ID NO: 1889526 - RNA, 19 nt, Artificial Sequence
  Description of Artificial Sequence: Synthetic oligonucleotide
caagcacgcgaccccggcc

SEQ ID NO: 1889527 - RNA, 19 nt, Artificial Sequence
  Description of Artificial Sequence: Synthetic oligonucleotide
ucgcugcugcugcugcugc

SEQ ID NO: 1889528 - RNA, 19 nt, Artificial Sequence
  Description of Artificial Sequence: Synthetic oligonucleotide
uccaguacguuggcugccu

SEQ ID NO: 1889529 - RNA, 19 nt, Artificial Sequence
  Description of Artificial Sequence: Synthetic oligonucleotide
acguccgcgcuuuucccca

SEQ ID NO: 1889530 - RNA, 19 nt, Artificial Sequence
  Description of Artificial Sequence: Synthetic oligonucleotide
gucgcaccauucgucgacg

SEQ ID NO: 1889531 - RNA, 19 nt, Artificial Sequence
  Description of Artificial Sequence: Synthetic oligonucleotide
cucgcucagccaccaacac

SEQ ID NO: 1889532 - RNA, 19 nt, Artificial Sequence
  Description of Artificial Sequence: Synthetic oligonucleotide
aagggcucaugcugaugua

SEQ ID NO: 1889533 - RNA, 19 nt, Artificial Sequence
  Description of Artificial Sequence: Synthetic oligonucleotide
gcuccaguacguuggcugc

SEQ ID NO: 1889534 - RNA, 19 nt, Artificial Sequence
  Description of Artificial Sequence: Synthetic oligonucleotide
cauauucaucgcccucauc

SEQ ID NO: 1889535 - RNA, 19 nt, Artificial Sequence
  Description of Artificial Sequence: Synthetic oligonucleotide
acugccaaguggggugcgg

SEQ ID NO: 1889536 - RNA, 19 nt, Artificial Sequence
  Description of Artificial Sequence: Synthetic oligonucleotide
gcccucauaguuuucagcu

SEQ ID NO: 1889537 - RNA, 19 nt, Artificial Sequence
  Description of Artificial Sequence: Synthetic oligonucleotide
gagacaucccuugggcguc

SEQ ID NO: 1889538 - RNA, 19 nt, Artificial Sequence
  Description of Artificial Sequence: Synthetic oligonucleotide
agcagcgcgcaugcgcacg

SEQ ID NO: 1889539 - RNA, 19 nt, Artificial Sequence
  Description of Artificial Sequence: Synthetic oligonucleotide
ggagcagagcacugccaag

SEQ ID NO: 1889540 - RNA, 19 nt, Artificial Sequence
  Description of Artificial Sequence: Synthetic oligonucleotide
gggcgguagggucagcacc

SEQ ID NO: 1889541 - RNA, 19 nt, Artificial Sequence
  Description of Artificial Sequence: Synthetic oligonucleotide
uagccaccucgguggaacc

SEQ ID NO: 1889542 - RNA, 19 nt, Artificial Sequence
  Description of Artificial Sequence: Synthetic oligonucleotide
guacguuggcugccugggc

SEQ ID NO: 1889543 - RNA, 19 nt, Artificial Sequence
  Description of Artificial Sequence: Synthetic oligonucleotide
ccauucgucgacguccgcg

SEQ ID NO: 1889544 - RNA, 19 nt, Artificial Sequence
  Description of Artificial Sequence: Synthetic oligonucleotide
ucaggcgggguuggaguca

SEQ ID NO: 1889545 - RNA, 19 nt, Artificial Sequence
  Description of Artificial Sequence: Synthetic oligonucleotide
uucgucgacguccgcgcuu

SEQ ID NO: 1889546 - RNA, 19 nt, Artificial Sequence
  Description of Artificial Sequence: Synthetic oligonucleotide
ccaugugcacggaggaggc

SEQ ID NO: 1889547 - RNA, 19 nt, Artificial Sequence
  Description of Artificial Sequence: Synthetic oligonucleotide
ggacccagggagccuaggc

SEQ ID NO: 1889548 - RNA, 19 nt, Artificial Sequence
  Description of Artificial Sequence: Synthetic oligonucleotide
aggggcgcccacgacaacu

SEQ ID NO: 1889549 - RNA, 19 nt, Artificial Sequence
  Description of Artificial Sequence: Synthetic oligonucleotide
auucgucgacguccgcgcu

SEQ ID NO: 1889550 - RNA, 19 nt, Artificial Sequence
  Description of Artificial Sequence: Synthetic oligonucleotide
ccauccucagugacguagc

SEQ ID NO: 1889551 - RNA, 19 nt, Artificial Sequence
  Description of Artificial Sequence: Synthetic oligonucleotide
acucagugccggcggagaa

SEQ ID NO: 1889552 - RNA, 19 nt, Artificial Sequence
  Description of Artificial Sequence: Synthetic oligonucleotide
agcgcgcaugcgcacgugu

SEQ ID NO: 1889553 - RNA, 19 nt, Artificial Sequence
  Description of Artificial Sequence: Synthetic oligonucleotide
accaacacuccggcgccag

SEQ ID NO: 1889554 - RNA, 19 nt, Artificial Sequence
  Description of Artificial Sequence: Synthetic oligonucleotide
cugccaaguggggugcggc

SEQ ID NO: 1889555 - RNA, 19 nt, Artificial Sequence
  Description of Artificial Sequence: Synthetic oligonucleotide
caugugcacggaggaggcg

SEQ ID NO: 1889556 - RNA, 19 nt, Artificial Sequence
  Description of Artificial Sequence: Synthetic oligonucleotide
guacucagugccggcggag

SEQ ID NO: 1889557 - RNA, 19 nt, Artificial Sequence
  Description of Artificial Sequence: Synthetic oligonucleotide
cugcggugagcuccagcgc

SEQ ID NO: 1889558 - RNA, 19 nt, Artificial Sequence
  Description of Artificial Sequence: Synthetic oligonucleotide
caucgcccucaucucugcc

SEQ ID NO: 1889559 - RNA, 19 nt, Artificial Sequence
  Description of Artificial Sequence: Synthetic oligonucleotide
cuacauggaguggggugug

SEQ ID NO: 1889560 - RNA, 19 nt, Artificial Sequence
  Description of Artificial Sequence: Synthetic oligonucleotide
cuccaguacguuggcugcc

SEQ ID NO: 1889561 - RNA, 19 nt, Artificial Sequence
  Description of Artificial Sequence: Synthetic oligonucleotide
aggauggcugcuaggugca

SEQ ID NO: 1889562 - RNA, 19 nt, Artificial Sequence
  Description of Artificial Sequence: Synthetic oligonucleotide
cucuaccguggaugccucc

SEQ ID NO: 1889563 - RNA, 19 nt, Artificial Sequence
  Description of Artificial Sequence: Synthetic oligonucleotide
cuucaucacucggauccuc

SEQ ID NO: 1889564 - RNA, 19 nt, Artificial Sequence
  Description of Artificial Sequence: Synthetic oligonucleotide
uugggccggagcagagcac

SEQ ID NO: 1889565 - RNA, 19 nt, Artificial Sequence
  Description of Artificial Sequence: Synthetic oligonucleotide
agggccguguccccauccu

SEQ ID NO: 1889566 - RNA, 19 nt, Artificial Sequence
  Description of Artificial Sequence: Synthetic oligonucleotide
aggaagggcucaugcugau

SEQ ID NO: 1889567 - RNA, 19 nt, Artificial Sequence
  Description of Artificial Sequence: Synthetic oligonucleotide
uguggcccucauaguuuuc

SEQ ID NO: 1889568 - RNA, 19 nt, Artificial Sequence
  Description of Artificial Sequence: Synthetic oligonucleotide
ucgcaccauucgucgacgu

SEQ ID NO: 1889569 - RNA, 19 nt, Artificial Sequence
  Description of Artificial Sequence: Synthetic oligonucleotide
ggcaaggaugggauugggc

SEQ ID NO: 1889570 - RNA, 19 nt, Artificial Sequence
  Description of Artificial Sequence: Synthetic oligonucleotide
augcgcacgugugugcccu

SEQ ID NO: 1889571 - RNA, 19 nt, Artificial Sequence
  Description of Artificial Sequence: Synthetic oligonucleotide
gguuugggugccggggagg

SEQ ID NO: 1889572 - RNA, 19 nt, Artificial Sequence
  Description of Artificial Sequence: Synthetic oligonucleotide
gcccuuagccaccucggug

SEQ ID NO: 1889573 - RNA, 19 nt, Artificial Sequence
  Description of Artificial Sequence: Synthetic oligonucleotide
uacaugcgggcgguagggu

SEQ ID NO: 1889574 - RNA, 19 nt, Artificial Sequence
  Description of Artificial Sequence: Synthetic oligonucleotide
cugauguaucacggccaag

SEQ ID NO: 1889575 - RNA, 19 nt, Artificial Sequence
  Description of Artificial Sequence: Synthetic oligonucleotide
gcccacgacaacuccgggc

SEQ ID NO: 1889576 - RNA, 19 nt, Artificial Sequence
  Description of Artificial Sequence: Synthetic oligonucleotide
gcugauguaucacggccaa

SEQ ID NO: 1889577 - RNA, 19 nt, Artificial Sequence
  Description of Artificial Sequence: Synthetic oligonucleotide
uugggcgucuggggcgggg

SEQ ID NO: 1889578 - RNA, 19 nt, Artificial Sequence
  Description of Artificial Sequence: Synthetic oligonucleotide
gcugcaagggccgagcuua

SEQ ID NO: 1889579 - RNA, 19 nt, Artificial Sequence
  Description of Artificial Sequence: Synthetic oligonucleotide
cuccgggcccagcucugcg

SEQ ID NO: 1889580 - RNA, 19 nt, Artificial Sequence
  Description of Artificial Sequence: Synthetic oligonucleotide
cgugugugcccucacccgg

SEQ ID NO: 1889581 - RNA, 19 nt, Artificial Sequence
  Description of Artificial Sequence: Synthetic oligonucleotide
ggagccgccgcgucgggac

SEQ ID NO: 1889582 - RNA, 19 nt, Artificial Sequence
  Description of Artificial Sequence: Synthetic oligonucleotide
cuucgaucucuggguuggg

SEQ ID NO: 1889583 - RNA, 19 nt, Artificial Sequence
  Description of Artificial Sequence: Synthetic oligonucleotide
gggguccggccacacgugg

SEQ ID NO: 1889584 - RNA, 19 nt, Artificial Sequence
  Description of Artificial Sequence: Synthetic oligonucleotide
uucuaccgccaggugcaga

SEQ ID NO: 1889585 - RNA, 19 nt, Artificial Sequence
  Description of Artificial Sequence: Synthetic oligonucleotide
ccauacaugcgggcgguag

SEQ ID NO: 1889586 - RNA, 19 nt, Artificial Sequence
  Description of Artificial Sequence: Synthetic oligonucleotide
cuaccgccaggugcagagg

SEQ ID NO: 1889587 - RNA, 19 nt, Artificial Sequence
  Description of Artificial Sequence: Synthetic oligonucleotide
ugccggggagggagguagc

SEQ ID NO: 1889588 - RNA, 19 nt, Artificial Sequence
  Description of Artificial Sequence: Synthetic oligonucleotide
ccaccaacacuccggcgcc

SEQ ID NO: 1889589 - RNA, 19 nt, Artificial Sequence
  Description of Artificial Sequence: Synthetic oligonucleotide
cccuugggcgucuggggcg

SEQ ID NO: 1889590 - RNA, 19 nt, Artificial Sequence
  Description of Artificial Sequence: Synthetic oligonucleotide
gugugugcccucacccggc

SEQ ID NO: 1889591 - RNA, 19 nt, Artificial Sequence
  Description of Artificial Sequence: Synthetic oligonucleotide
ucgucgacguccgcgcuuu

SEQ ID NO: 1889592 - RNA, 19 nt, Artificial Sequence
  Description of Artificial Sequence: Synthetic oligonucleotide
uccagcgcuuccgccuccc

SEQ ID NO: 1889593 - RNA, 19 nt, Artificial Sequence
  Description of Artificial Sequence: Synthetic oligonucleotide
acacgugggcuccgguuua

SEQ ID NO: 1889594 - RNA, 19 nt, Artificial Sequence
  Description of Artificial Sequence: Synthetic oligonucleotide
acgacaacuccgggcccag

SEQ ID NO: 1889595 - RNA, 19 nt, Artificial Sequence
  Description of Artificial Sequence: Synthetic oligonucleotide
caaggcuguuuggccuagg

SEQ ID NO: 1889596 - RNA, 19 nt, Artificial Sequence
  Description of Artificial Sequence: Synthetic oligonucleotide
gcacgugugugcccucacc

SEQ ID NO: 1889597 - RNA, 19 nt, Artificial Sequence
  Description of Artificial Sequence: Synthetic oligonucleotide
gguacucagugccggcgga

SEQ ID NO: 1889598 - RNA, 19 nt, Artificial Sequence
  Description of Artificial Sequence: Synthetic oligonucleotide
ggcgguagggucagcacca

SEQ ID NO: 1889599 - RNA, 19 nt, Artificial Sequence
  Description of Artificial Sequence: Synthetic oligonucleotide
ggcuccgguuuauugaggu

SEQ ID NO: 1889600 - RNA, 19 nt, Artificial Sequence
  Description of Artificial Sequence: Synthetic oligonucleotide
uggucgcccgcccgacgcu

SEQ ID NO: 1889601 - RNA, 19 nt, Artificial Sequence
  Description of Artificial Sequence: Synthetic oligonucleotide
agccuaggccgcugucgca

SEQ ID NO: 1889602 - RNA, 19 nt, Artificial Sequence
  Description of Artificial Sequence: Synthetic oligonucleotide
ccagguacucagugccggc

SEQ ID NO: 1889603 - RNA, 19 nt, Artificial Sequence
  Description of Artificial Sequence: Synthetic oligonucleotide
gcgcccacgacaacuccgg

SEQ ID NO: 1889604 - RNA, 19 nt, Artificial Sequence
  Description of Artificial Sequence: Synthetic oligonucleotide
ggcgggguuggagucauca

SEQ ID NO: 1889605 - RNA, 19 nt, Artificial Sequence
  Description of Artificial Sequence: Synthetic oligonucleotide
gcgggguuggagucaucag

SEQ ID NO: 1889606 - RNA, 19 nt, Artificial Sequence
  Description of Artificial Sequence: Synthetic oligonucleotide
cuucuagcugcagcuucca

SEQ ID NO: 1889607 - RNA, 19 nt, Artificial Sequence
  Description of Artificial Sequence: Synthetic oligonucleotide
gugugcccucacccggcag

SEQ ID NO: 1889608 - RNA, 19 nt, Artificial Sequence
  Description of Artificial Sequence: Synthetic oligonucleotide
ggaagagguuugggugccg

SEQ ID NO: 1889609 - RNA, 19 nt, Artificial Sequence
  Description of Artificial Sequence: Synthetic oligonucleotide
cugucgcaccauucgucga

SEQ ID NO: 1889610 - RNA, 19 nt, Artificial Sequence
  Description of Artificial Sequence: Synthetic oligonucleotide
cggggagggagguagccag

SEQ ID NO: 1889611 - RNA, 19 nt, Artificial Sequence
  Description of Artificial Sequence: Synthetic oligonucleotide
aggcgggcaaggaugggau

SEQ ID NO: 1889612 - RNA, 19 nt, Artificial Sequence
  Description of Artificial Sequence: Synthetic oligonucleotide
cacgacaacuccgggccca

SEQ ID NO: 1889613 - RNA, 19 nt, Artificial Sequence
  Description of Artificial Sequence: Synthetic oligonucleotide
guccgcgcuuuuccccaag

SEQ ID NO: 1889614 - RNA, 19 nt, Artificial Sequence
  Description of Artificial Sequence: Synthetic oligonucleotide
ggcuggagcagcgcgcaug

SEQ ID NO: 1889615 - RNA, 19 nt, Artificial Sequence
  Description of Artificial Sequence: Synthetic oligonucleotide
cccucgcucagccaccaac

SEQ ID NO: 1889616 - RNA, 19 nt, Artificial Sequence
  Description of Artificial Sequence: Synthetic oligonucleotide
gcuuuuccccaagcacgcg

SEQ ID NO: 1889617 - RNA, 19 nt, Artificial Sequence
  Description of Artificial Sequence: Synthetic oligonucleotide
ccaagcacgcgaccccggc

SEQ ID NO: 1889618 - RNA, 19 nt, Artificial Sequence
  Description of Artificial Sequence: Synthetic oligonucleotide
gccaccucgguggaacccc

SEQ ID NO: 1889619 - RNA, 19 nt, Artificial Sequence
  Description of Artificial Sequence: Synthetic oligonucleotide
gggcaaggaugggauuggg

SEQ ID NO: 1889620 - RNA, 19 nt, Artificial Sequence
  Description of Artificial Sequence: Synthetic oligonucleotide
guuuggccuaggucauucu

SEQ ID NO: 1889621 - RNA, 19 nt, Artificial Sequence
  Description of Artificial Sequence: Synthetic oligonucleotide
gagccgccgcgucgggacc

SEQ ID NO: 1889622 - RNA, 19 nt, Artificial Sequence
  Description of Artificial Sequence: Synthetic oligonucleotide
ugcaagggccgagcuuauc

SEQ ID NO: 1889623 - RNA, 19 nt, Artificial Sequence
  Description of Artificial Sequence: Synthetic oligonucleotide
ggauugggccggagcagag

SEQ ID NO: 1889624 - RNA, 19 nt, Artificial Sequence
  Description of Artificial Sequence: Synthetic oligonucleotide
cgugggcuccgguuuauug

SEQ ID NO: 1889625 - RNA, 19 nt, Artificial Sequence
  Description of Artificial Sequence: Synthetic oligonucleotide
ccgacgcugggcucugcgg

SEQ ID NO: 1889626 - RNA, 19 nt, Artificial Sequence
  Description of Artificial Sequence: Synthetic oligonucleotide
gcgaccccggccauggccc

SEQ ID NO: 1889627 - RNA, 19 nt, Artificial Sequence
  Description of Artificial Sequence: Synthetic oligonucleotide
gagcacugccaaguggggu

SEQ ID NO: 1889628 - RNA, 19 nt, Artificial Sequence
  Description of Artificial Sequence: Synthetic oligonucleotide
gccgagcuuaucauccuca

SEQ ID NO: 1889629 - RNA, 19 nt, Artificial Sequence
  Description of Artificial Sequence: Synthetic oligonucleotide
augcgggcgguagggucag

SEQ ID NO: 1889630 - RNA, 19 nt, Artificial Sequence
  Description of Artificial Sequence: Synthetic oligonucleotide
gaccaggggcgcccacgac

SEQ ID NO: 1889631 - RNA, 19 nt, Artificial Sequence
  Description of Artificial Sequence: Synthetic oligonucleotide
gucgacguccgcgcuuuuc

SEQ ID NO: 1889632 - RNA, 19 nt, Artificial Sequence
  Description of Artificial Sequence: Synthetic oligonucleotide
ggaagggcucaugcugaug

SEQ ID NO: 1889633 - RNA, 19 nt, Artificial Sequence
  Description of Artificial Sequence: Synthetic oligonucleotide
ggcgccagcugcauacaac

SEQ ID NO: 1889634 - RNA, 19 nt, Artificial Sequence
  Description of Artificial Sequence: Synthetic oligonucleotide
caagggccgagcuuaucau

SEQ ID NO: 1889635 - RNA, 19 nt, Artificial Sequence
  Description of Artificial Sequence: Synthetic oligonucleotide
gggauugggccggagcaga

SEQ ID NO: 1889636 - RNA, 19 nt, Artificial Sequence
  Description of Artificial Sequence: Synthetic oligonucleotide
ggccgagcuuaucauccuc

SEQ ID NO: 1889637 - RNA, 19 nt, Artificial Sequence
  Description of Artificial Sequence: Synthetic oligonucleotide
gcuccgguuuauugagguc

SEQ ID NO: 1889638 - RNA, 19 nt, Artificial Sequence
  Description of Artificial Sequence: Synthetic oligonucleotide
gacaucccuugggcgucug

SEQ ID NO: 1889639 - RNA, 19 nt, Artificial Sequence
  Description of Artificial Sequence: Synthetic oligonucleotide
cuggguuggguugaggguu

SEQ ID NO: 1889640 - RNA, 19 nt, Artificial Sequence
  Description of Artificial Sequence: Synthetic oligonucleotide
cuaggccgcugucgcacca

SEQ ID NO: 1889641 - RNA, 19 nt, Artificial Sequence
  Description of Artificial Sequence: Synthetic oligonucleotide
ggguccggccacacguggg

SEQ ID NO: 1889642 - RNA, 19 nt, Artificial Sequence
  Description of Artificial Sequence: Synthetic oligonucleotide
gggcuccaugugcacggag

SEQ ID NO: 1889643 - RNA, 19 nt, Artificial Sequence
  Description of Artificial Sequence: Synthetic oligonucleotide
ccacuguggaccacaaugu

SEQ ID NO: 1889644 - RNA, 19 nt, Artificial Sequence
  Description of Artificial Sequence: Synthetic oligonucleotide
ugcuaggugcaaggcuguu

SEQ ID NO: 1889645 - RNA, 19 nt, Artificial Sequence
  Description of Artificial Sequence: Synthetic oligonucleotide
ccaggugcagagggguccg

SEQ ID NO: 1889646 - RNA, 19 nt, Artificial Sequence
  Description of Artificial Sequence: Synthetic oligonucleotide
guguggcccucauaguuuu

SEQ ID NO: 1889647 - RNA, 19 nt, Artificial Sequence
  Description of Artificial Sequence: Synthetic oligonucleotide
gccuaggccgcugucgcac

SEQ ID NO: 1889648 - RNA, 19 nt, Artificial Sequence
  Description of Artificial Sequence: Synthetic oligonucleotide
agggguccggccacacgug

SEQ ID NO: 1889649 - RNA, 19 nt, Artificial Sequence
  Description of Artificial Sequence: Synthetic oligonucleotide
cacacgugggcuccgguuu

SEQ ID NO: 1889650 - RNA, 19 nt, Artificial Sequence
  Description of Artificial Sequence: Synthetic oligonucleotide
gggcuccgguuuauugagg

SEQ ID NO: 1889651 - RNA, 19 nt, Artificial Sequence
  Description of Artificial Sequence: Synthetic oligonucleotide
cugcaucuuuguggaugac

SEQ ID NO: 1889652 - RNA, 19 nt, Artificial Sequence
  Description of Artificial Sequence: Synthetic oligonucleotide
acgcugggcucugcgguga

SEQ ID NO: 1889653 - RNA, 19 nt, Artificial Sequence
  Description of Artificial Sequence: Synthetic oligonucleotide
gcgcaugcgcacgugugug

SEQ ID NO: 1889654 - RNA, 19 nt, Artificial Sequence
  Description of Artificial Sequence: Synthetic oligonucleotide
cggcggagaagcccaagag

SEQ ID NO: 1889655 - RNA, 19 nt, Artificial Sequence
  Description of Artificial Sequence: Synthetic oligonucleotide
caacacuccggcgccagcu

SEQ ID NO: 1889656 - RNA, 19 nt, Artificial Sequence
  Description of Artificial Sequence: Synthetic oligonucleotide
caaagaccaggggcgccca

SEQ ID NO: 1889657 - RNA, 19 nt, Artificial Sequence
  Description of Artificial Sequence: Synthetic oligonucleotide
gcccucacccggcaggcca

SEQ ID NO: 1889658 - RNA, 19 nt, Artificial Sequence
  Description of Artificial Sequence: Synthetic oligonucleotide
gucgcccgcccgacgcugg

SEQ ID NO: 1889659 - RNA, 19 nt, Artificial Sequence
  Description of Artificial Sequence: Synthetic oligonucleotide
ccuaggccgcugucgcacc

SEQ ID NO: 1889660 - RNA, 19 nt, Artificial Sequence
  Description of Artificial Sequence: Synthetic oligonucleotide
uaggccgcugucgcaccau

SEQ ID NO: 1889661 - RNA, 19 nt, Artificial Sequence
  Description of Artificial Sequence: Synthetic oligonucleotide
agcacgcgaccccggccau

SEQ ID NO: 1889662 - RNA, 19 nt, Artificial Sequence
  Description of Artificial Sequence: Synthetic oligonucleotide
ccuugggcgucuggggcgg

SEQ ID NO: 1889663 - RNA, 19 nt, Artificial Sequence
  Description of Artificial Sequence: Synthetic oligonucleotide
gcaaggcuguuuggccuag

SEQ ID NO: 1889664 - RNA, 19 nt, Artificial Sequence
  Description of Artificial Sequence: Synthetic oligonucleotide
cuguggucgcccgcccgac

SEQ ID NO: 1889665 - RNA, 19 nt, Artificial Sequence
  Description of Artificial Sequence: Synthetic oligonucleotide
cgagcuuaucauccucauc

SEQ ID NO: 1889666 - RNA, 19 nt, Artificial Sequence
  Description of Artificial Sequence: Synthetic oligonucleotide
ugcgcacgugugugcccuc

SEQ ID NO: 1889667 - RNA, 19 nt, Artificial Sequence
  Description of Artificial Sequence: Synthetic oligonucleotide
cgcugucgcaccauucguc

SEQ ID NO: 1889668 - RNA, 19 nt, Artificial Sequence
  Description of Artificial Sequence: Synthetic oligonucleotide
aggccgcugucgcaccauu

SEQ ID NO: 1889669 - RNA, 19 nt, Artificial Sequence
  Description of Artificial Sequence: Synthetic oligonucleotide
gcgucuggggcggggcugg

SEQ ID NO: 1889670 - RNA, 19 nt, Artificial Sequence
  Description of Artificial Sequence: Synthetic oligonucleotide
gugcacggaggaggcgggc

SEQ ID NO: 1889671 - RNA, 19 nt, Artificial Sequence
  Description of Artificial Sequence: Synthetic oligonucleotide
cuugggcgucuggggcggg

SEQ ID NO: 1889672 - RNA, 19 nt, Artificial Sequence
  Description of Artificial Sequence: Synthetic oligonucleotide
ccacgacaacuccgggccc

SEQ ID NO: 1889673 - RNA, 19 nt, Artificial Sequence
  Description of Artificial Sequence: Synthetic oligonucleotide
gggacccagggagccuagg

SEQ ID NO: 1889674 - RNA, 19 nt, Artificial Sequence
  Description of Artificial Sequence: Synthetic oligonucleotide
cgacguccgcgcuuuuccc

SEQ ID NO: 1889675 - RNA, 19 nt, Artificial Sequence
  Description of Artificial Sequence: Synthetic oligonucleotide
guagccaguuuuggcuccu

SEQ ID NO: 1889676 - RNA, 19 nt, Artificial Sequence
  Description of Artificial Sequence: Synthetic oligonucleotide
ccaggggcgcccacgacaa

SEQ ID NO: 1889677 - RNA, 19 nt, Artificial Sequence
  Description of Artificial Sequence: Synthetic oligonucleotide
ccaguacguuggcugccug

SEQ ID NO: 1889678 - RNA, 19 nt, Artificial Sequence
  Description of Artificial Sequence: Synthetic oligonucleotide
ggaugggauugggccggag

SEQ ID NO: 1889679 - RNA, 19 nt, Artificial Sequence
  Description of Artificial Sequence: Synthetic oligonucleotide
gcugcugcugcugcugcaa

SEQ ID NO: 1889680 - RNA, 19 nt, Artificial Sequence
  Description of Artificial Sequence: Synthetic oligonucleotide
cuuagccaccucgguggaa

SEQ ID NO: 1889681 - RNA, 19 nt, Artificial Sequence
  Description of Artificial Sequence: Synthetic oligonucleotide
cacucggauccucuucgau

SEQ ID NO: 1889682 - RNA, 19 nt, Artificial Sequence
  Description of Artificial Sequence: Synthetic oligonucleotide
gggccguguccccauccuc

SEQ ID NO: 1889683 - RNA, 19 nt, Artificial Sequence
  Description of Artificial Sequence: Synthetic oligonucleotide
gcgcgcaugcgcacgugug

SEQ ID NO: 1889684 - RNA, 19 nt, Artificial Sequence
  Description of Artificial Sequence: Synthetic oligonucleotide
uccugccacuguggaccac

SEQ ID NO: 1889685 - RNA, 19 nt, Artificial Sequence
  Description of Artificial Sequence: Synthetic oligonucleotide
ccgggagccgccgcgucgg

SEQ ID NO: 1889686 - RNA, 19 nt, Artificial Sequence
  Description of Artificial Sequence: Synthetic oligonucleotide
gcacggaggaggcgggcaa

SEQ ID NO: 1889687 - RNA, 19 nt, Artificial Sequence
  Description of Artificial Sequence: Synthetic oligonucleotide
ggccacacgugggcuccgg

SEQ ID NO: 1889688 - RNA, 19 nt, Artificial Sequence
  Description of Artificial Sequence: Synthetic oligonucleotide
ccggcggagaagcccaaga

SEQ ID NO: 1889689 - RNA, 19 nt, Artificial Sequence
  Description of Artificial Sequence: Synthetic oligonucleotide
ccgguuuauugaggucagc

SEQ ID NO: 1889690 - RNA, 19 nt, Artificial Sequence
  Description of Artificial Sequence: Synthetic oligonucleotide
cacuaucgcugcugcugcu

SEQ ID NO: 1889691 - RNA, 19 nt, Artificial Sequence
  Description of Artificial Sequence: Synthetic oligonucleotide
ggggcgcccacgacaacuc

SEQ ID NO: 1889692 - RNA, 19 nt, Artificial Sequence
  Description of Artificial Sequence: Synthetic oligonucleotide
ccuguggucgcccgcccga

SEQ ID NO: 1889693 - RNA, 19 nt, Artificial Sequence
  Description of Artificial Sequence: Synthetic oligonucleotide
ggucgcccgcccgacgcug

SEQ ID NO: 1889694 - RNA, 19 nt, Artificial Sequence
  Description of Artificial Sequence: Synthetic oligonucleotide
cgucgggacccagggagcc

SEQ ID NO: 1889695 - RNA, 19 nt, Artificial Sequence
  Description of Artificial Sequence: Synthetic oligonucleotide
gcgguagggucagcaccag

SEQ ID NO: 1889696 - RNA, 19 nt, Artificial Sequence
  Description of Artificial Sequence: Synthetic oligonucleotide
ggcucugcggugagcucca

SEQ ID NO: 1889697 - RNA, 19 nt, Artificial Sequence
  Description of Artificial Sequence: Synthetic oligonucleotide
ccagcgcuuccgccucccg

SEQ ID NO: 1889698 - RNA, 19 nt, Artificial Sequence
  Description of Artificial Sequence: Synthetic oligonucleotide
gcgggcgguagggucagca

SEQ ID NO: 1889699 - RNA, 19 nt, Artificial Sequence
  Description of Artificial Sequence: Synthetic oligonucleotide
cgcaccauucgucgacguc

SEQ ID NO: 1889700 - RNA, 19 nt, Artificial Sequence
  Description of Artificial Sequence: Synthetic oligonucleotide
caggggcgcccacgacaac

SEQ ID NO: 1889701 - RNA, 19 nt, Artificial Sequence
  Description of Artificial Sequence: Synthetic oligonucleotide
ccuuagccaccucggugga

SEQ ID NO: 1889702 - RNA, 19 nt, Artificial Sequence
  Description of Artificial Sequence: Synthetic oligonucleotide
ccgcgcuuuuccccaagca

SEQ ID NO: 1889703 - RNA, 19 nt, Artificial Sequence
  Description of Artificial Sequence: Synthetic oligonucleotide
ggcucugagugagguaggu

SEQ ID NO: 1889704 - RNA, 19 nt, Artificial Sequence
  Description of Artificial Sequence: Synthetic oligonucleotide
cagcuacauggaguggggu

SEQ ID NO: 1889705 - RNA, 19 nt, Artificial Sequence
  Description of Artificial Sequence: Synthetic oligonucleotide
gcucugagugagguaggua

SEQ ID NO: 1889706 - RNA, 19 nt, Artificial Sequence
  Description of Artificial Sequence: Synthetic oligonucleotide
cgguagggucagcaccagc

SEQ ID NO: 1889707 - RNA, 19 nt, Artificial Sequence
  Description of Artificial Sequence: Synthetic oligonucleotide
acgugggcuccgguuuauu

SEQ ID NO: 1889708 - RNA, 19 nt, Artificial Sequence
  Description of Artificial Sequence: Synthetic oligonucleotide
cagcgcgcaugcgcacgug

SEQ ID NO: 1889709 - RNA, 19 nt, Artificial Sequence
  Description of Artificial Sequence: Synthetic oligonucleotide
cgggcgguagggucagcac

SEQ ID NO: 1889710 - RNA, 19 nt, Artificial Sequence
  Description of Artificial Sequence: Synthetic oligonucleotide
gcuuccgccucccgggaau

SEQ ID NO: 1889711 - RNA, 19 nt, Artificial Sequence
  Description of Artificial Sequence: Synthetic oligonucleotide
caccaacacuccggcgcca

SEQ ID NO: 1889712 - RNA, 19 nt, Artificial Sequence
  Description of Artificial Sequence: Synthetic oligonucleotide
ggcccuuagccaccucggu

SEQ ID NO: 1889713 - RNA, 19 nt, Artificial Sequence
  Description of Artificial Sequence: Synthetic oligonucleotide
gggccggagcagagcacug

SEQ ID NO: 1889714 - RNA, 19 nt, Artificial Sequence
  Description of Artificial Sequence: Synthetic oligonucleotide
gggccgagcuuaucauccu

SEQ ID NO: 1889715 - RNA, 19 nt, Artificial Sequence
  Description of Artificial Sequence: Synthetic oligonucleotide
gggccggugucugugguau

SEQ ID NO: 1889716 - RNA, 19 nt, Artificial Sequence
  Description of Artificial Sequence: Synthetic oligonucleotide
gcucugcgcccagcccugg

SEQ ID NO: 1889717 - RNA, 19 nt, Artificial Sequence
  Description of Artificial Sequence: Synthetic oligonucleotide
ggaccacaaugucgucaua

SEQ ID NO: 1889718 - RNA, 19 nt, Artificial Sequence
  Description of Artificial Sequence: Synthetic oligonucleotide
gcuaggugcaaggcuguuu

SEQ ID NO: 1889719 - RNA, 19 nt, Artificial Sequence
  Description of Artificial Sequence: Synthetic oligonucleotide
aggcgggguuggagucauc

SEQ ID NO: 1889720 - RNA, 19 nt, Artificial Sequence
  Description of Artificial Sequence: Synthetic oligonucleotide
cgcccacgacaacuccggg

SEQ ID NO: 1889721 - RNA, 19 nt, Artificial Sequence
  Description of Artificial Sequence: Synthetic oligonucleotide
gcagcgcgcaugcgcacgu

SEQ ID NO: 1889722 - RNA, 19 nt, Artificial Sequence
  Description of Artificial Sequence: Synthetic oligonucleotide
ccuggcucugagugaggua

SEQ ID NO: 1889723 - RNA, 19 nt, Artificial Sequence
  Description of Artificial Sequence: Synthetic oligonucleotide
ccccuguggucgcccgccc

SEQ ID NO: 1889724 - RNA, 19 nt, Artificial Sequence
  Description of Artificial Sequence: Synthetic oligonucleotide
cugcaagggccgagcuuau

SEQ ID NO: 1889725 - RNA, 19 nt, Artificial Sequence
  Description of Artificial Sequence: Synthetic oligonucleotide
ccgagcuuaucauccucau

SEQ ID NO: 1889726 - RNA, 19 nt, Artificial Sequence
  Description of Artificial Sequence: Synthetic oligonucleotide
gucgggacccagggagccu

SEQ ID NO: 1889727 - RNA, 19 nt, Artificial Sequence
  Description of Artificial Sequence: Synthetic oligonucleotide
cgcacgugugugcccucac

SEQ ID NO: 1889728 - RNA, 19 nt, Artificial Sequence
  Description of Artificial Sequence: Synthetic oligonucleotide
cucugcgcccagcccuggu

SEQ ID NO: 1889729 - RNA, 19 nt, Artificial Sequence
  Description of Artificial Sequence: Synthetic oligonucleotide
gcacgcgaccccggccaug

SEQ ID NO: 1889730 - RNA, 19 nt, Artificial Sequence
  Description of Artificial Sequence: Synthetic oligonucleotide
ccucacccggcaggccaag

SEQ ID NO: 1889731 - RNA, 19 nt, Artificial Sequence
  Description of Artificial Sequence: Synthetic oligonucleotide
cuccggcgccagcugcaua

SEQ ID NO: 1889732 - RNA, 19 nt, Artificial Sequence
  Description of Artificial Sequence: Synthetic oligonucleotide
cccucacccggcaggccaa

SEQ ID NO: 1889733 - RNA, 19 nt, Artificial Sequence
  Description of Artificial Sequence: Synthetic oligonucleotide
ccacacgugggcuccgguu

SEQ ID NO: 1889734 - RNA, 19 nt, Artificial Sequence
  Description of Artificial Sequence: Synthetic oligonucleotide
gccacacgugggcuccggu

SEQ ID NO: 1889735 - RNA, 19 nt, Artificial Sequence
  Description of Artificial Sequence: Synthetic oligonucleotide
cuguuuggccuaggucauu

SEQ ID NO: 1889736 - RNA, 19 nt, Artificial Sequence
  Description of Artificial Sequence: Synthetic oligonucleotide
ccgcugucgcaccauucgu

SEQ ID NO: 1889737 - RNA, 19 nt, Artificial Sequence
  Description of Artificial Sequence: Synthetic oligonucleotide
cccgcccgacgcugggcuc

SEQ ID NO: 1889738 - RNA, 19 nt, Artificial Sequence
  Description of Artificial Sequence: Synthetic oligonucleotide
cacgugggcuccgguuuau

SEQ ID NO: 1889739 - RNA, 19 nt, Artificial Sequence
  Description of Artificial Sequence: Synthetic oligonucleotide
cgcugcugcugcugcugca

SEQ ID NO: 1889740 - RNA, 19 nt, Artificial Sequence
  Description of Artificial Sequence: Synthetic oligonucleotide
cgcgcaugcgcacgugugu

SEQ ID NO: 1889741 - RNA, 19 nt, Artificial Sequence
  Description of Artificial Sequence: Synthetic oligonucleotide
ccccauacaugcgggcggu

SEQ ID NO: 1889742 - RNA, 19 nt, Artificial Sequence
  Description of Artificial Sequence: Synthetic oligonucleotide
ccgcgucgggacccaggga

SEQ ID NO: 1889743 - RNA, 19 nt, Artificial Sequence
  Description of Artificial Sequence: Synthetic oligonucleotide
cgggagccgccgcgucggg

SEQ ID NO: 1889744 - RNA, 19 nt, Artificial Sequence
  Description of Artificial Sequence: Synthetic oligonucleotide
caacagggguggggccggu

SEQ ID NO: 1889745 - RNA, 19 nt, Artificial Sequence
  Description of Artificial Sequence: Synthetic oligonucleotide
gcggugagcuccagcgcuu

SEQ ID NO: 1889746 - RNA, 19 nt, Artificial Sequence
  Description of Artificial Sequence: Synthetic oligonucleotide
cggccacacgugggcuccg

SEQ ID NO: 1889747 - RNA, 19 nt, Artificial Sequence
  Description of Artificial Sequence: Synthetic oligonucleotide
cggcgccagcugcauacaa

SEQ ID NO: 1889748 - RNA, 19 nt, Artificial Sequence
  Description of Artificial Sequence: Synthetic oligonucleotide
gccgccgcgucgggaccca

SEQ ID NO: 1889749 - RNA, 19 nt, Artificial Sequence
  Description of Artificial Sequence: Synthetic oligonucleotide
cguccgcgcuuuuccccaa

SEQ ID NO: 1889750 - RNA, 19 nt, Artificial Sequence
  Description of Artificial Sequence: Synthetic oligonucleotide
cccauacaugcgggcggua

SEQ ID NO: 1889751 - RNA, 19 nt, Artificial Sequence
  Description of Artificial Sequence: Synthetic oligonucleotide
ccgcccgacgcugggcucu

SEQ ID NO: 1889752 - RNA, 19 nt, Artificial Sequence
  Description of Artificial Sequence: Synthetic oligonucleotide
ccccauccucagugacgua

SEQ ID NO: 1889753 - RNA, 19 nt, Artificial Sequence
  Description of Artificial Sequence: Synthetic oligonucleotide
ccgccgcgucgggacccag

SEQ ID NO: 1889754 - RNA, 19 nt, Artificial Sequence
  Description of Artificial Sequence: Synthetic oligonucleotide
ccccucgcucagccaccaa

SEQ ID NO: 1889755 - RNA, 19 nt, Artificial Sequence
  Description of Artificial Sequence: Synthetic oligonucleotide
cgucgacguccgcgcuuuu

SEQ ID NO: 1889756 - RNA, 19 nt, Artificial Sequence
  Description of Artificial Sequence: Synthetic oligonucleotide
cacgcuucagaucagguca

SEQ ID NO: 1889757 - RNA, 19 nt, Artificial Sequence
  Description of Artificial Sequence: Synthetic oligonucleotide
ccacgcuucagaucagguc

SEQ ID NO: 1889758 - RNA, 19 nt, Artificial Sequence
  Description of Artificial Sequence: Synthetic oligonucleotide
aauggucagacauuggacc

SEQ ID NO: 1889759 - RNA, 19 nt, Artificial Sequence
  Description of Artificial Sequence: Synthetic oligonucleotide
uuuucuaugaugcuuagug

SEQ ID NO: 1889760 - RNA, 19 nt, Artificial Sequence
  Description of Artificial Sequence: Synthetic oligonucleotide
uguaugacaauaaucaggc

SEQ ID NO: 1889761 - RNA, 19 nt, Artificial Sequence
  Description of Artificial Sequence: Synthetic oligonucleotide
acuuaaagaauccaguuuc

SEQ ID NO: 1889762 - RNA, 19 nt, Artificial Sequence
  Description of Artificial Sequence: Synthetic oligonucleotide
uugugauugagauuuaccg

SEQ ID NO: 1889763 - RNA, 19 nt, Artificial Sequence
  Description of Artificial Sequence: Synthetic oligonucleotide
uuaacuuaaagaauccagu

SEQ ID NO: 1889764 - RNA, 19 nt, Artificial Sequence
  Description of Artificial Sequence: Synthetic oligonucleotide
ucugcuuuaggguaaagca

SEQ ID NO: 1889765 - RNA, 19 nt, Artificial Sequence
  Description of Artificial Sequence: Synthetic oligonucleotide
ugagauuuaccgaaggucu

SEQ ID NO: 1889766 - RNA, 19 nt, Artificial Sequence
  Description of Artificial Sequence: Synthetic oligonucleotide
ucaaugaacagcgugaugu

SEQ ID NO: 1889767 - RNA, 19 nt, Artificial Sequence
  Description of Artificial Sequence: Synthetic oligonucleotide
agucaguuaacuuaaagaa

SEQ ID NO: 1889768 - RNA, 19 nt, Artificial Sequence
  Description of Artificial Sequence: Synthetic oligonucleotide
agugccuuuacccaaugcg

SEQ ID NO: 1889769 - RNA, 19 nt, Artificial Sequence
  Description of Artificial Sequence: Synthetic oligonucleotide
cuguaugacaauaaucagg

SEQ ID NO: 1889770 - RNA, 19 nt, Artificial Sequence
  Description of Artificial Sequence: Synthetic oligonucleotide
acauuggaccaauaagucc

SEQ ID NO: 1889771 - RNA, 19 nt, Artificial Sequence
  Description of Artificial Sequence: Synthetic oligonucleotide
aucaguuucccacagagga

SEQ ID NO: 1889772 - RNA, 19 nt, Artificial Sequence
  Description of Artificial Sequence: Synthetic oligonucleotide
agcaacauucuuuaauuuc

SEQ ID NO: 1889773 - RNA, 19 nt, Artificial Sequence
  Description of Artificial Sequence: Synthetic oligonucleotide
guugaaaucucuugaaggc

SEQ ID NO: 1889774 - RNA, 19 nt, Artificial Sequence
  Description of Artificial Sequence: Synthetic oligonucleotide
cucuguaugacaauaauca

SEQ ID NO: 1889775 - RNA, 19 nt, Artificial Sequence
  Description of Artificial Sequence: Synthetic oligonucleotide
aaauuccgagcacaaauug

SEQ ID NO: 1889776 - RNA, 19 nt, Artificial Sequence
  Description of Artificial Sequence: Synthetic oligonucleotide
aggucuuaaguucuucugc

SEQ ID NO: 1889777 - RNA, 19 nt, Artificial Sequence
  Description of Artificial Sequence: Synthetic oligonucleotide
aauuccgagcacaaauugc

SEQ ID NO: 1889778 - RNA, 19 nt, Artificial Sequence
  Description of Artificial Sequence: Synthetic oligonucleotide
agaggauaaaggcauguuc

SEQ ID NO: 1889779 - RNA, 19 nt, Artificial Sequence
  Description of Artificial Sequence: Synthetic oligonucleotide
aacgaaaguagcgacgggg

SEQ ID NO: 1889780 - RNA, 19 nt, Artificial Sequence
  Description of Artificial Sequence: Synthetic oligonucleotide
uaaagaaaauuucuucuuc

SEQ ID NO: 1889781 - RNA, 19 nt, Artificial Sequence
  Description of Artificial Sequence: Synthetic oligonucleotide
aguuacaugacugcagucg

SEQ ID NO: 1889782 - RNA, 19 nt, Artificial Sequence
  Description of Artificial Sequence: Synthetic oligonucleotide
ucggauaaucucaacacca

SEQ ID NO: 1889783 - RNA, 19 nt, Artificial Sequence
  Description of Artificial Sequence: Synthetic oligonucleotide
aacagcgugauguacuugu

SEQ ID NO: 1889784 - RNA, 19 nt, Artificial Sequence
  Description of Artificial Sequence: Synthetic oligonucleotide
acuccacaaguuucgaugc

SEQ ID NO: 1889785 - RNA, 19 nt, Artificial Sequence
  Description of Artificial Sequence: Synthetic oligonucleotide
uucuaugaugcuuagugcu

SEQ ID NO: 1889786 - RNA, 19 nt, Artificial Sequence
  Description of Artificial Sequence: Synthetic oligonucleotide
guuaacuuaaagaauccag

SEQ ID NO: 1889787 - RNA, 19 nt, Artificial Sequence
  Description of Artificial Sequence: Synthetic oligonucleotide
uggauugugauugagauuu

SEQ ID NO: 1889788 - RNA, 19 nt, Artificial Sequence
  Description of Artificial Sequence: Synthetic oligonucleotide
gauugagauuuaccgaagg

SEQ ID NO: 1889789 - RNA, 19 nt, Artificial Sequence
  Description of Artificial Sequence: Synthetic oligonucleotide
aauccaguuuccuggaacu

SEQ ID NO: 1889790 - RNA, 19 nt, Artificial Sequence
  Description of Artificial Sequence: Synthetic oligonucleotide
ugaguauggauccagccaa

SEQ ID NO: 1889791 - RNA, 19 nt, Artificial Sequence
  Description of Artificial Sequence: Synthetic oligonucleotide
ugugauugagauuuaccga

SEQ ID NO: 1889792 - RNA, 19 nt, Artificial Sequence
  Description of Artificial Sequence: Synthetic oligonucleotide
guaaacagaugccauucgg

SEQ ID NO: 1889793 - RNA, 19 nt, Artificial Sequence
  Description of Artificial Sequence: Synthetic oligonucleotide
auagucaguuaacuuaaag

SEQ ID NO: 1889794 - RNA, 19 nt, Artificial Sequence
  Description of Artificial Sequence: Synthetic oligonucleotide
gauaggagcagugagugug

SEQ ID NO: 1889795 - RNA, 19 nt, Artificial Sequence
  Description of Artificial Sequence: Synthetic oligonucleotide
aaugaacagcgugauguac

SEQ ID NO: 1889796 - RNA, 19 nt, Artificial Sequence
  Description of Artificial Sequence: Synthetic oligonucleotide
agacaauugcuauggacuc

SEQ ID NO: 1889797 - RNA, 19 nt, Artificial Sequence
  Description of Artificial Sequence: Synthetic oligonucleotide
ucuguaugacaauaaucag

SEQ ID NO: 1889798 - RNA, 19 nt, Artificial Sequence
  Description of Artificial Sequence: Synthetic oligonucleotide
auugugauugagauuuacc

SEQ ID NO: 1889799 - RNA, 19 nt, Artificial Sequence
  Description of Artificial Sequence: Synthetic oligonucleotide
acuuggggucaguugaugc

SEQ ID NO: 1889800 - RNA, 19 nt, Artificial Sequence
  Description of Artificial Sequence: Synthetic oligonucleotide
agaacgaaaguagcgacgg

SEQ ID NO: 1889801 - RNA, 19 nt, Artificial Sequence
  Description of Artificial Sequence: Synthetic oligonucleotide
cuuguuguagaggauaaag

SEQ ID NO: 1889802 - RNA, 19 nt, Artificial Sequence
  Description of Artificial Sequence: Synthetic oligonucleotide
ucauuuaauucaacugcgc

SEQ ID NO: 1889803 - RNA, 19 nt, Artificial Sequence
  Description of Artificial Sequence: Synthetic oligonucleotide
accaauaaguccuuucgug

SEQ ID NO: 1889804 - RNA, 19 nt, Artificial Sequence
  Description of Artificial Sequence: Synthetic oligonucleotide
ucuggggaugagaacaugc

SEQ ID NO: 1889805 - RNA, 19 nt, Artificial Sequence
  Description of Artificial Sequence: Synthetic oligonucleotide
aucugucuaccacaggugg

SEQ ID NO: 1889806 - RNA, 19 nt, Artificial Sequence
  Description of Artificial Sequence: Synthetic oligonucleotide
agcuggagaaauuccgagc

SEQ ID NO: 1889807 - RNA, 19 nt, Artificial Sequence
  Description of Artificial Sequence: Synthetic oligonucleotide
uucggauaaucucaacacc

SEQ ID NO: 1889808 - RNA, 19 nt, Artificial Sequence
  Description of Artificial Sequence: Synthetic oligonucleotide
ugaugcuuagugcuccagg

SEQ ID NO: 1889809 - RNA, 19 nt, Artificial Sequence
  Description of Artificial Sequence: Synthetic oligonucleotide
uggcguaagccuucaaugg

SEQ ID NO: 1889810 - RNA, 19 nt, Artificial Sequence
  Description of Artificial Sequence: Synthetic oligonucleotide
agugaguaguccaagauca

SEQ ID NO: 1889811 - RNA, 19 nt, Artificial Sequence
  Description of Artificial Sequence: Synthetic oligonucleotide
ucugccgugagggugaaag

SEQ ID NO: 1889812 - RNA, 19 nt, Artificial Sequence
  Description of Artificial Sequence: Synthetic oligonucleotide
ucagacauuggaccaauaa

SEQ ID NO: 1889813 - RNA, 19 nt, Artificial Sequence
  Description of Artificial Sequence: Synthetic oligonucleotide
uuuaccgaaggucugugau

SEQ ID NO: 1889814 - RNA, 19 nt, Artificial Sequence
  Description of Artificial Sequence: Synthetic oligonucleotide
auuccgagcacaaauugcg

SEQ ID NO: 1889815 - RNA, 19 nt, Artificial Sequence
  Description of Artificial Sequence: Synthetic oligonucleotide
aaucucaacaccagaacga

SEQ ID NO: 1889816 - RNA, 19 nt, Artificial Sequence
  Description of Artificial Sequence: Synthetic oligonucleotide
ucuguuacggucugcaguc

SEQ ID NO: 1889817 - RNA, 19 nt, Artificial Sequence
  Description of Artificial Sequence: Synthetic oligonucleotide
cagacauuggaccaauaag

SEQ ID NO: 1889818 - RNA, 19 nt, Artificial Sequence
  Description of Artificial Sequence: Synthetic oligonucleotide
gagcagacaauugcuaugg

SEQ ID NO: 1889819 - RNA, 19 nt, Artificial Sequence
  Description of Artificial Sequence: Synthetic oligonucleotide
uccgagcacaaauugcggg

SEQ ID NO: 1889820 - RNA, 19 nt, Artificial Sequence
  Description of Artificial Sequence: Synthetic oligonucleotide
agacauuggaccaauaagu

SEQ ID NO: 1889821 - RNA, 19 nt, Artificial Sequence
  Description of Artificial Sequence: Synthetic oligonucleotide
uacccaaugcgccaucucc

SEQ ID NO: 1889822 - RNA, 19 nt, Artificial Sequence
  Description of Artificial Sequence: Synthetic oligonucleotide
augagaacaugcgugauug

SEQ ID NO: 1889823 - RNA, 19 nt, Artificial Sequence
  Description of Artificial Sequence: Synthetic oligonucleotide
gaggcucacauccgaaugg

SEQ ID NO: 1889824 - RNA, 19 nt, Artificial Sequence
  Description of Artificial Sequence: Synthetic oligonucleotide
gaaaguagcgacggggcgg

SEQ ID NO: 1889825 - RNA, 19 nt, Artificial Sequence
  Description of Artificial Sequence: Synthetic oligonucleotide
ugauugagauuuaccgaag

SEQ ID NO: 1889826 - RNA, 19 nt, Artificial Sequence
  Description of Artificial Sequence: Synthetic oligonucleotide
aauugcuauggacucuggu

SEQ ID NO: 1889827 - RNA, 19 nt, Artificial Sequence
  Description of Artificial Sequence: Synthetic oligonucleotide
aauucauuucucaucaguu

SEQ ID NO: 1889828 - RNA, 19 nt, Artificial Sequence
  Description of Artificial Sequence: Synthetic oligonucleotide
uugagauuuaccgaagguc

SEQ ID NO: 1889829 - RNA, 19 nt, Artificial Sequence
  Description of Artificial Sequence: Synthetic oligonucleotide
auugcggggcacuacaaug

SEQ ID NO: 1889830 - RNA, 19 nt, Artificial Sequence
  Description of Artificial Sequence: Synthetic oligonucleotide
gaggauaaaggcauguuca

SEQ ID NO: 1889831 - RNA, 19 nt, Artificial Sequence
  Description of Artificial Sequence: Synthetic oligonucleotide
guugggugaguauggaucc

SEQ ID NO: 1889832 - RNA, 19 nt, Artificial Sequence
  Description of Artificial Sequence: Synthetic oligonucleotide
guuacaugacugcagucgc

SEQ ID NO: 1889833 - RNA, 19 nt, Artificial Sequence
  Description of Artificial Sequence: Synthetic oligonucleotide
ucugucggcagguugaaau

SEQ ID NO: 1889834 - RNA, 19 nt, Artificial Sequence
  Description of Artificial Sequence: Synthetic oligonucleotide
uucaacugcgcucccaagu

SEQ ID NO: 1889835 - RNA, 19 nt, Artificial Sequence
  Description of Artificial Sequence: Synthetic oligonucleotide
auugcuauggacucuggua

SEQ ID NO: 1889836 - RNA, 19 nt, Artificial Sequence
  Description of Artificial Sequence: Synthetic oligonucleotide
ugagugugcagauccacac

SEQ ID NO: 1889837 - RNA, 19 nt, Artificial Sequence
  Description of Artificial Sequence: Synthetic oligonucleotide
gaauccaguuuccuggaac

SEQ ID NO: 1889838 - RNA, 19 nt, Artificial Sequence
  Description of Artificial Sequence: Synthetic oligonucleotide
cagaacgaaaguagcgacg

SEQ ID NO: 1889839 - RNA, 19 nt, Artificial Sequence
  Description of Artificial Sequence: Synthetic oligonucleotide
gcagucgcagaacagaggg

SEQ ID NO: 1889840 - RNA, 19 nt, Artificial Sequence
  Description of Artificial Sequence: Synthetic oligonucleotide
agaaaggccguuugaguug

SEQ ID NO: 1889841 - RNA, 19 nt, Artificial Sequence
  Description of Artificial Sequence: Synthetic oligonucleotide
gugauugagauuuaccgaa

SEQ ID NO: 1889842 - RNA, 19 nt, Artificial Sequence
  Description of Artificial Sequence: Synthetic oligonucleotide
guggcguaagccuucaaug

SEQ ID NO: 1889843 - RNA, 19 nt, Artificial Sequence
  Description of Artificial Sequence: Synthetic oligonucleotide
ugugagcgcacauaccaca

SEQ ID NO: 1889844 - RNA, 19 nt, Artificial Sequence
  Description of Artificial Sequence: Synthetic oligonucleotide
ggugggaacauuuucuaug

SEQ ID NO: 1889845 - RNA, 19 nt, Artificial Sequence
  Description of Artificial Sequence: Synthetic oligonucleotide
uucugcuuuaggguaaagc

SEQ ID NO: 1889846 - RNA, 19 nt, Artificial Sequence
  Description of Artificial Sequence: Synthetic oligonucleotide
uccgaauggucagacauug

SEQ ID NO: 1889847 - RNA, 19 nt, Artificial Sequence
  Description of Artificial Sequence: Synthetic oligonucleotide
ugugcagauccacacugga

SEQ ID NO: 1889848 - RNA, 19 nt, Artificial Sequence
  Description of Artificial Sequence: Synthetic oligonucleotide
uuccgagcacaaauugcgg

SEQ ID NO: 1889849 - RNA, 19 nt, Artificial Sequence
  Description of Artificial Sequence: Synthetic oligonucleotide
cauucggauaaucucaaca

SEQ ID NO: 1889850 - RNA, 19 nt, Artificial Sequence
  Description of Artificial Sequence: Synthetic oligonucleotide
gaaaggccguuugaguugg

SEQ ID NO: 1889851 - RNA, 19 nt, Artificial Sequence
  Description of Artificial Sequence: Synthetic oligonucleotide
acgaaaguagcgacggggc

SEQ ID NO: 1889852 - RNA, 19 nt, Artificial Sequence
  Description of Artificial Sequence: Synthetic oligonucleotide
gagaacaugcgugauugug

SEQ ID NO: 1889853 - RNA, 19 nt, Artificial Sequence
  Description of Artificial Sequence: Synthetic oligonucleotide
uucucuguaugacaauaau

SEQ ID NO: 1889854 - RNA, 19 nt, Artificial Sequence
  Description of Artificial Sequence: Synthetic oligonucleotide
ugcuuagugcuccagguuu

SEQ ID NO: 1889855 - RNA, 19 nt, Artificial Sequence
  Description of Artificial Sequence: Synthetic oligonucleotide
ugcagucgcagaacagagg

SEQ ID NO: 1889856 - RNA, 19 nt, Artificial Sequence
  Description of Artificial Sequence: Synthetic oligonucleotide
ucugucuaccacagguggc

SEQ ID NO: 1889857 - RNA, 19 nt, Artificial Sequence
  Description of Artificial Sequence: Synthetic oligonucleotide
guauggauccagccaagag

SEQ ID NO: 1889858 - RNA, 19 nt, Artificial Sequence
  Description of Artificial Sequence: Synthetic oligonucleotide
uggagaaauuccgagcaca

SEQ ID NO: 1889859 - RNA, 19 nt, Artificial Sequence
  Description of Artificial Sequence: Synthetic oligonucleotide
cauuggaccaauaaguccu

SEQ ID NO: 1889860 - RNA, 19 nt, Artificial Sequence
  Description of Artificial Sequence: Synthetic oligonucleotide
uuaccgaaggucugugaug

SEQ ID NO: 1889861 - RNA, 19 nt, Artificial Sequence
  Description of Artificial Sequence: Synthetic oligonucleotide
agagugaguaguccaagau

SEQ ID NO: 1889862 - RNA, 19 nt, Artificial Sequence
  Description of Artificial Sequence: Synthetic oligonucleotide
gacauuggaccaauaaguc

SEQ ID NO: 1889863 - RNA, 19 nt, Artificial Sequence
  Description of Artificial Sequence: Synthetic oligonucleotide
cuacaauguggcguaagcc

SEQ ID NO: 1889864 - RNA, 19 nt, Artificial Sequence
  Description of Artificial Sequence: Synthetic oligonucleotide
aguuaacuuaaagaaucca

SEQ ID NO: 1889865 - RNA, 19 nt, Artificial Sequence
  Description of Artificial Sequence: Synthetic oligonucleotide
cuaugaugcuuagugcucc

SEQ ID NO: 1889866 - RNA, 19 nt, Artificial Sequence
  Description of Artificial Sequence: Synthetic oligonucleotide
acaaguuucgaugccuuug

SEQ ID NO: 1889867 - RNA, 19 nt, Artificial Sequence
  Description of Artificial Sequence: Synthetic oligonucleotide
agugagugugcagauccac

SEQ ID NO: 1889868 - RNA, 19 nt, Artificial Sequence
  Description of Artificial Sequence: Synthetic oligonucleotide
aauugcggggcacuacaau

SEQ ID NO: 1889869 - RNA, 19 nt, Artificial Sequence
  Description of Artificial Sequence: Synthetic oligonucleotide
uguuacggucugcagucug

SEQ ID NO: 1889870 - RNA, 19 nt, Artificial Sequence
  Description of Artificial Sequence: Synthetic oligonucleotide
uggggaugagaacaugcgu

SEQ ID NO: 1889871 - RNA, 19 nt, Artificial Sequence
  Description of Artificial Sequence: Synthetic oligonucleotide
caucaguuucccacagagg

SEQ ID NO: 1889872 - RNA, 19 nt, Artificial Sequence
  Description of Artificial Sequence: Synthetic oligonucleotide
agaggacuccacaaguuuc

SEQ ID NO: 1889873 - RNA, 19 nt, Artificial Sequence
  Description of Artificial Sequence: Synthetic oligonucleotide
cagacaauugcuauggacu

SEQ ID NO: 1889874 - RNA, 19 nt, Artificial Sequence
  Description of Artificial Sequence: Synthetic oligonucleotide
acaugcgugauugugaauu

SEQ ID NO: 1889875 - RNA, 19 nt, Artificial Sequence
  Description of Artificial Sequence: Synthetic oligonucleotide
agaucauccugcauaaaga

SEQ ID NO: 1889876 - RNA, 19 nt, Artificial Sequence
  Description of Artificial Sequence: Synthetic oligonucleotide
ugcgccaucuccuuggauu

SEQ ID NO: 1889877 - RNA, 19 nt, Artificial Sequence
  Description of Artificial Sequence: Synthetic oligonucleotide
uuucaaggaucugucuacc

SEQ ID NO: 1889878 - RNA, 19 nt, Artificial Sequence
  Description of Artificial Sequence: Synthetic oligonucleotide
cuugaccgcaucuuucuuc

SEQ ID NO: 1889879 - RNA, 19 nt, Artificial Sequence
  Description of Artificial Sequence: Synthetic oligonucleotide
ugacaguuacaugacugca

SEQ ID NO: 1889880 - RNA, 19 nt, Artificial Sequence
  Description of Artificial Sequence: Synthetic oligonucleotide
ucacgguucuguuacgguc

SEQ ID NO: 1889881 - RNA, 19 nt, Artificial Sequence
  Description of Artificial Sequence: Synthetic oligonucleotide
gauugugauugagauuuac

SEQ ID NO: 1889882 - RNA, 19 nt, Artificial Sequence
  Description of Artificial Sequence: Synthetic oligonucleotide
ugcgcucccaaguugggac

SEQ ID NO: 1889883 - RNA, 19 nt, Artificial Sequence
  Description of Artificial Sequence: Synthetic oligonucleotide
ugccgugagggugaaagcc

SEQ ID NO: 1889884 - RNA, 19 nt, Artificial Sequence
  Description of Artificial Sequence: Synthetic oligonucleotide
uucaaggaucugucuacca

SEQ ID NO: 1889885 - RNA, 19 nt, Artificial Sequence
  Description of Artificial Sequence: Synthetic oligonucleotide
gaacaugcgugauugugaa

SEQ ID NO: 1889886 - RNA, 19 nt, Artificial Sequence
  Description of Artificial Sequence: Synthetic oligonucleotide
uugcggggcacuacaaugu

SEQ ID NO: 1889887 - RNA, 19 nt, Artificial Sequence
  Description of Artificial Sequence: Synthetic oligonucleotide
cauuuucuaugaugcuuag

SEQ ID NO: 1889888 - RNA, 19 nt, Artificial Sequence
  Description of Artificial Sequence: Synthetic oligonucleotide
cacgugugagcgcacauac

SEQ ID NO: 1889889 - RNA, 19 nt, Artificial Sequence
  Description of Artificial Sequence: Synthetic oligonucleotide
acaaauugcggggcacuac

SEQ ID NO: 1889890 - RNA, 19 nt, Artificial Sequence
  Description of Artificial Sequence: Synthetic oligonucleotide
cacagugcacaaguggagg

SEQ ID NO: 1889891 - RNA, 19 nt, Artificial Sequence
  Description of Artificial Sequence: Synthetic oligonucleotide
gaacgaaaguagcgacggg

SEQ ID NO: 1889892 - RNA, 19 nt, Artificial Sequence
  Description of Artificial Sequence: Synthetic oligonucleotide
uuaauucaacugcgcuccc

SEQ ID NO: 1889893 - RNA, 19 nt, Artificial Sequence
  Description of Artificial Sequence: Synthetic oligonucleotide
cuuggauugugauugagau

SEQ ID NO: 1889894 - RNA, 19 nt, Artificial Sequence
  Description of Artificial Sequence: Synthetic oligonucleotide
ucaauggugggaacauuuu

SEQ ID NO: 1889895 - RNA, 19 nt, Artificial Sequence
  Description of Artificial Sequence: Synthetic oligonucleotide
cugcagucgcagaacagag

SEQ ID NO: 1889896 - RNA, 19 nt, Artificial Sequence
  Description of Artificial Sequence: Synthetic oligonucleotide
ggugaguauggauccagcc

SEQ ID NO: 1889897 - RNA, 19 nt, Artificial Sequence
  Description of Artificial Sequence: Synthetic oligonucleotide
agaacaugcgugauuguga

SEQ ID NO: 1889898 - RNA, 19 nt, Artificial Sequence
  Description of Artificial Sequence: Synthetic oligonucleotide
caaggaucugucuaccaca

SEQ ID NO: 1889899 - RNA, 19 nt, Artificial Sequence
  Description of Artificial Sequence: Synthetic oligonucleotide
aaaguagcgacggggcgga

SEQ ID NO: 1889900 - RNA, 19 nt, Artificial Sequence
  Description of Artificial Sequence: Synthetic oligonucleotide
aggauaaaggcauguucaa

SEQ ID NO: 1889901 - RNA, 19 nt, Artificial Sequence
  Description of Artificial Sequence: Synthetic oligonucleotide
acugcagucgcagaacaga

SEQ ID NO: 1889902 - RNA, 19 nt, Artificial Sequence
  Description of Artificial Sequence: Synthetic oligonucleotide
guagcgacggggcggaaug

SEQ ID NO: 1889903 - RNA, 19 nt, Artificial Sequence
  Description of Artificial Sequence: Synthetic oligonucleotide
gauuuaccgaaggucugug

SEQ ID NO: 1889904 - RNA, 19 nt, Artificial Sequence
  Description of Artificial Sequence: Synthetic oligonucleotide
ggacagaauccucacccgg

SEQ ID NO: 1889905 - RNA, 19 nt, Artificial Sequence
  Description of Artificial Sequence: Synthetic oligonucleotide
agcacaaauugcggggcac

SEQ ID NO: 1889906 - RNA, 19 nt, Artificial Sequence
  Description of Artificial Sequence: Synthetic oligonucleotide
gagauuuaccgaaggucug

SEQ ID NO: 1889907 - RNA, 19 nt, Artificial Sequence
  Description of Artificial Sequence: Synthetic oligonucleotide
uaugaugcuuagugcucca

SEQ ID NO: 1889908 - RNA, 19 nt, Artificial Sequence
  Description of Artificial Sequence: Synthetic oligonucleotide
augaacagcgugauguacu

SEQ ID NO: 1889909 - RNA, 19 nt, Artificial Sequence
  Description of Artificial Sequence: Synthetic oligonucleotide
aggccguuugaguugggug

SEQ ID NO: 1889910 - RNA, 19 nt, Artificial Sequence
  Description of Artificial Sequence: Synthetic oligonucleotide
guaugacaauaaucaggcc

SEQ ID NO: 1889911 - RNA, 19 nt, Artificial Sequence
  Description of Artificial Sequence: Synthetic oligonucleotide
auuuaccgaaggucuguga

SEQ ID NO: 1889912 - RNA, 19 nt, Artificial Sequence
  Description of Artificial Sequence: Synthetic oligonucleotide
caaauugcggggcacuaca

SEQ ID NO: 1889913 - RNA, 19 nt, Artificial Sequence
  Description of Artificial Sequence: Synthetic oligonucleotide
agcgcacauaccacagugc

SEQ ID NO: 1889914 - RNA, 19 nt, Artificial Sequence
  Description of Artificial Sequence: Synthetic oligonucleotide
gaugccauucggauaaucu

SEQ ID NO: 1889915 - RNA, 19 nt, Artificial Sequence
  Description of Artificial Sequence: Synthetic oligonucleotide
ugucggcagguugaaaucu

SEQ ID NO: 1889916 - RNA, 19 nt, Artificial Sequence
  Description of Artificial Sequence: Synthetic oligonucleotide
uccuguccuugacaguuac

SEQ ID NO: 1889917 - RNA, 19 nt, Artificial Sequence
  Description of Artificial Sequence: Synthetic oligonucleotide
agauuuaccgaaggucugu

SEQ ID NO: 1889918 - RNA, 19 nt, Artificial Sequence
  Description of Artificial Sequence: Synthetic oligonucleotide
ucggcagguugaaaucucu

SEQ ID NO: 1889919 - RNA, 19 nt, Artificial Sequence
  Description of Artificial Sequence: Synthetic oligonucleotide
ggagcagacaauugcuaug

SEQ ID NO: 1889920 - RNA, 19 nt, Artificial Sequence
  Description of Artificial Sequence: Synthetic oligonucleotide
aaugcgccaucuccuugga

SEQ ID NO: 1889921 - RNA, 19 nt, Artificial Sequence
  Description of Artificial Sequence: Synthetic oligonucleotide
gcagacaauugcuauggac

SEQ ID NO: 1889922 - RNA, 19 nt, Artificial Sequence
  Description of Artificial Sequence: Synthetic oligonucleotide
ugcggggcacuacaaugug

SEQ ID NO: 1889923 - RNA, 19 nt, Artificial Sequence
  Description of Artificial Sequence: Synthetic oligonucleotide
caagagugaguaguccaag

SEQ ID NO: 1889924 - RNA, 19 nt, Artificial Sequence
  Description of Artificial Sequence: Synthetic oligonucleotide
caugcgugauugugaauuc

SEQ ID NO: 1889925 - RNA, 19 nt, Artificial Sequence
  Description of Artificial Sequence: Synthetic oligonucleotide
ugauaggagcagugagugu

SEQ ID NO: 1889926 - RNA, 19 nt, Artificial Sequence
  Description of Artificial Sequence: Synthetic oligonucleotide
agguuucaaggaucugucu

SEQ ID NO: 1889927 - RNA, 19 nt, Artificial Sequence
  Description of Artificial Sequence: Synthetic oligonucleotide
uuggauugugauugagauu

SEQ ID NO: 1889928 - RNA, 19 nt, Artificial Sequence
  Description of Artificial Sequence: Synthetic oligonucleotide
uccuuggauugugauugag

SEQ ID NO: 1889929 - RNA, 19 nt, Artificial Sequence
  Description of Artificial Sequence: Synthetic oligonucleotide
ggaucugucuaccacaggu

SEQ ID NO: 1889930 - RNA, 19 nt, Artificial Sequence
  Description of Artificial Sequence: Synthetic oligonucleotide
ugagcgcacauaccacagu

SEQ ID NO: 1889931 - RNA, 19 nt, Artificial Sequence
  Description of Artificial Sequence: Synthetic oligonucleotide
ugugugugcgcgcgcgcgc

SEQ ID NO: 1889932 - RNA, 19 nt, Artificial Sequence
  Description of Artificial Sequence: Synthetic oligonucleotide
aggaucugucuaccacagg

SEQ ID NO: 1889933 - RNA, 19 nt, Artificial Sequence
  Description of Artificial Sequence: Synthetic oligonucleotide
guuacggucugcagucugc

SEQ ID NO: 1889934 - RNA, 19 nt, Artificial Sequence
  Description of Artificial Sequence: Synthetic oligonucleotide
ggaggcucacauccgaaug

SEQ ID NO: 1889935 - RNA, 19 nt, Artificial Sequence
  Description of Artificial Sequence: Synthetic oligonucleotide
agaugccauucggauaauc

SEQ ID NO: 1889936 - RNA, 19 nt, Artificial Sequence
  Description of Artificial Sequence: Synthetic oligonucleotide
ccgagcacaaauugcgggg

SEQ ID NO: 1889937 - RNA, 19 nt, Artificial Sequence
  Description of Artificial Sequence: Synthetic oligonucleotide
ugugugugugugcgcgcgc

SEQ ID NO: 1889938 - RNA, 19 nt, Artificial Sequence
  Description of Artificial Sequence: Synthetic oligonucleotide
aacaugcgugauugugaau

SEQ ID NO: 1889939 - RNA, 19 nt, Artificial Sequence
  Description of Artificial Sequence: Synthetic oligonucleotide
caauguugccuucuucaga

SEQ ID NO: 1889940 - RNA, 19 nt, Artificial Sequence
  Description of Artificial Sequence: Synthetic oligonucleotide
aggagcagugagugugcag

SEQ ID NO: 1889941 - RNA, 19 nt, Artificial Sequence
  Description of Artificial Sequence: Synthetic oligonucleotide
uuacggucugcagucugca

SEQ ID NO: 1889942 - RNA, 19 nt, Artificial Sequence
  Description of Artificial Sequence: Synthetic oligonucleotide
ccacacuggacagaaaggc

SEQ ID NO: 1889943 - RNA, 19 nt, Artificial Sequence
  Description of Artificial Sequence: Synthetic oligonucleotide
gaccaauaaguccuuucgu

SEQ ID NO: 1889944 - RNA, 19 nt, Artificial Sequence
  Description of Artificial Sequence: Synthetic oligonucleotide
aggccauagucaguuaacu

SEQ ID NO: 1889945 - RNA, 19 nt, Artificial Sequence
  Description of Artificial Sequence: Synthetic oligonucleotide
guacuuguuguagaggaua

SEQ ID NO: 1889946 - RNA, 19 nt, Artificial Sequence
  Description of Artificial Sequence: Synthetic oligonucleotide
aaggccguuugaguugggu

SEQ ID NO: 1889947 - RNA, 19 nt, Artificial Sequence
  Description of Artificial Sequence: Synthetic oligonucleotide
gugugugugugugcgcgcg

SEQ ID NO: 1889948 - RNA, 19 nt, Artificial Sequence
  Description of Artificial Sequence: Synthetic oligonucleotide
gaguauggauccagccaag

SEQ ID NO: 1889949 - RNA, 19 nt, Artificial Sequence
  Description of Artificial Sequence: Synthetic oligonucleotide
cauguucaauguugccuuc

SEQ ID NO: 1889950 - RNA, 19 nt, Artificial Sequence
  Description of Artificial Sequence: Synthetic oligonucleotide
cauccgaauggucagacau

SEQ ID NO: 1889951 - RNA, 19 nt, Artificial Sequence
  Description of Artificial Sequence: Synthetic oligonucleotide
ccaauaaguccuuucguga

SEQ ID NO: 1889952 - RNA, 19 nt, Artificial Sequence
  Description of Artificial Sequence: Synthetic oligonucleotide
ccagaacgaaaguagcgac

SEQ ID NO: 1889953 - RNA, 19 nt, Artificial Sequence
  Description of Artificial Sequence: Synthetic oligonucleotide
ggcacuggcaagcuggaga

SEQ ID NO: 1889954 - RNA, 19 nt, Artificial Sequence
  Description of Artificial Sequence: Synthetic oligonucleotide
gugagcgcacauaccacag

SEQ ID NO: 1889955 - RNA, 19 nt, Artificial Sequence
  Description of Artificial Sequence: Synthetic oligonucleotide
gaaagccuuucugucggca

SEQ ID NO: 1889956 - RNA, 19 nt, Artificial Sequence
  Description of Artificial Sequence: Synthetic oligonucleotide
caguuacaugacugcaguc

SEQ ID NO: 1889957 - RNA, 19 nt, Artificial Sequence
  Description of Artificial Sequence: Synthetic oligonucleotide
acauccgaauggucagaca

SEQ ID NO: 1889958 - RNA, 19 nt, Artificial Sequence
  Description of Artificial Sequence: Synthetic oligonucleotide
gcacaaguggaggucagag

SEQ ID NO: 1889959 - RNA, 19 nt, Artificial Sequence
  Description of Artificial Sequence: Synthetic oligonucleotide
ggcugauuuguagucucgg

SEQ ID NO: 1889960 - RNA, 19 nt, Artificial Sequence
  Description of Artificial Sequence: Synthetic oligonucleotide
gaugagaacaugcgugauu

SEQ ID NO: 1889961 - RNA, 19 nt, Artificial Sequence
  Description of Artificial Sequence: Synthetic oligonucleotide
cacauccgaauggucagac

SEQ ID NO: 1889962 - RNA, 19 nt, Artificial Sequence
  Description of Artificial Sequence: Synthetic oligonucleotide
acgugugagcgcacauacc

SEQ ID NO: 1889963 - RNA, 19 nt, Artificial Sequence
  Description of Artificial Sequence: Synthetic oligonucleotide
gaaauuccgagcacaaauu

SEQ ID NO: 1889964 - RNA, 19 nt, Artificial Sequence
  Description of Artificial Sequence: Synthetic oligonucleotide
aaauugcggggcacuacaa

SEQ ID NO: 1889965 - RNA, 19 nt, Artificial Sequence
  Description of Artificial Sequence: Synthetic oligonucleotide
agaauccaguuuccuggaa

SEQ ID NO: 1889966 - RNA, 19 nt, Artificial Sequence
  Description of Artificial Sequence: Synthetic oligonucleotide
ugggaggcucacauccgaa

SEQ ID NO: 1889967 - RNA, 19 nt, Artificial Sequence
  Description of Artificial Sequence: Synthetic oligonucleotide
cacuacaauguggcguaag

SEQ ID NO: 1889968 - RNA, 19 nt, Artificial Sequence
  Description of Artificial Sequence: Synthetic oligonucleotide
acaugacugcagucgcaga

SEQ ID NO: 1889969 - RNA, 19 nt, Artificial Sequence
  Description of Artificial Sequence: Synthetic oligonucleotide
ucacauccgaauggucaga

SEQ ID NO: 1889970 - RNA, 19 nt, Artificial Sequence
  Description of Artificial Sequence: Synthetic oligonucleotide
gagcacaaauugcggggca

SEQ ID NO: 1889971 - RNA, 19 nt, Artificial Sequence
  Description of Artificial Sequence: Synthetic oligonucleotide
augcuuagugcuccagguu

SEQ ID NO: 1889972 - RNA, 19 nt, Artificial Sequence
  Description of Artificial Sequence: Synthetic oligonucleotide
gcucacauccgaaugguca

SEQ ID NO: 1889973 - RNA, 19 nt, Artificial Sequence
  Description of Artificial Sequence: Synthetic oligonucleotide
cugccgugagggugaaagc

SEQ ID NO: 1889974 - RNA, 19 nt, Artificial Sequence
  Description of Artificial Sequence: Synthetic oligonucleotide
acgguucuguuacggucug

SEQ ID NO: 1889975 - RNA, 19 nt, Artificial Sequence
  Description of Artificial Sequence: Synthetic oligonucleotide
gucaguuaacuuaaagaau

SEQ ID NO: 1889976 - RNA, 19 nt, Artificial Sequence
  Description of Artificial Sequence: Synthetic oligonucleotide
gcaugggugaggucuuaag

SEQ ID NO: 1889977 - RNA, 19 nt, Artificial Sequence
  Description of Artificial Sequence: Synthetic oligonucleotide
gaacagcgugauguacuug

SEQ ID NO: 1889978 - RNA, 19 nt, Artificial Sequence
  Description of Artificial Sequence: Synthetic oligonucleotide
gauggcugauuuguagucu

SEQ ID NO: 1889979 - RNA, 19 nt, Artificial Sequence
  Description of Artificial Sequence: Synthetic oligonucleotide
ucacccggucuuggggugg

SEQ ID NO: 1889980 - RNA, 19 nt, Artificial Sequence
  Description of Artificial Sequence: Synthetic oligonucleotide
ucccaaguugggacagaau

SEQ ID NO: 1889981 - RNA, 19 nt, Artificial Sequence
  Description of Artificial Sequence: Synthetic oligonucleotide
ggcacuacaauguggcgua

SEQ ID NO: 1889982 - RNA, 19 nt, Artificial Sequence
  Description of Artificial Sequence: Synthetic oligonucleotide
agcgacggggcggaauguc

SEQ ID NO: 1889983 - RNA, 19 nt, Artificial Sequence
  Description of Artificial Sequence: Synthetic oligonucleotide
augcgugauugugaauuca

SEQ ID NO: 1889984 - RNA, 19 nt, Artificial Sequence
  Description of Artificial Sequence: Synthetic oligonucleotide
aaaucucuugaaggccaua

SEQ ID NO: 1889985 - RNA, 19 nt, Artificial Sequence
  Description of Artificial Sequence: Synthetic oligonucleotide
cggggcacuacaauguggc

SEQ ID NO: 1889986 - RNA, 19 nt, Artificial Sequence
  Description of Artificial Sequence: Synthetic oligonucleotide
gcgcacauaccacagugca

SEQ ID NO: 1889987 - RNA, 19 nt, Artificial Sequence
  Description of Artificial Sequence: Synthetic oligonucleotide
gugagugugcagauccaca

SEQ ID NO: 1889988 - RNA, 19 nt, Artificial Sequence
  Description of Artificial Sequence: Synthetic oligonucleotide
gauuuguagucucgguguu

SEQ ID NO: 1889989 - RNA, 19 nt, Artificial Sequence
  Description of Artificial Sequence: Synthetic oligonucleotide
cggauaaucucaacaccag

SEQ ID NO: 1889990 - RNA, 19 nt, Artificial Sequence
  Description of Artificial Sequence: Synthetic oligonucleotide
cacagaggacuccacaagu

SEQ ID NO: 1889991 - RNA, 19 nt, Artificial Sequence
  Description of Artificial Sequence: Synthetic oligonucleotide
gacggggcggaaugucuuc

SEQ ID NO: 1889992 - RNA, 19 nt, Artificial Sequence
  Description of Artificial Sequence: Synthetic oligonucleotide
acccaaugcgccaucuccu

SEQ ID NO: 1889993 - RNA, 19 nt, Artificial Sequence
  Description of Artificial Sequence: Synthetic oligonucleotide
cucacccggucuuggggug

SEQ ID NO: 1889994 - RNA, 19 nt, Artificial Sequence
  Description of Artificial Sequence: Synthetic oligonucleotide
cagaguaaacagaugccau

SEQ ID NO: 1889995 - RNA, 19 nt, Artificial Sequence
  Description of Artificial Sequence: Synthetic oligonucleotide
ugcgcgcgcgcgcacgugu

SEQ ID NO: 1889996 - RNA, 19 nt, Artificial Sequence
  Description of Artificial Sequence: Synthetic oligonucleotide
cacgguucuguuacggucu

SEQ ID NO: 1889997 - RNA, 19 nt, Artificial Sequence
  Description of Artificial Sequence: Synthetic oligonucleotide
auccugcauaaagaaaauu

SEQ ID NO: 1889998 - RNA, 19 nt, Artificial Sequence
  Description of Artificial Sequence: Synthetic oligonucleotide
acagaggacuccacaaguu

SEQ ID NO: 1889999 - RNA, 19 nt, Artificial Sequence
  Description of Artificial Sequence: Synthetic oligonucleotide
gcguaagccuucaauggug

SEQ ID NO: 1890000 - RNA, 19 nt, Artificial Sequence
  Description of Artificial Sequence: Synthetic oligonucleotide
gcgccaucuccuuggauug

SEQ ID NO: 1890001 - RNA, 19 nt, Artificial Sequence
  Description of Artificial Sequence: Synthetic oligonucleotide
gaaugauggcugauuugua

SEQ ID NO: 1890002 - RNA, 19 nt, Artificial Sequence
  Description of Artificial Sequence: Synthetic oligonucleotide
uuagugcuccagguuucaa

SEQ ID NO: 1890003 - RNA, 19 nt, Artificial Sequence
  Description of Artificial Sequence: Synthetic oligonucleotide
cgugugagcgcacauacca

SEQ ID NO: 1890004 - RNA, 19 nt, Artificial Sequence
  Description of Artificial Sequence: Synthetic oligonucleotide
gagugugcagauccacacu

SEQ ID NO: 1890005 - RNA, 19 nt, Artificial Sequence
  Description of Artificial Sequence: Synthetic oligonucleotide
ugugcgcgcgcgcgcacgu

SEQ ID NO: 1890006 - RNA, 19 nt, Artificial Sequence
  Description of Artificial Sequence: Synthetic oligonucleotide
gacaauugcuauggacucu

SEQ ID NO: 1890007 - RNA, 19 nt, Artificial Sequence
  Description of Artificial Sequence: Synthetic oligonucleotide
ccuuggauugugauugaga

SEQ ID NO: 1890008 - RNA, 19 nt, Artificial Sequence
  Description of Artificial Sequence: Synthetic oligonucleotide
ugcaugggugaggucuuaa

SEQ ID NO: 1890009 - RNA, 19 nt, Artificial Sequence
  Description of Artificial Sequence: Synthetic oligonucleotide
cgaaaguagcgacggggcg

SEQ ID NO: 1890010 - RNA, 19 nt, Artificial Sequence
  Description of Artificial Sequence: Synthetic oligonucleotide
gugugagcgcacauaccac

SEQ ID NO: 1890011 - RNA, 19 nt, Artificial Sequence
  Description of Artificial Sequence: Synthetic oligonucleotide
gcacuggcaagcuggagaa

SEQ ID NO: 1890012 - RNA, 19 nt, Artificial Sequence
  Description of Artificial Sequence: Synthetic oligonucleotide
aaaggccguuugaguuggg

SEQ ID NO: 1890013 - RNA, 19 nt, Artificial Sequence
  Description of Artificial Sequence: Synthetic oligonucleotide
ccuuucugucggcagguug

SEQ ID NO: 1890014 - RNA, 19 nt, Artificial Sequence
  Description of Artificial Sequence: Synthetic oligonucleotide
uccuuccaucauguggguc

SEQ ID NO: 1890015 - RNA, 19 nt, Artificial Sequence
  Description of Artificial Sequence: Synthetic oligonucleotide
ggagaaauuccgagcacaa

SEQ ID NO: 1890016 - RNA, 19 nt, Artificial Sequence
  Description of Artificial Sequence: Synthetic oligonucleotide
aguagcgacggggcggaau

SEQ ID NO: 1890017 - RNA, 19 nt, Artificial Sequence
  Description of Artificial Sequence: Synthetic oligonucleotide
acuugggcguugggcuugg

SEQ ID NO: 1890018 - RNA, 19 nt, Artificial Sequence
  Description of Artificial Sequence: Synthetic oligonucleotide
guuugaguugggugaguau

SEQ ID NO: 1890019 - RNA, 19 nt, Artificial Sequence
  Description of Artificial Sequence: Synthetic oligonucleotide
ccucacgguucuguuacgg

SEQ ID NO: 1890020 - RNA, 19 nt, Artificial Sequence
  Description of Artificial Sequence: Synthetic oligonucleotide
ccaucaugugggucccagg

SEQ ID NO: 1890021 - RNA, 19 nt, Artificial Sequence
  Description of Artificial Sequence: Synthetic oligonucleotide
ugugugcgcgcgcgcgcac

SEQ ID NO: 1890022 - RNA, 19 nt, Artificial Sequence
  Description of Artificial Sequence: Synthetic oligonucleotide
ccgaauggucagacauugg

SEQ ID NO: 1890023 - RNA, 19 nt, Artificial Sequence
  Description of Artificial Sequence: Synthetic oligonucleotide
cagugagugugcagaucca

SEQ ID NO: 1890024 - RNA, 19 nt, Artificial Sequence
  Description of Artificial Sequence: Synthetic oligonucleotide
gucggcagguugaaaucuc

SEQ ID NO: 1890025 - RNA, 19 nt, Artificial Sequence
  Description of Artificial Sequence: Synthetic oligonucleotide
cuugaaggccauagucagu

SEQ ID NO: 1890026 - RNA, 19 nt, Artificial Sequence
  Description of Artificial Sequence: Synthetic oligonucleotide
auuggaccaauaaguccuu

SEQ ID NO: 1890027 - RNA, 19 nt, Artificial Sequence
  Description of Artificial Sequence: Synthetic oligonucleotide
ccaagagugaguaguccaa

SEQ ID NO: 1890028 - RNA, 19 nt, Artificial Sequence
  Description of Artificial Sequence: Synthetic oligonucleotide
auccgaauggucagacauu

SEQ ID NO: 1890029 - RNA, 19 nt, Artificial Sequence
  Description of Artificial Sequence: Synthetic oligonucleotide
gcggaaugucuucauuuaa

SEQ ID NO: 1890030 - RNA, 19 nt, Artificial Sequence
  Description of Artificial Sequence: Synthetic oligonucleotide
ugucuaccacagguggcuu

SEQ ID NO: 1890031 - RNA, 19 nt, Artificial Sequence
  Description of Artificial Sequence: Synthetic oligonucleotide
gcuuuaggguaaagcaaca

SEQ ID NO: 1890032 - RNA, 19 nt, Artificial Sequence
  Description of Artificial Sequence: Synthetic oligonucleotide
gggugaguauggauccagc

SEQ ID NO: 1890033 - RNA, 19 nt, Artificial Sequence
  Description of Artificial Sequence: Synthetic oligonucleotide
gcugauuuguagucucggu

SEQ ID NO: 1890034 - RNA, 19 nt, Artificial Sequence
  Description of Artificial Sequence: Synthetic oligonucleotide
cucacgguucuguuacggu

SEQ ID NO: 1890035 - RNA, 19 nt, Artificial Sequence
  Description of Artificial Sequence: Synthetic oligonucleotide
gcuuagugcuccagguuuc

SEQ ID NO: 1890036 - RNA, 19 nt, Artificial Sequence
  Description of Artificial Sequence: Synthetic oligonucleotide
gcgcgcgcacgugugagcg

SEQ ID NO: 1890037 - RNA, 19 nt, Artificial Sequence
  Description of Artificial Sequence: Synthetic oligonucleotide
ccauucggauaaucucaac

SEQ ID NO: 1890038 - RNA, 19 nt, Artificial Sequence
  Description of Artificial Sequence: Synthetic oligonucleotide
cuccuuggauugugauuga

SEQ ID NO: 1890039 - RNA, 19 nt, Artificial Sequence
  Description of Artificial Sequence: Synthetic oligonucleotide
cucccaaguugggacagaa

SEQ ID NO: 1890040 - RNA, 19 nt, Artificial Sequence
  Description of Artificial Sequence: Synthetic oligonucleotide
gugugcgcgcgcgcgcacg

SEQ ID NO: 1890041 - RNA, 19 nt, Artificial Sequence
  Description of Artificial Sequence: Synthetic oligonucleotide
cacaaauugcggggcacua

SEQ ID NO: 1890042 - RNA, 19 nt, Artificial Sequence
  Description of Artificial Sequence: Synthetic oligonucleotide
gggcacuacaauguggcgu

SEQ ID NO: 1890043 - RNA, 19 nt, Artificial Sequence
  Description of Artificial Sequence: Synthetic oligonucleotide
cagaauccucacccggucu

SEQ ID NO: 1890044 - RNA, 19 nt, Artificial Sequence
  Description of Artificial Sequence: Synthetic oligonucleotide
uagcgacggggcggaaugu

SEQ ID NO: 1890045 - RNA, 19 nt, Artificial Sequence
  Description of Artificial Sequence: Synthetic oligonucleotide
uuccaucauguggguccca

SEQ ID NO: 1890046 - RNA, 19 nt, Artificial Sequence
  Description of Artificial Sequence: Synthetic oligonucleotide
cuauggacucugguaacau

SEQ ID NO: 1890047 - RNA, 19 nt, Artificial Sequence
  Description of Artificial Sequence: Synthetic oligonucleotide
gucaguugaugcucuccuu

SEQ ID NO: 1890048 - RNA, 19 nt, Artificial Sequence
  Description of Artificial Sequence: Synthetic oligonucleotide
auguggcguaagccuucaa

SEQ ID NO: 1890049 - RNA, 19 nt, Artificial Sequence
  Description of Artificial Sequence: Synthetic oligonucleotide
ggccauagucaguuaacuu

SEQ ID NO: 1890050 - RNA, 19 nt, Artificial Sequence
  Description of Artificial Sequence: Synthetic oligonucleotide
caagaucauccugcauaaa

SEQ ID NO: 1890051 - RNA, 19 nt, Artificial Sequence
  Description of Artificial Sequence: Synthetic oligonucleotide
cacaaguuucgaugccuuu

SEQ ID NO: 1890052 - RNA, 19 nt, Artificial Sequence
  Description of Artificial Sequence: Synthetic oligonucleotide
gugugugcgcgcgcgcgca

SEQ ID NO: 1890053 - RNA, 19 nt, Artificial Sequence
  Description of Artificial Sequence: Synthetic oligonucleotide
ccauuuugucuggggauga

SEQ ID NO: 1890054 - RNA, 19 nt, Artificial Sequence
  Description of Artificial Sequence: Synthetic oligonucleotide
ucgaugccuuuggcaguau

SEQ ID NO: 1890055 - RNA, 19 nt, Artificial Sequence
  Description of Artificial Sequence: Synthetic oligonucleotide
ggacuccacaaguuucgau

SEQ ID NO: 1890056 - RNA, 19 nt, Artificial Sequence
  Description of Artificial Sequence: Synthetic oligonucleotide
gucagacauuggaccaaua

SEQ ID NO: 1890057 - RNA, 19 nt, Artificial Sequence
  Description of Artificial Sequence: Synthetic oligonucleotide
gggaggcucacauccgaau

SEQ ID NO: 1890058 - RNA, 19 nt, Artificial Sequence
  Description of Artificial Sequence: Synthetic oligonucleotide
gugaguaguccaagaucau

SEQ ID NO: 1890059 - RNA, 19 nt, Artificial Sequence
  Description of Artificial Sequence: Synthetic oligonucleotide
cccggucuuggggugggag

SEQ ID NO: 1890060 - RNA, 19 nt, Artificial Sequence
  Description of Artificial Sequence: Synthetic oligonucleotide
ggacucugguaacaucauu

SEQ ID NO: 1890061 - RNA, 19 nt, Artificial Sequence
  Description of Artificial Sequence: Synthetic oligonucleotide
aaguagcgacggggcggaa

SEQ ID NO: 1890062 - RNA, 19 nt, Artificial Sequence
  Description of Artificial Sequence: Synthetic oligonucleotide
gcacaaauugcggggcacu

SEQ ID NO: 1890063 - RNA, 19 nt, Artificial Sequence
  Description of Artificial Sequence: Synthetic oligonucleotide
gcgcgcacgugugagcgca

SEQ ID NO: 1890064 - RNA, 19 nt, Artificial Sequence
  Description of Artificial Sequence: Synthetic oligonucleotide
ggaugagaacaugcgugau

SEQ ID NO: 1890065 - RNA, 19 nt, Artificial Sequence
  Description of Artificial Sequence: Synthetic oligonucleotide
ggauugugauugagauuua

SEQ ID NO: 1890066 - RNA, 19 nt, Artificial Sequence
  Description of Artificial Sequence: Synthetic oligonucleotide
gcacgugugagcgcacaua

SEQ ID NO: 1890067 - RNA, 19 nt, Artificial Sequence
  Description of Artificial Sequence: Synthetic oligonucleotide
ccucacccggucuuggggu

SEQ ID NO: 1890068 - RNA, 19 nt, Artificial Sequence
  Description of Artificial Sequence: Synthetic oligonucleotide
gcgcgcgcgcacgugugag

SEQ ID NO: 1890069 - RNA, 19 nt, Artificial Sequence
  Description of Artificial Sequence: Synthetic oligonucleotide
cgcucccaaguugggacag

SEQ ID NO: 1890070 - RNA, 19 nt, Artificial Sequence
  Description of Artificial Sequence: Synthetic oligonucleotide
cguuugaguugggugagua

SEQ ID NO: 1890071 - RNA, 19 nt, Artificial Sequence
  Description of Artificial Sequence: Synthetic oligonucleotide
cuguuacggucugcagucu

SEQ ID NO: 1890072 - RNA, 19 nt, Artificial Sequence
  Description of Artificial Sequence: Synthetic oligonucleotide
cacuggcaagcuggagaaa

SEQ ID NO: 1890073 - RNA, 19 nt, Artificial Sequence
  Description of Artificial Sequence: Synthetic oligonucleotide
ccacaaguuucgaugccuu

SEQ ID NO: 1890074 - RNA, 19 nt, Artificial Sequence
  Description of Artificial Sequence: Synthetic oligonucleotide
gcgugauugugaauucauu

SEQ ID NO: 1890075 - RNA, 19 nt, Artificial Sequence
  Description of Artificial Sequence: Synthetic oligonucleotide
ggggcggaaugucuucauu

SEQ ID NO: 1890076 - RNA, 19 nt, Artificial Sequence
  Description of Artificial Sequence: Synthetic oligonucleotide
gugcgcgcgcgcgcacgug

SEQ ID NO: 1890077 - RNA, 19 nt, Artificial Sequence
  Description of Artificial Sequence: Synthetic oligonucleotide
cgcgcgcgcacgugugagc

SEQ ID NO: 1890078 - RNA, 19 nt, Artificial Sequence
  Description of Artificial Sequence: Synthetic oligonucleotide
acccggucuugggguggga

SEQ ID NO: 1890079 - RNA, 19 nt, Artificial Sequence
  Description of Artificial Sequence: Synthetic oligonucleotide
gcgacggggcggaaugucu

SEQ ID NO: 1890080 - RNA, 19 nt, Artificial Sequence
  Description of Artificial Sequence: Synthetic oligonucleotide
gcacuacaauguggcguaa

SEQ ID NO: 1890081 - RNA, 19 nt, Artificial Sequence
  Description of Artificial Sequence: Synthetic oligonucleotide
cgcgcgcacgugugagcgc

SEQ ID NO: 1890082 - RNA, 19 nt, Artificial Sequence
  Description of Artificial Sequence: Synthetic oligonucleotide
cgguucuguuacggucugc

SEQ ID NO: 1890083 - RNA, 19 nt, Artificial Sequence
  Description of Artificial Sequence: Synthetic oligonucleotide
cccaaugcgccaucuccuu

SEQ ID NO: 1890084 - RNA, 19 nt, Artificial Sequence
  Description of Artificial Sequence: Synthetic oligonucleotide
cuugggcguugggcuugga

SEQ ID NO: 1890085 - RNA, 19 nt, Artificial Sequence
  Description of Artificial Sequence: Synthetic oligonucleotide
ccgugagggugaaagccuu

SEQ ID NO: 1890086 - RNA, 19 nt, Artificial Sequence
  Description of Artificial Sequence: Synthetic oligonucleotide
gcgcgcgcgcgcacgugug

SEQ ID NO: 1890087 - RNA, 19 nt, Artificial Sequence
  Description of Artificial Sequence: Synthetic oligonucleotide
cucugccgugagggugaaa

SEQ ID NO: 1890088 - RNA, 19 nt, Artificial Sequence
  Description of Artificial Sequence: Synthetic oligonucleotide
ccguuugaguugggugagu

SEQ ID NO: 1890089 - RNA, 19 nt, Artificial Sequence
  Description of Artificial Sequence: Synthetic oligonucleotide
aacucaucaaagcaggugc

SEQ ID NO: 1890090 - RNA, 19 nt, Artificial Sequence
  Description of Artificial Sequence: Synthetic oligonucleotide
cauuauaacacauacaaac

SEQ ID NO: 1890091 - RNA, 19 nt, Artificial Sequence
  Description of Artificial Sequence: Synthetic oligonucleotide
gauaauauuucauaccucc

SEQ ID NO: 1890092 - RNA, 19 nt, Artificial Sequence
  Description of Artificial Sequence: Synthetic oligonucleotide
ugugguaacauucuuguag

SEQ ID NO: 1890093 - RNA, 19 nt, Artificial Sequence
  Description of Artificial Sequence: Synthetic oligonucleotide
aauagauugaacuuuggaa

SEQ ID NO: 1890094 - RNA, 19 nt, Artificial Sequence
  Description of Artificial Sequence: Synthetic oligonucleotide
ucauauucaauucucuucc

SEQ ID NO: 1890095 - RNA, 19 nt, Artificial Sequence
  Description of Artificial Sequence: Synthetic oligonucleotide
uuuggaauaaaguaaugca

SEQ ID NO: 1890096 - RNA, 19 nt, Artificial Sequence
  Description of Artificial Sequence: Synthetic oligonucleotide
uuguuuguaacuuuugugc

SEQ ID NO: 1890097 - RNA, 19 nt, Artificial Sequence
  Description of Artificial Sequence: Synthetic oligonucleotide
uuggguacaagauaaaaug

SEQ ID NO: 1890098 - RNA, 19 nt, Artificial Sequence
  Description of Artificial Sequence: Synthetic oligonucleotide
uauuuuaucagugugugug

SEQ ID NO: 1890099 - RNA, 19 nt, Artificial Sequence
  Description of Artificial Sequence: Synthetic oligonucleotide
uuaaugauuucccuaaacu

SEQ ID NO: 1890100 - RNA, 19 nt, Artificial Sequence
  Description of Artificial Sequence: Synthetic oligonucleotide
uuaaaguuaucuuuccugc

SEQ ID NO: 1890101 - RNA, 19 nt, Artificial Sequence
  Description of Artificial Sequence: Synthetic oligonucleotide
aaucuucacacgcucauag

SEQ ID NO: 1890102 - RNA, 19 nt, Artificial Sequence
  Description of Artificial Sequence: Synthetic oligonucleotide
uacauaauuucaaaacuug

SEQ ID NO: 1890103 - RNA, 19 nt, Artificial Sequence
  Description of Artificial Sequence: Synthetic oligonucleotide
gucaauuagcucuugagag

SEQ ID NO: 1890104 - RNA, 19 nt, Artificial Sequence
  Description of Artificial Sequence: Synthetic oligonucleotide
uuaaacaugacaucaaauu

SEQ ID NO: 1890105 - RNA, 19 nt, Artificial Sequence
  Description of Artificial Sequence: Synthetic oligonucleotide
caucaaauucauuaggagc

SEQ ID NO: 1890106 - RNA, 19 nt, Artificial Sequence
  Description of Artificial Sequence: Synthetic oligonucleotide
uuucccuaaacuuugacaa

SEQ ID NO: 1890107 - RNA, 19 nt, Artificial Sequence
  Description of Artificial Sequence: Synthetic oligonucleotide
agcugauaauauuucauac

SEQ ID NO: 1890108 - RNA, 19 nt, Artificial Sequence
  Description of Artificial Sequence: Synthetic oligonucleotide
gauaaaauggcuuucgucu

SEQ ID NO: 1890109 - RNA, 19 nt, Artificial Sequence
  Description of Artificial Sequence: Synthetic oligonucleotide
auuggaaauccauuguuuc

SEQ ID NO: 1890110 - RNA, 19 nt, Artificial Sequence
  Description of Artificial Sequence: Synthetic oligonucleotide
aaaauuggaaauccauugu

SEQ ID NO: 1890111 - RNA, 19 nt, Artificial Sequence
  Description of Artificial Sequence: Synthetic oligonucleotide
uggguacaagauaaaaugg

SEQ ID NO: 1890112 - RNA, 19 nt, Artificial Sequence
  Description of Artificial Sequence: Synthetic oligonucleotide
uucagugugagagaaagag

SEQ ID NO: 1890113 - RNA, 19 nt, Artificial Sequence
  Description of Artificial Sequence: Synthetic oligonucleotide
uugacuuauuuuaucagug

SEQ ID NO: 1890114 - RNA, 19 nt, Artificial Sequence
  Description of Artificial Sequence: Synthetic oligonucleotide
aaguuaucuuuccugcaac

SEQ ID NO: 1890115 - RNA, 19 nt, Artificial Sequence
  Description of Artificial Sequence: Synthetic oligonucleotide
uuugguacuaacaggccag

SEQ ID NO: 1890116 - RNA, 19 nt, Artificial Sequence
  Description of Artificial Sequence: Synthetic oligonucleotide
uguagcugaauucugggga

SEQ ID NO: 1890117 - RNA, 19 nt, Artificial Sequence
  Description of Artificial Sequence: Synthetic oligonucleotide
acuguuuuggucaauuagc

SEQ ID NO: 1890118 - RNA, 19 nt, Artificial Sequence
  Description of Artificial Sequence: Synthetic oligonucleotide
uugacaacaucuuggaagc

SEQ ID NO: 1890119 - RNA, 19 nt, Artificial Sequence
  Description of Artificial Sequence: Synthetic oligonucleotide
agauaaaauggcuuucguc

SEQ ID NO: 1890120 - RNA, 19 nt, Artificial Sequence
  Description of Artificial Sequence: Synthetic oligonucleotide
uacuguuuuggucaauuag

SEQ ID NO: 1890121 - RNA, 19 nt, Artificial Sequence
  Description of Artificial Sequence: Synthetic oligonucleotide
cauuguuucuuucauauuc

SEQ ID NO: 1890122 - RNA, 19 nt, Artificial Sequence
  Description of Artificial Sequence: Synthetic oligonucleotide
aacauuugacuccaguaga

SEQ ID NO: 1890123 - RNA, 19 nt, Artificial Sequence
  Description of Artificial Sequence: Synthetic oligonucleotide
uucauuaauuuuaaaguua

SEQ ID NO: 1890124 - RNA, 19 nt, Artificial Sequence
  Description of Artificial Sequence: Synthetic oligonucleotide
cacauuauaacacauacaa

SEQ ID NO: 1890125 - RNA, 19 nt, Artificial Sequence
  Description of Artificial Sequence: Synthetic oligonucleotide
auucuuuacuguuuugguc

SEQ ID NO: 1890126 - RNA, 19 nt, Artificial Sequence
  Description of Artificial Sequence: Synthetic oligonucleotide
uguuuguaacuuuugugcc

SEQ ID NO: 1890127 - RNA, 19 nt, Artificial Sequence
  Description of Artificial Sequence: Synthetic oligonucleotide
auuauauccacagauauuu

SEQ ID NO: 1890128 - RNA, 19 nt, Artificial Sequence
  Description of Artificial Sequence: Synthetic oligonucleotide
aaacuuugacaacaucuug

SEQ ID NO: 1890129 - RNA, 19 nt, Artificial Sequence
  Description of Artificial Sequence: Synthetic oligonucleotide
uuggaauaaaguaaugcau

SEQ ID NO: 1890130 - RNA, 19 nt, Artificial Sequence
  Description of Artificial Sequence: Synthetic oligonucleotide
agauucacaacauguuuuc

SEQ ID NO: 1890131 - RNA, 19 nt, Artificial Sequence
  Description of Artificial Sequence: Synthetic oligonucleotide
aauacaucuaguucuucau

SEQ ID NO: 1890132 - RNA, 19 nt, Artificial Sequence
  Description of Artificial Sequence: Synthetic oligonucleotide
aaugcaucaguuucucugu

SEQ ID NO: 1890133 - RNA, 19 nt, Artificial Sequence
  Description of Artificial Sequence: Synthetic oligonucleotide
caagaacacauuauaacac

SEQ ID NO: 1890134 - RNA, 19 nt, Artificial Sequence
  Description of Artificial Sequence: Synthetic oligonucleotide
uaauauuucauaccuccaa

SEQ ID NO: 1890135 - RNA, 19 nt, Artificial Sequence
  Description of Artificial Sequence: Synthetic oligonucleotide
aauucuggggacuuucagu

SEQ ID NO: 1890136 - RNA, 19 nt, Artificial Sequence
  Description of Artificial Sequence: Synthetic oligonucleotide
gauugcagucuucacgugg

SEQ ID NO: 1890137 - RNA, 19 nt, Artificial Sequence
  Description of Artificial Sequence: Synthetic oligonucleotide
aaaguuaucuuuccugcaa

SEQ ID NO: 1890138 - RNA, 19 nt, Artificial Sequence
  Description of Artificial Sequence: Synthetic oligonucleotide
uuuaaacaugacaucaaau

SEQ ID NO: 1890139 - RNA, 19 nt, Artificial Sequence
  Description of Artificial Sequence: Synthetic oligonucleotide
acaucaaauucauuaggag

SEQ ID NO: 1890140 - RNA, 19 nt, Artificial Sequence
  Description of Artificial Sequence: Synthetic oligonucleotide
auuaggagcagaaaucuuc

SEQ ID NO: 1890141 - RNA, 19 nt, Artificial Sequence
  Description of Artificial Sequence: Synthetic oligonucleotide
gacuuauuuuaucagugug

SEQ ID NO: 1890142 - RNA, 19 nt, Artificial Sequence
  Description of Artificial Sequence: Synthetic oligonucleotide
ugucgugcccacaagaaca

SEQ ID NO: 1890143 - RNA, 19 nt, Artificial Sequence
  Description of Artificial Sequence: Synthetic oligonucleotide
aaauuggaaauccauuguu

SEQ ID NO: 1890144 - RNA, 19 nt, Artificial Sequence
  Description of Artificial Sequence: Synthetic oligonucleotide
cacagauauuucuucaggg

SEQ ID NO: 1890145 - RNA, 19 nt, Artificial Sequence
  Description of Artificial Sequence: Synthetic oligonucleotide
uucaacugcucgaagaggu

SEQ ID NO: 1890146 - RNA, 19 nt, Artificial Sequence
  Description of Artificial Sequence: Synthetic oligonucleotide
uaacuuuugugccaagcca

SEQ ID NO: 1890147 - RNA, 19 nt, Artificial Sequence
  Description of Artificial Sequence: Synthetic oligonucleotide
cuuguuuguaacuuuugug

SEQ ID NO: 1890148 - RNA, 19 nt, Artificial Sequence
  Description of Artificial Sequence: Synthetic oligonucleotide
aaaacuccauugugguaac

SEQ ID NO: 1890149 - RNA, 19 nt, Artificial Sequence
  Description of Artificial Sequence: Synthetic oligonucleotide
cugauaagaaguguuacag

SEQ ID NO: 1890150 - RNA, 19 nt, Artificial Sequence
  Description of Artificial Sequence: Synthetic oligonucleotide
uccauuguuucuuucauau

SEQ ID NO: 1890151 - RNA, 19 nt, Artificial Sequence
  Description of Artificial Sequence: Synthetic oligonucleotide
ucugauaagaaguguuaca

SEQ ID NO: 1890152 - RNA, 19 nt, Artificial Sequence
  Description of Artificial Sequence: Synthetic oligonucleotide
uuugacuccaguagauuca

SEQ ID NO: 1890153 - RNA, 19 nt, Artificial Sequence
  Description of Artificial Sequence: Synthetic oligonucleotide
uccacagaaauucuuuacu

SEQ ID NO: 1890154 - RNA, 19 nt, Artificial Sequence
  Description of Artificial Sequence: Synthetic oligonucleotide
gacuccauucaccaccucg

SEQ ID NO: 1890155 - RNA, 19 nt, Artificial Sequence
  Description of Artificial Sequence: Synthetic oligonucleotide
uuaggagcagaaaucuuca

SEQ ID NO: 1890156 - RNA, 19 nt, Artificial Sequence
  Description of Artificial Sequence: Synthetic oligonucleotide
uguccugaggcacucaaca

SEQ ID NO: 1890157 - RNA, 19 nt, Artificial Sequence
  Description of Artificial Sequence: Synthetic oligonucleotide
aaugauuucccuaaacuuu

SEQ ID NO: 1890158 - RNA, 19 nt, Artificial Sequence
  Description of Artificial Sequence: Synthetic oligonucleotide
uaaugauuucccuaaacuu

SEQ ID NO: 1890159 - RNA, 19 nt, Artificial Sequence
  Description of Artificial Sequence: Synthetic oligonucleotide
guacuaacaggccagcugc

SEQ ID NO: 1890160 - RNA, 19 nt, Artificial Sequence
  Description of Artificial Sequence: Synthetic oligonucleotide
aaugacccaguggauuucc

SEQ ID NO: 1890161 - RNA, 19 nt, Artificial Sequence
  Description of Artificial Sequence: Synthetic oligonucleotide
aacuuuugugccaagccag

SEQ ID NO: 1890162 - RNA, 19 nt, Artificial Sequence
  Description of Artificial Sequence: Synthetic oligonucleotide
aaaauggcuuucgucuucg

SEQ ID NO: 1890163 - RNA, 19 nt, Artificial Sequence
  Description of Artificial Sequence: Synthetic oligonucleotide
ucugagcuucacaagauaa

SEQ ID NO: 1890164 - RNA, 19 nt, Artificial Sequence
  Description of Artificial Sequence: Synthetic oligonucleotide
ugauaagaaguguuacagc

SEQ ID NO: 1890165 - RNA, 19 nt, Artificial Sequence
  Description of Artificial Sequence: Synthetic oligonucleotide
uacaagauaaaauggcuuu

SEQ ID NO: 1890166 - RNA, 19 nt, Artificial Sequence
  Description of Artificial Sequence: Synthetic oligonucleotide
auuucccuaaacuuugaca

SEQ ID NO: 1890167 - RNA, 19 nt, Artificial Sequence
  Description of Artificial Sequence: Synthetic oligonucleotide
uggucaauuagcucuugag

SEQ ID NO: 1890168 - RNA, 19 nt, Artificial Sequence
  Description of Artificial Sequence: Synthetic oligonucleotide
ucaauuagcucuugagaga

SEQ ID NO: 1890169 - RNA, 19 nt, Artificial Sequence
  Description of Artificial Sequence: Synthetic oligonucleotide
gaauagauugaacuuugga

SEQ ID NO: 1890170 - RNA, 19 nt, Artificial Sequence
  Description of Artificial Sequence: Synthetic oligonucleotide
gggacuuucaguuuaaaca

SEQ ID NO: 1890171 - RNA, 19 nt, Artificial Sequence
  Description of Artificial Sequence: Synthetic oligonucleotide
ucacgugguaagaagagaa

SEQ ID NO: 1890172 - RNA, 19 nt, Artificial Sequence
  Description of Artificial Sequence: Synthetic oligonucleotide
aagcugauaauauuucaua

SEQ ID NO: 1890173 - RNA, 19 nt, Artificial Sequence
  Description of Artificial Sequence: Synthetic oligonucleotide
augucuggccuugaaaacc

SEQ ID NO: 1890174 - RNA, 19 nt, Artificial Sequence
  Description of Artificial Sequence: Synthetic oligonucleotide
ugcucgaagagguauuuca

SEQ ID NO: 1890175 - RNA, 19 nt, Artificial Sequence
  Description of Artificial Sequence: Synthetic oligonucleotide
cuuuccugcaacauuugac

SEQ ID NO: 1890176 - RNA, 19 nt, Artificial Sequence
  Description of Artificial Sequence: Synthetic oligonucleotide
gaauaaaguaaugcaucag

SEQ ID NO: 1890177 - RNA, 19 nt, Artificial Sequence
  Description of Artificial Sequence: Synthetic oligonucleotide
aacuuuggaauaaaguaau

SEQ ID NO: 1890178 - RNA, 19 nt, Artificial Sequence
  Description of Artificial Sequence: Synthetic oligonucleotide
gugguaacauucuuguagc

SEQ ID NO: 1890179 - RNA, 19 nt, Artificial Sequence
  Description of Artificial Sequence: Synthetic oligonucleotide
cauucuuguagcugaauuc

SEQ ID NO: 1890180 - RNA, 19 nt, Artificial Sequence
  Description of Artificial Sequence: Synthetic oligonucleotide
cauugugguaacauucuug

SEQ ID NO: 1890181 - RNA, 19 nt, Artificial Sequence
  Description of Artificial Sequence: Synthetic oligonucleotide
acuccaguagauucacaac

SEQ ID NO: 1890182 - RNA, 19 nt, Artificial Sequence
  Description of Artificial Sequence: Synthetic oligonucleotide
uuucugauaagaaguguua

SEQ ID NO: 1890183 - RNA, 19 nt, Artificial Sequence
  Description of Artificial Sequence: Synthetic oligonucleotide
gauggguaguccuucuuug

SEQ ID NO: 1890184 - RNA, 19 nt, Artificial Sequence
  Description of Artificial Sequence: Synthetic oligonucleotide
cuucacacgcucauaguag

SEQ ID NO: 1890185 - RNA, 19 nt, Artificial Sequence
  Description of Artificial Sequence: Synthetic oligonucleotide
ugguaagaagagaauacau

SEQ ID NO: 1890186 - RNA, 19 nt, Artificial Sequence
  Description of Artificial Sequence: Synthetic oligonucleotide
ucgaagagguauuucauua

SEQ ID NO: 1890187 - RNA, 19 nt, Artificial Sequence
  Description of Artificial Sequence: Synthetic oligonucleotide
ugcguuucaaccucaauuu

SEQ ID NO: 1890188 - RNA, 19 nt, Artificial Sequence
  Description of Artificial Sequence: Synthetic oligonucleotide
ucaguuuaaacaugacauc

SEQ ID NO: 1890189 - RNA, 19 nt, Artificial Sequence
  Description of Artificial Sequence: Synthetic oligonucleotide
ucuuggaagcugauaauau

SEQ ID NO: 1890190 - RNA, 19 nt, Artificial Sequence
  Description of Artificial Sequence: Synthetic oligonucleotide
ggagcagaaaucuucacac

SEQ ID NO: 1890191 - RNA, 19 nt, Artificial Sequence
  Description of Artificial Sequence: Synthetic oligonucleotide
uuggaaauccauuguuucu

SEQ ID NO: 1890192 - RNA, 19 nt, Artificial Sequence
  Description of Artificial Sequence: Synthetic oligonucleotide
ugauaauauuucauaccuc

SEQ ID NO: 1890193 - RNA, 19 nt, Artificial Sequence
  Description of Artificial Sequence: Synthetic oligonucleotide
uccauugugguaacauucu

SEQ ID NO: 1890194 - RNA, 19 nt, Artificial Sequence
  Description of Artificial Sequence: Synthetic oligonucleotide
gacaucaaauucauuagga

SEQ ID NO: 1890195 - RNA, 19 nt, Artificial Sequence
  Description of Artificial Sequence: Synthetic oligonucleotide
uuaucagugugugugugug

SEQ ID NO: 1890196 - RNA, 19 nt, Artificial Sequence
  Description of Artificial Sequence: Synthetic oligonucleotide
ugacuuauuuuaucagugu

SEQ ID NO: 1890197 - RNA, 19 nt, Artificial Sequence
  Description of Artificial Sequence: Synthetic oligonucleotide
caacuuuugcauucuuggg

SEQ ID NO: 1890198 - RNA, 19 nt, Artificial Sequence
  Description of Artificial Sequence: Synthetic oligonucleotide
uccugcaacauuugacucc

SEQ ID NO: 1890199 - RNA, 19 nt, Artificial Sequence
  Description of Artificial Sequence: Synthetic oligonucleotide
uguaacuuuugugccaagc

SEQ ID NO: 1890200 - RNA, 19 nt, Artificial Sequence
  Description of Artificial Sequence: Synthetic oligonucleotide
aguaaugcaucaguuucuc

SEQ ID NO: 1890201 - RNA, 19 nt, Artificial Sequence
  Description of Artificial Sequence: Synthetic oligonucleotide
gaacuuuggaauaaaguaa

SEQ ID NO: 1890202 - RNA, 19 nt, Artificial Sequence
  Description of Artificial Sequence: Synthetic oligonucleotide
acaagauaaaauggcuuuc

SEQ ID NO: 1890203 - RNA, 19 nt, Artificial Sequence
  Description of Artificial Sequence: Synthetic oligonucleotide
uucacacgcucauaguagc

SEQ ID NO: 1890204 - RNA, 19 nt, Artificial Sequence
  Description of Artificial Sequence: Synthetic oligonucleotide
uuucauauucaauucucuu

SEQ ID NO: 1890205 - RNA, 19 nt, Artificial Sequence
  Description of Artificial Sequence: Synthetic oligonucleotide
gcugauaauauuucauacc

SEQ ID NO: 1890206 - RNA, 19 nt, Artificial Sequence
  Description of Artificial Sequence: Synthetic oligonucleotide
auacaucuaguucuucaug

SEQ ID NO: 1890207 - RNA, 19 nt, Artificial Sequence
  Description of Artificial Sequence: Synthetic oligonucleotide
aaauucauuaggagcagaa

SEQ ID NO: 1890208 - RNA, 19 nt, Artificial Sequence
  Description of Artificial Sequence: Synthetic oligonucleotide
uagauugaacuuuggaaua

SEQ ID NO: 1890209 - RNA, 19 nt, Artificial Sequence
  Description of Artificial Sequence: Synthetic oligonucleotide
uuaucuuuccugcaacauu

SEQ ID NO: 1890210 - RNA, 19 nt, Artificial Sequence
  Description of Artificial Sequence: Synthetic oligonucleotide
uuugugccaagccaguuuu

SEQ ID NO: 1890211 - RNA, 19 nt, Artificial Sequence
  Description of Artificial Sequence: Synthetic oligonucleotide
cuuggggucccacugacug

SEQ ID NO: 1890212 - RNA, 19 nt, Artificial Sequence
  Description of Artificial Sequence: Synthetic oligonucleotide
ucccuaaacuuugacaaca

SEQ ID NO: 1890213 - RNA, 19 nt, Artificial Sequence
  Description of Artificial Sequence: Synthetic oligonucleotide
auuuuaucagugugugugu

SEQ ID NO: 1890214 - RNA, 19 nt, Artificial Sequence
  Description of Artificial Sequence: Synthetic oligonucleotide
cugauaauauuucauaccu

SEQ ID NO: 1890215 - RNA, 19 nt, Artificial Sequence
  Description of Artificial Sequence: Synthetic oligonucleotide
uuuaucagugugugugugu

SEQ ID NO: 1890216 - RNA, 19 nt, Artificial Sequence
  Description of Artificial Sequence: Synthetic oligonucleotide
uucaggguuucugauaaga

SEQ ID NO: 1890217 - RNA, 19 nt, Artificial Sequence
  Description of Artificial Sequence: Synthetic oligonucleotide
ugcaacauuugacuccagu

SEQ ID NO: 1890218 - RNA, 19 nt, Artificial Sequence
  Description of Artificial Sequence: Synthetic oligonucleotide
acuuauuuuaucagugugu

SEQ ID NO: 1890219 - RNA, 19 nt, Artificial Sequence
  Description of Artificial Sequence: Synthetic oligonucleotide
acuguucagccgcuggacg

SEQ ID NO: 1890220 - RNA, 19 nt, Artificial Sequence
  Description of Artificial Sequence: Synthetic oligonucleotide
uucugauaagaaguguuac

SEQ ID NO: 1890221 - RNA, 19 nt, Artificial Sequence
  Description of Artificial Sequence: Synthetic oligonucleotide
ucaaauucauuaggagcag

SEQ ID NO: 1890222 - RNA, 19 nt, Artificial Sequence
  Description of Artificial Sequence: Synthetic oligonucleotide
ucggccgccaccgagaucu

SEQ ID NO: 1890223 - RNA, 19 nt, Artificial Sequence
  Description of Artificial Sequence: Synthetic oligonucleotide
uuucgucuucgcuuguuug

SEQ ID NO: 1890224 - RNA, 19 nt, Artificial Sequence
  Description of Artificial Sequence: Synthetic oligonucleotide
gacaacaucuuggaagcug

SEQ ID NO: 1890225 - RNA, 19 nt, Artificial Sequence
  Description of Artificial Sequence: Synthetic oligonucleotide
gugagagaaagagaggcgc

SEQ ID NO: 1890226 - RNA, 19 nt, Artificial Sequence
  Description of Artificial Sequence: Synthetic oligonucleotide
uucuugacagcaguugccc

SEQ ID NO: 1890227 - RNA, 19 nt, Artificial Sequence
  Description of Artificial Sequence: Synthetic oligonucleotide
uuuuaucagugugugugug

SEQ ID NO: 1890228 - RNA, 19 nt, Artificial Sequence
  Description of Artificial Sequence: Synthetic oligonucleotide
auguuuucucuuuuccaug

SEQ ID NO: 1890229 - RNA, 19 nt, Artificial Sequence
  Description of Artificial Sequence: Synthetic oligonucleotide
acagcaguugccccacgac

SEQ ID NO: 1890230 - RNA, 19 nt, Artificial Sequence
  Description of Artificial Sequence: Synthetic oligonucleotide
ugugugugugugugugucg

SEQ ID NO: 1890231 - RNA, 19 nt, Artificial Sequence
  Description of Artificial Sequence: Synthetic oligonucleotide
aguuaucuuuccugcaaca

SEQ ID NO: 1890232 - RNA, 19 nt, Artificial Sequence
  Description of Artificial Sequence: Synthetic oligonucleotide
uccaguagauucacaacau

SEQ ID NO: 1890233 - RNA, 19 nt, Artificial Sequence
  Description of Artificial Sequence: Synthetic oligonucleotide
caaagcaggugcuuaggug

SEQ ID NO: 1890234 - RNA, 19 nt, Artificial Sequence
  Description of Artificial Sequence: Synthetic oligonucleotide
uucuuguagcugaauucug

SEQ ID NO: 1890235 - RNA, 19 nt, Artificial Sequence
  Description of Artificial Sequence: Synthetic oligonucleotide
ucacgguucugcauucuug

SEQ ID NO: 1890236 - RNA, 19 nt, Artificial Sequence
  Description of Artificial Sequence: Synthetic oligonucleotide
uuauuuuaucagugugugu

SEQ ID NO: 1890237 - RNA, 19 nt, Artificial Sequence
  Description of Artificial Sequence: Synthetic oligonucleotide
acauucuuguagcugaauu

SEQ ID NO: 1890238 - RNA, 19 nt, Artificial Sequence
  Description of Artificial Sequence: Synthetic oligonucleotide
cuccaguagauucacaaca

SEQ ID NO: 1890239 - RNA, 19 nt, Artificial Sequence
  Description of Artificial Sequence: Synthetic oligonucleotide
aauuauauccacagauauu

SEQ ID NO: 1890240 - RNA, 19 nt, Artificial Sequence
  Description of Artificial Sequence: Synthetic oligonucleotide
ugugucgugcccacaagaa

SEQ ID NO: 1890241 - RNA, 19 nt, Artificial Sequence
  Description of Artificial Sequence: Synthetic oligonucleotide
uccugaggcacucaacaaa

SEQ ID NO: 1890242 - RNA, 19 nt, Artificial Sequence
  Description of Artificial Sequence: Synthetic oligonucleotide
augauuucccuaaacuuug

SEQ ID NO: 1890243 - RNA, 19 nt, Artificial Sequence
  Description of Artificial Sequence: Synthetic oligonucleotide
aaguaaugcaucaguuucu

SEQ ID NO: 1890244 - RNA, 19 nt, Artificial Sequence
  Description of Artificial Sequence: Synthetic oligonucleotide
uguccuguggguucucagc

SEQ ID NO: 1890245 - RNA, 19 nt, Artificial Sequence
  Description of Artificial Sequence: Synthetic oligonucleotide
uccauucaccaccucggcc

SEQ ID NO: 1890246 - RNA, 19 nt, Artificial Sequence
  Description of Artificial Sequence: Synthetic oligonucleotide
acuaacaggccagcugccc

SEQ ID NO: 1890247 - RNA, 19 nt, Artificial Sequence
  Description of Artificial Sequence: Synthetic oligonucleotide
aaaugacccaguggauuuc

SEQ ID NO: 1890248 - RNA, 19 nt, Artificial Sequence
  Description of Artificial Sequence: Synthetic oligonucleotide
gauuucccuaaacuuugac

SEQ ID NO: 1890249 - RNA, 19 nt, Artificial Sequence
  Description of Artificial Sequence: Synthetic oligonucleotide
auacauaauuucaaaacuu

SEQ ID NO: 1890250 - RNA, 19 nt, Artificial Sequence
  Description of Artificial Sequence: Synthetic oligonucleotide
uucgucuucgcuuguuugu

SEQ ID NO: 1890251 - RNA, 19 nt, Artificial Sequence
  Description of Artificial Sequence: Synthetic oligonucleotide
uuauauccacagauauuuc

SEQ ID NO: 1890252 - RNA, 19 nt, Artificial Sequence
  Description of Artificial Sequence: Synthetic oligonucleotide
uuuugugccaagccaguuu

SEQ ID NO: 1890253 - RNA, 19 nt, Artificial Sequence
  Description of Artificial Sequence: Synthetic oligonucleotide
cuuugaacuccgacucacg

SEQ ID NO: 1890254 - RNA, 19 nt, Artificial Sequence
  Description of Artificial Sequence: Synthetic oligonucleotide
acuccauucaccaccucgg

SEQ ID NO: 1890255 - RNA, 19 nt, Artificial Sequence
  Description of Artificial Sequence: Synthetic oligonucleotide
gucuucacgugguaagaag

SEQ ID NO: 1890256 - RNA, 19 nt, Artificial Sequence
  Description of Artificial Sequence: Synthetic oligonucleotide
uuuacuguuuuggucaauu

SEQ ID NO: 1890257 - RNA, 19 nt, Artificial Sequence
  Description of Artificial Sequence: Synthetic oligonucleotide
aacuccauugugguaacau

SEQ ID NO: 1890258 - RNA, 19 nt, Artificial Sequence
  Description of Artificial Sequence: Synthetic oligonucleotide
auaaaauggcuuucgucuu

SEQ ID NO: 1890259 - RNA, 19 nt, Artificial Sequence
  Description of Artificial Sequence: Synthetic oligonucleotide
ugacaucucgaucuuugau

SEQ ID NO: 1890260 - RNA, 19 nt, Artificial Sequence
  Description of Artificial Sequence: Synthetic oligonucleotide
uggguaguccuucuuuggu

SEQ ID NO: 1890261 - RNA, 19 nt, Artificial Sequence
  Description of Artificial Sequence: Synthetic oligonucleotide
gguacuaacaggccagcug

SEQ ID NO: 1890262 - RNA, 19 nt, Artificial Sequence
  Description of Artificial Sequence: Synthetic oligonucleotide
cuuucaguuuaaacaugac

SEQ ID NO: 1890263 - RNA, 19 nt, Artificial Sequence
  Description of Artificial Sequence: Synthetic oligonucleotide
uuggucaauuagcucuuga

SEQ ID NO: 1890264 - RNA, 19 nt, Artificial Sequence
  Description of Artificial Sequence: Synthetic oligonucleotide
uugaacuccgacucacggu

SEQ ID NO: 1890265 - RNA, 19 nt, Artificial Sequence
  Description of Artificial Sequence: Synthetic oligonucleotide
ucuucgcuuguuuguaacu

SEQ ID NO: 1890266 - RNA, 19 nt, Artificial Sequence
  Description of Artificial Sequence: Synthetic oligonucleotide
ucagcccacauguggagga

SEQ ID NO: 1890267 - RNA, 19 nt, Artificial Sequence
  Description of Artificial Sequence: Synthetic oligonucleotide
guuacagcagggcuuccug

SEQ ID NO: 1890268 - RNA, 19 nt, Artificial Sequence
  Description of Artificial Sequence: Synthetic oligonucleotide
acugacaucucgaucuuug

SEQ ID NO: 1890269 - RNA, 19 nt, Artificial Sequence
  Description of Artificial Sequence: Synthetic oligonucleotide
agaauagauugaacuuugg

SEQ ID NO: 1890270 - RNA, 19 nt, Artificial Sequence
  Description of Artificial Sequence: Synthetic oligonucleotide
auaguagcugccacuguuc

SEQ ID NO: 1890271 - RNA, 19 nt, Artificial Sequence
  Description of Artificial Sequence: Synthetic oligonucleotide
caugucuggccuugaaaac

SEQ ID NO: 1890272 - RNA, 19 nt, Artificial Sequence
  Description of Artificial Sequence: Synthetic oligonucleotide
acgccuuugaacuccgacu

SEQ ID NO: 1890273 - RNA, 19 nt, Artificial Sequence
  Description of Artificial Sequence: Synthetic oligonucleotide
ugccccacgacuccauuca

SEQ ID NO: 1890274 - RNA, 19 nt, Artificial Sequence
  Description of Artificial Sequence: Synthetic oligonucleotide
gaaguguuacagcagggcu

SEQ ID NO: 1890275 - RNA, 19 nt, Artificial Sequence
  Description of Artificial Sequence: Synthetic oligonucleotide
aucagugugugugugugug

SEQ ID NO: 1890276 - RNA, 19 nt, Artificial Sequence
  Description of Artificial Sequence: Synthetic oligonucleotide
aacuccgacucacgguucu

SEQ ID NO: 1890277 - RNA, 19 nt, Artificial Sequence
  Description of Artificial Sequence: Synthetic oligonucleotide
ugugugugugugucgugcc

SEQ ID NO: 1890278 - RNA, 19 nt, Artificial Sequence
  Description of Artificial Sequence: Synthetic oligonucleotide
ucuugacagcaguugcccc

SEQ ID NO: 1890279 - RNA, 19 nt, Artificial Sequence
  Description of Artificial Sequence: Synthetic oligonucleotide
ugauuucccuaaacuuuga

SEQ ID NO: 1890280 - RNA, 19 nt, Artificial Sequence
  Description of Artificial Sequence: Synthetic oligonucleotide
ggguacaagauaaaauggc

SEQ ID NO: 1890281 - RNA, 19 nt, Artificial Sequence
  Description of Artificial Sequence: Synthetic oligonucleotide
agagaggcgccaugucugg

SEQ ID NO: 1890282 - RNA, 19 nt, Artificial Sequence
  Description of Artificial Sequence: Synthetic oligonucleotide
ugugugucgugcccacaag

SEQ ID NO: 1890283 - RNA, 19 nt, Artificial Sequence
  Description of Artificial Sequence: Synthetic oligonucleotide
accgagaucuccuugcguu

SEQ ID NO: 1890284 - RNA, 19 nt, Artificial Sequence
  Description of Artificial Sequence: Synthetic oligonucleotide
caucuaguucuucaugcuc

SEQ ID NO: 1890285 - RNA, 19 nt, Artificial Sequence
  Description of Artificial Sequence: Synthetic oligonucleotide
ggucaauuagcucuugaga

SEQ ID NO: 1890286 - RNA, 19 nt, Artificial Sequence
  Description of Artificial Sequence: Synthetic oligonucleotide
auuagcucuugagagaaua

SEQ ID NO: 1890287 - RNA, 19 nt, Artificial Sequence
  Description of Artificial Sequence: Synthetic oligonucleotide
agaauuauauccacagaua

SEQ ID NO: 1890288 - RNA, 19 nt, Artificial Sequence
  Description of Artificial Sequence: Synthetic oligonucleotide
uuuugauggguaguccuuc

SEQ ID NO: 1890289 - RNA, 19 nt, Artificial Sequence
  Description of Artificial Sequence: Synthetic oligonucleotide
guccuguggguucucagcc

SEQ ID NO: 1890290 - RNA, 19 nt, Artificial Sequence
  Description of Artificial Sequence: Synthetic oligonucleotide
cugcccuuugacuccaaag

SEQ ID NO: 1890291 - RNA, 19 nt, Artificial Sequence
  Description of Artificial Sequence: Synthetic oligonucleotide
gacgccuuugaacuccgac

SEQ ID NO: 1890292 - RNA, 19 nt, Artificial Sequence
  Description of Artificial Sequence: Synthetic oligonucleotide
gagaaagagaggcgccaug

SEQ ID NO: 1890293 - RNA, 19 nt, Artificial Sequence
  Description of Artificial Sequence: Synthetic oligonucleotide
gguaguccuucuuugguac

SEQ ID NO: 1890294 - RNA, 19 nt, Artificial Sequence
  Description of Artificial Sequence: Synthetic oligonucleotide
aguagauucacaacauguu

SEQ ID NO: 1890295 - RNA, 19 nt, Artificial Sequence
  Description of Artificial Sequence: Synthetic oligonucleotide
ucuuuacuguuuuggucaa

SEQ ID NO: 1890296 - RNA, 19 nt, Artificial Sequence
  Description of Artificial Sequence: Synthetic oligonucleotide
cauaauuucaaaacuuguu

SEQ ID NO: 1890297 - RNA, 19 nt, Artificial Sequence
  Description of Artificial Sequence: Synthetic oligonucleotide
ugcccacaagaacacauua

SEQ ID NO: 1890298 - RNA, 19 nt, Artificial Sequence
  Description of Artificial Sequence: Synthetic oligonucleotide
uucccuaaacuuugacaac

SEQ ID NO: 1890299 - RNA, 19 nt, Artificial Sequence
  Description of Artificial Sequence: Synthetic oligonucleotide
caguagauucacaacaugu

SEQ ID NO: 1890300 - RNA, 19 nt, Artificial Sequence
  Description of Artificial Sequence: Synthetic oligonucleotide
acgguucugcauucuugac

SEQ ID NO: 1890301 - RNA, 19 nt, Artificial Sequence
  Description of Artificial Sequence: Synthetic oligonucleotide
uuucucuguccugaggcac

SEQ ID NO: 1890302 - RNA, 19 nt, Artificial Sequence
  Description of Artificial Sequence: Synthetic oligonucleotide
gguaacauucuuguagcug

SEQ ID NO: 1890303 - RNA, 19 nt, Artificial Sequence
  Description of Artificial Sequence: Synthetic oligonucleotide
agaauacaucuaguucuuc

SEQ ID NO: 1890304 - RNA, 19 nt, Artificial Sequence
  Description of Artificial Sequence: Synthetic oligonucleotide
cuuuugcauucuuggguac

SEQ ID NO: 1890305 - RNA, 19 nt, Artificial Sequence
  Description of Artificial Sequence: Synthetic oligonucleotide
uaacauucuuguagcugaa

SEQ ID NO: 1890306 - RNA, 19 nt, Artificial Sequence
  Description of Artificial Sequence: Synthetic oligonucleotide
agauauuucuucaggguuu

SEQ ID NO: 1890307 - RNA, 19 nt, Artificial Sequence
  Description of Artificial Sequence: Synthetic oligonucleotide
uggacgccuuugaacuccg

SEQ ID NO: 1890308 - RNA, 19 nt, Artificial Sequence
  Description of Artificial Sequence: Synthetic oligonucleotide
gacaucucgaucuuugauu

SEQ ID NO: 1890309 - RNA, 19 nt, Artificial Sequence
  Description of Artificial Sequence: Synthetic oligonucleotide
cugacuguccuguggguuc

SEQ ID NO: 1890310 - RNA, 19 nt, Artificial Sequence
  Description of Artificial Sequence: Synthetic oligonucleotide
gugguaagaagagaauaca

SEQ ID NO: 1890311 - RNA, 19 nt, Artificial Sequence
  Description of Artificial Sequence: Synthetic oligonucleotide
gaaagagaggcgccauguc

SEQ ID NO: 1890312 - RNA, 19 nt, Artificial Sequence
  Description of Artificial Sequence: Synthetic oligonucleotide
ccuuugacuccaaagccag

SEQ ID NO: 1890313 - RNA, 19 nt, Artificial Sequence
  Description of Artificial Sequence: Synthetic oligonucleotide
uugacuccaguagauucac

SEQ ID NO: 1890314 - RNA, 19 nt, Artificial Sequence
  Description of Artificial Sequence: Synthetic oligonucleotide
agauugaacuuuggaauaa

SEQ ID NO: 1890315 - RNA, 19 nt, Artificial Sequence
  Description of Artificial Sequence: Synthetic oligonucleotide
aucuuggaagcugauaaua

SEQ ID NO: 1890316 - RNA, 19 nt, Artificial Sequence
  Description of Artificial Sequence: Synthetic oligonucleotide
auugcagucuucacguggu

SEQ ID NO: 1890317 - RNA, 19 nt, Artificial Sequence
  Description of Artificial Sequence: Synthetic oligonucleotide
agcucuugagagaauagau

SEQ ID NO: 1890318 - RNA, 19 nt, Artificial Sequence
  Description of Artificial Sequence: Synthetic oligonucleotide
gaauguuucugagcuucac

SEQ ID NO: 1890319 - RNA, 19 nt, Artificial Sequence
  Description of Artificial Sequence: Synthetic oligonucleotide
cuuggguacaagauaaaau

SEQ ID NO: 1890320 - RNA, 19 nt, Artificial Sequence
  Description of Artificial Sequence: Synthetic oligonucleotide
ccacagauauuucuucagg

SEQ ID NO: 1890321 - RNA, 19 nt, Artificial Sequence
  Description of Artificial Sequence: Synthetic oligonucleotide
agaaaucuucacacgcuca

SEQ ID NO: 1890322 - RNA, 19 nt, Artificial Sequence
  Description of Artificial Sequence: Synthetic oligonucleotide
uucgcuuguuuguaacuuu

SEQ ID NO: 1890323 - RNA, 19 nt, Artificial Sequence
  Description of Artificial Sequence: Synthetic oligonucleotide
uguucagccgcuggacgcc

SEQ ID NO: 1890324 - RNA, 19 nt, Artificial Sequence
  Description of Artificial Sequence: Synthetic oligonucleotide
cauguuuucucuuuuccau

SEQ ID NO: 1890325 - RNA, 19 nt, Artificial Sequence
  Description of Artificial Sequence: Synthetic oligonucleotide
ugcuuggggucccacugac

SEQ ID NO: 1890326 - RNA, 19 nt, Artificial Sequence
  Description of Artificial Sequence: Synthetic oligonucleotide
cgugguaagaagagaauac

SEQ ID NO: 1890327 - RNA, 19 nt, Artificial Sequence
  Description of Artificial Sequence: Synthetic oligonucleotide
guagauucacaacauguuu

SEQ ID NO: 1890328 - RNA, 19 nt, Artificial Sequence
  Description of Artificial Sequence: Synthetic oligonucleotide
ugcuuaggugcuugggguc

SEQ ID NO: 1890329 - RNA, 19 nt, Artificial Sequence
  Description of Artificial Sequence: Synthetic oligonucleotide
ucuaguucuucaugcucuu

SEQ ID NO: 1890330 - RNA, 19 nt, Artificial Sequence
  Description of Artificial Sequence: Synthetic oligonucleotide
uaucagugugugugugugu

SEQ ID NO: 1890331 - RNA, 19 nt, Artificial Sequence
  Description of Artificial Sequence: Synthetic oligonucleotide
cuggacgccuuugaacucc

SEQ ID NO: 1890332 - RNA, 19 nt, Artificial Sequence
  Description of Artificial Sequence: Synthetic oligonucleotide
gugugugugugugucgugc

SEQ ID NO: 1890333 - RNA, 19 nt, Artificial Sequence
  Description of Artificial Sequence: Synthetic oligonucleotide
gacccaguggauuuccucu

SEQ ID NO: 1890334 - RNA, 19 nt, Artificial Sequence
  Description of Artificial Sequence: Synthetic oligonucleotide
acuccaaagccagaauuau

SEQ ID NO: 1890335 - RNA, 19 nt, Artificial Sequence
  Description of Artificial Sequence: Synthetic oligonucleotide
uccgacucacgguucugca

SEQ ID NO: 1890336 - RNA, 19 nt, Artificial Sequence
  Description of Artificial Sequence: Synthetic oligonucleotide
ucaacugcucgaagaggua

SEQ ID NO: 1890337 - RNA, 19 nt, Artificial Sequence
  Description of Artificial Sequence: Synthetic oligonucleotide
ucuggccuugaaaaccauu

SEQ ID NO: 1890338 - RNA, 19 nt, Artificial Sequence
  Description of Artificial Sequence: Synthetic oligonucleotide
acgugguaagaagagaaua

SEQ ID NO: 1890339 - RNA, 19 nt, Artificial Sequence
  Description of Artificial Sequence: Synthetic oligonucleotide
ucagugugugugugugugu

SEQ ID NO: 1890340 - RNA, 19 nt, Artificial Sequence
  Description of Artificial Sequence: Synthetic oligonucleotide
gacuccaaagccagaauua

SEQ ID NO: 1890341 - RNA, 19 nt, Artificial Sequence
  Description of Artificial Sequence: Synthetic oligonucleotide
ugugugugugugugucgug

SEQ ID NO: 1890342 - RNA, 19 nt, Artificial Sequence
  Description of Artificial Sequence: Synthetic oligonucleotide
agugugugugugugugugu

SEQ ID NO: 1890343 - RNA, 19 nt, Artificial Sequence
  Description of Artificial Sequence: Synthetic oligonucleotide
uugguacuaacaggccagc

SEQ ID NO: 1890344 - RNA, 19 nt, Artificial Sequence
  Description of Artificial Sequence: Synthetic oligonucleotide
gcccuuugacuccaaagcc

SEQ ID NO: 1890345 - RNA, 19 nt, Artificial Sequence
  Description of Artificial Sequence: Synthetic oligonucleotide
cacgcucauaguagcugcc

SEQ ID NO: 1890346 - RNA, 19 nt, Artificial Sequence
  Description of Artificial Sequence: Synthetic oligonucleotide
acauuugacuccaguagau

SEQ ID NO: 1890347 - RNA, 19 nt, Artificial Sequence
  Description of Artificial Sequence: Synthetic oligonucleotide
uccuugcguuucaaccuca

SEQ ID NO: 1890348 - RNA, 19 nt, Artificial Sequence
  Description of Artificial Sequence: Synthetic oligonucleotide
gcaacauuugacuccagua

SEQ ID NO: 1890349 - RNA, 19 nt, Artificial Sequence
  Description of Artificial Sequence: Synthetic oligonucleotide
ucacaacauguuuucucuu

SEQ ID NO: 1890350 - RNA, 19 nt, Artificial Sequence
  Description of Artificial Sequence: Synthetic oligonucleotide
cagugugugugugugugug

SEQ ID NO: 1890351 - RNA, 19 nt, Artificial Sequence
  Description of Artificial Sequence: Synthetic oligonucleotide
caucaguuucucuguccug

SEQ ID NO: 1890352 - RNA, 19 nt, Artificial Sequence
  Description of Artificial Sequence: Synthetic oligonucleotide
gugucgugcccacaagaac

SEQ ID NO: 1890353 - RNA, 19 nt, Artificial Sequence
  Description of Artificial Sequence: Synthetic oligonucleotide
acucaacaaagaaugucaa

SEQ ID NO: 1890354 - RNA, 19 nt, Artificial Sequence
  Description of Artificial Sequence: Synthetic oligonucleotide
gacagcaguugccccacga

SEQ ID NO: 1890355 - RNA, 19 nt, Artificial Sequence
  Description of Artificial Sequence: Synthetic oligonucleotide
cuccauucaccaccucggc

SEQ ID NO: 1890356 - RNA, 19 nt, Artificial Sequence
  Description of Artificial Sequence: Synthetic oligonucleotide
gugugugugugucgugccc

SEQ ID NO: 1890357 - RNA, 19 nt, Artificial Sequence
  Description of Artificial Sequence: Synthetic oligonucleotide
aggugcuuaggugcuuggg

SEQ ID NO: 1890358 - RNA, 19 nt, Artificial Sequence
  Description of Artificial Sequence: Synthetic oligonucleotide
cuccuugcguuucaaccuc

SEQ ID NO: 1890359 - RNA, 19 nt, Artificial Sequence
  Description of Artificial Sequence: Synthetic oligonucleotide
uugauggguaguccuucuu

SEQ ID NO: 1890360 - RNA, 19 nt, Artificial Sequence
  Description of Artificial Sequence: Synthetic oligonucleotide
cucagcccacauguggagg

SEQ ID NO: 1890361 - RNA, 19 nt, Artificial Sequence
  Description of Artificial Sequence: Synthetic oligonucleotide
cauucaccaccucggccgc

SEQ ID NO: 1890362 - RNA, 19 nt, Artificial Sequence
  Description of Artificial Sequence: Synthetic oligonucleotide
uugacagcaguugccccac

SEQ ID NO: 1890363 - RNA, 19 nt, Artificial Sequence
  Description of Artificial Sequence: Synthetic oligonucleotide
gcauucuugacagcaguug

SEQ ID NO: 1890364 - RNA, 19 nt, Artificial Sequence
  Description of Artificial Sequence: Synthetic oligonucleotide
gugugucgugcccacaaga

SEQ ID NO: 1890365 - RNA, 19 nt, Artificial Sequence
  Description of Artificial Sequence: Synthetic oligonucleotide
gguacaagauaaaauggcu

SEQ ID NO: 1890366 - RNA, 19 nt, Artificial Sequence
  Description of Artificial Sequence: Synthetic oligonucleotide
uguggguucucagcccaca

SEQ ID NO: 1890367 - RNA, 19 nt, Artificial Sequence
  Description of Artificial Sequence: Synthetic oligonucleotide
cuguccuguggguucucag

SEQ ID NO: 1890368 - RNA, 19 nt, Artificial Sequence
  Description of Artificial Sequence: Synthetic oligonucleotide
uugugguaacauucuugua

SEQ ID NO: 1890369 - RNA, 19 nt, Artificial Sequence
  Description of Artificial Sequence: Synthetic oligonucleotide
gacucacgguucugcauuc

SEQ ID NO: 1890370 - RNA, 19 nt, Artificial Sequence
  Description of Artificial Sequence: Synthetic oligonucleotide
cuuuaaugauuucccuaaa

SEQ ID NO: 1890371 - RNA, 19 nt, Artificial Sequence
  Description of Artificial Sequence: Synthetic oligonucleotide
acucaucaaagcaggugcu

SEQ ID NO: 1890372 - RNA, 19 nt, Artificial Sequence
  Description of Artificial Sequence: Synthetic oligonucleotide
caggugcuuaggugcuugg

SEQ ID NO: 1890373 - RNA, 19 nt, Artificial Sequence
  Description of Artificial Sequence: Synthetic oligonucleotide
gccaccgagaucuccuugc

SEQ ID NO: 1890374 - RNA, 19 nt, Artificial Sequence
  Description of Artificial Sequence: Synthetic oligonucleotide
uaacaggccagcugcccuu

SEQ ID NO: 1890375 - RNA, 19 nt, Artificial Sequence
  Description of Artificial Sequence: Synthetic oligonucleotide
acuuuugugccaagccagu

SEQ ID NO: 1890376 - RNA, 19 nt, Artificial Sequence
  Description of Artificial Sequence: Synthetic oligonucleotide
guguguguguguguguguc

SEQ ID NO: 1890377 - RNA, 19 nt, Artificial Sequence
  Description of Artificial Sequence: Synthetic oligonucleotide
ugguacuaacaggccagcu

SEQ ID NO: 1890378 - RNA, 19 nt, Artificial Sequence
  Description of Artificial Sequence: Synthetic oligonucleotide
aaacuccauugugguaaca

SEQ ID NO: 1890379 - RNA, 19 nt, Artificial Sequence
  Description of Artificial Sequence: Synthetic oligonucleotide
cuguccugaggcacucaac

SEQ ID NO: 1890380 - RNA, 19 nt, Artificial Sequence
  Description of Artificial Sequence: Synthetic oligonucleotide
gugcuuaggugcuuggggu

SEQ ID NO: 1890381 - RNA, 19 nt, Artificial Sequence
  Description of Artificial Sequence: Synthetic oligonucleotide
aauuagcucuugagagaau

SEQ ID NO: 1890382 - RNA, 19 nt, Artificial Sequence
  Description of Artificial Sequence: Synthetic oligonucleotide
guacaagauaaaauggcuu

SEQ ID NO: 1890383 - RNA, 19 nt, Artificial Sequence
  Description of Artificial Sequence: Synthetic oligonucleotide
gcacucaacaaagaauguc

SEQ ID NO: 1890384 - RNA, 19 nt, Artificial Sequence
  Description of Artificial Sequence: Synthetic oligonucleotide
cuuaggugcuugggguccc

SEQ ID NO: 1890385 - RNA, 19 nt, Artificial Sequence
  Description of Artificial Sequence: Synthetic oligonucleotide
ucgucuucgcuuguuugua

SEQ ID NO: 1890386 - RNA, 19 nt, Artificial Sequence
  Description of Artificial Sequence: Synthetic oligonucleotide
aacugcucgaagagguauu

SEQ ID NO: 1890387 - RNA, 19 nt, Artificial Sequence
  Description of Artificial Sequence: Synthetic oligonucleotide
cacuguucagccgcuggac

SEQ ID NO: 1890388 - RNA, 19 nt, Artificial Sequence
  Description of Artificial Sequence: Synthetic oligonucleotide
ugacuguccuguggguucu

SEQ ID NO: 1890389 - RNA, 19 nt, Artificial Sequence
  Description of Artificial Sequence: Synthetic oligonucleotide
cuccgacucacgguucugc

SEQ ID NO: 1890390 - RNA, 19 nt, Artificial Sequence
  Description of Artificial Sequence: Synthetic oligonucleotide
gauucacaacauguuuucu

SEQ ID NO: 1890391 - RNA, 19 nt, Artificial Sequence
  Description of Artificial Sequence: Synthetic oligonucleotide
ugacaacaucuuggaagcu

SEQ ID NO: 1890392 - RNA, 19 nt, Artificial Sequence
  Description of Artificial Sequence: Synthetic oligonucleotide
cuuggaagcugauaauauu

SEQ ID NO: 1890393 - RNA, 19 nt, Artificial Sequence
  Description of Artificial Sequence: Synthetic oligonucleotide
acugacuguccuguggguu

SEQ ID NO: 1890394 - RNA, 19 nt, Artificial Sequence
  Description of Artificial Sequence: Synthetic oligonucleotide
ccaguagauucacaacaug

SEQ ID NO: 1890395 - RNA, 19 nt, Artificial Sequence
  Description of Artificial Sequence: Synthetic oligonucleotide
guccuucuuugguacuaac

SEQ ID NO: 1890396 - RNA, 19 nt, Artificial Sequence
  Description of Artificial Sequence: Synthetic oligonucleotide
caguggauuuccucuugga

SEQ ID NO: 1890397 - RNA, 19 nt, Artificial Sequence
  Description of Artificial Sequence: Synthetic oligonucleotide
acagcagggcuuccuguuu

SEQ ID NO: 1890398 - RNA, 19 nt, Artificial Sequence
  Description of Artificial Sequence: Synthetic oligonucleotide
ccacaagaacacauuauaa

SEQ ID NO: 1890399 - RNA, 19 nt, Artificial Sequence
  Description of Artificial Sequence: Synthetic oligonucleotide
guuaucuuuccugcaacau

SEQ ID NO: 1890400 - RNA, 19 nt, Artificial Sequence
  Description of Artificial Sequence: Synthetic oligonucleotide
guucugcauucuugacagc

SEQ ID NO: 1890401 - RNA, 19 nt, Artificial Sequence
  Description of Artificial Sequence: Synthetic oligonucleotide
acugcucgaagagguauuu

SEQ ID NO: 1890402 - RNA, 19 nt, Artificial Sequence
  Description of Artificial Sequence: Synthetic oligonucleotide
gcuuaggugcuuggggucc

SEQ ID NO: 1890403 - RNA, 19 nt, Artificial Sequence
  Description of Artificial Sequence: Synthetic oligonucleotide
cugaggcacucaacaaaga

SEQ ID NO: 1890404 - RNA, 19 nt, Artificial Sequence
  Description of Artificial Sequence: Synthetic oligonucleotide
cuccaaagccagaauuaua

SEQ ID NO: 1890405 - RNA, 19 nt, Artificial Sequence
  Description of Artificial Sequence: Synthetic oligonucleotide
acccaguggauuuccucuu

SEQ ID NO: 1890406 - RNA, 19 nt, Artificial Sequence
  Description of Artificial Sequence: Synthetic oligonucleotide
acgacuccauucaccaccu

SEQ ID NO: 1890407 - RNA, 19 nt, Artificial Sequence
  Description of Artificial Sequence: Synthetic oligonucleotide
cccacaagaacacauuaua

SEQ ID NO: 1890408 - RNA, 19 nt, Artificial Sequence
  Description of Artificial Sequence: Synthetic oligonucleotide
uugcagucuucacguggua

SEQ ID NO: 1890409 - RNA, 19 nt, Artificial Sequence
  Description of Artificial Sequence: Synthetic oligonucleotide
cccuuugacuccaaagcca

SEQ ID NO: 1890410 - RNA, 19 nt, Artificial Sequence
  Description of Artificial Sequence: Synthetic oligonucleotide
guaaugcaucaguuucucu

SEQ ID NO: 1890411 - RNA, 19 nt, Artificial Sequence
  Description of Artificial Sequence: Synthetic oligonucleotide
cuaacaggccagcugcccu

SEQ ID NO: 1890412 - RNA, 19 nt, Artificial Sequence
  Description of Artificial Sequence: Synthetic oligonucleotide
ggauugcagucuucacgug

SEQ ID NO: 1890413 - RNA, 19 nt, Artificial Sequence
  Description of Artificial Sequence: Synthetic oligonucleotide
ucagccgcuggacgccuuu

SEQ ID NO: 1890414 - RNA, 19 nt, Artificial Sequence
  Description of Artificial Sequence: Synthetic oligonucleotide
cucgaagagguauuucauu

SEQ ID NO: 1890415 - RNA, 19 nt, Artificial Sequence
  Description of Artificial Sequence: Synthetic oligonucleotide
gagaggcgccaugucuggc

SEQ ID NO: 1890416 - RNA, 19 nt, Artificial Sequence
  Description of Artificial Sequence: Synthetic oligonucleotide
caccucggccgccaccgag

SEQ ID NO: 1890417 - RNA, 19 nt, Artificial Sequence
  Description of Artificial Sequence: Synthetic oligonucleotide
cgccuuugaacuccgacuc

SEQ ID NO: 1890418 - RNA, 19 nt, Artificial Sequence
  Description of Artificial Sequence: Synthetic oligonucleotide
gaacuccgacucacgguuc

SEQ ID NO: 1890419 - RNA, 19 nt, Artificial Sequence
  Description of Artificial Sequence: Synthetic oligonucleotide
uggggacuuucaguuuaaa

SEQ ID NO: 1890420 - RNA, 19 nt, Artificial Sequence
  Description of Artificial Sequence: Synthetic oligonucleotide
ggguaguccuucuuuggua

SEQ ID NO: 1890421 - RNA, 19 nt, Artificial Sequence
  Description of Artificial Sequence: Synthetic oligonucleotide
ucgugcccacaagaacaca

SEQ ID NO: 1890422 - RNA, 19 nt, Artificial Sequence
  Description of Artificial Sequence: Synthetic oligonucleotide
ccaccgagaucuccuugcg

SEQ ID NO: 1890423 - RNA, 19 nt, Artificial Sequence
  Description of Artificial Sequence: Synthetic oligonucleotide
ccugcaacauuugacucca

SEQ ID NO: 1890424 - RNA, 19 nt, Artificial Sequence
  Description of Artificial Sequence: Synthetic oligonucleotide
gcccacauguggaggauug

SEQ ID NO: 1890425 - RNA, 19 nt, Artificial Sequence
  Description of Artificial Sequence: Synthetic oligonucleotide
aacaggccagcugcccuuu

SEQ ID NO: 1890426 - RNA, 19 nt, Artificial Sequence
  Description of Artificial Sequence: Synthetic oligonucleotide
guaguccuucuuugguacu

SEQ ID NO: 1890427 - RNA, 19 nt, Artificial Sequence
  Description of Artificial Sequence: Synthetic oligonucleotide
cugcaacauuugacuccag

SEQ ID NO: 1890428 - RNA, 19 nt, Artificial Sequence
  Description of Artificial Sequence: Synthetic oligonucleotide
ccccacgacuccauucacc

SEQ ID NO: 1890429 - RNA, 19 nt, Artificial Sequence
  Description of Artificial Sequence: Synthetic oligonucleotide
gugugugugugugugucgu

SEQ ID NO: 1890430 - RNA, 19 nt, Artificial Sequence
  Description of Artificial Sequence: Synthetic oligonucleotide
cagcaguugccccacgacu

SEQ ID NO: 1890431 - RNA, 19 nt, Artificial Sequence
  Description of Artificial Sequence: Synthetic oligonucleotide
acucacgguucugcauucu

SEQ ID NO: 1890432 - RNA, 19 nt, Artificial Sequence
  Description of Artificial Sequence: Synthetic oligonucleotide
cauuaggagcagaaaucuu

SEQ ID NO: 1890433 - RNA, 19 nt, Artificial Sequence
  Description of Artificial Sequence: Synthetic oligonucleotide
gaggcgccaugucuggccu

SEQ ID NO: 1890434 - RNA, 19 nt, Artificial Sequence
  Description of Artificial Sequence: Synthetic oligonucleotide
gcaggugcuuaggugcuug

SEQ ID NO: 1890435 - RNA, 19 nt, Artificial Sequence
  Description of Artificial Sequence: Synthetic oligonucleotide
ccgcuggacgccuuugaac

SEQ ID NO: 1890436 - RNA, 19 nt, Artificial Sequence
  Description of Artificial Sequence: Synthetic oligonucleotide
gccaugucuggccuugaaa

SEQ ID NO: 1890437 - RNA, 19 nt, Artificial Sequence
  Description of Artificial Sequence: Synthetic oligonucleotide
acuccgacucacgguucug

SEQ ID NO: 1890438 - RNA, 19 nt, Artificial Sequence
  Description of Artificial Sequence: Synthetic oligonucleotide
cacgugguaagaagagaau

SEQ ID NO: 1890439 - RNA, 19 nt, Artificial Sequence
  Description of Artificial Sequence: Synthetic oligonucleotide
gcagaaaucuucacacgcu

SEQ ID NO: 1890440 - RNA, 19 nt, Artificial Sequence
  Description of Artificial Sequence: Synthetic oligonucleotide
augacccaguggauuuccu

SEQ ID NO: 1890441 - RNA, 19 nt, Artificial Sequence
  Description of Artificial Sequence: Synthetic oligonucleotide
cgcuuguuuguaacuuuug

SEQ ID NO: 1890442 - RNA, 19 nt, Artificial Sequence
  Description of Artificial Sequence: Synthetic oligonucleotide
cuucgcuuguuuguaacuu

SEQ ID NO: 1890443 - RNA, 19 nt, Artificial Sequence
  Description of Artificial Sequence: Synthetic oligonucleotide
acaugacaucaaauucauu

SEQ ID NO: 1890444 - RNA, 19 nt, Artificial Sequence
  Description of Artificial Sequence: Synthetic oligonucleotide
accucggccgccaccgaga

SEQ ID NO: 1890445 - RNA, 19 nt, Artificial Sequence
  Description of Artificial Sequence: Synthetic oligonucleotide
ggcgccaugucuggccuug

SEQ ID NO: 1890446 - RNA, 19 nt, Artificial Sequence
  Description of Artificial Sequence: Synthetic oligonucleotide
cccaguggauuuccucuug

SEQ ID NO: 1890447 - RNA, 19 nt, Artificial Sequence
  Description of Artificial Sequence: Synthetic oligonucleotide
gcuggacgccuuugaacuc

SEQ ID NO: 1890448 - RNA, 19 nt, Artificial Sequence
  Description of Artificial Sequence: Synthetic oligonucleotide
ccacauguggaggauugca

SEQ ID NO: 1890449 - RNA, 19 nt, Artificial Sequence
  Description of Artificial Sequence: Synthetic oligonucleotide
uucagccgcuggacgccuu

SEQ ID NO: 1890450 - RNA, 19 nt, Artificial Sequence
  Description of Artificial Sequence: Synthetic oligonucleotide
cgcucauaguagcugccac

SEQ ID NO: 1890451 - RNA, 19 nt, Artificial Sequence
  Description of Artificial Sequence: Synthetic oligonucleotide
cauuugacuccaguagauu

SEQ ID NO: 1890452 - RNA, 19 nt, Artificial Sequence
  Description of Artificial Sequence: Synthetic oligonucleotide
guggguucucagcccacau

SEQ ID NO: 1890453 - RNA, 19 nt, Artificial Sequence
  Description of Artificial Sequence: Synthetic oligonucleotide
cccacauguggaggauugc

SEQ ID NO: 1890454 - RNA, 19 nt, Artificial Sequence
  Description of Artificial Sequence: Synthetic oligonucleotide
ggcacucaacaaagaaugu

SEQ ID NO: 1890455 - RNA, 19 nt, Artificial Sequence
  Description of Artificial Sequence: Synthetic oligonucleotide
caacaucuuggaagcugau

SEQ ID NO: 1890456 - RNA, 19 nt, Artificial Sequence
  Description of Artificial Sequence: Synthetic oligonucleotide
cucaucaaagcaggugcuu

SEQ ID NO: 1890457 - RNA, 19 nt, Artificial Sequence
  Description of Artificial Sequence: Synthetic oligonucleotide
cucacgguucugcauucuu

SEQ ID NO: 1890458 - RNA, 19 nt, Artificial Sequence
  Description of Artificial Sequence: Synthetic oligonucleotide
agcaggugcuuaggugcuu

SEQ ID NO: 1890459 - RNA, 19 nt, Artificial Sequence
  Description of Artificial Sequence: Synthetic oligonucleotide
caccgagaucuccuugcgu

SEQ ID NO: 1890460 - RNA, 19 nt, Artificial Sequence
  Description of Artificial Sequence: Synthetic oligonucleotide
caucucgaucuuugauuuu

SEQ ID NO: 1890461 - RNA, 19 nt, Artificial Sequence
  Description of Artificial Sequence: Synthetic oligonucleotide
gccccacgacuccauucac

SEQ ID NO: 1890462 - RNA, 19 nt, Artificial Sequence
  Description of Artificial Sequence: Synthetic oligonucleotide
gcguuucaaccucaauuuu

SEQ ID NO: 1890463 - RNA, 19 nt, Artificial Sequence
  Description of Artificial Sequence: Synthetic oligonucleotide
ccuugcguuucaaccucaa

SEQ ID NO: 1890464 - RNA, 19 nt, Artificial Sequence
  Description of Artificial Sequence: Synthetic oligonucleotide
cucuguccugaggcacuca

SEQ ID NO: 1890465 - RNA, 19 nt, Artificial Sequence
  Description of Artificial Sequence: Synthetic oligonucleotide
cuuuacuguuuuggucaau

SEQ ID NO: 1890466 - RNA, 19 nt, Artificial Sequence
  Description of Artificial Sequence: Synthetic oligonucleotide
cgugcccacaagaacacau

SEQ ID NO: 1890467 - RNA, 19 nt, Artificial Sequence
  Description of Artificial Sequence: Synthetic oligonucleotide
ggccgccaccgagaucucc

SEQ ID NO: 1890468 - RNA, 19 nt, Artificial Sequence
  Description of Artificial Sequence: Synthetic oligonucleotide
guucagccgcuggacgccu

SEQ ID NO: 1890469 - RNA, 19 nt, Artificial Sequence
  Description of Artificial Sequence: Synthetic oligonucleotide
gggucccacugacuguccu

SEQ ID NO: 1890470 - RNA, 19 nt, Artificial Sequence
  Description of Artificial Sequence: Synthetic oligonucleotide
cgucuucgcuuguuuguaa

SEQ ID NO: 1890471 - RNA, 19 nt, Artificial Sequence
  Description of Artificial Sequence: Synthetic oligonucleotide
cgacucacgguucugcauu

SEQ ID NO: 1890472 - RNA, 19 nt, Artificial Sequence
  Description of Artificial Sequence: Synthetic oligonucleotide
ggacgccuuugaacuccga

SEQ ID NO: 1890473 - RNA, 19 nt, Artificial Sequence
  Description of Artificial Sequence: Synthetic oligonucleotide
ccgacucacgguucugcau

SEQ ID NO: 1890474 - RNA, 19 nt, Artificial Sequence
  Description of Artificial Sequence: Synthetic oligonucleotide
gcuuucgucuucgcuuguu

SEQ ID NO: 1890475 - RNA, 19 nt, Artificial Sequence
  Description of Artificial Sequence: Synthetic oligonucleotide
cagcccacauguggaggau

SEQ ID NO: 1890476 - RNA, 19 nt, Artificial Sequence
  Description of Artificial Sequence: Synthetic oligonucleotide
cgccaugucuggccuugaa

SEQ ID NO: 1890477 - RNA, 19 nt, Artificial Sequence
  Description of Artificial Sequence: Synthetic oligonucleotide
gcgccaugucuggccuuga

SEQ ID NO: 1890478 - RNA, 19 nt, Artificial Sequence
  Description of Artificial Sequence: Synthetic oligonucleotide
ccucggccgccaccgagau

SEQ ID NO: 1890479 - RNA, 19 nt, Artificial Sequence
  Description of Artificial Sequence: Synthetic oligonucleotide
ccgccaccgagaucuccuu

SEQ ID NO: 1890480 - RNA, 19 nt, Artificial Sequence
  Description of Artificial Sequence: Synthetic oligonucleotide
cggccgccaccgagaucuc

SEQ ID NO: 1890481 - RNA, 19 nt, Artificial Sequence
  Description of Artificial Sequence: Synthetic oligonucleotide
aaugcaauacagcccaucc

SEQ ID NO: 1890482 - RNA, 19 nt, Artificial Sequence
  Description of Artificial Sequence: Synthetic oligonucleotide
uauuauuuagcuauguccc

SEQ ID NO: 1890483 - RNA, 19 nt, Artificial Sequence
  Description of Artificial Sequence: Synthetic oligonucleotide
agucaguucacuuagcagc

SEQ ID NO: 1890484 - RNA, 19 nt, Artificial Sequence
  Description of Artificial Sequence: Synthetic oligonucleotide
aaaacugcuaauuauggcu

SEQ ID NO: 1890485 - RNA, 19 nt, Artificial Sequence
  Description of Artificial Sequence: Synthetic oligonucleotide
ugaucuauuauuuagcuau

SEQ ID NO: 1890486 - RNA, 19 nt, Artificial Sequence
  Description of Artificial Sequence: Synthetic oligonucleotide
aagacuaaagaccacccag

SEQ ID NO: 1890487 - RNA, 19 nt, Artificial Sequence
  Description of Artificial Sequence: Synthetic oligonucleotide
aacaaccaacucuaguacc

SEQ ID NO: 1890488 - RNA, 19 nt, Artificial Sequence
  Description of Artificial Sequence: Synthetic oligonucleotide
cucagugucaaucaaaccc

SEQ ID NO: 1890489 - RNA, 19 nt, Artificial Sequence
  Description of Artificial Sequence: Synthetic oligonucleotide
caaacacugaguuaggcag

SEQ ID NO: 1890490 - RNA, 19 nt, Artificial Sequence
  Description of Artificial Sequence: Synthetic oligonucleotide
auuauuuagcuaugucccc

SEQ ID NO: 1890491 - RNA, 19 nt, Artificial Sequence
  Description of Artificial Sequence: Synthetic oligonucleotide
ucuaccuggacacugguga

SEQ ID NO: 1890492 - RNA, 19 nt, Artificial Sequence
  Description of Artificial Sequence: Synthetic oligonucleotide
uucacauugucucggaagc

SEQ ID NO: 1890493 - RNA, 19 nt, Artificial Sequence
  Description of Artificial Sequence: Synthetic oligonucleotide
acaguaggaacucaaaacu

SEQ ID NO: 1890494 - RNA, 19 nt, Artificial Sequence
  Description of Artificial Sequence: Synthetic oligonucleotide
uuuguagcuuugaacaacc

SEQ ID NO: 1890495 - RNA, 19 nt, Artificial Sequence
  Description of Artificial Sequence: Synthetic oligonucleotide
gacuuuucaaaggagaagc

SEQ ID NO: 1890496 - RNA, 19 nt, Artificial Sequence
  Description of Artificial Sequence: Synthetic oligonucleotide
uuaaccuucccugacuugg

SEQ ID NO: 1890497 - RNA, 19 nt, Artificial Sequence
  Description of Artificial Sequence: Synthetic oligonucleotide
uuccgaaugcaauacagcc

SEQ ID NO: 1890498 - RNA, 19 nt, Artificial Sequence
  Description of Artificial Sequence: Synthetic oligonucleotide
ugagacaaagguuaucucu

SEQ ID NO: 1890499 - RNA, 19 nt, Artificial Sequence
  Description of Artificial Sequence: Synthetic oligonucleotide
uagguaacacugcaggccg

SEQ ID NO: 1890500 - RNA, 19 nt, Artificial Sequence
  Description of Artificial Sequence: Synthetic oligonucleotide
ucuaguaccacgccaguca

SEQ ID NO: 1890501 - RNA, 19 nt, Artificial Sequence
  Description of Artificial Sequence: Synthetic oligonucleotide
ucaaucaaacccuggacca

SEQ ID NO: 1890502 - RNA, 19 nt, Artificial Sequence
  Description of Artificial Sequence: Synthetic oligonucleotide
aaccuuucuaccucacagg

SEQ ID NO: 1890503 - RNA, 19 nt, Artificial Sequence
  Description of Artificial Sequence: Synthetic oligonucleotide
  modified_base (18)..(18): a, c, u, g, unknown or other
auuccaaccucccuagcnc

SEQ ID NO: 1890504 - RNA, 19 nt, Artificial Sequence
  Description of Artificial Sequence: Synthetic oligonucleotide
ucuuuucuggucuagguaa

SEQ ID NO: 1890505 - RNA, 19 nt, Artificial Sequence
  Description of Artificial Sequence: Synthetic oligonucleotide
  modified_base (4)..(4): a, c, u, g, unknown or other
agcnccuucaugcacagcu

SEQ ID NO: 1890506 - RNA, 19 nt, Artificial Sequence
  Description of Artificial Sequence: Synthetic oligonucleotide
gguuuuguagcuuugaaca

SEQ ID NO: 1890507 - RNA, 19 nt, Artificial Sequence
  Description of Artificial Sequence: Synthetic oligonucleotide
uaccacgccagucacacag

SEQ ID NO: 1890508 - RNA, 19 nt, Artificial Sequence
  Description of Artificial Sequence: Synthetic oligonucleotide
ugucacaguuccuagaggu

SEQ ID NO: 1890509 - RNA, 19 nt, Artificial Sequence
  Description of Artificial Sequence: Synthetic oligonucleotide
cuaauuauggcuuuggagu

SEQ ID NO: 1890510 - RNA, 19 nt, Artificial Sequence
  Description of Artificial Sequence: Synthetic oligonucleotide
auccugaucuauuauuuag

SEQ ID NO: 1890511 - RNA, 19 nt, Artificial Sequence
  Description of Artificial Sequence: Synthetic oligonucleotide
ucaguagcucucuaccugg

SEQ ID NO: 1890512 - RNA, 19 nt, Artificial Sequence
  Description of Artificial Sequence: Synthetic oligonucleotide
ucuauuauuuagcuauguc

SEQ ID NO: 1890513 - RNA, 19 nt, Artificial Sequence
  Description of Artificial Sequence: Synthetic oligonucleotide
auugagacaaagguuaucu

SEQ ID NO: 1890514 - RNA, 19 nt, Artificial Sequence
  Description of Artificial Sequence: Synthetic oligonucleotide
acgccagucacacaguagg

SEQ ID NO: 1890515 - RNA, 19 nt, Artificial Sequence
  Description of Artificial Sequence: Synthetic oligonucleotide
uuuuagcauccucagggcc

SEQ ID NO: 1890516 - RNA, 19 nt, Artificial Sequence
  Description of Artificial Sequence: Synthetic oligonucleotide
aagcaagguuuccggaggc

SEQ ID NO: 1890517 - RNA, 19 nt, Artificial Sequence
  Description of Artificial Sequence: Synthetic oligonucleotide
uuauuagcaggcacgggug

SEQ ID NO: 1890518 - RNA, 19 nt, Artificial Sequence
  Description of Artificial Sequence: Synthetic oligonucleotide
uccugaucuauuauuuagc

SEQ ID NO: 1890519 - RNA, 19 nt, Artificial Sequence
  Description of Artificial Sequence: Synthetic oligonucleotide
uugaacaaccuuucuaccu

SEQ ID NO: 1890520 - RNA, 19 nt, Artificial Sequence
  Description of Artificial Sequence: Synthetic oligonucleotide
aacucaaaacugcuaauua

SEQ ID NO: 1890521 - RNA, 19 nt, Artificial Sequence
  Description of Artificial Sequence: Synthetic oligonucleotide
uuugaacaaccuuucuacc

SEQ ID NO: 1890522 - RNA, 19 nt, Artificial Sequence
  Description of Artificial Sequence: Synthetic oligonucleotide
ugaacaaccuuucuaccuc

SEQ ID NO: 1890523 - RNA, 19 nt, Artificial Sequence
  Description of Artificial Sequence: Synthetic oligonucleotide
uuuagcuauguccccaagu

SEQ ID NO: 1890524 - RNA, 19 nt, Artificial Sequence
  Description of Artificial Sequence: Synthetic oligonucleotide
caaccuuucuaccucacag

SEQ ID NO: 1890525 - RNA, 19 nt, Artificial Sequence
  Description of Artificial Sequence: Synthetic oligonucleotide
cuucccagaacacugcacc

SEQ ID NO: 1890526 - RNA, 19 nt, Artificial Sequence
  Description of Artificial Sequence: Synthetic oligonucleotide
aaccaacucuaguaccacg

SEQ ID NO: 1890527 - RNA, 19 nt, Artificial Sequence
  Description of Artificial Sequence: Synthetic oligonucleotide
uuaucucugauuuaaccuu

SEQ ID NO: 1890528 - RNA, 19 nt, Artificial Sequence
  Description of Artificial Sequence: Synthetic oligonucleotide
aagguuaucucugauuuaa

SEQ ID NO: 1890529 - RNA, 19 nt, Artificial Sequence
  Description of Artificial Sequence: Synthetic oligonucleotide
aauugagacaaagguuauc

SEQ ID NO: 1890530 - RNA, 19 nt, Artificial Sequence
  Description of Artificial Sequence: Synthetic oligonucleotide
uccgaaugcaauacagccc

SEQ ID NO: 1890531 - RNA, 19 nt, Artificial Sequence
  Description of Artificial Sequence: Synthetic oligonucleotide
cugcucacaggcaacaacc

SEQ ID NO: 1890532 - RNA, 19 nt, Artificial Sequence
  Description of Artificial Sequence: Synthetic oligonucleotide
aacacugaguuaggcagcg

SEQ ID NO: 1890533 - RNA, 19 nt, Artificial Sequence
  Description of Artificial Sequence: Synthetic oligonucleotide
aacucuaguaccacgccag

SEQ ID NO: 1890534 - RNA, 19 nt, Artificial Sequence
  Description of Artificial Sequence: Synthetic oligonucleotide
acaaacacugaguuaggca

SEQ ID NO: 1890535 - RNA, 19 nt, Artificial Sequence
  Description of Artificial Sequence: Synthetic oligonucleotide
ucuagguaacacugcaggc

SEQ ID NO: 1890536 - RNA, 19 nt, Artificial Sequence
  Description of Artificial Sequence: Synthetic oligonucleotide
aguagagccuguugucccc

SEQ ID NO: 1890537 - RNA, 19 nt, Artificial Sequence
  Description of Artificial Sequence: Synthetic oligonucleotide
aauuauggcuuuggaguuc

SEQ ID NO: 1890538 - RNA, 19 nt, Artificial Sequence
  Description of Artificial Sequence: Synthetic oligonucleotide
ucggaagcaagguuuccgg

SEQ ID NO: 1890539 - RNA, 19 nt, Artificial Sequence
  Description of Artificial Sequence: Synthetic oligonucleotide
gcuaauuauggcuuuggag

SEQ ID NO: 1890540 - RNA, 19 nt, Artificial Sequence
  Description of Artificial Sequence: Synthetic oligonucleotide
aggaacucaaaacugcuaa

SEQ ID NO: 1890541 - RNA, 19 nt, Artificial Sequence
  Description of Artificial Sequence: Synthetic oligonucleotide
cuagguaacacugcaggcc

SEQ ID NO: 1890542 - RNA, 19 nt, Artificial Sequence
  Description of Artificial Sequence: Synthetic oligonucleotide
accaacucuaguaccacgc

SEQ ID NO: 1890543 - RNA, 19 nt, Artificial Sequence
  Description of Artificial Sequence: Synthetic oligonucleotide
ugauuuaaccuucccugac

SEQ ID NO: 1890544 - RNA, 19 nt, Artificial Sequence
  Description of Artificial Sequence: Synthetic oligonucleotide
acuggugaugcucaguaga

SEQ ID NO: 1890545 - RNA, 19 nt, Artificial Sequence
  Description of Artificial Sequence: Synthetic oligonucleotide
acccuggaccaauugagac

SEQ ID NO: 1890546 - RNA, 19 nt, Artificial Sequence
  Description of Artificial Sequence: Synthetic oligonucleotide
ucacaggcaacaaccaacu

SEQ ID NO: 1890547 - RNA, 19 nt, Artificial Sequence
  Description of Artificial Sequence: Synthetic oligonucleotide
uggaguucgggcuccagcc

SEQ ID NO: 1890548 - RNA, 19 nt, Artificial Sequence
  Description of Artificial Sequence: Synthetic oligonucleotide
acucaaaacugcuaauuau

SEQ ID NO: 1890549 - RNA, 19 nt, Artificial Sequence
  Description of Artificial Sequence: Synthetic oligonucleotide
gaccaauugagacaaaggu

SEQ ID NO: 1890550 - RNA, 19 nt, Artificial Sequence
  Description of Artificial Sequence: Synthetic oligonucleotide
ugucgggacuuuucaaagg

SEQ ID NO: 1890551 - RNA, 19 nt, Artificial Sequence
  Description of Artificial Sequence: Synthetic oligonucleotide
uuauuuagcuaugucccca

SEQ ID NO: 1890552 - RNA, 19 nt, Artificial Sequence
  Description of Artificial Sequence: Synthetic oligonucleotide
auacucacugaccugcucu

SEQ ID NO: 1890553 - RNA, 19 nt, Artificial Sequence
  Description of Artificial Sequence: Synthetic oligonucleotide
cucauacucacugaccugc

SEQ ID NO: 1890554 - RNA, 19 nt, Artificial Sequence
  Description of Artificial Sequence: Synthetic oligonucleotide
  modified_base (19)..(19): a, c, u, g, unknown or other
gauuccaaccucccuagcn

SEQ ID NO: 1890555 - RNA, 19 nt, Artificial Sequence
  Description of Artificial Sequence: Synthetic oligonucleotide
aaaggagaagcuccugaaa

SEQ ID NO: 1890556 - RNA, 19 nt, Artificial Sequence
  Description of Artificial Sequence: Synthetic oligonucleotide
cauugucucggaagcaagg

SEQ ID NO: 1890557 - RNA, 19 nt, Artificial Sequence
  Description of Artificial Sequence: Synthetic oligonucleotide
aagaggagucuuuucuggu

SEQ ID NO: 1890558 - RNA, 19 nt, Artificial Sequence
  Description of Artificial Sequence: Synthetic oligonucleotide
ggguacauugccuagagga

SEQ ID NO: 1890559 - RNA, 19 nt, Artificial Sequence
  Description of Artificial Sequence: Synthetic oligonucleotide
ugucucggaagcaagguuu

SEQ ID NO: 1890560 - RNA, 19 nt, Artificial Sequence
  Description of Artificial Sequence: Synthetic oligonucleotide
uauggcuuuggaguucggg

SEQ ID NO: 1890561 - RNA, 19 nt, Artificial Sequence
  Description of Artificial Sequence: Synthetic oligonucleotide
uguagcuuugaacaaccuu

SEQ ID NO: 1890562 - RNA, 19 nt, Artificial Sequence
  Description of Artificial Sequence: Synthetic oligonucleotide
guuaucucugauuuaaccu

SEQ ID NO: 1890563 - RNA, 19 nt, Artificial Sequence
  Description of Artificial Sequence: Synthetic oligonucleotide
guacauugccuagaggagg

SEQ ID NO: 1890564 - RNA, 19 nt, Artificial Sequence
  Description of Artificial Sequence: Synthetic oligonucleotide
auccagauggauccugauc

SEQ ID NO: 1890565 - RNA, 19 nt, Artificial Sequence
  Description of Artificial Sequence: Synthetic oligonucleotide
gacuagaggcugcucacag

SEQ ID NO: 1890566 - RNA, 19 nt, Artificial Sequence
  Description of Artificial Sequence: Synthetic oligonucleotide
ugacugauccagauggauc

SEQ ID NO: 1890567 - RNA, 19 nt, Artificial Sequence
  Description of Artificial Sequence: Synthetic oligonucleotide
aguuccgaaugcaauacag

SEQ ID NO: 1890568 - RNA, 19 nt, Artificial Sequence
  Description of Artificial Sequence: Synthetic oligonucleotide
caguaggaacucaaaacug

SEQ ID NO: 1890569 - RNA, 19 nt, Artificial Sequence
  Description of Artificial Sequence: Synthetic oligonucleotide
ugcuaauuauggcuuugga

SEQ ID NO: 1890570 - RNA, 19 nt, Artificial Sequence
  Description of Artificial Sequence: Synthetic oligonucleotide
ucacucauucuccgagggg

SEQ ID NO: 1890571 - RNA, 19 nt, Artificial Sequence
  Description of Artificial Sequence: Synthetic oligonucleotide
cuugaguuugucacaguuc

SEQ ID NO: 1890572 - RNA, 19 nt, Artificial Sequence
  Description of Artificial Sequence: Synthetic oligonucleotide
accuuucuaccucacagga

SEQ ID NO: 1890573 - RNA, 19 nt, Artificial Sequence
  Description of Artificial Sequence: Synthetic oligonucleotide
ucaaacccuggaccaauug

SEQ ID NO: 1890574 - RNA, 19 nt, Artificial Sequence
  Description of Artificial Sequence: Synthetic oligonucleotide
caacaaccaacucuaguac

SEQ ID NO: 1890575 - RNA, 19 nt, Artificial Sequence
  Description of Artificial Sequence: Synthetic oligonucleotide
uucacuuagcagccugggc

SEQ ID NO: 1890576 - RNA, 19 nt, Artificial Sequence
  Description of Artificial Sequence: Synthetic oligonucleotide
uuggaguucgggcuccagc

SEQ ID NO: 1890577 - RNA, 19 nt, Artificial Sequence
  Description of Artificial Sequence: Synthetic oligonucleotide
gaagacuaaagaccaccca

SEQ ID NO: 1890578 - RNA, 19 nt, Artificial Sequence
  Description of Artificial Sequence: Synthetic oligonucleotide
uaccucacaggauucugug

SEQ ID NO: 1890579 - RNA, 19 nt, Artificial Sequence
  Description of Artificial Sequence: Synthetic oligonucleotide
acugaccugcucuagacua

SEQ ID NO: 1890580 - RNA, 19 nt, Artificial Sequence
  Description of Artificial Sequence: Synthetic oligonucleotide
gucaguagcucucuaccug

SEQ ID NO: 1890581 - RNA, 19 nt, Artificial Sequence
  Description of Artificial Sequence: Synthetic oligonucleotide
ugauccagauggauccuga

SEQ ID NO: 1890582 - RNA, 19 nt, Artificial Sequence
  Description of Artificial Sequence: Synthetic oligonucleotide
ugucaguagcucucuaccu

SEQ ID NO: 1890583 - RNA, 19 nt, Artificial Sequence
  Description of Artificial Sequence: Synthetic oligonucleotide
uuuaaccuucccugacuug

SEQ ID NO: 1890584 - RNA, 19 nt, Artificial Sequence
  Description of Artificial Sequence: Synthetic oligonucleotide
ucgggacuuuucaaaggag

SEQ ID NO: 1890585 - RNA, 19 nt, Artificial Sequence
  Description of Artificial Sequence: Synthetic oligonucleotide
uucuggucuagguaacacu

SEQ ID NO: 1890586 - RNA, 19 nt, Artificial Sequence
  Description of Artificial Sequence: Synthetic oligonucleotide
aaagguuaucucugauuua

SEQ ID NO: 1890587 - RNA, 19 nt, Artificial Sequence
  Description of Artificial Sequence: Synthetic oligonucleotide
cugucgggacuuuucaaag

SEQ ID NO: 1890588 - RNA, 19 nt, Artificial Sequence
  Description of Artificial Sequence: Synthetic oligonucleotide
ugcucaguagagccuguug

SEQ ID NO: 1890589 - RNA, 19 nt, Artificial Sequence
  Description of Artificial Sequence: Synthetic oligonucleotide
cuaggcucagccacacccg

SEQ ID NO: 1890590 - RNA, 19 nt, Artificial Sequence
  Description of Artificial Sequence: Synthetic oligonucleotide
cuuauuagcaggcacgggu

SEQ ID NO: 1890591 - RNA, 19 nt, Artificial Sequence
  Description of Artificial Sequence: Synthetic oligonucleotide
  modified_base (17)..(17): a, c, u, g, unknown or other
uuccaaccucccuagcncc

SEQ ID NO: 1890592 - RNA, 19 nt, Artificial Sequence
  Description of Artificial Sequence: Synthetic oligonucleotide
aucgcuggaggugaggaag

SEQ ID NO: 1890593 - RNA, 19 nt, Artificial Sequence
  Description of Artificial Sequence: Synthetic oligonucleotide
cacuuagcagccugggccc

SEQ ID NO: 1890594 - RNA, 19 nt, Artificial Sequence
  Description of Artificial Sequence: Synthetic oligonucleotide
cucgccucaggcccaaugg

SEQ ID NO: 1890595 - RNA, 19 nt, Artificial Sequence
  Description of Artificial Sequence: Synthetic oligonucleotide
gauggauccugaucuauua

SEQ ID NO: 1890596 - RNA, 19 nt, Artificial Sequence
  Description of Artificial Sequence: Synthetic oligonucleotide
cucucuaccuggacacugg

SEQ ID NO: 1890597 - RNA, 19 nt, Artificial Sequence
  Description of Artificial Sequence: Synthetic oligonucleotide
agucccauggcuagggguc

SEQ ID NO: 1890598 - RNA, 19 nt, Artificial Sequence
  Description of Artificial Sequence: Synthetic oligonucleotide
gugucaaucaaacccugga

SEQ ID NO: 1890599 - RNA, 19 nt, Artificial Sequence
  Description of Artificial Sequence: Synthetic oligonucleotide
cuuuucuggucuagguaac

SEQ ID NO: 1890600 - RNA, 19 nt, Artificial Sequence
  Description of Artificial Sequence: Synthetic oligonucleotide
acaaccaacucuaguacca

SEQ ID NO: 1890601 - RNA, 19 nt, Artificial Sequence
  Description of Artificial Sequence: Synthetic oligonucleotide
aucucugauuuaaccuucc

SEQ ID NO: 1890602 - RNA, 19 nt, Artificial Sequence
  Description of Artificial Sequence: Synthetic oligonucleotide
guggguacauugccuagag

SEQ ID NO: 1890603 - RNA, 19 nt, Artificial Sequence
  Description of Artificial Sequence: Synthetic oligonucleotide
agacaaagguuaucucuga

SEQ ID NO: 1890604 - RNA, 19 nt, Artificial Sequence
  Description of Artificial Sequence: Synthetic oligonucleotide
cucggaagcaagguuuccg

SEQ ID NO: 1890605 - RNA, 19 nt, Artificial Sequence
  Description of Artificial Sequence: Synthetic oligonucleotide
ugaccugcucuagacuagg

SEQ ID NO: 1890606 - RNA, 19 nt, Artificial Sequence
  Description of Artificial Sequence: Synthetic oligonucleotide
uuucuggucuagguaacac

SEQ ID NO: 1890607 - RNA, 19 nt, Artificial Sequence
  Description of Artificial Sequence: Synthetic oligonucleotide
aaccuucccugacuuggug

SEQ ID NO: 1890608 - RNA, 19 nt, Artificial Sequence
  Description of Artificial Sequence: Synthetic oligonucleotide
gcaacaaccaacucuagua

SEQ ID NO: 1890609 - RNA, 19 nt, Artificial Sequence
  Description of Artificial Sequence: Synthetic oligonucleotide
  modified_base (16)..(16): a, c, u, g, unknown or other
uccaaccucccuagcnccu

SEQ ID NO: 1890610 - RNA, 19 nt, Artificial Sequence
  Description of Artificial Sequence: Synthetic oligonucleotide
cuuggggaggcuucuucag

SEQ ID NO: 1890611 - RNA, 19 nt, Artificial Sequence
  Description of Artificial Sequence: Synthetic oligonucleotide
auuuagcuauguccccaag

SEQ ID NO: 1890612 - RNA, 19 nt, Artificial Sequence
  Description of Artificial Sequence: Synthetic oligonucleotide
aggacuugaguuugucaca

SEQ ID NO: 1890613 - RNA, 19 nt, Artificial Sequence
  Description of Artificial Sequence: Synthetic oligonucleotide
uugagacaaagguuaucuc

SEQ ID NO: 1890614 - RNA, 19 nt, Artificial Sequence
  Description of Artificial Sequence: Synthetic oligonucleotide
uaggaacucaaaacugcua

SEQ ID NO: 1890615 - RNA, 19 nt, Artificial Sequence
  Description of Artificial Sequence: Synthetic oligonucleotide
gucgggacuuuucaaagga

SEQ ID NO: 1890616 - RNA, 19 nt, Artificial Sequence
  Description of Artificial Sequence: Synthetic oligonucleotide
ugaucgcuggaggugagga

SEQ ID NO: 1890617 - RNA, 19 nt, Artificial Sequence
  Description of Artificial Sequence: Synthetic oligonucleotide
cucaguagagccuguuguc

SEQ ID NO: 1890618 - RNA, 19 nt, Artificial Sequence
  Description of Artificial Sequence: Synthetic oligonucleotide
gaugugggcggcccucggg

SEQ ID NO: 1890619 - RNA, 19 nt, Artificial Sequence
  Description of Artificial Sequence: Synthetic oligonucleotide
accucggauuccaaccucc

SEQ ID NO: 1890620 - RNA, 19 nt, Artificial Sequence
  Description of Artificial Sequence: Synthetic oligonucleotide
aucuauuauuuagcuaugu

SEQ ID NO: 1890621 - RNA, 19 nt, Artificial Sequence
  Description of Artificial Sequence: Synthetic oligonucleotide
auuagcaggcacggguggg

SEQ ID NO: 1890622 - RNA, 19 nt, Artificial Sequence
  Description of Artificial Sequence: Synthetic oligonucleotide
gauuuaaccuucccugacu

SEQ ID NO: 1890623 - RNA, 19 nt, Artificial Sequence
  Description of Artificial Sequence: Synthetic oligonucleotide
gaacaaccuuucuaccuca

SEQ ID NO: 1890624 - RNA, 19 nt, Artificial Sequence
  Description of Artificial Sequence: Synthetic oligonucleotide
ggaagaggagucuuuucug

SEQ ID NO: 1890625 - RNA, 19 nt, Artificial Sequence
  Description of Artificial Sequence: Synthetic oligonucleotide
gguaacaggcacccugggg

SEQ ID NO: 1890626 - RNA, 19 nt, Artificial Sequence
  Description of Artificial Sequence: Synthetic oligonucleotide
ucagccacacccgacuaga

SEQ ID NO: 1890627 - RNA, 19 nt, Artificial Sequence
  Description of Artificial Sequence: Synthetic oligonucleotide
guuccgaaugcaauacagc

SEQ ID NO: 1890628 - RNA, 19 nt, Artificial Sequence
  Description of Artificial Sequence: Synthetic oligonucleotide
caccucauacucacugacc

SEQ ID NO: 1890629 - RNA, 19 nt, Artificial Sequence
  Description of Artificial Sequence: Synthetic oligonucleotide
ggaccaauugagacaaagg

SEQ ID NO: 1890630 - RNA, 19 nt, Artificial Sequence
  Description of Artificial Sequence: Synthetic oligonucleotide
aggaguuccgaaugcaaua

SEQ ID NO: 1890631 - RNA, 19 nt, Artificial Sequence
  Description of Artificial Sequence: Synthetic oligonucleotide
cugcuaauuauggcuuugg

SEQ ID NO: 1890632 - RNA, 19 nt, Artificial Sequence
  Description of Artificial Sequence: Synthetic oligonucleotide
caaagguuaucucugauuu

SEQ ID NO: 1890633 - RNA, 19 nt, Artificial Sequence
  Description of Artificial Sequence: Synthetic oligonucleotide
cuaguaccacgccagucac

SEQ ID NO: 1890634 - RNA, 19 nt, Artificial Sequence
  Description of Artificial Sequence: Synthetic oligonucleotide
cugauuuaaccuucccuga

SEQ ID NO: 1890635 - RNA, 19 nt, Artificial Sequence
  Description of Artificial Sequence: Synthetic oligonucleotide
guucacuuagcagccuggg

SEQ ID NO: 1890636 - RNA, 19 nt, Artificial Sequence
  Description of Artificial Sequence: Synthetic oligonucleotide
caggcaacaaccaacucua

SEQ ID NO: 1890637 - RNA, 19 nt, Artificial Sequence
  Description of Artificial Sequence: Synthetic oligonucleotide
auugucucggaagcaaggu

SEQ ID NO: 1890638 - RNA, 19 nt, Artificial Sequence
  Description of Artificial Sequence: Synthetic oligonucleotide
cuguuguccccucaguguc

SEQ ID NO: 1890639 - RNA, 19 nt, Artificial Sequence
  Description of Artificial Sequence: Synthetic oligonucleotide
  modified_base (6)..(6): a, c, u, g, unknown or other
cuagcnccuucaugcacag

SEQ ID NO: 1890640 - RNA, 19 nt, Artificial Sequence
  Description of Artificial Sequence: Synthetic oligonucleotide
ggguuuuguagcuuugaac

SEQ ID NO: 1890641 - RNA, 19 nt, Artificial Sequence
  Description of Artificial Sequence: Synthetic oligonucleotide
aguuccuagagguggcaau

SEQ ID NO: 1890642 - RNA, 19 nt, Artificial Sequence
  Description of Artificial Sequence: Synthetic oligonucleotide
guuuuguagcuuugaacaa

SEQ ID NO: 1890643 - RNA, 19 nt, Artificial Sequence
  Description of Artificial Sequence: Synthetic oligonucleotide
cugaaacucuguccaucgg

SEQ ID NO: 1890644 - RNA, 19 nt, Artificial Sequence
  Description of Artificial Sequence: Synthetic oligonucleotide
uguuguccccucaguguca

SEQ ID NO: 1890645 - RNA, 19 nt, Artificial Sequence
  Description of Artificial Sequence: Synthetic oligonucleotide
acaaccuuucuaccucaca

SEQ ID NO: 1890646 - RNA, 19 nt, Artificial Sequence
  Description of Artificial Sequence: Synthetic oligonucleotide
agccucaggaauagguaac

SEQ ID NO: 1890647 - RNA, 19 nt, Artificial Sequence
  Description of Artificial Sequence: Synthetic oligonucleotide
agacuaaagaccacccagu

SEQ ID NO: 1890648 - RNA, 19 nt, Artificial Sequence
  Description of Artificial Sequence: Synthetic oligonucleotide
guagcuuugaacaaccuuu

SEQ ID NO: 1890649 - RNA, 19 nt, Artificial Sequence
  Description of Artificial Sequence: Synthetic oligonucleotide
uguccccucagugucaauc

SEQ ID NO: 1890650 - RNA, 19 nt, Artificial Sequence
  Description of Artificial Sequence: Synthetic oligonucleotide
accaauugagacaaagguu

SEQ ID NO: 1890651 - RNA, 19 nt, Artificial Sequence
  Description of Artificial Sequence: Synthetic oligonucleotide
auugccuagaggaggguca

SEQ ID NO: 1890652 - RNA, 19 nt, Artificial Sequence
  Description of Artificial Sequence: Synthetic oligonucleotide
ggguacaaagaguccaggc

SEQ ID NO: 1890653 - RNA, 19 nt, Artificial Sequence
  Description of Artificial Sequence: Synthetic oligonucleotide
gguacauugccuagaggag

SEQ ID NO: 1890654 - RNA, 19 nt, Artificial Sequence
  Description of Artificial Sequence: Synthetic oligonucleotide
acccaccucggauuccaac

SEQ ID NO: 1890655 - RNA, 19 nt, Artificial Sequence
  Description of Artificial Sequence: Synthetic oligonucleotide
ggcucuacucgccucaggc

SEQ ID NO: 1890656 - RNA, 19 nt, Artificial Sequence
  Description of Artificial Sequence: Synthetic oligonucleotide
gacuaaagaccacccagua

SEQ ID NO: 1890657 - RNA, 19 nt, Artificial Sequence
  Description of Artificial Sequence: Synthetic oligonucleotide
guuugucacaguuccuaga

SEQ ID NO: 1890658 - RNA, 19 nt, Artificial Sequence
  Description of Artificial Sequence: Synthetic oligonucleotide
uccacgggguuuuguagcu

SEQ ID NO: 1890659 - RNA, 19 nt, Artificial Sequence
  Description of Artificial Sequence: Synthetic oligonucleotide
gauccugaucuauuauuua

SEQ ID NO: 1890660 - RNA, 19 nt, Artificial Sequence
  Description of Artificial Sequence: Synthetic oligonucleotide
ugguggguacauugccuag

SEQ ID NO: 1890661 - RNA, 19 nt, Artificial Sequence
  Description of Artificial Sequence: Synthetic oligonucleotide
acaaagaguccaggcuugg

SEQ ID NO: 1890662 - RNA, 19 nt, Artificial Sequence
  Description of Artificial Sequence: Synthetic oligonucleotide
ucgggaagacagguggaag

SEQ ID NO: 1890663 - RNA, 19 nt, Artificial Sequence
  Description of Artificial Sequence: Synthetic oligonucleotide
cagaacacugcaccagcac

SEQ ID NO: 1890664 - RNA, 19 nt, Artificial Sequence
  Description of Artificial Sequence: Synthetic oligonucleotide
ucucuaccuggacacuggu

SEQ ID NO: 1890665 - RNA, 19 nt, Artificial Sequence
  Description of Artificial Sequence: Synthetic oligonucleotide
ggcccuagaagacuaaaga

SEQ ID NO: 1890666 - RNA, 19 nt, Artificial Sequence
  Description of Artificial Sequence: Synthetic oligonucleotide
ccuagagguggcaauggcc

SEQ ID NO: 1890667 - RNA, 19 nt, Artificial Sequence
  Description of Artificial Sequence: Synthetic oligonucleotide
uaaccuucccugacuuggu

SEQ ID NO: 1890668 - RNA, 19 nt, Artificial Sequence
  Description of Artificial Sequence: Synthetic oligonucleotide
cuuucuaccucacaggauu

SEQ ID NO: 1890669 - RNA, 19 nt, Artificial Sequence
  Description of Artificial Sequence: Synthetic oligonucleotide
acugcuaauuauggcuuug

SEQ ID NO: 1890670 - RNA, 19 nt, Artificial Sequence
  Description of Artificial Sequence: Synthetic oligonucleotide
ggcuuauuagcaggcacgg

SEQ ID NO: 1890671 - RNA, 19 nt, Artificial Sequence
  Description of Artificial Sequence: Synthetic oligonucleotide
uugucucggaagcaagguu

SEQ ID NO: 1890672 - RNA, 19 nt, Artificial Sequence
  Description of Artificial Sequence: Synthetic oligonucleotide
cugaccugcucuagacuag

SEQ ID NO: 1890673 - RNA, 19 nt, Artificial Sequence
  Description of Artificial Sequence: Synthetic oligonucleotide
gggcuuauuagcaggcacg

SEQ ID NO: 1890674 - RNA, 19 nt, Artificial Sequence
  Description of Artificial Sequence: Synthetic oligonucleotide
gaaugcaauacagcccauc

SEQ ID NO: 1890675 - RNA, 19 nt, Artificial Sequence
  Description of Artificial Sequence: Synthetic oligonucleotide
caguucacuuagcagccug

SEQ ID NO: 1890676 - RNA, 19 nt, Artificial Sequence
  Description of Artificial Sequence: Synthetic oligonucleotide
cagcuagucccauggcuag

SEQ ID NO: 1890677 - RNA, 19 nt, Artificial Sequence
  Description of Artificial Sequence: Synthetic oligonucleotide
augguggguacauugccua

SEQ ID NO: 1890678 - RNA, 19 nt, Artificial Sequence
  Description of Artificial Sequence: Synthetic oligonucleotide
ucugggcugggguucacau

SEQ ID NO: 1890679 - RNA, 19 nt, Artificial Sequence
  Description of Artificial Sequence: Synthetic oligonucleotide
ggacuuuucaaaggagaag

SEQ ID NO: 1890680 - RNA, 19 nt, Artificial Sequence
  Description of Artificial Sequence: Synthetic oligonucleotide
auggauccugaucuauuau

SEQ ID NO: 1890681 - RNA, 19 nt, Artificial Sequence
  Description of Artificial Sequence: Synthetic oligonucleotide
acauugucucggaagcaag

SEQ ID NO: 1890682 - RNA, 19 nt, Artificial Sequence
  Description of Artificial Sequence: Synthetic oligonucleotide
uuauggcuuuggaguucgg

SEQ ID NO: 1890683 - RNA, 19 nt, Artificial Sequence
  Description of Artificial Sequence: Synthetic oligonucleotide
uggugaugcucaguagagc

SEQ ID NO: 1890684 - RNA, 19 nt, Artificial Sequence
  Description of Artificial Sequence: Synthetic oligonucleotide
agguuaucucugauuuaac

SEQ ID NO: 1890685 - RNA, 19 nt, Artificial Sequence
  Description of Artificial Sequence: Synthetic oligonucleotide
cucacaggauucuguggug

SEQ ID NO: 1890686 - RNA, 19 nt, Artificial Sequence
  Description of Artificial Sequence: Synthetic oligonucleotide
uggcaauggccaugguggc

SEQ ID NO: 1890687 - RNA, 19 nt, Artificial Sequence
  Description of Artificial Sequence: Synthetic oligonucleotide
  modified_base (2)..(2): a, c, u, g, unknown or other
cnccuucaugcacagcuuc

SEQ ID NO: 1890688 - RNA, 19 nt, Artificial Sequence
  Description of Artificial Sequence: Synthetic oligonucleotide
cuagucccauggcuagggg

SEQ ID NO: 1890689 - RNA, 19 nt, Artificial Sequence
  Description of Artificial Sequence: Synthetic oligonucleotide
  modified_base (9)..(9): a, c, u, g, unknown or other
ucccuagcnccuucaugca

SEQ ID NO: 1890690 - RNA, 19 nt, Artificial Sequence
  Description of Artificial Sequence: Synthetic oligonucleotide
gaguuccgaaugcaauaca

SEQ ID NO: 1890691 - RNA, 19 nt, Artificial Sequence
  Description of Artificial Sequence: Synthetic oligonucleotide
cacgccagucacacaguag

SEQ ID NO: 1890692 - RNA, 19 nt, Artificial Sequence
  Description of Artificial Sequence: Synthetic oligonucleotide
caacucuaguaccacgcca

SEQ ID NO: 1890693 - RNA, 19 nt, Artificial Sequence
  Description of Artificial Sequence: Synthetic oligonucleotide
cucuaccuggacacuggug

SEQ ID NO: 1890694 - RNA, 19 nt, Artificial Sequence
  Description of Artificial Sequence: Synthetic oligonucleotide
cccaccucggauuccaacc

SEQ ID NO: 1890695 - RNA, 19 nt, Artificial Sequence
  Description of Artificial Sequence: Synthetic oligonucleotide
ccgaaugcaauacagccca

SEQ ID NO: 1890696 - RNA, 19 nt, Artificial Sequence
  Description of Artificial Sequence: Synthetic oligonucleotide
acucgccucaggcccaaug

SEQ ID NO: 1890697 - RNA, 19 nt, Artificial Sequence
  Description of Artificial Sequence: Synthetic oligonucleotide
gcuuugaacaaccuuucua

SEQ ID NO: 1890698 - RNA, 19 nt, Artificial Sequence
  Description of Artificial Sequence: Synthetic oligonucleotide
cugaucuauuauuuagcua

SEQ ID NO: 1890699 - RNA, 19 nt, Artificial Sequence
  Description of Artificial Sequence: Synthetic oligonucleotide
uuuccggaggcugggcaug

SEQ ID NO: 1890700 - RNA, 19 nt, Artificial Sequence
  Description of Artificial Sequence: Synthetic oligonucleotide
gcaugguggguacauugcc

SEQ ID NO: 1890701 - RNA, 19 nt, Artificial Sequence
  Description of Artificial Sequence: Synthetic oligonucleotide
cucagccacacccgacuag

SEQ ID NO: 1890702 - RNA, 19 nt, Artificial Sequence
  Description of Artificial Sequence: Synthetic oligonucleotide
ggaguuccgaaugcaauac

SEQ ID NO: 1890703 - RNA, 19 nt, Artificial Sequence
  Description of Artificial Sequence: Synthetic oligonucleotide
gucacaguuccuagaggug

SEQ ID NO: 1890704 - RNA, 19 nt, Artificial Sequence
  Description of Artificial Sequence: Synthetic oligonucleotide
acucuaguaccacgccagu

SEQ ID NO: 1890705 - RNA, 19 nt, Artificial Sequence
  Description of Artificial Sequence: Synthetic oligonucleotide
cauacucacugaccugcuc

SEQ ID NO: 1890706 - RNA, 19 nt, Artificial Sequence
  Description of Artificial Sequence: Synthetic oligonucleotide
ugcucuagacuaggcucag

SEQ ID NO: 1890707 - RNA, 19 nt, Artificial Sequence
  Description of Artificial Sequence: Synthetic oligonucleotide
cauugccuagaggaggguc

SEQ ID NO: 1890708 - RNA, 19 nt, Artificial Sequence
  Description of Artificial Sequence: Synthetic oligonucleotide
acuugguggaggaguuccg

SEQ ID NO: 1890709 - RNA, 19 nt, Artificial Sequence
  Description of Artificial Sequence: Synthetic oligonucleotide
agaugugggcggcccucgg

SEQ ID NO: 1890710 - RNA, 19 nt, Artificial Sequence
  Description of Artificial Sequence: Synthetic oligonucleotide
agcggcaccuucucauagu

SEQ ID NO: 1890711 - RNA, 19 nt, Artificial Sequence
  Description of Artificial Sequence: Synthetic oligonucleotide
  modified_base (7)..(7): a, c, u, g, unknown or other
ccuagcnccuucaugcaca

SEQ ID NO: 1890712 - RNA, 19 nt, Artificial Sequence
  Description of Artificial Sequence: Synthetic oligonucleotide
ucucggaagcaagguuucc

SEQ ID NO: 1890713 - RNA, 19 nt, Artificial Sequence
  Description of Artificial Sequence: Synthetic oligonucleotide
ucauucuccgagggguaac

SEQ ID NO: 1890714 - RNA, 19 nt, Artificial Sequence
  Description of Artificial Sequence: Synthetic oligonucleotide
caaccaacucuaguaccac

SEQ ID NO: 1890715 - RNA, 19 nt, Artificial Sequence
  Description of Artificial Sequence: Synthetic oligonucleotide
guccccucagugucaauca

SEQ ID NO: 1890716 - RNA, 19 nt, Artificial Sequence
  Description of Artificial Sequence: Synthetic oligonucleotide
agggucacucauucuccga

SEQ ID NO: 1890717 - RNA, 19 nt, Artificial Sequence
  Description of Artificial Sequence: Synthetic oligonucleotide
acacccgacuagaggcugc

SEQ ID NO: 1890718 - RNA, 19 nt, Artificial Sequence
  Description of Artificial Sequence: Synthetic oligonucleotide
agagccuguuguccccuca

SEQ ID NO: 1890719 - RNA, 19 nt, Artificial Sequence
  Description of Artificial Sequence: Synthetic oligonucleotide
cacacaguaggaacucaaa

SEQ ID NO: 1890720 - RNA, 19 nt, Artificial Sequence
  Description of Artificial Sequence: Synthetic oligonucleotide
gaguucgggcuccagccaa

SEQ ID NO: 1890721 - RNA, 19 nt, Artificial Sequence
  Description of Artificial Sequence: Synthetic oligonucleotide
uucgggcuccagccaagac

SEQ ID NO: 1890722 - RNA, 19 nt, Artificial Sequence
  Description of Artificial Sequence: Synthetic oligonucleotide
cagcggcaccuucucauag

SEQ ID NO: 1890723 - RNA, 19 nt, Artificial Sequence
  Description of Artificial Sequence: Synthetic oligonucleotide
gcaccucauacucacugac

SEQ ID NO: 1890724 - RNA, 19 nt, Artificial Sequence
  Description of Artificial Sequence: Synthetic oligonucleotide
aggcucuacucgccucagg

SEQ ID NO: 1890725 - RNA, 19 nt, Artificial Sequence
  Description of Artificial Sequence: Synthetic oligonucleotide
uugccuagaggagggucac

SEQ ID NO: 1890726 - RNA, 19 nt, Artificial Sequence
  Description of Artificial Sequence: Synthetic oligonucleotide
cucuaguaccacgccaguc

SEQ ID NO: 1890727 - RNA, 19 nt, Artificial Sequence
  Description of Artificial Sequence: Synthetic oligonucleotide
agcuagucccauggcuagg

SEQ ID NO: 1890728 - RNA, 19 nt, Artificial Sequence
  Description of Artificial Sequence: Synthetic oligonucleotide
gccuguuguccccucagug

SEQ ID NO: 1890729 - RNA, 19 nt, Artificial Sequence
  Description of Artificial Sequence: Synthetic oligonucleotide
ccaacucuaguaccacgcc

SEQ ID NO: 1890730 - RNA, 19 nt, Artificial Sequence
  Description of Artificial Sequence: Synthetic oligonucleotide
gcugucgggacuuuucaaa

SEQ ID NO: 1890731 - RNA, 19 nt, Artificial Sequence
  Description of Artificial Sequence: Synthetic oligonucleotide
gaucgcuggaggugaggaa

SEQ ID NO: 1890732 - RNA, 19 nt, Artificial Sequence
  Description of Artificial Sequence: Synthetic oligonucleotide
agauggauccugaucuauu

SEQ ID NO: 1890733 - RNA, 19 nt, Artificial Sequence
  Description of Artificial Sequence: Synthetic oligonucleotide
ggcaugguggguacauugc

SEQ ID NO: 1890734 - RNA, 19 nt, Artificial Sequence
  Description of Artificial Sequence: Synthetic oligonucleotide
cacucauucuccgaggggu

SEQ ID NO: 1890735 - RNA, 19 nt, Artificial Sequence
  Description of Artificial Sequence: Synthetic oligonucleotide
gugaucgcuggaggugagg

SEQ ID NO: 1890736 - RNA, 19 nt, Artificial Sequence
  Description of Artificial Sequence: Synthetic oligonucleotide
gcuuauuagcaggcacggg

SEQ ID NO: 1890737 - RNA, 19 nt, Artificial Sequence
  Description of Artificial Sequence: Synthetic oligonucleotide
ugggcccuagaagacuaaa

SEQ ID NO: 1890738 - RNA, 19 nt, Artificial Sequence
  Description of Artificial Sequence: Synthetic oligonucleotide
  modified_base (13)..(13): a, c, u, g, unknown or other
aaccucccuagcnccuuca

SEQ ID NO: 1890739 - RNA, 19 nt, Artificial Sequence
  Description of Artificial Sequence: Synthetic oligonucleotide
cacagcuagucccauggcu

SEQ ID NO: 1890740 - RNA, 19 nt, Artificial Sequence
  Description of Artificial Sequence: Synthetic oligonucleotide
gaggcugcucacaggcaac

SEQ ID NO: 1890741 - RNA, 19 nt, Artificial Sequence
  Description of Artificial Sequence: Synthetic oligonucleotide
aggagucuuuucuggucua

SEQ ID NO: 1890742 - RNA, 19 nt, Artificial Sequence
  Description of Artificial Sequence: Synthetic oligonucleotide
ccugaucuauuauuuagcu

SEQ ID NO: 1890743 - RNA, 19 nt, Artificial Sequence
  Description of Artificial Sequence: Synthetic oligonucleotide
cagccacacccgacuagag

SEQ ID NO: 1890744 - RNA, 19 nt, Artificial Sequence
  Description of Artificial Sequence: Synthetic oligonucleotide
agcaagguuuccggaggcu

SEQ ID NO: 1890745 - RNA, 19 nt, Artificial Sequence
  Description of Artificial Sequence: Synthetic oligonucleotide
cuaccucacaggauucugu

SEQ ID NO: 1890746 - RNA, 19 nt, Artificial Sequence
  Description of Artificial Sequence: Synthetic oligonucleotide
gaggaguuccgaaugcaau

SEQ ID NO: 1890747 - RNA, 19 nt, Artificial Sequence
  Description of Artificial Sequence: Synthetic oligonucleotide
cucuccacgggguuuugua

SEQ ID NO: 1890748 - RNA, 19 nt, Artificial Sequence
  Description of Artificial Sequence: Synthetic oligonucleotide
cauucuccgagggguaaca

SEQ ID NO: 1890749 - RNA, 19 nt, Artificial Sequence
  Description of Artificial Sequence: Synthetic oligonucleotide
ccucaggcccaaugggucc

SEQ ID NO: 1890750 - RNA, 19 nt, Artificial Sequence
  Description of Artificial Sequence: Synthetic oligonucleotide
cacacccgacuagaggcug

SEQ ID NO: 1890751 - RNA, 19 nt, Artificial Sequence
  Description of Artificial Sequence: Synthetic oligonucleotide
aguucgggcuccagccaag

SEQ ID NO: 1890752 - RNA, 19 nt, Artificial Sequence
  Description of Artificial Sequence: Synthetic oligonucleotide
gagaagcuccugaaacucu

SEQ ID NO: 1890753 - RNA, 19 nt, Artificial Sequence
  Description of Artificial Sequence: Synthetic oligonucleotide
gcucucuaccuggacacug

SEQ ID NO: 1890754 - RNA, 19 nt, Artificial Sequence
  Description of Artificial Sequence: Synthetic oligonucleotide
gggguuuuguagcuuugaa

SEQ ID NO: 1890755 - RNA, 19 nt, Artificial Sequence
  Description of Artificial Sequence: Synthetic oligonucleotide
cuguagccucaggaauagg

SEQ ID NO: 1890756 - RNA, 19 nt, Artificial Sequence
  Description of Artificial Sequence: Synthetic oligonucleotide
ggcaacaaccaacucuagu

SEQ ID NO: 1890757 - RNA, 19 nt, Artificial Sequence
  Description of Artificial Sequence: Synthetic oligonucleotide
uucaggaauuugggcuuau

SEQ ID NO: 1890758 - RNA, 19 nt, Artificial Sequence
  Description of Artificial Sequence: Synthetic oligonucleotide
aggcugcucacaggcaaca

SEQ ID NO: 1890759 - RNA, 19 nt, Artificial Sequence
  Description of Artificial Sequence: Synthetic oligonucleotide
gccaagacugacugaucca

SEQ ID NO: 1890760 - RNA, 19 nt, Artificial Sequence
  Description of Artificial Sequence: Synthetic oligonucleotide
ccuggaccaauugagacaa

SEQ ID NO: 1890761 - RNA, 19 nt, Artificial Sequence
  Description of Artificial Sequence: Synthetic oligonucleotide
ccgacuagaggcugcucac

SEQ ID NO: 1890762 - RNA, 19 nt, Artificial Sequence
  Description of Artificial Sequence: Synthetic oligonucleotide
ggggugaucgcuggaggug

SEQ ID NO: 1890763 - RNA, 19 nt, Artificial Sequence
  Description of Artificial Sequence: Synthetic oligonucleotide
gguggguacauugccuaga

SEQ ID NO: 1890764 - RNA, 19 nt, Artificial Sequence
  Description of Artificial Sequence: Synthetic oligonucleotide
ccgagggguaacaggcacc

SEQ ID NO: 1890765 - RNA, 19 nt, Artificial Sequence
  Description of Artificial Sequence: Synthetic oligonucleotide
gccuagaggagggucacuc

SEQ ID NO: 1890766 - RNA, 19 nt, Artificial Sequence
  Description of Artificial Sequence: Synthetic oligonucleotide
gcggcaccuucucauaguc

SEQ ID NO: 1890767 - RNA, 19 nt, Artificial Sequence
  Description of Artificial Sequence: Synthetic oligonucleotide
gcaauacagcccauccuga

SEQ ID NO: 1890768 - RNA, 19 nt, Artificial Sequence
  Description of Artificial Sequence: Synthetic oligonucleotide
gacuugaguuugucacagu

SEQ ID NO: 1890769 - RNA, 19 nt, Artificial Sequence
  Description of Artificial Sequence: Synthetic oligonucleotide
cugcacaggaggccuggga

SEQ ID NO: 1890770 - RNA, 19 nt, Artificial Sequence
  Description of Artificial Sequence: Synthetic oligonucleotide
ccuucccugacuuggugga

SEQ ID NO: 1890771 - RNA, 19 nt, Artificial Sequence
  Description of Artificial Sequence: Synthetic oligonucleotide
acauugccuagaggagggu

SEQ ID NO: 1890772 - RNA, 19 nt, Artificial Sequence
  Description of Artificial Sequence: Synthetic oligonucleotide
acuuagcagccugggcccu

SEQ ID NO: 1890773 - RNA, 19 nt, Artificial Sequence
  Description of Artificial Sequence: Synthetic oligonucleotide
cccuggaccaauugagaca

SEQ ID NO: 1890774 - RNA, 19 nt, Artificial Sequence
  Description of Artificial Sequence: Synthetic oligonucleotide
cccgacuagaggcugcuca

SEQ ID NO: 1890775 - RNA, 19 nt, Artificial Sequence
  Description of Artificial Sequence: Synthetic oligonucleotide
acgggguuuuguagcuuug

SEQ ID NO: 1890776 - RNA, 19 nt, Artificial Sequence
  Description of Artificial Sequence: Synthetic oligonucleotide
  modified_base (5)..(5): a, c, u, g, unknown or other
uagcnccuucaugcacagc

SEQ ID NO: 1890777 - RNA, 19 nt, Artificial Sequence
  Description of Artificial Sequence: Synthetic oligonucleotide
guuguccccucagugucaa

SEQ ID NO: 1890778 - RNA, 19 nt, Artificial Sequence
  Description of Artificial Sequence: Synthetic oligonucleotide
ccgagcuguagccucagga

SEQ ID NO: 1890779 - RNA, 19 nt, Artificial Sequence
  Description of Artificial Sequence: Synthetic oligonucleotide
ggauccugaucuauuauuu

SEQ ID NO: 1890780 - RNA, 19 nt, Artificial Sequence
  Description of Artificial Sequence: Synthetic oligonucleotide
cucgggaagacagguggaa

SEQ ID NO: 1890781 - RNA, 19 nt, Artificial Sequence
  Description of Artificial Sequence: Synthetic oligonucleotide
ggaguucgggcuccagcca

SEQ ID NO: 1890782 - RNA, 19 nt, Artificial Sequence
  Description of Artificial Sequence: Synthetic oligonucleotide
gggcugucgggacuuuuca

SEQ ID NO: 1890783 - RNA, 19 nt, Artificial Sequence
  Description of Artificial Sequence: Synthetic oligonucleotide
aucaaacccuggaccaauu

SEQ ID NO: 1890784 - RNA, 19 nt, Artificial Sequence
  Description of Artificial Sequence: Synthetic oligonucleotide
ggaggaguuccgaaugcaa

SEQ ID NO: 1890785 - RNA, 19 nt, Artificial Sequence
  Description of Artificial Sequence: Synthetic oligonucleotide
agcucucuaccuggacacu

SEQ ID NO: 1890786 - RNA, 19 nt, Artificial Sequence
  Description of Artificial Sequence: Synthetic oligonucleotide
aggcccaauggguccuuuu

SEQ ID NO: 1890787 - RNA, 19 nt, Artificial Sequence
  Description of Artificial Sequence: Synthetic oligonucleotide
gggugaucgcuggagguga

SEQ ID NO: 1890788 - RNA, 19 nt, Artificial Sequence
  Description of Artificial Sequence: Synthetic oligonucleotide
ccuuggggaggcuucuuca

SEQ ID NO: 1890789 - RNA, 19 nt, Artificial Sequence
  Description of Artificial Sequence: Synthetic oligonucleotide
cagguggaaggacuugagu

SEQ ID NO: 1890790 - RNA, 19 nt, Artificial Sequence
  Description of Artificial Sequence: Synthetic oligonucleotide
cugacuugguggaggaguu

SEQ ID NO: 1890791 - RNA, 19 nt, Artificial Sequence
  Description of Artificial Sequence: Synthetic oligonucleotide
cugccucccuuggggaggc

SEQ ID NO: 1890792 - RNA, 19 nt, Artificial Sequence
  Description of Artificial Sequence: Synthetic oligonucleotide
  modified_base (8)..(8): a, c, u, g, unknown or other
cccuagcnccuucaugcac

SEQ ID NO: 1890793 - RNA, 19 nt, Artificial Sequence
  Description of Artificial Sequence: Synthetic oligonucleotide
ugccuagaggagggucacu

SEQ ID NO: 1890794 - RNA, 19 nt, Artificial Sequence
  Description of Artificial Sequence: Synthetic oligonucleotide
agguaacacugcaggccga

SEQ ID NO: 1890795 - RNA, 19 nt, Artificial Sequence
  Description of Artificial Sequence: Synthetic oligonucleotide
cugacugauccagauggau

SEQ ID NO: 1890796 - RNA, 19 nt, Artificial Sequence
  Description of Artificial Sequence: Synthetic oligonucleotide
ggugaucgcuggaggugag

SEQ ID NO: 1890797 - RNA, 19 nt, Artificial Sequence
  Description of Artificial Sequence: Synthetic oligonucleotide
acccgacuagaggcugcuc

SEQ ID NO: 1890798 - RNA, 19 nt, Artificial Sequence
  Description of Artificial Sequence: Synthetic oligonucleotide
cuagggguccagggcucug

SEQ ID NO: 1890799 - RNA, 19 nt, Artificial Sequence
  Description of Artificial Sequence: Synthetic oligonucleotide
ggcagcggcaccuucucau

SEQ ID NO: 1890800 - RNA, 19 nt, Artificial Sequence
  Description of Artificial Sequence: Synthetic oligonucleotide
ccucccuuggggaggcuuc

SEQ ID NO: 1890801 - RNA, 19 nt, Artificial Sequence
  Description of Artificial Sequence: Synthetic oligonucleotide
cacgggguuuuguagcuuu

SEQ ID NO: 1890802 - RNA, 19 nt, Artificial Sequence
  Description of Artificial Sequence: Synthetic oligonucleotide
cuaccuggacacuggugau

SEQ ID NO: 1890803 - RNA, 19 nt, Artificial Sequence
  Description of Artificial Sequence: Synthetic oligonucleotide
ggcugucgggacuuuucaa

SEQ ID NO: 1890804 - RNA, 19 nt, Artificial Sequence
  Description of Artificial Sequence: Synthetic oligonucleotide
guaccacgccagucacaca

SEQ ID NO: 1890805 - RNA, 19 nt, Artificial Sequence
  Description of Artificial Sequence: Synthetic oligonucleotide
ggggcaggcucuacucgcc

SEQ ID NO: 1890806 - RNA, 19 nt, Artificial Sequence
  Description of Artificial Sequence: Synthetic oligonucleotide
ccccaagucaguucacuua

SEQ ID NO: 1890807 - RNA, 19 nt, Artificial Sequence
  Description of Artificial Sequence: Synthetic oligonucleotide
guagagccuguuguccccu

SEQ ID NO: 1890808 - RNA, 19 nt, Artificial Sequence
  Description of Artificial Sequence: Synthetic oligonucleotide
ccugacuugguggaggagu

SEQ ID NO: 1890809 - RNA, 19 nt, Artificial Sequence
  Description of Artificial Sequence: Synthetic oligonucleotide
cagauggauccugaucuau

SEQ ID NO: 1890810 - RNA, 19 nt, Artificial Sequence
  Description of Artificial Sequence: Synthetic oligonucleotide
cuauguccccaagucaguu

SEQ ID NO: 1890811 - RNA, 19 nt, Artificial Sequence
  Description of Artificial Sequence: Synthetic oligonucleotide
uuguccccucagugucaau

SEQ ID NO: 1890812 - RNA, 19 nt, Artificial Sequence
  Description of Artificial Sequence: Synthetic oligonucleotide
cugggcccuagaagacuaa

SEQ ID NO: 1890813 - RNA, 19 nt, Artificial Sequence
  Description of Artificial Sequence: Synthetic oligonucleotide
gcucuagacuaggcucagc

SEQ ID NO: 1890814 - RNA, 19 nt, Artificial Sequence
  Description of Artificial Sequence: Synthetic oligonucleotide
ggcucagaugugggcggcc

SEQ ID NO: 1890815 - RNA, 19 nt, Artificial Sequence
  Description of Artificial Sequence: Synthetic oligonucleotide
ggugaggaagaggagucuu

SEQ ID NO: 1890816 - RNA, 19 nt, Artificial Sequence
  Description of Artificial Sequence: Synthetic oligonucleotide
cucagaugugggcggcccu

SEQ ID NO: 1890817 - RNA, 19 nt, Artificial Sequence
  Description of Artificial Sequence: Synthetic oligonucleotide
ccccucagugucaaucaaa

SEQ ID NO: 1890818 - RNA, 19 nt, Artificial Sequence
  Description of Artificial Sequence: Synthetic oligonucleotide
cuccugaaacucuguccau

SEQ ID NO: 1890819 - RNA, 19 nt, Artificial Sequence
  Description of Artificial Sequence: Synthetic oligonucleotide
ucccuuggggaggcuucuu

SEQ ID NO: 1890820 - RNA, 19 nt, Artificial Sequence
  Description of Artificial Sequence: Synthetic oligonucleotide
gcagcggcaccuucucaua

SEQ ID NO: 1890821 - RNA, 19 nt, Artificial Sequence
  Description of Artificial Sequence: Synthetic oligonucleotide
cuggaccaauugagacaaa

SEQ ID NO: 1890822 - RNA, 19 nt, Artificial Sequence
  Description of Artificial Sequence: Synthetic oligonucleotide
ccagauggauccugaucua

SEQ ID NO: 1890823 - RNA, 19 nt, Artificial Sequence
  Description of Artificial Sequence: Synthetic oligonucleotide
cucaggcccaauggguccu

SEQ ID NO: 1890824 - RNA, 19 nt, Artificial Sequence
  Description of Artificial Sequence: Synthetic oligonucleotide
cggaagcaagguuuccgga

SEQ ID NO: 1890825 - RNA, 19 nt, Artificial Sequence
  Description of Artificial Sequence: Synthetic oligonucleotide
cuuagcagccugggcccua

SEQ ID NO: 1890826 - RNA, 19 nt, Artificial Sequence
  Description of Artificial Sequence: Synthetic oligonucleotide
gcuauguccccaagucagu

SEQ ID NO: 1890827 - RNA, 19 nt, Artificial Sequence
  Description of Artificial Sequence: Synthetic oligonucleotide
gugagggcugucgggacuu

SEQ ID NO: 1890828 - RNA, 19 nt, Artificial Sequence
  Description of Artificial Sequence: Synthetic oligonucleotide
ggccgagcuguagccucag

SEQ ID NO: 1890829 - RNA, 19 nt, Artificial Sequence
  Description of Artificial Sequence: Synthetic oligonucleotide
ccuuucuaccucacaggau

SEQ ID NO: 1890830 - RNA, 19 nt, Artificial Sequence
  Description of Artificial Sequence: Synthetic oligonucleotide
ccaccucggauuccaaccu

SEQ ID NO: 1890831 - RNA, 19 nt, Artificial Sequence
  Description of Artificial Sequence: Synthetic oligonucleotide
ccacccaccucggauucca

SEQ ID NO: 1890832 - RNA, 19 nt, Artificial Sequence
  Description of Artificial Sequence: Synthetic oligonucleotide
gagggguaacaggcacccu

SEQ ID NO: 1890833 - RNA, 19 nt, Artificial Sequence
  Description of Artificial Sequence: Synthetic oligonucleotide
cacccaccucggauuccaa

SEQ ID NO: 1890834 - RNA, 19 nt, Artificial Sequence
  Description of Artificial Sequence: Synthetic oligonucleotide
ccacgccagucacacagua

SEQ ID NO: 1890835 - RNA, 19 nt, Artificial Sequence
  Description of Artificial Sequence: Synthetic oligonucleotide
cacccgacuagaggcugcu

SEQ ID NO: 1890836 - RNA, 19 nt, Artificial Sequence
  Description of Artificial Sequence: Synthetic oligonucleotide
uacucgccucaggcccaau

SEQ ID NO: 1890837 - RNA, 19 nt, Artificial Sequence
  Description of Artificial Sequence: Synthetic oligonucleotide
cccacccaccucggauucc

SEQ ID NO: 1890838 - RNA, 19 nt, Artificial Sequence
  Description of Artificial Sequence: Synthetic oligonucleotide
cgggguuuuguagcuuuga

SEQ ID NO: 1890839 - RNA, 19 nt, Artificial Sequence
  Description of Artificial Sequence: Synthetic oligonucleotide
ugccucccuuggggaggcu

SEQ ID NO: 1890840 - RNA, 19 nt, Artificial Sequence
  Description of Artificial Sequence: Synthetic oligonucleotide
gccugggcccuagaagacu

SEQ ID NO: 1890841 - RNA, 19 nt, Artificial Sequence
  Description of Artificial Sequence: Synthetic oligonucleotide
cgacuagaggcugcucaca

SEQ ID NO: 1890842 - RNA, 19 nt, Artificial Sequence
  Description of Artificial Sequence: Synthetic oligonucleotide
  modified_base (3)..(3): a, c, u, g, unknown or other
gcnccuucaugcacagcuu

SEQ ID NO: 1890843 - RNA, 19 nt, Artificial Sequence
  Description of Artificial Sequence: Synthetic oligonucleotide
cgccucaggcccaaugggu

SEQ ID NO: 1890844 - RNA, 19 nt, Artificial Sequence
  Description of Artificial Sequence: Synthetic oligonucleotide
gcucuccacgggguuuugu

SEQ ID NO: 1890845 - RNA, 19 nt, Artificial Sequence
  Description of Artificial Sequence: Synthetic oligonucleotide
ccucaggaauagguaacuu

SEQ ID NO: 1890846 - RNA, 19 nt, Artificial Sequence
  Description of Artificial Sequence: Synthetic oligonucleotide
gggcggcccucgggaagac

SEQ ID NO: 1890847 - RNA, 19 nt, Artificial Sequence
  Description of Artificial Sequence: Synthetic oligonucleotide
gccucccuuggggaggcuu

SEQ ID NO: 1890848 - RNA, 19 nt, Artificial Sequence
  Description of Artificial Sequence: Synthetic oligonucleotide
cgaaugcaauacagcccau

SEQ ID NO: 1890849 - RNA, 19 nt, Artificial Sequence
  Description of Artificial Sequence: Synthetic oligonucleotide
caggcccaauggguccuuu

SEQ ID NO: 1890850 - RNA, 19 nt, Artificial Sequence
  Description of Artificial Sequence: Synthetic oligonucleotide
ccacgggguuuuguagcuu

SEQ ID NO: 1890851 - RNA, 19 nt, Artificial Sequence
  Description of Artificial Sequence: Synthetic oligonucleotide
aauuagacaaaauuucaca

SEQ ID NO: 1890852 - RNA, 19 nt, Artificial Sequence
  Description of Artificial Sequence: Synthetic oligonucleotide
aaaauuucacauaaaauca

SEQ ID NO: 1890853 - RNA, 19 nt, Artificial Sequence
  Description of Artificial Sequence: Synthetic oligonucleotide
aaaagcagcgucauguugc

SEQ ID NO: 1890854 - RNA, 19 nt, Artificial Sequence
  Description of Artificial Sequence: Synthetic oligonucleotide
aaagcgacugcuuuaauga

SEQ ID NO: 1890855 - RNA, 19 nt, Artificial Sequence
  Description of Artificial Sequence: Synthetic oligonucleotide
uuuauagccaaacuucuug

SEQ ID NO: 1890856 - RNA, 19 nt, Artificial Sequence
  Description of Artificial Sequence: Synthetic oligonucleotide
agaaaccuaugauucaucc

SEQ ID NO: 1890857 - RNA, 19 nt, Artificial Sequence
  Description of Artificial Sequence: Synthetic oligonucleotide
aaugguuuuauagccaaac

SEQ ID NO: 1890858 - RNA, 19 nt, Artificial Sequence
  Description of Artificial Sequence: Synthetic oligonucleotide
aaaugcaagauucaucaca

SEQ ID NO: 1890859 - RNA, 19 nt, Artificial Sequence
  Description of Artificial Sequence: Synthetic oligonucleotide
uuguaaagcucaaugaggc

SEQ ID NO: 1890860 - RNA, 19 nt, Artificial Sequence
  Description of Artificial Sequence: Synthetic oligonucleotide
uaaugaauuagacaaaauu

SEQ ID NO: 1890861 - RNA, 19 nt, Artificial Sequence
  Description of Artificial Sequence: Synthetic oligonucleotide
uuugauggaaagcacaggu

SEQ ID NO: 1890862 - RNA, 19 nt, Artificial Sequence
  Description of Artificial Sequence: Synthetic oligonucleotide
ugaauuagacaaaauuuca

SEQ ID NO: 1890863 - RNA, 19 nt, Artificial Sequence
  Description of Artificial Sequence: Synthetic oligonucleotide
uucuuuguaaagcucaaug

SEQ ID NO: 1890864 - RNA, 19 nt, Artificial Sequence
  Description of Artificial Sequence: Synthetic oligonucleotide
auugaagucacccgugucg

SEQ ID NO: 1890865 - RNA, 19 nt, Artificial Sequence
  Description of Artificial Sequence: Synthetic oligonucleotide
aaaucagaaaccuaugauu

SEQ ID NO: 1890866 - RNA, 19 nt, Artificial Sequence
  Description of Artificial Sequence: Synthetic oligonucleotide
aaaagcgacugcuuuaaug

SEQ ID NO: 1890867 - RNA, 19 nt, Artificial Sequence
  Description of Artificial Sequence: Synthetic oligonucleotide
auccguucuaacuuuaugg

SEQ ID NO: 1890868 - RNA, 19 nt, Artificial Sequence
  Description of Artificial Sequence: Synthetic oligonucleotide
aaaaucagaaaccuaugau

SEQ ID NO: 1890869 - RNA, 19 nt, Artificial Sequence
  Description of Artificial Sequence: Synthetic oligonucleotide
uaaaaucagaaaccuauga

SEQ ID NO: 1890870 - RNA, 19 nt, Artificial Sequence
  Description of Artificial Sequence: Synthetic oligonucleotide
acuuuauggcaucagcagc

SEQ ID NO: 1890871 - RNA, 19 nt, Artificial Sequence
  Description of Artificial Sequence: Synthetic oligonucleotide
uuaggagccagcucaaagg

SEQ ID NO: 1890872 - RNA, 19 nt, Artificial Sequence
  Description of Artificial Sequence: Synthetic oligonucleotide
augaauuagacaaaauuuc

SEQ ID NO: 1890873 - RNA, 19 nt, Artificial Sequence
  Description of Artificial Sequence: Synthetic oligonucleotide
aaggaugcgccccacaaag

SEQ ID NO: 1890874 - RNA, 19 nt, Artificial Sequence
  Description of Artificial Sequence: Synthetic oligonucleotide
uaccauugcauccuuauca

SEQ ID NO: 1890875 - RNA, 19 nt, Artificial Sequence
  Description of Artificial Sequence: Synthetic oligonucleotide
cuuuguaaagcucaaugag

SEQ ID NO: 1890876 - RNA, 19 nt, Artificial Sequence
  Description of Artificial Sequence: Synthetic oligonucleotide
cuugcauccacuucugugg

SEQ ID NO: 1890877 - RNA, 19 nt, Artificial Sequence
  Description of Artificial Sequence: Synthetic oligonucleotide
cuugccauaggcaauggcc

SEQ ID NO: 1890878 - RNA, 19 nt, Artificial Sequence
  Description of Artificial Sequence: Synthetic oligonucleotide
guugaggacaacuugauga

SEQ ID NO: 1890879 - RNA, 19 nt, Artificial Sequence
  Description of Artificial Sequence: Synthetic oligonucleotide
uaguuguagauuuugguga

SEQ ID NO: 1890880 - RNA, 19 nt, Artificial Sequence
  Description of Artificial Sequence: Synthetic oligonucleotide
uaacuuuauggcaucagca

SEQ ID NO: 1890881 - RNA, 19 nt, Artificial Sequence
  Description of Artificial Sequence: Synthetic oligonucleotide
cauugcauccuuaucaaag

SEQ ID NO: 1890882 - RNA, 19 nt, Artificial Sequence
  Description of Artificial Sequence: Synthetic oligonucleotide
guaguuguagauuuuggug

SEQ ID NO: 1890883 - RNA, 19 nt, Artificial Sequence
  Description of Artificial Sequence: Synthetic oligonucleotide
auuagacaaaauuucacau

SEQ ID NO: 1890884 - RNA, 19 nt, Artificial Sequence
  Description of Artificial Sequence: Synthetic oligonucleotide
aaaguuuaucaauagcauu

SEQ ID NO: 1890885 - RNA, 19 nt, Artificial Sequence
  Description of Artificial Sequence: Synthetic oligonucleotide
auccuuaucaaaggaaagc

SEQ ID NO: 1890886 - RNA, 19 nt, Artificial Sequence
  Description of Artificial Sequence: Synthetic oligonucleotide
uaugauucaucccucucca

SEQ ID NO: 1890887 - RNA, 19 nt, Artificial Sequence
  Description of Artificial Sequence: Synthetic oligonucleotide
ugagauggugaggaaaucg

SEQ ID NO: 1890888 - RNA, 19 nt, Artificial Sequence
  Description of Artificial Sequence: Synthetic oligonucleotide
cuugguguuauccuugagc

SEQ ID NO: 1890889 - RNA, 19 nt, Artificial Sequence
  Description of Artificial Sequence: Synthetic oligonucleotide
aggagcuugggugagaugg

SEQ ID NO: 1890890 - RNA, 19 nt, Artificial Sequence
  Description of Artificial Sequence: Synthetic oligonucleotide
uuuaaucuguuccucuugu

SEQ ID NO: 1890891 - RNA, 19 nt, Artificial Sequence
  Description of Artificial Sequence: Synthetic oligonucleotide
aaagccuugcauccacuuc

SEQ ID NO: 1890892 - RNA, 19 nt, Artificial Sequence
  Description of Artificial Sequence: Synthetic oligonucleotide
ugcuuuaaugaauuagaca

SEQ ID NO: 1890893 - RNA, 19 nt, Artificial Sequence
  Description of Artificial Sequence: Synthetic oligonucleotide
uuaucaaaggaaagccuug

SEQ ID NO: 1890894 - RNA, 19 nt, Artificial Sequence
  Description of Artificial Sequence: Synthetic oligonucleotide
uuggugacacucuuuaccc

SEQ ID NO: 1890895 - RNA, 19 nt, Artificial Sequence
  Description of Artificial Sequence: Synthetic oligonucleotide
agauguaucuucuccaagu

SEQ ID NO: 1890896 - RNA, 19 nt, Artificial Sequence
  Description of Artificial Sequence: Synthetic oligonucleotide
aucaaggauggguuggugg

SEQ ID NO: 1890897 - RNA, 19 nt, Artificial Sequence
  Description of Artificial Sequence: Synthetic oligonucleotide
agccauuugguccucauug

SEQ ID NO: 1890898 - RNA, 19 nt, Artificial Sequence
  Description of Artificial Sequence: Synthetic oligonucleotide
cuaacuuuauggcaucagc

SEQ ID NO: 1890899 - RNA, 19 nt, Artificial Sequence
  Description of Artificial Sequence: Synthetic oligonucleotide
guauuucugcuccaaacag

SEQ ID NO: 1890900 - RNA, 19 nt, Artificial Sequence
  Description of Artificial Sequence: Synthetic oligonucleotide
aaaaguuuaucaauagcau

SEQ ID NO: 1890901 - RNA, 19 nt, Artificial Sequence
  Description of Artificial Sequence: Synthetic oligonucleotide
auuaggagccagcucaaag

SEQ ID NO: 1890902 - RNA, 19 nt, Artificial Sequence
  Description of Artificial Sequence: Synthetic oligonucleotide
uguaaagcucaaugaggcg

SEQ ID NO: 1890903 - RNA, 19 nt, Artificial Sequence
  Description of Artificial Sequence: Synthetic oligonucleotide
acuugaugagaauucuguc

SEQ ID NO: 1890904 - RNA, 19 nt, Artificial Sequence
  Description of Artificial Sequence: Synthetic oligonucleotide
agcgcugaacauucguucc

SEQ ID NO: 1890905 - RNA, 19 nt, Artificial Sequence
  Description of Artificial Sequence: Synthetic oligonucleotide
aacuugaugagaauucugu

SEQ ID NO: 1890906 - RNA, 19 nt, Artificial Sequence
  Description of Artificial Sequence: Synthetic oligonucleotide
aauuucacauaaaaucaga

SEQ ID NO: 1890907 - RNA, 19 nt, Artificial Sequence
  Description of Artificial Sequence: Synthetic oligonucleotide
agaugagcgucacacccgc

SEQ ID NO: 1890908 - RNA, 19 nt, Artificial Sequence
  Description of Artificial Sequence: Synthetic oligonucleotide
ucauugugcagccaacgga

SEQ ID NO: 1890909 - RNA, 19 nt, Artificial Sequence
  Description of Artificial Sequence: Synthetic oligonucleotide
ugggcgaaggagaaaagca

SEQ ID NO: 1890910 - RNA, 19 nt, Artificial Sequence
  Description of Artificial Sequence: Synthetic oligonucleotide
aauucuguccuugcugauc

SEQ ID NO: 1890911 - RNA, 19 nt, Artificial Sequence
  Description of Artificial Sequence: Synthetic oligonucleotide
aaugcaagauucaucacaa

SEQ ID NO: 1890912 - RNA, 19 nt, Artificial Sequence
  Description of Artificial Sequence: Synthetic oligonucleotide
cauaaaaucagaaaccuau

SEQ ID NO: 1890913 - RNA, 19 nt, Artificial Sequence
  Description of Artificial Sequence: Synthetic oligonucleotide
guugcaauggaugccaugc

SEQ ID NO: 1890914 - RNA, 19 nt, Artificial Sequence
  Description of Artificial Sequence: Synthetic oligonucleotide
gucauguugcaauggaugc

SEQ ID NO: 1890915 - RNA, 19 nt, Artificial Sequence
  Description of Artificial Sequence: Synthetic oligonucleotide
ucauaggacuucuugucug

SEQ ID NO: 1890916 - RNA, 19 nt, Artificial Sequence
  Description of Artificial Sequence: Synthetic oligonucleotide
ugagcauccguucuaacuu

SEQ ID NO: 1890917 - RNA, 19 nt, Artificial Sequence
  Description of Artificial Sequence: Synthetic oligonucleotide
ucaucacaagccaugugca

SEQ ID NO: 1890918 - RNA, 19 nt, Artificial Sequence
  Description of Artificial Sequence: Synthetic oligonucleotide
ugugcaauuaggagccagc

SEQ ID NO: 1890919 - RNA, 19 nt, Artificial Sequence
  Description of Artificial Sequence: Synthetic oligonucleotide
uucauaggacuucuugucu

SEQ ID NO: 1890920 - RNA, 19 nt, Artificial Sequence
  Description of Artificial Sequence: Synthetic oligonucleotide
uuugaucucaccaguguua

SEQ ID NO: 1890921 - RNA, 19 nt, Artificial Sequence
  Description of Artificial Sequence: Synthetic oligonucleotide
aaucgcagccugccagugc

SEQ ID NO: 1890922 - RNA, 19 nt, Artificial Sequence
  Description of Artificial Sequence: Synthetic oligonucleotide
ugcaauggaugccaugcug

SEQ ID NO: 1890923 - RNA, 19 nt, Artificial Sequence
  Description of Artificial Sequence: Synthetic oligonucleotide
ucuggcguuuuacagggga

SEQ ID NO: 1890924 - RNA, 19 nt, Artificial Sequence
  Description of Artificial Sequence: Synthetic oligonucleotide
aacuuucggaucccaucgg

SEQ ID NO: 1890925 - RNA, 19 nt, Artificial Sequence
  Description of Artificial Sequence: Synthetic oligonucleotide
ucuguguuugccacaugcc

SEQ ID NO: 1890926 - RNA, 19 nt, Artificial Sequence
  Description of Artificial Sequence: Synthetic oligonucleotide
uucucguccagauguaucu

SEQ ID NO: 1890927 - RNA, 19 nt, Artificial Sequence
  Description of Artificial Sequence: Synthetic oligonucleotide
ucaaggauggguugguggu

SEQ ID NO: 1890928 - RNA, 19 nt, Artificial Sequence
  Description of Artificial Sequence: Synthetic oligonucleotide
uagauuuuggugacacucu

SEQ ID NO: 1890929 - RNA, 19 nt, Artificial Sequence
  Description of Artificial Sequence: Synthetic oligonucleotide
gaugccaugcugcuccucc

SEQ ID NO: 1890930 - RNA, 19 nt, Artificial Sequence
  Description of Artificial Sequence: Synthetic oligonucleotide
guagauuuuggugacacuc

SEQ ID NO: 1890931 - RNA, 19 nt, Artificial Sequence
  Description of Artificial Sequence: Synthetic oligonucleotide
uccagauguaucuucucca

SEQ ID NO: 1890932 - RNA, 19 nt, Artificial Sequence
  Description of Artificial Sequence: Synthetic oligonucleotide
uugaagucacccgugucgg

SEQ ID NO: 1890933 - RNA, 19 nt, Artificial Sequence
  Description of Artificial Sequence: Synthetic oligonucleotide
gauucaucccucuccaauc

SEQ ID NO: 1890934 - RNA, 19 nt, Artificial Sequence
  Description of Artificial Sequence: Synthetic oligonucleotide
gacacucuuuaccccaggg

SEQ ID NO: 1890935 - RNA, 19 nt, Artificial Sequence
  Description of Artificial Sequence: Synthetic oligonucleotide
ugagaauucuguccuugcu

SEQ ID NO: 1890936 - RNA, 19 nt, Artificial Sequence
  Description of Artificial Sequence: Synthetic oligonucleotide
gauguaucuucuccaaguc

SEQ ID NO: 1890937 - RNA, 19 nt, Artificial Sequence
  Description of Artificial Sequence: Synthetic oligonucleotide
uggugaggaaaucgcagcc

SEQ ID NO: 1890938 - RNA, 19 nt, Artificial Sequence
  Description of Artificial Sequence: Synthetic oligonucleotide
ugcauccuuaucaaaggaa

SEQ ID NO: 1890939 - RNA, 19 nt, Artificial Sequence
  Description of Artificial Sequence: Synthetic oligonucleotide
caguguuacggaaggaggc

SEQ ID NO: 1890940 - RNA, 19 nt, Artificial Sequence
  Description of Artificial Sequence: Synthetic oligonucleotide
aggaaagccuugcauccac

SEQ ID NO: 1890941 - RNA, 19 nt, Artificial Sequence
  Description of Artificial Sequence: Synthetic oligonucleotide
auucguuccgugagcaucc

SEQ ID NO: 1890942 - RNA, 19 nt, Artificial Sequence
  Description of Artificial Sequence: Synthetic oligonucleotide
uugggugagauggugagga

SEQ ID NO: 1890943 - RNA, 19 nt, Artificial Sequence
  Description of Artificial Sequence: Synthetic oligonucleotide
uaucaaaggaaagccuugc

SEQ ID NO: 1890944 - RNA, 19 nt, Artificial Sequence
  Description of Artificial Sequence: Synthetic oligonucleotide
uuucggaucccaucggaga

SEQ ID NO: 1890945 - RNA, 19 nt, Artificial Sequence
  Description of Artificial Sequence: Synthetic oligonucleotide
augccagucaaggaugcgc

SEQ ID NO: 1890946 - RNA, 19 nt, Artificial Sequence
  Description of Artificial Sequence: Synthetic oligonucleotide
uccuacuuuccauucucag

SEQ ID NO: 1890947 - RNA, 19 nt, Artificial Sequence
  Description of Artificial Sequence: Synthetic oligonucleotide
uucucagcgcugaacauuc

SEQ ID NO: 1890948 - RNA, 19 nt, Artificial Sequence
  Description of Artificial Sequence: Synthetic oligonucleotide
acucuuuaccccagggucc

SEQ ID NO: 1890949 - RNA, 19 nt, Artificial Sequence
  Description of Artificial Sequence: Synthetic oligonucleotide
gaugagaauucuguccuug

SEQ ID NO: 1890950 - RNA, 19 nt, Artificial Sequence
  Description of Artificial Sequence: Synthetic oligonucleotide
cacucuuuaccccaggguc

SEQ ID NO: 1890951 - RNA, 19 nt, Artificial Sequence
  Description of Artificial Sequence: Synthetic oligonucleotide
gcaagauucaucacaagcc

SEQ ID NO: 1890952 - RNA, 19 nt, Artificial Sequence
  Description of Artificial Sequence: Synthetic oligonucleotide
cucauugugcagccaacgg

SEQ ID NO: 1890953 - RNA, 19 nt, Artificial Sequence
  Description of Artificial Sequence: Synthetic oligonucleotide
aaagcagcgucauguugca

SEQ ID NO: 1890954 - RNA, 19 nt, Artificial Sequence
  Description of Artificial Sequence: Synthetic oligonucleotide
aguguuacggaaggaggcg

SEQ ID NO: 1890955 - RNA, 19 nt, Artificial Sequence
  Description of Artificial Sequence: Synthetic oligonucleotide
ucaaggaugcgccccacaa

SEQ ID NO: 1890956 - RNA, 19 nt, Artificial Sequence
  Description of Artificial Sequence: Synthetic oligonucleotide
uuaaucuguuccucuugug

SEQ ID NO: 1890957 - RNA, 19 nt, Artificial Sequence
  Description of Artificial Sequence: Synthetic oligonucleotide
gguguuauccuugagcagc

SEQ ID NO: 1890958 - RNA, 19 nt, Artificial Sequence
  Description of Artificial Sequence: Synthetic oligonucleotide
uguuacggaaggaggcgcc

SEQ ID NO: 1890959 - RNA, 19 nt, Artificial Sequence
  Description of Artificial Sequence: Synthetic oligonucleotide
augguuuuauagccaaacu

SEQ ID NO: 1890960 - RNA, 19 nt, Artificial Sequence
  Description of Artificial Sequence: Synthetic oligonucleotide
aacuugguguuauccuuga

SEQ ID NO: 1890961 - RNA, 19 nt, Artificial Sequence
  Description of Artificial Sequence: Synthetic oligonucleotide
ucggagagcuucuccacag

SEQ ID NO: 1890962 - RNA, 19 nt, Artificial Sequence
  Description of Artificial Sequence: Synthetic oligonucleotide
caagauucaucacaagcca

SEQ ID NO: 1890963 - RNA, 19 nt, Artificial Sequence
  Description of Artificial Sequence: Synthetic oligonucleotide
gaaggaggcgcccaugaca

SEQ ID NO: 1890964 - RNA, 19 nt, Artificial Sequence
  Description of Artificial Sequence: Synthetic oligonucleotide
aauggaugccaugcugcuc

SEQ ID NO: 1890965 - RNA, 19 nt, Artificial Sequence
  Description of Artificial Sequence: Synthetic oligonucleotide
uuuaguauuucugcuccaa

SEQ ID NO: 1890966 - RNA, 19 nt, Artificial Sequence
  Description of Artificial Sequence: Synthetic oligonucleotide
cuuucggaucccaucggag

SEQ ID NO: 1890967 - RNA, 19 nt, Artificial Sequence
  Description of Artificial Sequence: Synthetic oligonucleotide
auccucuggcguuuuacag

SEQ ID NO: 1890968 - RNA, 19 nt, Artificial Sequence
  Description of Artificial Sequence: Synthetic oligonucleotide
aggaucaaggauggguugg

SEQ ID NO: 1890969 - RNA, 19 nt, Artificial Sequence
  Description of Artificial Sequence: Synthetic oligonucleotide
auucaucccucuccaauca

SEQ ID NO: 1890970 - RNA, 19 nt, Artificial Sequence
  Description of Artificial Sequence: Synthetic oligonucleotide
ucccucuccaaucacuaaa

SEQ ID NO: 1890971 - RNA, 19 nt, Artificial Sequence
  Description of Artificial Sequence: Synthetic oligonucleotide
ucauguugcaauggaugcc

SEQ ID NO: 1890972 - RNA, 19 nt, Artificial Sequence
  Description of Artificial Sequence: Synthetic oligonucleotide
ggaaaucgcagccugccag

SEQ ID NO: 1890973 - RNA, 19 nt, Artificial Sequence
  Description of Artificial Sequence: Synthetic oligonucleotide
ugaggaaaucgcagccugc

SEQ ID NO: 1890974 - RNA, 19 nt, Artificial Sequence
  Description of Artificial Sequence: Synthetic oligonucleotide
agcagcgucauguugcaau

SEQ ID NO: 1890975 - RNA, 19 nt, Artificial Sequence
  Description of Artificial Sequence: Synthetic oligonucleotide
cacaugccagucaaggaug

SEQ ID NO: 1890976 - RNA, 19 nt, Artificial Sequence
  Description of Artificial Sequence: Synthetic oligonucleotide
ucuuguggcccacccagcu

SEQ ID NO: 1890977 - RNA, 19 nt, Artificial Sequence
  Description of Artificial Sequence: Synthetic oligonucleotide
ggagagaugagcgucacac

SEQ ID NO: 1890978 - RNA, 19 nt, Artificial Sequence
  Description of Artificial Sequence: Synthetic oligonucleotide
gaagucacccgugucggcc

SEQ ID NO: 1890979 - RNA, 19 nt, Artificial Sequence
  Description of Artificial Sequence: Synthetic oligonucleotide
ggcuuguacucaucaaugg

SEQ ID NO: 1890980 - RNA, 19 nt, Artificial Sequence
  Description of Artificial Sequence: Synthetic oligonucleotide
uaaagcucaaugaggcguu

SEQ ID NO: 1890981 - RNA, 19 nt, Artificial Sequence
  Description of Artificial Sequence: Synthetic oligonucleotide
uugaucucaccaguguuac

SEQ ID NO: 1890982 - RNA, 19 nt, Artificial Sequence
  Description of Artificial Sequence: Synthetic oligonucleotide
cuuugauggaaagcacagg

SEQ ID NO: 1890983 - RNA, 19 nt, Artificial Sequence
  Description of Artificial Sequence: Synthetic oligonucleotide
gaggaaaucgcagccugcc

SEQ ID NO: 1890984 - RNA, 19 nt, Artificial Sequence
  Description of Artificial Sequence: Synthetic oligonucleotide
ucguccagauguaucuucu

SEQ ID NO: 1890985 - RNA, 19 nt, Artificial Sequence
  Description of Artificial Sequence: Synthetic oligonucleotide
ggaugcgccccacaaaggg

SEQ ID NO: 1890986 - RNA, 19 nt, Artificial Sequence
  Description of Artificial Sequence: Synthetic oligonucleotide
caacuugguguuauccuug

SEQ ID NO: 1890987 - RNA, 19 nt, Artificial Sequence
  Description of Artificial Sequence: Synthetic oligonucleotide
aaccuaugauucaucccuc

SEQ ID NO: 1890988 - RNA, 19 nt, Artificial Sequence
  Description of Artificial Sequence: Synthetic oligonucleotide
ucgggcuaccauugcaucc

SEQ ID NO: 1890989 - RNA, 19 nt, Artificial Sequence
  Description of Artificial Sequence: Synthetic oligonucleotide
ugcaauuaggagccagcuc

SEQ ID NO: 1890990 - RNA, 19 nt, Artificial Sequence
  Description of Artificial Sequence: Synthetic oligonucleotide
uguugcaauggaugccaug

SEQ ID NO: 1890991 - RNA, 19 nt, Artificial Sequence
  Description of Artificial Sequence: Synthetic oligonucleotide
aaugaggcguuuggcucgg

SEQ ID NO: 1890992 - RNA, 19 nt, Artificial Sequence
  Description of Artificial Sequence: Synthetic oligonucleotide
uugaauuccuucccagguu

SEQ ID NO: 1890993 - RNA, 19 nt, Artificial Sequence
  Description of Artificial Sequence: Synthetic oligonucleotide
cauugugcagccaacggaa

SEQ ID NO: 1890994 - RNA, 19 nt, Artificial Sequence
  Description of Artificial Sequence: Synthetic oligonucleotide
acaagccaugugcaauuag

SEQ ID NO: 1890995 - RNA, 19 nt, Artificial Sequence
  Description of Artificial Sequence: Synthetic oligonucleotide
aucgcagccugccagugcu

SEQ ID NO: 1890996 - RNA, 19 nt, Artificial Sequence
  Description of Artificial Sequence: Synthetic oligonucleotide
ugccaacuugguguuaucc

SEQ ID NO: 1890997 - RNA, 19 nt, Artificial Sequence
  Description of Artificial Sequence: Synthetic oligonucleotide
ucggccaccacggugguga

SEQ ID NO: 1890998 - RNA, 19 nt, Artificial Sequence
  Description of Artificial Sequence: Synthetic oligonucleotide
accauugcauccuuaucaa

SEQ ID NO: 1890999 - RNA, 19 nt, Artificial Sequence
  Description of Artificial Sequence: Synthetic oligonucleotide
gaggacaacuugaugagaa

SEQ ID NO: 1891000 - RNA, 19 nt, Artificial Sequence
  Description of Artificial Sequence: Synthetic oligonucleotide
agcgucauguugcaaugga

SEQ ID NO: 1891001 - RNA, 19 nt, Artificial Sequence
  Description of Artificial Sequence: Synthetic oligonucleotide
gcuuguacucaucaauggc

SEQ ID NO: 1891002 - RNA, 19 nt, Artificial Sequence
  Description of Artificial Sequence: Synthetic oligonucleotide
acaugccagucaaggaugc

SEQ ID NO: 1891003 - RNA, 19 nt, Artificial Sequence
  Description of Artificial Sequence: Synthetic oligonucleotide
gcuugaauuccuucccagg

SEQ ID NO: 1891004 - RNA, 19 nt, Artificial Sequence
  Description of Artificial Sequence: Synthetic oligonucleotide
ugaucucaccaguguuacg

SEQ ID NO: 1891005 - RNA, 19 nt, Artificial Sequence
  Description of Artificial Sequence: Synthetic oligonucleotide
gugucggccaccacggugg

SEQ ID NO: 1891006 - RNA, 19 nt, Artificial Sequence
  Description of Artificial Sequence: Synthetic oligonucleotide
aaggaggcgcccaugacaa

SEQ ID NO: 1891007 - RNA, 19 nt, Artificial Sequence
  Description of Artificial Sequence: Synthetic oligonucleotide
acuuucggaucccaucgga

SEQ ID NO: 1891008 - RNA, 19 nt, Artificial Sequence
  Description of Artificial Sequence: Synthetic oligonucleotide
uuugguccucauugugcag

SEQ ID NO: 1891009 - RNA, 19 nt, Artificial Sequence
  Description of Artificial Sequence: Synthetic oligonucleotide
ucagcgcugaacauucguu

SEQ ID NO: 1891010 - RNA, 19 nt, Artificial Sequence
  Description of Artificial Sequence: Synthetic oligonucleotide
cauccguucuaacuuuaug

SEQ ID NO: 1891011 - RNA, 19 nt, Artificial Sequence
  Description of Artificial Sequence: Synthetic oligonucleotide
cuuaucaaaggaaagccuu

SEQ ID NO: 1891012 - RNA, 19 nt, Artificial Sequence
  Description of Artificial Sequence: Synthetic oligonucleotide
guggugaacugcuugagcu

SEQ ID NO: 1891013 - RNA, 19 nt, Artificial Sequence
  Description of Artificial Sequence: Synthetic oligonucleotide
ucacaagccaugugcaauu

SEQ ID NO: 1891014 - RNA, 19 nt, Artificial Sequence
  Description of Artificial Sequence: Synthetic oligonucleotide
uggacacacggccuggaau

SEQ ID NO: 1891015 - RNA, 19 nt, Artificial Sequence
  Description of Artificial Sequence: Synthetic oligonucleotide
aagcgacugcuuuaaugaa

SEQ ID NO: 1891016 - RNA, 19 nt, Artificial Sequence
  Description of Artificial Sequence: Synthetic oligonucleotide
cagauguaucuucuccaag

SEQ ID NO: 1891017 - RNA, 19 nt, Artificial Sequence
  Description of Artificial Sequence: Synthetic oligonucleotide
aagauucaucacaagccau

SEQ ID NO: 1891018 - RNA, 19 nt, Artificial Sequence
  Description of Artificial Sequence: Synthetic oligonucleotide
agauuuuggugacacucuu

SEQ ID NO: 1891019 - RNA, 19 nt, Artificial Sequence
  Description of Artificial Sequence: Synthetic oligonucleotide
uggugacacucuuuacccc

SEQ ID NO: 1891020 - RNA, 19 nt, Artificial Sequence
  Description of Artificial Sequence: Synthetic oligonucleotide
ugaggcguuuggcucgggc

SEQ ID NO: 1891021 - RNA, 19 nt, Artificial Sequence
  Description of Artificial Sequence: Synthetic oligonucleotide
cauucguuccgugagcauc

SEQ ID NO: 1891022 - RNA, 19 nt, Artificial Sequence
  Description of Artificial Sequence: Synthetic oligonucleotide
agccuccuacuuuccauuc

SEQ ID NO: 1891023 - RNA, 19 nt, Artificial Sequence
  Description of Artificial Sequence: Synthetic oligonucleotide
uccugggguucauaggacu

SEQ ID NO: 1891024 - RNA, 19 nt, Artificial Sequence
  Description of Artificial Sequence: Synthetic oligonucleotide
uacuuuccauucucagcgc

SEQ ID NO: 1891025 - RNA, 19 nt, Artificial Sequence
  Description of Artificial Sequence: Synthetic oligonucleotide
aagucacccgugucggcca

SEQ ID NO: 1891026 - RNA, 19 nt, Artificial Sequence
  Description of Artificial Sequence: Synthetic oligonucleotide
gcugaucccagcuucuuug

SEQ ID NO: 1891027 - RNA, 19 nt, Artificial Sequence
  Description of Artificial Sequence: Synthetic oligonucleotide
guaaagcucaaugaggcgu

SEQ ID NO: 1891028 - RNA, 19 nt, Artificial Sequence
  Description of Artificial Sequence: Synthetic oligonucleotide
cuucucguccagauguauc

SEQ ID NO: 1891029 - RNA, 19 nt, Artificial Sequence
  Description of Artificial Sequence: Synthetic oligonucleotide
cauccuggggcuuguacuc

SEQ ID NO: 1891030 - RNA, 19 nt, Artificial Sequence
  Description of Artificial Sequence: Synthetic oligonucleotide
cugggcgaaggagaaaagc

SEQ ID NO: 1891031 - RNA, 19 nt, Artificial Sequence
  Description of Artificial Sequence: Synthetic oligonucleotide
ggguucauaggacuucuug

SEQ ID NO: 1891032 - RNA, 19 nt, Artificial Sequence
  Description of Artificial Sequence: Synthetic oligonucleotide
uugcaauggaugccaugcu

SEQ ID NO: 1891033 - RNA, 19 nt, Artificial Sequence
  Description of Artificial Sequence: Synthetic oligonucleotide
aggaaaagcgacugcuuua

SEQ ID NO: 1891034 - RNA, 19 nt, Artificial Sequence
  Description of Artificial Sequence: Synthetic oligonucleotide
uuccgugagcauccguucu

SEQ ID NO: 1891035 - RNA, 19 nt, Artificial Sequence
  Description of Artificial Sequence: Synthetic oligonucleotide
gcuuugauggaaagcacag

SEQ ID NO: 1891036 - RNA, 19 nt, Artificial Sequence
  Description of Artificial Sequence: Synthetic oligonucleotide
ggagccagcucaaaggcag

SEQ ID NO: 1891037 - RNA, 19 nt, Artificial Sequence
  Description of Artificial Sequence: Synthetic oligonucleotide
aaaucgcagccugccagug

SEQ ID NO: 1891038 - RNA, 19 nt, Artificial Sequence
  Description of Artificial Sequence: Synthetic oligonucleotide
ggagagcuucuccacagcc

SEQ ID NO: 1891039 - RNA, 19 nt, Artificial Sequence
  Description of Artificial Sequence: Synthetic oligonucleotide
accuaugauucaucccucu

SEQ ID NO: 1891040 - RNA, 19 nt, Artificial Sequence
  Description of Artificial Sequence: Synthetic oligonucleotide
uauccuugagcagcucccc

SEQ ID NO: 1891041 - RNA, 19 nt, Artificial Sequence
  Description of Artificial Sequence: Synthetic oligonucleotide
uucaucccucuccaaucac

SEQ ID NO: 1891042 - RNA, 19 nt, Artificial Sequence
  Description of Artificial Sequence: Synthetic oligonucleotide
ucucagcgcugaacauucg

SEQ ID NO: 1891043 - RNA, 19 nt, Artificial Sequence
  Description of Artificial Sequence: Synthetic oligonucleotide
aucacaagccaugugcaau

SEQ ID NO: 1891044 - RNA, 19 nt, Artificial Sequence
  Description of Artificial Sequence: Synthetic oligonucleotide
augcaagauucaucacaag

SEQ ID NO: 1891045 - RNA, 19 nt, Artificial Sequence
  Description of Artificial Sequence: Synthetic oligonucleotide
aguuuaucaauagcauuuu

SEQ ID NO: 1891046 - RNA, 19 nt, Artificial Sequence
  Description of Artificial Sequence: Synthetic oligonucleotide
uccucauugugcagccaac

SEQ ID NO: 1891047 - RNA, 19 nt, Artificial Sequence
  Description of Artificial Sequence: Synthetic oligonucleotide
ugaggacaacuugaugaga

SEQ ID NO: 1891048 - RNA, 19 nt, Artificial Sequence
  Description of Artificial Sequence: Synthetic oligonucleotide
caggaucaaggauggguug

SEQ ID NO: 1891049 - RNA, 19 nt, Artificial Sequence
  Description of Artificial Sequence: Synthetic oligonucleotide
aggauggguuggugguggc

SEQ ID NO: 1891050 - RNA, 19 nt, Artificial Sequence
  Description of Artificial Sequence: Synthetic oligonucleotide
cacgguggugaacugcuug

SEQ ID NO: 1891051 - RNA, 19 nt, Artificial Sequence
  Description of Artificial Sequence: Synthetic oligonucleotide
ggugacacucuuuacccca

SEQ ID NO: 1891052 - RNA, 19 nt, Artificial Sequence
  Description of Artificial Sequence: Synthetic oligonucleotide
auggaaagcacaggugcca

SEQ ID NO: 1891053 - RNA, 19 nt, Artificial Sequence
  Description of Artificial Sequence: Synthetic oligonucleotide
gcgaaggagaaaagcagcg

SEQ ID NO: 1891054 - RNA, 19 nt, Artificial Sequence
  Description of Artificial Sequence: Synthetic oligonucleotide
gcuugggugagauggugag

SEQ ID NO: 1891055 - RNA, 19 nt, Artificial Sequence
  Description of Artificial Sequence: Synthetic oligonucleotide
cuuuaccccaggguccucc

SEQ ID NO: 1891056 - RNA, 19 nt, Artificial Sequence
  Description of Artificial Sequence: Synthetic oligonucleotide
ggacacacggccuggaauc

SEQ ID NO: 1891057 - RNA, 19 nt, Artificial Sequence
  Description of Artificial Sequence: Synthetic oligonucleotide
gcaauggaugccaugcugc

SEQ ID NO: 1891058 - RNA, 19 nt, Artificial Sequence
  Description of Artificial Sequence: Synthetic oligonucleotide
uuauggcaucagcagcaaa

SEQ ID NO: 1891059 - RNA, 19 nt, Artificial Sequence
  Description of Artificial Sequence: Synthetic oligonucleotide
ccaacggaaggccuucucg

SEQ ID NO: 1891060 - RNA, 19 nt, Artificial Sequence
  Description of Artificial Sequence: Synthetic oligonucleotide
cuaccauugcauccuuauc

SEQ ID NO: 1891061 - RNA, 19 nt, Artificial Sequence
  Description of Artificial Sequence: Synthetic oligonucleotide
agcggacuccauccucugg

SEQ ID NO: 1891062 - RNA, 19 nt, Artificial Sequence
  Description of Artificial Sequence: Synthetic oligonucleotide
ucccagguugaggacaacu

SEQ ID NO: 1891063 - RNA, 19 nt, Artificial Sequence
  Description of Artificial Sequence: Synthetic oligonucleotide
ugaagucacccgugucggc

SEQ ID NO: 1891064 - RNA, 19 nt, Artificial Sequence
  Description of Artificial Sequence: Synthetic oligonucleotide
cuugggugagauggugagg

SEQ ID NO: 1891065 - RNA, 19 nt, Artificial Sequence
  Description of Artificial Sequence: Synthetic oligonucleotide
uucuugccauaggcaaugg

SEQ ID NO: 1891066 - RNA, 19 nt, Artificial Sequence
  Description of Artificial Sequence: Synthetic oligonucleotide
gugagcauccguucuaacu

SEQ ID NO: 1891067 - RNA, 19 nt, Artificial Sequence
  Description of Artificial Sequence: Synthetic oligonucleotide
uccucuuguggcccaccca

SEQ ID NO: 1891068 - RNA, 19 nt, Artificial Sequence
  Description of Artificial Sequence: Synthetic oligonucleotide
aggacaacuugaugagaau

SEQ ID NO: 1891069 - RNA, 19 nt, Artificial Sequence
  Description of Artificial Sequence: Synthetic oligonucleotide
aggaaaucgcagccugcca

SEQ ID NO: 1891070 - RNA, 19 nt, Artificial Sequence
  Description of Artificial Sequence: Synthetic oligonucleotide
ggcgaaggagaaaagcagc

SEQ ID NO: 1891071 - RNA, 19 nt, Artificial Sequence
  Description of Artificial Sequence: Synthetic oligonucleotide
gaucaaggauggguuggug

SEQ ID NO: 1891072 - RNA, 19 nt, Artificial Sequence
  Description of Artificial Sequence: Synthetic oligonucleotide
ccuugcauccacuucugug

SEQ ID NO: 1891073 - RNA, 19 nt, Artificial Sequence
  Description of Artificial Sequence: Synthetic oligonucleotide
cacaggugccaacuuggug

SEQ ID NO: 1891074 - RNA, 19 nt, Artificial Sequence
  Description of Artificial Sequence: Synthetic oligonucleotide
acggccuggaaucuucuuu

SEQ ID NO: 1891075 - RNA, 19 nt, Artificial Sequence
  Description of Artificial Sequence: Synthetic oligonucleotide
aauuaggagccagcucaaa

SEQ ID NO: 1891076 - RNA, 19 nt, Artificial Sequence
  Description of Artificial Sequence: Synthetic oligonucleotide
gguugaggacaacuugaug

SEQ ID NO: 1891077 - RNA, 19 nt, Artificial Sequence
  Description of Artificial Sequence: Synthetic oligonucleotide
cuuuaguauuucugcucca

SEQ ID NO: 1891078 - RNA, 19 nt, Artificial Sequence
  Description of Artificial Sequence: Synthetic oligonucleotide
augcgccccacaaagggag

SEQ ID NO: 1891079 - RNA, 19 nt, Artificial Sequence
  Description of Artificial Sequence: Synthetic oligonucleotide
uuuaccccaggguccuccu

SEQ ID NO: 1891080 - RNA, 19 nt, Artificial Sequence
  Description of Artificial Sequence: Synthetic oligonucleotide
uccgugagcauccguucua

SEQ ID NO: 1891081 - RNA, 19 nt, Artificial Sequence
  Description of Artificial Sequence: Synthetic oligonucleotide
gccgcuuugauggaaagca

SEQ ID NO: 1891082 - RNA, 19 nt, Artificial Sequence
  Description of Artificial Sequence: Synthetic oligonucleotide
guguuacggaaggaggcgc

SEQ ID NO: 1891083 - RNA, 19 nt, Artificial Sequence
  Description of Artificial Sequence: Synthetic oligonucleotide
auucucagcgcugaacauu

SEQ ID NO: 1891084 - RNA, 19 nt, Artificial Sequence
  Description of Artificial Sequence: Synthetic oligonucleotide
acauaaaaucagaaaccua

SEQ ID NO: 1891085 - RNA, 19 nt, Artificial Sequence
  Description of Artificial Sequence: Synthetic oligonucleotide
agggagagaugagcgucac

SEQ ID NO: 1891086 - RNA, 19 nt, Artificial Sequence
  Description of Artificial Sequence: Synthetic oligonucleotide
gaaaucgcagccugccagu

SEQ ID NO: 1891087 - RNA, 19 nt, Artificial Sequence
  Description of Artificial Sequence: Synthetic oligonucleotide
ugaucccagcuucuuugua

SEQ ID NO: 1891088 - RNA, 19 nt, Artificial Sequence
  Description of Artificial Sequence: Synthetic oligonucleotide
cauccucuggcguuuuaca

SEQ ID NO: 1891089 - RNA, 19 nt, Artificial Sequence
  Description of Artificial Sequence: Synthetic oligonucleotide
agagcggacuccauccucu

SEQ ID NO: 1891090 - RNA, 19 nt, Artificial Sequence
  Description of Artificial Sequence: Synthetic oligonucleotide
uggaaagcacaggugccaa

SEQ ID NO: 1891091 - RNA, 19 nt, Artificial Sequence
  Description of Artificial Sequence: Synthetic oligonucleotide
ugaugagaauucuguccuu

SEQ ID NO: 1891092 - RNA, 19 nt, Artificial Sequence
  Description of Artificial Sequence: Synthetic oligonucleotide
ugggccgcuuugauggaaa

SEQ ID NO: 1891093 - RNA, 19 nt, Artificial Sequence
  Description of Artificial Sequence: Synthetic oligonucleotide
uuacggaaggaggcgccca

SEQ ID NO: 1891094 - RNA, 19 nt, Artificial Sequence
  Description of Artificial Sequence: Synthetic oligonucleotide
gcggacuccauccucuggc

SEQ ID NO: 1891095 - RNA, 19 nt, Artificial Sequence
  Description of Artificial Sequence: Synthetic oligonucleotide
guccucauugugcagccaa

SEQ ID NO: 1891096 - RNA, 19 nt, Artificial Sequence
  Description of Artificial Sequence: Synthetic oligonucleotide
guuacggaaggaggcgccc

SEQ ID NO: 1891097 - RNA, 19 nt, Artificial Sequence
  Description of Artificial Sequence: Synthetic oligonucleotide
agucacccgugucggccac

SEQ ID NO: 1891098 - RNA, 19 nt, Artificial Sequence
  Description of Artificial Sequence: Synthetic oligonucleotide
cucuuguggcccacccagc

SEQ ID NO: 1891099 - RNA, 19 nt, Artificial Sequence
  Description of Artificial Sequence: Synthetic oligonucleotide
cucgggcuaccauugcauc

SEQ ID NO: 1891100 - RNA, 19 nt, Artificial Sequence
  Description of Artificial Sequence: Synthetic oligonucleotide
uuaccccaggguccuccug

SEQ ID NO: 1891101 - RNA, 19 nt, Artificial Sequence
  Description of Artificial Sequence: Synthetic oligonucleotide
ugcauccacuucuguggac

SEQ ID NO: 1891102 - RNA, 19 nt, Artificial Sequence
  Description of Artificial Sequence: Synthetic oligonucleotide
gaugcgccccacaaaggga

SEQ ID NO: 1891103 - RNA, 19 nt, Artificial Sequence
  Description of Artificial Sequence: Synthetic oligonucleotide
gcgcugaacauucguuccg

SEQ ID NO: 1891104 - RNA, 19 nt, Artificial Sequence
  Description of Artificial Sequence: Synthetic oligonucleotide
cuccugggguucauaggac

SEQ ID NO: 1891105 - RNA, 19 nt, Artificial Sequence
  Description of Artificial Sequence: Synthetic oligonucleotide
gcagcgucauguugcaaug

SEQ ID NO: 1891106 - RNA, 19 nt, Artificial Sequence
  Description of Artificial Sequence: Synthetic oligonucleotide
uucguuccgugagcauccg

SEQ ID NO: 1891107 - RNA, 19 nt, Artificial Sequence
  Description of Artificial Sequence: Synthetic oligonucleotide
gaggcguuuggcucgggcu

SEQ ID NO: 1891108 - RNA, 19 nt, Artificial Sequence
  Description of Artificial Sequence: Synthetic oligonucleotide
agcgacugcuuuaaugaau

SEQ ID NO: 1891109 - RNA, 19 nt, Artificial Sequence
  Description of Artificial Sequence: Synthetic oligonucleotide
caugccagucaaggaugcg

SEQ ID NO: 1891110 - RNA, 19 nt, Artificial Sequence
  Description of Artificial Sequence: Synthetic oligonucleotide
aggcguuuggcucgggcua

SEQ ID NO: 1891111 - RNA, 19 nt, Artificial Sequence
  Description of Artificial Sequence: Synthetic oligonucleotide
ggaaaagcgacugcuuuaa

SEQ ID NO: 1891112 - RNA, 19 nt, Artificial Sequence
  Description of Artificial Sequence: Synthetic oligonucleotide
agucaaggaugcgccccac

SEQ ID NO: 1891113 - RNA, 19 nt, Artificial Sequence
  Description of Artificial Sequence: Synthetic oligonucleotide
agcugguccagagcggacu

SEQ ID NO: 1891114 - RNA, 19 nt, Artificial Sequence
  Description of Artificial Sequence: Synthetic oligonucleotide
uggucugggccgcuuugau

SEQ ID NO: 1891115 - RNA, 19 nt, Artificial Sequence
  Description of Artificial Sequence: Synthetic oligonucleotide
cagcgucauguugcaaugg

SEQ ID NO: 1891116 - RNA, 19 nt, Artificial Sequence
  Description of Artificial Sequence: Synthetic oligonucleotide
augauucaucccucuccaa

SEQ ID NO: 1891117 - RNA, 19 nt, Artificial Sequence
  Description of Artificial Sequence: Synthetic oligonucleotide
ggcguuuuacaggggaccc

SEQ ID NO: 1891118 - RNA, 19 nt, Artificial Sequence
  Description of Artificial Sequence: Synthetic oligonucleotide
caucccucuccaaucacua

SEQ ID NO: 1891119 - RNA, 19 nt, Artificial Sequence
  Description of Artificial Sequence: Synthetic oligonucleotide
agacaaaauuucacauaaa

SEQ ID NO: 1891120 - RNA, 19 nt, Artificial Sequence
  Description of Artificial Sequence: Synthetic oligonucleotide
aggaugcgccccacaaagg

SEQ ID NO: 1891121 - RNA, 19 nt, Artificial Sequence
  Description of Artificial Sequence: Synthetic oligonucleotide
gaaagccuugcauccacuu

SEQ ID NO: 1891122 - RNA, 19 nt, Artificial Sequence
  Description of Artificial Sequence: Synthetic oligonucleotide
ggccuucucguccagaugu

SEQ ID NO: 1891123 - RNA, 19 nt, Artificial Sequence
  Description of Artificial Sequence: Synthetic oligonucleotide
uguuugccacaugccaguc

SEQ ID NO: 1891124 - RNA, 19 nt, Artificial Sequence
  Description of Artificial Sequence: Synthetic oligonucleotide
ugcaggucugggguccagc

SEQ ID NO: 1891125 - RNA, 19 nt, Artificial Sequence
  Description of Artificial Sequence: Synthetic oligonucleotide
gagcggacuccauccucug

SEQ ID NO: 1891126 - RNA, 19 nt, Artificial Sequence
  Description of Artificial Sequence: Synthetic oligonucleotide
acccgccucagcacaggcc

SEQ ID NO: 1891127 - RNA, 19 nt, Artificial Sequence
  Description of Artificial Sequence: Synthetic oligonucleotide
caucacaagccaugugcaa

SEQ ID NO: 1891128 - RNA, 19 nt, Artificial Sequence
  Description of Artificial Sequence: Synthetic oligonucleotide
ccucauugugcagccaacg

SEQ ID NO: 1891129 - RNA, 19 nt, Artificial Sequence
  Description of Artificial Sequence: Synthetic oligonucleotide
acauucguuccgugagcau

SEQ ID NO: 1891130 - RNA, 19 nt, Artificial Sequence
  Description of Artificial Sequence: Synthetic oligonucleotide
cauaggacuucuugucugu

SEQ ID NO: 1891131 - RNA, 19 nt, Artificial Sequence
  Description of Artificial Sequence: Synthetic oligonucleotide
cccgugucggccaccacgg

SEQ ID NO: 1891132 - RNA, 19 nt, Artificial Sequence
  Description of Artificial Sequence: Synthetic oligonucleotide
aaagcucaaugaggcguuu

SEQ ID NO: 1891133 - RNA, 19 nt, Artificial Sequence
  Description of Artificial Sequence: Synthetic oligonucleotide
cacacccgccucagcacag

SEQ ID NO: 1891134 - RNA, 19 nt, Artificial Sequence
  Description of Artificial Sequence: Synthetic oligonucleotide
cugggguucauaggacuuc

SEQ ID NO: 1891135 - RNA, 19 nt, Artificial Sequence
  Description of Artificial Sequence: Synthetic oligonucleotide
cagagcggacuccauccuc

SEQ ID NO: 1891136 - RNA, 19 nt, Artificial Sequence
  Description of Artificial Sequence: Synthetic oligonucleotide
caauggcauugaagucacc

SEQ ID NO: 1891137 - RNA, 19 nt, Artificial Sequence
  Description of Artificial Sequence: Synthetic oligonucleotide
caccacgguggugaacugc

SEQ ID NO: 1891138 - RNA, 19 nt, Artificial Sequence
  Description of Artificial Sequence: Synthetic oligonucleotide
caaagggagagaugagcgu

SEQ ID NO: 1891139 - RNA, 19 nt, Artificial Sequence
  Description of Artificial Sequence: Synthetic oligonucleotide
cucuggcguuuuacagggg

SEQ ID NO: 1891140 - RNA, 19 nt, Artificial Sequence
  Description of Artificial Sequence: Synthetic oligonucleotide
ugcgccccacaaagggaga

SEQ ID NO: 1891141 - RNA, 19 nt, Artificial Sequence
  Description of Artificial Sequence: Synthetic oligonucleotide
caacggaaggccuucucgu

SEQ ID NO: 1891142 - RNA, 19 nt, Artificial Sequence
  Description of Artificial Sequence: Synthetic oligonucleotide
cuuugaucucaccaguguu

SEQ ID NO: 1891143 - RNA, 19 nt, Artificial Sequence
  Description of Artificial Sequence: Synthetic oligonucleotide
ucugggccgcuuugaugga

SEQ ID NO: 1891144 - RNA, 19 nt, Artificial Sequence
  Description of Artificial Sequence: Synthetic oligonucleotide
cuugguaggcaggcaucug

SEQ ID NO: 1891145 - RNA, 19 nt, Artificial Sequence
  Description of Artificial Sequence: Synthetic oligonucleotide
ccuccuacuuuccauucuc

SEQ ID NO: 1891146 - RNA, 19 nt, Artificial Sequence
  Description of Artificial Sequence: Synthetic oligonucleotide
aucccucuccaaucacuaa

SEQ ID NO: 1891147 - RNA, 19 nt, Artificial Sequence
  Description of Artificial Sequence: Synthetic oligonucleotide
gagcgucacacccgccuca

SEQ ID NO: 1891148 - RNA, 19 nt, Artificial Sequence
  Description of Artificial Sequence: Synthetic oligonucleotide
ugggugagauggugaggaa

SEQ ID NO: 1891149 - RNA, 19 nt, Artificial Sequence
  Description of Artificial Sequence: Synthetic oligonucleotide
ggccuggaaucuucuuuag

SEQ ID NO: 1891150 - RNA, 19 nt, Artificial Sequence
  Description of Artificial Sequence: Synthetic oligonucleotide
ucguuccgugagcauccgu

SEQ ID NO: 1891151 - RNA, 19 nt, Artificial Sequence
  Description of Artificial Sequence: Synthetic oligonucleotide
ccuaugauucaucccucuc

SEQ ID NO: 1891152 - RNA, 19 nt, Artificial Sequence
  Description of Artificial Sequence: Synthetic oligonucleotide
agcgucacacccgccucag

SEQ ID NO: 1891153 - RNA, 19 nt, Artificial Sequence
  Description of Artificial Sequence: Synthetic oligonucleotide
cagcaaacuuucggauccc

SEQ ID NO: 1891154 - RNA, 19 nt, Artificial Sequence
  Description of Artificial Sequence: Synthetic oligonucleotide
gaugagcgucacacccgcc

SEQ ID NO: 1891155 - RNA, 19 nt, Artificial Sequence
  Description of Artificial Sequence: Synthetic oligonucleotide
cuuccaccagcucuuggua

SEQ ID NO: 1891156 - RNA, 19 nt, Artificial Sequence
  Description of Artificial Sequence: Synthetic oligonucleotide
ccguucuaacuuuauggca

SEQ ID NO: 1891157 - RNA, 19 nt, Artificial Sequence
  Description of Artificial Sequence: Synthetic oligonucleotide
ccaucggagagcuucucca

SEQ ID NO: 1891158 - RNA, 19 nt, Artificial Sequence
  Description of Artificial Sequence: Synthetic oligonucleotide
gucaaggaugcgccccaca

SEQ ID NO: 1891159 - RNA, 19 nt, Artificial Sequence
  Description of Artificial Sequence: Synthetic oligonucleotide
caaggaugcgccccacaaa

SEQ ID NO: 1891160 - RNA, 19 nt, Artificial Sequence
  Description of Artificial Sequence: Synthetic oligonucleotide
gcuaccauugcauccuuau

SEQ ID NO: 1891161 - RNA, 19 nt, Artificial Sequence
  Description of Artificial Sequence: Synthetic oligonucleotide
acacccgccucagcacagg

SEQ ID NO: 1891162 - RNA, 19 nt, Artificial Sequence
  Description of Artificial Sequence: Synthetic oligonucleotide
cacccgccucagcacaggc

SEQ ID NO: 1891163 - RNA, 19 nt, Artificial Sequence
  Description of Artificial Sequence: Synthetic oligonucleotide
ugucggccaccacgguggu

SEQ ID NO: 1891164 - RNA, 19 nt, Artificial Sequence
  Description of Artificial Sequence: Synthetic oligonucleotide
gugcaauuaggagccagcu

SEQ ID NO: 1891165 - RNA, 19 nt, Artificial Sequence
  Description of Artificial Sequence: Synthetic oligonucleotide
ggugagauggugaggaaau

SEQ ID NO: 1891166 - RNA, 19 nt, Artificial Sequence
  Description of Artificial Sequence: Synthetic oligonucleotide
agccuugcauccacuucug

SEQ ID NO: 1891167 - RNA, 19 nt, Artificial Sequence
  Description of Artificial Sequence: Synthetic oligonucleotide
gccacaugccagucaagga

SEQ ID NO: 1891168 - RNA, 19 nt, Artificial Sequence
  Description of Artificial Sequence: Synthetic oligonucleotide
ccuuaucaaaggaaagccu

SEQ ID NO: 1891169 - RNA, 19 nt, Artificial Sequence
  Description of Artificial Sequence: Synthetic oligonucleotide
gagcauccguucuaacuuu

SEQ ID NO: 1891170 - RNA, 19 nt, Artificial Sequence
  Description of Artificial Sequence: Synthetic oligonucleotide
gaaaagcgacugcuuuaau

SEQ ID NO: 1891171 - RNA, 19 nt, Artificial Sequence
  Description of Artificial Sequence: Synthetic oligonucleotide
cucagcgcugaacauucgu

SEQ ID NO: 1891172 - RNA, 19 nt, Artificial Sequence
  Description of Artificial Sequence: Synthetic oligonucleotide
cguucuaacuuuauggcau

SEQ ID NO: 1891173 - RNA, 19 nt, Artificial Sequence
  Description of Artificial Sequence: Synthetic oligonucleotide
cgcuuugauggaaagcaca

SEQ ID NO: 1891174 - RNA, 19 nt, Artificial Sequence
  Description of Artificial Sequence: Synthetic oligonucleotide
gggccgcuuugauggaaag

SEQ ID NO: 1891175 - RNA, 19 nt, Artificial Sequence
  Description of Artificial Sequence: Synthetic oligonucleotide
guuuuacaggggacccaga

SEQ ID NO: 1891176 - RNA, 19 nt, Artificial Sequence
  Description of Artificial Sequence: Synthetic oligonucleotide
gccaggaucaaggaugggu

SEQ ID NO: 1891177 - RNA, 19 nt, Artificial Sequence
  Description of Artificial Sequence: Synthetic oligonucleotide
acggaaggaggcgcccaug

SEQ ID NO: 1891178 - RNA, 19 nt, Artificial Sequence
  Description of Artificial Sequence: Synthetic oligonucleotide
ccgcuuugauggaaagcac

SEQ ID NO: 1891179 - RNA, 19 nt, Artificial Sequence
  Description of Artificial Sequence: Synthetic oligonucleotide
cugaucccagcuucuuugu

SEQ ID NO: 1891180 - RNA, 19 nt, Artificial Sequence
  Description of Artificial Sequence: Synthetic oligonucleotide
ccugggcgaaggagaaaag

SEQ ID NO: 1891181 - RNA, 19 nt, Artificial Sequence
  Description of Artificial Sequence: Synthetic oligonucleotide
gggugagauggugaggaaa

SEQ ID NO: 1891182 - RNA, 19 nt, Artificial Sequence
  Description of Artificial Sequence: Synthetic oligonucleotide
cagccaacggaaggccuuc

SEQ ID NO: 1891183 - RNA, 19 nt, Artificial Sequence
  Description of Artificial Sequence: Synthetic oligonucleotide
agcauccguucuaacuuua

SEQ ID NO: 1891184 - RNA, 19 nt, Artificial Sequence
  Description of Artificial Sequence: Synthetic oligonucleotide
gccugggcgaaggagaaaa

SEQ ID NO: 1891185 - RNA, 19 nt, Artificial Sequence
  Description of Artificial Sequence: Synthetic oligonucleotide
guggacacacggccuggaa

SEQ ID NO: 1891186 - RNA, 19 nt, Artificial Sequence
  Description of Artificial Sequence: Synthetic oligonucleotide
cagccugccagugcuuuga

SEQ ID NO: 1891187 - RNA, 19 nt, Artificial Sequence
  Description of Artificial Sequence: Synthetic oligonucleotide
gacacacggccuggaaucu

SEQ ID NO: 1891188 - RNA, 19 nt, Artificial Sequence
  Description of Artificial Sequence: Synthetic oligonucleotide
ccagugcuuugaucucacc

SEQ ID NO: 1891189 - RNA, 19 nt, Artificial Sequence
  Description of Artificial Sequence: Synthetic oligonucleotide
agccugccagugcuuugau

SEQ ID NO: 1891190 - RNA, 19 nt, Artificial Sequence
  Description of Artificial Sequence: Synthetic oligonucleotide
cccucuccaaucacuaaaa

SEQ ID NO: 1891191 - RNA, 19 nt, Artificial Sequence
  Description of Artificial Sequence: Synthetic oligonucleotide
acacggccuggaaucuucu

SEQ ID NO: 1891192 - RNA, 19 nt, Artificial Sequence
  Description of Artificial Sequence: Synthetic oligonucleotide
auguugcaauggaugccau

SEQ ID NO: 1891193 - RNA, 19 nt, Artificial Sequence
  Description of Artificial Sequence: Synthetic oligonucleotide
gcucuugguaggcaggcau

SEQ ID NO: 1891194 - RNA, 19 nt, Artificial Sequence
  Description of Artificial Sequence: Synthetic oligonucleotide
ccacaugccagucaaggau

SEQ ID NO: 1891195 - RNA, 19 nt, Artificial Sequence
  Description of Artificial Sequence: Synthetic oligonucleotide
cgucacacccgccucagca

SEQ ID NO: 1891196 - RNA, 19 nt, Artificial Sequence
  Description of Artificial Sequence: Synthetic oligonucleotide
ucuuuaccccaggguccuc

SEQ ID NO: 1891197 - RNA, 19 nt, Artificial Sequence
  Description of Artificial Sequence: Synthetic oligonucleotide
ggggacccagacauggcga

SEQ ID NO: 1891198 - RNA, 19 nt, Artificial Sequence
  Description of Artificial Sequence: Synthetic oligonucleotide
agccaacggaaggccuucu

SEQ ID NO: 1891199 - RNA, 19 nt, Artificial Sequence
  Description of Artificial Sequence: Synthetic oligonucleotide
guuuggcucgggcuaccau

SEQ ID NO: 1891200 - RNA, 19 nt, Artificial Sequence
  Description of Artificial Sequence: Synthetic oligonucleotide
ggcguuuggcucgggcuac

SEQ ID NO: 1891201 - RNA, 19 nt, Artificial Sequence
  Description of Artificial Sequence: Synthetic oligonucleotide
ccccacaaagggagagaug

SEQ ID NO: 1891202 - RNA, 19 nt, Artificial Sequence
  Description of Artificial Sequence: Synthetic oligonucleotide
gccaacggaaggccuucuc

SEQ ID NO: 1891203 - RNA, 19 nt, Artificial Sequence
  Description of Artificial Sequence: Synthetic oligonucleotide
cacaagccaugugcaauua

SEQ ID NO: 1891204 - RNA, 19 nt, Artificial Sequence
  Description of Artificial Sequence: Synthetic oligonucleotide
gcgacugcuuuaaugaauu

SEQ ID NO: 1891205 - RNA, 19 nt, Artificial Sequence
  Description of Artificial Sequence: Synthetic oligonucleotide
gggagagaugagcgucaca

SEQ ID NO: 1891206 - RNA, 19 nt, Artificial Sequence
  Description of Artificial Sequence: Synthetic oligonucleotide
gcgccccacaaagggagag

SEQ ID NO: 1891207 - RNA, 19 nt, Artificial Sequence
  Description of Artificial Sequence: Synthetic oligonucleotide
augaggcguuuggcucggg

SEQ ID NO: 1891208 - RNA, 19 nt, Artificial Sequence
  Description of Artificial Sequence: Synthetic oligonucleotide
ggauggguuggugguggca

SEQ ID NO: 1891209 - RNA, 19 nt, Artificial Sequence
  Description of Artificial Sequence: Synthetic oligonucleotide
ucacuggucugggccgcuu

SEQ ID NO: 1891210 - RNA, 19 nt, Artificial Sequence
  Description of Artificial Sequence: Synthetic oligonucleotide
caccaguguuacggaagga

SEQ ID NO: 1891211 - RNA, 19 nt, Artificial Sequence
  Description of Artificial Sequence: Synthetic oligonucleotide
ggaucaaggauggguuggu

SEQ ID NO: 1891212 - RNA, 19 nt, Artificial Sequence
  Description of Artificial Sequence: Synthetic oligonucleotide
gccuggaaucuucuuuagu

SEQ ID NO: 1891213 - RNA, 19 nt, Artificial Sequence
  Description of Artificial Sequence: Synthetic oligonucleotide
gugcaggucugggguccag

SEQ ID NO: 1891214 - RNA, 19 nt, Artificial Sequence
  Description of Artificial Sequence: Synthetic oligonucleotide
gcguuuuacaggggaccca

SEQ ID NO: 1891215 - RNA, 19 nt, Artificial Sequence
  Description of Artificial Sequence: Synthetic oligonucleotide
caggugccaacuugguguu

SEQ ID NO: 1891216 - RNA, 19 nt, Artificial Sequence
  Description of Artificial Sequence: Synthetic oligonucleotide
cgugagcauccguucuaac

SEQ ID NO: 1891217 - RNA, 19 nt, Artificial Sequence
  Description of Artificial Sequence: Synthetic oligonucleotide
gccuccuacuuuccauucu

SEQ ID NO: 1891218 - RNA, 19 nt, Artificial Sequence
  Description of Artificial Sequence: Synthetic oligonucleotide
cuuguggcccacccagcuu

SEQ ID NO: 1891219 - RNA, 19 nt, Artificial Sequence
  Description of Artificial Sequence: Synthetic oligonucleotide
cggaaggaggcgcccauga

SEQ ID NO: 1891220 - RNA, 19 nt, Artificial Sequence
  Description of Artificial Sequence: Synthetic oligonucleotide
gcaaacuuucggaucccau

SEQ ID NO: 1891221 - RNA, 19 nt, Artificial Sequence
  Description of Artificial Sequence: Synthetic oligonucleotide
cugggccgcuuugauggaa

SEQ ID NO: 1891222 - RNA, 19 nt, Artificial Sequence
  Description of Artificial Sequence: Synthetic oligonucleotide
ccccaggguccuccugggg

SEQ ID NO: 1891223 - RNA, 19 nt, Artificial Sequence
  Description of Artificial Sequence: Synthetic oligonucleotide
ggguccagccuccuacuuu

SEQ ID NO: 1891224 - RNA, 19 nt, Artificial Sequence
  Description of Artificial Sequence: Synthetic oligonucleotide
ggagcuugggugagauggu

SEQ ID NO: 1891225 - RNA, 19 nt, Artificial Sequence
  Description of Artificial Sequence: Synthetic oligonucleotide
cacccgugucggccaccac

SEQ ID NO: 1891226 - RNA, 19 nt, Artificial Sequence
  Description of Artificial Sequence: Synthetic oligonucleotide
gcgucacacccgccucagc

SEQ ID NO: 1891227 - RNA, 19 nt, Artificial Sequence
  Description of Artificial Sequence: Synthetic oligonucleotide
ccacccagcuucuugccau

SEQ ID NO: 1891228 - RNA, 19 nt, Artificial Sequence
  Description of Artificial Sequence: Synthetic oligonucleotide
ggccacagccugggcgaag

SEQ ID NO: 1891229 - RNA, 19 nt, Artificial Sequence
  Description of Artificial Sequence: Synthetic oligonucleotide
cguuccgugagcauccguu

SEQ ID NO: 1891230 - RNA, 19 nt, Artificial Sequence
  Description of Artificial Sequence: Synthetic oligonucleotide
uggcauccuggggcuugua

SEQ ID NO: 1891231 - RNA, 19 nt, Artificial Sequence
  Description of Artificial Sequence: Synthetic oligonucleotide
ggaugccaugcugcuccuc

SEQ ID NO: 1891232 - RNA, 19 nt, Artificial Sequence
  Description of Artificial Sequence: Synthetic oligonucleotide
gcguuuggcucgggcuacc

SEQ ID NO: 1891233 - RNA, 19 nt, Artificial Sequence
  Description of Artificial Sequence: Synthetic oligonucleotide
ccugggguucauaggacuu

SEQ ID NO: 1891234 - RNA, 19 nt, Artificial Sequence
  Description of Artificial Sequence: Synthetic oligonucleotide
ccgccucagcacaggccac

SEQ ID NO: 1891235 - RNA, 19 nt, Artificial Sequence
  Description of Artificial Sequence: Synthetic oligonucleotide
cacggccuggaaucuucuu

SEQ ID NO: 1891236 - RNA, 19 nt, Artificial Sequence
  Description of Artificial Sequence: Synthetic oligonucleotide
gcagccaacggaaggccuu

SEQ ID NO: 1891237 - RNA, 19 nt, Artificial Sequence
  Description of Artificial Sequence: Synthetic oligonucleotide
gcauccguucuaacuuuau

SEQ ID NO: 1891238 - RNA, 19 nt, Artificial Sequence
  Description of Artificial Sequence: Synthetic oligonucleotide
gccuugcauccacuucugu

SEQ ID NO: 1891239 - RNA, 19 nt, Artificial Sequence
  Description of Artificial Sequence: Synthetic oligonucleotide
ccgugagcauccguucuaa

SEQ ID NO: 1891240 - RNA, 19 nt, Artificial Sequence
  Description of Artificial Sequence: Synthetic oligonucleotide
cgacugcuuuaaugaauua

SEQ ID NO: 1891241 - RNA, 19 nt, Artificial Sequence
  Description of Artificial Sequence: Synthetic oligonucleotide
gccuucucguccagaugua

SEQ ID NO: 1891242 - RNA, 19 nt, Artificial Sequence
  Description of Artificial Sequence: Synthetic oligonucleotide
ccagagcggacuccauccu

SEQ ID NO: 1891243 - RNA, 19 nt, Artificial Sequence
  Description of Artificial Sequence: Synthetic oligonucleotide
ggcgcccaugacaaugguu

SEQ ID NO: 1891244 - RNA, 19 nt, Artificial Sequence
  Description of Artificial Sequence: Synthetic oligonucleotide
gucugggguccagccuccu

SEQ ID NO: 1891245 - RNA, 19 nt, Artificial Sequence
  Description of Artificial Sequence: Synthetic oligonucleotide
cgcugaacauucguuccgu

SEQ ID NO: 1891246 - RNA, 19 nt, Artificial Sequence
  Description of Artificial Sequence: Synthetic oligonucleotide
gggguucauaggacuucuu

SEQ ID NO: 1891247 - RNA, 19 nt, Artificial Sequence
  Description of Artificial Sequence: Synthetic oligonucleotide
ccacgguggugaacugcuu

SEQ ID NO: 1891248 - RNA, 19 nt, Artificial Sequence
  Description of Artificial Sequence: Synthetic oligonucleotide
ggaucccaucggagagcuu

SEQ ID NO: 1891249 - RNA, 19 nt, Artificial Sequence
  Description of Artificial Sequence: Synthetic oligonucleotide
ccgugucggccaccacggu

SEQ ID NO: 1891250 - RNA, 19 nt, Artificial Sequence
  Description of Artificial Sequence: Synthetic oligonucleotide
aaugugaucaaucugaguc

SEQ ID NO: 1891251 - RNA, 19 nt, Artificial Sequence
  Description of Artificial Sequence: Synthetic oligonucleotide
ucugagucaauauagagcg

SEQ ID NO: 1891252 - RNA, 19 nt, Artificial Sequence
  Description of Artificial Sequence: Synthetic oligonucleotide
aguaaaaucagcaaagcgc

SEQ ID NO: 1891253 - RNA, 19 nt, Artificial Sequence
  Description of Artificial Sequence: Synthetic oligonucleotide
auauagagcguucaaaggc

SEQ ID NO: 1891254 - RNA, 19 nt, Artificial Sequence
  Description of Artificial Sequence: Synthetic oligonucleotide
uuugccaagaauuugguag

SEQ ID NO: 1891255 - RNA, 19 nt, Artificial Sequence
  Description of Artificial Sequence: Synthetic oligonucleotide
uuaacaaugcuuuaagugc

SEQ ID NO: 1891256 - RNA, 19 nt, Artificial Sequence
  Description of Artificial Sequence: Synthetic oligonucleotide
aagagaucgauacaacucg

SEQ ID NO: 1891257 - RNA, 19 nt, Artificial Sequence
  Description of Artificial Sequence: Synthetic oligonucleotide
ucaaucugagucaauauag

SEQ ID NO: 1891258 - RNA, 19 nt, Artificial Sequence
  Description of Artificial Sequence: Synthetic oligonucleotide
ugaagauccaccaaugacc

SEQ ID NO: 1891259 - RNA, 19 nt, Artificial Sequence
  Description of Artificial Sequence: Synthetic oligonucleotide
uuuuccagaagcaagcuug

SEQ ID NO: 1891260 - RNA, 19 nt, Artificial Sequence
  Description of Artificial Sequence: Synthetic oligonucleotide
aauuucuggauugcaagcc

SEQ ID NO: 1891261 - RNA, 19 nt, Artificial Sequence
  Description of Artificial Sequence: Synthetic oligonucleotide
gaauuugguagauggagcg

SEQ ID NO: 1891262 - RNA, 19 nt, Artificial Sequence
  Description of Artificial Sequence: Synthetic oligonucleotide
aagcaaucuuucuuugucc

SEQ ID NO: 1891263 - RNA, 19 nt, Artificial Sequence
  Description of Artificial Sequence: Synthetic oligonucleotide
aaaagagaucgauacaacu

SEQ ID NO: 1891264 - RNA, 19 nt, Artificial Sequence
  Description of Artificial Sequence: Synthetic oligonucleotide
aaagagaucgauacaacuc

SEQ ID NO: 1891265 - RNA, 19 nt, Artificial Sequence
  Description of Artificial Sequence: Synthetic oligonucleotide
  modified_base (16)..(16): a, c, u, g, unknown or other
uuaacagaauuaaaanaaa

SEQ ID NO: 1891266 - RNA, 19 nt, Artificial Sequence
  Description of Artificial Sequence: Synthetic oligonucleotide
uccguuuuggguuucaucc

SEQ ID NO: 1891267 - RNA, 19 nt, Artificial Sequence
  Description of Artificial Sequence: Synthetic oligonucleotide
cuagcuuccucuuuggugg

SEQ ID NO: 1891268 - RNA, 19 nt, Artificial Sequence
  Description of Artificial Sequence: Synthetic oligonucleotide
uuuacuagguaucuagugu

SEQ ID NO: 1891269 - RNA, 19 nt, Artificial Sequence
  Description of Artificial Sequence: Synthetic oligonucleotide
uaugaguucucgaaggagc

SEQ ID NO: 1891270 - RNA, 19 nt, Artificial Sequence
  Description of Artificial Sequence: Synthetic oligonucleotide
caauauagagcguucaaag

SEQ ID NO: 1891271 - RNA, 19 nt, Artificial Sequence
  Description of Artificial Sequence: Synthetic oligonucleotide
ucaauaggugccaugaaac

SEQ ID NO: 1891272 - RNA, 19 nt, Artificial Sequence
  Description of Artificial Sequence: Synthetic oligonucleotide
ugaucauuuggauccaagg

SEQ ID NO: 1891273 - RNA, 19 nt, Artificial Sequence
  Description of Artificial Sequence: Synthetic oligonucleotide
uucaaaggcacugaaaccc

SEQ ID NO: 1891274 - RNA, 19 nt, Artificial Sequence
  Description of Artificial Sequence: Synthetic oligonucleotide
gaggacaugaaaccgaagc

SEQ ID NO: 1891275 - RNA, 19 nt, Artificial Sequence
  Description of Artificial Sequence: Synthetic oligonucleotide
acuagaaaucuccucacuc

SEQ ID NO: 1891276 - RNA, 19 nt, Artificial Sequence
  Description of Artificial Sequence: Synthetic oligonucleotide
caacucauccugaagaucc

SEQ ID NO: 1891277 - RNA, 19 nt, Artificial Sequence
  Description of Artificial Sequence: Synthetic oligonucleotide
uccucagagacuuugacac

SEQ ID NO: 1891278 - RNA, 19 nt, Artificial Sequence
  Description of Artificial Sequence: Synthetic oligonucleotide
ucuaucuaccuucuuucgg

SEQ ID NO: 1891279 - RNA, 19 nt, Artificial Sequence
  Description of Artificial Sequence: Synthetic oligonucleotide
aacgcuaucugauucuuca

SEQ ID NO: 1891280 - RNA, 19 nt, Artificial Sequence
  Description of Artificial Sequence: Synthetic oligonucleotide
ucauuuggauccaaggagc

SEQ ID NO: 1891281 - RNA, 19 nt, Artificial Sequence
  Description of Artificial Sequence: Synthetic oligonucleotide
ugcaguguggucaauaggu

SEQ ID NO: 1891282 - RNA, 19 nt, Artificial Sequence
  Description of Artificial Sequence: Synthetic oligonucleotide
gaucgauacaacucggucc

SEQ ID NO: 1891283 - RNA, 19 nt, Artificial Sequence
  Description of Artificial Sequence: Synthetic oligonucleotide
aagcaacucauccugaaga

SEQ ID NO: 1891284 - RNA, 19 nt, Artificial Sequence
  Description of Artificial Sequence: Synthetic oligonucleotide
gagacuuugacacuggaga

SEQ ID NO: 1891285 - RNA, 19 nt, Artificial Sequence
  Description of Artificial Sequence: Synthetic oligonucleotide
uaucugauucuucacagcu

SEQ ID NO: 1891286 - RNA, 19 nt, Artificial Sequence
  Description of Artificial Sequence: Synthetic oligonucleotide
auugguagucaacagagcu

SEQ ID NO: 1891287 - RNA, 19 nt, Artificial Sequence
  Description of Artificial Sequence: Synthetic oligonucleotide
ucuaccuucuuucggaucu

SEQ ID NO: 1891288 - RNA, 19 nt, Artificial Sequence
  Description of Artificial Sequence: Synthetic oligonucleotide
aagcgcuuugccaugaagc

SEQ ID NO: 1891289 - RNA, 19 nt, Artificial Sequence
  Description of Artificial Sequence: Synthetic oligonucleotide
ucaaauauuucuucaucca

SEQ ID NO: 1891290 - RNA, 19 nt, Artificial Sequence
  Description of Artificial Sequence: Synthetic oligonucleotide
uuugccaugaagcugggau

SEQ ID NO: 1891291 - RNA, 19 nt, Artificial Sequence
  Description of Artificial Sequence: Synthetic oligonucleotide
caaacucucugcuacaggc

SEQ ID NO: 1891292 - RNA, 19 nt, Artificial Sequence
  Description of Artificial Sequence: Synthetic oligonucleotide
uauagagcguucaaaggca

SEQ ID NO: 1891293 - RNA, 19 nt, Artificial Sequence
  Description of Artificial Sequence: Synthetic oligonucleotide
uggauugcaagccacugcc

SEQ ID NO: 1891294 - RNA, 19 nt, Artificial Sequence
  Description of Artificial Sequence: Synthetic oligonucleotide
aucugagucaauauagagc

SEQ ID NO: 1891295 - RNA, 19 nt, Artificial Sequence
  Description of Artificial Sequence: Synthetic oligonucleotide
cuugcuucguaauuucugg

SEQ ID NO: 1891296 - RNA, 19 nt, Artificial Sequence
  Description of Artificial Sequence: Synthetic oligonucleotide
uaucaugccacuucugcag

SEQ ID NO: 1891297 - RNA, 19 nt, Artificial Sequence
  Description of Artificial Sequence: Synthetic oligonucleotide
auuuacuagguaucuagug

SEQ ID NO: 1891298 - RNA, 19 nt, Artificial Sequence
  Description of Artificial Sequence: Synthetic oligonucleotide
aauuugguagauggagcgc

SEQ ID NO: 1891299 - RNA, 19 nt, Artificial Sequence
  Description of Artificial Sequence: Synthetic oligonucleotide
aaaacaucugguugaggca

SEQ ID NO: 1891300 - RNA, 19 nt, Artificial Sequence
  Description of Artificial Sequence: Synthetic oligonucleotide
aagcuugguuuuaucaugc

SEQ ID NO: 1891301 - RNA, 19 nt, Artificial Sequence
  Description of Artificial Sequence: Synthetic oligonucleotide
aaguuaauucccauggucu

SEQ ID NO: 1891302 - RNA, 19 nt, Artificial Sequence
  Description of Artificial Sequence: Synthetic oligonucleotide
agaucgauacaacucgguc

SEQ ID NO: 1891303 - RNA, 19 nt, Artificial Sequence
  Description of Artificial Sequence: Synthetic oligonucleotide
uuguccaucagaaugugau

SEQ ID NO: 1891304 - RNA, 19 nt, Artificial Sequence
  Description of Artificial Sequence: Synthetic oligonucleotide
cacaccgucaucuucacug

SEQ ID NO: 1891305 - RNA, 19 nt, Artificial Sequence
  Description of Artificial Sequence: Synthetic oligonucleotide
aucagaaugugaucaaucu

SEQ ID NO: 1891306 - RNA, 19 nt, Artificial Sequence
  Description of Artificial Sequence: Synthetic oligonucleotide
ucuagcuuccucuuuggug

SEQ ID NO: 1891307 - RNA, 19 nt, Artificial Sequence
  Description of Artificial Sequence: Synthetic oligonucleotide
gaucauuuggauccaagga

SEQ ID NO: 1891308 - RNA, 19 nt, Artificial Sequence
  Description of Artificial Sequence: Synthetic oligonucleotide
acuuugacacuggagaagg

SEQ ID NO: 1891309 - RNA, 19 nt, Artificial Sequence
  Description of Artificial Sequence: Synthetic oligonucleotide
aguguggucaauaggugcc

SEQ ID NO: 1891310 - RNA, 19 nt, Artificial Sequence
  Description of Artificial Sequence: Synthetic oligonucleotide
gaaaccgaagcuuccuucc

SEQ ID NO: 1891311 - RNA, 19 nt, Artificial Sequence
  Description of Artificial Sequence: Synthetic oligonucleotide
ugcccaguuuuccagaagc

SEQ ID NO: 1891312 - RNA, 19 nt, Artificial Sequence
  Description of Artificial Sequence: Synthetic oligonucleotide
uuugcuggcuuuucuaucu

SEQ ID NO: 1891313 - RNA, 19 nt, Artificial Sequence
  Description of Artificial Sequence: Synthetic oligonucleotide
aaaucagcaaagcgcuuug

SEQ ID NO: 1891314 - RNA, 19 nt, Artificial Sequence
  Description of Artificial Sequence: Synthetic oligonucleotide
uuacuagguaucuaguguc

SEQ ID NO: 1891315 - RNA, 19 nt, Artificial Sequence
  Description of Artificial Sequence: Synthetic oligonucleotide
gauccuuccuuccaagagc

SEQ ID NO: 1891316 - RNA, 19 nt, Artificial Sequence
  Description of Artificial Sequence: Synthetic oligonucleotide
auugcaguguggucaauag

SEQ ID NO: 1891317 - RNA, 19 nt, Artificial Sequence
  Description of Artificial Sequence: Synthetic oligonucleotide
uggucuuccgcucuaugag

SEQ ID NO: 1891318 - RNA, 19 nt, Artificial Sequence
  Description of Artificial Sequence: Synthetic oligonucleotide
uuuuagagcacugguaaac

SEQ ID NO: 1891319 - RNA, 19 nt, Artificial Sequence
  Description of Artificial Sequence: Synthetic oligonucleotide
accuuaacaaugcuuuaag

SEQ ID NO: 1891320 - RNA, 19 nt, Artificial Sequence
  Description of Artificial Sequence: Synthetic oligonucleotide
aucgauacaacucgguccu

SEQ ID NO: 1891321 - RNA, 19 nt, Artificial Sequence
  Description of Artificial Sequence: Synthetic oligonucleotide
agcacugguaaacucuggg

SEQ ID NO: 1891322 - RNA, 19 nt, Artificial Sequence
  Description of Artificial Sequence: Synthetic oligonucleotide
gaaacucagaagcuugcug

SEQ ID NO: 1891323 - RNA, 19 nt, Artificial Sequence
  Description of Artificial Sequence: Synthetic oligonucleotide
aacucagaagcuugcugag

SEQ ID NO: 1891324 - RNA, 19 nt, Artificial Sequence
  Description of Artificial Sequence: Synthetic oligonucleotide
uucacucucaccuuuuaaa

SEQ ID NO: 1891325 - RNA, 19 nt, Artificial Sequence
  Description of Artificial Sequence: Synthetic oligonucleotide
uguagacaguaaaaucagc

SEQ ID NO: 1891326 - RNA, 19 nt, Artificial Sequence
  Description of Artificial Sequence: Synthetic oligonucleotide
aguuaauucccauggucug

SEQ ID NO: 1891327 - RNA, 19 nt, Artificial Sequence
  Description of Artificial Sequence: Synthetic oligonucleotide
guacgguuccuguagacag

SEQ ID NO: 1891328 - RNA, 19 nt, Artificial Sequence
  Description of Artificial Sequence: Synthetic oligonucleotide
cucugcuacaggcacaggg

SEQ ID NO: 1891329 - RNA, 19 nt, Artificial Sequence
  Description of Artificial Sequence: Synthetic oligonucleotide
auucauugcagugugguca

SEQ ID NO: 1891330 - RNA, 19 nt, Artificial Sequence
  Description of Artificial Sequence: Synthetic oligonucleotide
uggaaaagcaacucauccu

SEQ ID NO: 1891331 - RNA, 19 nt, Artificial Sequence
  Description of Artificial Sequence: Synthetic oligonucleotide
ucuaugaguucucgaagga

SEQ ID NO: 1891332 - RNA, 19 nt, Artificial Sequence
  Description of Artificial Sequence: Synthetic oligonucleotide
aaagcgcuuugccaugaag

SEQ ID NO: 1891333 - RNA, 19 nt, Artificial Sequence
  Description of Artificial Sequence: Synthetic oligonucleotide
cuagguaucuagugucugg

SEQ ID NO: 1891334 - RNA, 19 nt, Artificial Sequence
  Description of Artificial Sequence: Synthetic oligonucleotide
uagacaguaaaaucagcaa

SEQ ID NO: 1891335 - RNA, 19 nt, Artificial Sequence
  Description of Artificial Sequence: Synthetic oligonucleotide
uuuaagugcuuugugacua

SEQ ID NO: 1891336 - RNA, 19 nt, Artificial Sequence
  Description of Artificial Sequence: Synthetic oligonucleotide
uuugauccuuccuuccaag

SEQ ID NO: 1891337 - RNA, 19 nt, Artificial Sequence
  Description of Artificial Sequence: Synthetic oligonucleotide
uacuggaaaagcaacucau

SEQ ID NO: 1891338 - RNA, 19 nt, Artificial Sequence
  Description of Artificial Sequence: Synthetic oligonucleotide
uggguuucaucccauuuac

SEQ ID NO: 1891339 - RNA, 19 nt, Artificial Sequence
  Description of Artificial Sequence: Synthetic oligonucleotide
aacccuugcccaguuuucc

SEQ ID NO: 1891340 - RNA, 19 nt, Artificial Sequence
  Description of Artificial Sequence: Synthetic oligonucleotide
uagguaucuagugucuggg

SEQ ID NO: 1891341 - RNA, 19 nt, Artificial Sequence
  Description of Artificial Sequence: Synthetic oligonucleotide
agcaagcuugguuuuauca

SEQ ID NO: 1891342 - RNA, 19 nt, Artificial Sequence
  Description of Artificial Sequence: Synthetic oligonucleotide
ucuagugucuggguacugg

SEQ ID NO: 1891343 - RNA, 19 nt, Artificial Sequence
  Description of Artificial Sequence: Synthetic oligonucleotide
ucaauauagagcguucaaa

SEQ ID NO: 1891344 - RNA, 19 nt, Artificial Sequence
  Description of Artificial Sequence: Synthetic oligonucleotide
uacaacucgguccuggcau

SEQ ID NO: 1891345 - RNA, 19 nt, Artificial Sequence
  Description of Artificial Sequence: Synthetic oligonucleotide
guagacaguaaaaucagca

SEQ ID NO: 1891346 - RNA, 19 nt, Artificial Sequence
  Description of Artificial Sequence: Synthetic oligonucleotide
auugcaagccacugccuuc

SEQ ID NO: 1891347 - RNA, 19 nt, Artificial Sequence
  Description of Artificial Sequence: Synthetic oligonucleotide
aaaaucagcaaagcgcuuu

SEQ ID NO: 1891348 - RNA, 19 nt, Artificial Sequence
  Description of Artificial Sequence: Synthetic oligonucleotide
ugcuacuggcucaucaucu

SEQ ID NO: 1891349 - RNA, 19 nt, Artificial Sequence
  Description of Artificial Sequence: Synthetic oligonucleotide
agguuugccaagaauuugg

SEQ ID NO: 1891350 - RNA, 19 nt, Artificial Sequence
  Description of Artificial Sequence: Synthetic oligonucleotide
guucaaaggcacugaaacc

SEQ ID NO: 1891351 - RNA, 19 nt, Artificial Sequence
  Description of Artificial Sequence: Synthetic oligonucleotide
aggacaugaaaccgaagcu

SEQ ID NO: 1891352 - RNA, 19 nt, Artificial Sequence
  Description of Artificial Sequence: Synthetic oligonucleotide
aucucuagcuuccucuuug

SEQ ID NO: 1891353 - RNA, 19 nt, Artificial Sequence
  Description of Artificial Sequence: Synthetic oligonucleotide
uccuguagacaguaaaauc

SEQ ID NO: 1891354 - RNA, 19 nt, Artificial Sequence
  Description of Artificial Sequence: Synthetic oligonucleotide
uucuuucggaucuugcuuc

SEQ ID NO: 1891355 - RNA, 19 nt, Artificial Sequence
  Description of Artificial Sequence: Synthetic oligonucleotide
ugcugaggacaugaaaccg

SEQ ID NO: 1891356 - RNA, 19 nt, Artificial Sequence
  Description of Artificial Sequence: Synthetic oligonucleotide
ugguagauggagcgcuugg

SEQ ID NO: 1891357 - RNA, 19 nt, Artificial Sequence
  Description of Artificial Sequence: Synthetic oligonucleotide
ucuguaguuugauccuucc

SEQ ID NO: 1891358 - RNA, 19 nt, Artificial Sequence
  Description of Artificial Sequence: Synthetic oligonucleotide
aucaaucugagucaauaua

SEQ ID NO: 1891359 - RNA, 19 nt, Artificial Sequence
  Description of Artificial Sequence: Synthetic oligonucleotide
ugagcuggccgaaaagaga

SEQ ID NO: 1891360 - RNA, 19 nt, Artificial Sequence
  Description of Artificial Sequence: Synthetic oligonucleotide
ugaucaaucugagucaaua

SEQ ID NO: 1891361 - RNA, 19 nt, Artificial Sequence
  Description of Artificial Sequence: Synthetic oligonucleotide
caucagaaugugaucaauc

SEQ ID NO: 1891362 - RNA, 19 nt, Artificial Sequence
  Description of Artificial Sequence: Synthetic oligonucleotide
augugaucaaucugaguca

SEQ ID NO: 1891363 - RNA, 19 nt, Artificial Sequence
  Description of Artificial Sequence: Synthetic oligonucleotide
uggguacuggaaaagcaac

SEQ ID NO: 1891364 - RNA, 19 nt, Artificial Sequence
  Description of Artificial Sequence: Synthetic oligonucleotide
uggucaauaggugccauga

SEQ ID NO: 1891365 - RNA, 19 nt, Artificial Sequence
  Description of Artificial Sequence: Synthetic oligonucleotide
uuuagagcacugguaaacu

SEQ ID NO: 1891366 - RNA, 19 nt, Artificial Sequence
  Description of Artificial Sequence: Synthetic oligonucleotide
agauggagcgcuugguuug

SEQ ID NO: 1891367 - RNA, 19 nt, Artificial Sequence
  Description of Artificial Sequence: Synthetic oligonucleotide
gccgaaaagagaucgauac

SEQ ID NO: 1891368 - RNA, 19 nt, Artificial Sequence
  Description of Artificial Sequence: Synthetic oligonucleotide
uuggguuucaucccauuua

SEQ ID NO: 1891369 - RNA, 19 nt, Artificial Sequence
  Description of Artificial Sequence: Synthetic oligonucleotide
gauacaacucgguccuggc

SEQ ID NO: 1891370 - RNA, 19 nt, Artificial Sequence
  Description of Artificial Sequence: Synthetic oligonucleotide
uuucuggauugcaagccac

SEQ ID NO: 1891371 - RNA, 19 nt, Artificial Sequence
  Description of Artificial Sequence: Synthetic oligonucleotide
cuaucuaccuucuuucgga

SEQ ID NO: 1891372 - RNA, 19 nt, Artificial Sequence
  Description of Artificial Sequence: Synthetic oligonucleotide
ucagguuugccaagaauuu

SEQ ID NO: 1891373 - RNA, 19 nt, Artificial Sequence
  Description of Artificial Sequence: Synthetic oligonucleotide
caguguggucaauaggugc

SEQ ID NO: 1891374 - RNA, 19 nt, Artificial Sequence
  Description of Artificial Sequence: Synthetic oligonucleotide
ccauuuacuagguaucuag

SEQ ID NO: 1891375 - RNA, 19 nt, Artificial Sequence
  Description of Artificial Sequence: Synthetic oligonucleotide
aagcaagcuugguuuuauc

SEQ ID NO: 1891376 - RNA, 19 nt, Artificial Sequence
  Description of Artificial Sequence: Synthetic oligonucleotide
aggucaucaccacaccguc

SEQ ID NO: 1891377 - RNA, 19 nt, Artificial Sequence
  Description of Artificial Sequence: Synthetic oligonucleotide
ugagucaauauagagcguu

SEQ ID NO: 1891378 - RNA, 19 nt, Artificial Sequence
  Description of Artificial Sequence: Synthetic oligonucleotide
agucaacagagcuuucugu

SEQ ID NO: 1891379 - RNA, 19 nt, Artificial Sequence
  Description of Artificial Sequence: Synthetic oligonucleotide
guaguuugauccuuccuuc

SEQ ID NO: 1891380 - RNA, 19 nt, Artificial Sequence
  Description of Artificial Sequence: Synthetic oligonucleotide
ugaaaccgaagcuuccuuc

SEQ ID NO: 1891381 - RNA, 19 nt, Artificial Sequence
  Description of Artificial Sequence: Synthetic oligonucleotide
aaugaccuuaacaaugcuu

SEQ ID NO: 1891382 - RNA, 19 nt, Artificial Sequence
  Description of Artificial Sequence: Synthetic oligonucleotide
ggugccaugaaacucagaa

SEQ ID NO: 1891383 - RNA, 19 nt, Artificial Sequence
  Description of Artificial Sequence: Synthetic oligonucleotide
uacuagguaucuagugucu

SEQ ID NO: 1891384 - RNA, 19 nt, Artificial Sequence
  Description of Artificial Sequence: Synthetic oligonucleotide
uaguuugauccuuccuucc

SEQ ID NO: 1891385 - RNA, 19 nt, Artificial Sequence
  Description of Artificial Sequence: Synthetic oligonucleotide
auuugguagauggagcgcu

SEQ ID NO: 1891386 - RNA, 19 nt, Artificial Sequence
  Description of Artificial Sequence: Synthetic oligonucleotide
aaggucaucaccacaccgu

SEQ ID NO: 1891387 - RNA, 19 nt, Artificial Sequence
  Description of Artificial Sequence: Synthetic oligonucleotide
uguccuucgaagcaaucuu

SEQ ID NO: 1891388 - RNA, 19 nt, Artificial Sequence
  Description of Artificial Sequence: Synthetic oligonucleotide
aguuugauccuuccuucca

SEQ ID NO: 1891389 - RNA, 19 nt, Artificial Sequence
  Description of Artificial Sequence: Synthetic oligonucleotide
uuuggguuucaucccauuu

SEQ ID NO: 1891390 - RNA, 19 nt, Artificial Sequence
  Description of Artificial Sequence: Synthetic oligonucleotide
auaggugccaugaaacuca

SEQ ID NO: 1891391 - RNA, 19 nt, Artificial Sequence
  Description of Artificial Sequence: Synthetic oligonucleotide
ucaggaacgaucuccgguu

SEQ ID NO: 1891392 - RNA, 19 nt, Artificial Sequence
  Description of Artificial Sequence: Synthetic oligonucleotide
gcuuuaagugcuuugugac

SEQ ID NO: 1891393 - RNA, 19 nt, Artificial Sequence
  Description of Artificial Sequence: Synthetic oligonucleotide
aaaccgaagcuuccuuccu

SEQ ID NO: 1891394 - RNA, 19 nt, Artificial Sequence
  Description of Artificial Sequence: Synthetic oligonucleotide
agcgcuuugccaugaagcu

SEQ ID NO: 1891395 - RNA, 19 nt, Artificial Sequence
  Description of Artificial Sequence: Synthetic oligonucleotide
acaugaaaccgaagcuucc

SEQ ID NO: 1891396 - RNA, 19 nt, Artificial Sequence
  Description of Artificial Sequence: Synthetic oligonucleotide
uuagagcacugguaaacuc

SEQ ID NO: 1891397 - RNA, 19 nt, Artificial Sequence
  Description of Artificial Sequence: Synthetic oligonucleotide
uugguuuuaucaugccacu

SEQ ID NO: 1891398 - RNA, 19 nt, Artificial Sequence
  Description of Artificial Sequence: Synthetic oligonucleotide
agugcuuugugacuauuuu

SEQ ID NO: 1891399 - RNA, 19 nt, Artificial Sequence
  Description of Artificial Sequence: Synthetic oligonucleotide
ucgaagcaaucuuucuuug

SEQ ID NO: 1891400 - RNA, 19 nt, Artificial Sequence
  Description of Artificial Sequence: Synthetic oligonucleotide
ugcuucguaauuucuggau

SEQ ID NO: 1891401 - RNA, 19 nt, Artificial Sequence
  Description of Artificial Sequence: Synthetic oligonucleotide
caaccugaucauuuggauc

SEQ ID NO: 1891402 - RNA, 19 nt, Artificial Sequence
  Description of Artificial Sequence: Synthetic oligonucleotide
caguguacgguuccuguag

SEQ ID NO: 1891403 - RNA, 19 nt, Artificial Sequence
  Description of Artificial Sequence: Synthetic oligonucleotide
uugguuuguguccuucgaa

SEQ ID NO: 1891404 - RNA, 19 nt, Artificial Sequence
  Description of Artificial Sequence: Synthetic oligonucleotide
aacgaucuccgguucuccu

SEQ ID NO: 1891405 - RNA, 19 nt, Artificial Sequence
  Description of Artificial Sequence: Synthetic oligonucleotide
agagcguucaaaggcacug

SEQ ID NO: 1891406 - RNA, 19 nt, Artificial Sequence
  Description of Artificial Sequence: Synthetic oligonucleotide
caugaagcugggauaguuc

SEQ ID NO: 1891407 - RNA, 19 nt, Artificial Sequence
  Description of Artificial Sequence: Synthetic oligonucleotide
uccuucgaagcaaucuuuc

SEQ ID NO: 1891408 - RNA, 19 nt, Artificial Sequence
  Description of Artificial Sequence: Synthetic oligonucleotide
aacagagcuuucuguaguu

SEQ ID NO: 1891409 - RNA, 19 nt, Artificial Sequence
  Description of Artificial Sequence: Synthetic oligonucleotide
ucuggauugcaagccacug

SEQ ID NO: 1891410 - RNA, 19 nt, Artificial Sequence
  Description of Artificial Sequence: Synthetic oligonucleotide
gguuuuaucaugccacuuc

SEQ ID NO: 1891411 - RNA, 19 nt, Artificial Sequence
  Description of Artificial Sequence: Synthetic oligonucleotide
cuaugaguucucgaaggag

SEQ ID NO: 1891412 - RNA, 19 nt, Artificial Sequence
  Description of Artificial Sequence: Synthetic oligonucleotide
uugguagucaacagagcuu

SEQ ID NO: 1891413 - RNA, 19 nt, Artificial Sequence
  Description of Artificial Sequence: Synthetic oligonucleotide
uucaucccauuuacuaggu

SEQ ID NO: 1891414 - RNA, 19 nt, Artificial Sequence
  Description of Artificial Sequence: Synthetic oligonucleotide
augcuuuaagugcuuugug

SEQ ID NO: 1891415 - RNA, 19 nt, Artificial Sequence
  Description of Artificial Sequence: Synthetic oligonucleotide
acuucugcaguguacgguu

SEQ ID NO: 1891416 - RNA, 19 nt, Artificial Sequence
  Description of Artificial Sequence: Synthetic oligonucleotide
agacuuugacacuggagaa

SEQ ID NO: 1891417 - RNA, 19 nt, Artificial Sequence
  Description of Artificial Sequence: Synthetic oligonucleotide
auggcaaccugaucauuug

SEQ ID NO: 1891418 - RNA, 19 nt, Artificial Sequence
  Description of Artificial Sequence: Synthetic oligonucleotide
gucaauaggugccaugaaa

SEQ ID NO: 1891419 - RNA, 19 nt, Artificial Sequence
  Description of Artificial Sequence: Synthetic oligonucleotide
cguucaaaggcacugaaac

SEQ ID NO: 1891420 - RNA, 19 nt, Artificial Sequence
  Description of Artificial Sequence: Synthetic oligonucleotide
ucccacaacgcuaucugau

SEQ ID NO: 1891421 - RNA, 19 nt, Artificial Sequence
  Description of Artificial Sequence: Synthetic oligonucleotide
aucuaccuucuuucggauc

SEQ ID NO: 1891422 - RNA, 19 nt, Artificial Sequence
  Description of Artificial Sequence: Synthetic oligonucleotide
uugauccuuccuuccaaga

SEQ ID NO: 1891423 - RNA, 19 nt, Artificial Sequence
  Description of Artificial Sequence: Synthetic oligonucleotide
agauccaccaaugaccuua

SEQ ID NO: 1891424 - RNA, 19 nt, Artificial Sequence
  Description of Artificial Sequence: Synthetic oligonucleotide
ugguagucaacagagcuuu

SEQ ID NO: 1891425 - RNA, 19 nt, Artificial Sequence
  Description of Artificial Sequence: Synthetic oligonucleotide
cucagaagcuugcugagga

SEQ ID NO: 1891426 - RNA, 19 nt, Artificial Sequence
  Description of Artificial Sequence: Synthetic oligonucleotide
ugaggacaugaaaccgaag

SEQ ID NO: 1891427 - RNA, 19 nt, Artificial Sequence
  Description of Artificial Sequence: Synthetic oligonucleotide
auagagcguucaaaggcac

SEQ ID NO: 1891428 - RNA, 19 nt, Artificial Sequence
  Description of Artificial Sequence: Synthetic oligonucleotide
cuggauugcaagccacugc

SEQ ID NO: 1891429 - RNA, 19 nt, Artificial Sequence
  Description of Artificial Sequence: Synthetic oligonucleotide
uucggaucuugcuucguaa

SEQ ID NO: 1891430 - RNA, 19 nt, Artificial Sequence
  Description of Artificial Sequence: Synthetic oligonucleotide
auucuucacagcucuuccu

SEQ ID NO: 1891431 - RNA, 19 nt, Artificial Sequence
  Description of Artificial Sequence: Synthetic oligonucleotide
acgcuaucugauucuucac

SEQ ID NO: 1891432 - RNA, 19 nt, Artificial Sequence
  Description of Artificial Sequence: Synthetic oligonucleotide
uucuggauugcaagccacu

SEQ ID NO: 1891433 - RNA, 19 nt, Artificial Sequence
  Description of Artificial Sequence: Synthetic oligonucleotide
uagauggagcgcuugguuu

SEQ ID NO: 1891434 - RNA, 19 nt, Artificial Sequence
  Description of Artificial Sequence: Synthetic oligonucleotide
guacuggaaaagcaacuca

SEQ ID NO: 1891435 - RNA, 19 nt, Artificial Sequence
  Description of Artificial Sequence: Synthetic oligonucleotide
agagacuuugacacuggag

SEQ ID NO: 1891436 - RNA, 19 nt, Artificial Sequence
  Description of Artificial Sequence: Synthetic oligonucleotide
agagaucgauacaacucgg

SEQ ID NO: 1891437 - RNA, 19 nt, Artificial Sequence
  Description of Artificial Sequence: Synthetic oligonucleotide
agcaacucauccugaagau

SEQ ID NO: 1891438 - RNA, 19 nt, Artificial Sequence
  Description of Artificial Sequence: Synthetic oligonucleotide
aacaucugguugaggcaac

SEQ ID NO: 1891439 - RNA, 19 nt, Artificial Sequence
  Description of Artificial Sequence: Synthetic oligonucleotide
uugcuucguaauuucugga

SEQ ID NO: 1891440 - RNA, 19 nt, Artificial Sequence
  Description of Artificial Sequence: Synthetic oligonucleotide
ucccauggucuguaucggg

SEQ ID NO: 1891441 - RNA, 19 nt, Artificial Sequence
  Description of Artificial Sequence: Synthetic oligonucleotide
agucaauauagagcguuca

SEQ ID NO: 1891442 - RNA, 19 nt, Artificial Sequence
  Description of Artificial Sequence: Synthetic oligonucleotide
gauugguagucaacagagc

SEQ ID NO: 1891443 - RNA, 19 nt, Artificial Sequence
  Description of Artificial Sequence: Synthetic oligonucleotide
gguuucaucccauuuacua

SEQ ID NO: 1891444 - RNA, 19 nt, Artificial Sequence
  Description of Artificial Sequence: Synthetic oligonucleotide
cugauugguagucaacaga

SEQ ID NO: 1891445 - RNA, 19 nt, Artificial Sequence
  Description of Artificial Sequence: Synthetic oligonucleotide
ugucuggguacuggaaaag

SEQ ID NO: 1891446 - RNA, 19 nt, Artificial Sequence
  Description of Artificial Sequence: Synthetic oligonucleotide
gcuggccgaaaagagaucg

SEQ ID NO: 1891447 - RNA, 19 nt, Artificial Sequence
  Description of Artificial Sequence: Synthetic oligonucleotide
uuucggaucuugcuucgua

SEQ ID NO: 1891448 - RNA, 19 nt, Artificial Sequence
  Description of Artificial Sequence: Synthetic oligonucleotide
guuuuaucaugccacuucu

SEQ ID NO: 1891449 - RNA, 19 nt, Artificial Sequence
  Description of Artificial Sequence: Synthetic oligonucleotide
ucgaaggagcuggugguag

SEQ ID NO: 1891450 - RNA, 19 nt, Artificial Sequence
  Description of Artificial Sequence: Synthetic oligonucleotide
ucuguaucgggaggguuga

SEQ ID NO: 1891451 - RNA, 19 nt, Artificial Sequence
  Description of Artificial Sequence: Synthetic oligonucleotide
uccgcucuaugaguucucg

SEQ ID NO: 1891452 - RNA, 19 nt, Artificial Sequence
  Description of Artificial Sequence: Synthetic oligonucleotide
cuagaaaucuccucacucu

SEQ ID NO: 1891453 - RNA, 19 nt, Artificial Sequence
  Description of Artificial Sequence: Synthetic oligonucleotide
ucuccgguucuccuggcaa

SEQ ID NO: 1891454 - RNA, 19 nt, Artificial Sequence
  Description of Artificial Sequence: Synthetic oligonucleotide
uucccauggucuguaucgg

SEQ ID NO: 1891455 - RNA, 19 nt, Artificial Sequence
  Description of Artificial Sequence: Synthetic oligonucleotide
uaggugccaugaaacucag

SEQ ID NO: 1891456 - RNA, 19 nt, Artificial Sequence
  Description of Artificial Sequence: Synthetic oligonucleotide
ugcuacaggcacaggggcu

SEQ ID NO: 1891457 - RNA, 19 nt, Artificial Sequence
  Description of Artificial Sequence: Synthetic oligonucleotide
gucaacagagcuuucugua

SEQ ID NO: 1891458 - RNA, 19 nt, Artificial Sequence
  Description of Artificial Sequence: Synthetic oligonucleotide
ggcaggaacuucaggaacg

SEQ ID NO: 1891459 - RNA, 19 nt, Artificial Sequence
  Description of Artificial Sequence: Synthetic oligonucleotide
accuuuguccuugaagacu

SEQ ID NO: 1891460 - RNA, 19 nt, Artificial Sequence
  Description of Artificial Sequence: Synthetic oligonucleotide
aucugauucuucacagcuc

SEQ ID NO: 1891461 - RNA, 19 nt, Artificial Sequence
  Description of Artificial Sequence: Synthetic oligonucleotide
ucguaauuucuggauugca

SEQ ID NO: 1891462 - RNA, 19 nt, Artificial Sequence
  Description of Artificial Sequence: Synthetic oligonucleotide
auacaacucgguccuggca

SEQ ID NO: 1891463 - RNA, 19 nt, Artificial Sequence
  Description of Artificial Sequence: Synthetic oligonucleotide
gucuguaucgggaggguug

SEQ ID NO: 1891464 - RNA, 19 nt, Artificial Sequence
  Description of Artificial Sequence: Synthetic oligonucleotide
uggcuuuucuaucuaccuu

SEQ ID NO: 1891465 - RNA, 19 nt, Artificial Sequence
  Description of Artificial Sequence: Synthetic oligonucleotide
aguguacgguuccuguaga

SEQ ID NO: 1891466 - RNA, 19 nt, Artificial Sequence
  Description of Artificial Sequence: Synthetic oligonucleotide
cuucaggaacgaucuccgg

SEQ ID NO: 1891467 - RNA, 19 nt, Artificial Sequence
  Description of Artificial Sequence: Synthetic oligonucleotide
acuagguaucuagugucug

SEQ ID NO: 1891468 - RNA, 19 nt, Artificial Sequence
  Description of Artificial Sequence: Synthetic oligonucleotide
cgcuuugccaugaagcugg

SEQ ID NO: 1891469 - RNA, 19 nt, Artificial Sequence
  Description of Artificial Sequence: Synthetic oligonucleotide
aggagcuggucuuccgcuc

SEQ ID NO: 1891470 - RNA, 19 nt, Artificial Sequence
  Description of Artificial Sequence: Synthetic oligonucleotide
agcaaagcgcuuugccaug

SEQ ID NO: 1891471 - RNA, 19 nt, Artificial Sequence
  Description of Artificial Sequence: Synthetic oligonucleotide
agagcacugguaaacucug

SEQ ID NO: 1891472 - RNA, 19 nt, Artificial Sequence
  Description of Artificial Sequence: Synthetic oligonucleotide
uagagcguucaaaggcacu

SEQ ID NO: 1891473 - RNA, 19 nt, Artificial Sequence
  Description of Artificial Sequence: Synthetic oligonucleotide
uaaaaucagcaaagcgcuu

SEQ ID NO: 1891474 - RNA, 19 nt, Artificial Sequence
  Description of Artificial Sequence: Synthetic oligonucleotide
gucaauauagagcguucaa

SEQ ID NO: 1891475 - RNA, 19 nt, Artificial Sequence
  Description of Artificial Sequence: Synthetic oligonucleotide
uaucgggaggguugagcug

SEQ ID NO: 1891476 - RNA, 19 nt, Artificial Sequence
  Description of Artificial Sequence: Synthetic oligonucleotide
uugccaugaagcugggaua

SEQ ID NO: 1891477 - RNA, 19 nt, Artificial Sequence
  Description of Artificial Sequence: Synthetic oligonucleotide
ugggauaguucuccaucuc

SEQ ID NO: 1891478 - RNA, 19 nt, Artificial Sequence
  Description of Artificial Sequence: Synthetic oligonucleotide
cuuuguccuugaagacugg

SEQ ID NO: 1891479 - RNA, 19 nt, Artificial Sequence
  Description of Artificial Sequence: Synthetic oligonucleotide
aaccgaagcuuccuuccuu

SEQ ID NO: 1891480 - RNA, 19 nt, Artificial Sequence
  Description of Artificial Sequence: Synthetic oligonucleotide
acucgguccuggcaucauc

SEQ ID NO: 1891481 - RNA, 19 nt, Artificial Sequence
  Description of Artificial Sequence: Synthetic oligonucleotide
gguccuggcaucaucauuc

SEQ ID NO: 1891482 - RNA, 19 nt, Artificial Sequence
  Description of Artificial Sequence: Synthetic oligonucleotide
guccuugaagacuggaaaa

SEQ ID NO: 1891483 - RNA, 19 nt, Artificial Sequence
  Description of Artificial Sequence: Synthetic oligonucleotide
ucggaucuugcuucguaau

SEQ ID NO: 1891484 - RNA, 19 nt, Artificial Sequence
  Description of Artificial Sequence: Synthetic oligonucleotide
uacgguuccuguagacagu

SEQ ID NO: 1891485 - RNA, 19 nt, Artificial Sequence
  Description of Artificial Sequence: Synthetic oligonucleotide
caucccauuuacuagguau

SEQ ID NO: 1891486 - RNA, 19 nt, Artificial Sequence
  Description of Artificial Sequence: Synthetic oligonucleotide
gccacuucugcaguguacg

SEQ ID NO: 1891487 - RNA, 19 nt, Artificial Sequence
  Description of Artificial Sequence: Synthetic oligonucleotide
uagcuuccucuuugguggg

SEQ ID NO: 1891488 - RNA, 19 nt, Artificial Sequence
  Description of Artificial Sequence: Synthetic oligonucleotide
auuuggauccaaggagcug

SEQ ID NO: 1891489 - RNA, 19 nt, Artificial Sequence
  Description of Artificial Sequence: Synthetic oligonucleotide
guuugauccuuccuuccaa

SEQ ID NO: 1891490 - RNA, 19 nt, Artificial Sequence
  Description of Artificial Sequence: Synthetic oligonucleotide
ggucccacaacgcuaucug

SEQ ID NO: 1891491 - RNA, 19 nt, Artificial Sequence
  Description of Artificial Sequence: Synthetic oligonucleotide
cuagugucuggguacugga

SEQ ID NO: 1891492 - RNA, 19 nt, Artificial Sequence
  Description of Artificial Sequence: Synthetic oligonucleotide
guaucgggaggguugagcu

SEQ ID NO: 1891493 - RNA, 19 nt, Artificial Sequence
  Description of Artificial Sequence: Synthetic oligonucleotide
uugguagauggagcgcuug

SEQ ID NO: 1891494 - RNA, 19 nt, Artificial Sequence
  Description of Artificial Sequence: Synthetic oligonucleotide
ugaguucucgaaggagcug

SEQ ID NO: 1891495 - RNA, 19 nt, Artificial Sequence
  Description of Artificial Sequence: Synthetic oligonucleotide
gagucaauauagagcguuc

SEQ ID NO: 1891496 - RNA, 19 nt, Artificial Sequence
  Description of Artificial Sequence: Synthetic oligonucleotide
agguaucuagugucugggu

SEQ ID NO: 1891497 - RNA, 19 nt, Artificial Sequence
  Description of Artificial Sequence: Synthetic oligonucleotide
gcuugguuuguguccuucg

SEQ ID NO: 1891498 - RNA, 19 nt, Artificial Sequence
  Description of Artificial Sequence: Synthetic oligonucleotide
uuugguagauggagcgcuu

SEQ ID NO: 1891499 - RNA, 19 nt, Artificial Sequence
  Description of Artificial Sequence: Synthetic oligonucleotide
agcguucaaaggcacugaa

SEQ ID NO: 1891500 - RNA, 19 nt, Artificial Sequence
  Description of Artificial Sequence: Synthetic oligonucleotide
gguacuggaaaagcaacuc

SEQ ID NO: 1891501 - RNA, 19 nt, Artificial Sequence
  Description of Artificial Sequence: Synthetic oligonucleotide
gcaaacucucugcuacagg

SEQ ID NO: 1891502 - RNA, 19 nt, Artificial Sequence
  Description of Artificial Sequence: Synthetic oligonucleotide
gguugagcuggccgaaaag

SEQ ID NO: 1891503 - RNA, 19 nt, Artificial Sequence
  Description of Artificial Sequence: Synthetic oligonucleotide
cuuucuguaguuugauccu

SEQ ID NO: 1891504 - RNA, 19 nt, Artificial Sequence
  Description of Artificial Sequence: Synthetic oligonucleotide
augaaaccgaagcuuccuu

SEQ ID NO: 1891505 - RNA, 19 nt, Artificial Sequence
  Description of Artificial Sequence: Synthetic oligonucleotide
ucacagcucuuccuuucuc

SEQ ID NO: 1891506 - RNA, 19 nt, Artificial Sequence
  Description of Artificial Sequence: Synthetic oligonucleotide
uuggauccaaggagcuggu

SEQ ID NO: 1891507 - RNA, 19 nt, Artificial Sequence
  Description of Artificial Sequence: Synthetic oligonucleotide
aucauucauugcagugugg

SEQ ID NO: 1891508 - RNA, 19 nt, Artificial Sequence
  Description of Artificial Sequence: Synthetic oligonucleotide
cuccguuuuggguuucauc

SEQ ID NO: 1891509 - RNA, 19 nt, Artificial Sequence
  Description of Artificial Sequence: Synthetic oligonucleotide
cuugguuuguguccuucga

SEQ ID NO: 1891510 - RNA, 19 nt, Artificial Sequence
  Description of Artificial Sequence: Synthetic oligonucleotide
guugaggcaacugauuggu

SEQ ID NO: 1891511 - RNA, 19 nt, Artificial Sequence
  Description of Artificial Sequence: Synthetic oligonucleotide
aggaacgaucuccgguucu

SEQ ID NO: 1891512 - RNA, 19 nt, Artificial Sequence
  Description of Artificial Sequence: Synthetic oligonucleotide
uggccgaaaagagaucgau

SEQ ID NO: 1891513 - RNA, 19 nt, Artificial Sequence
  Description of Artificial Sequence: Synthetic oligonucleotide
gaacgaucuccgguucucc

SEQ ID NO: 1891514 - RNA, 19 nt, Artificial Sequence
  Description of Artificial Sequence: Synthetic oligonucleotide
cucgguccuggcaucauca

SEQ ID NO: 1891515 - RNA, 19 nt, Artificial Sequence
  Description of Artificial Sequence: Synthetic oligonucleotide
gcugggauaguucuccauc

SEQ ID NO: 1891516 - RNA, 19 nt, Artificial Sequence
  Description of Artificial Sequence: Synthetic oligonucleotide
uggagcgcuugguuugugu

SEQ ID NO: 1891517 - RNA, 19 nt, Artificial Sequence
  Description of Artificial Sequence: Synthetic oligonucleotide
cuuuaagugcuuugugacu

SEQ ID NO: 1891518 - RNA, 19 nt, Artificial Sequence
  Description of Artificial Sequence: Synthetic oligonucleotide
gguaucuagugucugggua

SEQ ID NO: 1891519 - RNA, 19 nt, Artificial Sequence
  Description of Artificial Sequence: Synthetic oligonucleotide
aacucauccugaagaucca

SEQ ID NO: 1891520 - RNA, 19 nt, Artificial Sequence
  Description of Artificial Sequence: Synthetic oligonucleotide
ucuuccgcucuaugaguuc

SEQ ID NO: 1891521 - RNA, 19 nt, Artificial Sequence
  Description of Artificial Sequence: Synthetic oligonucleotide
uggcaucaucauucauugc

SEQ ID NO: 1891522 - RNA, 19 nt, Artificial Sequence
  Description of Artificial Sequence: Synthetic oligonucleotide
cugcuacuggcucaucauc

SEQ ID NO: 1891523 - RNA, 19 nt, Artificial Sequence
  Description of Artificial Sequence: Synthetic oligonucleotide
gaaugugaucaaucugagu

SEQ ID NO: 1891524 - RNA, 19 nt, Artificial Sequence
  Description of Artificial Sequence: Synthetic oligonucleotide
agcgcuugguuuguguccu

SEQ ID NO: 1891525 - RNA, 19 nt, Artificial Sequence
  Description of Artificial Sequence: Synthetic oligonucleotide
ucaucccauuuacuaggua

SEQ ID NO: 1891526 - RNA, 19 nt, Artificial Sequence
  Description of Artificial Sequence: Synthetic oligonucleotide
cauuuacuagguaucuagu

SEQ ID NO: 1891527 - RNA, 19 nt, Artificial Sequence
  Description of Artificial Sequence: Synthetic oligonucleotide
cugguaaacucugggccac

SEQ ID NO: 1891528 - RNA, 19 nt, Artificial Sequence
  Description of Artificial Sequence: Synthetic oligonucleotide
gugucuggguacuggaaaa

SEQ ID NO: 1891529 - RNA, 19 nt, Artificial Sequence
  Description of Artificial Sequence: Synthetic oligonucleotide
cuggcucagguuugccaag

SEQ ID NO: 1891530 - RNA, 19 nt, Artificial Sequence
  Description of Artificial Sequence: Synthetic oligonucleotide
cagaagcuugcugaggaca

SEQ ID NO: 1891531 - RNA, 19 nt, Artificial Sequence
  Description of Artificial Sequence: Synthetic oligonucleotide
gauccaaggagcuggucuu

SEQ ID NO: 1891532 - RNA, 19 nt, Artificial Sequence
  Description of Artificial Sequence: Synthetic oligonucleotide
cugccuucccauggcaacc

SEQ ID NO: 1891533 - RNA, 19 nt, Artificial Sequence
  Description of Artificial Sequence: Synthetic oligonucleotide
acccuugcccaguuuucca

SEQ ID NO: 1891534 - RNA, 19 nt, Artificial Sequence
  Description of Artificial Sequence: Synthetic oligonucleotide
caacgcuaucugauucuuc

SEQ ID NO: 1891535 - RNA, 19 nt, Artificial Sequence
  Description of Artificial Sequence: Synthetic oligonucleotide
auccaaggagcuggucuuc

SEQ ID NO: 1891536 - RNA, 19 nt, Artificial Sequence
  Description of Artificial Sequence: Synthetic oligonucleotide
gcuggcuuuucuaucuacc

SEQ ID NO: 1891537 - RNA, 19 nt, Artificial Sequence
  Description of Artificial Sequence: Synthetic oligonucleotide
cuggcuuuucuaucuaccu

SEQ ID NO: 1891538 - RNA, 19 nt, Artificial Sequence
  Description of Artificial Sequence: Synthetic oligonucleotide
uccgguucuccuggcaaac

SEQ ID NO: 1891539 - RNA, 19 nt, Artificial Sequence
  Description of Artificial Sequence: Synthetic oligonucleotide
gcaacugauugguagucaa

SEQ ID NO: 1891540 - RNA, 19 nt, Artificial Sequence
  Description of Artificial Sequence: Synthetic oligonucleotide
guagucaacagagcuuucu

SEQ ID NO: 1891541 - RNA, 19 nt, Artificial Sequence
  Description of Artificial Sequence: Synthetic oligonucleotide
agcugggauaguucuccau

SEQ ID NO: 1891542 - RNA, 19 nt, Artificial Sequence
  Description of Artificial Sequence: Synthetic oligonucleotide
aagauccaccaaugaccuu

SEQ ID NO: 1891543 - RNA, 19 nt, Artificial Sequence
  Description of Artificial Sequence: Synthetic oligonucleotide
cuucacucucaccuuuuaa

SEQ ID NO: 1891544 - RNA, 19 nt, Artificial Sequence
  Description of Artificial Sequence: Synthetic oligonucleotide
guucuccuggcaaacucuc

SEQ ID NO: 1891545 - RNA, 19 nt, Artificial Sequence
  Description of Artificial Sequence: Synthetic oligonucleotide
ucaucaccacaccgucauc

SEQ ID NO: 1891546 - RNA, 19 nt, Artificial Sequence
  Description of Artificial Sequence: Synthetic oligonucleotide
guuaauucccauggucugu

SEQ ID NO: 1891547 - RNA, 19 nt, Artificial Sequence
  Description of Artificial Sequence: Synthetic oligonucleotide
acaacgcuaucugauucuu

SEQ ID NO: 1891548 - RNA, 19 nt, Artificial Sequence
  Description of Artificial Sequence: Synthetic oligonucleotide
aucuccgguucuccuggca

SEQ ID NO: 1891549 - RNA, 19 nt, Artificial Sequence
  Description of Artificial Sequence: Synthetic oligonucleotide
ccguuuuggguuucauccc

SEQ ID NO: 1891550 - RNA, 19 nt, Artificial Sequence
  Description of Artificial Sequence: Synthetic oligonucleotide
caacagagcuuucuguagu

SEQ ID NO: 1891551 - RNA, 19 nt, Artificial Sequence
  Description of Artificial Sequence: Synthetic oligonucleotide
caggaacgaucuccgguuc

SEQ ID NO: 1891552 - RNA, 19 nt, Artificial Sequence
  Description of Artificial Sequence: Synthetic oligonucleotide
acaucugguugaggcaacu

SEQ ID NO: 1891553 - RNA, 19 nt, Artificial Sequence
  Description of Artificial Sequence: Synthetic oligonucleotide
uuccgcucuaugaguucuc

SEQ ID NO: 1891554 - RNA, 19 nt, Artificial Sequence
  Description of Artificial Sequence: Synthetic oligonucleotide
gacacuggagaaggucauc

SEQ ID NO: 1891555 - RNA, 19 nt, Artificial Sequence
  Description of Artificial Sequence: Synthetic oligonucleotide
ccacaacgcuaucugauuc

SEQ ID NO: 1891556 - RNA, 19 nt, Artificial Sequence
  Description of Artificial Sequence: Synthetic oligonucleotide
cagcaaagcgcuuugccau

SEQ ID NO: 1891557 - RNA, 19 nt, Artificial Sequence
  Description of Artificial Sequence: Synthetic oligonucleotide
ggcaaccugaucauuugga

SEQ ID NO: 1891558 - RNA, 19 nt, Artificial Sequence
  Description of Artificial Sequence: Synthetic oligonucleotide
gucccacaacgcuaucuga

SEQ ID NO: 1891559 - RNA, 19 nt, Artificial Sequence
  Description of Artificial Sequence: Synthetic oligonucleotide
cuucuuucggaucuugcuu

SEQ ID NO: 1891560 - RNA, 19 nt, Artificial Sequence
  Description of Artificial Sequence: Synthetic oligonucleotide
caucaucauucauugcagu

SEQ ID NO: 1891561 - RNA, 19 nt, Artificial Sequence
  Description of Artificial Sequence: Synthetic oligonucleotide
cacaacgcuaucugauucu

SEQ ID NO: 1891562 - RNA, 19 nt, Artificial Sequence
  Description of Artificial Sequence: Synthetic oligonucleotide
uuccuuccuuugcuggcuu

SEQ ID NO: 1891563 - RNA, 19 nt, Artificial Sequence
  Description of Artificial Sequence: Synthetic oligonucleotide
gcugaggacaugaaaccga

SEQ ID NO: 1891564 - RNA, 19 nt, Artificial Sequence
  Description of Artificial Sequence: Synthetic oligonucleotide
gagaucgauacaacucggu

SEQ ID NO: 1891565 - RNA, 19 nt, Artificial Sequence
  Description of Artificial Sequence: Synthetic oligonucleotide
gagcguucaaaggcacuga

SEQ ID NO: 1891566 - RNA, 19 nt, Artificial Sequence
  Description of Artificial Sequence: Synthetic oligonucleotide
gggauaguucuccaucucu

SEQ ID NO: 1891567 - RNA, 19 nt, Artificial Sequence
  Description of Artificial Sequence: Synthetic oligonucleotide
uggucuguaucgggagggu

SEQ ID NO: 1891568 - RNA, 19 nt, Artificial Sequence
  Description of Artificial Sequence: Synthetic oligonucleotide
guguccuucgaagcaaucu

SEQ ID NO: 1891569 - RNA, 19 nt, Artificial Sequence
  Description of Artificial Sequence: Synthetic oligonucleotide
accgucaucuucacuguuu

SEQ ID NO: 1891570 - RNA, 19 nt, Artificial Sequence
  Description of Artificial Sequence: Synthetic oligonucleotide
cgaucuccgguucuccugg

SEQ ID NO: 1891571 - RNA, 19 nt, Artificial Sequence
  Description of Artificial Sequence: Synthetic oligonucleotide
ucgguccuggcaucaucau

SEQ ID NO: 1891572 - RNA, 19 nt, Artificial Sequence
  Description of Artificial Sequence: Synthetic oligonucleotide
acgguuccuguagacagua

SEQ ID NO: 1891573 - RNA, 19 nt, Artificial Sequence
  Description of Artificial Sequence: Synthetic oligonucleotide
cguaauuucuggauugcaa

SEQ ID NO: 1891574 - RNA, 19 nt, Artificial Sequence
  Description of Artificial Sequence: Synthetic oligonucleotide
agcuggccgaaaagagauc

SEQ ID NO: 1891575 - RNA, 19 nt, Artificial Sequence
  Description of Artificial Sequence: Synthetic oligonucleotide
caugaaaccgaagcuuccu

SEQ ID NO: 1891576 - RNA, 19 nt, Artificial Sequence
  Description of Artificial Sequence: Synthetic oligonucleotide
cuuccaagagcugguccca

SEQ ID NO: 1891577 - RNA, 19 nt, Artificial Sequence
  Description of Artificial Sequence: Synthetic oligonucleotide
ggauaguucuccaucucua

SEQ ID NO: 1891578 - RNA, 19 nt, Artificial Sequence
  Description of Artificial Sequence: Synthetic oligonucleotide
cuggccgaaaagagaucga

SEQ ID NO: 1891579 - RNA, 19 nt, Artificial Sequence
  Description of Artificial Sequence: Synthetic oligonucleotide
aucuagugucuggguacug

SEQ ID NO: 1891580 - RNA, 19 nt, Artificial Sequence
  Description of Artificial Sequence: Synthetic oligonucleotide
cuucccauggcaaccugau

SEQ ID NO: 1891581 - RNA, 19 nt, Artificial Sequence
  Description of Artificial Sequence: Synthetic oligonucleotide
augccacuucugcagugua

SEQ ID NO: 1891582 - RNA, 19 nt, Artificial Sequence
  Description of Artificial Sequence: Synthetic oligonucleotide
ucgauacaacucgguccug

SEQ ID NO: 1891583 - RNA, 19 nt, Artificial Sequence
  Description of Artificial Sequence: Synthetic oligonucleotide
gccaagaauuugguagaug

SEQ ID NO: 1891584 - RNA, 19 nt, Artificial Sequence
  Description of Artificial Sequence: Synthetic oligonucleotide
cgauacaacucgguccugg

SEQ ID NO: 1891585 - RNA, 19 nt, Artificial Sequence
  Description of Artificial Sequence: Synthetic oligonucleotide
guguggucaauaggugcca

SEQ ID NO: 1891586 - RNA, 19 nt, Artificial Sequence
  Description of Artificial Sequence: Synthetic oligonucleotide
aguucucgaaggagcuggu

SEQ ID NO: 1891587 - RNA, 19 nt, Artificial Sequence
  Description of Artificial Sequence: Synthetic oligonucleotide
ggaacgaucuccgguucuc

SEQ ID NO: 1891588 - RNA, 19 nt, Artificial Sequence
  Description of Artificial Sequence: Synthetic oligonucleotide
accugaucauuuggaucca

SEQ ID NO: 1891589 - RNA, 19 nt, Artificial Sequence
  Description of Artificial Sequence: Synthetic oligonucleotide
uccuuccuuugcuggcuuu

SEQ ID NO: 1891590 - RNA, 19 nt, Artificial Sequence
  Description of Artificial Sequence: Synthetic oligonucleotide
aacucgguccuggcaucau

SEQ ID NO: 1891591 - RNA, 19 nt, Artificial Sequence
  Description of Artificial Sequence: Synthetic oligonucleotide
gcaacucauccugaagauc

SEQ ID NO: 1891592 - RNA, 19 nt, Artificial Sequence
  Description of Artificial Sequence: Synthetic oligonucleotide
uggauccaaggagcugguc

SEQ ID NO: 1891593 - RNA, 19 nt, Artificial Sequence
  Description of Artificial Sequence: Synthetic oligonucleotide
caaugaccuuaacaaugcu

SEQ ID NO: 1891594 - RNA, 19 nt, Artificial Sequence
  Description of Artificial Sequence: Synthetic oligonucleotide
gcaaccugaucauuuggau

SEQ ID NO: 1891595 - RNA, 19 nt, Artificial Sequence
  Description of Artificial Sequence: Synthetic oligonucleotide
ggucaauaggugccaugaa

SEQ ID NO: 1891596 - RNA, 19 nt, Artificial Sequence
  Description of Artificial Sequence: Synthetic oligonucleotide
ggcaacugauugguaguca

SEQ ID NO: 1891597 - RNA, 19 nt, Artificial Sequence
  Description of Artificial Sequence: Synthetic oligonucleotide
cuccgguucuccuggcaaa

SEQ ID NO: 1891598 - RNA, 19 nt, Artificial Sequence
  Description of Artificial Sequence: Synthetic oligonucleotide
ccgaaaagagaucgauaca

SEQ ID NO: 1891599 - RNA, 19 nt, Artificial Sequence
  Description of Artificial Sequence: Synthetic oligonucleotide
cgcucuaugaguucucgaa

SEQ ID NO: 1891600 - RNA, 19 nt, Artificial Sequence
  Description of Artificial Sequence: Synthetic oligonucleotide
gauggagcgcuugguuugu

SEQ ID NO: 1891601 - RNA, 19 nt, Artificial Sequence
  Description of Artificial Sequence: Synthetic oligonucleotide
ggucuuccgcucuaugagu

SEQ ID NO: 1891602 - RNA, 19 nt, Artificial Sequence
  Description of Artificial Sequence: Synthetic oligonucleotide
cgcuaucugauucuucaca

SEQ ID NO: 1891603 - RNA, 19 nt, Artificial Sequence
  Description of Artificial Sequence: Synthetic oligonucleotide
ggguugagcuggccgaaaa

SEQ ID NO: 1891604 - RNA, 19 nt, Artificial Sequence
  Description of Artificial Sequence: Synthetic oligonucleotide
gcaggaacuucaggaacga

SEQ ID NO: 1891605 - RNA, 19 nt, Artificial Sequence
  Description of Artificial Sequence: Synthetic oligonucleotide
cugagucaauauagagcgu

SEQ ID NO: 1891606 - RNA, 19 nt, Artificial Sequence
  Description of Artificial Sequence: Synthetic oligonucleotide
ggguacuggaaaagcaacu

SEQ ID NO: 1891607 - RNA, 19 nt, Artificial Sequence
  Description of Artificial Sequence: Synthetic oligonucleotide
caugccacuucugcagugu

SEQ ID NO: 1891608 - RNA, 19 nt, Artificial Sequence
  Description of Artificial Sequence: Synthetic oligonucleotide
auggagcgcuugguuugug

SEQ ID NO: 1891609 - RNA, 19 nt, Artificial Sequence
  Description of Artificial Sequence: Synthetic oligonucleotide
gguuugccaagaauuuggu

SEQ ID NO: 1891610 - RNA, 19 nt, Artificial Sequence
  Description of Artificial Sequence: Synthetic oligonucleotide
ucauugcaguguggucaau

SEQ ID NO: 1891611 - RNA, 19 nt, Artificial Sequence
  Description of Artificial Sequence: Synthetic oligonucleotide
caacucgguccuggcauca

SEQ ID NO: 1891612 - RNA, 19 nt, Artificial Sequence
  Description of Artificial Sequence: Synthetic oligonucleotide
ggucaucaccacaccguca

SEQ ID NO: 1891613 - RNA, 19 nt, Artificial Sequence
  Description of Artificial Sequence: Synthetic oligonucleotide
cucuagcuuccucuuuggu

SEQ ID NO: 1891614 - RNA, 19 nt, Artificial Sequence
  Description of Artificial Sequence: Synthetic oligonucleotide
ggagcuggucuuccgcucu

SEQ ID NO: 1891615 - RNA, 19 nt, Artificial Sequence
  Description of Artificial Sequence: Synthetic oligonucleotide
gagcuggucuuccgcucua

SEQ ID NO: 1891616 - RNA, 19 nt, Artificial Sequence
  Description of Artificial Sequence: Synthetic oligonucleotide
cuuugccaugaagcuggga

SEQ ID NO: 1891617 - RNA, 19 nt, Artificial Sequence
  Description of Artificial Sequence: Synthetic oligonucleotide
gucuuccgcucuaugaguu

SEQ ID NO: 1891618 - RNA, 19 nt, Artificial Sequence
  Description of Artificial Sequence: Synthetic oligonucleotide
guuuuggguuucaucccau

SEQ ID NO: 1891619 - RNA, 19 nt, Artificial Sequence
  Description of Artificial Sequence: Synthetic oligonucleotide
gguagucaacagagcuuuc

SEQ ID NO: 1891620 - RNA, 19 nt, Artificial Sequence
  Description of Artificial Sequence: Synthetic oligonucleotide
aggguugagcuggccgaaa

SEQ ID NO: 1891621 - RNA, 19 nt, Artificial Sequence
  Description of Artificial Sequence: Synthetic oligonucleotide
ggccgaaaagagaucgaua

SEQ ID NO: 1891622 - RNA, 19 nt, Artificial Sequence
  Description of Artificial Sequence: Synthetic oligonucleotide
gcccaguuuuccagaagca

SEQ ID NO: 1891623 - RNA, 19 nt, Artificial Sequence
  Description of Artificial Sequence: Synthetic oligonucleotide
guccuucgaagcaaucuuu

SEQ ID NO: 1891624 - RNA, 19 nt, Artificial Sequence
  Description of Artificial Sequence: Synthetic oligonucleotide
ccuucgaagcaaucuuucu

SEQ ID NO: 1891625 - RNA, 19 nt, Artificial Sequence
  Description of Artificial Sequence: Synthetic oligonucleotide
aggugagcauuggcaggaa

SEQ ID NO: 1891626 - RNA, 19 nt, Artificial Sequence
  Description of Artificial Sequence: Synthetic oligonucleotide
gguaaacucugggccaccu

SEQ ID NO: 1891627 - RNA, 19 nt, Artificial Sequence
  Description of Artificial Sequence: Synthetic oligonucleotide
gcguucaaaggcacugaaa

SEQ ID NO: 1891628 - RNA, 19 nt, Artificial Sequence
  Description of Artificial Sequence: Synthetic oligonucleotide
cacucuccguuuuggguuu

SEQ ID NO: 1891629 - RNA, 19 nt, Artificial Sequence
  Description of Artificial Sequence: Synthetic oligonucleotide
aggugccaugaaacucaga

SEQ ID NO: 1891630 - RNA, 19 nt, Artificial Sequence
  Description of Artificial Sequence: Synthetic oligonucleotide
guggggcuuuucuuugcuu

SEQ ID NO: 1891631 - RNA, 19 nt, Artificial Sequence
  Description of Artificial Sequence: Synthetic oligonucleotide
cugaaacccuugcccaguu

SEQ ID NO: 1891632 - RNA, 19 nt, Artificial Sequence
  Description of Artificial Sequence: Synthetic oligonucleotide
cgaagcaaucuuucuuugu

SEQ ID NO: 1891633 - RNA, 19 nt, Artificial Sequence
  Description of Artificial Sequence: Synthetic oligonucleotide
cgaaggagcuggugguaga

SEQ ID NO: 1891634 - RNA, 19 nt, Artificial Sequence
  Description of Artificial Sequence: Synthetic oligonucleotide
ccgcucuaugaguucucga

SEQ ID NO: 1891635 - RNA, 19 nt, Artificial Sequence
  Description of Artificial Sequence: Synthetic oligonucleotide
ccaugaaacucagaagcuu

SEQ ID NO: 1891636 - RNA, 19 nt, Artificial Sequence
  Description of Artificial Sequence: Synthetic oligonucleotide
ggguuucaucccauuuacu

SEQ ID NO: 1891637 - RNA, 19 nt, Artificial Sequence
  Description of Artificial Sequence: Synthetic oligonucleotide
gcacaggggcuggcucagg

SEQ ID NO: 1891638 - RNA, 19 nt, Artificial Sequence
  Description of Artificial Sequence: Synthetic oligonucleotide
ccucagagacuuugacacu

SEQ ID NO: 1891639 - RNA, 19 nt, Artificial Sequence
  Description of Artificial Sequence: Synthetic oligonucleotide
cccacaacgcuaucugauu

SEQ ID NO: 1891640 - RNA, 19 nt, Artificial Sequence
  Description of Artificial Sequence: Synthetic oligonucleotide
ccaugaagcugggauaguu

SEQ ID NO: 1891641 - RNA, 19 nt, Artificial Sequence
  Description of Artificial Sequence: Synthetic oligonucleotide
ccugaucauuuggauccaa

SEQ ID NO: 1891642 - RNA, 19 nt, Artificial Sequence
  Description of Artificial Sequence: Synthetic oligonucleotide
caccgucaucuucacuguu

SEQ ID NO: 1891643 - RNA, 19 nt, Artificial Sequence
  Description of Artificial Sequence: Synthetic oligonucleotide
ggucuguaucgggaggguu

SEQ ID NO: 1891644 - RNA, 19 nt, Artificial Sequence
  Description of Artificial Sequence: Synthetic oligonucleotide
cggaucuugcuucguaauu

SEQ ID NO: 1891645 - RNA, 19 nt, Artificial Sequence
  Description of Artificial Sequence: Synthetic oligonucleotide
gccaugaagcugggauagu

SEQ ID NO: 1891646 - RNA, 19 nt, Artificial Sequence
  Description of Artificial Sequence: Synthetic oligonucleotide
ccgguucuccuggcaaacu

SEQ ID NO: 1891647 - RNA, 19 nt, Artificial Sequence
  Description of Artificial Sequence: Synthetic oligonucleotide
gcgcuugguuuguguccuu

SEQ ID NO: 1891648 - RNA, 19 nt, Artificial Sequence
  Description of Artificial Sequence: Synthetic oligonucleotide
aaaaucucaauuuuaaucc

SEQ ID NO: 1891649 - RNA, 19 nt, Artificial Sequence
  Description of Artificial Sequence: Synthetic oligonucleotide
gaauguacgauuuuaaagg

SEQ ID NO: 1891650 - RNA, 19 nt, Artificial Sequence
  Description of Artificial Sequence: Synthetic oligonucleotide
ucaaacauuucuauuaugg

SEQ ID NO: 1891651 - RNA, 19 nt, Artificial Sequence
  Description of Artificial Sequence: Synthetic oligonucleotide
caugauaucaucaucauuc

SEQ ID NO: 1891652 - RNA, 19 nt, Artificial Sequence
  Description of Artificial Sequence: Synthetic oligonucleotide
aguuuugucagauggagac

SEQ ID NO: 1891653 - RNA, 19 nt, Artificial Sequence
  Description of Artificial Sequence: Synthetic oligonucleotide
auuauuaggacucaaauuu

SEQ ID NO: 1891654 - RNA, 19 nt, Artificial Sequence
  Description of Artificial Sequence: Synthetic oligonucleotide
aauaguucuagaauguacg

SEQ ID NO: 1891655 - RNA, 19 nt, Artificial Sequence
  Description of Artificial Sequence: Synthetic oligonucleotide
aauucaaacauuucuauua

SEQ ID NO: 1891656 - RNA, 19 nt, Artificial Sequence
  Description of Artificial Sequence: Synthetic oligonucleotide
acugaucacacguaguugc

SEQ ID NO: 1891657 - RNA, 19 nt, Artificial Sequence
  Description of Artificial Sequence: Synthetic oligonucleotide
uguacgauuuuaaagguca

SEQ ID NO: 1891658 - RNA, 19 nt, Artificial Sequence
  Description of Artificial Sequence: Synthetic oligonucleotide
gaauuuacuuauuggaucc

SEQ ID NO: 1891659 - RNA, 19 nt, Artificial Sequence
  Description of Artificial Sequence: Synthetic oligonucleotide
uucuaagucucaaacgugg

SEQ ID NO: 1891660 - RNA, 19 nt, Artificial Sequence
  Description of Artificial Sequence: Synthetic oligonucleotide
ucuuuauacaagaaacugc

SEQ ID NO: 1891661 - RNA, 19 nt, Artificial Sequence
  Description of Artificial Sequence: Synthetic oligonucleotide
uugucagucacucacaaga

SEQ ID NO: 1891662 - RNA, 19 nt, Artificial Sequence
  Description of Artificial Sequence: Synthetic oligonucleotide
gauuccucaagauggaccg

SEQ ID NO: 1891663 - RNA, 19 nt, Artificial Sequence
  Description of Artificial Sequence: Synthetic oligonucleotide
uugauguggauuuuguagg

SEQ ID NO: 1891664 - RNA, 19 nt, Artificial Sequence
  Description of Artificial Sequence: Synthetic oligonucleotide
uuuccaauaauuuucaauu

SEQ ID NO: 1891665 - RNA, 19 nt, Artificial Sequence
  Description of Artificial Sequence: Synthetic oligonucleotide
acugacaaaaccccugccc

SEQ ID NO: 1891666 - RNA, 19 nt, Artificial Sequence
  Description of Artificial Sequence: Synthetic oligonucleotide
uccuuuaaaagucugcaca

SEQ ID NO: 1891667 - RNA, 19 nt, Artificial Sequence
  Description of Artificial Sequence: Synthetic oligonucleotide
augauuuuauaucuuccac

SEQ ID NO: 1891668 - RNA, 19 nt, Artificial Sequence
  Description of Artificial Sequence: Synthetic oligonucleotide
gagaguuugaaacuugggc

SEQ ID NO: 1891669 - RNA, 19 nt, Artificial Sequence
  Description of Artificial Sequence: Synthetic oligonucleotide
uaaucuaccagacccacga

SEQ ID NO: 1891670 - RNA, 19 nt, Artificial Sequence
  Description of Artificial Sequence: Synthetic oligonucleotide
acuagugaggaacuauggc

SEQ ID NO: 1891671 - RNA, 19 nt, Artificial Sequence
  Description of Artificial Sequence: Synthetic oligonucleotide
agaguuugaaacuugggcu

SEQ ID NO: 1891672 - RNA, 19 nt, Artificial Sequence
  Description of Artificial Sequence: Synthetic oligonucleotide
uugacuaaaauaguucuag

SEQ ID NO: 1891673 - RNA, 19 nt, Artificial Sequence
  Description of Artificial Sequence: Synthetic oligonucleotide
cacucuaauaaauucaaac

SEQ ID NO: 1891674 - RNA, 19 nt, Artificial Sequence
  Description of Artificial Sequence: Synthetic oligonucleotide
aauguacgauuuuaaaggu

SEQ ID NO: 1891675 - RNA, 19 nt, Artificial Sequence
  Description of Artificial Sequence: Synthetic oligonucleotide
aauccagaguuccacugac

SEQ ID NO: 1891676 - RNA, 19 nt, Artificial Sequence
  Description of Artificial Sequence: Synthetic oligonucleotide
aaaaccccugcccuguugg

SEQ ID NO: 1891677 - RNA, 19 nt, Artificial Sequence
  Description of Artificial Sequence: Synthetic oligonucleotide
caaacgugguccaagaaag

SEQ ID NO: 1891678 - RNA, 19 nt, Artificial Sequence
  Description of Artificial Sequence: Synthetic oligonucleotide
agaaagcaaguucugauug

SEQ ID NO: 1891679 - RNA, 19 nt, Artificial Sequence
  Description of Artificial Sequence: Synthetic oligonucleotide
cugagauguacucuuaggg

SEQ ID NO: 1891680 - RNA, 19 nt, Artificial Sequence
  Description of Artificial Sequence: Synthetic oligonucleotide
aaugugugguccaagcugg

SEQ ID NO: 1891681 - RNA, 19 nt, Artificial Sequence
  Description of Artificial Sequence: Synthetic oligonucleotide
uuaguuuugucagauggag

SEQ ID NO: 1891682 - RNA, 19 nt, Artificial Sequence
  Description of Artificial Sequence: Synthetic oligonucleotide
ucugauuguagcaacugac

SEQ ID NO: 1891683 - RNA, 19 nt, Artificial Sequence
  Description of Artificial Sequence: Synthetic oligonucleotide
uaagucucaaacguggucc

SEQ ID NO: 1891684 - RNA, 19 nt, Artificial Sequence
  Description of Artificial Sequence: Synthetic oligonucleotide
ugauuguagcaacugacca

SEQ ID NO: 1891685 - RNA, 19 nt, Artificial Sequence
  Description of Artificial Sequence: Synthetic oligonucleotide
ugagguuagucuuuguccc

SEQ ID NO: 1891686 - RNA, 19 nt, Artificial Sequence
  Description of Artificial Sequence: Synthetic oligonucleotide
caugaauuuacuuauugga

SEQ ID NO: 1891687 - RNA, 19 nt, Artificial Sequence
  Description of Artificial Sequence: Synthetic oligonucleotide
aauagcugccgucugagau

SEQ ID NO: 1891688 - RNA, 19 nt, Artificial Sequence
  Description of Artificial Sequence: Synthetic oligonucleotide
gggauaaucuaccagaccc

SEQ ID NO: 1891689 - RNA, 19 nt, Artificial Sequence
  Description of Artificial Sequence: Synthetic oligonucleotide
auaucgaugauuccucaag

SEQ ID NO: 1891690 - RNA, 19 nt, Artificial Sequence
  Description of Artificial Sequence: Synthetic oligonucleotide
aaaucucaauuuuaauccu

SEQ ID NO: 1891691 - RNA, 19 nt, Artificial Sequence
  Description of Artificial Sequence: Synthetic oligonucleotide
aucuacaucuucuagugcu

SEQ ID NO: 1891692 - RNA, 19 nt, Artificial Sequence
  Description of Artificial Sequence: Synthetic oligonucleotide
aauccuuuaaaagucugca

SEQ ID NO: 1891693 - RNA, 19 nt, Artificial Sequence
  Description of Artificial Sequence: Synthetic oligonucleotide
uacucuuagggacggaucc

SEQ ID NO: 1891694 - RNA, 19 nt, Artificial Sequence
  Description of Artificial Sequence: Synthetic oligonucleotide
uacuagugaggaacuaugg

SEQ ID NO: 1891695 - RNA, 19 nt, Artificial Sequence
  Description of Artificial Sequence: Synthetic oligonucleotide
uuagucuuugucccacugg

SEQ ID NO: 1891696 - RNA, 19 nt, Artificial Sequence
  Description of Artificial Sequence: Synthetic oligonucleotide
aaagucugcacauaaucua

SEQ ID NO: 1891697 - RNA, 19 nt, Artificial Sequence
  Description of Artificial Sequence: Synthetic oligonucleotide
acagguacugaucacacgu

SEQ ID NO: 1891698 - RNA, 19 nt, Artificial Sequence
  Description of Artificial Sequence: Synthetic oligonucleotide
uaauccuuuaaaagucugc

SEQ ID NO: 1891699 - RNA, 19 nt, Artificial Sequence
  Description of Artificial Sequence: Synthetic oligonucleotide
uuaauccuuuaaaagucug

SEQ ID NO: 1891700 - RNA, 19 nt, Artificial Sequence
  Description of Artificial Sequence: Synthetic oligonucleotide
ugagauguacucuuaggga

SEQ ID NO: 1891701 - RNA, 19 nt, Artificial Sequence
  Description of Artificial Sequence: Synthetic oligonucleotide
cugagguuagucuuugucc

SEQ ID NO: 1891702 - RNA, 19 nt, Artificial Sequence
  Description of Artificial Sequence: Synthetic oligonucleotide
aaaagucugcacauaaucu

SEQ ID NO: 1891703 - RNA, 19 nt, Artificial Sequence
  Description of Artificial Sequence: Synthetic oligonucleotide
ucgaugauuccucaagaug

SEQ ID NO: 1891704 - RNA, 19 nt, Artificial Sequence
  Description of Artificial Sequence: Synthetic oligonucleotide
cucacaagagaccacugcg

SEQ ID NO: 1891705 - RNA, 19 nt, Artificial Sequence
  Description of Artificial Sequence: Synthetic oligonucleotide
uuccacucuaauaaauuca

SEQ ID NO: 1891706 - RNA, 19 nt, Artificial Sequence
  Description of Artificial Sequence: Synthetic oligonucleotide
agacccauucuucuaaguc

SEQ ID NO: 1891707 - RNA, 19 nt, Artificial Sequence
  Description of Artificial Sequence: Synthetic oligonucleotide
uauuauuaggacucaaauu

SEQ ID NO: 1891708 - RNA, 19 nt, Artificial Sequence
  Description of Artificial Sequence: Synthetic oligonucleotide
aagucugcacauaaucuac

SEQ ID NO: 1891709 - RNA, 19 nt, Artificial Sequence
  Description of Artificial Sequence: Synthetic oligonucleotide
uucucuacuagugaggaac

SEQ ID NO: 1891710 - RNA, 19 nt, Artificial Sequence
  Description of Artificial Sequence: Synthetic oligonucleotide
uuuacuuauuggauccaug

SEQ ID NO: 1891711 - RNA, 19 nt, Artificial Sequence
  Description of Artificial Sequence: Synthetic oligonucleotide
ugauguggauuuuguaggg

SEQ ID NO: 1891712 - RNA, 19 nt, Artificial Sequence
  Description of Artificial Sequence: Synthetic oligonucleotide
uuugucaacagguacugau

SEQ ID NO: 1891713 - RNA, 19 nt, Artificial Sequence
  Description of Artificial Sequence: Synthetic oligonucleotide
auuaggacucaaauuuugc

SEQ ID NO: 1891714 - RNA, 19 nt, Artificial Sequence
  Description of Artificial Sequence: Synthetic oligonucleotide
aucgggauaaucuaccaga

SEQ ID NO: 1891715 - RNA, 19 nt, Artificial Sequence
  Description of Artificial Sequence: Synthetic oligonucleotide
uuugugguaauagcugccg

SEQ ID NO: 1891716 - RNA, 19 nt, Artificial Sequence
  Description of Artificial Sequence: Synthetic oligonucleotide
aaagggcaauguguggucc

SEQ ID NO: 1891717 - RNA, 19 nt, Artificial Sequence
  Description of Artificial Sequence: Synthetic oligonucleotide
cauaaucuacaucuucuag

SEQ ID NO: 1891718 - RNA, 19 nt, Artificial Sequence
  Description of Artificial Sequence: Synthetic oligonucleotide
uuuauacaagaaacugcug

SEQ ID NO: 1891719 - RNA, 19 nt, Artificial Sequence
  Description of Artificial Sequence: Synthetic oligonucleotide
aguucuagaauguacgauu

SEQ ID NO: 1891720 - RNA, 19 nt, Artificial Sequence
  Description of Artificial Sequence: Synthetic oligonucleotide
uguugaaccacaucucuuc

SEQ ID NO: 1891721 - RNA, 19 nt, Artificial Sequence
  Description of Artificial Sequence: Synthetic oligonucleotide
uagucuuugucccacugga

SEQ ID NO: 1891722 - RNA, 19 nt, Artificial Sequence
  Description of Artificial Sequence: Synthetic oligonucleotide
aaagacccauucuucuaag

SEQ ID NO: 1891723 - RNA, 19 nt, Artificial Sequence
  Description of Artificial Sequence: Synthetic oligonucleotide
uauaucuuccacucuaaua

SEQ ID NO: 1891724 - RNA, 19 nt, Artificial Sequence
  Description of Artificial Sequence: Synthetic oligonucleotide
auccuuuaaaagucugcac

SEQ ID NO: 1891725 - RNA, 19 nt, Artificial Sequence
  Description of Artificial Sequence: Synthetic oligonucleotide
uccacucuaauaaauucaa

SEQ ID NO: 1891726 - RNA, 19 nt, Artificial Sequence
  Description of Artificial Sequence: Synthetic oligonucleotide
uaucgaugauuccucaaga

SEQ ID NO: 1891727 - RNA, 19 nt, Artificial Sequence
  Description of Artificial Sequence: Synthetic oligonucleotide
uuagggacggauccaggag

SEQ ID NO: 1891728 - RNA, 19 nt, Artificial Sequence
  Description of Artificial Sequence: Synthetic oligonucleotide
uuacaugggcaguuaauga

SEQ ID NO: 1891729 - RNA, 19 nt, Artificial Sequence
  Description of Artificial Sequence: Synthetic oligonucleotide
ggcucugucguccagaaag

SEQ ID NO: 1891730 - RNA, 19 nt, Artificial Sequence
  Description of Artificial Sequence: Synthetic oligonucleotide
ucaucuguguugaaccaca

SEQ ID NO: 1891731 - RNA, 19 nt, Artificial Sequence
  Description of Artificial Sequence: Synthetic oligonucleotide
guuaguuuucagaagcacc

SEQ ID NO: 1891732 - RNA, 19 nt, Artificial Sequence
  Description of Artificial Sequence: Synthetic oligonucleotide
uuuauaucuuccacucuaa

SEQ ID NO: 1891733 - RNA, 19 nt, Artificial Sequence
  Description of Artificial Sequence: Synthetic oligonucleotide
ucccuuugugguaauagcu

SEQ ID NO: 1891734 - RNA, 19 nt, Artificial Sequence
  Description of Artificial Sequence: Synthetic oligonucleotide
acgauuuuaaaggucaggu

SEQ ID NO: 1891735 - RNA, 19 nt, Artificial Sequence
  Description of Artificial Sequence: Synthetic oligonucleotide
guaguugcuauuauuagga

SEQ ID NO: 1891736 - RNA, 19 nt, Artificial Sequence
  Description of Artificial Sequence: Synthetic oligonucleotide
cuuccacucuaauaaauuc

SEQ ID NO: 1891737 - RNA, 19 nt, Artificial Sequence
  Description of Artificial Sequence: Synthetic oligonucleotide
cgaugauuccucaagaugg

SEQ ID NO: 1891738 - RNA, 19 nt, Artificial Sequence
  Description of Artificial Sequence: Synthetic oligonucleotide
cuacuagugaggaacuaug

SEQ ID NO: 1891739 - RNA, 19 nt, Artificial Sequence
  Description of Artificial Sequence: Synthetic oligonucleotide
ucuagaauguacgauuuua

SEQ ID NO: 1891740 - RNA, 19 nt, Artificial Sequence
  Description of Artificial Sequence: Synthetic oligonucleotide
uucaaacauuucuauuaug

SEQ ID NO: 1891741 - RNA, 19 nt, Artificial Sequence
  Description of Artificial Sequence: Synthetic oligonucleotide
auaguucuagaauguacga

SEQ ID NO: 1891742 - RNA, 19 nt, Artificial Sequence
  Description of Artificial Sequence: Synthetic oligonucleotide
ucaaaaucucaauuuuaau

SEQ ID NO: 1891743 - RNA, 19 nt, Artificial Sequence
  Description of Artificial Sequence: Synthetic oligonucleotide
agcuugacuaaaauaguuc

SEQ ID NO: 1891744 - RNA, 19 nt, Artificial Sequence
  Description of Artificial Sequence: Synthetic oligonucleotide
ugaccagucaauccagagu

SEQ ID NO: 1891745 - RNA, 19 nt, Artificial Sequence
  Description of Artificial Sequence: Synthetic oligonucleotide
acguaguugcuauuauuag

SEQ ID NO: 1891746 - RNA, 19 nt, Artificial Sequence
  Description of Artificial Sequence: Synthetic oligonucleotide
uguuguucaaaaucucaau

SEQ ID NO: 1891747 - RNA, 19 nt, Artificial Sequence
  Description of Artificial Sequence: Synthetic oligonucleotide
uccaagaaagcaaguucug

SEQ ID NO: 1891748 - RNA, 19 nt, Artificial Sequence
  Description of Artificial Sequence: Synthetic oligonucleotide
ugacuaaaauaguucuaga

SEQ ID NO: 1891749 - RNA, 19 nt, Artificial Sequence
  Description of Artificial Sequence: Synthetic oligonucleotide
uaaaggucaggucucuuua

SEQ ID NO: 1891750 - RNA, 19 nt, Artificial Sequence
  Description of Artificial Sequence: Synthetic oligonucleotide
augcugucaaguuuggggu

SEQ ID NO: 1891751 - RNA, 19 nt, Artificial Sequence
  Description of Artificial Sequence: Synthetic oligonucleotide
uacaugggcaguuaaugau

SEQ ID NO: 1891752 - RNA, 19 nt, Artificial Sequence
  Description of Artificial Sequence: Synthetic oligonucleotide
ucuuccacucuaauaaauu

SEQ ID NO: 1891753 - RNA, 19 nt, Artificial Sequence
  Description of Artificial Sequence: Synthetic oligonucleotide
uuauuaggacucaaauuuu

SEQ ID NO: 1891754 - RNA, 19 nt, Artificial Sequence
  Description of Artificial Sequence: Synthetic oligonucleotide
ucgauaucgaugauuccuc

SEQ ID NO: 1891755 - RNA, 19 nt, Artificial Sequence
  Description of Artificial Sequence: Synthetic oligonucleotide
cuaacugcacagcaucccc

SEQ ID NO: 1891756 - RNA, 19 nt, Artificial Sequence
  Description of Artificial Sequence: Synthetic oligonucleotide
cacuugaugagcagaaguc

SEQ ID NO: 1891757 - RNA, 19 nt, Artificial Sequence
  Description of Artificial Sequence: Synthetic oligonucleotide
aucccgucgauaucgauga

SEQ ID NO: 1891758 - RNA, 19 nt, Artificial Sequence
  Description of Artificial Sequence: Synthetic oligonucleotide
gauguacucuuagggacgg

SEQ ID NO: 1891759 - RNA, 19 nt, Artificial Sequence
  Description of Artificial Sequence: Synthetic oligonucleotide
ucuggcaucccgucgauau

SEQ ID NO: 1891760 - RNA, 19 nt, Artificial Sequence
  Description of Artificial Sequence: Synthetic oligonucleotide
uuccauuuccuucccugag

SEQ ID NO: 1891761 - RNA, 19 nt, Artificial Sequence
  Description of Artificial Sequence: Synthetic oligonucleotide
aaacgugguccaagaaagc

SEQ ID NO: 1891762 - RNA, 19 nt, Artificial Sequence
  Description of Artificial Sequence: Synthetic oligonucleotide
agguacugaucacacguag

SEQ ID NO: 1891763 - RNA, 19 nt, Artificial Sequence
  Description of Artificial Sequence: Synthetic oligonucleotide
uggcaucccgucgauaucg

SEQ ID NO: 1891764 - RNA, 19 nt, Artificial Sequence
  Description of Artificial Sequence: Synthetic oligonucleotide
ucuaagucucaaacguggu

SEQ ID NO: 1891765 - RNA, 19 nt, Artificial Sequence
  Description of Artificial Sequence: Synthetic oligonucleotide
gauguggauuuuguagggg

SEQ ID NO: 1891766 - RNA, 19 nt, Artificial Sequence
  Description of Artificial Sequence: Synthetic oligonucleotide
ugagcagaaguccggugug

SEQ ID NO: 1891767 - RNA, 19 nt, Artificial Sequence
  Description of Artificial Sequence: Synthetic oligonucleotide
aguuuugucaacagguacu

SEQ ID NO: 1891768 - RNA, 19 nt, Artificial Sequence
  Description of Artificial Sequence: Synthetic oligonucleotide
gaaacuugggcucugucgu

SEQ ID NO: 1891769 - RNA, 19 nt, Artificial Sequence
  Description of Artificial Sequence: Synthetic oligonucleotide
uaguuuugucagauggaga

SEQ ID NO: 1891770 - RNA, 19 nt, Artificial Sequence
  Description of Artificial Sequence: Synthetic oligonucleotide
agagcucacaggcuauguc

SEQ ID NO: 1891771 - RNA, 19 nt, Artificial Sequence
  Description of Artificial Sequence: Synthetic oligonucleotide
cuucuaagucucaaacgug

SEQ ID NO: 1891772 - RNA, 19 nt, Artificial Sequence
  Description of Artificial Sequence: Synthetic oligonucleotide
uagggacggauccaggaga

SEQ ID NO: 1891773 - RNA, 19 nt, Artificial Sequence
  Description of Artificial Sequence: Synthetic oligonucleotide
ucucaaacgugguccaaga

SEQ ID NO: 1891774 - RNA, 19 nt, Artificial Sequence
  Description of Artificial Sequence: Synthetic oligonucleotide
cuuauuggauccaugauau

SEQ ID NO: 1891775 - RNA, 19 nt, Artificial Sequence
  Description of Artificial Sequence: Synthetic oligonucleotide
ugugguaauagcugccguc

SEQ ID NO: 1891776 - RNA, 19 nt, Artificial Sequence
  Description of Artificial Sequence: Synthetic oligonucleotide
ucuuagggacggauccagg

SEQ ID NO: 1891777 - RNA, 19 nt, Artificial Sequence
  Description of Artificial Sequence: Synthetic oligonucleotide
aaucuaccagacccacgag

SEQ ID NO: 1891778 - RNA, 19 nt, Artificial Sequence
  Description of Artificial Sequence: Synthetic oligonucleotide
uuugacagugguagcgagu

SEQ ID NO: 1891779 - RNA, 19 nt, Artificial Sequence
  Description of Artificial Sequence: Synthetic oligonucleotide
acagggagaguuugaaacu

SEQ ID NO: 1891780 - RNA, 19 nt, Artificial Sequence
  Description of Artificial Sequence: Synthetic oligonucleotide
ucgggauaaucuaccagac

SEQ ID NO: 1891781 - RNA, 19 nt, Artificial Sequence
  Description of Artificial Sequence: Synthetic oligonucleotide
agauggaccgcaugcuguc

SEQ ID NO: 1891782 - RNA, 19 nt, Artificial Sequence
  Description of Artificial Sequence: Synthetic oligonucleotide
agauguacucuuagggacg

SEQ ID NO: 1891783 - RNA, 19 nt, Artificial Sequence
  Description of Artificial Sequence: Synthetic oligonucleotide
agaguucuggcaucccguc

SEQ ID NO: 1891784 - RNA, 19 nt, Artificial Sequence
  Description of Artificial Sequence: Synthetic oligonucleotide
gaguuccacugacaaaacc

SEQ ID NO: 1891785 - RNA, 19 nt, Artificial Sequence
  Description of Artificial Sequence: Synthetic oligonucleotide
caguuuugucaacagguac

SEQ ID NO: 1891786 - RNA, 19 nt, Artificial Sequence
  Description of Artificial Sequence: Synthetic oligonucleotide
ucucuacuagugaggaacu

SEQ ID NO: 1891787 - RNA, 19 nt, Artificial Sequence
  Description of Artificial Sequence: Synthetic oligonucleotide
gaauuggcacuugaugagc

SEQ ID NO: 1891788 - RNA, 19 nt, Artificial Sequence
  Description of Artificial Sequence: Synthetic oligonucleotide
uugucagauggagacacca

SEQ ID NO: 1891789 - RNA, 19 nt, Artificial Sequence
  Description of Artificial Sequence: Synthetic oligonucleotide
aagacccauucuucuaagu

SEQ ID NO: 1891790 - RNA, 19 nt, Artificial Sequence
  Description of Artificial Sequence: Synthetic oligonucleotide
caucccgucgauaucgaug

SEQ ID NO: 1891791 - RNA, 19 nt, Artificial Sequence
  Description of Artificial Sequence: Synthetic oligonucleotide
aauuuacuuauuggaucca

SEQ ID NO: 1891792 - RNA, 19 nt, Artificial Sequence
  Description of Artificial Sequence: Synthetic oligonucleotide
uugacagugguagcgaguc

SEQ ID NO: 1891793 - RNA, 19 nt, Artificial Sequence
  Description of Artificial Sequence: Synthetic oligonucleotide
aauuacaugggcaguuaau

SEQ ID NO: 1891794 - RNA, 19 nt, Artificial Sequence
  Description of Artificial Sequence: Synthetic oligonucleotide
caucaucgggauaaucuac

SEQ ID NO: 1891795 - RNA, 19 nt, Artificial Sequence
  Description of Artificial Sequence: Synthetic oligonucleotide
ucuacuagugaggaacuau

SEQ ID NO: 1891796 - RNA, 19 nt, Artificial Sequence
  Description of Artificial Sequence: Synthetic oligonucleotide
aauuggcacuugaugagca

SEQ ID NO: 1891797 - RNA, 19 nt, Artificial Sequence
  Description of Artificial Sequence: Synthetic oligonucleotide
uuucuuugacagugguagc

SEQ ID NO: 1891798 - RNA, 19 nt, Artificial Sequence
  Description of Artificial Sequence: Synthetic oligonucleotide
agaaccaguuuugucaaca

SEQ ID NO: 1891799 - RNA, 19 nt, Artificial Sequence
  Description of Artificial Sequence: Synthetic oligonucleotide
agucacucacaagagacca

SEQ ID NO: 1891800 - RNA, 19 nt, Artificial Sequence
  Description of Artificial Sequence: Synthetic oligonucleotide
agcaacugaccagucaauc

SEQ ID NO: 1891801 - RNA, 19 nt, Artificial Sequence
  Description of Artificial Sequence: Synthetic oligonucleotide
cucccuuugugguaauagc

SEQ ID NO: 1891802 - RNA, 19 nt, Artificial Sequence
  Description of Artificial Sequence: Synthetic oligonucleotide
ucacucacaagagaccacu

SEQ ID NO: 1891803 - RNA, 19 nt, Artificial Sequence
  Description of Artificial Sequence: Synthetic oligonucleotide
cuugcugccgacgacuggc

SEQ ID NO: 1891804 - RNA, 19 nt, Artificial Sequence
  Description of Artificial Sequence: Synthetic oligonucleotide
ucaucgggauaaucuacca

SEQ ID NO: 1891805 - RNA, 19 nt, Artificial Sequence
  Description of Artificial Sequence: Synthetic oligonucleotide
acgaguccucccuuugugg

SEQ ID NO: 1891806 - RNA, 19 nt, Artificial Sequence
  Description of Artificial Sequence: Synthetic oligonucleotide
guaauagcugccgucugag

SEQ ID NO: 1891807 - RNA, 19 nt, Artificial Sequence
  Description of Artificial Sequence: Synthetic oligonucleotide
cuuugacagugguagcgag

SEQ ID NO: 1891808 - RNA, 19 nt, Artificial Sequence
  Description of Artificial Sequence: Synthetic oligonucleotide
gucuuugucccacuggaca

SEQ ID NO: 1891809 - RNA, 19 nt, Artificial Sequence
  Description of Artificial Sequence: Synthetic oligonucleotide
ugucguccagaaagguuag

SEQ ID NO: 1891810 - RNA, 19 nt, Artificial Sequence
  Description of Artificial Sequence: Synthetic oligonucleotide
uggcauucucuacuaguga

SEQ ID NO: 1891811 - RNA, 19 nt, Artificial Sequence
  Description of Artificial Sequence: Synthetic oligonucleotide
ugacaaaaccccugcccug

SEQ ID NO: 1891812 - RNA, 19 nt, Artificial Sequence
  Description of Artificial Sequence: Synthetic oligonucleotide
cuuaguuuugucagaugga

SEQ ID NO: 1891813 - RNA, 19 nt, Artificial Sequence
  Description of Artificial Sequence: Synthetic oligonucleotide
uuugucagauggagacacc

SEQ ID NO: 1891814 - RNA, 19 nt, Artificial Sequence
  Description of Artificial Sequence: Synthetic oligonucleotide
cuucccugagaaaagggca

SEQ ID NO: 1891815 - RNA, 19 nt, Artificial Sequence
  Description of Artificial Sequence: Synthetic oligonucleotide
ugucagauggagacaccac

SEQ ID NO: 1891816 - RNA, 19 nt, Artificial Sequence
  Description of Artificial Sequence: Synthetic oligonucleotide
ucuuugacagugguagcga

SEQ ID NO: 1891817 - RNA, 19 nt, Artificial Sequence
  Description of Artificial Sequence: Synthetic oligonucleotide
uccggugugcugcugauuu

SEQ ID NO: 1891818 - RNA, 19 nt, Artificial Sequence
  Description of Artificial Sequence: Synthetic oligonucleotide
cuaagucucaaacgugguc

SEQ ID NO: 1891819 - RNA, 19 nt, Artificial Sequence
  Description of Artificial Sequence: Synthetic oligonucleotide
uucaauuacaugggcaguu

SEQ ID NO: 1891820 - RNA, 19 nt, Artificial Sequence
  Description of Artificial Sequence: Synthetic oligonucleotide
gaguucuggcaucccgucg

SEQ ID NO: 1891821 - RNA, 19 nt, Artificial Sequence
  Description of Artificial Sequence: Synthetic oligonucleotide
aacugaccagucaauccag

SEQ ID NO: 1891822 - RNA, 19 nt, Artificial Sequence
  Description of Artificial Sequence: Synthetic oligonucleotide
aucgaugauuccucaagau

SEQ ID NO: 1891823 - RNA, 19 nt, Artificial Sequence
  Description of Artificial Sequence: Synthetic oligonucleotide
uuuuaaaggucaggucucu

SEQ ID NO: 1891824 - RNA, 19 nt, Artificial Sequence
  Description of Artificial Sequence: Synthetic oligonucleotide
cagaaguccggugugcugc

SEQ ID NO: 1891825 - RNA, 19 nt, Artificial Sequence
  Description of Artificial Sequence: Synthetic oligonucleotide
gucagauggagacaccaca

SEQ ID NO: 1891826 - RNA, 19 nt, Artificial Sequence
  Description of Artificial Sequence: Synthetic oligonucleotide
auguacgauuuuaaagguc

SEQ ID NO: 1891827 - RNA, 19 nt, Artificial Sequence
  Description of Artificial Sequence: Synthetic oligonucleotide
aagaguucuggcaucccgu

SEQ ID NO: 1891828 - RNA, 19 nt, Artificial Sequence
  Description of Artificial Sequence: Synthetic oligonucleotide
uacugaucacacguaguug

SEQ ID NO: 1891829 - RNA, 19 nt, Artificial Sequence
  Description of Artificial Sequence: Synthetic oligonucleotide
cacguaguugcuauuauua

SEQ ID NO: 1891830 - RNA, 19 nt, Artificial Sequence
  Description of Artificial Sequence: Synthetic oligonucleotide
agguuagucuuugucccac

SEQ ID NO: 1891831 - RNA, 19 nt, Artificial Sequence
  Description of Artificial Sequence: Synthetic oligonucleotide
uuucaauuacaugggcagu

SEQ ID NO: 1891832 - RNA, 19 nt, Artificial Sequence
  Description of Artificial Sequence: Synthetic oligonucleotide
aagggcaauguguggucca

SEQ ID NO: 1891833 - RNA, 19 nt, Artificial Sequence
  Description of Artificial Sequence: Synthetic oligonucleotide
caucgggauaaucuaccag

SEQ ID NO: 1891834 - RNA, 19 nt, Artificial Sequence
  Description of Artificial Sequence: Synthetic oligonucleotide
ucugucguccagaaagguu

SEQ ID NO: 1891835 - RNA, 19 nt, Artificial Sequence
  Description of Artificial Sequence: Synthetic oligonucleotide
uaguugcuauuauuaggac

SEQ ID NO: 1891836 - RNA, 19 nt, Artificial Sequence
  Description of Artificial Sequence: Synthetic oligonucleotide
uguacucuuagggacggau

SEQ ID NO: 1891837 - RNA, 19 nt, Artificial Sequence
  Description of Artificial Sequence: Synthetic oligonucleotide
gaccagucaauccagaguu

SEQ ID NO: 1891838 - RNA, 19 nt, Artificial Sequence
  Description of Artificial Sequence: Synthetic oligonucleotide
ugggcaguuaaugauuuua

SEQ ID NO: 1891839 - RNA, 19 nt, Artificial Sequence
  Description of Artificial Sequence: Synthetic oligonucleotide
caagauggaccgcaugcug

SEQ ID NO: 1891840 - RNA, 19 nt, Artificial Sequence
  Description of Artificial Sequence: Synthetic oligonucleotide
gauaucgaugauuccucaa

SEQ ID NO: 1891841 - RNA, 19 nt, Artificial Sequence
  Description of Artificial Sequence: Synthetic oligonucleotide
aaacugcuggcauucucua

SEQ ID NO: 1891842 - RNA, 19 nt, Artificial Sequence
  Description of Artificial Sequence: Synthetic oligonucleotide
gaaaagggcaauguguggu

SEQ ID NO: 1891843 - RNA, 19 nt, Artificial Sequence
  Description of Artificial Sequence: Synthetic oligonucleotide
ugauaucaucaucauucuu

SEQ ID NO: 1891844 - RNA, 19 nt, Artificial Sequence
  Description of Artificial Sequence: Synthetic oligonucleotide
uugugguaauagcugccgu

SEQ ID NO: 1891845 - RNA, 19 nt, Artificial Sequence
  Description of Artificial Sequence: Synthetic oligonucleotide
cuuagggacggauccagga

SEQ ID NO: 1891846 - RNA, 19 nt, Artificial Sequence
  Description of Artificial Sequence: Synthetic oligonucleotide
uggcuuuuauuuccauuuc

SEQ ID NO: 1891847 - RNA, 19 nt, Artificial Sequence
  Description of Artificial Sequence: Synthetic oligonucleotide
ugcacagcauccccuccgc

SEQ ID NO: 1891848 - RNA, 19 nt, Artificial Sequence
  Description of Artificial Sequence: Synthetic oligonucleotide
gcaguuaaugauuuuauau

SEQ ID NO: 1891849 - RNA, 19 nt, Artificial Sequence
  Description of Artificial Sequence: Synthetic oligonucleotide
uccuuuccaugaauuuacu

SEQ ID NO: 1891850 - RNA, 19 nt, Artificial Sequence
  Description of Artificial Sequence: Synthetic oligonucleotide
cauucucuacuagugagga

SEQ ID NO: 1891851 - RNA, 19 nt, Artificial Sequence
  Description of Artificial Sequence: Synthetic oligonucleotide
gagacaccacagcuucucc

SEQ ID NO: 1891852 - RNA, 19 nt, Artificial Sequence
  Description of Artificial Sequence: Synthetic oligonucleotide
auuuacuuauuggauccau

SEQ ID NO: 1891853 - RNA, 19 nt, Artificial Sequence
  Description of Artificial Sequence: Synthetic oligonucleotide
uucuagaauguacgauuuu

SEQ ID NO: 1891854 - RNA, 19 nt, Artificial Sequence
  Description of Artificial Sequence: Synthetic oligonucleotide
agacccacgaguccucccu

SEQ ID NO: 1891855 - RNA, 19 nt, Artificial Sequence
  Description of Artificial Sequence: Synthetic oligonucleotide
gcaaguucugauuguagca

SEQ ID NO: 1891856 - RNA, 19 nt, Artificial Sequence
  Description of Artificial Sequence: Synthetic oligonucleotide
gucucaaacgugguccaag

SEQ ID NO: 1891857 - RNA, 19 nt, Artificial Sequence
  Description of Artificial Sequence: Synthetic oligonucleotide
ucacacguaguugcuauua

SEQ ID NO: 1891858 - RNA, 19 nt, Artificial Sequence
  Description of Artificial Sequence: Synthetic oligonucleotide
gucgauaucgaugauuccu

SEQ ID NO: 1891859 - RNA, 19 nt, Artificial Sequence
  Description of Artificial Sequence: Synthetic oligonucleotide
cuugacuaaaauaguucua

SEQ ID NO: 1891860 - RNA, 19 nt, Artificial Sequence
  Description of Artificial Sequence: Synthetic oligonucleotide
ugguagcgagucuuccuug

SEQ ID NO: 1891861 - RNA, 19 nt, Artificial Sequence
  Description of Artificial Sequence: Synthetic oligonucleotide
ugcuggcauucucuacuag

SEQ ID NO: 1891862 - RNA, 19 nt, Artificial Sequence
  Description of Artificial Sequence: Synthetic oligonucleotide
ucaauuacaugggcaguua

SEQ ID NO: 1891863 - RNA, 19 nt, Artificial Sequence
  Description of Artificial Sequence: Synthetic oligonucleotide
agaguuccacugacaaaac

SEQ ID NO: 1891864 - RNA, 19 nt, Artificial Sequence
  Description of Artificial Sequence: Synthetic oligonucleotide
acuggacagggagaguuug

SEQ ID NO: 1891865 - RNA, 19 nt, Artificial Sequence
  Description of Artificial Sequence: Synthetic oligonucleotide
uaauagcugccgucugaga

SEQ ID NO: 1891866 - RNA, 19 nt, Artificial Sequence
  Description of Artificial Sequence: Synthetic oligonucleotide
cuaccagacccacgagucc

SEQ ID NO: 1891867 - RNA, 19 nt, Artificial Sequence
  Description of Artificial Sequence: Synthetic oligonucleotide
gcuugacuaaaauaguucu

SEQ ID NO: 1891868 - RNA, 19 nt, Artificial Sequence
  Description of Artificial Sequence: Synthetic oligonucleotide
cucuuagggacggauccag

SEQ ID NO: 1891869 - RNA, 19 nt, Artificial Sequence
  Description of Artificial Sequence: Synthetic oligonucleotide
accacugcgcuuugaugug

SEQ ID NO: 1891870 - RNA, 19 nt, Artificial Sequence
  Description of Artificial Sequence: Synthetic oligonucleotide
agucuuugucccacuggac

SEQ ID NO: 1891871 - RNA, 19 nt, Artificial Sequence
  Description of Artificial Sequence: Synthetic oligonucleotide
ucguccagaaagguuaguu

SEQ ID NO: 1891872 - RNA, 19 nt, Artificial Sequence
  Description of Artificial Sequence: Synthetic oligonucleotide
uuauuggauccaugauauc

SEQ ID NO: 1891873 - RNA, 19 nt, Artificial Sequence
  Description of Artificial Sequence: Synthetic oligonucleotide
gaucacacguaguugcuau

SEQ ID NO: 1891874 - RNA, 19 nt, Artificial Sequence
  Description of Artificial Sequence: Synthetic oligonucleotide
acacguaguugcuauuauu

SEQ ID NO: 1891875 - RNA, 19 nt, Artificial Sequence
  Description of Artificial Sequence: Synthetic oligonucleotide
ugaggaacuauggcagaaa

SEQ ID NO: 1891876 - RNA, 19 nt, Artificial Sequence
  Description of Artificial Sequence: Synthetic oligonucleotide
ccgucgauaucgaugauuc

SEQ ID NO: 1891877 - RNA, 19 nt, Artificial Sequence
  Description of Artificial Sequence: Synthetic oligonucleotide
caagaaagcaaguucugau

SEQ ID NO: 1891878 - RNA, 19 nt, Artificial Sequence
  Description of Artificial Sequence: Synthetic oligonucleotide
ggacggauccaggagagcc

SEQ ID NO: 1891879 - RNA, 19 nt, Artificial Sequence
  Description of Artificial Sequence: Synthetic oligonucleotide
guacgauuuuaaaggucag

SEQ ID NO: 1891880 - RNA, 19 nt, Artificial Sequence
  Description of Artificial Sequence: Synthetic oligonucleotide
cacgaguccucccuuugug

SEQ ID NO: 1891881 - RNA, 19 nt, Artificial Sequence
  Description of Artificial Sequence: Synthetic oligonucleotide
gccugcuccauugaauugg

SEQ ID NO: 1891882 - RNA, 19 nt, Artificial Sequence
  Description of Artificial Sequence: Synthetic oligonucleotide
cacugacaaaaccccugcc

SEQ ID NO: 1891883 - RNA, 19 nt, Artificial Sequence
  Description of Artificial Sequence: Synthetic oligonucleotide
gagguuagucuuuguccca

SEQ ID NO: 1891884 - RNA, 19 nt, Artificial Sequence
  Description of Artificial Sequence: Synthetic oligonucleotide
ugccgucugagauguacuc

SEQ ID NO: 1891885 - RNA, 19 nt, Artificial Sequence
  Description of Artificial Sequence: Synthetic oligonucleotide
uagcugccgucugagaugu

SEQ ID NO: 1891886 - RNA, 19 nt, Artificial Sequence
  Description of Artificial Sequence: Synthetic oligonucleotide
gguuaguuuucagaagcac

SEQ ID NO: 1891887 - RNA, 19 nt, Artificial Sequence
  Description of Artificial Sequence: Synthetic oligonucleotide
ugcuauuauuaggacucaa

SEQ ID NO: 1891888 - RNA, 19 nt, Artificial Sequence
  Description of Artificial Sequence: Synthetic oligonucleotide
uagcaacugaccagucaau

SEQ ID NO: 1891889 - RNA, 19 nt, Artificial Sequence
  Description of Artificial Sequence: Synthetic oligonucleotide
cacaggcuaugucuucccc

SEQ ID NO: 1891890 - RNA, 19 nt, Artificial Sequence
  Description of Artificial Sequence: Synthetic oligonucleotide
ucaagaguucuggcauccc

SEQ ID NO: 1891891 - RNA, 19 nt, Artificial Sequence
  Description of Artificial Sequence: Synthetic oligonucleotide
ugcccuguuggcuuuuauu

SEQ ID NO: 1891892 - RNA, 19 nt, Artificial Sequence
  Description of Artificial Sequence: Synthetic oligonucleotide
guacugaucacacguaguu

SEQ ID NO: 1891893 - RNA, 19 nt, Artificial Sequence
  Description of Artificial Sequence: Synthetic oligonucleotide
aagagaccacugcgcuuug

SEQ ID NO: 1891894 - RNA, 19 nt, Artificial Sequence
  Description of Artificial Sequence: Synthetic oligonucleotide
cccuuugugguaauagcug

SEQ ID NO: 1891895 - RNA, 19 nt, Artificial Sequence
  Description of Artificial Sequence: Synthetic oligonucleotide
acagugguagcgagucuuc

SEQ ID NO: 1891896 - RNA, 19 nt, Artificial Sequence
  Description of Artificial Sequence: Synthetic oligonucleotide
cugacaaaaccccugcccu

SEQ ID NO: 1891897 - RNA, 19 nt, Artificial Sequence
  Description of Artificial Sequence: Synthetic oligonucleotide
aggaacuauggcagaaaga

SEQ ID NO: 1891898 - RNA, 19 nt, Artificial Sequence
  Description of Artificial Sequence: Synthetic oligonucleotide
aucuuccacucuaauaaau

SEQ ID NO: 1891899 - RNA, 19 nt, Artificial Sequence
  Description of Artificial Sequence: Synthetic oligonucleotide
cacucacaagagaccacug

SEQ ID NO: 1891900 - RNA, 19 nt, Artificial Sequence
  Description of Artificial Sequence: Synthetic oligonucleotide
uggagagcucacaggcuau

SEQ ID NO: 1891901 - RNA, 19 nt, Artificial Sequence
  Description of Artificial Sequence: Synthetic oligonucleotide
uaguuuucagaagcaccuc

SEQ ID NO: 1891902 - RNA, 19 nt, Artificial Sequence
  Description of Artificial Sequence: Synthetic oligonucleotide
agguuaguuuucagaagca

SEQ ID NO: 1891903 - RNA, 19 nt, Artificial Sequence
  Description of Artificial Sequence: Synthetic oligonucleotide
caaaaccccugcccuguug

SEQ ID NO: 1891904 - RNA, 19 nt, Artificial Sequence
  Description of Artificial Sequence: Synthetic oligonucleotide
acaagagaccacugcgcuu

SEQ ID NO: 1891905 - RNA, 19 nt, Artificial Sequence
  Description of Artificial Sequence: Synthetic oligonucleotide
auucucuacuagugaggaa

SEQ ID NO: 1891906 - RNA, 19 nt, Artificial Sequence
  Description of Artificial Sequence: Synthetic oligonucleotide
aaccccugcccuguuggcu

SEQ ID NO: 1891907 - RNA, 19 nt, Artificial Sequence
  Description of Artificial Sequence: Synthetic oligonucleotide
gacgacuggcugcugaggu

SEQ ID NO: 1891908 - RNA, 19 nt, Artificial Sequence
  Description of Artificial Sequence: Synthetic oligonucleotide
agaaguccggugugcugcu

SEQ ID NO: 1891909 - RNA, 19 nt, Artificial Sequence
  Description of Artificial Sequence: Synthetic oligonucleotide
agggacggauccaggagag

SEQ ID NO: 1891910 - RNA, 19 nt, Artificial Sequence
  Description of Artificial Sequence: Synthetic oligonucleotide
guuuugucagauggagaca

SEQ ID NO: 1891911 - RNA, 19 nt, Artificial Sequence
  Description of Artificial Sequence: Synthetic oligonucleotide
caauuacaugggcaguuaa

SEQ ID NO: 1891912 - RNA, 19 nt, Artificial Sequence
  Description of Artificial Sequence: Synthetic oligonucleotide
ugcugucaaguuugggguu

SEQ ID NO: 1891913 - RNA, 19 nt, Artificial Sequence
  Description of Artificial Sequence: Synthetic oligonucleotide
acaugggcaguuaaugauu

SEQ ID NO: 1891914 - RNA, 19 nt, Artificial Sequence
  Description of Artificial Sequence: Synthetic oligonucleotide
gggucaagaaccaguuuug

SEQ ID NO: 1891915 - RNA, 19 nt, Artificial Sequence
  Description of Artificial Sequence: Synthetic oligonucleotide
caucuucuagugcuuucca

SEQ ID NO: 1891916 - RNA, 19 nt, Artificial Sequence
  Description of Artificial Sequence: Synthetic oligonucleotide
acuauggcagaaagaccca

SEQ ID NO: 1891917 - RNA, 19 nt, Artificial Sequence
  Description of Artificial Sequence: Synthetic oligonucleotide
auggaccgcaugcugucaa

SEQ ID NO: 1891918 - RNA, 19 nt, Artificial Sequence
  Description of Artificial Sequence: Synthetic oligonucleotide
ugcugccgacgacuggcug

SEQ ID NO: 1891919 - RNA, 19 nt, Artificial Sequence
  Description of Artificial Sequence: Synthetic oligonucleotide
ccgcaugcugucaaguuug

SEQ ID NO: 1891920 - RNA, 19 nt, Artificial Sequence
  Description of Artificial Sequence: Synthetic oligonucleotide
guacucuuagggacggauc

SEQ ID NO: 1891921 - RNA, 19 nt, Artificial Sequence
  Description of Artificial Sequence: Synthetic oligonucleotide
gcuauuauuaggacucaaa

SEQ ID NO: 1891922 - RNA, 19 nt, Artificial Sequence
  Description of Artificial Sequence: Synthetic oligonucleotide
cagugguagcgagucuucc

SEQ ID NO: 1891923 - RNA, 19 nt, Artificial Sequence
  Description of Artificial Sequence: Synthetic oligonucleotide
aggcuugcugccgacgacu

SEQ ID NO: 1891924 - RNA, 19 nt, Artificial Sequence
  Description of Artificial Sequence: Synthetic oligonucleotide
guagcgagucuuccuuguc

SEQ ID NO: 1891925 - RNA, 19 nt, Artificial Sequence
  Description of Artificial Sequence: Synthetic oligonucleotide
gugguaauagcugccgucu

SEQ ID NO: 1891926 - RNA, 19 nt, Artificial Sequence
  Description of Artificial Sequence: Synthetic oligonucleotide
ggcagaaagacccauucuu

SEQ ID NO: 1891927 - RNA, 19 nt, Artificial Sequence
  Description of Artificial Sequence: Synthetic oligonucleotide
acuugggcucugucgucca

SEQ ID NO: 1891928 - RNA, 19 nt, Artificial Sequence
  Description of Artificial Sequence: Synthetic oligonucleotide
cacaagagaccacugcgcu

SEQ ID NO: 1891929 - RNA, 19 nt, Artificial Sequence
  Description of Artificial Sequence: Synthetic oligonucleotide
gcucugucguccagaaagg

SEQ ID NO: 1891930 - RNA, 19 nt, Artificial Sequence
  Description of Artificial Sequence: Synthetic oligonucleotide
ugcugagguuagucuuugu

SEQ ID NO: 1891931 - RNA, 19 nt, Artificial Sequence
  Description of Artificial Sequence: Synthetic oligonucleotide
cccuaacugcacagcaucc

SEQ ID NO: 1891932 - RNA, 19 nt, Artificial Sequence
  Description of Artificial Sequence: Synthetic oligonucleotide
aucacacguaguugcuauu

SEQ ID NO: 1891933 - RNA, 19 nt, Artificial Sequence
  Description of Artificial Sequence: Synthetic oligonucleotide
ggagagccuggagagcccg

SEQ ID NO: 1891934 - RNA, 19 nt, Artificial Sequence
  Description of Artificial Sequence: Synthetic oligonucleotide
gagaccacugcgcuuugau

SEQ ID NO: 1891935 - RNA, 19 nt, Artificial Sequence
  Description of Artificial Sequence: Synthetic oligonucleotide
aggcaggcuugcugccgac

SEQ ID NO: 1891936 - RNA, 19 nt, Artificial Sequence
  Description of Artificial Sequence: Synthetic oligonucleotide
cccaggugacccuggagag

SEQ ID NO: 1891937 - RNA, 19 nt, Artificial Sequence
  Description of Artificial Sequence: Synthetic oligonucleotide
gacagugguagcgagucuu

SEQ ID NO: 1891938 - RNA, 19 nt, Artificial Sequence
  Description of Artificial Sequence: Synthetic oligonucleotide
gucacucacaagagaccac

SEQ ID NO: 1891939 - RNA, 19 nt, Artificial Sequence
  Description of Artificial Sequence: Synthetic oligonucleotide
guucuagaauguacgauuu

SEQ ID NO: 1891940 - RNA, 19 nt, Artificial Sequence
  Description of Artificial Sequence: Synthetic oligonucleotide
cucaaacgugguccaagaa

SEQ ID NO: 1891941 - RNA, 19 nt, Artificial Sequence
  Description of Artificial Sequence: Synthetic oligonucleotide
gauggaccgcaugcuguca

SEQ ID NO: 1891942 - RNA, 19 nt, Artificial Sequence
  Description of Artificial Sequence: Synthetic oligonucleotide
ccccuaacugcacagcauc

SEQ ID NO: 1891943 - RNA, 19 nt, Artificial Sequence
  Description of Artificial Sequence: Synthetic oligonucleotide
cuggcaucccgucgauauc

SEQ ID NO: 1891944 - RNA, 19 nt, Artificial Sequence
  Description of Artificial Sequence: Synthetic oligonucleotide
augggcaguuaaugauuuu

SEQ ID NO: 1891945 - RNA, 19 nt, Artificial Sequence
  Description of Artificial Sequence: Synthetic oligonucleotide
gcuggcauucucuacuagu

SEQ ID NO: 1891946 - RNA, 19 nt, Artificial Sequence
  Description of Artificial Sequence: Synthetic oligonucleotide
aggggucaagaaccaguuu

SEQ ID NO: 1891947 - RNA, 19 nt, Artificial Sequence
  Description of Artificial Sequence: Synthetic oligonucleotide
cagguacugaucacacgua

SEQ ID NO: 1891948 - RNA, 19 nt, Artificial Sequence
  Description of Artificial Sequence: Synthetic oligonucleotide
guuugggguugucuugccu

SEQ ID NO: 1891949 - RNA, 19 nt, Artificial Sequence
  Description of Artificial Sequence: Synthetic oligonucleotide
gugguagcgagucuuccuu

SEQ ID NO: 1891950 - RNA, 19 nt, Artificial Sequence
  Description of Artificial Sequence: Synthetic oligonucleotide
cugaucacacguaguugcu

SEQ ID NO: 1891951 - RNA, 19 nt, Artificial Sequence
  Description of Artificial Sequence: Synthetic oligonucleotide
acaaaaccccugcccuguu

SEQ ID NO: 1891952 - RNA, 19 nt, Artificial Sequence
  Description of Artificial Sequence: Synthetic oligonucleotide
gcaugcugucaaguuuggg

SEQ ID NO: 1891953 - RNA, 19 nt, Artificial Sequence
  Description of Artificial Sequence: Synthetic oligonucleotide
cauuuccuucccugagaaa

SEQ ID NO: 1891954 - RNA, 19 nt, Artificial Sequence
  Description of Artificial Sequence: Synthetic oligonucleotide
agggcaaugugugguccaa

SEQ ID NO: 1891955 - RNA, 19 nt, Artificial Sequence
  Description of Artificial Sequence: Synthetic oligonucleotide
gaaguccggugugcugcug

SEQ ID NO: 1891956 - RNA, 19 nt, Artificial Sequence
  Description of Artificial Sequence: Synthetic oligonucleotide
cgggauaaucuaccagacc

SEQ ID NO: 1891957 - RNA, 19 nt, Artificial Sequence
  Description of Artificial Sequence: Synthetic oligonucleotide
ugggguugucuugccuuuc

SEQ ID NO: 1891958 - RNA, 19 nt, Artificial Sequence
  Description of Artificial Sequence: Synthetic oligonucleotide
gguagcgagucuuccuugu

SEQ ID NO: 1891959 - RNA, 19 nt, Artificial Sequence
  Description of Artificial Sequence: Synthetic oligonucleotide
ccauugaauuggcacuuga

SEQ ID NO: 1891960 - RNA, 19 nt, Artificial Sequence
  Description of Artificial Sequence: Synthetic oligonucleotide
agucucaaacgugguccaa

SEQ ID NO: 1891961 - RNA, 19 nt, Artificial Sequence
  Description of Artificial Sequence: Synthetic oligonucleotide
agagaccacugcgcuuuga

SEQ ID NO: 1891962 - RNA, 19 nt, Artificial Sequence
  Description of Artificial Sequence: Synthetic oligonucleotide
gacggauccaggagagccu

SEQ ID NO: 1891963 - RNA, 19 nt, Artificial Sequence
  Description of Artificial Sequence: Synthetic oligonucleotide
gaccgcaugcugucaaguu

SEQ ID NO: 1891964 - RNA, 19 nt, Artificial Sequence
  Description of Artificial Sequence: Synthetic oligonucleotide
caggcaggcuugcugccga

SEQ ID NO: 1891965 - RNA, 19 nt, Artificial Sequence
  Description of Artificial Sequence: Synthetic oligonucleotide
acccacgaguccucccuuu

SEQ ID NO: 1891966 - RNA, 19 nt, Artificial Sequence
  Description of Artificial Sequence: Synthetic oligonucleotide
ccgacgacuggcugcugag

SEQ ID NO: 1891967 - RNA, 19 nt, Artificial Sequence
  Description of Artificial Sequence: Synthetic oligonucleotide
ggaggggucaagaaccagu

SEQ ID NO: 1891968 - RNA, 19 nt, Artificial Sequence
  Description of Artificial Sequence: Synthetic oligonucleotide
gugguccaagcuggagagc

SEQ ID NO: 1891969 - RNA, 19 nt, Artificial Sequence
  Description of Artificial Sequence: Synthetic oligonucleotide
gguacugaucacacguagu

SEQ ID NO: 1891970 - RNA, 19 nt, Artificial Sequence
  Description of Artificial Sequence: Synthetic oligonucleotide
ggcaggcuugcugccgacg

SEQ ID NO: 1891971 - RNA, 19 nt, Artificial Sequence
  Description of Artificial Sequence: Synthetic oligonucleotide
gcucacaggcuaugucuuc

SEQ ID NO: 1891972 - RNA, 19 nt, Artificial Sequence
  Description of Artificial Sequence: Synthetic oligonucleotide
cacacguaguugcuauuau

SEQ ID NO: 1891973 - RNA, 19 nt, Artificial Sequence
  Description of Artificial Sequence: Synthetic oligonucleotide
cgucgauaucgaugauucc

SEQ ID NO: 1891974 - RNA, 19 nt, Artificial Sequence
  Description of Artificial Sequence: Synthetic oligonucleotide
uucuggcaucccgucgaua

SEQ ID NO: 1891975 - RNA, 19 nt, Artificial Sequence
  Description of Artificial Sequence: Synthetic oligonucleotide
ucccgucgauaucgaugau

SEQ ID NO: 1891976 - RNA, 19 nt, Artificial Sequence
  Description of Artificial Sequence: Synthetic oligonucleotide
auguacucuuagggacgga

SEQ ID NO: 1891977 - RNA, 19 nt, Artificial Sequence
  Description of Artificial Sequence: Synthetic oligonucleotide
ccacugcgcuuugaugugg

SEQ ID NO: 1891978 - RNA, 19 nt, Artificial Sequence
  Description of Artificial Sequence: Synthetic oligonucleotide
gggcaaugugugguccaag

SEQ ID NO: 1891979 - RNA, 19 nt, Artificial Sequence
  Description of Artificial Sequence: Synthetic oligonucleotide
cucuacuagugaggaacua

SEQ ID NO: 1891980 - RNA, 19 nt, Artificial Sequence
  Description of Artificial Sequence: Synthetic oligonucleotide
gccgacgacuggcugcuga

SEQ ID NO: 1891981 - RNA, 19 nt, Artificial Sequence
  Description of Artificial Sequence: Synthetic oligonucleotide
caucuguguugaaccacau

SEQ ID NO: 1891982 - RNA, 19 nt, Artificial Sequence
  Description of Artificial Sequence: Synthetic oligonucleotide
ccaggugacccuggagagc

SEQ ID NO: 1891983 - RNA, 19 nt, Artificial Sequence
  Description of Artificial Sequence: Synthetic oligonucleotide
cccacgaguccucccuuug

SEQ ID NO: 1891984 - RNA, 19 nt, Artificial Sequence
  Description of Artificial Sequence: Synthetic oligonucleotide
cagggagaguuugaaacuu

SEQ ID NO: 1891985 - RNA, 19 nt, Artificial Sequence
  Description of Artificial Sequence: Synthetic oligonucleotide
cuauggcagaaagacccau

SEQ ID NO: 1891986 - RNA, 19 nt, Artificial Sequence
  Description of Artificial Sequence: Synthetic oligonucleotide
cgauaucgaugauuccuca

SEQ ID NO: 1891987 - RNA, 19 nt, Artificial Sequence
  Description of Artificial Sequence: Synthetic oligonucleotide
gggcaguuaaugauuuuau

SEQ ID NO: 1891988 - RNA, 19 nt, Artificial Sequence
  Description of Artificial Sequence: Synthetic oligonucleotide
gguuagucuuugucccacu

SEQ ID NO: 1891989 - RNA, 19 nt, Artificial Sequence
  Description of Artificial Sequence: Synthetic oligonucleotide
cucugucguccagaaaggu

SEQ ID NO: 1891990 - RNA, 19 nt, Artificial Sequence
  Description of Artificial Sequence: Synthetic oligonucleotide
gggguugucuugccuuucu

SEQ ID NO: 1891991 - RNA, 19 nt, Artificial Sequence
  Description of Artificial Sequence: Synthetic oligonucleotide
ggggaggggucaagaacca

SEQ ID NO: 1891992 - RNA, 19 nt, Artificial Sequence
  Description of Artificial Sequence: Synthetic oligonucleotide
cacuggacagggagaguuu

SEQ ID NO: 1891993 - RNA, 19 nt, Artificial Sequence
  Description of Artificial Sequence: Synthetic oligonucleotide
ccaagcuggagagcucaca

SEQ ID NO: 1891994 - RNA, 19 nt, Artificial Sequence
  Description of Artificial Sequence: Synthetic oligonucleotide
gacccacgaguccucccuu

SEQ ID NO: 1891995 - RNA, 19 nt, Artificial Sequence
  Description of Artificial Sequence: Synthetic oligonucleotide
cugccgacgacuggcugcu

SEQ ID NO: 1891996 - RNA, 19 nt, Artificial Sequence
  Description of Artificial Sequence: Synthetic oligonucleotide
ccgucugagauguacucuu

SEQ ID NO: 1891997 - RNA, 19 nt, Artificial Sequence
  Description of Artificial Sequence: Synthetic oligonucleotide
ggcaucccgucgauaucga

SEQ ID NO: 1891998 - RNA, 19 nt, Artificial Sequence
  Description of Artificial Sequence: Synthetic oligonucleotide
ggaccgcaugcugucaagu

SEQ ID NO: 1891999 - RNA, 19 nt, Artificial Sequence
  Description of Artificial Sequence: Synthetic oligonucleotide
ugccgacgacuggcugcug

SEQ ID NO: 1892000 - RNA, 19 nt, Artificial Sequence
  Description of Artificial Sequence: Synthetic oligonucleotide
gucguccagaaagguuagu

SEQ ID NO: 1892001 - RNA, 19 nt, Artificial Sequence
  Description of Artificial Sequence: Synthetic oligonucleotide
ccgccugcuccauugaauu

SEQ ID NO: 1892002 - RNA, 19 nt, Artificial Sequence
  Description of Artificial Sequence: Synthetic oligonucleotide
cugcccuguuggcuuuuau

SEQ ID NO: 1892003 - RNA, 19 nt, Artificial Sequence
  Description of Artificial Sequence: Synthetic oligonucleotide
gcaucccgucgauaucgau

SEQ ID NO: 1892004 - RNA, 19 nt, Artificial Sequence
  Description of Artificial Sequence: Synthetic oligonucleotide
ccacgaguccucccuuugu

SEQ ID NO: 1892005 - RNA, 19 nt, Artificial Sequence
  Description of Artificial Sequence: Synthetic oligonucleotide
cccgucgauaucgaugauu

SEQ ID NO: 1892006 - RNA, 19 nt, Artificial Sequence
  Description of Artificial Sequence: Synthetic oligonucleotide
guccucccuuugugguaau

SEQ ID NO: 1892007 - RNA, 19 nt, Artificial Sequence
  Description of Artificial Sequence: Synthetic oligonucleotide
agcugccgucugagaugua

SEQ ID NO: 1892008 - RNA, 19 nt, Artificial Sequence
  Description of Artificial Sequence: Synthetic oligonucleotide
gcgcuuugauguggauuuu

SEQ ID NO: 1892009 - RNA, 19 nt, Artificial Sequence
  Description of Artificial Sequence: Synthetic oligonucleotide
aauaaauauauccugaucu

SEQ ID NO: 1892010 - RNA, 19 nt, Artificial Sequence
  Description of Artificial Sequence: Synthetic oligonucleotide
agaaauaagagaaagcucc

SEQ ID NO: 1892011 - RNA, 19 nt, Artificial Sequence
  Description of Artificial Sequence: Synthetic oligonucleotide
aauccagcauaacagaccc

SEQ ID NO: 1892012 - RNA, 19 nt, Artificial Sequence
  Description of Artificial Sequence: Synthetic oligonucleotide
aagagauccuuucagcagc

SEQ ID NO: 1892013 - RNA, 19 nt, Artificial Sequence
  Description of Artificial Sequence: Synthetic oligonucleotide
aaaccaaucagguucagga

SEQ ID NO: 1892014 - RNA, 19 nt, Artificial Sequence
  Description of Artificial Sequence: Synthetic oligonucleotide
ugugaagacagaaagagau

SEQ ID NO: 1892015 - RNA, 19 nt, Artificial Sequence
  Description of Artificial Sequence: Synthetic oligonucleotide
uauauagucuucauggcug

SEQ ID NO: 1892016 - RNA, 19 nt, Artificial Sequence
  Description of Artificial Sequence: Synthetic oligonucleotide
guaaaagacagugucaugg

SEQ ID NO: 1892017 - RNA, 19 nt, Artificial Sequence
  Description of Artificial Sequence: Synthetic oligonucleotide
ccuuauauagucuucaugg

SEQ ID NO: 1892018 - RNA, 19 nt, Artificial Sequence
  Description of Artificial Sequence: Synthetic oligonucleotide
aauaagagaaagcucccca

SEQ ID NO: 1892019 - RNA, 19 nt, Artificial Sequence
  Description of Artificial Sequence: Synthetic oligonucleotide
aaauauauccugaucuuuc

SEQ ID NO: 1892020 - RNA, 19 nt, Artificial Sequence
  Description of Artificial Sequence: Synthetic oligonucleotide
aaaucugcuguacaccauc

SEQ ID NO: 1892021 - RNA, 19 nt, Artificial Sequence
  Description of Artificial Sequence: Synthetic oligonucleotide
gauacugaucuucuuuucg

SEQ ID NO: 1892022 - RNA, 19 nt, Artificial Sequence
  Description of Artificial Sequence: Synthetic oligonucleotide
aaagaggcagaccagccag

SEQ ID NO: 1892023 - RNA, 19 nt, Artificial Sequence
  Description of Artificial Sequence: Synthetic oligonucleotide
aaaagacagugucaugggg

SEQ ID NO: 1892024 - RNA, 19 nt, Artificial Sequence
  Description of Artificial Sequence: Synthetic oligonucleotide
ugaauuggaaacuuaaaua

SEQ ID NO: 1892025 - RNA, 19 nt, Artificial Sequence
  Description of Artificial Sequence: Synthetic oligonucleotide
ugcaaauucuuccaucaag

SEQ ID NO: 1892026 - RNA, 19 nt, Artificial Sequence
  Description of Artificial Sequence: Synthetic oligonucleotide
gaaacugccuuauauaguc

SEQ ID NO: 1892027 - RNA, 19 nt, Artificial Sequence
  Description of Artificial Sequence: Synthetic oligonucleotide
uuauauagucuucauggcu

SEQ ID NO: 1892028 - RNA, 19 nt, Artificial Sequence
  Description of Artificial Sequence: Synthetic oligonucleotide
aauauauccugaucuuuca

SEQ ID NO: 1892029 - RNA, 19 nt, Artificial Sequence
  Description of Artificial Sequence: Synthetic oligonucleotide
aauuggaaacuuaaauauc

SEQ ID NO: 1892030 - RNA, 19 nt, Artificial Sequence
  Description of Artificial Sequence: Synthetic oligonucleotide
uauugacuccuacauuugg

SEQ ID NO: 1892031 - RNA, 19 nt, Artificial Sequence
  Description of Artificial Sequence: Synthetic oligonucleotide
acuaccacaccaaauuucc

SEQ ID NO: 1892032 - RNA, 19 nt, Artificial Sequence
  Description of Artificial Sequence: Synthetic oligonucleotide
aacaccaaccacuaccaca

SEQ ID NO: 1892033 - RNA, 19 nt, Artificial Sequence
  Description of Artificial Sequence: Synthetic oligonucleotide
ugaagagauccuuucagca

SEQ ID NO: 1892034 - RNA, 19 nt, Artificial Sequence
  Description of Artificial Sequence: Synthetic oligonucleotide
uccccaaagaggcagacca

SEQ ID NO: 1892035 - RNA, 19 nt, Artificial Sequence
  Description of Artificial Sequence: Synthetic oligonucleotide
uuuucggucuuccaaggug

SEQ ID NO: 1892036 - RNA, 19 nt, Artificial Sequence
  Description of Artificial Sequence: Synthetic oligonucleotide
ucagguucaggaaugcuga

SEQ ID NO: 1892037 - RNA, 19 nt, Artificial Sequence
  Description of Artificial Sequence: Synthetic oligonucleotide
uucuuuucggucuuccaag

SEQ ID NO: 1892038 - RNA, 19 nt, Artificial Sequence
  Description of Artificial Sequence: Synthetic oligonucleotide
uacauuuggcacauucucc

SEQ ID NO: 1892039 - RNA, 19 nt, Artificial Sequence
  Description of Artificial Sequence: Synthetic oligonucleotide
cuuauauagucuucauggc

SEQ ID NO: 1892040 - RNA, 19 nt, Artificial Sequence
  Description of Artificial Sequence: Synthetic oligonucleotide
aaugcagggaagccaaacu

SEQ ID NO: 1892041 - RNA, 19 nt, Artificial Sequence
  Description of Artificial Sequence: Synthetic oligonucleotide
ucuuccaaagaaaucugcu

SEQ ID NO: 1892042 - RNA, 19 nt, Artificial Sequence
  Description of Artificial Sequence: Synthetic oligonucleotide
caugggguauuccacaagg

SEQ ID NO: 1892043 - RNA, 19 nt, Artificial Sequence
  Description of Artificial Sequence: Synthetic oligonucleotide
uggacacaaaaccaaucag

SEQ ID NO: 1892044 - RNA, 19 nt, Artificial Sequence
  Description of Artificial Sequence: Synthetic oligonucleotide
uggaaacuuaaauaucugu

SEQ ID NO: 1892045 - RNA, 19 nt, Artificial Sequence
  Description of Artificial Sequence: Synthetic oligonucleotide
agaaaucugcuguacacca

SEQ ID NO: 1892046 - RNA, 19 nt, Artificial Sequence
  Description of Artificial Sequence: Synthetic oligonucleotide
uuugaauuggaaacuuaaa

SEQ ID NO: 1892047 - RNA, 19 nt, Artificial Sequence
  Description of Artificial Sequence: Synthetic oligonucleotide
accccaaucucuuggcugc

SEQ ID NO: 1892048 - RNA, 19 nt, Artificial Sequence
  Description of Artificial Sequence: Synthetic oligonucleotide
auauagucuucauggcugg

SEQ ID NO: 1892049 - RNA, 19 nt, Artificial Sequence
  Description of Artificial Sequence: Synthetic oligonucleotide
uuucagauacugaucuucu

SEQ ID NO: 1892050 - RNA, 19 nt, Artificial Sequence
  Description of Artificial Sequence: Synthetic oligonucleotide
uccacaaggacaugcuucc

SEQ ID NO: 1892051 - RNA, 19 nt, Artificial Sequence
  Description of Artificial Sequence: Synthetic oligonucleotide
ucuuuucggucuuccaagg

SEQ ID NO: 1892052 - RNA, 19 nt, Artificial Sequence
  Description of Artificial Sequence: Synthetic oligonucleotide
cugugaagugaagagaucc

SEQ ID NO: 1892053 - RNA, 19 nt, Artificial Sequence
  Description of Artificial Sequence: Synthetic oligonucleotide
cuccucacuucuuagggcg

SEQ ID NO: 1892054 - RNA, 19 nt, Artificial Sequence
  Description of Artificial Sequence: Synthetic oligonucleotide
uuuucagauacugaucuuc

SEQ ID NO: 1892055 - RNA, 19 nt, Artificial Sequence
  Description of Artificial Sequence: Synthetic oligonucleotide
caauccagcauaacagacc

SEQ ID NO: 1892056 - RNA, 19 nt, Artificial Sequence
  Description of Artificial Sequence: Synthetic oligonucleotide
uggcagaaauaagagaaag

SEQ ID NO: 1892057 - RNA, 19 nt, Artificial Sequence
  Description of Artificial Sequence: Synthetic oligonucleotide
uugacuccuacauuuggca

SEQ ID NO: 1892058 - RNA, 19 nt, Artificial Sequence
  Description of Artificial Sequence: Synthetic oligonucleotide
uuauugacuccuacauuug

SEQ ID NO: 1892059 - RNA, 19 nt, Artificial Sequence
  Description of Artificial Sequence: Synthetic oligonucleotide
ucccuuauccucacggugc

SEQ ID NO: 1892060 - RNA, 19 nt, Artificial Sequence
  Description of Artificial Sequence: Synthetic oligonucleotide
aagguggcagaaauaagag

SEQ ID NO: 1892061 - RNA, 19 nt, Artificial Sequence
  Description of Artificial Sequence: Synthetic oligonucleotide
ucgucuggacacaaaacca

SEQ ID NO: 1892062 - RNA, 19 nt, Artificial Sequence
  Description of Artificial Sequence: Synthetic oligonucleotide
gagagcaucuuccaaagaa

SEQ ID NO: 1892063 - RNA, 19 nt, Artificial Sequence
  Description of Artificial Sequence: Synthetic oligonucleotide
ucgguggcugugaagacag

SEQ ID NO: 1892064 - RNA, 19 nt, Artificial Sequence
  Description of Artificial Sequence: Synthetic oligonucleotide
gauguaggcaaccccaauc

SEQ ID NO: 1892065 - RNA, 19 nt, Artificial Sequence
  Description of Artificial Sequence: Synthetic oligonucleotide
ucaagaguuccacaugcuc

SEQ ID NO: 1892066 - RNA, 19 nt, Artificial Sequence
  Description of Artificial Sequence: Synthetic oligonucleotide
auauccugaucuuucagaa

SEQ ID NO: 1892067 - RNA, 19 nt, Artificial Sequence
  Description of Artificial Sequence: Synthetic oligonucleotide
cuacauuuggcacauucuc

SEQ ID NO: 1892068 - RNA, 19 nt, Artificial Sequence
  Description of Artificial Sequence: Synthetic oligonucleotide
agauacugaucuucuuuuc

SEQ ID NO: 1892069 - RNA, 19 nt, Artificial Sequence
  Description of Artificial Sequence: Synthetic oligonucleotide
aggaaugcaaauucuucca

SEQ ID NO: 1892070 - RNA, 19 nt, Artificial Sequence
  Description of Artificial Sequence: Synthetic oligonucleotide
acaaggacaugcuucccag

SEQ ID NO: 1892071 - RNA, 19 nt, Artificial Sequence
  Description of Artificial Sequence: Synthetic oligonucleotide
aacagacccuuguucuggg

SEQ ID NO: 1892072 - RNA, 19 nt, Artificial Sequence
  Description of Artificial Sequence: Synthetic oligonucleotide
uaacagacccuuguucugg

SEQ ID NO: 1892073 - RNA, 19 nt, Artificial Sequence
  Description of Artificial Sequence: Synthetic oligonucleotide
ugugaagugaagagauccu

SEQ ID NO: 1892074 - RNA, 19 nt, Artificial Sequence
  Description of Artificial Sequence: Synthetic oligonucleotide
uuucucuucaauccagcau

SEQ ID NO: 1892075 - RNA, 19 nt, Artificial Sequence
  Description of Artificial Sequence: Synthetic oligonucleotide
cagaaauaagagaaagcuc

SEQ ID NO: 1892076 - RNA, 19 nt, Artificial Sequence
  Description of Artificial Sequence: Synthetic oligonucleotide
cacagucauuuucagauac

SEQ ID NO: 1892077 - RNA, 19 nt, Artificial Sequence
  Description of Artificial Sequence: Synthetic oligonucleotide
auguaggcaaccccaaucu

SEQ ID NO: 1892078 - RNA, 19 nt, Artificial Sequence
  Description of Artificial Sequence: Synthetic oligonucleotide
ggacacaaaaccaaucagg

SEQ ID NO: 1892079 - RNA, 19 nt, Artificial Sequence
  Description of Artificial Sequence: Synthetic oligonucleotide
gaagaaacugccuuauaua

SEQ ID NO: 1892080 - RNA, 19 nt, Artificial Sequence
  Description of Artificial Sequence: Synthetic oligonucleotide
uucuuagggcggcagagcu

SEQ ID NO: 1892081 - RNA, 19 nt, Artificial Sequence
  Description of Artificial Sequence: Synthetic oligonucleotide
uaagagaaagcuccccaaa

SEQ ID NO: 1892082 - RNA, 19 nt, Artificial Sequence
  Description of Artificial Sequence: Synthetic oligonucleotide
uuuuaaaccgggcccuuuc

SEQ ID NO: 1892083 - RNA, 19 nt, Artificial Sequence
  Description of Artificial Sequence: Synthetic oligonucleotide
gaaugcaaauucuuccauc

SEQ ID NO: 1892084 - RNA, 19 nt, Artificial Sequence
  Description of Artificial Sequence: Synthetic oligonucleotide
uguaaaagacagugucaug

SEQ ID NO: 1892085 - RNA, 19 nt, Artificial Sequence
  Description of Artificial Sequence: Synthetic oligonucleotide
uucuguuuagcucccuccu

SEQ ID NO: 1892086 - RNA, 19 nt, Artificial Sequence
  Description of Artificial Sequence: Synthetic oligonucleotide
gugaagagauccuuucagc

SEQ ID NO: 1892087 - RNA, 19 nt, Artificial Sequence
  Description of Artificial Sequence: Synthetic oligonucleotide
aacugccuuauauagucuu

SEQ ID NO: 1892088 - RNA, 19 nt, Artificial Sequence
  Description of Artificial Sequence: Synthetic oligonucleotide
ugucaugggguauuccaca

SEQ ID NO: 1892089 - RNA, 19 nt, Artificial Sequence
  Description of Artificial Sequence: Synthetic oligonucleotide
auaacagacccuuguucug

SEQ ID NO: 1892090 - RNA, 19 nt, Artificial Sequence
  Description of Artificial Sequence: Synthetic oligonucleotide
uuuaaaccgggcccuuucu

SEQ ID NO: 1892091 - RNA, 19 nt, Artificial Sequence
  Description of Artificial Sequence: Synthetic oligonucleotide
ugggucucgagcugcacag

SEQ ID NO: 1892092 - RNA, 19 nt, Artificial Sequence
  Description of Artificial Sequence: Synthetic oligonucleotide
agauccuuucagcagcucu

SEQ ID NO: 1892093 - RNA, 19 nt, Artificial Sequence
  Description of Artificial Sequence: Synthetic oligonucleotide
aagacagugucauggggua

SEQ ID NO: 1892094 - RNA, 19 nt, Artificial Sequence
  Description of Artificial Sequence: Synthetic oligonucleotide
acugcagauguaggcaacc

SEQ ID NO: 1892095 - RNA, 19 nt, Artificial Sequence
  Description of Artificial Sequence: Synthetic oligonucleotide
uagucuucauggcuggaac

SEQ ID NO: 1892096 - RNA, 19 nt, Artificial Sequence
  Description of Artificial Sequence: Synthetic oligonucleotide
auaagagaaagcuccccaa

SEQ ID NO: 1892097 - RNA, 19 nt, Artificial Sequence
  Description of Artificial Sequence: Synthetic oligonucleotide
cuuauugacuccuacauuu

SEQ ID NO: 1892098 - RNA, 19 nt, Artificial Sequence
  Description of Artificial Sequence: Synthetic oligonucleotide
agaugcgcuucuucucagc

SEQ ID NO: 1892099 - RNA, 19 nt, Artificial Sequence
  Description of Artificial Sequence: Synthetic oligonucleotide
aaccaaucagguucaggaa

SEQ ID NO: 1892100 - RNA, 19 nt, Artificial Sequence
  Description of Artificial Sequence: Synthetic oligonucleotide
gccaacaccaaccacuacc

SEQ ID NO: 1892101 - RNA, 19 nt, Artificial Sequence
  Description of Artificial Sequence: Synthetic oligonucleotide
cuggacacaaaaccaauca

SEQ ID NO: 1892102 - RNA, 19 nt, Artificial Sequence
  Description of Artificial Sequence: Synthetic oligonucleotide
ucuuauugacuccuacauu

SEQ ID NO: 1892103 - RNA, 19 nt, Artificial Sequence
  Description of Artificial Sequence: Synthetic oligonucleotide
caaucucuuggcugcagag

SEQ ID NO: 1892104 - RNA, 19 nt, Artificial Sequence
  Description of Artificial Sequence: Synthetic oligonucleotide
agggauccagauuugaauu

SEQ ID NO: 1892105 - RNA, 19 nt, Artificial Sequence
  Description of Artificial Sequence: Synthetic oligonucleotide
ucucgucuggacacaaaac

SEQ ID NO: 1892106 - RNA, 19 nt, Artificial Sequence
  Description of Artificial Sequence: Synthetic oligonucleotide
uccucucaagcucagcauc

SEQ ID NO: 1892107 - RNA, 19 nt, Artificial Sequence
  Description of Artificial Sequence: Synthetic oligonucleotide
ugugcagcuagcucccaca

SEQ ID NO: 1892108 - RNA, 19 nt, Artificial Sequence
  Description of Artificial Sequence: Synthetic oligonucleotide
ucaugggguauuccacaag

SEQ ID NO: 1892109 - RNA, 19 nt, Artificial Sequence
  Description of Artificial Sequence: Synthetic oligonucleotide
ugccacugaaugcagggaa

SEQ ID NO: 1892110 - RNA, 19 nt, Artificial Sequence
  Description of Artificial Sequence: Synthetic oligonucleotide
agacagaaagagauucagg

SEQ ID NO: 1892111 - RNA, 19 nt, Artificial Sequence
  Description of Artificial Sequence: Synthetic oligonucleotide
cuuauccucacggugccag

SEQ ID NO: 1892112 - RNA, 19 nt, Artificial Sequence
  Description of Artificial Sequence: Synthetic oligonucleotide
aggaaugcugacgagugug

SEQ ID NO: 1892113 - RNA, 19 nt, Artificial Sequence
  Description of Artificial Sequence: Synthetic oligonucleotide
cacuaccacaccaaauuuc

SEQ ID NO: 1892114 - RNA, 19 nt, Artificial Sequence
  Description of Artificial Sequence: Synthetic oligonucleotide
gaaugcugacgaguguggg

SEQ ID NO: 1892115 - RNA, 19 nt, Artificial Sequence
  Description of Artificial Sequence: Synthetic oligonucleotide
uguuucaggaaugcaaauu

SEQ ID NO: 1892116 - RNA, 19 nt, Artificial Sequence
  Description of Artificial Sequence: Synthetic oligonucleotide
cauaacagacccuuguucu

SEQ ID NO: 1892117 - RNA, 19 nt, Artificial Sequence
  Description of Artificial Sequence: Synthetic oligonucleotide
ucccuccucacuucuuagg

SEQ ID NO: 1892118 - RNA, 19 nt, Artificial Sequence
  Description of Artificial Sequence: Synthetic oligonucleotide
uuaaaccgggcccuuucuc

SEQ ID NO: 1892119 - RNA, 19 nt, Artificial Sequence
  Description of Artificial Sequence: Synthetic oligonucleotide
gguucaggaaugcugacga

SEQ ID NO: 1892120 - RNA, 19 nt, Artificial Sequence
  Description of Artificial Sequence: Synthetic oligonucleotide
ugggccgcuguaaaagaca

SEQ ID NO: 1892121 - RNA, 19 nt, Artificial Sequence
  Description of Artificial Sequence: Synthetic oligonucleotide
ucucgagcugcacagucau

SEQ ID NO: 1892122 - RNA, 19 nt, Artificial Sequence
  Description of Artificial Sequence: Synthetic oligonucleotide
uccugggccgcuguaaaag

SEQ ID NO: 1892123 - RNA, 19 nt, Artificial Sequence
  Description of Artificial Sequence: Synthetic oligonucleotide
ugcagcuagcucccacagg

SEQ ID NO: 1892124 - RNA, 19 nt, Artificial Sequence
  Description of Artificial Sequence: Synthetic oligonucleotide
uccagcauaacagacccuu

SEQ ID NO: 1892125 - RNA, 19 nt, Artificial Sequence
  Description of Artificial Sequence: Synthetic oligonucleotide
ugggcuagcugugaaguga

SEQ ID NO: 1892126 - RNA, 19 nt, Artificial Sequence
  Description of Artificial Sequence: Synthetic oligonucleotide
ucacugcagauguaggcaa

SEQ ID NO: 1892127 - RNA, 19 nt, Artificial Sequence
  Description of Artificial Sequence: Synthetic oligonucleotide
cgagaaaugccacugaaug

SEQ ID NO: 1892128 - RNA, 19 nt, Artificial Sequence
  Description of Artificial Sequence: Synthetic oligonucleotide
ggcccuuucucuucaaucc

SEQ ID NO: 1892129 - RNA, 19 nt, Artificial Sequence
  Description of Artificial Sequence: Synthetic oligonucleotide
ucccacagguccugggccg

SEQ ID NO: 1892130 - RNA, 19 nt, Artificial Sequence
  Description of Artificial Sequence: Synthetic oligonucleotide
agucuucauggcuggaacu

SEQ ID NO: 1892131 - RNA, 19 nt, Artificial Sequence
  Description of Artificial Sequence: Synthetic oligonucleotide
ucucggucuccuccgucgg

SEQ ID NO: 1892132 - RNA, 19 nt, Artificial Sequence
  Description of Artificial Sequence: Synthetic oligonucleotide
ucucuucaauccagcauaa

SEQ ID NO: 1892133 - RNA, 19 nt, Artificial Sequence
  Description of Artificial Sequence: Synthetic oligonucleotide
ucuguuuagcucccuccuc

SEQ ID NO: 1892134 - RNA, 19 nt, Artificial Sequence
  Description of Artificial Sequence: Synthetic oligonucleotide
gaagccaaacuucucuucu

SEQ ID NO: 1892135 - RNA, 19 nt, Artificial Sequence
  Description of Artificial Sequence: Synthetic oligonucleotide
agugggcuagcugugaagu

SEQ ID NO: 1892136 - RNA, 19 nt, Artificial Sequence
  Description of Artificial Sequence: Synthetic oligonucleotide
gcagaaauaagagaaagcu

SEQ ID NO: 1892137 - RNA, 19 nt, Artificial Sequence
  Description of Artificial Sequence: Synthetic oligonucleotide
uggcccaagagcuucugaa

SEQ ID NO: 1892138 - RNA, 19 nt, Artificial Sequence
  Description of Artificial Sequence: Synthetic oligonucleotide
cuuagggcggcagagcuuc

SEQ ID NO: 1892139 - RNA, 19 nt, Artificial Sequence
  Description of Artificial Sequence: Synthetic oligonucleotide
uuucccuuucugugcagcu

SEQ ID NO: 1892140 - RNA, 19 nt, Artificial Sequence
  Description of Artificial Sequence: Synthetic oligonucleotide
agguggcagaaauaagaga

SEQ ID NO: 1892141 - RNA, 19 nt, Artificial Sequence
  Description of Artificial Sequence: Synthetic oligonucleotide
ugcagagagcaucuuccaa

SEQ ID NO: 1892142 - RNA, 19 nt, Artificial Sequence
  Description of Artificial Sequence: Synthetic oligonucleotide
caggucaggcgagaaaugc

SEQ ID NO: 1892143 - RNA, 19 nt, Artificial Sequence
  Description of Artificial Sequence: Synthetic oligonucleotide
uguaggcaaccccaaucuc

SEQ ID NO: 1892144 - RNA, 19 nt, Artificial Sequence
  Description of Artificial Sequence: Synthetic oligonucleotide
aaucugcuguacaccauca

SEQ ID NO: 1892145 - RNA, 19 nt, Artificial Sequence
  Description of Artificial Sequence: Synthetic oligonucleotide
gccgcuguaaaagacagug

SEQ ID NO: 1892146 - RNA, 19 nt, Artificial Sequence
  Description of Artificial Sequence: Synthetic oligonucleotide
ucaggcgagaaaugccacu

SEQ ID NO: 1892147 - RNA, 19 nt, Artificial Sequence
  Description of Artificial Sequence: Synthetic oligonucleotide
ucgagcugcacagucauuu

SEQ ID NO: 1892148 - RNA, 19 nt, Artificial Sequence
  Description of Artificial Sequence: Synthetic oligonucleotide
augcagggaagccaaacuu

SEQ ID NO: 1892149 - RNA, 19 nt, Artificial Sequence
  Description of Artificial Sequence: Synthetic oligonucleotide
agccugaagaaacugccuu

SEQ ID NO: 1892150 - RNA, 19 nt, Artificial Sequence
  Description of Artificial Sequence: Synthetic oligonucleotide
uguuuagcucccuccucac

SEQ ID NO: 1892151 - RNA, 19 nt, Artificial Sequence
  Description of Artificial Sequence: Synthetic oligonucleotide
uuguuucaggaaugcaaau

SEQ ID NO: 1892152 - RNA, 19 nt, Artificial Sequence
  Description of Artificial Sequence: Synthetic oligonucleotide
uuccaucaagaguuccaca

SEQ ID NO: 1892153 - RNA, 19 nt, Artificial Sequence
  Description of Artificial Sequence: Synthetic oligonucleotide
cuuucucuucaauccagca

SEQ ID NO: 1892154 - RNA, 19 nt, Artificial Sequence
  Description of Artificial Sequence: Synthetic oligonucleotide
ugcaggacuuucccuuucu

SEQ ID NO: 1892155 - RNA, 19 nt, Artificial Sequence
  Description of Artificial Sequence: Synthetic oligonucleotide
cugaaugcagggaagccaa

SEQ ID NO: 1892156 - RNA, 19 nt, Artificial Sequence
  Description of Artificial Sequence: Synthetic oligonucleotide
uucuuccaucaagaguucc

SEQ ID NO: 1892157 - RNA, 19 nt, Artificial Sequence
  Description of Artificial Sequence: Synthetic oligonucleotide
cuuccagugggcuagcugu

SEQ ID NO: 1892158 - RNA, 19 nt, Artificial Sequence
  Description of Artificial Sequence: Synthetic oligonucleotide
uucccagccugaagaaacu

SEQ ID NO: 1892159 - RNA, 19 nt, Artificial Sequence
  Description of Artificial Sequence: Synthetic oligonucleotide
ggcagaaauaagagaaagc

SEQ ID NO: 1892160 - RNA, 19 nt, Artificial Sequence
  Description of Artificial Sequence: Synthetic oligonucleotide
cuguuuagcucccuccuca

SEQ ID NO: 1892161 - RNA, 19 nt, Artificial Sequence
  Description of Artificial Sequence: Synthetic oligonucleotide
agucccuuauccucacggu

SEQ ID NO: 1892162 - RNA, 19 nt, Artificial Sequence
  Description of Artificial Sequence: Synthetic oligonucleotide
uucggucuuccaagguggc

SEQ ID NO: 1892163 - RNA, 19 nt, Artificial Sequence
  Description of Artificial Sequence: Synthetic oligonucleotide
gggauccagauuugaauug

SEQ ID NO: 1892164 - RNA, 19 nt, Artificial Sequence
  Description of Artificial Sequence: Synthetic oligonucleotide
cuuucccuuucugugcagc

SEQ ID NO: 1892165 - RNA, 19 nt, Artificial Sequence
  Description of Artificial Sequence: Synthetic oligonucleotide
aaaccgggcccuuucucuu

SEQ ID NO: 1892166 - RNA, 19 nt, Artificial Sequence
  Description of Artificial Sequence: Synthetic oligonucleotide
uuagcucccuccucacuuc

SEQ ID NO: 1892167 - RNA, 19 nt, Artificial Sequence
  Description of Artificial Sequence: Synthetic oligonucleotide
gagcugcacagucauuuuc

SEQ ID NO: 1892168 - RNA, 19 nt, Artificial Sequence
  Description of Artificial Sequence: Synthetic oligonucleotide
aaacugccuuauauagucu

SEQ ID NO: 1892169 - RNA, 19 nt, Artificial Sequence
  Description of Artificial Sequence: Synthetic oligonucleotide
augcaggacuuucccuuuc

SEQ ID NO: 1892170 - RNA, 19 nt, Artificial Sequence
  Description of Artificial Sequence: Synthetic oligonucleotide
ccaaucagguucaggaaug

SEQ ID NO: 1892171 - RNA, 19 nt, Artificial Sequence
  Description of Artificial Sequence: Synthetic oligonucleotide
uuccagugggcuagcugug

SEQ ID NO: 1892172 - RNA, 19 nt, Artificial Sequence
  Description of Artificial Sequence: Synthetic oligonucleotide
gcauaacagacccuuguuc

SEQ ID NO: 1892173 - RNA, 19 nt, Artificial Sequence
  Description of Artificial Sequence: Synthetic oligonucleotide
cucccacagguccugggcc

SEQ ID NO: 1892174 - RNA, 19 nt, Artificial Sequence
  Description of Artificial Sequence: Synthetic oligonucleotide
aguuccacaugcuccucau

SEQ ID NO: 1892175 - RNA, 19 nt, Artificial Sequence
  Description of Artificial Sequence: Synthetic oligonucleotide
caggcagugcaagaugcgc

SEQ ID NO: 1892176 - RNA, 19 nt, Artificial Sequence
  Description of Artificial Sequence: Synthetic oligonucleotide
uuuccccaucacuucuugu

SEQ ID NO: 1892177 - RNA, 19 nt, Artificial Sequence
  Description of Artificial Sequence: Synthetic oligonucleotide
caggcgagaaaugccacug

SEQ ID NO: 1892178 - RNA, 19 nt, Artificial Sequence
  Description of Artificial Sequence: Synthetic oligonucleotide
auccucacggugccagcuc

SEQ ID NO: 1892179 - RNA, 19 nt, Artificial Sequence
  Description of Artificial Sequence: Synthetic oligonucleotide
cagacccuuguucuggguc

SEQ ID NO: 1892180 - RNA, 19 nt, Artificial Sequence
  Description of Artificial Sequence: Synthetic oligonucleotide
cacugaaugcagggaagcc

SEQ ID NO: 1892181 - RNA, 19 nt, Artificial Sequence
  Description of Artificial Sequence: Synthetic oligonucleotide
ugccuuauauagucuucau

SEQ ID NO: 1892182 - RNA, 19 nt, Artificial Sequence
  Description of Artificial Sequence: Synthetic oligonucleotide
auagucuucauggcuggaa

SEQ ID NO: 1892183 - RNA, 19 nt, Artificial Sequence
  Description of Artificial Sequence: Synthetic oligonucleotide
cagaccagccaggucaggc

SEQ ID NO: 1892184 - RNA, 19 nt, Artificial Sequence
  Description of Artificial Sequence: Synthetic oligonucleotide
guucaggaaugcugacgag

SEQ ID NO: 1892185 - RNA, 19 nt, Artificial Sequence
  Description of Artificial Sequence: Synthetic oligonucleotide
cuucuuagggcggcagagc

SEQ ID NO: 1892186 - RNA, 19 nt, Artificial Sequence
  Description of Artificial Sequence: Synthetic oligonucleotide
uauccucacggugccagcu

SEQ ID NO: 1892187 - RNA, 19 nt, Artificial Sequence
  Description of Artificial Sequence: Synthetic oligonucleotide
augcaaauucuuccaucaa

SEQ ID NO: 1892188 - RNA, 19 nt, Artificial Sequence
  Description of Artificial Sequence: Synthetic oligonucleotide
gugcagcuagcucccacag

SEQ ID NO: 1892189 - RNA, 19 nt, Artificial Sequence
  Description of Artificial Sequence: Synthetic oligonucleotide
cugggccgcuguaaaagac

SEQ ID NO: 1892190 - RNA, 19 nt, Artificial Sequence
  Description of Artificial Sequence: Synthetic oligonucleotide
agauguaggcaaccccaau

SEQ ID NO: 1892191 - RNA, 19 nt, Artificial Sequence
  Description of Artificial Sequence: Synthetic oligonucleotide
ucacggugccagcucugcc

SEQ ID NO: 1892192 - RNA, 19 nt, Artificial Sequence
  Description of Artificial Sequence: Synthetic oligonucleotide
aaccacuaccacaccaaau

SEQ ID NO: 1892193 - RNA, 19 nt, Artificial Sequence
  Description of Artificial Sequence: Synthetic oligonucleotide
gagcuucugaauaaauaua

SEQ ID NO: 1892194 - RNA, 19 nt, Artificial Sequence
  Description of Artificial Sequence: Synthetic oligonucleotide
gcagagagcaucuuccaaa

SEQ ID NO: 1892195 - RNA, 19 nt, Artificial Sequence
  Description of Artificial Sequence: Synthetic oligonucleotide
ugcugacgagugugggucc

SEQ ID NO: 1892196 - RNA, 19 nt, Artificial Sequence
  Description of Artificial Sequence: Synthetic oligonucleotide
aaggcuccccagcucucgu

SEQ ID NO: 1892197 - RNA, 19 nt, Artificial Sequence
  Description of Artificial Sequence: Synthetic oligonucleotide
cucucgucuggacacaaaa

SEQ ID NO: 1892198 - RNA, 19 nt, Artificial Sequence
  Description of Artificial Sequence: Synthetic oligonucleotide
ugcuucccagccugaagaa

SEQ ID NO: 1892199 - RNA, 19 nt, Artificial Sequence
  Description of Artificial Sequence: Synthetic oligonucleotide
gagugugggucccucaagu

SEQ ID NO: 1892200 - RNA, 19 nt, Artificial Sequence
  Description of Artificial Sequence: Synthetic oligonucleotide
cacugcagauguaggcaac

SEQ ID NO: 1892201 - RNA, 19 nt, Artificial Sequence
  Description of Artificial Sequence: Synthetic oligonucleotide
ucggucuccuccgucggug

SEQ ID NO: 1892202 - RNA, 19 nt, Artificial Sequence
  Description of Artificial Sequence: Synthetic oligonucleotide
acuccuacauuuggcacau

SEQ ID NO: 1892203 - RNA, 19 nt, Artificial Sequence
  Description of Artificial Sequence: Synthetic oligonucleotide
cucccuccucacuucuuag

SEQ ID NO: 1892204 - RNA, 19 nt, Artificial Sequence
  Description of Artificial Sequence: Synthetic oligonucleotide
gugucaugggguauuccac

SEQ ID NO: 1892205 - RNA, 19 nt, Artificial Sequence
  Description of Artificial Sequence: Synthetic oligonucleotide
uccgucgguggcugugaag

SEQ ID NO: 1892206 - RNA, 19 nt, Artificial Sequence
  Description of Artificial Sequence: Synthetic oligonucleotide
acgagugugggucccucaa

SEQ ID NO: 1892207 - RNA, 19 nt, Artificial Sequence
  Description of Artificial Sequence: Synthetic oligonucleotide
ggaagccaaacuucucuuc

SEQ ID NO: 1892208 - RNA, 19 nt, Artificial Sequence
  Description of Artificial Sequence: Synthetic oligonucleotide
acagucauuuucagauacu

SEQ ID NO: 1892209 - RNA, 19 nt, Artificial Sequence
  Description of Artificial Sequence: Synthetic oligonucleotide
ucuuagggcggcagagcuu

SEQ ID NO: 1892210 - RNA, 19 nt, Artificial Sequence
  Description of Artificial Sequence: Synthetic oligonucleotide
cuguaaaagacagugucau

SEQ ID NO: 1892211 - RNA, 19 nt, Artificial Sequence
  Description of Artificial Sequence: Synthetic oligonucleotide
guaggcaaccccaaucucu

SEQ ID NO: 1892212 - RNA, 19 nt, Artificial Sequence
  Description of Artificial Sequence: Synthetic oligonucleotide
caagucccuuauccucacg

SEQ ID NO: 1892213 - RNA, 19 nt, Artificial Sequence
  Description of Artificial Sequence: Synthetic oligonucleotide
gcagcuagcucccacaggu

SEQ ID NO: 1892214 - RNA, 19 nt, Artificial Sequence
  Description of Artificial Sequence: Synthetic oligonucleotide
aucaagaguuccacaugcu

SEQ ID NO: 1892215 - RNA, 19 nt, Artificial Sequence
  Description of Artificial Sequence: Synthetic oligonucleotide
gucaugggguauuccacaa

SEQ ID NO: 1892216 - RNA, 19 nt, Artificial Sequence
  Description of Artificial Sequence: Synthetic oligonucleotide
cacggugccagcucugcca

SEQ ID NO: 1892217 - RNA, 19 nt, Artificial Sequence
  Description of Artificial Sequence: Synthetic oligonucleotide
ggaaacuuaaauaucuguu

SEQ ID NO: 1892218 - RNA, 19 nt, Artificial Sequence
  Description of Artificial Sequence: Synthetic oligonucleotide
cuuccaagguggcagaaau

SEQ ID NO: 1892219 - RNA, 19 nt, Artificial Sequence
  Description of Artificial Sequence: Synthetic oligonucleotide
auccagauuugaauuggaa

SEQ ID NO: 1892220 - RNA, 19 nt, Artificial Sequence
  Description of Artificial Sequence: Synthetic oligonucleotide
cagauuugaauuggaaacu

SEQ ID NO: 1892221 - RNA, 19 nt, Artificial Sequence
  Description of Artificial Sequence: Synthetic oligonucleotide
aggcgagaaaugccacuga

SEQ ID NO: 1892222 - RNA, 19 nt, Artificial Sequence
  Description of Artificial Sequence: Synthetic oligonucleotide
gcuagcugugaagugaaga

SEQ ID NO: 1892223 - RNA, 19 nt, Artificial Sequence
  Description of Artificial Sequence: Synthetic oligonucleotide
agagauccuuucagcagcu

SEQ ID NO: 1892224 - RNA, 19 nt, Artificial Sequence
  Description of Artificial Sequence: Synthetic oligonucleotide
ccaacaccaaccacuacca

SEQ ID NO: 1892225 - RNA, 19 nt, Artificial Sequence
  Description of Artificial Sequence: Synthetic oligonucleotide
ggucaggcgagaaaugcca

SEQ ID NO: 1892226 - RNA, 19 nt, Artificial Sequence
  Description of Artificial Sequence: Synthetic oligonucleotide
cucacggugccagcucugc

SEQ ID NO: 1892227 - RNA, 19 nt, Artificial Sequence
  Description of Artificial Sequence: Synthetic oligonucleotide
aggcuccccagcucucguc

SEQ ID NO: 1892228 - RNA, 19 nt, Artificial Sequence
  Description of Artificial Sequence: Synthetic oligonucleotide
caacaccaaccacuaccac

SEQ ID NO: 1892229 - RNA, 19 nt, Artificial Sequence
  Description of Artificial Sequence: Synthetic oligonucleotide
uccagugggcuagcuguga

SEQ ID NO: 1892230 - RNA, 19 nt, Artificial Sequence
  Description of Artificial Sequence: Synthetic oligonucleotide
ucggucuuccaagguggca

SEQ ID NO: 1892231 - RNA, 19 nt, Artificial Sequence
  Description of Artificial Sequence: Synthetic oligonucleotide
gacgagugugggucccuca

SEQ ID NO: 1892232 - RNA, 19 nt, Artificial Sequence
  Description of Artificial Sequence: Synthetic oligonucleotide
gggcccuuucucuucaauc

SEQ ID NO: 1892233 - RNA, 19 nt, Artificial Sequence
  Description of Artificial Sequence: Synthetic oligonucleotide
ggucucgagcugcacaguc

SEQ ID NO: 1892234 - RNA, 19 nt, Artificial Sequence
  Description of Artificial Sequence: Synthetic oligonucleotide
acggugccagcucugccaa

SEQ ID NO: 1892235 - RNA, 19 nt, Artificial Sequence
  Description of Artificial Sequence: Synthetic oligonucleotide
uucccuuucugugcagcua

SEQ ID NO: 1892236 - RNA, 19 nt, Artificial Sequence
  Description of Artificial Sequence: Synthetic oligonucleotide
cagcauaacagacccuugu

SEQ ID NO: 1892237 - RNA, 19 nt, Artificial Sequence
  Description of Artificial Sequence: Synthetic oligonucleotide
ggcgagaaaugccacugaa

SEQ ID NO: 1892238 - RNA, 19 nt, Artificial Sequence
  Description of Artificial Sequence: Synthetic oligonucleotide
gucaggcgagaaaugccac

SEQ ID NO: 1892239 - RNA, 19 nt, Artificial Sequence
  Description of Artificial Sequence: Synthetic oligonucleotide
augccacugaaugcaggga

SEQ ID NO: 1892240 - RNA, 19 nt, Artificial Sequence
  Description of Artificial Sequence: Synthetic oligonucleotide
ccaggcagugcaagaugcg

SEQ ID NO: 1892241 - RNA, 19 nt, Artificial Sequence
  Description of Artificial Sequence: Synthetic oligonucleotide
cugccaacaccaaccacua

SEQ ID NO: 1892242 - RNA, 19 nt, Artificial Sequence
  Description of Artificial Sequence: Synthetic oligonucleotide
uccuccgucgguggcugug

SEQ ID NO: 1892243 - RNA, 19 nt, Artificial Sequence
  Description of Artificial Sequence: Synthetic oligonucleotide
gauccuuucagcagcucuu

SEQ ID NO: 1892244 - RNA, 19 nt, Artificial Sequence
  Description of Artificial Sequence: Synthetic oligonucleotide
ccacugaaugcagggaagc

SEQ ID NO: 1892245 - RNA, 19 nt, Artificial Sequence
  Description of Artificial Sequence: Synthetic oligonucleotide
accgggcccuuucucuuca

SEQ ID NO: 1892246 - RNA, 19 nt, Artificial Sequence
  Description of Artificial Sequence: Synthetic oligonucleotide
caaccacuaccacaccaaa

SEQ ID NO: 1892247 - RNA, 19 nt, Artificial Sequence
  Description of Artificial Sequence: Synthetic oligonucleotide
ggguauuccacaaggacau

SEQ ID NO: 1892248 - RNA, 19 nt, Artificial Sequence
  Description of Artificial Sequence: Synthetic oligonucleotide
caucucggucuccuccguc

SEQ ID NO: 1892249 - RNA, 19 nt, Artificial Sequence
  Description of Artificial Sequence: Synthetic oligonucleotide
gucucgagcugcacaguca

SEQ ID NO: 1892250 - RNA, 19 nt, Artificial Sequence
  Description of Artificial Sequence: Synthetic oligonucleotide
cccuuauccucacggugcc

SEQ ID NO: 1892251 - RNA, 19 nt, Artificial Sequence
  Description of Artificial Sequence: Synthetic oligonucleotide
uuagggcggcagagcuucu

SEQ ID NO: 1892252 - RNA, 19 nt, Artificial Sequence
  Description of Artificial Sequence: Synthetic oligonucleotide
ugacgagugugggucccuc

SEQ ID NO: 1892253 - RNA, 19 nt, Artificial Sequence
  Description of Artificial Sequence: Synthetic oligonucleotide
caccaaccacuaccacacc

SEQ ID NO: 1892254 - RNA, 19 nt, Artificial Sequence
  Description of Artificial Sequence: Synthetic oligonucleotide
auccuuucagcagcucuuu

SEQ ID NO: 1892255 - RNA, 19 nt, Artificial Sequence
  Description of Artificial Sequence: Synthetic oligonucleotide
agugcaagaugcgcuucuu

SEQ ID NO: 1892256 - RNA, 19 nt, Artificial Sequence
  Description of Artificial Sequence: Synthetic oligonucleotide
cagcuagcucccacagguc

SEQ ID NO: 1892257 - RNA, 19 nt, Artificial Sequence
  Description of Artificial Sequence: Synthetic oligonucleotide
gcccaagagcuucugaaua

SEQ ID NO: 1892258 - RNA, 19 nt, Artificial Sequence
  Description of Artificial Sequence: Synthetic oligonucleotide
gcagagaccuggcccaaga

SEQ ID NO: 1892259 - RNA, 19 nt, Artificial Sequence
  Description of Artificial Sequence: Synthetic oligonucleotide
ccagcauaacagacccuug

SEQ ID NO: 1892260 - RNA, 19 nt, Artificial Sequence
  Description of Artificial Sequence: Synthetic oligonucleotide
cuuuucggucuuccaaggu

SEQ ID NO: 1892261 - RNA, 19 nt, Artificial Sequence
  Description of Artificial Sequence: Synthetic oligonucleotide
guuuagcucccuccucacu

SEQ ID NO: 1892262 - RNA, 19 nt, Artificial Sequence
  Description of Artificial Sequence: Synthetic oligonucleotide
gaaaucugcuguacaccau

SEQ ID NO: 1892263 - RNA, 19 nt, Artificial Sequence
  Description of Artificial Sequence: Synthetic oligonucleotide
gacagugucaugggguauu

SEQ ID NO: 1892264 - RNA, 19 nt, Artificial Sequence
  Description of Artificial Sequence: Synthetic oligonucleotide
agacagugucaugggguau

SEQ ID NO: 1892265 - RNA, 19 nt, Artificial Sequence
  Description of Artificial Sequence: Synthetic oligonucleotide
cccaagagcuucugaauaa

SEQ ID NO: 1892266 - RNA, 19 nt, Artificial Sequence
  Description of Artificial Sequence: Synthetic oligonucleotide
gacaugcuucccagccuga

SEQ ID NO: 1892267 - RNA, 19 nt, Artificial Sequence
  Description of Artificial Sequence: Synthetic oligonucleotide
gagauccuuucagcagcuc

SEQ ID NO: 1892268 - RNA, 19 nt, Artificial Sequence
  Description of Artificial Sequence: Synthetic oligonucleotide
gacccuuguucugggucuc

SEQ ID NO: 1892269 - RNA, 19 nt, Artificial Sequence
  Description of Artificial Sequence: Synthetic oligonucleotide
gguauuccacaaggacaug

SEQ ID NO: 1892270 - RNA, 19 nt, Artificial Sequence
  Description of Artificial Sequence: Synthetic oligonucleotide
cuggcccaagagcuucuga

SEQ ID NO: 1892271 - RNA, 19 nt, Artificial Sequence
  Description of Artificial Sequence: Synthetic oligonucleotide
agcucucgucuggacacaa

SEQ ID NO: 1892272 - RNA, 19 nt, Artificial Sequence
  Description of Artificial Sequence: Synthetic oligonucleotide
agguccugggccgcuguaa

SEQ ID NO: 1892273 - RNA, 19 nt, Artificial Sequence
  Description of Artificial Sequence: Synthetic oligonucleotide
ccgucgguggcugugaaga

SEQ ID NO: 1892274 - RNA, 19 nt, Artificial Sequence
  Description of Artificial Sequence: Synthetic oligonucleotide
gcugugaagugaagagauc

SEQ ID NO: 1892275 - RNA, 19 nt, Artificial Sequence
  Description of Artificial Sequence: Synthetic oligonucleotide
cagugcaagaugcgcuucu

SEQ ID NO: 1892276 - RNA, 19 nt, Artificial Sequence
  Description of Artificial Sequence: Synthetic oligonucleotide
gcugacgaguguggguccc

SEQ ID NO: 1892277 - RNA, 19 nt, Artificial Sequence
  Description of Artificial Sequence: Synthetic oligonucleotide
auccagcauaacagacccu

SEQ ID NO: 1892278 - RNA, 19 nt, Artificial Sequence
  Description of Artificial Sequence: Synthetic oligonucleotide
ccagggauccagauuugaa

SEQ ID NO: 1892279 - RNA, 19 nt, Artificial Sequence
  Description of Artificial Sequence: Synthetic oligonucleotide
ccaaucucuuggcugcaga

SEQ ID NO: 1892280 - RNA, 19 nt, Artificial Sequence
  Description of Artificial Sequence: Synthetic oligonucleotide
guccugggccgcuguaaaa

SEQ ID NO: 1892281 - RNA, 19 nt, Artificial Sequence
  Description of Artificial Sequence: Synthetic oligonucleotide
caaccccaaucucuuggcu

SEQ ID NO: 1892282 - RNA, 19 nt, Artificial Sequence
  Description of Artificial Sequence: Synthetic oligonucleotide
ggcuagcugugaagugaag

SEQ ID NO: 1892283 - RNA, 19 nt, Artificial Sequence
  Description of Artificial Sequence: Synthetic oligonucleotide
caggaaugcugacgagugu

SEQ ID NO: 1892284 - RNA, 19 nt, Artificial Sequence
  Description of Artificial Sequence: Synthetic oligonucleotide
ccugggccgcuguaaaaga

SEQ ID NO: 1892285 - RNA, 19 nt, Artificial Sequence
  Description of Artificial Sequence: Synthetic oligonucleotide
cgagugugggucccucaag

SEQ ID NO: 1892286 - RNA, 19 nt, Artificial Sequence
  Description of Artificial Sequence: Synthetic oligonucleotide
ggcagugcaagaugcgcuu

SEQ ID NO: 1892287 - RNA, 19 nt, Artificial Sequence
  Description of Artificial Sequence: Synthetic oligonucleotide
gcgcuucuucucagcagcc

SEQ ID NO: 1892288 - RNA, 19 nt, Artificial Sequence
  Description of Artificial Sequence: Synthetic oligonucleotide
gcuccccaaagaggcagac

SEQ ID NO: 1892289 - RNA, 19 nt, Artificial Sequence
  Description of Artificial Sequence: Synthetic oligonucleotide
cccaaucucuuggcugcag

SEQ ID NO: 1892290 - RNA, 19 nt, Artificial Sequence
  Description of Artificial Sequence: Synthetic oligonucleotide
ccucacggugccagcucug

SEQ ID NO: 1892291 - RNA, 19 nt, Artificial Sequence
  Description of Artificial Sequence: Synthetic oligonucleotide
gcgagaaaugccacugaau

SEQ ID NO: 1892292 - RNA, 19 nt, Artificial Sequence
  Description of Artificial Sequence: Synthetic oligonucleotide
gcuagcucccacagguccu

SEQ ID NO: 1892293 - RNA, 19 nt, Artificial Sequence
  Description of Artificial Sequence: Synthetic oligonucleotide
cuccgucgguggcugugaa

SEQ ID NO: 1892294 - RNA, 19 nt, Artificial Sequence
  Description of Artificial Sequence: Synthetic oligonucleotide
cagcucucgucuggacaca

SEQ ID NO: 1892295 - RNA, 19 nt, Artificial Sequence
  Description of Artificial Sequence: Synthetic oligonucleotide
cgucgguggcugugaagac

SEQ ID NO: 1892296 - RNA, 19 nt, Artificial Sequence
  Description of Artificial Sequence: Synthetic oligonucleotide
ccacuaccacaccaaauuu

SEQ ID NO: 1892297 - RNA, 19 nt, Artificial Sequence
  Description of Artificial Sequence: Synthetic oligonucleotide
cucggucuccuccgucggu

SEQ ID NO: 1892298 - RNA, 19 nt, Artificial Sequence
  Description of Artificial Sequence: Synthetic oligonucleotide
ccgcuguaaaagacagugu

SEQ ID NO: 1892299 - RNA, 19 nt, Artificial Sequence
  Description of Artificial Sequence: Synthetic oligonucleotide
cugacgagugugggucccu

SEQ ID NO: 1892300 - RNA, 19 nt, Artificial Sequence
  Description of Artificial Sequence: Synthetic oligonucleotide
cucgagcugcacagucauu

SEQ ID NO: 1892301 - RNA, 19 nt, Artificial Sequence
  Description of Artificial Sequence: Synthetic oligonucleotide
gcucucgucuggacacaaa

SEQ ID NO: 1892302 - RNA, 19 nt, Artificial Sequence
  Description of Artificial Sequence: Synthetic oligonucleotide
ccuuauccucacggugcca

SEQ ID NO: 1892303 - RNA, 19 nt, Artificial Sequence
  Description of Artificial Sequence: Synthetic oligonucleotide
ccuccgucgguggcuguga

SEQ ID NO: 1892304 - RNA, 19 nt, Artificial Sequence
  Description of Artificial Sequence: Synthetic oligonucleotide
ccaucucggucuccuccgu

SEQ ID NO: 1892305 - RNA, 19 nt, Artificial Sequence
  Description of Artificial Sequence: Synthetic oligonucleotide
gcuccucaugcaggacuuu

SEQ ID NO: 1892306 - RNA, 19 nt, Artificial Sequence
  Description of Artificial Sequence: Synthetic oligonucleotide
auaacugacgcccacaacc

SEQ ID NO: 1892307 - RNA, 19 nt, Artificial Sequence
  Description of Artificial Sequence: Synthetic oligonucleotide
uauucugugaaacugauaa

SEQ ID NO: 1892308 - RNA, 19 nt, Artificial Sequence
  Description of Artificial Sequence: Synthetic oligonucleotide
gugauuaucaaauaccagg

SEQ ID NO: 1892309 - RNA, 19 nt, Artificial Sequence
  Description of Artificial Sequence: Synthetic oligonucleotide
aacuaaauaguccaguuga

SEQ ID NO: 1892310 - RNA, 19 nt, Artificial Sequence
  Description of Artificial Sequence: Synthetic oligonucleotide
ucaacaacuaaauagucca

SEQ ID NO: 1892311 - RNA, 19 nt, Artificial Sequence
  Description of Artificial Sequence: Synthetic oligonucleotide
uaaauaguccaguugaccc

SEQ ID NO: 1892312 - RNA, 19 nt, Artificial Sequence
  Description of Artificial Sequence: Synthetic oligonucleotide
uuuagauacauacaaacuu

SEQ ID NO: 1892313 - RNA, 19 nt, Artificial Sequence
  Description of Artificial Sequence: Synthetic oligonucleotide
auuaccauaaggccucucc

SEQ ID NO: 1892314 - RNA, 19 nt, Artificial Sequence
  Description of Artificial Sequence: Synthetic oligonucleotide
accauaauucaaaagaggc

SEQ ID NO: 1892315 - RNA, 19 nt, Artificial Sequence
  Description of Artificial Sequence: Synthetic oligonucleotide
aagccaaccgccuuggacg

SEQ ID NO: 1892316 - RNA, 19 nt, Artificial Sequence
  Description of Artificial Sequence: Synthetic oligonucleotide
acaucuaacaagccaaccg

SEQ ID NO: 1892317 - RNA, 19 nt, Artificial Sequence
  Description of Artificial Sequence: Synthetic oligonucleotide
ugauuaucaaauaccagga

SEQ ID NO: 1892318 - RNA, 19 nt, Artificial Sequence
  Description of Artificial Sequence: Synthetic oligonucleotide
uucgaaacaucucagcacc

SEQ ID NO: 1892319 - RNA, 19 nt, Artificial Sequence
  Description of Artificial Sequence: Synthetic oligonucleotide
ugaaacugauaacugcacg

SEQ ID NO: 1892320 - RNA, 19 nt, Artificial Sequence
  Description of Artificial Sequence: Synthetic oligonucleotide
aaguccaagaaccggcacg

SEQ ID NO: 1892321 - RNA, 19 nt, Artificial Sequence
  Description of Artificial Sequence: Synthetic oligonucleotide
auuuucguggguuccacac

SEQ ID NO: 1892322 - RNA, 19 nt, Artificial Sequence
  Description of Artificial Sequence: Synthetic oligonucleotide
aagaucaagggucugugcu

SEQ ID NO: 1892323 - RNA, 19 nt, Artificial Sequence
  Description of Artificial Sequence: Synthetic oligonucleotide
uuauacugagguguaaggg

SEQ ID NO: 1892324 - RNA, 19 nt, Artificial Sequence
  Description of Artificial Sequence: Synthetic oligonucleotide
ucucaauaguuucucaaug

SEQ ID NO: 1892325 - RNA, 19 nt, Artificial Sequence
  Description of Artificial Sequence: Synthetic oligonucleotide
agcgccuaauaacugacgc

SEQ ID NO: 1892326 - RNA, 19 nt, Artificial Sequence
  Description of Artificial Sequence: Synthetic oligonucleotide
ugacauuaccauaaggccu

SEQ ID NO: 1892327 - RNA, 19 nt, Artificial Sequence
  Description of Artificial Sequence: Synthetic oligonucleotide
cugacauuaccauaaggcc

SEQ ID NO: 1892328 - RNA, 19 nt, Artificial Sequence
  Description of Artificial Sequence: Synthetic oligonucleotide
ugugauuaucaaauaccag

SEQ ID NO: 1892329 - RNA, 19 nt, Artificial Sequence
  Description of Artificial Sequence: Synthetic oligonucleotide
ucaaaagaggccucauuag

SEQ ID NO: 1892330 - RNA, 19 nt, Artificial Sequence
  Description of Artificial Sequence: Synthetic oligonucleotide
aauaccaggacaauuucca

SEQ ID NO: 1892331 - RNA, 19 nt, Artificial Sequence
  Description of Artificial Sequence: Synthetic oligonucleotide
aauaacugacgcccacaac

SEQ ID NO: 1892332 - RNA, 19 nt, Artificial Sequence
  Description of Artificial Sequence: Synthetic oligonucleotide
aaucaaccugucucaauag

SEQ ID NO: 1892333 - RNA, 19 nt, Artificial Sequence
  Description of Artificial Sequence: Synthetic oligonucleotide
agacauacaagcaauacca

SEQ ID NO: 1892334 - RNA, 19 nt, Artificial Sequence
  Description of Artificial Sequence: Synthetic oligonucleotide
aaacugauaacugcacguc

SEQ ID NO: 1892335 - RNA, 19 nt, Artificial Sequence
  Description of Artificial Sequence: Synthetic oligonucleotide
uguccugagguguagagac

SEQ ID NO: 1892336 - RNA, 19 nt, Artificial Sequence
  Description of Artificial Sequence: Synthetic oligonucleotide
caaugcucacuuuugacag

SEQ ID NO: 1892337 - RNA, 19 nt, Artificial Sequence
  Description of Artificial Sequence: Synthetic oligonucleotide
uccaagaaccggcacgugg

SEQ ID NO: 1892338 - RNA, 19 nt, Artificial Sequence
  Description of Artificial Sequence: Synthetic oligonucleotide
ugugcuaauuuucuugcac

SEQ ID NO: 1892339 - RNA, 19 nt, Artificial Sequence
  Description of Artificial Sequence: Synthetic oligonucleotide
acaaacuuuauuugugugu

SEQ ID NO: 1892340 - RNA, 19 nt, Artificial Sequence
  Description of Artificial Sequence: Synthetic oligonucleotide
aauggaaggaccauacaca

SEQ ID NO: 1892341 - RNA, 19 nt, Artificial Sequence
  Description of Artificial Sequence: Synthetic oligonucleotide
ugaagcaaugugcagguaa

SEQ ID NO: 1892342 - RNA, 19 nt, Artificial Sequence
  Description of Artificial Sequence: Synthetic oligonucleotide
cauguuuuggacaagucca

SEQ ID NO: 1892343 - RNA, 19 nt, Artificial Sequence
  Description of Artificial Sequence: Synthetic oligonucleotide
caucuaacaagccaaccgc

SEQ ID NO: 1892344 - RNA, 19 nt, Artificial Sequence
  Description of Artificial Sequence: Synthetic oligonucleotide
aaucguucgcugccagugc

SEQ ID NO: 1892345 - RNA, 19 nt, Artificial Sequence
  Description of Artificial Sequence: Synthetic oligonucleotide
uaccaggacaauuuccagg

SEQ ID NO: 1892346 - RNA, 19 nt, Artificial Sequence
  Description of Artificial Sequence: Synthetic oligonucleotide
uuguagacuuuccaacucc

SEQ ID NO: 1892347 - RNA, 19 nt, Artificial Sequence
  Description of Artificial Sequence: Synthetic oligonucleotide
uucuuaccacuucugaagc

SEQ ID NO: 1892348 - RNA, 19 nt, Artificial Sequence
  Description of Artificial Sequence: Synthetic oligonucleotide
auuuuggacacuggaagac

SEQ ID NO: 1892349 - RNA, 19 nt, Artificial Sequence
  Description of Artificial Sequence: Synthetic oligonucleotide
aggacucacccucagcgcc

SEQ ID NO: 1892350 - RNA, 19 nt, Artificial Sequence
  Description of Artificial Sequence: Synthetic oligonucleotide
cacuucugaagcaaugugc

SEQ ID NO: 1892351 - RNA, 19 nt, Artificial Sequence
  Description of Artificial Sequence: Synthetic oligonucleotide
ucaggcugugaaaacacca

SEQ ID NO: 1892352 - RNA, 19 nt, Artificial Sequence
  Description of Artificial Sequence: Synthetic oligonucleotide
aaagacgccgccagguccc

SEQ ID NO: 1892353 - RNA, 19 nt, Artificial Sequence
  Description of Artificial Sequence: Synthetic oligonucleotide
aacugcacgucuccuguuc

SEQ ID NO: 1892354 - RNA, 19 nt, Artificial Sequence
  Description of Artificial Sequence: Synthetic oligonucleotide
aacugauaacugcacgucu

SEQ ID NO: 1892355 - RNA, 19 nt, Artificial Sequence
  Description of Artificial Sequence: Synthetic oligonucleotide
guuucaaggacucacccuc

SEQ ID NO: 1892356 - RNA, 19 nt, Artificial Sequence
  Description of Artificial Sequence: Synthetic oligonucleotide
aaauagggauauucuguga

SEQ ID NO: 1892357 - RNA, 19 nt, Artificial Sequence
  Description of Artificial Sequence: Synthetic oligonucleotide
ucauuagguuguuugguga

SEQ ID NO: 1892358 - RNA, 19 nt, Artificial Sequence
  Description of Artificial Sequence: Synthetic oligonucleotide
uggcaugucaacaacuaaa

SEQ ID NO: 1892359 - RNA, 19 nt, Artificial Sequence
  Description of Artificial Sequence: Synthetic oligonucleotide
uucccuuauacugaggugu

SEQ ID NO: 1892360 - RNA, 19 nt, Artificial Sequence
  Description of Artificial Sequence: Synthetic oligonucleotide
uuucaggcugugaaaacac

SEQ ID NO: 1892361 - RNA, 19 nt, Artificial Sequence
  Description of Artificial Sequence: Synthetic oligonucleotide
acuaccacaaugcucacuu

SEQ ID NO: 1892362 - RNA, 19 nt, Artificial Sequence
  Description of Artificial Sequence: Synthetic oligonucleotide
caguugaccccaaucaacc

SEQ ID NO: 1892363 - RNA, 19 nt, Artificial Sequence
  Description of Artificial Sequence: Synthetic oligonucleotide
uccacacacuaccacaaug

SEQ ID NO: 1892364 - RNA, 19 nt, Artificial Sequence
  Description of Artificial Sequence: Synthetic oligonucleotide
cuaaauaguccaguugacc

SEQ ID NO: 1892365 - RNA, 19 nt, Artificial Sequence
  Description of Artificial Sequence: Synthetic oligonucleotide
gauuaucaaauaccaggac

SEQ ID NO: 1892366 - RNA, 19 nt, Artificial Sequence
  Description of Artificial Sequence: Synthetic oligonucleotide
uaacugacgcccacaaccc

SEQ ID NO: 1892367 - RNA, 19 nt, Artificial Sequence
  Description of Artificial Sequence: Synthetic oligonucleotide
uuaccauaaggccucucca

SEQ ID NO: 1892368 - RNA, 19 nt, Artificial Sequence
  Description of Artificial Sequence: Synthetic oligonucleotide
ucuaacaagccaaccgccu

SEQ ID NO: 1892369 - RNA, 19 nt, Artificial Sequence
  Description of Artificial Sequence: Synthetic oligonucleotide
gaccuuucgaaacaucuca

SEQ ID NO: 1892370 - RNA, 19 nt, Artificial Sequence
  Description of Artificial Sequence: Synthetic oligonucleotide
uggagcagucucuucaacc

SEQ ID NO: 1892371 - RNA, 19 nt, Artificial Sequence
  Description of Artificial Sequence: Synthetic oligonucleotide
guggguuccacacacuacc

SEQ ID NO: 1892372 - RNA, 19 nt, Artificial Sequence
  Description of Artificial Sequence: Synthetic oligonucleotide
cuguuguagacuuuccaac

SEQ ID NO: 1892373 - RNA, 19 nt, Artificial Sequence
  Description of Artificial Sequence: Synthetic oligonucleotide
gguguagagacaaucacag

SEQ ID NO: 1892374 - RNA, 19 nt, Artificial Sequence
  Description of Artificial Sequence: Synthetic oligonucleotide
gacaaguccaagaaccggc

SEQ ID NO: 1892375 - RNA, 19 nt, Artificial Sequence
  Description of Artificial Sequence: Synthetic oligonucleotide
gucaacaacuaaauagucc

SEQ ID NO: 1892376 - RNA, 19 nt, Artificial Sequence
  Description of Artificial Sequence: Synthetic oligonucleotide
cugugauuaucaaauacca

SEQ ID NO: 1892377 - RNA, 19 nt, Artificial Sequence
  Description of Artificial Sequence: Synthetic oligonucleotide
ugucucaauaguuucucaa

SEQ ID NO: 1892378 - RNA, 19 nt, Artificial Sequence
  Description of Artificial Sequence: Synthetic oligonucleotide
aagcaaugugcagguaagc

SEQ ID NO: 1892379 - RNA, 19 nt, Artificial Sequence
  Description of Artificial Sequence: Synthetic oligonucleotide
ugucaacaacuaaauaguc

SEQ ID NO: 1892380 - RNA, 19 nt, Artificial Sequence
  Description of Artificial Sequence: Synthetic oligonucleotide
auaacugcacgucuccugu

SEQ ID NO: 1892381 - RNA, 19 nt, Artificial Sequence
  Description of Artificial Sequence: Synthetic oligonucleotide
gaagcaaugugcagguaag

SEQ ID NO: 1892382 - RNA, 19 nt, Artificial Sequence
  Description of Artificial Sequence: Synthetic oligonucleotide
gugguugcaaucuucuuac

SEQ ID NO: 1892383 - RNA, 19 nt, Artificial Sequence
  Description of Artificial Sequence: Synthetic oligonucleotide
acccucagcgccuaauaac

SEQ ID NO: 1892384 - RNA, 19 nt, Artificial Sequence
  Description of Artificial Sequence: Synthetic oligonucleotide
aucuaacaagccaaccgcc

SEQ ID NO: 1892385 - RNA, 19 nt, Artificial Sequence
  Description of Artificial Sequence: Synthetic oligonucleotide
cuuucgaaacaucucagca

SEQ ID NO: 1892386 - RNA, 19 nt, Artificial Sequence
  Description of Artificial Sequence: Synthetic oligonucleotide
uugaccccaaucaaccugu

SEQ ID NO: 1892387 - RNA, 19 nt, Artificial Sequence
  Description of Artificial Sequence: Synthetic oligonucleotide
cuguuuaggaaguccucgg

SEQ ID NO: 1892388 - RNA, 19 nt, Artificial Sequence
  Description of Artificial Sequence: Synthetic oligonucleotide
acugcacgucuccuguucc

SEQ ID NO: 1892389 - RNA, 19 nt, Artificial Sequence
  Description of Artificial Sequence: Synthetic oligonucleotide
ucaaccugucucaauaguu

SEQ ID NO: 1892390 - RNA, 19 nt, Artificial Sequence
  Description of Artificial Sequence: Synthetic oligonucleotide
cucauuagguuguuuggug

SEQ ID NO: 1892391 - RNA, 19 nt, Artificial Sequence
  Description of Artificial Sequence: Synthetic oligonucleotide
aagaaccggcacguggacc

SEQ ID NO: 1892392 - RNA, 19 nt, Artificial Sequence
  Description of Artificial Sequence: Synthetic oligonucleotide
uguuucaaggacucacccu

SEQ ID NO: 1892393 - RNA, 19 nt, Artificial Sequence
  Description of Artificial Sequence: Synthetic oligonucleotide
cagagagcaaaagacgccg

SEQ ID NO: 1892394 - RNA, 19 nt, Artificial Sequence
  Description of Artificial Sequence: Synthetic oligonucleotide
gagguguagagacaaucac

SEQ ID NO: 1892395 - RNA, 19 nt, Artificial Sequence
  Description of Artificial Sequence: Synthetic oligonucleotide
uuaggaaguccucgggaca

SEQ ID NO: 1892396 - RNA, 19 nt, Artificial Sequence
  Description of Artificial Sequence: Synthetic oligonucleotide
gaaucguucgcugccagug

SEQ ID NO: 1892397 - RNA, 19 nt, Artificial Sequence
  Description of Artificial Sequence: Synthetic oligonucleotide
cucaauggcugacauuacc

SEQ ID NO: 1892398 - RNA, 19 nt, Artificial Sequence
  Description of Artificial Sequence: Synthetic oligonucleotide
gugacaccccuccagagag

SEQ ID NO: 1892399 - RNA, 19 nt, Artificial Sequence
  Description of Artificial Sequence: Synthetic oligonucleotide
uggaagacacucauguuuu

SEQ ID NO: 1892400 - RNA, 19 nt, Artificial Sequence
  Description of Artificial Sequence: Synthetic oligonucleotide
acaacuaaauaguccaguu

SEQ ID NO: 1892401 - RNA, 19 nt, Artificial Sequence
  Description of Artificial Sequence: Synthetic oligonucleotide
agaaccggcacguggaccu

SEQ ID NO: 1892402 - RNA, 19 nt, Artificial Sequence
  Description of Artificial Sequence: Synthetic oligonucleotide
ugugcauccaucagcgcaa

SEQ ID NO: 1892403 - RNA, 19 nt, Artificial Sequence
  Description of Artificial Sequence: Synthetic oligonucleotide
gacauuaccauaaggccuc

SEQ ID NO: 1892404 - RNA, 19 nt, Artificial Sequence
  Description of Artificial Sequence: Synthetic oligonucleotide
acuaaauaguccaguugac

SEQ ID NO: 1892405 - RNA, 19 nt, Artificial Sequence
  Description of Artificial Sequence: Synthetic oligonucleotide
uuaucugaagcuucccuua

SEQ ID NO: 1892406 - RNA, 19 nt, Artificial Sequence
  Description of Artificial Sequence: Synthetic oligonucleotide
uucuauggguuucuguuua

SEQ ID NO: 1892407 - RNA, 19 nt, Artificial Sequence
  Description of Artificial Sequence: Synthetic oligonucleotide
agcaauaccauaauucaaa

SEQ ID NO: 1892408 - RNA, 19 nt, Artificial Sequence
  Description of Artificial Sequence: Synthetic oligonucleotide
gguguaaggggacaucucc

SEQ ID NO: 1892409 - RNA, 19 nt, Artificial Sequence
  Description of Artificial Sequence: Synthetic oligonucleotide
guugaccccaaucaaccug

SEQ ID NO: 1892410 - RNA, 19 nt, Artificial Sequence
  Description of Artificial Sequence: Synthetic oligonucleotide
ucagcgccuaauaacugac

SEQ ID NO: 1892411 - RNA, 19 nt, Artificial Sequence
  Description of Artificial Sequence: Synthetic oligonucleotide
ccauaauucaaaagaggcc

SEQ ID NO: 1892412 - RNA, 19 nt, Artificial Sequence
  Description of Artificial Sequence: Synthetic oligonucleotide
caauuuccagggcacuugg

SEQ ID NO: 1892413 - RNA, 19 nt, Artificial Sequence
  Description of Artificial Sequence: Synthetic oligonucleotide
auggaaggaccauacacau

SEQ ID NO: 1892414 - RNA, 19 nt, Artificial Sequence
  Description of Artificial Sequence: Synthetic oligonucleotide
aaacaucucagcacccuug

SEQ ID NO: 1892415 - RNA, 19 nt, Artificial Sequence
  Description of Artificial Sequence: Synthetic oligonucleotide
aaggggacaucuccuagaa

SEQ ID NO: 1892416 - RNA, 19 nt, Artificial Sequence
  Description of Artificial Sequence: Synthetic oligonucleotide
uucaggcugugaaaacacc

SEQ ID NO: 1892417 - RNA, 19 nt, Artificial Sequence
  Description of Artificial Sequence: Synthetic oligonucleotide
uuuucguggguuccacaca

SEQ ID NO: 1892418 - RNA, 19 nt, Artificial Sequence
  Description of Artificial Sequence: Synthetic oligonucleotide
uuagguuguuuggugauaa

SEQ ID NO: 1892419 - RNA, 19 nt, Artificial Sequence
  Description of Artificial Sequence: Synthetic oligonucleotide
uggacgaaucguucgcugc

SEQ ID NO: 1892420 - RNA, 19 nt, Artificial Sequence
  Description of Artificial Sequence: Synthetic oligonucleotide
auaauucaaaagaggccuc

SEQ ID NO: 1892421 - RNA, 19 nt, Artificial Sequence
  Description of Artificial Sequence: Synthetic oligonucleotide
uucaaggacucacccucag

SEQ ID NO: 1892422 - RNA, 19 nt, Artificial Sequence
  Description of Artificial Sequence: Synthetic oligonucleotide
gugauaauucuggauuucc

SEQ ID NO: 1892423 - RNA, 19 nt, Artificial Sequence
  Description of Artificial Sequence: Synthetic oligonucleotide
uuuugacagucugugauua

SEQ ID NO: 1892424 - RNA, 19 nt, Artificial Sequence
  Description of Artificial Sequence: Synthetic oligonucleotide
cacaaugcucacuuuugac

SEQ ID NO: 1892425 - RNA, 19 nt, Artificial Sequence
  Description of Artificial Sequence: Synthetic oligonucleotide
gcaagagcaagguucacug

SEQ ID NO: 1892426 - RNA, 19 nt, Artificial Sequence
  Description of Artificial Sequence: Synthetic oligonucleotide
aaucuucuuaccacuucug

SEQ ID NO: 1892427 - RNA, 19 nt, Artificial Sequence
  Description of Artificial Sequence: Synthetic oligonucleotide
uacaucuaacaagccaacc

SEQ ID NO: 1892428 - RNA, 19 nt, Artificial Sequence
  Description of Artificial Sequence: Synthetic oligonucleotide
ucuauggguuucuguuuag

SEQ ID NO: 1892429 - RNA, 19 nt, Artificial Sequence
  Description of Artificial Sequence: Synthetic oligonucleotide
gaagcuucccuuauacuga

SEQ ID NO: 1892430 - RNA, 19 nt, Artificial Sequence
  Description of Artificial Sequence: Synthetic oligonucleotide
caaauaccaggacaauuuc

SEQ ID NO: 1892431 - RNA, 19 nt, Artificial Sequence
  Description of Artificial Sequence: Synthetic oligonucleotide
uccaguugaccccaaucaa

SEQ ID NO: 1892432 - RNA, 19 nt, Artificial Sequence
  Description of Artificial Sequence: Synthetic oligonucleotide
acgcccacaacccaaggcu

SEQ ID NO: 1892433 - RNA, 19 nt, Artificial Sequence
  Description of Artificial Sequence: Synthetic oligonucleotide
aaccgccuuggacgaaucg

SEQ ID NO: 1892434 - RNA, 19 nt, Artificial Sequence
  Description of Artificial Sequence: Synthetic oligonucleotide
guagagacaaucacagcac

SEQ ID NO: 1892435 - RNA, 19 nt, Artificial Sequence
  Description of Artificial Sequence: Synthetic oligonucleotide
cuuuggaauggaaggacca

SEQ ID NO: 1892436 - RNA, 19 nt, Artificial Sequence
  Description of Artificial Sequence: Synthetic oligonucleotide
aaguccucgggacaugauu

SEQ ID NO: 1892437 - RNA, 19 nt, Artificial Sequence
  Description of Artificial Sequence: Synthetic oligonucleotide
guaaggggacaucuccuag

SEQ ID NO: 1892438 - RNA, 19 nt, Artificial Sequence
  Description of Artificial Sequence: Synthetic oligonucleotide
aucaaccugucucaauagu

SEQ ID NO: 1892439 - RNA, 19 nt, Artificial Sequence
  Description of Artificial Sequence: Synthetic oligonucleotide
uuucaaggacucacccuca

SEQ ID NO: 1892440 - RNA, 19 nt, Artificial Sequence
  Description of Artificial Sequence: Synthetic oligonucleotide
cucacuuucaggcugugaa

SEQ ID NO: 1892441 - RNA, 19 nt, Artificial Sequence
  Description of Artificial Sequence: Synthetic oligonucleotide
acacaucuacaucuaacaa

SEQ ID NO: 1892442 - RNA, 19 nt, Artificial Sequence
  Description of Artificial Sequence: Synthetic oligonucleotide
agcaaaagacgccgccagg

SEQ ID NO: 1892443 - RNA, 19 nt, Artificial Sequence
  Description of Artificial Sequence: Synthetic oligonucleotide
aauauggguuuuguguuua

SEQ ID NO: 1892444 - RNA, 19 nt, Artificial Sequence
  Description of Artificial Sequence: Synthetic oligonucleotide
cuacaucuaacaagccaac

SEQ ID NO: 1892445 - RNA, 19 nt, Artificial Sequence
  Description of Artificial Sequence: Synthetic oligonucleotide
uggugauaauucuggauuu

SEQ ID NO: 1892446 - RNA, 19 nt, Artificial Sequence
  Description of Artificial Sequence: Synthetic oligonucleotide
uguaaggggacaucuccua

SEQ ID NO: 1892447 - RNA, 19 nt, Artificial Sequence
  Description of Artificial Sequence: Synthetic oligonucleotide
caagaucaagggucugugc

SEQ ID NO: 1892448 - RNA, 19 nt, Artificial Sequence
  Description of Artificial Sequence: Synthetic oligonucleotide
uuggacgaaucguucgcug

SEQ ID NO: 1892449 - RNA, 19 nt, Artificial Sequence
  Description of Artificial Sequence: Synthetic oligonucleotide
auagggauauucugugaaa

SEQ ID NO: 1892450 - RNA, 19 nt, Artificial Sequence
  Description of Artificial Sequence: Synthetic oligonucleotide
gugugcauccaucagcgca

SEQ ID NO: 1892451 - RNA, 19 nt, Artificial Sequence
  Description of Artificial Sequence: Synthetic oligonucleotide
aucagcgcaauguccugag

SEQ ID NO: 1892452 - RNA, 19 nt, Artificial Sequence
  Description of Artificial Sequence: Synthetic oligonucleotide
agguucacugcuguuguag

SEQ ID NO: 1892453 - RNA, 19 nt, Artificial Sequence
  Description of Artificial Sequence: Synthetic oligonucleotide
gauaauucuggauuuccuu

SEQ ID NO: 1892454 - RNA, 19 nt, Artificial Sequence
  Description of Artificial Sequence: Synthetic oligonucleotide
gguuguuuggugauaauuc

SEQ ID NO: 1892455 - RNA, 19 nt, Artificial Sequence
  Description of Artificial Sequence: Synthetic oligonucleotide
ugcaagagcaagguucacu

SEQ ID NO: 1892456 - RNA, 19 nt, Artificial Sequence
  Description of Artificial Sequence: Synthetic oligonucleotide
gacgcccacaacccaaggc

SEQ ID NO: 1892457 - RNA, 19 nt, Artificial Sequence
  Description of Artificial Sequence: Synthetic oligonucleotide
acacacuaccacaaugcuc

SEQ ID NO: 1892458 - RNA, 19 nt, Artificial Sequence
  Description of Artificial Sequence: Synthetic oligonucleotide
auacaagcaauaccauaau

SEQ ID NO: 1892459 - RNA, 19 nt, Artificial Sequence
  Description of Artificial Sequence: Synthetic oligonucleotide
uggguuuuguguuuacauu

SEQ ID NO: 1892460 - RNA, 19 nt, Artificial Sequence
  Description of Artificial Sequence: Synthetic oligonucleotide
cacguggaccuuucgaaac

SEQ ID NO: 1892461 - RNA, 19 nt, Artificial Sequence
  Description of Artificial Sequence: Synthetic oligonucleotide
acccuuaucugaagcuucc

SEQ ID NO: 1892462 - RNA, 19 nt, Artificial Sequence
  Description of Artificial Sequence: Synthetic oligonucleotide
cuaccccagagugacaccc

SEQ ID NO: 1892463 - RNA, 19 nt, Artificial Sequence
  Description of Artificial Sequence: Synthetic oligonucleotide
caucuccuagaacaucaag

SEQ ID NO: 1892464 - RNA, 19 nt, Artificial Sequence
  Description of Artificial Sequence: Synthetic oligonucleotide
caaucaaccugucucaaua

SEQ ID NO: 1892465 - RNA, 19 nt, Artificial Sequence
  Description of Artificial Sequence: Synthetic oligonucleotide
cauaaggccucuccaaaca

SEQ ID NO: 1892466 - RNA, 19 nt, Artificial Sequence
  Description of Artificial Sequence: Synthetic oligonucleotide
uaucugaagcuucccuuau

SEQ ID NO: 1892467 - RNA, 19 nt, Artificial Sequence
  Description of Artificial Sequence: Synthetic oligonucleotide
caucuacaucuaacaagcc

SEQ ID NO: 1892468 - RNA, 19 nt, Artificial Sequence
  Description of Artificial Sequence: Synthetic oligonucleotide
acaggcugacccuuaucug

SEQ ID NO: 1892469 - RNA, 19 nt, Artificial Sequence
  Description of Artificial Sequence: Synthetic oligonucleotide
cuucccuuauacugaggug

SEQ ID NO: 1892470 - RNA, 19 nt, Artificial Sequence
  Description of Artificial Sequence: Synthetic oligonucleotide
caacccaaggcucggcgcc

SEQ ID NO: 1892471 - RNA, 19 nt, Artificial Sequence
  Description of Artificial Sequence: Synthetic oligonucleotide
accauaaggccucuccaaa

SEQ ID NO: 1892472 - RNA, 19 nt, Artificial Sequence
  Description of Artificial Sequence: Synthetic oligonucleotide
aguccaagaaccggcacgu

SEQ ID NO: 1892473 - RNA, 19 nt, Artificial Sequence
  Description of Artificial Sequence: Synthetic oligonucleotide
cugagguguagagacaauc

SEQ ID NO: 1892474 - RNA, 19 nt, Artificial Sequence
  Description of Artificial Sequence: Synthetic oligonucleotide
aguugaccccaaucaaccu

SEQ ID NO: 1892475 - RNA, 19 nt, Artificial Sequence
  Description of Artificial Sequence: Synthetic oligonucleotide
aacugacgcccacaaccca

SEQ ID NO: 1892476 - RNA, 19 nt, Artificial Sequence
  Description of Artificial Sequence: Synthetic oligonucleotide
uggguuccacacacuacca

SEQ ID NO: 1892477 - RNA, 19 nt, Artificial Sequence
  Description of Artificial Sequence: Synthetic oligonucleotide
uuaccacuucugaagcaau

SEQ ID NO: 1892478 - RNA, 19 nt, Artificial Sequence
  Description of Artificial Sequence: Synthetic oligonucleotide
gccucauuagguuguuugg

SEQ ID NO: 1892479 - RNA, 19 nt, Artificial Sequence
  Description of Artificial Sequence: Synthetic oligonucleotide
uggcugacauuaccauaag

SEQ ID NO: 1892480 - RNA, 19 nt, Artificial Sequence
  Description of Artificial Sequence: Synthetic oligonucleotide
agagcaaaagacgccgcca

SEQ ID NO: 1892481 - RNA, 19 nt, Artificial Sequence
  Description of Artificial Sequence: Synthetic oligonucleotide
agaucaagggucugugcua

SEQ ID NO: 1892482 - RNA, 19 nt, Artificial Sequence
  Description of Artificial Sequence: Synthetic oligonucleotide
ugacgcccacaacccaagg

SEQ ID NO: 1892483 - RNA, 19 nt, Artificial Sequence
  Description of Artificial Sequence: Synthetic oligonucleotide
aucguucgcugccagugca

SEQ ID NO: 1892484 - RNA, 19 nt, Artificial Sequence
  Description of Artificial Sequence: Synthetic oligonucleotide
gguuccacacacuaccaca

SEQ ID NO: 1892485 - RNA, 19 nt, Artificial Sequence
  Description of Artificial Sequence: Synthetic oligonucleotide
guguagagacaaucacagc

SEQ ID NO: 1892486 - RNA, 19 nt, Artificial Sequence
  Description of Artificial Sequence: Synthetic oligonucleotide
acguggaccuuucgaaaca

SEQ ID NO: 1892487 - RNA, 19 nt, Artificial Sequence
  Description of Artificial Sequence: Synthetic oligonucleotide
uuggaauggaaggaccaua

SEQ ID NO: 1892488 - RNA, 19 nt, Artificial Sequence
  Description of Artificial Sequence: Synthetic oligonucleotide
aaugugcagguaagcuuug

SEQ ID NO: 1892489 - RNA, 19 nt, Artificial Sequence
  Description of Artificial Sequence: Synthetic oligonucleotide
cucagcgccuaauaacuga

SEQ ID NO: 1892490 - RNA, 19 nt, Artificial Sequence
  Description of Artificial Sequence: Synthetic oligonucleotide
agguuguuuggugauaauu

SEQ ID NO: 1892491 - RNA, 19 nt, Artificial Sequence
  Description of Artificial Sequence: Synthetic oligonucleotide
uggaaggaccauacacauc

SEQ ID NO: 1892492 - RNA, 19 nt, Artificial Sequence
  Description of Artificial Sequence: Synthetic oligonucleotide
accuuucgaaacaucucag

SEQ ID NO: 1892493 - RNA, 19 nt, Artificial Sequence
  Description of Artificial Sequence: Synthetic oligonucleotide
cagcgccuaauaacugacg

SEQ ID NO: 1892494 - RNA, 19 nt, Artificial Sequence
  Description of Artificial Sequence: Synthetic oligonucleotide
acgaaucguucgcugccag

SEQ ID NO: 1892495 - RNA, 19 nt, Artificial Sequence
  Description of Artificial Sequence: Synthetic oligonucleotide
caaaagacgccgccagguc

SEQ ID NO: 1892496 - RNA, 19 nt, Artificial Sequence
  Description of Artificial Sequence: Synthetic oligonucleotide
cuuaccacuucugaagcaa

SEQ ID NO: 1892497 - RNA, 19 nt, Artificial Sequence
  Description of Artificial Sequence: Synthetic oligonucleotide
gcugacccuuaucugaagc

SEQ ID NO: 1892498 - RNA, 19 nt, Artificial Sequence
  Description of Artificial Sequence: Synthetic oligonucleotide
gaggccacaacaauaacuu

SEQ ID NO: 1892499 - RNA, 19 nt, Artificial Sequence
  Description of Artificial Sequence: Synthetic oligonucleotide
ugacccuuaucugaagcuu

SEQ ID NO: 1892500 - RNA, 19 nt, Artificial Sequence
  Description of Artificial Sequence: Synthetic oligonucleotide
gacccuuaucugaagcuuc

SEQ ID NO: 1892501 - RNA, 19 nt, Artificial Sequence
  Description of Artificial Sequence: Synthetic oligonucleotide
ucacccucagcgccuaaua

SEQ ID NO: 1892502 - RNA, 19 nt, Artificial Sequence
  Description of Artificial Sequence: Synthetic oligonucleotide
ggacgaaucguucgcugcc

SEQ ID NO: 1892503 - RNA, 19 nt, Artificial Sequence
  Description of Artificial Sequence: Synthetic oligonucleotide
gaucaagggucugugcuaa

SEQ ID NO: 1892504 - RNA, 19 nt, Artificial Sequence
  Description of Artificial Sequence: Synthetic oligonucleotide
gcuguuguagacuuuccaa

SEQ ID NO: 1892505 - RNA, 19 nt, Artificial Sequence
  Description of Artificial Sequence: Synthetic oligonucleotide
gcucacuuuugacagucug

SEQ ID NO: 1892506 - RNA, 19 nt, Artificial Sequence
  Description of Artificial Sequence: Synthetic oligonucleotide
ugguugcaaucuucuuacc

SEQ ID NO: 1892507 - RNA, 19 nt, Artificial Sequence
  Description of Artificial Sequence: Synthetic oligonucleotide
acacuaccacaaugcucac

SEQ ID NO: 1892508 - RNA, 19 nt, Artificial Sequence
  Description of Artificial Sequence: Synthetic oligonucleotide
ccuuauacugagguguaag

SEQ ID NO: 1892509 - RNA, 19 nt, Artificial Sequence
  Description of Artificial Sequence: Synthetic oligonucleotide
uuccugguggcaugucaac

SEQ ID NO: 1892510 - RNA, 19 nt, Artificial Sequence
  Description of Artificial Sequence: Synthetic oligonucleotide
acaaguccaagaaccggca

SEQ ID NO: 1892511 - RNA, 19 nt, Artificial Sequence
  Description of Artificial Sequence: Synthetic oligonucleotide
augugcagguaagcuuugg

SEQ ID NO: 1892512 - RNA, 19 nt, Artificial Sequence
  Description of Artificial Sequence: Synthetic oligonucleotide
aguccucgggacaugauuu

SEQ ID NO: 1892513 - RNA, 19 nt, Artificial Sequence
  Description of Artificial Sequence: Synthetic oligonucleotide
acugagguguaaggggaca

SEQ ID NO: 1892514 - RNA, 19 nt, Artificial Sequence
  Description of Artificial Sequence: Synthetic oligonucleotide
accgccuuggacgaaucgu

SEQ ID NO: 1892515 - RNA, 19 nt, Artificial Sequence
  Description of Artificial Sequence: Synthetic oligonucleotide
agguguaaggggacaucuc

SEQ ID NO: 1892516 - RNA, 19 nt, Artificial Sequence
  Description of Artificial Sequence: Synthetic oligonucleotide
aagacgccgccaggucccc

SEQ ID NO: 1892517 - RNA, 19 nt, Artificial Sequence
  Description of Artificial Sequence: Synthetic oligonucleotide
ugagguguaaggggacauc

SEQ ID NO: 1892518 - RNA, 19 nt, Artificial Sequence
  Description of Artificial Sequence: Synthetic oligonucleotide
ugugugucaugggcuguca

SEQ ID NO: 1892519 - RNA, 19 nt, Artificial Sequence
  Description of Artificial Sequence: Synthetic oligonucleotide
cgccuaauaacugacgccc

SEQ ID NO: 1892520 - RNA, 19 nt, Artificial Sequence
  Description of Artificial Sequence: Synthetic oligonucleotide
gagguguaaggggacaucu

SEQ ID NO: 1892521 - RNA, 19 nt, Artificial Sequence
  Description of Artificial Sequence: Synthetic oligonucleotide
acaacuggagcagucucuu

SEQ ID NO: 1892522 - RNA, 19 nt, Artificial Sequence
  Description of Artificial Sequence: Synthetic oligonucleotide
ccuuggacgaaucguucgc

SEQ ID NO: 1892523 - RNA, 19 nt, Artificial Sequence
  Description of Artificial Sequence: Synthetic oligonucleotide
ccuaauaacugacgcccac

SEQ ID NO: 1892524 - RNA, 19 nt, Artificial Sequence
  Description of Artificial Sequence: Synthetic oligonucleotide
auuagguuguuuggugaua

SEQ ID NO: 1892525 - RNA, 19 nt, Artificial Sequence
  Description of Artificial Sequence: Synthetic oligonucleotide
cagguaagcuuuggccucc

SEQ ID NO: 1892526 - RNA, 19 nt, Artificial Sequence
  Description of Artificial Sequence: Synthetic oligonucleotide
gcgccuaauaacugacgcc

SEQ ID NO: 1892527 - RNA, 19 nt, Artificial Sequence
  Description of Artificial Sequence: Synthetic oligonucleotide
uugugugucaugggcuguc

SEQ ID NO: 1892528 - RNA, 19 nt, Artificial Sequence
  Description of Artificial Sequence: Synthetic oligonucleotide
accccagagugacaccccu

SEQ ID NO: 1892529 - RNA, 19 nt, Artificial Sequence
  Description of Artificial Sequence: Synthetic oligonucleotide
agcaccugaaauagggaua

SEQ ID NO: 1892530 - RNA, 19 nt, Artificial Sequence
  Description of Artificial Sequence: Synthetic oligonucleotide
cacuuuugacagucuguga

SEQ ID NO: 1892531 - RNA, 19 nt, Artificial Sequence
  Description of Artificial Sequence: Synthetic oligonucleotide
auguuuuggacaaguccaa

SEQ ID NO: 1892532 - RNA, 19 nt, Artificial Sequence
  Description of Artificial Sequence: Synthetic oligonucleotide
uagguuguuuggugauaau

SEQ ID NO: 1892533 - RNA, 19 nt, Artificial Sequence
  Description of Artificial Sequence: Synthetic oligonucleotide
acgucuccuguuccuggug

SEQ ID NO: 1892534 - RNA, 19 nt, Artificial Sequence
  Description of Artificial Sequence: Synthetic oligonucleotide
cugugcuaauuuucuugca

SEQ ID NO: 1892535 - RNA, 19 nt, Artificial Sequence
  Description of Artificial Sequence: Synthetic oligonucleotide
ucguucgcugccagugcaa

SEQ ID NO: 1892536 - RNA, 19 nt, Artificial Sequence
  Description of Artificial Sequence: Synthetic oligonucleotide
aggcucggcgccccagggg

SEQ ID NO: 1892537 - RNA, 19 nt, Artificial Sequence
  Description of Artificial Sequence: Synthetic oligonucleotide
cauuuucguggguuccaca

SEQ ID NO: 1892538 - RNA, 19 nt, Artificial Sequence
  Description of Artificial Sequence: Synthetic oligonucleotide
gacgaaucguucgcugcca

SEQ ID NO: 1892539 - RNA, 19 nt, Artificial Sequence
  Description of Artificial Sequence: Synthetic oligonucleotide
caugggcugucaaaucaaa

SEQ ID NO: 1892540 - RNA, 19 nt, Artificial Sequence
  Description of Artificial Sequence: Synthetic oligonucleotide
auaacuucucuaacaccuu

SEQ ID NO: 1892541 - RNA, 19 nt, Artificial Sequence
  Description of Artificial Sequence: Synthetic oligonucleotide
gaggugguugcaaucuucu

SEQ ID NO: 1892542 - RNA, 19 nt, Artificial Sequence
  Description of Artificial Sequence: Synthetic oligonucleotide
ggaauggaaggaccauaca

SEQ ID NO: 1892543 - RNA, 19 nt, Artificial Sequence
  Description of Artificial Sequence: Synthetic oligonucleotide
gcacgucuccuguuccugg

SEQ ID NO: 1892544 - RNA, 19 nt, Artificial Sequence
  Description of Artificial Sequence: Synthetic oligonucleotide
cauuagguuguuuggugau

SEQ ID NO: 1892545 - RNA, 19 nt, Artificial Sequence
  Description of Artificial Sequence: Synthetic oligonucleotide
ccaagaaccggcacgugga

SEQ ID NO: 1892546 - RNA, 19 nt, Artificial Sequence
  Description of Artificial Sequence: Synthetic oligonucleotide
cucgggacaugauuugugu

SEQ ID NO: 1892547 - RNA, 19 nt, Artificial Sequence
  Description of Artificial Sequence: Synthetic oligonucleotide
cuuuugacagucugugauu

SEQ ID NO: 1892548 - RNA, 19 nt, Artificial Sequence
  Description of Artificial Sequence: Synthetic oligonucleotide
gggacagcggccccgccgc

SEQ ID NO: 1892549 - RNA, 19 nt, Artificial Sequence
  Description of Artificial Sequence: Synthetic oligonucleotide
caaacaacuggagcagucu

SEQ ID NO: 1892550 - RNA, 19 nt, Artificial Sequence
  Description of Artificial Sequence: Synthetic oligonucleotide
uaacugcacgucuccuguu

SEQ ID NO: 1892551 - RNA, 19 nt, Artificial Sequence
  Description of Artificial Sequence: Synthetic oligonucleotide
gccgcuaccccagagugac

SEQ ID NO: 1892552 - RNA, 19 nt, Artificial Sequence
  Description of Artificial Sequence: Synthetic oligonucleotide
ggguuccacacacuaccac

SEQ ID NO: 1892553 - RNA, 19 nt, Artificial Sequence
  Description of Artificial Sequence: Synthetic oligonucleotide
ggaccuuucgaaacaucuc

SEQ ID NO: 1892554 - RNA, 19 nt, Artificial Sequence
  Description of Artificial Sequence: Synthetic oligonucleotide
cacacacuaccacaaugcu

SEQ ID NO: 1892555 - RNA, 19 nt, Artificial Sequence
  Description of Artificial Sequence: Synthetic oligonucleotide
cuucuauggguuucuguuu

SEQ ID NO: 1892556 - RNA, 19 nt, Artificial Sequence
  Description of Artificial Sequence: Synthetic oligonucleotide
gguggcaugucaacaacua

SEQ ID NO: 1892557 - RNA, 19 nt, Artificial Sequence
  Description of Artificial Sequence: Synthetic oligonucleotide
caucagcgcaauguccuga

SEQ ID NO: 1892558 - RNA, 19 nt, Artificial Sequence
  Description of Artificial Sequence: Synthetic oligonucleotide
cagguucaucaucuuugga

SEQ ID NO: 1892559 - RNA, 19 nt, Artificial Sequence
  Description of Artificial Sequence: Synthetic oligonucleotide
gcccacaacccaaggcucg

SEQ ID NO: 1892560 - RNA, 19 nt, Artificial Sequence
  Description of Artificial Sequence: Synthetic oligonucleotide
ggcacuugggcaucauucu

SEQ ID NO: 1892561 - RNA, 19 nt, Artificial Sequence
  Description of Artificial Sequence: Synthetic oligonucleotide
caaccgccuuggacgaauc

SEQ ID NO: 1892562 - RNA, 19 nt, Artificial Sequence
  Description of Artificial Sequence: Synthetic oligonucleotide
cuaacaagccaaccgccuu

SEQ ID NO: 1892563 - RNA, 19 nt, Artificial Sequence
  Description of Artificial Sequence: Synthetic oligonucleotide
aucaagggucugugcuaau

SEQ ID NO: 1892564 - RNA, 19 nt, Artificial Sequence
  Description of Artificial Sequence: Synthetic oligonucleotide
cagguccccauggcgcgcg

SEQ ID NO: 1892565 - RNA, 19 nt, Artificial Sequence
  Description of Artificial Sequence: Synthetic oligonucleotide
ccuucuauggguuucuguu

SEQ ID NO: 1892566 - RNA, 19 nt, Artificial Sequence
  Description of Artificial Sequence: Synthetic oligonucleotide
guguaaggggacaucuccu

SEQ ID NO: 1892567 - RNA, 19 nt, Artificial Sequence
  Description of Artificial Sequence: Synthetic oligonucleotide
cacccucagcgccuaauaa

SEQ ID NO: 1892568 - RNA, 19 nt, Artificial Sequence
  Description of Artificial Sequence: Synthetic oligonucleotide
cauuaccauaaggccucuc

SEQ ID NO: 1892569 - RNA, 19 nt, Artificial Sequence
  Description of Artificial Sequence: Synthetic oligonucleotide
accggcacguggaccuuuc

SEQ ID NO: 1892570 - RNA, 19 nt, Artificial Sequence
  Description of Artificial Sequence: Synthetic oligonucleotide
ccucagcgccuaauaacug

SEQ ID NO: 1892571 - RNA, 19 nt, Artificial Sequence
  Description of Artificial Sequence: Synthetic oligonucleotide
gcaaaagacgccgccaggu

SEQ ID NO: 1892572 - RNA, 19 nt, Artificial Sequence
  Description of Artificial Sequence: Synthetic oligonucleotide
gcuaccccagagugacacc

SEQ ID NO: 1892573 - RNA, 19 nt, Artificial Sequence
  Description of Artificial Sequence: Synthetic oligonucleotide
ccccaaucaaccugucuca

SEQ ID NO: 1892574 - RNA, 19 nt, Artificial Sequence
  Description of Artificial Sequence: Synthetic oligonucleotide
guggaccuuucgaaacauc

SEQ ID NO: 1892575 - RNA, 19 nt, Artificial Sequence
  Description of Artificial Sequence: Synthetic oligonucleotide
cucggcgccccaggggcgg

SEQ ID NO: 1892576 - RNA, 19 nt, Artificial Sequence
  Description of Artificial Sequence: Synthetic oligonucleotide
cgccagguccccauggcgc

SEQ ID NO: 1892577 - RNA, 19 nt, Artificial Sequence
  Description of Artificial Sequence: Synthetic oligonucleotide
cuuggacgaaucguucgcu

SEQ ID NO: 1892578 - RNA, 19 nt, Artificial Sequence
  Description of Artificial Sequence: Synthetic oligonucleotide
cguggguuccacacacuac

SEQ ID NO: 1892579 - RNA, 19 nt, Artificial Sequence
  Description of Artificial Sequence: Synthetic oligonucleotide
cccucagcgccuaauaacu

SEQ ID NO: 1892580 - RNA, 19 nt, Artificial Sequence
  Description of Artificial Sequence: Synthetic oligonucleotide
ccgccgcuaccccagagug

SEQ ID NO: 1892581 - RNA, 19 nt, Artificial Sequence
  Description of Artificial Sequence: Synthetic oligonucleotide
gaaggaccauacacaucua

SEQ ID NO: 1892582 - RNA, 19 nt, Artificial Sequence
  Description of Artificial Sequence: Synthetic oligonucleotide
gcaccugaaauagggauau

SEQ ID NO: 1892583 - RNA, 19 nt, Artificial Sequence
  Description of Artificial Sequence: Synthetic oligonucleotide
ccgccagguccccauggcg

SEQ ID NO: 1892584 - RNA, 19 nt, Artificial Sequence
  Description of Artificial Sequence: Synthetic oligonucleotide
guccaagaaccggcacgug

SEQ ID NO: 1892585 - RNA, 19 nt, Artificial Sequence
  Description of Artificial Sequence: Synthetic oligonucleotide
cgcuaccccagagugacac

SEQ ID NO: 1892586 - RNA, 19 nt, Artificial Sequence
  Description of Artificial Sequence: Synthetic oligonucleotide
gccgccagguccccauggc

SEQ ID NO: 1892587 - RNA, 19 nt, Artificial Sequence
  Description of Artificial Sequence: Synthetic oligonucleotide
gccuaauaacugacgccca

SEQ ID NO: 1892588 - RNA, 19 nt, Artificial Sequence
  Description of Artificial Sequence: Synthetic oligonucleotide
cugagguguaaggggacau

SEQ ID NO: 1892589 - RNA, 19 nt, Artificial Sequence
  Description of Artificial Sequence: Synthetic oligonucleotide
ccucauuagguuguuuggu

SEQ ID NO: 1892590 - RNA, 19 nt, Artificial Sequence
  Description of Artificial Sequence: Synthetic oligonucleotide
cgccuuggacgaaucguuc

SEQ ID NO: 1892591 - RNA, 19 nt, Artificial Sequence
  Description of Artificial Sequence: Synthetic oligonucleotide
cacuaccacaaugcucacu

SEQ ID NO: 1892592 - RNA, 19 nt, Artificial Sequence
  Description of Artificial Sequence: Synthetic oligonucleotide
cuaccacaaugcucacuuu

SEQ ID NO: 1892593 - RNA, 19 nt, Artificial Sequence
  Description of Artificial Sequence: Synthetic oligonucleotide
cugaagcaaugugcaggua

SEQ ID NO: 1892594 - RNA, 19 nt, Artificial Sequence
  Description of Artificial Sequence: Synthetic oligonucleotide
ccagagugacaccccucca

SEQ ID NO: 1892595 - RNA, 19 nt, Artificial Sequence
  Description of Artificial Sequence: Synthetic oligonucleotide
ggcgggacagcggccccgc

SEQ ID NO: 1892596 - RNA, 19 nt, Artificial Sequence
  Description of Artificial Sequence: Synthetic oligonucleotide
ggggcgggacagcggcccc

SEQ ID NO: 1892597 - RNA, 19 nt, Artificial Sequence
  Description of Artificial Sequence: Synthetic oligonucleotide
gcucggcgccccaggggcg

SEQ ID NO: 1892598 - RNA, 19 nt, Artificial Sequence
  Description of Artificial Sequence: Synthetic oligonucleotide
cucacccucagcgccuaau

SEQ ID NO: 1892599 - RNA, 19 nt, Artificial Sequence
  Description of Artificial Sequence: Synthetic oligonucleotide
agacgccgccaggucccca

SEQ ID NO: 1892600 - RNA, 19 nt, Artificial Sequence
  Description of Artificial Sequence: Synthetic oligonucleotide
ggacucacccucagcgccu

SEQ ID NO: 1892601 - RNA, 19 nt, Artificial Sequence
  Description of Artificial Sequence: Synthetic oligonucleotide
cccaaucaaccugucucaa

SEQ ID NO: 1892602 - RNA, 19 nt, Artificial Sequence
  Description of Artificial Sequence: Synthetic oligonucleotide
cgaaacaucucagcacccu

SEQ ID NO: 1892603 - RNA, 19 nt, Artificial Sequence
  Description of Artificial Sequence: Synthetic oligonucleotide
ccgccuuggacgaaucguu

SEQ ID NO: 1892604 - RNA, 19 nt, Artificial Sequence
  Description of Artificial Sequence: Synthetic oligonucleotide
ccccgccgcuaccccagag

SEQ ID NO: 1892605 - RNA, 19 nt, Artificial Sequence
  Description of Artificial Sequence: Synthetic oligonucleotide
gcgggacagcggccccgcc

SEQ ID NO: 1892606 - RNA, 19 nt, Artificial Sequence
  Description of Artificial Sequence: Synthetic oligonucleotide
cgaaucguucgcugccagu

SEQ ID NO: 1892607 - RNA, 19 nt, Artificial Sequence
  Description of Artificial Sequence: Synthetic oligonucleotide
ccaaccgccuuggacgaau

SEQ ID NO: 1892608 - RNA, 19 nt, Artificial Sequence
  Description of Artificial Sequence: Synthetic oligonucleotide
cgccgcuaccccagaguga

SEQ ID NO: 1892609 - RNA, 19 nt, Artificial Sequence
  Description of Artificial Sequence: Synthetic oligonucleotide
gcgccccaggggcgggaca

SEQ ID NO: 1892610 - RNA, 19 nt, Artificial Sequence
  Description of Artificial Sequence: Synthetic oligonucleotide
cguggaccuuucgaaacau

SEQ ID NO: 1892611 - RNA, 19 nt, Artificial Sequence
  Description of Artificial Sequence: Synthetic oligonucleotide
ccgcuaccccagagugaca

SEQ ID NO: 1892612 - RNA, 19 nt, Artificial Sequence
  Description of Artificial Sequence: Synthetic oligonucleotide
gccaaccgccuuggacgaa

SEQ ID NO: 1892613 - RNA, 19 nt, Artificial Sequence
  Description of Artificial Sequence: Synthetic oligonucleotide
ggacagcggccccgccgcu

SEQ ID NO: 1892614 - RNA, 19 nt, Artificial Sequence
  Description of Artificial Sequence: Synthetic oligonucleotide
uuuaaaacuauuuuaaggg

SEQ ID NO: 1892615 - RNA, 19 nt, Artificial Sequence
  Description of Artificial Sequence: Synthetic oligonucleotide
uuuaaaacuaaacauuggg

SEQ ID NO: 1892616 - RNA, 19 nt, Artificial Sequence
  Description of Artificial Sequence: Synthetic oligonucleotide
uaaaauagcacagucauag

SEQ ID NO: 1892617 - RNA, 19 nt, Artificial Sequence
  Description of Artificial Sequence: Synthetic oligonucleotide
gauuauagugcucaugggg

SEQ ID NO: 1892618 - RNA, 19 nt, Artificial Sequence
  Description of Artificial Sequence: Synthetic oligonucleotide
uuaaaacuauuuuaagggg

SEQ ID NO: 1892619 - RNA, 19 nt, Artificial Sequence
  Description of Artificial Sequence: Synthetic oligonucleotide
gaugauucauauaaggugg

SEQ ID NO: 1892620 - RNA, 19 nt, Artificial Sequence
  Description of Artificial Sequence: Synthetic oligonucleotide
ucuuguugaaauacgaaag

SEQ ID NO: 1892621 - RNA, 19 nt, Artificial Sequence
  Description of Artificial Sequence: Synthetic oligonucleotide
aagguuuccugacugaccg

SEQ ID NO: 1892622 - RNA, 19 nt, Artificial Sequence
  Description of Artificial Sequence: Synthetic oligonucleotide
ugagucauccugaauaggg

SEQ ID NO: 1892623 - RNA, 19 nt, Artificial Sequence
  Description of Artificial Sequence: Synthetic oligonucleotide
uuuuaaaacuaaacauugg

SEQ ID NO: 1892624 - RNA, 19 nt, Artificial Sequence
  Description of Artificial Sequence: Synthetic oligonucleotide
aauacgaaagguuuccuga

SEQ ID NO: 1892625 - RNA, 19 nt, Artificial Sequence
  Description of Artificial Sequence: Synthetic oligonucleotide
aagacuuuguguuugguga

SEQ ID NO: 1892626 - RNA, 19 nt, Artificial Sequence
  Description of Artificial Sequence: Synthetic oligonucleotide
cugauuauagugcucaugg

SEQ ID NO: 1892627 - RNA, 19 nt, Artificial Sequence
  Description of Artificial Sequence: Synthetic oligonucleotide
cauaauauggugagggugg

SEQ ID NO: 1892628 - RNA, 19 nt, Artificial Sequence
  Description of Artificial Sequence: Synthetic oligonucleotide
ugaagcacggguaacaggc

SEQ ID NO: 1892629 - RNA, 19 nt, Artificial Sequence
  Description of Artificial Sequence: Synthetic oligonucleotide
aauauggugagggugggac

SEQ ID NO: 1892630 - RNA, 19 nt, Artificial Sequence
  Description of Artificial Sequence: Synthetic oligonucleotide
aaaacuauuuuaaggggac

SEQ ID NO: 1892631 - RNA, 19 nt, Artificial Sequence
  Description of Artificial Sequence: Synthetic oligonucleotide
ucucauauggcgaugguug

SEQ ID NO: 1892632 - RNA, 19 nt, Artificial Sequence
  Description of Artificial Sequence: Synthetic oligonucleotide
aaaagacaugcuugcaugg

SEQ ID NO: 1892633 - RNA, 19 nt, Artificial Sequence
  Description of Artificial Sequence: Synthetic oligonucleotide
gaggaugauucauauaagg

SEQ ID NO: 1892634 - RNA, 19 nt, Artificial Sequence
  Description of Artificial Sequence: Synthetic oligonucleotide
aaccgagccacguaucugc

SEQ ID NO: 1892635 - RNA, 19 nt, Artificial Sequence
  Description of Artificial Sequence: Synthetic oligonucleotide
aaaauagcacagucauagc

SEQ ID NO: 1892636 - RNA, 19 nt, Artificial Sequence
  Description of Artificial Sequence: Synthetic oligonucleotide
auuauagugcucauggggc

SEQ ID NO: 1892637 - RNA, 19 nt, Artificial Sequence
  Description of Artificial Sequence: Synthetic oligonucleotide
uggaggagcacgaauaucc

SEQ ID NO: 1892638 - RNA, 19 nt, Artificial Sequence
  Description of Artificial Sequence: Synthetic oligonucleotide
uacacaugaagagagaacc

SEQ ID NO: 1892639 - RNA, 19 nt, Artificial Sequence
  Description of Artificial Sequence: Synthetic oligonucleotide
uagacaauucugcuggagg

SEQ ID NO: 1892640 - RNA, 19 nt, Artificial Sequence
  Description of Artificial Sequence: Synthetic oligonucleotide
aaaacuaaacauuggguuu

SEQ ID NO: 1892641 - RNA, 19 nt, Artificial Sequence
  Description of Artificial Sequence: Synthetic oligonucleotide
auucauauaagguggcauc

SEQ ID NO: 1892642 - RNA, 19 nt, Artificial Sequence
  Description of Artificial Sequence: Synthetic oligonucleotide
auacauuugugcucaaccg

SEQ ID NO: 1892643 - RNA, 19 nt, Artificial Sequence
  Description of Artificial Sequence: Synthetic oligonucleotide
uggcuauacaccaagugag

SEQ ID NO: 1892644 - RNA, 19 nt, Artificial Sequence
  Description of Artificial Sequence: Synthetic oligonucleotide
aauccuaaggucaagauuu

SEQ ID NO: 1892645 - RNA, 19 nt, Artificial Sequence
  Description of Artificial Sequence: Synthetic oligonucleotide
aggaggaugauucauauaa

SEQ ID NO: 1892646 - RNA, 19 nt, Artificial Sequence
  Description of Artificial Sequence: Synthetic oligonucleotide
auuugugcucaaccgagcc

SEQ ID NO: 1892647 - RNA, 19 nt, Artificial Sequence
  Description of Artificial Sequence: Synthetic oligonucleotide
aaauacgaaagguuuccug

SEQ ID NO: 1892648 - RNA, 19 nt, Artificial Sequence
  Description of Artificial Sequence: Synthetic oligonucleotide
acgaauauccucauguggc

SEQ ID NO: 1892649 - RNA, 19 nt, Artificial Sequence
  Description of Artificial Sequence: Synthetic oligonucleotide
aggaugaacauucucaagu

SEQ ID NO: 1892650 - RNA, 19 nt, Artificial Sequence
  Description of Artificial Sequence: Synthetic oligonucleotide
uuuccugacugaccgaacg

SEQ ID NO: 1892651 - RNA, 19 nt, Artificial Sequence
  Description of Artificial Sequence: Synthetic oligonucleotide
uaguauuugaaagcaaucc

SEQ ID NO: 1892652 - RNA, 19 nt, Artificial Sequence
  Description of Artificial Sequence: Synthetic oligonucleotide
uauuuuaaggggacaagac

SEQ ID NO: 1892653 - RNA, 19 nt, Artificial Sequence
  Description of Artificial Sequence: Synthetic oligonucleotide
caucugggcaaucauaugg

SEQ ID NO: 1892654 - RNA, 19 nt, Artificial Sequence
  Description of Artificial Sequence: Synthetic oligonucleotide
ugcuaagauacauuugugc

SEQ ID NO: 1892655 - RNA, 19 nt, Artificial Sequence
  Description of Artificial Sequence: Synthetic oligonucleotide
ucaagauuuaaaacuauuu

SEQ ID NO: 1892656 - RNA, 19 nt, Artificial Sequence
  Description of Artificial Sequence: Synthetic oligonucleotide
cugauagucagggugaugg

SEQ ID NO: 1892657 - RNA, 19 nt, Artificial Sequence
  Description of Artificial Sequence: Synthetic oligonucleotide
uuugccacaccaaaguaac

SEQ ID NO: 1892658 - RNA, 19 nt, Artificial Sequence
  Description of Artificial Sequence: Synthetic oligonucleotide
aaacauuggguuuaauaaa

SEQ ID NO: 1892659 - RNA, 19 nt, Artificial Sequence
  Description of Artificial Sequence: Synthetic oligonucleotide
ugcauggaaucauucaucc

SEQ ID NO: 1892660 - RNA, 19 nt, Artificial Sequence
  Description of Artificial Sequence: Synthetic oligonucleotide
agcacgaauauccucaugu

SEQ ID NO: 1892661 - RNA, 19 nt, Artificial Sequence
  Description of Artificial Sequence: Synthetic oligonucleotide
ugaaauacgaaagguuucc

SEQ ID NO: 1892662 - RNA, 19 nt, Artificial Sequence
  Description of Artificial Sequence: Synthetic oligonucleotide
uauaagguggcaucugggc

SEQ ID NO: 1892663 - RNA, 19 nt, Artificial Sequence
  Description of Artificial Sequence: Synthetic oligonucleotide
uggcaugaugaaccgaucg

SEQ ID NO: 1892664 - RNA, 19 nt, Artificial Sequence
  Description of Artificial Sequence: Synthetic oligonucleotide
uuauuggugguggaggagg

SEQ ID NO: 1892665 - RNA, 19 nt, Artificial Sequence
  Description of Artificial Sequence: Synthetic oligonucleotide
uugucugguggcaugauga

SEQ ID NO: 1892666 - RNA, 19 nt, Artificial Sequence
  Description of Artificial Sequence: Synthetic oligonucleotide
cuguggaggcauaauaugg

SEQ ID NO: 1892667 - RNA, 19 nt, Artificial Sequence
  Description of Artificial Sequence: Synthetic oligonucleotide
uucucuugcaaccuugaac

SEQ ID NO: 1892668 - RNA, 19 nt, Artificial Sequence
  Description of Artificial Sequence: Synthetic oligonucleotide
cuuuggaggaauauggcuc

SEQ ID NO: 1892669 - RNA, 19 nt, Artificial Sequence
  Description of Artificial Sequence: Synthetic oligonucleotide
aacgagguggagguggagc

SEQ ID NO: 1892670 - RNA, 19 nt, Artificial Sequence
  Description of Artificial Sequence: Synthetic oligonucleotide
ucucaagugaagcacgggu

SEQ ID NO: 1892671 - RNA, 19 nt, Artificial Sequence
  Description of Artificial Sequence: Synthetic oligonucleotide
auacgaaagguuuccugac

SEQ ID NO: 1892672 - RNA, 19 nt, Artificial Sequence
  Description of Artificial Sequence: Synthetic oligonucleotide
guaagucucucugagacag

SEQ ID NO: 1892673 - RNA, 19 nt, Artificial Sequence
  Description of Artificial Sequence: Synthetic oligonucleotide
cauucucaagugaagcacg

SEQ ID NO: 1892674 - RNA, 19 nt, Artificial Sequence
  Description of Artificial Sequence: Synthetic oligonucleotide
ugauuauagugcucauggg

SEQ ID NO: 1892675 - RNA, 19 nt, Artificial Sequence
  Description of Artificial Sequence: Synthetic oligonucleotide
aguaggaugaacauucuca

SEQ ID NO: 1892676 - RNA, 19 nt, Artificial Sequence
  Description of Artificial Sequence: Synthetic oligonucleotide
uggagguggagccauagac

SEQ ID NO: 1892677 - RNA, 19 nt, Artificial Sequence
  Description of Artificial Sequence: Synthetic oligonucleotide
uguacacugcucaauccgc

SEQ ID NO: 1892678 - RNA, 19 nt, Artificial Sequence
  Description of Artificial Sequence: Synthetic oligonucleotide
uauacaccaagugaggagu

SEQ ID NO: 1892679 - RNA, 19 nt, Artificial Sequence
  Description of Artificial Sequence: Synthetic oligonucleotide
cuugagucauccugaauag

SEQ ID NO: 1892680 - RNA, 19 nt, Artificial Sequence
  Description of Artificial Sequence: Synthetic oligonucleotide
uuuggaggaauauggcuca

SEQ ID NO: 1892681 - RNA, 19 nt, Artificial Sequence
  Description of Artificial Sequence: Synthetic oligonucleotide
cugaacuugagucauccug

SEQ ID NO: 1892682 - RNA, 19 nt, Artificial Sequence
  Description of Artificial Sequence: Synthetic oligonucleotide
uggggcaauaguaggauga

SEQ ID NO: 1892683 - RNA, 19 nt, Artificial Sequence
  Description of Artificial Sequence: Synthetic oligonucleotide
uugaaauacgaaagguuuc

SEQ ID NO: 1892684 - RNA, 19 nt, Artificial Sequence
  Description of Artificial Sequence: Synthetic oligonucleotide
cuaagauacauuugugcuc

SEQ ID NO: 1892685 - RNA, 19 nt, Artificial Sequence
  Description of Artificial Sequence: Synthetic oligonucleotide
guguacacugcucaauccg

SEQ ID NO: 1892686 - RNA, 19 nt, Artificial Sequence
  Description of Artificial Sequence: Synthetic oligonucleotide
cacgaauauccucaugugg

SEQ ID NO: 1892687 - RNA, 19 nt, Artificial Sequence
  Description of Artificial Sequence: Synthetic oligonucleotide
caugaugaaccgaucgggg

SEQ ID NO: 1892688 - RNA, 19 nt, Artificial Sequence
  Description of Artificial Sequence: Synthetic oligonucleotide
uugaacaaugcuacacaug

SEQ ID NO: 1892689 - RNA, 19 nt, Artificial Sequence
  Description of Artificial Sequence: Synthetic oligonucleotide
uagcaaaagacaugcuugc

SEQ ID NO: 1892690 - RNA, 19 nt, Artificial Sequence
  Description of Artificial Sequence: Synthetic oligonucleotide
cuauacaccaagugaggag

SEQ ID NO: 1892691 - RNA, 19 nt, Artificial Sequence
  Description of Artificial Sequence: Synthetic oligonucleotide
uguggaggcauaauauggu

SEQ ID NO: 1892692 - RNA, 19 nt, Artificial Sequence
  Description of Artificial Sequence: Synthetic oligonucleotide
aacauuggguuuaauaaaa

SEQ ID NO: 1892693 - RNA, 19 nt, Artificial Sequence
  Description of Artificial Sequence: Synthetic oligonucleotide
acaauucugcuggaggagc

SEQ ID NO: 1892694 - RNA, 19 nt, Artificial Sequence
  Description of Artificial Sequence: Synthetic oligonucleotide
cuaaggucaagauuuaaaa

SEQ ID NO: 1892695 - RNA, 19 nt, Artificial Sequence
  Description of Artificial Sequence: Synthetic oligonucleotide
ucaagugaagcacggguaa

SEQ ID NO: 1892696 - RNA, 19 nt, Artificial Sequence
  Description of Artificial Sequence: Synthetic oligonucleotide
agacaauucugcuggagga

SEQ ID NO: 1892697 - RNA, 19 nt, Artificial Sequence
  Description of Artificial Sequence: Synthetic oligonucleotide
accugaacuugagucaucc

SEQ ID NO: 1892698 - RNA, 19 nt, Artificial Sequence
  Description of Artificial Sequence: Synthetic oligonucleotide
gaucggggaugucaguugg

SEQ ID NO: 1892699 - RNA, 19 nt, Artificial Sequence
  Description of Artificial Sequence: Synthetic oligonucleotide
cugggcacaucuuaucucc

SEQ ID NO: 1892700 - RNA, 19 nt, Artificial Sequence
  Description of Artificial Sequence: Synthetic oligonucleotide
cugggcaaucauauggucc

SEQ ID NO: 1892701 - RNA, 19 nt, Artificial Sequence
  Description of Artificial Sequence: Synthetic oligonucleotide
ucuagcaccugaacuugag

SEQ ID NO: 1892702 - RNA, 19 nt, Artificial Sequence
  Description of Artificial Sequence: Synthetic oligonucleotide
gcacuauaguauuugaaag

SEQ ID NO: 1892703 - RNA, 19 nt, Artificial Sequence
  Description of Artificial Sequence: Synthetic oligonucleotide
gacagguauguucucuugc

SEQ ID NO: 1892704 - RNA, 19 nt, Artificial Sequence
  Description of Artificial Sequence: Synthetic oligonucleotide
gaugguugaugugagcuug

SEQ ID NO: 1892705 - RNA, 19 nt, Artificial Sequence
  Description of Artificial Sequence: Synthetic oligonucleotide
acgaaagguuuccugacug

SEQ ID NO: 1892706 - RNA, 19 nt, Artificial Sequence
  Description of Artificial Sequence: Synthetic oligonucleotide
agcacagucauagcaaaag

SEQ ID NO: 1892707 - RNA, 19 nt, Artificial Sequence
  Description of Artificial Sequence: Synthetic oligonucleotide
aacaguugcuaagauacau

SEQ ID NO: 1892708 - RNA, 19 nt, Artificial Sequence
  Description of Artificial Sequence: Synthetic oligonucleotide
gguauguucucuugcaacc

SEQ ID NO: 1892709 - RNA, 19 nt, Artificial Sequence
  Description of Artificial Sequence: Synthetic oligonucleotide
uugcuaagauacauuugug

SEQ ID NO: 1892710 - RNA, 19 nt, Artificial Sequence
  Description of Artificial Sequence: Synthetic oligonucleotide
uuauagugcucauggggca

SEQ ID NO: 1892711 - RNA, 19 nt, Artificial Sequence
  Description of Artificial Sequence: Synthetic oligonucleotide
cucauguggcugauuauag

SEQ ID NO: 1892712 - RNA, 19 nt, Artificial Sequence
  Description of Artificial Sequence: Synthetic oligonucleotide
uucauauaagguggcaucu

SEQ ID NO: 1892713 - RNA, 19 nt, Artificial Sequence
  Description of Artificial Sequence: Synthetic oligonucleotide
ugcuuuggaggaauauggc

SEQ ID NO: 1892714 - RNA, 19 nt, Artificial Sequence
  Description of Artificial Sequence: Synthetic oligonucleotide
acaggaucacuacagccug

SEQ ID NO: 1892715 - RNA, 19 nt, Artificial Sequence
  Description of Artificial Sequence: Synthetic oligonucleotide
aagacaugcuugcauggaa

SEQ ID NO: 1892716 - RNA, 19 nt, Artificial Sequence
  Description of Artificial Sequence: Synthetic oligonucleotide
ugaugaaccgaucggggau

SEQ ID NO: 1892717 - RNA, 19 nt, Artificial Sequence
  Description of Artificial Sequence: Synthetic oligonucleotide
aauucugcuggaggagcac

SEQ ID NO: 1892718 - RNA, 19 nt, Artificial Sequence
  Description of Artificial Sequence: Synthetic oligonucleotide
ucugcacuauaguauuuga

SEQ ID NO: 1892719 - RNA, 19 nt, Artificial Sequence
  Description of Artificial Sequence: Synthetic oligonucleotide
ugaaagcaauccuaagguc

SEQ ID NO: 1892720 - RNA, 19 nt, Artificial Sequence
  Description of Artificial Sequence: Synthetic oligonucleotide
ggaggcauaauauggugag

SEQ ID NO: 1892721 - RNA, 19 nt, Artificial Sequence
  Description of Artificial Sequence: Synthetic oligonucleotide
caaucauaugguccagggg

SEQ ID NO: 1892722 - RNA, 19 nt, Artificial Sequence
  Description of Artificial Sequence: Synthetic oligonucleotide
ugaccgaacgagguggagg

SEQ ID NO: 1892723 - RNA, 19 nt, Artificial Sequence
  Description of Artificial Sequence: Synthetic oligonucleotide
uaggaugaacauucucaag

SEQ ID NO: 1892724 - RNA, 19 nt, Artificial Sequence
  Description of Artificial Sequence: Synthetic oligonucleotide
aguaacaguugcuaagaua

SEQ ID NO: 1892725 - RNA, 19 nt, Artificial Sequence
  Description of Artificial Sequence: Synthetic oligonucleotide
agguggaccguccauguug

SEQ ID NO: 1892726 - RNA, 19 nt, Artificial Sequence
  Description of Artificial Sequence: Synthetic oligonucleotide
augauucauauaagguggc

SEQ ID NO: 1892727 - RNA, 19 nt, Artificial Sequence
  Description of Artificial Sequence: Synthetic oligonucleotide
cuacacaugaagagagaac

SEQ ID NO: 1892728 - RNA, 19 nt, Artificial Sequence
  Description of Artificial Sequence: Synthetic oligonucleotide
uaagguggcaucugggcaa

SEQ ID NO: 1892729 - RNA, 19 nt, Artificial Sequence
  Description of Artificial Sequence: Synthetic oligonucleotide
ucaaccgagccacguaucu

SEQ ID NO: 1892730 - RNA, 19 nt, Artificial Sequence
  Description of Artificial Sequence: Synthetic oligonucleotide
acuauuuuaaggggacaag

SEQ ID NO: 1892731 - RNA, 19 nt, Artificial Sequence
  Description of Artificial Sequence: Synthetic oligonucleotide
gauagucagggugauggug

SEQ ID NO: 1892732 - RNA, 19 nt, Artificial Sequence
  Description of Artificial Sequence: Synthetic oligonucleotide
guuauuaaauugcugugcu

SEQ ID NO: 1892733 - RNA, 19 nt, Artificial Sequence
  Description of Artificial Sequence: Synthetic oligonucleotide
agacuuuguguuuggugag

SEQ ID NO: 1892734 - RNA, 19 nt, Artificial Sequence
  Description of Artificial Sequence: Synthetic oligonucleotide
agcuuggcuauacaccaag

SEQ ID NO: 1892735 - RNA, 19 nt, Artificial Sequence
  Description of Artificial Sequence: Synthetic oligonucleotide
cacaccaaaguaacaguug

SEQ ID NO: 1892736 - RNA, 19 nt, Artificial Sequence
  Description of Artificial Sequence: Synthetic oligonucleotide
uuuaaggggacaagacuuu

SEQ ID NO: 1892737 - RNA, 19 nt, Artificial Sequence
  Description of Artificial Sequence: Synthetic oligonucleotide
acauuugugcucaaccgag

SEQ ID NO: 1892738 - RNA, 19 nt, Artificial Sequence
  Description of Artificial Sequence: Synthetic oligonucleotide
uccagcucucauauggcga

SEQ ID NO: 1892739 - RNA, 19 nt, Artificial Sequence
  Description of Artificial Sequence: Synthetic oligonucleotide
ugcacaggaucacuacagc

SEQ ID NO: 1892740 - RNA, 19 nt, Artificial Sequence
  Description of Artificial Sequence: Synthetic oligonucleotide
uggcugauuauagugcuca

SEQ ID NO: 1892741 - RNA, 19 nt, Artificial Sequence
  Description of Artificial Sequence: Synthetic oligonucleotide
aaagacaugcuugcaugga

SEQ ID NO: 1892742 - RNA, 19 nt, Artificial Sequence
  Description of Artificial Sequence: Synthetic oligonucleotide
acuuuguguuuggugaggg

SEQ ID NO: 1892743 - RNA, 19 nt, Artificial Sequence
  Description of Artificial Sequence: Synthetic oligonucleotide
uuaaauugcugugcuuucu

SEQ ID NO: 1892744 - RNA, 19 nt, Artificial Sequence
  Description of Artificial Sequence: Synthetic oligonucleotide
gagagaaccucguguacac

SEQ ID NO: 1892745 - RNA, 19 nt, Artificial Sequence
  Description of Artificial Sequence: Synthetic oligonucleotide
uguucucuugcaaccuuga

SEQ ID NO: 1892746 - RNA, 19 nt, Artificial Sequence
  Description of Artificial Sequence: Synthetic oligonucleotide
gggacaguuauuaaauugc

SEQ ID NO: 1892747 - RNA, 19 nt, Artificial Sequence
  Description of Artificial Sequence: Synthetic oligonucleotide
ucguguacacugcucaauc

SEQ ID NO: 1892748 - RNA, 19 nt, Artificial Sequence
  Description of Artificial Sequence: Synthetic oligonucleotide
uacgaaagguuuccugacu

SEQ ID NO: 1892749 - RNA, 19 nt, Artificial Sequence
  Description of Artificial Sequence: Synthetic oligonucleotide
ugcaaccuugaacaaugcu

SEQ ID NO: 1892750 - RNA, 19 nt, Artificial Sequence
  Description of Artificial Sequence: Synthetic oligonucleotide
aaagcaauccuaaggucaa

SEQ ID NO: 1892751 - RNA, 19 nt, Artificial Sequence
  Description of Artificial Sequence: Synthetic oligonucleotide
uggaccguccauguugagg

SEQ ID NO: 1892752 - RNA, 19 nt, Artificial Sequence
  Description of Artificial Sequence: Synthetic oligonucleotide
ggaugaacauucucaagug

SEQ ID NO: 1892753 - RNA, 19 nt, Artificial Sequence
  Description of Artificial Sequence: Synthetic oligonucleotide
augaugaaccgaucgggga

SEQ ID NO: 1892754 - RNA, 19 nt, Artificial Sequence
  Description of Artificial Sequence: Synthetic oligonucleotide
uaaggggacaagacuuugu

SEQ ID NO: 1892755 - RNA, 19 nt, Artificial Sequence
  Description of Artificial Sequence: Synthetic oligonucleotide
agaaccucguguacacugc

SEQ ID NO: 1892756 - RNA, 19 nt, Artificial Sequence
  Description of Artificial Sequence: Synthetic oligonucleotide
auaauauggugaggguggg

SEQ ID NO: 1892757 - RNA, 19 nt, Artificial Sequence
  Description of Artificial Sequence: Synthetic oligonucleotide
ugaugugagcuuguaaguc

SEQ ID NO: 1892758 - RNA, 19 nt, Artificial Sequence
  Description of Artificial Sequence: Synthetic oligonucleotide
cuauuuuaaggggacaaga

SEQ ID NO: 1892759 - RNA, 19 nt, Artificial Sequence
  Description of Artificial Sequence: Synthetic oligonucleotide
gaggaauauggcucaugug

SEQ ID NO: 1892760 - RNA, 19 nt, Artificial Sequence
  Description of Artificial Sequence: Synthetic oligonucleotide
cuuuguguuuggugagggg

SEQ ID NO: 1892761 - RNA, 19 nt, Artificial Sequence
  Description of Artificial Sequence: Synthetic oligonucleotide
auggcgaugguugauguga

SEQ ID NO: 1892762 - RNA, 19 nt, Artificial Sequence
  Description of Artificial Sequence: Synthetic oligonucleotide
guaggaugaacauucucaa

SEQ ID NO: 1892763 - RNA, 19 nt, Artificial Sequence
  Description of Artificial Sequence: Synthetic oligonucleotide
augaagagagaaccucgug

SEQ ID NO: 1892764 - RNA, 19 nt, Artificial Sequence
  Description of Artificial Sequence: Synthetic oligonucleotide
uugagucauccugaauagg

SEQ ID NO: 1892765 - RNA, 19 nt, Artificial Sequence
  Description of Artificial Sequence: Synthetic oligonucleotide
gucaauuugccacaccaaa

SEQ ID NO: 1892766 - RNA, 19 nt, Artificial Sequence
  Description of Artificial Sequence: Synthetic oligonucleotide
uaguaggaugaacauucuc

SEQ ID NO: 1892767 - RNA, 19 nt, Artificial Sequence
  Description of Artificial Sequence: Synthetic oligonucleotide
ggcaauaguaggaugaaca

SEQ ID NO: 1892768 - RNA, 19 nt, Artificial Sequence
  Description of Artificial Sequence: Synthetic oligonucleotide
ugcguagugcugcugugga

SEQ ID NO: 1892769 - RNA, 19 nt, Artificial Sequence
  Description of Artificial Sequence: Synthetic oligonucleotide
ucucucugagacagguaug

SEQ ID NO: 1892770 - RNA, 19 nt, Artificial Sequence
  Description of Artificial Sequence: Synthetic oligonucleotide
augaacauucucaagugaa

SEQ ID NO: 1892771 - RNA, 19 nt, Artificial Sequence
  Description of Artificial Sequence: Synthetic oligonucleotide
gacaugcuugcauggaauc

SEQ ID NO: 1892772 - RNA, 19 nt, Artificial Sequence
  Description of Artificial Sequence: Synthetic oligonucleotide
gacuuuguguuuggugagg

SEQ ID NO: 1892773 - RNA, 19 nt, Artificial Sequence
  Description of Artificial Sequence: Synthetic oligonucleotide
uggagccauagacaauucu

SEQ ID NO: 1892774 - RNA, 19 nt, Artificial Sequence
  Description of Artificial Sequence: Synthetic oligonucleotide
uccugacugaccgaacgag

SEQ ID NO: 1892775 - RNA, 19 nt, Artificial Sequence
  Description of Artificial Sequence: Synthetic oligonucleotide
auucucaagugaagcacgg

SEQ ID NO: 1892776 - RNA, 19 nt, Artificial Sequence
  Description of Artificial Sequence: Synthetic oligonucleotide
aggagcacgaauauccuca

SEQ ID NO: 1892777 - RNA, 19 nt, Artificial Sequence
  Description of Artificial Sequence: Synthetic oligonucleotide
ucucuagcaccugaacuug

SEQ ID NO: 1892778 - RNA, 19 nt, Artificial Sequence
  Description of Artificial Sequence: Synthetic oligonucleotide
agccauagacaauucugcu

SEQ ID NO: 1892779 - RNA, 19 nt, Artificial Sequence
  Description of Artificial Sequence: Synthetic oligonucleotide
uuauuaaauugcugugcuu

SEQ ID NO: 1892780 - RNA, 19 nt, Artificial Sequence
  Description of Artificial Sequence: Synthetic oligonucleotide
acguaucugcacuauagua

SEQ ID NO: 1892781 - RNA, 19 nt, Artificial Sequence
  Description of Artificial Sequence: Synthetic oligonucleotide
cauuugugcucaaccgagc

SEQ ID NO: 1892782 - RNA, 19 nt, Artificial Sequence
  Description of Artificial Sequence: Synthetic oligonucleotide
caauccgcugcacaggauc

SEQ ID NO: 1892783 - RNA, 19 nt, Artificial Sequence
  Description of Artificial Sequence: Synthetic oligonucleotide
ugauucauauaagguggca

SEQ ID NO: 1892784 - RNA, 19 nt, Artificial Sequence
  Description of Artificial Sequence: Synthetic oligonucleotide
agagagaaccucguguaca

SEQ ID NO: 1892785 - RNA, 19 nt, Artificial Sequence
  Description of Artificial Sequence: Synthetic oligonucleotide
uuccugacugaccgaacga

SEQ ID NO: 1892786 - RNA, 19 nt, Artificial Sequence
  Description of Artificial Sequence: Synthetic oligonucleotide
aucugcacuauaguauuug

SEQ ID NO: 1892787 - RNA, 19 nt, Artificial Sequence
  Description of Artificial Sequence: Synthetic oligonucleotide
uguggcauuggauggcuua

SEQ ID NO: 1892788 - RNA, 19 nt, Artificial Sequence
  Description of Artificial Sequence: Synthetic oligonucleotide
auccucauguggcugauua

SEQ ID NO: 1892789 - RNA, 19 nt, Artificial Sequence
  Description of Artificial Sequence: Synthetic oligonucleotide
uggugguggggcaauagua

SEQ ID NO: 1892790 - RNA, 19 nt, Artificial Sequence
  Description of Artificial Sequence: Synthetic oligonucleotide
cauauggcgaugguugaug

SEQ ID NO: 1892791 - RNA, 19 nt, Artificial Sequence
  Description of Artificial Sequence: Synthetic oligonucleotide
auuggauggcuuauuggug

SEQ ID NO: 1892792 - RNA, 19 nt, Artificial Sequence
  Description of Artificial Sequence: Synthetic oligonucleotide
uacagguggaccguccaug

SEQ ID NO: 1892793 - RNA, 19 nt, Artificial Sequence
  Description of Artificial Sequence: Synthetic oligonucleotide
guauuugaaagcaauccua

SEQ ID NO: 1892794 - RNA, 19 nt, Artificial Sequence
  Description of Artificial Sequence: Synthetic oligonucleotide
gaugaaccgaucggggaug

SEQ ID NO: 1892795 - RNA, 19 nt, Artificial Sequence
  Description of Artificial Sequence: Synthetic oligonucleotide
ugcuacacaugaagagaga

SEQ ID NO: 1892796 - RNA, 19 nt, Artificial Sequence
  Description of Artificial Sequence: Synthetic oligonucleotide
accaaaguaacaguugcua

SEQ ID NO: 1892797 - RNA, 19 nt, Artificial Sequence
  Description of Artificial Sequence: Synthetic oligonucleotide
acauuggguuuaauaaaag

SEQ ID NO: 1892798 - RNA, 19 nt, Artificial Sequence
  Description of Artificial Sequence: Synthetic oligonucleotide
uugcguagugcugcugugg

SEQ ID NO: 1892799 - RNA, 19 nt, Artificial Sequence
  Description of Artificial Sequence: Synthetic oligonucleotide
uccugaauagggacaguua

SEQ ID NO: 1892800 - RNA, 19 nt, Artificial Sequence
  Description of Artificial Sequence: Synthetic oligonucleotide
uggggcacgugcugcaaag

SEQ ID NO: 1892801 - RNA, 19 nt, Artificial Sequence
  Description of Artificial Sequence: Synthetic oligonucleotide
gcuaagauacauuugugcu

SEQ ID NO: 1892802 - RNA, 19 nt, Artificial Sequence
  Description of Artificial Sequence: Synthetic oligonucleotide
auugcugugcuuucuuguu

SEQ ID NO: 1892803 - RNA, 19 nt, Artificial Sequence
  Description of Artificial Sequence: Synthetic oligonucleotide
uauggcgaugguugaugug

SEQ ID NO: 1892804 - RNA, 19 nt, Artificial Sequence
  Description of Artificial Sequence: Synthetic oligonucleotide
gaggcauaauauggugagg

SEQ ID NO: 1892805 - RNA, 19 nt, Artificial Sequence
  Description of Artificial Sequence: Synthetic oligonucleotide
gaaccgaucggggauguca

SEQ ID NO: 1892806 - RNA, 19 nt, Artificial Sequence
  Description of Artificial Sequence: Synthetic oligonucleotide
ugugcucaaccgagccacg

SEQ ID NO: 1892807 - RNA, 19 nt, Artificial Sequence
  Description of Artificial Sequence: Synthetic oligonucleotide
augugagcuuguaagucuc

SEQ ID NO: 1892808 - RNA, 19 nt, Artificial Sequence
  Description of Artificial Sequence: Synthetic oligonucleotide
uggcgaugguugaugugag

SEQ ID NO: 1892809 - RNA, 19 nt, Artificial Sequence
  Description of Artificial Sequence: Synthetic oligonucleotide
ucugggcaaucauaugguc

SEQ ID NO: 1892810 - RNA, 19 nt, Artificial Sequence
  Description of Artificial Sequence: Synthetic oligonucleotide
gcauaauauggugagggug

SEQ ID NO: 1892811 - RNA, 19 nt, Artificial Sequence
  Description of Artificial Sequence: Synthetic oligonucleotide
gggucaauuugccacacca

SEQ ID NO: 1892812 - RNA, 19 nt, Artificial Sequence
  Description of Artificial Sequence: Synthetic oligonucleotide
ggcuuauuggugguggagg

SEQ ID NO: 1892813 - RNA, 19 nt, Artificial Sequence
  Description of Artificial Sequence: Synthetic oligonucleotide
uaguuggugguggagcaga

SEQ ID NO: 1892814 - RNA, 19 nt, Artificial Sequence
  Description of Artificial Sequence: Synthetic oligonucleotide
aauccgcugcacaggauca

SEQ ID NO: 1892815 - RNA, 19 nt, Artificial Sequence
  Description of Artificial Sequence: Synthetic oligonucleotide
uauagugcucauggggcac

SEQ ID NO: 1892816 - RNA, 19 nt, Artificial Sequence
  Description of Artificial Sequence: Synthetic oligonucleotide
gccauagacaauucugcug

SEQ ID NO: 1892817 - RNA, 19 nt, Artificial Sequence
  Description of Artificial Sequence: Synthetic oligonucleotide
ccacguaucugcacuauag

SEQ ID NO: 1892818 - RNA, 19 nt, Artificial Sequence
  Description of Artificial Sequence: Synthetic oligonucleotide
aguugcuaagauacauuug

SEQ ID NO: 1892819 - RNA, 19 nt, Artificial Sequence
  Description of Artificial Sequence: Synthetic oligonucleotide
aggggacaagacuuugugu

SEQ ID NO: 1892820 - RNA, 19 nt, Artificial Sequence
  Description of Artificial Sequence: Synthetic oligonucleotide
uacaccaagugaggagucc

SEQ ID NO: 1892821 - RNA, 19 nt, Artificial Sequence
  Description of Artificial Sequence: Synthetic oligonucleotide
ggcccugauagucagggug

SEQ ID NO: 1892822 - RNA, 19 nt, Artificial Sequence
  Description of Artificial Sequence: Synthetic oligonucleotide
cgagguuacagguggaccg

SEQ ID NO: 1892823 - RNA, 19 nt, Artificial Sequence
  Description of Artificial Sequence: Synthetic oligonucleotide
acagguggaccguccaugu

SEQ ID NO: 1892824 - RNA, 19 nt, Artificial Sequence
  Description of Artificial Sequence: Synthetic oligonucleotide
gguuaguuggugguggagc

SEQ ID NO: 1892825 - RNA, 19 nt, Artificial Sequence
  Description of Artificial Sequence: Synthetic oligonucleotide
aagcacggguaacaggcuu

SEQ ID NO: 1892826 - RNA, 19 nt, Artificial Sequence
  Description of Artificial Sequence: Synthetic oligonucleotide
auagugcucauggggcacg

SEQ ID NO: 1892827 - RNA, 19 nt, Artificial Sequence
  Description of Artificial Sequence: Synthetic oligonucleotide
uggcuuauuggugguggag

SEQ ID NO: 1892828 - RNA, 19 nt, Artificial Sequence
  Description of Artificial Sequence: Synthetic oligonucleotide
cuuguaagucucucugaga

SEQ ID NO: 1892829 - RNA, 19 nt, Artificial Sequence
  Description of Artificial Sequence: Synthetic oligonucleotide
  modified_base (17)..(17): a, c, u, g, unknown or other
accguccauguugaggngg

SEQ ID NO: 1892830 - RNA, 19 nt, Artificial Sequence
  Description of Artificial Sequence: Synthetic oligonucleotide
ugggacaccacuggcuggc

SEQ ID NO: 1892831 - RNA, 19 nt, Artificial Sequence
  Description of Artificial Sequence: Synthetic oligonucleotide
ugggcacaucuuaucuccc

SEQ ID NO: 1892832 - RNA, 19 nt, Artificial Sequence
  Description of Artificial Sequence: Synthetic oligonucleotide
gaggagcacgaauauccuc

SEQ ID NO: 1892833 - RNA, 19 nt, Artificial Sequence
  Description of Artificial Sequence: Synthetic oligonucleotide
gauucauauaagguggcau

SEQ ID NO: 1892834 - RNA, 19 nt, Artificial Sequence
  Description of Artificial Sequence: Synthetic oligonucleotide
aaccucguguacacugcuc

SEQ ID NO: 1892835 - RNA, 19 nt, Artificial Sequence
  Description of Artificial Sequence: Synthetic oligonucleotide
uagggacaguuauuaaauu

SEQ ID NO: 1892836 - RNA, 19 nt, Artificial Sequence
  Description of Artificial Sequence: Synthetic oligonucleotide
uagcacagucauagcaaaa

SEQ ID NO: 1892837 - RNA, 19 nt, Artificial Sequence
  Description of Artificial Sequence: Synthetic oligonucleotide
augucaguugguggugggg

SEQ ID NO: 1892838 - RNA, 19 nt, Artificial Sequence
  Description of Artificial Sequence: Synthetic oligonucleotide
guuacagguggaccgucca

SEQ ID NO: 1892839 - RNA, 19 nt, Artificial Sequence
  Description of Artificial Sequence: Synthetic oligonucleotide
uuacagguggaccguccau

SEQ ID NO: 1892840 - RNA, 19 nt, Artificial Sequence
  Description of Artificial Sequence: Synthetic oligonucleotide
guaacaggcuuuccagcuc

SEQ ID NO: 1892841 - RNA, 19 nt, Artificial Sequence
  Description of Artificial Sequence: Synthetic oligonucleotide
cuugcauggaaucauucau

SEQ ID NO: 1892842 - RNA, 19 nt, Artificial Sequence
  Description of Artificial Sequence: Synthetic oligonucleotide
uggcaucugggcaaucaua

SEQ ID NO: 1892843 - RNA, 19 nt, Artificial Sequence
  Description of Artificial Sequence: Synthetic oligonucleotide
ugggucaauuugccacacc

SEQ ID NO: 1892844 - RNA, 19 nt, Artificial Sequence
  Description of Artificial Sequence: Synthetic oligonucleotide
gucucucugagacagguau

SEQ ID NO: 1892845 - RNA, 19 nt, Artificial Sequence
  Description of Artificial Sequence: Synthetic oligonucleotide
auacaccaagugaggaguc

SEQ ID NO: 1892846 - RNA, 19 nt, Artificial Sequence
  Description of Artificial Sequence: Synthetic oligonucleotide
gugaugcuugucugguggc

SEQ ID NO: 1892847 - RNA, 19 nt, Artificial Sequence
  Description of Artificial Sequence: Synthetic oligonucleotide
gaacuugagucauccugaa

SEQ ID NO: 1892848 - RNA, 19 nt, Artificial Sequence
  Description of Artificial Sequence: Synthetic oligonucleotide
guugcguagugcugcugug

SEQ ID NO: 1892849 - RNA, 19 nt, Artificial Sequence
  Description of Artificial Sequence: Synthetic oligonucleotide
cucaagugaagcacgggua

SEQ ID NO: 1892850 - RNA, 19 nt, Artificial Sequence
  Description of Artificial Sequence: Synthetic oligonucleotide
gaccgaacgagguggaggu

SEQ ID NO: 1892851 - RNA, 19 nt, Artificial Sequence
  Description of Artificial Sequence: Synthetic oligonucleotide
ggcuauacaccaagugagg

SEQ ID NO: 1892852 - RNA, 19 nt, Artificial Sequence
  Description of Artificial Sequence: Synthetic oligonucleotide
augugaugcuugucuggug

SEQ ID NO: 1892853 - RNA, 19 nt, Artificial Sequence
  Description of Artificial Sequence: Synthetic oligonucleotide
cuugaacaaugcuacacau

SEQ ID NO: 1892854 - RNA, 19 nt, Artificial Sequence
  Description of Artificial Sequence: Synthetic oligonucleotide
cucaauccgcugcacagga

SEQ ID NO: 1892855 - RNA, 19 nt, Artificial Sequence
  Description of Artificial Sequence: Synthetic oligonucleotide
agguggagcuuggcuauac

SEQ ID NO: 1892856 - RNA, 19 nt, Artificial Sequence
  Description of Artificial Sequence: Synthetic oligonucleotide
uggaggaauauggcucaug

SEQ ID NO: 1892857 - RNA, 19 nt, Artificial Sequence
  Description of Artificial Sequence: Synthetic oligonucleotide
acugcucaauccgcugcac

SEQ ID NO: 1892858 - RNA, 19 nt, Artificial Sequence
  Description of Artificial Sequence: Synthetic oligonucleotide
ccugacugaccgaacgagg

SEQ ID NO: 1892859 - RNA, 19 nt, Artificial Sequence
  Description of Artificial Sequence: Synthetic oligonucleotide
uaauauggugaggguggga

SEQ ID NO: 1892860 - RNA, 19 nt, Artificial Sequence
  Description of Artificial Sequence: Synthetic oligonucleotide
  modified_base (16)..(16): a, c, u, g, unknown or other
ccguccauguugaggnggg

SEQ ID NO: 1892861 - RNA, 19 nt, Artificial Sequence
  Description of Artificial Sequence: Synthetic oligonucleotide
cucauauggcgaugguuga

SEQ ID NO: 1892862 - RNA, 19 nt, Artificial Sequence
  Description of Artificial Sequence: Synthetic oligonucleotide
uggcucaugugaugcuugu

SEQ ID NO: 1892863 - RNA, 19 nt, Artificial Sequence
  Description of Artificial Sequence: Synthetic oligonucleotide
guggggcaauaguaggaug

SEQ ID NO: 1892864 - RNA, 19 nt, Artificial Sequence
  Description of Artificial Sequence: Synthetic oligonucleotide
ugcucaaccgagccacgua

SEQ ID NO: 1892865 - RNA, 19 nt, Artificial Sequence
  Description of Artificial Sequence: Synthetic oligonucleotide
gcacgaauauccucaugug

SEQ ID NO: 1892866 - RNA, 19 nt, Artificial Sequence
  Description of Artificial Sequence: Synthetic oligonucleotide
gguaacaggcuuuccagcu

SEQ ID NO: 1892867 - RNA, 19 nt, Artificial Sequence
  Description of Artificial Sequence: Synthetic oligonucleotide
gagcacgaauauccucaug

SEQ ID NO: 1892868 - RNA, 19 nt, Artificial Sequence
  Description of Artificial Sequence: Synthetic oligonucleotide
gagggguuaguugguggug

SEQ ID NO: 1892869 - RNA, 19 nt, Artificial Sequence
  Description of Artificial Sequence: Synthetic oligonucleotide
ucauauggcgaugguugau

SEQ ID NO: 1892870 - RNA, 19 nt, Artificial Sequence
  Description of Artificial Sequence: Synthetic oligonucleotide
agacaugcuugcauggaau

SEQ ID NO: 1892871 - RNA, 19 nt, Artificial Sequence
  Description of Artificial Sequence: Synthetic oligonucleotide
auaguaggaugaacauucu

SEQ ID NO: 1892872 - RNA, 19 nt, Artificial Sequence
  Description of Artificial Sequence: Synthetic oligonucleotide
gguucucuagcaccugaac

SEQ ID NO: 1892873 - RNA, 19 nt, Artificial Sequence
  Description of Artificial Sequence: Synthetic oligonucleotide
  modified_base (18)..(18): a, c, u, g, unknown or other
gaccguccauguugaggng

SEQ ID NO: 1892874 - RNA, 19 nt, Artificial Sequence
  Description of Artificial Sequence: Synthetic oligonucleotide
cucaaccgagccacguauc

SEQ ID NO: 1892875 - RNA, 19 nt, Artificial Sequence
  Description of Artificial Sequence: Synthetic oligonucleotide
accaagugaggagucccug

SEQ ID NO: 1892876 - RNA, 19 nt, Artificial Sequence
  Description of Artificial Sequence: Synthetic oligonucleotide
caugaagagagaaccucgu

SEQ ID NO: 1892877 - RNA, 19 nt, Artificial Sequence
  Description of Artificial Sequence: Synthetic oligonucleotide
gcugauuauagugcucaug

SEQ ID NO: 1892878 - RNA, 19 nt, Artificial Sequence
  Description of Artificial Sequence: Synthetic oligonucleotide
gcuuauuggugguggagga

SEQ ID NO: 1892879 - RNA, 19 nt, Artificial Sequence
  Description of Artificial Sequence: Synthetic oligonucleotide
uccucauguggcugauuau

SEQ ID NO: 1892880 - RNA, 19 nt, Artificial Sequence
  Description of Artificial Sequence: Synthetic oligonucleotide
caguugcuaagauacauuu

SEQ ID NO: 1892881 - RNA, 19 nt, Artificial Sequence
  Description of Artificial Sequence: Synthetic oligonucleotide
auggcucaugugaugcuug

SEQ ID NO: 1892882 - RNA, 19 nt, Artificial Sequence
  Description of Artificial Sequence: Synthetic oligonucleotide
gaaauacgaaagguuuccu

SEQ ID NO: 1892883 - RNA, 19 nt, Artificial Sequence
  Description of Artificial Sequence: Synthetic oligonucleotide
agggugauggugagcaggu

SEQ ID NO: 1892884 - RNA, 19 nt, Artificial Sequence
  Description of Artificial Sequence: Synthetic oligonucleotide
gguuuaauaaaagcaguau

SEQ ID NO: 1892885 - RNA, 19 nt, Artificial Sequence
  Description of Artificial Sequence: Synthetic oligonucleotide
agguuacagguggaccguc

SEQ ID NO: 1892886 - RNA, 19 nt, Artificial Sequence
  Description of Artificial Sequence: Synthetic oligonucleotide
ucaauccgcugcacaggau

SEQ ID NO: 1892887 - RNA, 19 nt, Artificial Sequence
  Description of Artificial Sequence: Synthetic oligonucleotide
gcuauacaccaagugagga

SEQ ID NO: 1892888 - RNA, 19 nt, Artificial Sequence
  Description of Artificial Sequence: Synthetic oligonucleotide
ccuugaacaaugcuacaca

SEQ ID NO: 1892889 - RNA, 19 nt, Artificial Sequence
  Description of Artificial Sequence: Synthetic oligonucleotide
gucaguuggugguggggca

SEQ ID NO: 1892890 - RNA, 19 nt, Artificial Sequence
  Description of Artificial Sequence: Synthetic oligonucleotide
ggcacgugcugcaaaggag

SEQ ID NO: 1892891 - RNA, 19 nt, Artificial Sequence
  Description of Artificial Sequence: Synthetic oligonucleotide
uccgcugcacaggaucacu

SEQ ID NO: 1892892 - RNA, 19 nt, Artificial Sequence
  Description of Artificial Sequence: Synthetic oligonucleotide
cauagacaauucugcugga

SEQ ID NO: 1892893 - RNA, 19 nt, Artificial Sequence
  Description of Artificial Sequence: Synthetic oligonucleotide
gaacaaugcuacacaugaa

SEQ ID NO: 1892894 - RNA, 19 nt, Artificial Sequence
  Description of Artificial Sequence: Synthetic oligonucleotide
ccgaacgagguggaggugg

SEQ ID NO: 1892895 - RNA, 19 nt, Artificial Sequence
  Description of Artificial Sequence: Synthetic oligonucleotide
auccgcugcacaggaucac

SEQ ID NO: 1892896 - RNA, 19 nt, Artificial Sequence
  Description of Artificial Sequence: Synthetic oligonucleotide
gaggaggaugauucauaua

SEQ ID NO: 1892897 - RNA, 19 nt, Artificial Sequence
  Description of Artificial Sequence: Synthetic oligonucleotide
ggagguggagccauagaca

SEQ ID NO: 1892898 - RNA, 19 nt, Artificial Sequence
  Description of Artificial Sequence: Synthetic oligonucleotide
cguguacacugcucaaucc

SEQ ID NO: 1892899 - RNA, 19 nt, Artificial Sequence
  Description of Artificial Sequence: Synthetic oligonucleotide
gcaaaagacaugcuugcau

SEQ ID NO: 1892900 - RNA, 19 nt, Artificial Sequence
  Description of Artificial Sequence: Synthetic oligonucleotide
cggguaacaggcuuuccag

SEQ ID NO: 1892901 - RNA, 19 nt, Artificial Sequence
  Description of Artificial Sequence: Synthetic oligonucleotide
gcaauaguaggaugaacau

SEQ ID NO: 1892902 - RNA, 19 nt, Artificial Sequence
  Description of Artificial Sequence: Synthetic oligonucleotide
guucucuugcaaccuugaa

SEQ ID NO: 1892903 - RNA, 19 nt, Artificial Sequence
  Description of Artificial Sequence: Synthetic oligonucleotide
caaccgagccacguaucug

SEQ ID NO: 1892904 - RNA, 19 nt, Artificial Sequence
  Description of Artificial Sequence: Synthetic oligonucleotide
aagguggcaucugggcaau

SEQ ID NO: 1892905 - RNA, 19 nt, Artificial Sequence
  Description of Artificial Sequence: Synthetic oligonucleotide
cuggaggagcacgaauauc

SEQ ID NO: 1892906 - RNA, 19 nt, Artificial Sequence
  Description of Artificial Sequence: Synthetic oligonucleotide
gaacgagguggagguggag

SEQ ID NO: 1892907 - RNA, 19 nt, Artificial Sequence
  Description of Artificial Sequence: Synthetic oligonucleotide
uggcgagguuacaggugga

SEQ ID NO: 1892908 - RNA, 19 nt, Artificial Sequence
  Description of Artificial Sequence: Synthetic oligonucleotide
agagaaccucguguacacu

SEQ ID NO: 1892909 - RNA, 19 nt, Artificial Sequence
  Description of Artificial Sequence: Synthetic oligonucleotide
cucuagcaccugaacuuga

SEQ ID NO: 1892910 - RNA, 19 nt, Artificial Sequence
  Description of Artificial Sequence: Synthetic oligonucleotide
cagguauguucucuugcaa

SEQ ID NO: 1892911 - RNA, 19 nt, Artificial Sequence
  Description of Artificial Sequence: Synthetic oligonucleotide
acaggcuuuccagcucuca

SEQ ID NO: 1892912 - RNA, 19 nt, Artificial Sequence
  Description of Artificial Sequence: Synthetic oligonucleotide
guauguucucuugcaaccu

SEQ ID NO: 1892913 - RNA, 19 nt, Artificial Sequence
  Description of Artificial Sequence: Synthetic oligonucleotide
ugguggcaugaugaaccga

SEQ ID NO: 1892914 - RNA, 19 nt, Artificial Sequence
  Description of Artificial Sequence: Synthetic oligonucleotide
guuuccugacugaccgaac

SEQ ID NO: 1892915 - RNA, 19 nt, Artificial Sequence
  Description of Artificial Sequence: Synthetic oligonucleotide
acgugcugcaaaggaggug

SEQ ID NO: 1892916 - RNA, 19 nt, Artificial Sequence
  Description of Artificial Sequence: Synthetic oligonucleotide
augaaccgaucggggaugu

SEQ ID NO: 1892917 - RNA, 19 nt, Artificial Sequence
  Description of Artificial Sequence: Synthetic oligonucleotide
cugcucaauccgcugcaca

SEQ ID NO: 1892918 - RNA, 19 nt, Artificial Sequence
  Description of Artificial Sequence: Synthetic oligonucleotide
cacguaucugcacuauagu

SEQ ID NO: 1892919 - RNA, 19 nt, Artificial Sequence
  Description of Artificial Sequence: Synthetic oligonucleotide
caccaaaguaacaguugcu

SEQ ID NO: 1892920 - RNA, 19 nt, Artificial Sequence
  Description of Artificial Sequence: Synthetic oligonucleotide
gguggcgagguuacaggug

SEQ ID NO: 1892921 - RNA, 19 nt, Artificial Sequence
  Description of Artificial Sequence: Synthetic oligonucleotide
gguggcaucugggcaauca

SEQ ID NO: 1892922 - RNA, 19 nt, Artificial Sequence
  Description of Artificial Sequence: Synthetic oligonucleotide
gcgagguuacagguggacc

SEQ ID NO: 1892923 - RNA, 19 nt, Artificial Sequence
  Description of Artificial Sequence: Synthetic oligonucleotide
accgaucggggaugucagu

SEQ ID NO: 1892924 - RNA, 19 nt, Artificial Sequence
  Description of Artificial Sequence: Synthetic oligonucleotide
cugaauagggacaguuauu

SEQ ID NO: 1892925 - RNA, 19 nt, Artificial Sequence
  Description of Artificial Sequence: Synthetic oligonucleotide
ggcgaugguugaugugagc

SEQ ID NO: 1892926 - RNA, 19 nt, Artificial Sequence
  Description of Artificial Sequence: Synthetic oligonucleotide
gggcacgugcugcaaagga

SEQ ID NO: 1892927 - RNA, 19 nt, Artificial Sequence
  Description of Artificial Sequence: Synthetic oligonucleotide
gaugcuugucugguggcau

SEQ ID NO: 1892928 - RNA, 19 nt, Artificial Sequence
  Description of Artificial Sequence: Synthetic oligonucleotide
gggcguugcguagugcugc

SEQ ID NO: 1892929 - RNA, 19 nt, Artificial Sequence
  Description of Artificial Sequence: Synthetic oligonucleotide
cugaccgaacgagguggag

SEQ ID NO: 1892930 - RNA, 19 nt, Artificial Sequence
  Description of Artificial Sequence: Synthetic oligonucleotide
ggacaguuauuaaauugcu

SEQ ID NO: 1892931 - RNA, 19 nt, Artificial Sequence
  Description of Artificial Sequence: Synthetic oligonucleotide
gagccacguaucugcacua

SEQ ID NO: 1892932 - RNA, 19 nt, Artificial Sequence
  Description of Artificial Sequence: Synthetic oligonucleotide
ggcuuuccagcucucauau

SEQ ID NO: 1892933 - RNA, 19 nt, Artificial Sequence
  Description of Artificial Sequence: Synthetic oligonucleotide
ggcauaauauggugagggu

SEQ ID NO: 1892934 - RNA, 19 nt, Artificial Sequence
  Description of Artificial Sequence: Synthetic oligonucleotide
uagugcucauggggcacgu

SEQ ID NO: 1892935 - RNA, 19 nt, Artificial Sequence
  Description of Artificial Sequence: Synthetic oligonucleotide
cuagcaccugaacuugagu

SEQ ID NO: 1892936 - RNA, 19 nt, Artificial Sequence
  Description of Artificial Sequence: Synthetic oligonucleotide
gcgaugguugaugugagcu

SEQ ID NO: 1892937 - RNA, 19 nt, Artificial Sequence
  Description of Artificial Sequence: Synthetic oligonucleotide
gguggaccguccauguuga

SEQ ID NO: 1892938 - RNA, 19 nt, Artificial Sequence
  Description of Artificial Sequence: Synthetic oligonucleotide
ggaauauggcucaugugau

SEQ ID NO: 1892939 - RNA, 19 nt, Artificial Sequence
  Description of Artificial Sequence: Synthetic oligonucleotide
ggagggguuaguugguggu

SEQ ID NO: 1892940 - RNA, 19 nt, Artificial Sequence
  Description of Artificial Sequence: Synthetic oligonucleotide
agcacggguaacaggcuuu

SEQ ID NO: 1892941 - RNA, 19 nt, Artificial Sequence
  Description of Artificial Sequence: Synthetic oligonucleotide
gggaugucaguugguggug

SEQ ID NO: 1892942 - RNA, 19 nt, Artificial Sequence
  Description of Artificial Sequence: Synthetic oligonucleotide
cguaucugcacuauaguau

SEQ ID NO: 1892943 - RNA, 19 nt, Artificial Sequence
  Description of Artificial Sequence: Synthetic oligonucleotide
gguggagcuuggcuauaca

SEQ ID NO: 1892944 - RNA, 19 nt, Artificial Sequence
  Description of Artificial Sequence: Synthetic oligonucleotide
guggcaugaugaaccgauc

SEQ ID NO: 1892945 - RNA, 19 nt, Artificial Sequence
  Description of Artificial Sequence: Synthetic oligonucleotide
gcguagugcugcuguggag

SEQ ID NO: 1892946 - RNA, 19 nt, Artificial Sequence
  Description of Artificial Sequence: Synthetic oligonucleotide
guacacugcucaauccgcu

SEQ ID NO: 1892947 - RNA, 19 nt, Artificial Sequence
  Description of Artificial Sequence: Synthetic oligonucleotide
guggaccguccauguugag

SEQ ID NO: 1892948 - RNA, 19 nt, Artificial Sequence
  Description of Artificial Sequence: Synthetic oligonucleotide
gaagcacggguaacaggcu

SEQ ID NO: 1892949 - RNA, 19 nt, Artificial Sequence
  Description of Artificial Sequence: Synthetic oligonucleotide
auccuaaggucaagauuua

SEQ ID NO: 1892950 - RNA, 19 nt, Artificial Sequence
  Description of Artificial Sequence: Synthetic oligonucleotide
ggcgagguuacagguggac

SEQ ID NO: 1892951 - RNA, 19 nt, Artificial Sequence
  Description of Artificial Sequence: Synthetic oligonucleotide
gcccugauagucaggguga

SEQ ID NO: 1892952 - RNA, 19 nt, Artificial Sequence
  Description of Artificial Sequence: Synthetic oligonucleotide
agccacguaucugcacuau

SEQ ID NO: 1892953 - RNA, 19 nt, Artificial Sequence
  Description of Artificial Sequence: Synthetic oligonucleotide
guggcaucugggcaaucau

SEQ ID NO: 1892954 - RNA, 19 nt, Artificial Sequence
  Description of Artificial Sequence: Synthetic oligonucleotide
gagcuuggcuauacaccaa

SEQ ID NO: 1892955 - RNA, 19 nt, Artificial Sequence
  Description of Artificial Sequence: Synthetic oligonucleotide
gggguuaguugguggugga

SEQ ID NO: 1892956 - RNA, 19 nt, Artificial Sequence
  Description of Artificial Sequence: Synthetic oligonucleotide
aucggggaugucaguuggu

SEQ ID NO: 1892957 - RNA, 19 nt, Artificial Sequence
  Description of Artificial Sequence: Synthetic oligonucleotide
cgaucggggaugucaguug

SEQ ID NO: 1892958 - RNA, 19 nt, Artificial Sequence
  Description of Artificial Sequence: Synthetic oligonucleotide
accgaacgagguggaggug

SEQ ID NO: 1892959 - RNA, 19 nt, Artificial Sequence
  Description of Artificial Sequence: Synthetic oligonucleotide
accgagccacguaucugca

SEQ ID NO: 1892960 - RNA, 19 nt, Artificial Sequence
  Description of Artificial Sequence: Synthetic oligonucleotide
cagcucucauauggcgaug

SEQ ID NO: 1892961 - RNA, 19 nt, Artificial Sequence
  Description of Artificial Sequence: Synthetic oligonucleotide
gcucaaccgagccacguau

SEQ ID NO: 1892962 - RNA, 19 nt, Artificial Sequence
  Description of Artificial Sequence: Synthetic oligonucleotide
gggcaaucauaugguccag

SEQ ID NO: 1892963 - RNA, 19 nt, Artificial Sequence
  Description of Artificial Sequence: Synthetic oligonucleotide
ccucauguggcugauuaua

SEQ ID NO: 1892964 - RNA, 19 nt, Artificial Sequence
  Description of Artificial Sequence: Synthetic oligonucleotide
augugcugcuuuggaggaa

SEQ ID NO: 1892965 - RNA, 19 nt, Artificial Sequence
  Description of Artificial Sequence: Synthetic oligonucleotide
cucucauauggcgaugguu

SEQ ID NO: 1892966 - RNA, 19 nt, Artificial Sequence
  Description of Artificial Sequence: Synthetic oligonucleotide
ggggcaauaguaggaugaa

SEQ ID NO: 1892967 - RNA, 19 nt, Artificial Sequence
  Description of Artificial Sequence: Synthetic oligonucleotide
gggacaagacuuuguguuu

SEQ ID NO: 1892968 - RNA, 19 nt, Artificial Sequence
  Description of Artificial Sequence: Synthetic oligonucleotide
gcuggaggagcacgaauau

SEQ ID NO: 1892969 - RNA, 19 nt, Artificial Sequence
  Description of Artificial Sequence: Synthetic oligonucleotide
agguggagccauagacaau

SEQ ID NO: 1892970 - RNA, 19 nt, Artificial Sequence
  Description of Artificial Sequence: Synthetic oligonucleotide
ggggcguugcguagugcug

SEQ ID NO: 1892971 - RNA, 19 nt, Artificial Sequence
  Description of Artificial Sequence: Synthetic oligonucleotide
gguggggcaauaguaggau

SEQ ID NO: 1892972 - RNA, 19 nt, Artificial Sequence
  Description of Artificial Sequence: Synthetic oligonucleotide
gggcacaucuuaucucccu

SEQ ID NO: 1892973 - RNA, 19 nt, Artificial Sequence
  Description of Artificial Sequence: Synthetic oligonucleotide
ccacaccaaaguaacaguu

SEQ ID NO: 1892974 - RNA, 19 nt, Artificial Sequence
  Description of Artificial Sequence: Synthetic oligonucleotide
cucguguacacugcucaau

SEQ ID NO: 1892975 - RNA, 19 nt, Artificial Sequence
  Description of Artificial Sequence: Synthetic oligonucleotide
ggcacaucuuaucucccuu

SEQ ID NO: 1892976 - RNA, 19 nt, Artificial Sequence
  Description of Artificial Sequence: Synthetic oligonucleotide
ggcucaugugaugcuuguc

SEQ ID NO: 1892977 - RNA, 19 nt, Artificial Sequence
  Description of Artificial Sequence: Synthetic oligonucleotide
ggggaggguguggcauugg

SEQ ID NO: 1892978 - RNA, 19 nt, Artificial Sequence
  Description of Artificial Sequence: Synthetic oligonucleotide
ccgagccacguaucugcac

SEQ ID NO: 1892979 - RNA, 19 nt, Artificial Sequence
  Description of Artificial Sequence: Synthetic oligonucleotide
ggaggagcacgaauauccu

SEQ ID NO: 1892980 - RNA, 19 nt, Artificial Sequence
  Description of Artificial Sequence: Synthetic oligonucleotide
ggagcacgaauauccucau

SEQ ID NO: 1892981 - RNA, 19 nt, Artificial Sequence
  Description of Artificial Sequence: Synthetic oligonucleotide
gccacguaucugcacuaua

SEQ ID NO: 1892982 - RNA, 19 nt, Artificial Sequence
  Description of Artificial Sequence: Synthetic oligonucleotide
gcacaucuuaucucccuuu

SEQ ID NO: 1892983 - RNA, 19 nt, Artificial Sequence
  Description of Artificial Sequence: Synthetic oligonucleotide
cugcuggaggagcacgaau

SEQ ID NO: 1892984 - RNA, 19 nt, Artificial Sequence
  Description of Artificial Sequence: Synthetic oligonucleotide
gugcucaaccgagccacgu

SEQ ID NO: 1892985 - RNA, 19 nt, Artificial Sequence
  Description of Artificial Sequence: Synthetic oligonucleotide
ccagcucucauauggcgau

SEQ ID NO: 1892986 - RNA, 19 nt, Artificial Sequence
  Description of Artificial Sequence: Synthetic oligonucleotide
gagguggagcuuggcuaua

SEQ ID NO: 1892987 - RNA, 19 nt, Artificial Sequence
  Description of Artificial Sequence: Synthetic oligonucleotide
ccucguguacacugcucaa

SEQ ID NO: 1892988 - RNA, 19 nt, Artificial Sequence
  Description of Artificial Sequence: Synthetic oligonucleotide
cguugcguagugcugcugu

SEQ ID NO: 1892989 - RNA, 19 nt, Artificial Sequence
  Description of Artificial Sequence: Synthetic oligonucleotide
gcucucauauggcgauggu

SEQ ID NO: 1892990 - RNA, 19 nt, Artificial Sequence
  Description of Artificial Sequence: Synthetic oligonucleotide
ggcguugcguagugcugcu

SEQ ID NO: 1892991 - RNA, 19 nt, Artificial Sequence
  Description of Artificial Sequence: Synthetic oligonucleotide
ccugaacuugagucauccu

SEQ ID NO: 1892992 - RNA, 19 nt, Artificial Sequence
  Description of Artificial Sequence: Synthetic oligonucleotide
gcguugcguagugcugcug

SEQ ID NO: 1892993 - RNA, 19 nt, Artificial Sequence
  Description of Artificial Sequence: Synthetic oligonucleotide
cacuacagccugggcacau

SEQ ID NO: 1892994 - RNA, 19 nt, Artificial Sequence
  Description of Artificial Sequence: Synthetic oligonucleotide
ccgcugcacaggaucacua

SEQ ID NO: 1892995 - RNA, 19 nt, Artificial Sequence
  Description of Artificial Sequence: Synthetic oligonucleotide
caguuggugguggggcaau

SEQ ID NO: 1892996 - RNA, 19 nt, Artificial Sequence
  Description of Artificial Sequence: Synthetic oligonucleotide
cagguggaccguccauguu

SEQ ID NO: 1892997 - RNA, 19 nt, Artificial Sequence
  Description of Artificial Sequence: Synthetic oligonucleotide
cgaugguugaugugagcuu

SEQ ID NO: 1892998 - RNA, 19 nt, Artificial Sequence
  Description of Artificial Sequence: Synthetic oligonucleotide
ccgaucggggaugucaguu

SEQ ID NO: 1892999 - RNA, 19 nt, Artificial Sequence
  Description of Artificial Sequence: Synthetic oligonucleotide
guccguggaggaggaugau

SEQ ID NO: 1893000 - RNA, 19 nt, Artificial Sequence
  Description of Artificial Sequence: Synthetic oligonucleotide
gggguccguggaggaggau

SEQ ID NO: 1893001 - RNA, 19 nt, Artificial Sequence
  Description of Artificial Sequence: Synthetic oligonucleotide
aagacauugccguagaccc

SEQ ID NO: 1893002 - RNA, 19 nt, Artificial Sequence
  Description of Artificial Sequence: Synthetic oligonucleotide
  modified_base (7)..(7): a, c, u, g, unknown or other
aguuacnuuaaauggaugc

SEQ ID NO: 1893003 - RNA, 19 nt, Artificial Sequence
  Description of Artificial Sequence: Synthetic oligonucleotide
aucucuuugagacaguuac

SEQ ID NO: 1893004 - RNA, 19 nt, Artificial Sequence
  Description of Artificial Sequence: Synthetic oligonucleotide
  modified_base (11)..(11): a, c, u, g, unknown or other
agacaguuacnuuaaaugg

SEQ ID NO: 1893005 - RNA, 19 nt, Artificial Sequence
  Description of Artificial Sequence: Synthetic oligonucleotide
  modified_base (4)..(4): a, c, u, g, unknown or other
uacnuuaaauggaugcggg

SEQ ID NO: 1893006 - RNA, 19 nt, Artificial Sequence
  Description of Artificial Sequence: Synthetic oligonucleotide
uguaccgaccacaaguugg

SEQ ID NO: 1893007 - RNA, 19 nt, Artificial Sequence
  Description of Artificial Sequence: Synthetic oligonucleotide
  modified_base (5)..(5): a, c, u, g, unknown or other
uuacnuuaaauggaugcgg

SEQ ID NO: 1893008 - RNA, 19 nt, Artificial Sequence
  Description of Artificial Sequence: Synthetic oligonucleotide
gaauaauuccaucuuugcc

SEQ ID NO: 1893009 - RNA, 19 nt, Artificial Sequence
  Description of Artificial Sequence: Synthetic oligonucleotide
agguaguccucacugaagc

SEQ ID NO: 1893010 - RNA, 19 nt, Artificial Sequence
  Description of Artificial Sequence: Synthetic oligonucleotide
caaacaucaggaauaauuc

SEQ ID NO: 1893011 - RNA, 19 nt, Artificial Sequence
  Description of Artificial Sequence: Synthetic oligonucleotide
uggccgaugaauaagcuga

SEQ ID NO: 1893012 - RNA, 19 nt, Artificial Sequence
  Description of Artificial Sequence: Synthetic oligonucleotide
gaauaguguauccuuggag

SEQ ID NO: 1893013 - RNA, 19 nt, Artificial Sequence
  Description of Artificial Sequence: Synthetic oligonucleotide
aaccgaucaggacagaagu

SEQ ID NO: 1893014 - RNA, 19 nt, Artificial Sequence
  Description of Artificial Sequence: Synthetic oligonucleotide
ucccaaaaggaauaaaagu

SEQ ID NO: 1893015 - RNA, 19 nt, Artificial Sequence
  Description of Artificial Sequence: Synthetic oligonucleotide
  modified_base (6)..(6): a, c, u, g, unknown or other
guuacnuuaaauggaugcg

SEQ ID NO: 1893016 - RNA, 19 nt, Artificial Sequence
  Description of Artificial Sequence: Synthetic oligonucleotide
caaagcaaagaguugguug

SEQ ID NO: 1893017 - RNA, 19 nt, Artificial Sequence
  Description of Artificial Sequence: Synthetic oligonucleotide
gaaggugaaacucugcauc

SEQ ID NO: 1893018 - RNA, 19 nt, Artificial Sequence
  Description of Artificial Sequence: Synthetic oligonucleotide
ucuguguauggcaucuggg

SEQ ID NO: 1893019 - RNA, 19 nt, Artificial Sequence
  Description of Artificial Sequence: Synthetic oligonucleotide
uuucuccgaagucauauga

SEQ ID NO: 1893020 - RNA, 19 nt, Artificial Sequence
  Description of Artificial Sequence: Synthetic oligonucleotide
gguagacuagacuagcugg

SEQ ID NO: 1893021 - RNA, 19 nt, Artificial Sequence
  Description of Artificial Sequence: Synthetic oligonucleotide
auguagaacagguaguccu

SEQ ID NO: 1893022 - RNA, 19 nt, Artificial Sequence
  Description of Artificial Sequence: Synthetic oligonucleotide
uuggggaugaccacugugc

SEQ ID NO: 1893023 - RNA, 19 nt, Artificial Sequence
  Description of Artificial Sequence: Synthetic oligonucleotide
  modified_base (2)..(2): a, c, u, g, unknown or other
cnuuaaauggaugcggggc

SEQ ID NO: 1893024 - RNA, 19 nt, Artificial Sequence
  Description of Artificial Sequence: Synthetic oligonucleotide
aagcugguagacuagacua

SEQ ID NO: 1893025 - RNA, 19 nt, Artificial Sequence
  Description of Artificial Sequence: Synthetic oligonucleotide
  modified_base (3)..(3): a, c, u, g, unknown or other
acnuuaaauggaugcgggg

SEQ ID NO: 1893026 - RNA, 19 nt, Artificial Sequence
  Description of Artificial Sequence: Synthetic oligonucleotide
auugccguagaccccggcc

SEQ ID NO: 1893027 - RNA, 19 nt, Artificial Sequence
  Description of Artificial Sequence: Synthetic oligonucleotide
ucauaugaggaauggcaag

SEQ ID NO: 1893028 - RNA, 19 nt, Artificial Sequence
  Description of Artificial Sequence: Synthetic oligonucleotide
gaacacuucggccugcugc

SEQ ID NO: 1893029 - RNA, 19 nt, Artificial Sequence
  Description of Artificial Sequence: Synthetic oligonucleotide
  modified_base (16)..(16): a, c, u, g, unknown or other
cuuugagacaguuacnuua

SEQ ID NO: 1893030 - RNA, 19 nt, Artificial Sequence
  Description of Artificial Sequence: Synthetic oligonucleotide
  modified_base (15)..(15): a, c, u, g, unknown or other
uuugagacaguuacnuuaa

SEQ ID NO: 1893031 - RNA, 19 nt, Artificial Sequence
  Description of Artificial Sequence: Synthetic oligonucleotide
uggaggacuguuuucuccg

SEQ ID NO: 1893032 - RNA, 19 nt, Artificial Sequence
  Description of Artificial Sequence: Synthetic oligonucleotide
gaagucauaugaggaaugg

SEQ ID NO: 1893033 - RNA, 19 nt, Artificial Sequence
  Description of Artificial Sequence: Synthetic oligonucleotide
  modified_base (10)..(10): a, c, u, g, unknown or other
gacaguuacnuuaaaugga

SEQ ID NO: 1893034 - RNA, 19 nt, Artificial Sequence
  Description of Artificial Sequence: Synthetic oligonucleotide
uuuggguaaagcgaaggug

SEQ ID NO: 1893035 - RNA, 19 nt, Artificial Sequence
  Description of Artificial Sequence: Synthetic oligonucleotide
  modified_base (13)..(13): a, c, u, g, unknown or other
ugagacaguuacnuuaaau

SEQ ID NO: 1893036 - RNA, 19 nt, Artificial Sequence
  Description of Artificial Sequence: Synthetic oligonucleotide
ugguagacuagacuagcug

SEQ ID NO: 1893037 - RNA, 19 nt, Artificial Sequence
  Description of Artificial Sequence: Synthetic oligonucleotide
acaaacaucaggaauaauu

SEQ ID NO: 1893038 - RNA, 19 nt, Artificial Sequence
  Description of Artificial Sequence: Synthetic oligonucleotide
uccgccuccacauagcaga

SEQ ID NO: 1893039 - RNA, 19 nt, Artificial Sequence
  Description of Artificial Sequence: Synthetic oligonucleotide
uuaggaauaguguauccuu

SEQ ID NO: 1893040 - RNA, 19 nt, Artificial Sequence
  Description of Artificial Sequence: Synthetic oligonucleotide
agucauaugaggaauggca

SEQ ID NO: 1893041 - RNA, 19 nt, Artificial Sequence
  Description of Artificial Sequence: Synthetic oligonucleotide
aagagguccccaaugaugu

SEQ ID NO: 1893042 - RNA, 19 nt, Artificial Sequence
  Description of Artificial Sequence: Synthetic oligonucleotide
acggucacugaacacuucg

SEQ ID NO: 1893043 - RNA, 19 nt, Artificial Sequence
  Description of Artificial Sequence: Synthetic oligonucleotide
uuuucaagaguugucccug

SEQ ID NO: 1893044 - RNA, 19 nt, Artificial Sequence
  Description of Artificial Sequence: Synthetic oligonucleotide
cuuuaggaauaguguaucc

SEQ ID NO: 1893045 - RNA, 19 nt, Artificial Sequence
  Description of Artificial Sequence: Synthetic oligonucleotide
aaagcgaaggugaaacucu

SEQ ID NO: 1893046 - RNA, 19 nt, Artificial Sequence
  Description of Artificial Sequence: Synthetic oligonucleotide
cuauccuucuccuugguca

SEQ ID NO: 1893047 - RNA, 19 nt, Artificial Sequence
  Description of Artificial Sequence: Synthetic oligonucleotide
cuguguauggcaucugggc

SEQ ID NO: 1893048 - RNA, 19 nt, Artificial Sequence
  Description of Artificial Sequence: Synthetic oligonucleotide
agacccaaaucucccaguc

SEQ ID NO: 1893049 - RNA, 19 nt, Artificial Sequence
  Description of Artificial Sequence: Synthetic oligonucleotide
cagaaaccgaucaggacag

SEQ ID NO: 1893050 - RNA, 19 nt, Artificial Sequence
  Description of Artificial Sequence: Synthetic oligonucleotide
ugcacgucaggguucagug

SEQ ID NO: 1893051 - RNA, 19 nt, Artificial Sequence
  Description of Artificial Sequence: Synthetic oligonucleotide
uaaagcgaaggugaaacuc

SEQ ID NO: 1893052 - RNA, 19 nt, Artificial Sequence
  Description of Artificial Sequence: Synthetic oligonucleotide
aaaccgaucaggacagaag

SEQ ID NO: 1893053 - RNA, 19 nt, Artificial Sequence
  Description of Artificial Sequence: Synthetic oligonucleotide
uuucaagaguugucccugg

SEQ ID NO: 1893054 - RNA, 19 nt, Artificial Sequence
  Description of Artificial Sequence: Synthetic oligonucleotide
cauccagaaaccgaucagg

SEQ ID NO: 1893055 - RNA, 19 nt, Artificial Sequence
  Description of Artificial Sequence: Synthetic oligonucleotide
auauacagcaggcaccaaa

SEQ ID NO: 1893056 - RNA, 19 nt, Artificial Sequence
  Description of Artificial Sequence: Synthetic oligonucleotide
uggucauccagaaaccgau

SEQ ID NO: 1893057 - RNA, 19 nt, Artificial Sequence
  Description of Artificial Sequence: Synthetic oligonucleotide
ggaauaauuccaucuuugc

SEQ ID NO: 1893058 - RNA, 19 nt, Artificial Sequence
  Description of Artificial Sequence: Synthetic oligonucleotide
gaaccuuuggguaaagcga

SEQ ID NO: 1893059 - RNA, 19 nt, Artificial Sequence
  Description of Artificial Sequence: Synthetic oligonucleotide
agacuagacuagcuggcuc

SEQ ID NO: 1893060 - RNA, 19 nt, Artificial Sequence
  Description of Artificial Sequence: Synthetic oligonucleotide
agggaugccgcaugcgcgc

SEQ ID NO: 1893061 - RNA, 19 nt, Artificial Sequence
  Description of Artificial Sequence: Synthetic oligonucleotide
uucucagaaccuuugggua

SEQ ID NO: 1893062 - RNA, 19 nt, Artificial Sequence
  Description of Artificial Sequence: Synthetic oligonucleotide
uccgcgcccagccagaacu

SEQ ID NO: 1893063 - RNA, 19 nt, Artificial Sequence
  Description of Artificial Sequence: Synthetic oligonucleotide
gguaaagcgaaggugaaac

SEQ ID NO: 1893064 - RNA, 19 nt, Artificial Sequence
  Description of Artificial Sequence: Synthetic oligonucleotide
ugccuuuaggaauagugua

SEQ ID NO: 1893065 - RNA, 19 nt, Artificial Sequence
  Description of Artificial Sequence: Synthetic oligonucleotide
agguacaugucuauccuuc

SEQ ID NO: 1893066 - RNA, 19 nt, Artificial Sequence
  Description of Artificial Sequence: Synthetic oligonucleotide
agcaagugcccgauguucc

SEQ ID NO: 1893067 - RNA, 19 nt, Artificial Sequence
  Description of Artificial Sequence: Synthetic oligonucleotide
  modified_base (19)..(19): a, c, u, g, unknown or other
ucucuuugagacaguuacn

SEQ ID NO: 1893068 - RNA, 19 nt, Artificial Sequence
  Description of Artificial Sequence: Synthetic oligonucleotide
uccgaagucauaugaggaa

SEQ ID NO: 1893069 - RNA, 19 nt, Artificial Sequence
  Description of Artificial Sequence: Synthetic oligonucleotide
aggacuguuuucuccgaag

SEQ ID NO: 1893070 - RNA, 19 nt, Artificial Sequence
  Description of Artificial Sequence: Synthetic oligonucleotide
acccaaaucucccagucau

SEQ ID NO: 1893071 - RNA, 19 nt, Artificial Sequence
  Description of Artificial Sequence: Synthetic oligonucleotide
auggauagccucugcaccu

SEQ ID NO: 1893072 - RNA, 19 nt, Artificial Sequence
  Description of Artificial Sequence: Synthetic oligonucleotide
uggggaugaccacugugcc

SEQ ID NO: 1893073 - RNA, 19 nt, Artificial Sequence
  Description of Artificial Sequence: Synthetic oligonucleotide
uguguaccgaccacaaguu

SEQ ID NO: 1893074 - RNA, 19 nt, Artificial Sequence
  Description of Artificial Sequence: Synthetic oligonucleotide
aacccggucacaaccaaug

SEQ ID NO: 1893075 - RNA, 19 nt, Artificial Sequence
  Description of Artificial Sequence: Synthetic oligonucleotide
  modified_base (9)..(9): a, c, u, g, unknown or other
acaguuacnuuaaauggau

SEQ ID NO: 1893076 - RNA, 19 nt, Artificial Sequence
  Description of Artificial Sequence: Synthetic oligonucleotide
cacgucaggguucagugac

SEQ ID NO: 1893077 - RNA, 19 nt, Artificial Sequence
  Description of Artificial Sequence: Synthetic oligonucleotide
ucccuaucccaaaaggaau

SEQ ID NO: 1893078 - RNA, 19 nt, Artificial Sequence
  Description of Artificial Sequence: Synthetic oligonucleotide
uggaagucgcugaggacca

SEQ ID NO: 1893079 - RNA, 19 nt, Artificial Sequence
  Description of Artificial Sequence: Synthetic oligonucleotide
guugguuguggugucagug

SEQ ID NO: 1893080 - RNA, 19 nt, Artificial Sequence
  Description of Artificial Sequence: Synthetic oligonucleotide
gcuucccuaucccaaaagg

SEQ ID NO: 1893081 - RNA, 19 nt, Artificial Sequence
  Description of Artificial Sequence: Synthetic oligonucleotide
uugccguagaccccggcca

SEQ ID NO: 1893082 - RNA, 19 nt, Artificial Sequence
  Description of Artificial Sequence: Synthetic oligonucleotide
ucuguguaccgaccacaag

SEQ ID NO: 1893083 - RNA, 19 nt, Artificial Sequence
  Description of Artificial Sequence: Synthetic oligonucleotide
agccgcgggaugcggaucc

SEQ ID NO: 1893084 - RNA, 19 nt, Artificial Sequence
  Description of Artificial Sequence: Synthetic oligonucleotide
acaugucuauccuucuccu

SEQ ID NO: 1893085 - RNA, 19 nt, Artificial Sequence
  Description of Artificial Sequence: Synthetic oligonucleotide
uccagaaaccgaucaggac

SEQ ID NO: 1893086 - RNA, 19 nt, Artificial Sequence
  Description of Artificial Sequence: Synthetic oligonucleotide
guagacuagacuagcuggc

SEQ ID NO: 1893087 - RNA, 19 nt, Artificial Sequence
  Description of Artificial Sequence: Synthetic oligonucleotide
cuucccuaucccaaaagga

SEQ ID NO: 1893088 - RNA, 19 nt, Artificial Sequence
  Description of Artificial Sequence: Synthetic oligonucleotide
aaccuuuggguaaagcgaa

SEQ ID NO: 1893089 - RNA, 19 nt, Artificial Sequence
  Description of Artificial Sequence: Synthetic oligonucleotide
ucuauccuucuccuugguc

SEQ ID NO: 1893090 - RNA, 19 nt, Artificial Sequence
  Description of Artificial Sequence: Synthetic oligonucleotide
ccggucacaaccaaugacc

SEQ ID NO: 1893091 - RNA, 19 nt, Artificial Sequence
  Description of Artificial Sequence: Synthetic oligonucleotide
gcaaguggcacugccaugg

SEQ ID NO: 1893092 - RNA, 19 nt, Artificial Sequence
  Description of Artificial Sequence: Synthetic oligonucleotide
aagaguugucccuggucau

SEQ ID NO: 1893093 - RNA, 19 nt, Artificial Sequence
  Description of Artificial Sequence: Synthetic oligonucleotide
cuagugugagacccaaauc

SEQ ID NO: 1893094 - RNA, 19 nt, Artificial Sequence
  Description of Artificial Sequence: Synthetic oligonucleotide
guaccgaccacaaguuggg

SEQ ID NO: 1893095 - RNA, 19 nt, Artificial Sequence
  Description of Artificial Sequence: Synthetic oligonucleotide
  modified_base (14)..(14): a, c, u, g, unknown or other
uugagacaguuacnuuaaa

SEQ ID NO: 1893096 - RNA, 19 nt, Artificial Sequence
  Description of Artificial Sequence: Synthetic oligonucleotide
aagguacaugucuauccuu

SEQ ID NO: 1893097 - RNA, 19 nt, Artificial Sequence
  Description of Artificial Sequence: Synthetic oligonucleotide
gaagguacaugucuauccu

SEQ ID NO: 1893098 - RNA, 19 nt, Artificial Sequence
  Description of Artificial Sequence: Synthetic oligonucleotide
auaugaggaauggcaagug

SEQ ID NO: 1893099 - RNA, 19 nt, Artificial Sequence
  Description of Artificial Sequence: Synthetic oligonucleotide
gagggaugccgcaugcgcg

SEQ ID NO: 1893100 - RNA, 19 nt, Artificial Sequence
  Description of Artificial Sequence: Synthetic oligonucleotide
uggcaaguggcacugccau

SEQ ID NO: 1893101 - RNA, 19 nt, Artificial Sequence
  Description of Artificial Sequence: Synthetic oligonucleotide
gacuguuuucuccgaaguc

SEQ ID NO: 1893102 - RNA, 19 nt, Artificial Sequence
  Description of Artificial Sequence: Synthetic oligonucleotide
uuuugcacgucaggguuca

SEQ ID NO: 1893103 - RNA, 19 nt, Artificial Sequence
  Description of Artificial Sequence: Synthetic oligonucleotide
guuguggugucagugccag

SEQ ID NO: 1893104 - RNA, 19 nt, Artificial Sequence
  Description of Artificial Sequence: Synthetic oligonucleotide
ugagggaaggaacccgguc

SEQ ID NO: 1893105 - RNA, 19 nt, Artificial Sequence
  Description of Artificial Sequence: Synthetic oligonucleotide
ucucuguguaccgaccaca

SEQ ID NO: 1893106 - RNA, 19 nt, Artificial Sequence
  Description of Artificial Sequence: Synthetic oligonucleotide
ugaauaagcugaagacauu

SEQ ID NO: 1893107 - RNA, 19 nt, Artificial Sequence
  Description of Artificial Sequence: Synthetic oligonucleotide
uauccuuggaggacuguuu

SEQ ID NO: 1893108 - RNA, 19 nt, Artificial Sequence
  Description of Artificial Sequence: Synthetic oligonucleotide
gaagcugguagacuagacu

SEQ ID NO: 1893109 - RNA, 19 nt, Artificial Sequence
  Description of Artificial Sequence: Synthetic oligonucleotide
ucuccgccuccacauagca

SEQ ID NO: 1893110 - RNA, 19 nt, Artificial Sequence
  Description of Artificial Sequence: Synthetic oligonucleotide
gaagcgcggcaccagcaag

SEQ ID NO: 1893111 - RNA, 19 nt, Artificial Sequence
  Description of Artificial Sequence: Synthetic oligonucleotide
ucccauacacacccgcuuc

SEQ ID NO: 1893112 - RNA, 19 nt, Artificial Sequence
  Description of Artificial Sequence: Synthetic oligonucleotide
guggccgaugaauaagcug

SEQ ID NO: 1893113 - RNA, 19 nt, Artificial Sequence
  Description of Artificial Sequence: Synthetic oligonucleotide
uucaagaguugucccuggu

SEQ ID NO: 1893114 - RNA, 19 nt, Artificial Sequence
  Description of Artificial Sequence: Synthetic oligonucleotide
  modified_base (8)..(8): a, c, u, g, unknown or other
caguuacnuuaaauggaug

SEQ ID NO: 1893115 - RNA, 19 nt, Artificial Sequence
  Description of Artificial Sequence: Synthetic oligonucleotide
accgaccacaaguugggga

SEQ ID NO: 1893116 - RNA, 19 nt, Artificial Sequence
  Description of Artificial Sequence: Synthetic oligonucleotide
aagugcccgauguucccca

SEQ ID NO: 1893117 - RNA, 19 nt, Artificial Sequence
  Description of Artificial Sequence: Synthetic oligonucleotide
ccagaaaccgaucaggaca

SEQ ID NO: 1893118 - RNA, 19 nt, Artificial Sequence
  Description of Artificial Sequence: Synthetic oligonucleotide
  modified_base (17)..(17): a, c, u, g, unknown or other
ucuuugagacaguuacnuu

SEQ ID NO: 1893119 - RNA, 19 nt, Artificial Sequence
  Description of Artificial Sequence: Synthetic oligonucleotide
ucucccagucaugaugggc

SEQ ID NO: 1893120 - RNA, 19 nt, Artificial Sequence
  Description of Artificial Sequence: Synthetic oligonucleotide
gaaggaacccggucacaac

SEQ ID NO: 1893121 - RNA, 19 nt, Artificial Sequence
  Description of Artificial Sequence: Synthetic oligonucleotide
augagcggcaugcgcggac

SEQ ID NO: 1893122 - RNA, 19 nt, Artificial Sequence
  Description of Artificial Sequence: Synthetic oligonucleotide
gacuagacuagcuggcucu

SEQ ID NO: 1893123 - RNA, 19 nt, Artificial Sequence
  Description of Artificial Sequence: Synthetic oligonucleotide
cuguguaccgaccacaagu

SEQ ID NO: 1893124 - RNA, 19 nt, Artificial Sequence
  Description of Artificial Sequence: Synthetic oligonucleotide
uagaccccggccagccugg

SEQ ID NO: 1893125 - RNA, 19 nt, Artificial Sequence
  Description of Artificial Sequence: Synthetic oligonucleotide
aagcgaaggugaaacucug

SEQ ID NO: 1893126 - RNA, 19 nt, Artificial Sequence
  Description of Artificial Sequence: Synthetic oligonucleotide
agaguugucccuggucauc

SEQ ID NO: 1893127 - RNA, 19 nt, Artificial Sequence
  Description of Artificial Sequence: Synthetic oligonucleotide
gaacugccgccgcaggaag

SEQ ID NO: 1893128 - RNA, 19 nt, Artificial Sequence
  Description of Artificial Sequence: Synthetic oligonucleotide
gaugcggggcuagugugag

SEQ ID NO: 1893129 - RNA, 19 nt, Artificial Sequence
  Description of Artificial Sequence: Synthetic oligonucleotide
agcgaaggugaaacucugc

SEQ ID NO: 1893130 - RNA, 19 nt, Artificial Sequence
  Description of Artificial Sequence: Synthetic oligonucleotide
ugccgccgcaggaagcgcg

SEQ ID NO: 1893131 - RNA, 19 nt, Artificial Sequence
  Description of Artificial Sequence: Synthetic oligonucleotide
ugcgcggacggucacugaa

SEQ ID NO: 1893132 - RNA, 19 nt, Artificial Sequence
  Description of Artificial Sequence: Synthetic oligonucleotide
ugggucucuguguaccgac

SEQ ID NO: 1893133 - RNA, 19 nt, Artificial Sequence
  Description of Artificial Sequence: Synthetic oligonucleotide
ugagcggcaugcgcggacg

SEQ ID NO: 1893134 - RNA, 19 nt, Artificial Sequence
  Description of Artificial Sequence: Synthetic oligonucleotide
uagacuagacuagcuggcu

SEQ ID NO: 1893135 - RNA, 19 nt, Artificial Sequence
  Description of Artificial Sequence: Synthetic oligonucleotide
cagcccgcaaagcagcagc

SEQ ID NO: 1893136 - RNA, 19 nt, Artificial Sequence
  Description of Artificial Sequence: Synthetic oligonucleotide
gaagucgcugaggaccacc

SEQ ID NO: 1893137 - RNA, 19 nt, Artificial Sequence
  Description of Artificial Sequence: Synthetic oligonucleotide
gucauaugaggaauggcaa

SEQ ID NO: 1893138 - RNA, 19 nt, Artificial Sequence
  Description of Artificial Sequence: Synthetic oligonucleotide
gcugaagacauugccguag

SEQ ID NO: 1893139 - RNA, 19 nt, Artificial Sequence
  Description of Artificial Sequence: Synthetic oligonucleotide
uuaaauggaugcggggcua

SEQ ID NO: 1893140 - RNA, 19 nt, Artificial Sequence
  Description of Artificial Sequence: Synthetic oligonucleotide
agucgcugaggaccaccac

SEQ ID NO: 1893141 - RNA, 19 nt, Artificial Sequence
  Description of Artificial Sequence: Synthetic oligonucleotide
acugaacacuucggccugc

SEQ ID NO: 1893142 - RNA, 19 nt, Artificial Sequence
  Description of Artificial Sequence: Synthetic oligonucleotide
cacugaagcugguagacua

SEQ ID NO: 1893143 - RNA, 19 nt, Artificial Sequence
  Description of Artificial Sequence: Synthetic oligonucleotide
auacacacccgcuucccua

SEQ ID NO: 1893144 - RNA, 19 nt, Artificial Sequence
  Description of Artificial Sequence: Synthetic oligonucleotide
caucaggcucacaaacauc

SEQ ID NO: 1893145 - RNA, 19 nt, Artificial Sequence
  Description of Artificial Sequence: Synthetic oligonucleotide
acuucggccugcugcacga

SEQ ID NO: 1893146 - RNA, 19 nt, Artificial Sequence
  Description of Artificial Sequence: Synthetic oligonucleotide
ggagggaugccgcaugcgc

SEQ ID NO: 1893147 - RNA, 19 nt, Artificial Sequence
  Description of Artificial Sequence: Synthetic oligonucleotide
acuagacuagcuggcucuc

SEQ ID NO: 1893148 - RNA, 19 nt, Artificial Sequence
  Description of Artificial Sequence: Synthetic oligonucleotide
acugaagcugguagacuag

SEQ ID NO: 1893149 - RNA, 19 nt, Artificial Sequence
  Description of Artificial Sequence: Synthetic oligonucleotide
auguuccccacgaggggcc

SEQ ID NO: 1893150 - RNA, 19 nt, Artificial Sequence
  Description of Artificial Sequence: Synthetic oligonucleotide
uacacacccgcuucccuau

SEQ ID NO: 1893151 - RNA, 19 nt, Artificial Sequence
  Description of Artificial Sequence: Synthetic oligonucleotide
ggaugagcggcaugcgcgg

SEQ ID NO: 1893152 - RNA, 19 nt, Artificial Sequence
  Description of Artificial Sequence: Synthetic oligonucleotide
aguggcacugccauggaua

SEQ ID NO: 1893153 - RNA, 19 nt, Artificial Sequence
  Description of Artificial Sequence: Synthetic oligonucleotide
gacccaaaucucccaguca

SEQ ID NO: 1893154 - RNA, 19 nt, Artificial Sequence
  Description of Artificial Sequence: Synthetic oligonucleotide
cacgcuguggaagucgcug

SEQ ID NO: 1893155 - RNA, 19 nt, Artificial Sequence
  Description of Artificial Sequence: Synthetic oligonucleotide
aagucgcugaggaccacca

SEQ ID NO: 1893156 - RNA, 19 nt, Artificial Sequence
  Description of Artificial Sequence: Synthetic oligonucleotide
cacugaacacuucggccug

SEQ ID NO: 1893157 - RNA, 19 nt, Artificial Sequence
  Description of Artificial Sequence: Synthetic oligonucleotide
guccgugagggaaggaacc

SEQ ID NO: 1893158 - RNA, 19 nt, Artificial Sequence
  Description of Artificial Sequence: Synthetic oligonucleotide
aggugaaacucugcaucag

SEQ ID NO: 1893159 - RNA, 19 nt, Artificial Sequence
  Description of Artificial Sequence: Synthetic oligonucleotide
guguaccgaccacaaguug

SEQ ID NO: 1893160 - RNA, 19 nt, Artificial Sequence
  Description of Artificial Sequence: Synthetic oligonucleotide
agugcccgauguuccccac

SEQ ID NO: 1893161 - RNA, 19 nt, Artificial Sequence
  Description of Artificial Sequence: Synthetic oligonucleotide
gaugccgcaugcgcgcugc

SEQ ID NO: 1893162 - RNA, 19 nt, Artificial Sequence
  Description of Artificial Sequence: Synthetic oligonucleotide
agcaccgccagcccgcaaa

SEQ ID NO: 1893163 - RNA, 19 nt, Artificial Sequence
  Description of Artificial Sequence: Synthetic oligonucleotide
cccgauguuccccacgagg

SEQ ID NO: 1893164 - RNA, 19 nt, Artificial Sequence
  Description of Artificial Sequence: Synthetic oligonucleotide
aguugguuguggugucagu

SEQ ID NO: 1893165 - RNA, 19 nt, Artificial Sequence
  Description of Artificial Sequence: Synthetic oligonucleotide
gcgaaggugaaacucugca

SEQ ID NO: 1893166 - RNA, 19 nt, Artificial Sequence
  Description of Artificial Sequence: Synthetic oligonucleotide
ccauggauagccucugcac

SEQ ID NO: 1893167 - RNA, 19 nt, Artificial Sequence
  Description of Artificial Sequence: Synthetic oligonucleotide
cauaugaggaauggcaagu

SEQ ID NO: 1893168 - RNA, 19 nt, Artificial Sequence
  Description of Artificial Sequence: Synthetic oligonucleotide
ccuuuggguaaagcgaagg

SEQ ID NO: 1893169 - RNA, 19 nt, Artificial Sequence
  Description of Artificial Sequence: Synthetic oligonucleotide
auagccucugcaccuccau

SEQ ID NO: 1893170 - RNA, 19 nt, Artificial Sequence
  Description of Artificial Sequence: Synthetic oligonucleotide
cgcggcaccagcaagugcc

SEQ ID NO: 1893171 - RNA, 19 nt, Artificial Sequence
  Description of Artificial Sequence: Synthetic oligonucleotide
cuucuggccguccgcgccc

SEQ ID NO: 1893172 - RNA, 19 nt, Artificial Sequence
  Description of Artificial Sequence: Synthetic oligonucleotide
caggaagcgcggcaccagc

SEQ ID NO: 1893173 - RNA, 19 nt, Artificial Sequence
  Description of Artificial Sequence: Synthetic oligonucleotide
cuagacuagcuggcucucc

SEQ ID NO: 1893174 - RNA, 19 nt, Artificial Sequence
  Description of Artificial Sequence: Synthetic oligonucleotide
aagcgcggcaccagcaagu

SEQ ID NO: 1893175 - RNA, 19 nt, Artificial Sequence
  Description of Artificial Sequence: Synthetic oligonucleotide
cagcaagugcccgauguuc

SEQ ID NO: 1893176 - RNA, 19 nt, Artificial Sequence
  Description of Artificial Sequence: Synthetic oligonucleotide
acgcuguggaagucgcuga

SEQ ID NO: 1893177 - RNA, 19 nt, Artificial Sequence
  Description of Artificial Sequence: Synthetic oligonucleotide
caagugcccgauguucccc

SEQ ID NO: 1893178 - RNA, 19 nt, Artificial Sequence
  Description of Artificial Sequence: Synthetic oligonucleotide
gaugcggauccccgggcga

SEQ ID NO: 1893179 - RNA, 19 nt, Artificial Sequence
  Description of Artificial Sequence: Synthetic oligonucleotide
ggaugcggauccccgggcg

SEQ ID NO: 1893180 - RNA, 19 nt, Artificial Sequence
  Description of Artificial Sequence: Synthetic oligonucleotide
gaccacaaguuggggauga

SEQ ID NO: 1893181 - RNA, 19 nt, Artificial Sequence
  Description of Artificial Sequence: Synthetic oligonucleotide
cuuuggguaaagcgaaggu

SEQ ID NO: 1893182 - RNA, 19 nt, Artificial Sequence
  Description of Artificial Sequence: Synthetic oligonucleotide
gucucuguguaccgaccac

SEQ ID NO: 1893183 - RNA, 19 nt, Artificial Sequence
  Description of Artificial Sequence: Synthetic oligonucleotide
guaaagcgaaggugaaacu

SEQ ID NO: 1893184 - RNA, 19 nt, Artificial Sequence
  Description of Artificial Sequence: Synthetic oligonucleotide
ucgcgcacgcuguggaagu

SEQ ID NO: 1893185 - RNA, 19 nt, Artificial Sequence
  Description of Artificial Sequence: Synthetic oligonucleotide
gcugguagacuagacuagc

SEQ ID NO: 1893186 - RNA, 19 nt, Artificial Sequence
  Description of Artificial Sequence: Synthetic oligonucleotide
cacgugcguggccacggcg

SEQ ID NO: 1893187 - RNA, 19 nt, Artificial Sequence
  Description of Artificial Sequence: Synthetic oligonucleotide
acccggucacaaccaauga

SEQ ID NO: 1893188 - RNA, 19 nt, Artificial Sequence
  Description of Artificial Sequence: Synthetic oligonucleotide
caugcgcggacggucacug

SEQ ID NO: 1893189 - RNA, 19 nt, Artificial Sequence
  Description of Artificial Sequence: Synthetic oligonucleotide
uguuccccacgaggggccg

SEQ ID NO: 1893190 - RNA, 19 nt, Artificial Sequence
  Description of Artificial Sequence: Synthetic oligonucleotide
gaggacuguuuucuccgaa

SEQ ID NO: 1893191 - RNA, 19 nt, Artificial Sequence
  Description of Artificial Sequence: Synthetic oligonucleotide
ccuuuaggaauaguguauc

SEQ ID NO: 1893192 - RNA, 19 nt, Artificial Sequence
  Description of Artificial Sequence: Synthetic oligonucleotide
cacugugccuuuaggaaua

SEQ ID NO: 1893193 - RNA, 19 nt, Artificial Sequence
  Description of Artificial Sequence: Synthetic oligonucleotide
ggcaccaaagcaaagaguu

SEQ ID NO: 1893194 - RNA, 19 nt, Artificial Sequence
  Description of Artificial Sequence: Synthetic oligonucleotide
uguauccuuggaggacugu

SEQ ID NO: 1893195 - RNA, 19 nt, Artificial Sequence
  Description of Artificial Sequence: Synthetic oligonucleotide
uccuucuggccguccgcgc

SEQ ID NO: 1893196 - RNA, 19 nt, Artificial Sequence
  Description of Artificial Sequence: Synthetic oligonucleotide
ugccgcaugcgcgcugccg

SEQ ID NO: 1893197 - RNA, 19 nt, Artificial Sequence
  Description of Artificial Sequence: Synthetic oligonucleotide
cucuguguaccgaccacaa

SEQ ID NO: 1893198 - RNA, 19 nt, Artificial Sequence
  Description of Artificial Sequence: Synthetic oligonucleotide
cgugagggaaggaacccgg

SEQ ID NO: 1893199 - RNA, 19 nt, Artificial Sequence
  Description of Artificial Sequence: Synthetic oligonucleotide
acugugccuuuaggaauag

SEQ ID NO: 1893200 - RNA, 19 nt, Artificial Sequence
  Description of Artificial Sequence: Synthetic oligonucleotide
agcccgcaaagcagcagcg

SEQ ID NO: 1893201 - RNA, 19 nt, Artificial Sequence
  Description of Artificial Sequence: Synthetic oligonucleotide
uguauggcaucugggccuu

SEQ ID NO: 1893202 - RNA, 19 nt, Artificial Sequence
  Description of Artificial Sequence: Synthetic oligonucleotide
gaugguggcuucuguguau

SEQ ID NO: 1893203 - RNA, 19 nt, Artificial Sequence
  Description of Artificial Sequence: Synthetic oligonucleotide
accacaaguuggggaugac

SEQ ID NO: 1893204 - RNA, 19 nt, Artificial Sequence
  Description of Artificial Sequence: Synthetic oligonucleotide
gagcgccucgcgcacgcug

SEQ ID NO: 1893205 - RNA, 19 nt, Artificial Sequence
  Description of Artificial Sequence: Synthetic oligonucleotide
cgaagucauaugaggaaug

SEQ ID NO: 1893206 - RNA, 19 nt, Artificial Sequence
  Description of Artificial Sequence: Synthetic oligonucleotide
acacacccgcuucccuauc

SEQ ID NO: 1893207 - RNA, 19 nt, Artificial Sequence
  Description of Artificial Sequence: Synthetic oligonucleotide
agcugaagacauugccgua

SEQ ID NO: 1893208 - RNA, 19 nt, Artificial Sequence
  Description of Artificial Sequence: Synthetic oligonucleotide
gcaagugcccgauguuccc

SEQ ID NO: 1893209 - RNA, 19 nt, Artificial Sequence
  Description of Artificial Sequence: Synthetic oligonucleotide
aggaacccggucacaacca

SEQ ID NO: 1893210 - RNA, 19 nt, Artificial Sequence
  Description of Artificial Sequence: Synthetic oligonucleotide
uggauagccucugcaccuc

SEQ ID NO: 1893211 - RNA, 19 nt, Artificial Sequence
  Description of Artificial Sequence: Synthetic oligonucleotide
gcguccguguccuucuggc

SEQ ID NO: 1893212 - RNA, 19 nt, Artificial Sequence
  Description of Artificial Sequence: Synthetic oligonucleotide
cagcaggcaccaaagcaaa

SEQ ID NO: 1893213 - RNA, 19 nt, Artificial Sequence
  Description of Artificial Sequence: Synthetic oligonucleotide
augcggauccccgggcgag

SEQ ID NO: 1893214 - RNA, 19 nt, Artificial Sequence
  Description of Artificial Sequence: Synthetic oligonucleotide
ggauagccucugcaccucc

SEQ ID NO: 1893215 - RNA, 19 nt, Artificial Sequence
  Description of Artificial Sequence: Synthetic oligonucleotide
cuguuuucuccgaagucau

SEQ ID NO: 1893216 - RNA, 19 nt, Artificial Sequence
  Description of Artificial Sequence: Synthetic oligonucleotide
agcaggcaccaaagcaaag

SEQ ID NO: 1893217 - RNA, 19 nt, Artificial Sequence
  Description of Artificial Sequence: Synthetic oligonucleotide
ccgcaaagcagcagcgccc

SEQ ID NO: 1893218 - RNA, 19 nt, Artificial Sequence
  Description of Artificial Sequence: Synthetic oligonucleotide
cuaucccaaaaggaauaaa

SEQ ID NO: 1893219 - RNA, 19 nt, Artificial Sequence
  Description of Artificial Sequence: Synthetic oligonucleotide
guguauccuuggaggacug

SEQ ID NO: 1893220 - RNA, 19 nt, Artificial Sequence
  Description of Artificial Sequence: Synthetic oligonucleotide
ggaggaugagcggcaugcg

SEQ ID NO: 1893221 - RNA, 19 nt, Artificial Sequence
  Description of Artificial Sequence: Synthetic oligonucleotide
caccaccaggcgguggccg

SEQ ID NO: 1893222 - RNA, 19 nt, Artificial Sequence
  Description of Artificial Sequence: Synthetic oligonucleotide
cacaaccaaugacccuuuc

SEQ ID NO: 1893223 - RNA, 19 nt, Artificial Sequence
  Description of Artificial Sequence: Synthetic oligonucleotide
augccgcaugcgcgcugcc

SEQ ID NO: 1893224 - RNA, 19 nt, Artificial Sequence
  Description of Artificial Sequence: Synthetic oligonucleotide
cugguagacuagacuagcu

SEQ ID NO: 1893225 - RNA, 19 nt, Artificial Sequence
  Description of Artificial Sequence: Synthetic oligonucleotide
ggcguccguguccuucugg

SEQ ID NO: 1893226 - RNA, 19 nt, Artificial Sequence
  Description of Artificial Sequence: Synthetic oligonucleotide
cagcccgcaagcgcggccc

SEQ ID NO: 1893227 - RNA, 19 nt, Artificial Sequence
  Description of Artificial Sequence: Synthetic oligonucleotide
gccgcaugcgcgcugccgc

SEQ ID NO: 1893228 - RNA, 19 nt, Artificial Sequence
  Description of Artificial Sequence: Synthetic oligonucleotide
acgugcguggccacggcgu

SEQ ID NO: 1893229 - RNA, 19 nt, Artificial Sequence
  Description of Artificial Sequence: Synthetic oligonucleotide
cagccagaacugccgccgc

SEQ ID NO: 1893230 - RNA, 19 nt, Artificial Sequence
  Description of Artificial Sequence: Synthetic oligonucleotide
gguacaugucuauccuucu

SEQ ID NO: 1893231 - RNA, 19 nt, Artificial Sequence
  Description of Artificial Sequence: Synthetic oligonucleotide
ggcaaguggcacugccaug

SEQ ID NO: 1893232 - RNA, 19 nt, Artificial Sequence
  Description of Artificial Sequence: Synthetic oligonucleotide
aggcgcacgugcguggcca

SEQ ID NO: 1893233 - RNA, 19 nt, Artificial Sequence
  Description of Artificial Sequence: Synthetic oligonucleotide
ccuucuggccguccgcgcc

SEQ ID NO: 1893234 - RNA, 19 nt, Artificial Sequence
  Description of Artificial Sequence: Synthetic oligonucleotide
aggaagcgcggcaccagca

SEQ ID NO: 1893235 - RNA, 19 nt, Artificial Sequence
  Description of Artificial Sequence: Synthetic oligonucleotide
uccucuccgccuccacaua

SEQ ID NO: 1893236 - RNA, 19 nt, Artificial Sequence
  Description of Artificial Sequence: Synthetic oligonucleotide
ggguucagugacauauaca

SEQ ID NO: 1893237 - RNA, 19 nt, Artificial Sequence
  Description of Artificial Sequence: Synthetic oligonucleotide
cgguggccgaugaauaagc

SEQ ID NO: 1893238 - RNA, 19 nt, Artificial Sequence
  Description of Artificial Sequence: Synthetic oligonucleotide
gcgguggccgaugaauaag

SEQ ID NO: 1893239 - RNA, 19 nt, Artificial Sequence
  Description of Artificial Sequence: Synthetic oligonucleotide
uuugcacgucaggguucag

SEQ ID NO: 1893240 - RNA, 19 nt, Artificial Sequence
  Description of Artificial Sequence: Synthetic oligonucleotide
caagcgcggcccagcuccc

SEQ ID NO: 1893241 - RNA, 19 nt, Artificial Sequence
  Description of Artificial Sequence: Synthetic oligonucleotide
gcgggaugcggauccccgg

SEQ ID NO: 1893242 - RNA, 19 nt, Artificial Sequence
  Description of Artificial Sequence: Synthetic oligonucleotide
ggacagaagucaucuggcu

SEQ ID NO: 1893243 - RNA, 19 nt, Artificial Sequence
  Description of Artificial Sequence: Synthetic oligonucleotide
cgauguuccccacgagggg

SEQ ID NO: 1893244 - RNA, 19 nt, Artificial Sequence
  Description of Artificial Sequence: Synthetic oligonucleotide
cacggcguccguguccuuc

SEQ ID NO: 1893245 - RNA, 19 nt, Artificial Sequence
  Description of Artificial Sequence: Synthetic oligonucleotide
ggaggacuguuuucuccga

SEQ ID NO: 1893246 - RNA, 19 nt, Artificial Sequence
  Description of Artificial Sequence: Synthetic oligonucleotide
gaugagcggcaugcgcgga

SEQ ID NO: 1893247 - RNA, 19 nt, Artificial Sequence
  Description of Artificial Sequence: Synthetic oligonucleotide
ggcuucuguguauggcauc

SEQ ID NO: 1893248 - RNA, 19 nt, Artificial Sequence
  Description of Artificial Sequence: Synthetic oligonucleotide
caaugaagagguccccaau

SEQ ID NO: 1893249 - RNA, 19 nt, Artificial Sequence
  Description of Artificial Sequence: Synthetic oligonucleotide
agaaaccgaucaggacaga

SEQ ID NO: 1893250 - RNA, 19 nt, Artificial Sequence
  Description of Artificial Sequence: Synthetic oligonucleotide
gccaggcgcacgugcgugg

SEQ ID NO: 1893251 - RNA, 19 nt, Artificial Sequence
  Description of Artificial Sequence: Synthetic oligonucleotide
guauccuuggaggacuguu

SEQ ID NO: 1893252 - RNA, 19 nt, Artificial Sequence
  Description of Artificial Sequence: Synthetic oligonucleotide
ccgugagggaaggaacccg

SEQ ID NO: 1893253 - RNA, 19 nt, Artificial Sequence
  Description of Artificial Sequence: Synthetic oligonucleotide
gccguccgcgcccagccag

SEQ ID NO: 1893254 - RNA, 19 nt, Artificial Sequence
  Description of Artificial Sequence: Synthetic oligonucleotide
ccuuguccgugagggaagg

SEQ ID NO: 1893255 - RNA, 19 nt, Artificial Sequence
  Description of Artificial Sequence: Synthetic oligonucleotide
cacccgcuucccuauccca

SEQ ID NO: 1893256 - RNA, 19 nt, Artificial Sequence
  Description of Artificial Sequence: Synthetic oligonucleotide
cccuaucccaaaaggaaua

SEQ ID NO: 1893257 - RNA, 19 nt, Artificial Sequence
  Description of Artificial Sequence: Synthetic oligonucleotide
agcgccucgcgcacgcugu

SEQ ID NO: 1893258 - RNA, 19 nt, Artificial Sequence
  Description of Artificial Sequence: Synthetic oligonucleotide
gcgcacgcuguggaagucg

SEQ ID NO: 1893259 - RNA, 19 nt, Artificial Sequence
  Description of Artificial Sequence: Synthetic oligonucleotide
ggaagcgcggcaccagcaa

SEQ ID NO: 1893260 - RNA, 19 nt, Artificial Sequence
  Description of Artificial Sequence: Synthetic oligonucleotide
ccgccagcccgcaaagcag

SEQ ID NO: 1893261 - RNA, 19 nt, Artificial Sequence
  Description of Artificial Sequence: Synthetic oligonucleotide
gggaugaccacugugccuu

SEQ ID NO: 1893262 - RNA, 19 nt, Artificial Sequence
  Description of Artificial Sequence: Synthetic oligonucleotide
acgucaggguucagugaca

SEQ ID NO: 1893263 - RNA, 19 nt, Artificial Sequence
  Description of Artificial Sequence: Synthetic oligonucleotide
gggucucuguguaccgacc

SEQ ID NO: 1893264 - RNA, 19 nt, Artificial Sequence
  Description of Artificial Sequence: Synthetic oligonucleotide
acccgcuucccuaucccaa

SEQ ID NO: 1893265 - RNA, 19 nt, Artificial Sequence
  Description of Artificial Sequence: Synthetic oligonucleotide
ggauccccgggcgaggaca

SEQ ID NO: 1893266 - RNA, 19 nt, Artificial Sequence
  Description of Artificial Sequence: Synthetic oligonucleotide
gaugaccacugugccuuua

SEQ ID NO: 1893267 - RNA, 19 nt, Artificial Sequence
  Description of Artificial Sequence: Synthetic oligonucleotide
gcaccgccagcccgcaaag

SEQ ID NO: 1893268 - RNA, 19 nt, Artificial Sequence
  Description of Artificial Sequence: Synthetic oligonucleotide
agaccccggccagccuggc

SEQ ID NO: 1893269 - RNA, 19 nt, Artificial Sequence
  Description of Artificial Sequence: Synthetic oligonucleotide
ggaacccggucacaaccaa

SEQ ID NO: 1893270 - RNA, 19 nt, Artificial Sequence
  Description of Artificial Sequence: Synthetic oligonucleotide
ggucauccagaaaccgauc

SEQ ID NO: 1893271 - RNA, 19 nt, Artificial Sequence
  Description of Artificial Sequence: Synthetic oligonucleotide
ccaaauggcugggucucug

SEQ ID NO: 1893272 - RNA, 19 nt, Artificial Sequence
  Description of Artificial Sequence: Synthetic oligonucleotide
ggcgguggccgaugaauaa

SEQ ID NO: 1893273 - RNA, 19 nt, Artificial Sequence
  Description of Artificial Sequence: Synthetic oligonucleotide
cacgagcgccucgcgcacg

SEQ ID NO: 1893274 - RNA, 19 nt, Artificial Sequence
  Description of Artificial Sequence: Synthetic oligonucleotide
gcacgucaggguucaguga

SEQ ID NO: 1893275 - RNA, 19 nt, Artificial Sequence
  Description of Artificial Sequence: Synthetic oligonucleotide
augcggggcuagugugaga

SEQ ID NO: 1893276 - RNA, 19 nt, Artificial Sequence
  Description of Artificial Sequence: Synthetic oligonucleotide
cugggucucuguguaccga

SEQ ID NO: 1893277 - RNA, 19 nt, Artificial Sequence
  Description of Artificial Sequence: Synthetic oligonucleotide
cuucggccugcugcacgag

SEQ ID NO: 1893278 - RNA, 19 nt, Artificial Sequence
  Description of Artificial Sequence: Synthetic oligonucleotide
gccuuuaggaauaguguau

SEQ ID NO: 1893279 - RNA, 19 nt, Artificial Sequence
  Description of Artificial Sequence: Synthetic oligonucleotide
cgggaugcggauccccggg

SEQ ID NO: 1893280 - RNA, 19 nt, Artificial Sequence
  Description of Artificial Sequence: Synthetic oligonucleotide
gucuauccuucuccuuggu

SEQ ID NO: 1893281 - RNA, 19 nt, Artificial Sequence
  Description of Artificial Sequence: Synthetic oligonucleotide
ggaugcggggcuaguguga

SEQ ID NO: 1893282 - RNA, 19 nt, Artificial Sequence
  Description of Artificial Sequence: Synthetic oligonucleotide
gucccuggucauccagaaa

SEQ ID NO: 1893283 - RNA, 19 nt, Artificial Sequence
  Description of Artificial Sequence: Synthetic oligonucleotide
augcgcggacggucacuga

SEQ ID NO: 1893284 - RNA, 19 nt, Artificial Sequence
  Description of Artificial Sequence: Synthetic oligonucleotide
augcgcgcugccgccgcag

SEQ ID NO: 1893285 - RNA, 19 nt, Artificial Sequence
  Description of Artificial Sequence: Synthetic oligonucleotide
ccggagggaugccgcaugc

SEQ ID NO: 1893286 - RNA, 19 nt, Artificial Sequence
  Description of Artificial Sequence: Synthetic oligonucleotide
gcggacggucacugaacac

SEQ ID NO: 1893287 - RNA, 19 nt, Artificial Sequence
  Description of Artificial Sequence: Synthetic oligonucleotide
uccccacgaggggccgggg

SEQ ID NO: 1893288 - RNA, 19 nt, Artificial Sequence
  Description of Artificial Sequence: Synthetic oligonucleotide
cucccauacacacccgcuu

SEQ ID NO: 1893289 - RNA, 19 nt, Artificial Sequence
  Description of Artificial Sequence: Synthetic oligonucleotide
ccuaucccaaaaggaauaa

SEQ ID NO: 1893290 - RNA, 19 nt, Artificial Sequence
  Description of Artificial Sequence: Synthetic oligonucleotide
ggaugccgcaugcgcgcug

SEQ ID NO: 1893291 - RNA, 19 nt, Artificial Sequence
  Description of Artificial Sequence: Synthetic oligonucleotide
ccguagaccccggccagcc

SEQ ID NO: 1893292 - RNA, 19 nt, Artificial Sequence
  Description of Artificial Sequence: Synthetic oligonucleotide
ccgaccacaaguuggggau

SEQ ID NO: 1893293 - RNA, 19 nt, Artificial Sequence
  Description of Artificial Sequence: Synthetic oligonucleotide
agcccgcaagcgcggccca

SEQ ID NO: 1893294 - RNA, 19 nt, Artificial Sequence
  Description of Artificial Sequence: Synthetic oligonucleotide
cuuguccgugagggaagga

SEQ ID NO: 1893295 - RNA, 19 nt, Artificial Sequence
  Description of Artificial Sequence: Synthetic oligonucleotide
gcaugcgcgcugccgccgc

SEQ ID NO: 1893296 - RNA, 19 nt, Artificial Sequence
  Description of Artificial Sequence: Synthetic oligonucleotide
ggccaggcgcacgugcgug

SEQ ID NO: 1893297 - RNA, 19 nt, Artificial Sequence
  Description of Artificial Sequence: Synthetic oligonucleotide
guccgcgcccagccagaac

SEQ ID NO: 1893298 - RNA, 19 nt, Artificial Sequence
  Description of Artificial Sequence: Synthetic oligonucleotide
cauauacagcaggcaccaa

SEQ ID NO: 1893299 - RNA, 19 nt, Artificial Sequence
  Description of Artificial Sequence: Synthetic oligonucleotide
ggcaugcgcggacggucac

SEQ ID NO: 1893300 - RNA, 19 nt, Artificial Sequence
  Description of Artificial Sequence: Synthetic oligonucleotide
gcagcgccccucccgcagc

SEQ ID NO: 1893301 - RNA, 19 nt, Artificial Sequence
  Description of Artificial Sequence: Synthetic oligonucleotide
guccucacugaagcuggua

SEQ ID NO: 1893302 - RNA, 19 nt, Artificial Sequence
  Description of Artificial Sequence: Synthetic oligonucleotide
gcccgauguuccccacgag

SEQ ID NO: 1893303 - RNA, 19 nt, Artificial Sequence
  Description of Artificial Sequence: Synthetic oligonucleotide
gcggggcuagugugagacc

SEQ ID NO: 1893304 - RNA, 19 nt, Artificial Sequence
  Description of Artificial Sequence: Synthetic oligonucleotide
gccgccgcaggaagcgcgg

SEQ ID NO: 1893305 - RNA, 19 nt, Artificial Sequence
  Description of Artificial Sequence: Synthetic oligonucleotide
gcccgcaaagcagcagcgc

SEQ ID NO: 1893306 - RNA, 19 nt, Artificial Sequence
  Description of Artificial Sequence: Synthetic oligonucleotide
ccacgaggggccggggugc

SEQ ID NO: 1893307 - RNA, 19 nt, Artificial Sequence
  Description of Artificial Sequence: Synthetic oligonucleotide
gcggcaugcgcggacgguc

SEQ ID NO: 1893308 - RNA, 19 nt, Artificial Sequence
  Description of Artificial Sequence: Synthetic oligonucleotide
gcacgagcgccucgcgcac

SEQ ID NO: 1893309 - RNA, 19 nt, Artificial Sequence
  Description of Artificial Sequence: Synthetic oligonucleotide
gcacgugcguggccacggc

SEQ ID NO: 1893310 - RNA, 19 nt, Artificial Sequence
  Description of Artificial Sequence: Synthetic oligonucleotide
guauggcaucugggccuug

SEQ ID NO: 1893311 - RNA, 19 nt, Artificial Sequence
  Description of Artificial Sequence: Synthetic oligonucleotide
ccgcaugcgcgcugccgcc

SEQ ID NO: 1893312 - RNA, 19 nt, Artificial Sequence
  Description of Artificial Sequence: Synthetic oligonucleotide
gggcuagugugagacccaa

SEQ ID NO: 1893313 - RNA, 19 nt, Artificial Sequence
  Description of Artificial Sequence: Synthetic oligonucleotide
ggggcuagugugagaccca

SEQ ID NO: 1893314 - RNA, 19 nt, Artificial Sequence
  Description of Artificial Sequence: Synthetic oligonucleotide
gcaucugggccuuguccgu

SEQ ID NO: 1893315 - RNA, 19 nt, Artificial Sequence
  Description of Artificial Sequence: Synthetic oligonucleotide
cgcacgugcguggccacgg

SEQ ID NO: 1893316 - RNA, 19 nt, Artificial Sequence
  Description of Artificial Sequence: Synthetic oligonucleotide
cugaacacuucggccugcu

SEQ ID NO: 1893317 - RNA, 19 nt, Artificial Sequence
  Description of Artificial Sequence: Synthetic oligonucleotide
gcgcggcaccagcaagugc

SEQ ID NO: 1893318 - RNA, 19 nt, Artificial Sequence
  Description of Artificial Sequence: Synthetic oligonucleotide
gauccccgggcgaggacau

SEQ ID NO: 1893319 - RNA, 19 nt, Artificial Sequence
  Description of Artificial Sequence: Synthetic oligonucleotide
gcgcggacggucacugaac

SEQ ID NO: 1893320 - RNA, 19 nt, Artificial Sequence
  Description of Artificial Sequence: Synthetic oligonucleotide
ccgaagucauaugaggaau

SEQ ID NO: 1893321 - RNA, 19 nt, Artificial Sequence
  Description of Artificial Sequence: Synthetic oligonucleotide
ggaagucgcugaggaccac

SEQ ID NO: 1893322 - RNA, 19 nt, Artificial Sequence
  Description of Artificial Sequence: Synthetic oligonucleotide
ggcgcacgugcguggccac

SEQ ID NO: 1893323 - RNA, 19 nt, Artificial Sequence
  Description of Artificial Sequence: Synthetic oligonucleotide
caugcgcgcugccgccgca

SEQ ID NO: 1893324 - RNA, 19 nt, Artificial Sequence
  Description of Artificial Sequence: Synthetic oligonucleotide
cacaaacaucaggaauaau

SEQ ID NO: 1893325 - RNA, 19 nt, Artificial Sequence
  Description of Artificial Sequence: Synthetic oligonucleotide
acucugcaucaggcucaca

SEQ ID NO: 1893326 - RNA, 19 nt, Artificial Sequence
  Description of Artificial Sequence: Synthetic oligonucleotide
cccgcaagcgcggcccagc

SEQ ID NO: 1893327 - RNA, 19 nt, Artificial Sequence
  Description of Artificial Sequence: Synthetic oligonucleotide
ggacggucacugaacacuu

SEQ ID NO: 1893328 - RNA, 19 nt, Artificial Sequence
  Description of Artificial Sequence: Synthetic oligonucleotide
auccccgggcgaggacaug

SEQ ID NO: 1893329 - RNA, 19 nt, Artificial Sequence
  Description of Artificial Sequence: Synthetic oligonucleotide
cgcggacggucacugaaca

SEQ ID NO: 1893330 - RNA, 19 nt, Artificial Sequence
  Description of Artificial Sequence: Synthetic oligonucleotide
cccgcuucccuaucccaaa

SEQ ID NO: 1893331 - RNA, 19 nt, Artificial Sequence
  Description of Artificial Sequence: Synthetic oligonucleotide
gcgcacgugcguggccacg

SEQ ID NO: 1893332 - RNA, 19 nt, Artificial Sequence
  Description of Artificial Sequence: Synthetic oligonucleotide
cggagggaugccgcaugcg

SEQ ID NO: 1893333 - RNA, 19 nt, Artificial Sequence
  Description of Artificial Sequence: Synthetic oligonucleotide
ccgcgcccagccagaacug

SEQ ID NO: 1893334 - RNA, 19 nt, Artificial Sequence
  Description of Artificial Sequence: Synthetic oligonucleotide
cgaccacaaguuggggaug

SEQ ID NO: 1893335 - RNA, 19 nt, Artificial Sequence
  Description of Artificial Sequence: Synthetic oligonucleotide
cugugccuuuaggaauagu

SEQ ID NO: 1893336 - RNA, 19 nt, Artificial Sequence
  Description of Artificial Sequence: Synthetic oligonucleotide
ccgcgggaugcggaucccc

SEQ ID NO: 1893337 - RNA, 19 nt, Artificial Sequence
  Description of Artificial Sequence: Synthetic oligonucleotide
gcgccucgcgcacgcugug

SEQ ID NO: 1893338 - RNA, 19 nt, Artificial Sequence
  Description of Artificial Sequence: Synthetic oligonucleotide
gcggauccccgggcgagga

SEQ ID NO: 1893339 - RNA, 19 nt, Artificial Sequence
  Description of Artificial Sequence: Synthetic oligonucleotide
ccgcuucccuaucccaaaa

SEQ ID NO: 1893340 - RNA, 19 nt, Artificial Sequence
  Description of Artificial Sequence: Synthetic oligonucleotide
cguguccuucuggccgucc

SEQ ID NO: 1893341 - RNA, 19 nt, Artificial Sequence
  Description of Artificial Sequence: Synthetic oligonucleotide
ccgccuccacauagcagaa

SEQ ID NO: 1893342 - RNA, 19 nt, Artificial Sequence
  Description of Artificial Sequence: Synthetic oligonucleotide
cggcaugcgcggacgguca

SEQ ID NO: 1893343 - RNA, 19 nt, Artificial Sequence
  Description of Artificial Sequence: Synthetic oligonucleotide
cguggccacggcguccgug

SEQ ID NO: 1893344 - RNA, 19 nt, Artificial Sequence
  Description of Artificial Sequence: Synthetic oligonucleotide
gcccgcaagcgcggcccag

SEQ ID NO: 1893345 - RNA, 19 nt, Artificial Sequence
  Description of Artificial Sequence: Synthetic oligonucleotide
gccgcgggaugcggauccc

SEQ ID NO: 1893346 - RNA, 19 nt, Artificial Sequence
  Description of Artificial Sequence: Synthetic oligonucleotide
ccccagccgcgggaugcgg

SEQ ID NO: 1893347 - RNA, 19 nt, Artificial Sequence
  Description of Artificial Sequence: Synthetic oligonucleotide
gcaaagcagcagcgccccu

SEQ ID NO: 1893348 - RNA, 19 nt, Artificial Sequence
  Description of Artificial Sequence: Synthetic oligonucleotide
cgcaagcgcggcccagcuc

SEQ ID NO: 1893349 - RNA, 19 nt, Artificial Sequence
  Description of Artificial Sequence: Synthetic oligonucleotide
gcaugcgcggacggucacu

SEQ ID NO: 1893350 - RNA, 19 nt, Artificial Sequence
  Description of Artificial Sequence: Synthetic oligonucleotide
ccguccgcgcccagccaga

SEQ ID NO: 1893351 - RNA, 19 nt, Artificial Sequence
  Description of Artificial Sequence: Synthetic oligonucleotide
gggaugccgcaugcgcgcu

SEQ ID NO: 1893352 - RNA, 19 nt, Artificial Sequence
  Description of Artificial Sequence: Synthetic oligonucleotide
ccagccgcgggaugcggau

SEQ ID NO: 1893353 - RNA, 19 nt, Artificial Sequence
  Description of Artificial Sequence: Synthetic oligonucleotide
cggauccccgggcgaggac

SEQ ID NO: 1893354 - RNA, 19 nt, Artificial Sequence
  Description of Artificial Sequence: Synthetic oligonucleotide
cagcaccgccagcccgcaa

SEQ ID NO: 1893355 - RNA, 19 nt, Artificial Sequence
  Description of Artificial Sequence: Synthetic oligonucleotide
gcacgcuguggaagucgcu

SEQ ID NO: 1893356 - RNA, 19 nt, Artificial Sequence
  Description of Artificial Sequence: Synthetic oligonucleotide
cgcgcacgcuguggaaguc

SEQ ID NO: 1893357 - RNA, 19 nt, Artificial Sequence
  Description of Artificial Sequence: Synthetic oligonucleotide
cccaaauggcugggucucu

SEQ ID NO: 1893358 - RNA, 19 nt, Artificial Sequence
  Description of Artificial Sequence: Synthetic oligonucleotide
ccgcaagcgcggcccagcu

SEQ ID NO: 1893359 - RNA, 19 nt, Artificial Sequence
  Description of Artificial Sequence: Synthetic oligonucleotide
ccccacgaggggccggggu

SEQ ID NO: 1893360 - RNA, 19 nt, Artificial Sequence
  Description of Artificial Sequence: Synthetic oligonucleotide
cguagaccccggccagccu

SEQ ID NO: 1893361 - RNA, 19 nt, Artificial Sequence
  Description of Artificial Sequence: Synthetic oligonucleotide
cggcuccccagccgcggga

SEQ ID NO: 1893362 - RNA, 19 nt, Artificial Sequence
  Description of Artificial Sequence: Synthetic oligonucleotide
cguccgcgcccagccagaa

SEQ ID NO: 1893363 - RNA, 19 nt, Artificial Sequence
  Description of Artificial Sequence: Synthetic oligonucleotide
ccccggagggaugccgcau

SEQ ID NO: 1893364 - RNA, 19 nt, Artificial Sequence
  Description of Artificial Sequence: Synthetic oligonucleotide
cgagcgccucgcgcacgcu

SEQ ID NO: 1893365 - RNA, 19 nt, Artificial Sequence
  Description of Artificial Sequence: Synthetic oligonucleotide
ccacggcguccguguccuu

SEQ ID NO: 1893366 - RNA, 19 nt, Artificial Sequence
  Description of Artificial Sequence: Synthetic oligonucleotide
  modified_base (1)..(1): a, c, u, g, unknown or other
nuuaaauggaugcggggcu

SEQ ID NO: 1893367 - RNA, 19 nt, Artificial Sequence
  Description of Artificial Sequence: Synthetic oligonucleotide
acacaaaugagguagaugc

SEQ ID NO: 1893368 - RNA, 19 nt, Artificial Sequence
  Description of Artificial Sequence: Synthetic oligonucleotide
ucaagaagcauaaauaaac

SEQ ID NO: 1893369 - RNA, 19 nt, Artificial Sequence
  Description of Artificial Sequence: Synthetic oligonucleotide
aacaugagcuggcugaagc

SEQ ID NO: 1893370 - RNA, 19 nt, Artificial Sequence
  Description of Artificial Sequence: Synthetic oligonucleotide
aaucaagaagcauaaauaa

SEQ ID NO: 1893371 - RNA, 19 nt, Artificial Sequence
  Description of Artificial Sequence: Synthetic oligonucleotide
ucacguaguaaccugagag

SEQ ID NO: 1893372 - RNA, 19 nt, Artificial Sequence
  Description of Artificial Sequence: Synthetic oligonucleotide
acuccuaauaccugcaccc

SEQ ID NO: 1893373 - RNA, 19 nt, Artificial Sequence
  Description of Artificial Sequence: Synthetic oligonucleotide
ucagcguacaacaugagcu

SEQ ID NO: 1893374 - RNA, 19 nt, Artificial Sequence
  Description of Artificial Sequence: Synthetic oligonucleotide
acaacaacaacccuacgag

SEQ ID NO: 1893375 - RNA, 19 nt, Artificial Sequence
  Description of Artificial Sequence: Synthetic oligonucleotide
auguaagcggcguaggugc

SEQ ID NO: 1893376 - RNA, 19 nt, Artificial Sequence
  Description of Artificial Sequence: Synthetic oligonucleotide
acaaaugagguagaugccc

SEQ ID NO: 1893377 - RNA, 19 nt, Artificial Sequence
  Description of Artificial Sequence: Synthetic oligonucleotide
uuuccgacgguauagcucc

SEQ ID NO: 1893378 - RNA, 19 nt, Artificial Sequence
  Description of Artificial Sequence: Synthetic oligonucleotide
uacauucggaccuuuagcc

SEQ ID NO: 1893379 - RNA, 19 nt, Artificial Sequence
  Description of Artificial Sequence: Synthetic oligonucleotide
cuaauggcuagcuggagcg

SEQ ID NO: 1893380 - RNA, 19 nt, Artificial Sequence
  Description of Artificial Sequence: Synthetic oligonucleotide
acuguuuagcugcaucugc

SEQ ID NO: 1893381 - RNA, 19 nt, Artificial Sequence
  Description of Artificial Sequence: Synthetic oligonucleotide
ucgaaauacagguaaggca

SEQ ID NO: 1893382 - RNA, 19 nt, Artificial Sequence
  Description of Artificial Sequence: Synthetic oligonucleotide
gaagcaaccccaaaagggg

SEQ ID NO: 1893383 - RNA, 19 nt, Artificial Sequence
  Description of Artificial Sequence: Synthetic oligonucleotide
ggugcuaauggcuagcugg

SEQ ID NO: 1893384 - RNA, 19 nt, Artificial Sequence
  Description of Artificial Sequence: Synthetic oligonucleotide
uccagaacucgacacgucg

SEQ ID NO: 1893385 - RNA, 19 nt, Artificial Sequence
  Description of Artificial Sequence: Synthetic oligonucleotide
uaaccugagaggaaggcca

SEQ ID NO: 1893386 - RNA, 19 nt, Artificial Sequence
  Description of Artificial Sequence: Synthetic oligonucleotide
  modified_base (16)..(16): a, c, u, g, unknown or other
uccaucuucccaaaanaaa

SEQ ID NO: 1893387 - RNA, 19 nt, Artificial Sequence
  Description of Artificial Sequence: Synthetic oligonucleotide
aaucuucgaagacaucuug

SEQ ID NO: 1893388 - RNA, 19 nt, Artificial Sequence
  Description of Artificial Sequence: Synthetic oligonucleotide
ugccaugucgaaauacagg

SEQ ID NO: 1893389 - RNA, 19 nt, Artificial Sequence
  Description of Artificial Sequence: Synthetic oligonucleotide
aguacauucggaccuuuag

SEQ ID NO: 1893390 - RNA, 19 nt, Artificial Sequence
  Description of Artificial Sequence: Synthetic oligonucleotide
ugucgaaauacagguaagg

SEQ ID NO: 1893391 - RNA, 19 nt, Artificial Sequence
  Description of Artificial Sequence: Synthetic oligonucleotide
aacccuacgaggguuacag

SEQ ID NO: 1893392 - RNA, 19 nt, Artificial Sequence
  Description of Artificial Sequence: Synthetic oligonucleotide
ucucgaaccaaucuucgaa

SEQ ID NO: 1893393 - RNA, 19 nt, Artificial Sequence
  Description of Artificial Sequence: Synthetic oligonucleotide
gaacucgacacgucgagug

SEQ ID NO: 1893394 - RNA, 19 nt, Artificial Sequence
  Description of Artificial Sequence: Synthetic oligonucleotide
augaagcuagcacacaaca

SEQ ID NO: 1893395 - RNA, 19 nt, Artificial Sequence
  Description of Artificial Sequence: Synthetic oligonucleotide
ucgaguguugugccaauag

SEQ ID NO: 1893396 - RNA, 19 nt, Artificial Sequence
  Description of Artificial Sequence: Synthetic oligonucleotide
cacguaguaaccugagagg

SEQ ID NO: 1893397 - RNA, 19 nt, Artificial Sequence
  Description of Artificial Sequence: Synthetic oligonucleotide
acucucgccaaguaacuuc

SEQ ID NO: 1893398 - RNA, 19 nt, Artificial Sequence
  Description of Artificial Sequence: Synthetic oligonucleotide
agacauugccaucaaugag

SEQ ID NO: 1893399 - RNA, 19 nt, Artificial Sequence
  Description of Artificial Sequence: Synthetic oligonucleotide
cuuucagcguacaacauga

SEQ ID NO: 1893400 - RNA, 19 nt, Artificial Sequence
  Description of Artificial Sequence: Synthetic oligonucleotide
ucugccuuacuccuuucgc

SEQ ID NO: 1893401 - RNA, 19 nt, Artificial Sequence
  Description of Artificial Sequence: Synthetic oligonucleotide
acauuugcuauuuccagau

SEQ ID NO: 1893402 - RNA, 19 nt, Artificial Sequence
  Description of Artificial Sequence: Synthetic oligonucleotide
cauucggaccuuuagccag

SEQ ID NO: 1893403 - RNA, 19 nt, Artificial Sequence
  Description of Artificial Sequence: Synthetic oligonucleotide
aagaugguucagguaugcc

SEQ ID NO: 1893404 - RNA, 19 nt, Artificial Sequence
  Description of Artificial Sequence: Synthetic oligonucleotide
aagcaaccccaaaaggggc

SEQ ID NO: 1893405 - RNA, 19 nt, Artificial Sequence
  Description of Artificial Sequence: Synthetic oligonucleotide
acugugcgcgaguacauuc

SEQ ID NO: 1893406 - RNA, 19 nt, Artificial Sequence
  Description of Artificial Sequence: Synthetic oligonucleotide
ugaagcuagcacacaacac

SEQ ID NO: 1893407 - RNA, 19 nt, Artificial Sequence
  Description of Artificial Sequence: Synthetic oligonucleotide
uccccuaaaacaguaagaa

SEQ ID NO: 1893408 - RNA, 19 nt, Artificial Sequence
  Description of Artificial Sequence: Synthetic oligonucleotide
guacauucggaccuuuagc

SEQ ID NO: 1893409 - RNA, 19 nt, Artificial Sequence
  Description of Artificial Sequence: Synthetic oligonucleotide
cacgaagaacaucuggacc

SEQ ID NO: 1893410 - RNA, 19 nt, Artificial Sequence
  Description of Artificial Sequence: Synthetic oligonucleotide
ugccuuacuccuuucgcag

SEQ ID NO: 1893411 - RNA, 19 nt, Artificial Sequence
  Description of Artificial Sequence: Synthetic oligonucleotide
gacgguauagcuccccggc

SEQ ID NO: 1893412 - RNA, 19 nt, Artificial Sequence
  Description of Artificial Sequence: Synthetic oligonucleotide
cuguuuagcugcaucugcc

SEQ ID NO: 1893413 - RNA, 19 nt, Artificial Sequence
  Description of Artificial Sequence: Synthetic oligonucleotide
gacacgucgaguguugugc

SEQ ID NO: 1893414 - RNA, 19 nt, Artificial Sequence
  Description of Artificial Sequence: Synthetic oligonucleotide
uggacguagccuccgaugu

SEQ ID NO: 1893415 - RNA, 19 nt, Artificial Sequence
  Description of Artificial Sequence: Synthetic oligonucleotide
gauguaagcggcguaggug

SEQ ID NO: 1893416 - RNA, 19 nt, Artificial Sequence
  Description of Artificial Sequence: Synthetic oligonucleotide
cgaaauacagguaaggcac

SEQ ID NO: 1893417 - RNA, 19 nt, Artificial Sequence
  Description of Artificial Sequence: Synthetic oligonucleotide
accagcgccguuucacucc

SEQ ID NO: 1893418 - RNA, 19 nt, Artificial Sequence
  Description of Artificial Sequence: Synthetic oligonucleotide
gaccccguaaagcacgaag

SEQ ID NO: 1893419 - RNA, 19 nt, Artificial Sequence
  Description of Artificial Sequence: Synthetic oligonucleotide
caugucgaaauacagguaa

SEQ ID NO: 1893420 - RNA, 19 nt, Artificial Sequence
  Description of Artificial Sequence: Synthetic oligonucleotide
cacaccuagucugaaaagc

SEQ ID NO: 1893421 - RNA, 19 nt, Artificial Sequence
  Description of Artificial Sequence: Synthetic oligonucleotide
aguguugugccaauaggag

SEQ ID NO: 1893422 - RNA, 19 nt, Artificial Sequence
  Description of Artificial Sequence: Synthetic oligonucleotide
gccaauaggagacauugcc

SEQ ID NO: 1893423 - RNA, 19 nt, Artificial Sequence
  Description of Artificial Sequence: Synthetic oligonucleotide
uguuuagcugcaucugcca

SEQ ID NO: 1893424 - RNA, 19 nt, Artificial Sequence
  Description of Artificial Sequence: Synthetic oligonucleotide
gugccaauaggagacauug

SEQ ID NO: 1893425 - RNA, 19 nt, Artificial Sequence
  Description of Artificial Sequence: Synthetic oligonucleotide
acacgucgaguguugugcc

SEQ ID NO: 1893426 - RNA, 19 nt, Artificial Sequence
  Description of Artificial Sequence: Synthetic oligonucleotide
gucgaaauacagguaaggc

SEQ ID NO: 1893427 - RNA, 19 nt, Artificial Sequence
  Description of Artificial Sequence: Synthetic oligonucleotide
ugcgcgaguacauucggac

SEQ ID NO: 1893428 - RNA, 19 nt, Artificial Sequence
  Description of Artificial Sequence: Synthetic oligonucleotide
aaccagcgccguuucacuc

SEQ ID NO: 1893429 - RNA, 19 nt, Artificial Sequence
  Description of Artificial Sequence: Synthetic oligonucleotide
ucgaaccaaucuucgaaga

SEQ ID NO: 1893430 - RNA, 19 nt, Artificial Sequence
  Description of Artificial Sequence: Synthetic oligonucleotide
uuugcuauuuccagaucuu

SEQ ID NO: 1893431 - RNA, 19 nt, Artificial Sequence
  Description of Artificial Sequence: Synthetic oligonucleotide
cacaaaugagguagaugcc

SEQ ID NO: 1893432 - RNA, 19 nt, Artificial Sequence
  Description of Artificial Sequence: Synthetic oligonucleotide
guuuagcugcaucugccag

SEQ ID NO: 1893433 - RNA, 19 nt, Artificial Sequence
  Description of Artificial Sequence: Synthetic oligonucleotide
cuacgaggguuacagcacg

SEQ ID NO: 1893434 - RNA, 19 nt, Artificial Sequence
  Description of Artificial Sequence: Synthetic oligonucleotide
uggccaguggacugcagag

SEQ ID NO: 1893435 - RNA, 19 nt, Artificial Sequence
  Description of Artificial Sequence: Synthetic oligonucleotide
aacggcuucgggguuuccg

SEQ ID NO: 1893436 - RNA, 19 nt, Artificial Sequence
  Description of Artificial Sequence: Synthetic oligonucleotide
cacuccuaauaccugcacc

SEQ ID NO: 1893437 - RNA, 19 nt, Artificial Sequence
  Description of Artificial Sequence: Synthetic oligonucleotide
acguaguaaccugagagga

SEQ ID NO: 1893438 - RNA, 19 nt, Artificial Sequence
  Description of Artificial Sequence: Synthetic oligonucleotide
acacaccuagucugaaaag

SEQ ID NO: 1893439 - RNA, 19 nt, Artificial Sequence
  Description of Artificial Sequence: Synthetic oligonucleotide
acugcagagaacggcuucg

SEQ ID NO: 1893440 - RNA, 19 nt, Artificial Sequence
  Description of Artificial Sequence: Synthetic oligonucleotide
caggaccccguaaagcacg

SEQ ID NO: 1893441 - RNA, 19 nt, Artificial Sequence
  Description of Artificial Sequence: Synthetic oligonucleotide
aacucgacacgucgagugu

SEQ ID NO: 1893442 - RNA, 19 nt, Artificial Sequence
  Description of Artificial Sequence: Synthetic oligonucleotide
gaagaugguucagguaugc

SEQ ID NO: 1893443 - RNA, 19 nt, Artificial Sequence
  Description of Artificial Sequence: Synthetic oligonucleotide
cugugcgcgaguacauucg

SEQ ID NO: 1893444 - RNA, 19 nt, Artificial Sequence
  Description of Artificial Sequence: Synthetic oligonucleotide
uuucagcguacaacaugag

SEQ ID NO: 1893445 - RNA, 19 nt, Artificial Sequence
  Description of Artificial Sequence: Synthetic oligonucleotide
aauggacguagccuccgau

SEQ ID NO: 1893446 - RNA, 19 nt, Artificial Sequence
  Description of Artificial Sequence: Synthetic oligonucleotide
auggacguagccuccgaug

SEQ ID NO: 1893447 - RNA, 19 nt, Artificial Sequence
  Description of Artificial Sequence: Synthetic oligonucleotide
acauucggaccuuuagcca

SEQ ID NO: 1893448 - RNA, 19 nt, Artificial Sequence
  Description of Artificial Sequence: Synthetic oligonucleotide
ugggaugucgggcuuccga

SEQ ID NO: 1893449 - RNA, 19 nt, Artificial Sequence
  Description of Artificial Sequence: Synthetic oligonucleotide
agaagacaacaacaacccu

SEQ ID NO: 1893450 - RNA, 19 nt, Artificial Sequence
  Description of Artificial Sequence: Synthetic oligonucleotide
gcauccagcgucucgaacc

SEQ ID NO: 1893451 - RNA, 19 nt, Artificial Sequence
  Description of Artificial Sequence: Synthetic oligonucleotide
guagccaagaugacagcag

SEQ ID NO: 1893452 - RNA, 19 nt, Artificial Sequence
  Description of Artificial Sequence: Synthetic oligonucleotide
guaaccugagaggaaggcc

SEQ ID NO: 1893453 - RNA, 19 nt, Artificial Sequence
  Description of Artificial Sequence: Synthetic oligonucleotide
caccuagucugaaaagcac

SEQ ID NO: 1893454 - RNA, 19 nt, Artificial Sequence
  Description of Artificial Sequence: Synthetic oligonucleotide
caaaugagguagaugccca

SEQ ID NO: 1893455 - RNA, 19 nt, Artificial Sequence
  Description of Artificial Sequence: Synthetic oligonucleotide
ccguaaagcacgaagaaca

SEQ ID NO: 1893456 - RNA, 19 nt, Artificial Sequence
  Description of Artificial Sequence: Synthetic oligonucleotide
cacuccgaaggacaugaag

SEQ ID NO: 1893457 - RNA, 19 nt, Artificial Sequence
  Description of Artificial Sequence: Synthetic oligonucleotide
agcguacaacaugagcugg

SEQ ID NO: 1893458 - RNA, 19 nt, Artificial Sequence
  Description of Artificial Sequence: Synthetic oligonucleotide
cagcguacaacaugagcug

SEQ ID NO: 1893459 - RNA, 19 nt, Artificial Sequence
  Description of Artificial Sequence: Synthetic oligonucleotide
cagaacucgacacgucgag

SEQ ID NO: 1893460 - RNA, 19 nt, Artificial Sequence
  Description of Artificial Sequence: Synthetic oligonucleotide
agggucacguaguaaccug

SEQ ID NO: 1893461 - RNA, 19 nt, Artificial Sequence
  Description of Artificial Sequence: Synthetic oligonucleotide
ugcagaacucagccaucag

SEQ ID NO: 1893462 - RNA, 19 nt, Artificial Sequence
  Description of Artificial Sequence: Synthetic oligonucleotide
caaaccagcgccguuucac

SEQ ID NO: 1893463 - RNA, 19 nt, Artificial Sequence
  Description of Artificial Sequence: Synthetic oligonucleotide
guaauggacguagccuccg

SEQ ID NO: 1893464 - RNA, 19 nt, Artificial Sequence
  Description of Artificial Sequence: Synthetic oligonucleotide
cccaacgcaaaccagcgcc

SEQ ID NO: 1893465 - RNA, 19 nt, Artificial Sequence
  Description of Artificial Sequence: Synthetic oligonucleotide
cuuccgacgcgccucggcc

SEQ ID NO: 1893466 - RNA, 19 nt, Artificial Sequence
  Description of Artificial Sequence: Synthetic oligonucleotide
agcgucucgaaccaaucuu

SEQ ID NO: 1893467 - RNA, 19 nt, Artificial Sequence
  Description of Artificial Sequence: Synthetic oligonucleotide
uccuuucgcagggacuccg

SEQ ID NO: 1893468 - RNA, 19 nt, Artificial Sequence
  Description of Artificial Sequence: Synthetic oligonucleotide
cacacaccuagucugaaaa

SEQ ID NO: 1893469 - RNA, 19 nt, Artificial Sequence
  Description of Artificial Sequence: Synthetic oligonucleotide
agacaacaacaacccuacg

SEQ ID NO: 1893470 - RNA, 19 nt, Artificial Sequence
  Description of Artificial Sequence: Synthetic oligonucleotide
uaauggacguagccuccga

SEQ ID NO: 1893471 - RNA, 19 nt, Artificial Sequence
  Description of Artificial Sequence: Synthetic oligonucleotide
acgagggcuuccaucuucc

SEQ ID NO: 1893472 - RNA, 19 nt, Artificial Sequence
  Description of Artificial Sequence: Synthetic oligonucleotide
gccagggucacguaguaac

SEQ ID NO: 1893473 - RNA, 19 nt, Artificial Sequence
  Description of Artificial Sequence: Synthetic oligonucleotide
agcuagcacacaacacagc

SEQ ID NO: 1893474 - RNA, 19 nt, Artificial Sequence
  Description of Artificial Sequence: Synthetic oligonucleotide
accuagucugaaaagcacu

SEQ ID NO: 1893475 - RNA, 19 nt, Artificial Sequence
  Description of Artificial Sequence: Synthetic oligonucleotide
cuuucgcagggacuccgcc

SEQ ID NO: 1893476 - RNA, 19 nt, Artificial Sequence
  Description of Artificial Sequence: Synthetic oligonucleotide
guccccguaauggacguag

SEQ ID NO: 1893477 - RNA, 19 nt, Artificial Sequence
  Description of Artificial Sequence: Synthetic oligonucleotide
cuucgaagacaucuuggga

SEQ ID NO: 1893478 - RNA, 19 nt, Artificial Sequence
  Description of Artificial Sequence: Synthetic oligonucleotide
uugcuauuuccagaucuuc

SEQ ID NO: 1893479 - RNA, 19 nt, Artificial Sequence
  Description of Artificial Sequence: Synthetic oligonucleotide
caauaggagacauugccau

SEQ ID NO: 1893480 - RNA, 19 nt, Artificial Sequence
  Description of Artificial Sequence: Synthetic oligonucleotide
cuagcuggagcgcggcgcc

SEQ ID NO: 1893481 - RNA, 19 nt, Artificial Sequence
  Description of Artificial Sequence: Synthetic oligonucleotide
cuccccuaaaacaguaaga

SEQ ID NO: 1893482 - RNA, 19 nt, Artificial Sequence
  Description of Artificial Sequence: Synthetic oligonucleotide
augucgaaauacagguaag

SEQ ID NO: 1893483 - RNA, 19 nt, Artificial Sequence
  Description of Artificial Sequence: Synthetic oligonucleotide
gcggcguaggugcuaaugg

SEQ ID NO: 1893484 - RNA, 19 nt, Artificial Sequence
  Description of Artificial Sequence: Synthetic oligonucleotide
ugugccaauaggagacauu

SEQ ID NO: 1893485 - RNA, 19 nt, Artificial Sequence
  Description of Artificial Sequence: Synthetic oligonucleotide
acccuacgaggguuacagc

SEQ ID NO: 1893486 - RNA, 19 nt, Artificial Sequence
  Description of Artificial Sequence: Synthetic oligonucleotide
guuuccgacgguauagcuc

SEQ ID NO: 1893487 - RNA, 19 nt, Artificial Sequence
  Description of Artificial Sequence: Synthetic oligonucleotide
uguaagcggcguaggugcu

SEQ ID NO: 1893488 - RNA, 19 nt, Artificial Sequence
  Description of Artificial Sequence: Synthetic oligonucleotide
guaggugcuaauggcuagc

SEQ ID NO: 1893489 - RNA, 19 nt, Artificial Sequence
  Description of Artificial Sequence: Synthetic oligonucleotide
cucgacacgucgaguguug

SEQ ID NO: 1893490 - RNA, 19 nt, Artificial Sequence
  Description of Artificial Sequence: Synthetic oligonucleotide
ccuuacuccuuucgcaggg

SEQ ID NO: 1893491 - RNA, 19 nt, Artificial Sequence
  Description of Artificial Sequence: Synthetic oligonucleotide
cugccuuacuccuuucgca

SEQ ID NO: 1893492 - RNA, 19 nt, Artificial Sequence
  Description of Artificial Sequence: Synthetic oligonucleotide
agccggucuuccuugcugu

SEQ ID NO: 1893493 - RNA, 19 nt, Artificial Sequence
  Description of Artificial Sequence: Synthetic oligonucleotide
accccguaaagcacgaaga

SEQ ID NO: 1893494 - RNA, 19 nt, Artificial Sequence
  Description of Artificial Sequence: Synthetic oligonucleotide
agguaugccagccggucuu

SEQ ID NO: 1893495 - RNA, 19 nt, Artificial Sequence
  Description of Artificial Sequence: Synthetic oligonucleotide
aggugcuaauggcuagcug

SEQ ID NO: 1893496 - RNA, 19 nt, Artificial Sequence
  Description of Artificial Sequence: Synthetic oligonucleotide
uaggugcuaauggcuagcu

SEQ ID NO: 1893497 - RNA, 19 nt, Artificial Sequence
  Description of Artificial Sequence: Synthetic oligonucleotide
ccuccccuaaaacaguaag

SEQ ID NO: 1893498 - RNA, 19 nt, Artificial Sequence
  Description of Artificial Sequence: Synthetic oligonucleotide
gcccuuucagcguacaaca

SEQ ID NO: 1893499 - RNA, 19 nt, Artificial Sequence
  Description of Artificial Sequence: Synthetic oligonucleotide
accccaaaaggggcagcgc

SEQ ID NO: 1893500 - RNA, 19 nt, Artificial Sequence
  Description of Artificial Sequence: Synthetic oligonucleotide
aacgcaaaccagcgccguu

SEQ ID NO: 1893501 - RNA, 19 nt, Artificial Sequence
  Description of Artificial Sequence: Synthetic oligonucleotide
ccguaauggacguagccuc

SEQ ID NO: 1893502 - RNA, 19 nt, Artificial Sequence
  Description of Artificial Sequence: Synthetic oligonucleotide
cagagaacggcuucggggu

SEQ ID NO: 1893503 - RNA, 19 nt, Artificial Sequence
  Description of Artificial Sequence: Synthetic oligonucleotide
uaagcggcguaggugcuaa

SEQ ID NO: 1893504 - RNA, 19 nt, Artificial Sequence
  Description of Artificial Sequence: Synthetic oligonucleotide
ccccaaaaggggcagcgcg

SEQ ID NO: 1893505 - RNA, 19 nt, Artificial Sequence
  Description of Artificial Sequence: Synthetic oligonucleotide
gguauagcuccccggcccc

SEQ ID NO: 1893506 - RNA, 19 nt, Artificial Sequence
  Description of Artificial Sequence: Synthetic oligonucleotide
uccccguaauggacguagc

SEQ ID NO: 1893507 - RNA, 19 nt, Artificial Sequence
  Description of Artificial Sequence: Synthetic oligonucleotide
auggcaacugugcgcgagu

SEQ ID NO: 1893508 - RNA, 19 nt, Artificial Sequence
  Description of Artificial Sequence: Synthetic oligonucleotide
acgaggguuacagcacgag

SEQ ID NO: 1893509 - RNA, 19 nt, Artificial Sequence
  Description of Artificial Sequence: Synthetic oligonucleotide
gggguuuccgacgguauag

SEQ ID NO: 1893510 - RNA, 19 nt, Artificial Sequence
  Description of Artificial Sequence: Synthetic oligonucleotide
augucgggcuuccgacgcg

SEQ ID NO: 1893511 - RNA, 19 nt, Artificial Sequence
  Description of Artificial Sequence: Synthetic oligonucleotide
ccccuaaaacaguaagaag

SEQ ID NO: 1893512 - RNA, 19 nt, Artificial Sequence
  Description of Artificial Sequence: Synthetic oligonucleotide
caccgaacccagcugcaug

SEQ ID NO: 1893513 - RNA, 19 nt, Artificial Sequence
  Description of Artificial Sequence: Synthetic oligonucleotide
accuuuagccaguccccgu

SEQ ID NO: 1893514 - RNA, 19 nt, Artificial Sequence
  Description of Artificial Sequence: Synthetic oligonucleotide
ccuacgaggguuacagcac

SEQ ID NO: 1893515 - RNA, 19 nt, Artificial Sequence
  Description of Artificial Sequence: Synthetic oligonucleotide
agccuccgauguaagcggc

SEQ ID NO: 1893516 - RNA, 19 nt, Artificial Sequence
  Description of Artificial Sequence: Synthetic oligonucleotide
agcggcguaggugcuaaug

SEQ ID NO: 1893517 - RNA, 19 nt, Artificial Sequence
  Description of Artificial Sequence: Synthetic oligonucleotide
ucggaccuuuagccagucc

SEQ ID NO: 1893518 - RNA, 19 nt, Artificial Sequence
  Description of Artificial Sequence: Synthetic oligonucleotide
cagcgaguaggccacacaa

SEQ ID NO: 1893519 - RNA, 19 nt, Artificial Sequence
  Description of Artificial Sequence: Synthetic oligonucleotide
agaacucgacacgucgagu

SEQ ID NO: 1893520 - RNA, 19 nt, Artificial Sequence
  Description of Artificial Sequence: Synthetic oligonucleotide
gucacguaguaaccugaga

SEQ ID NO: 1893521 - RNA, 19 nt, Artificial Sequence
  Description of Artificial Sequence: Synthetic oligonucleotide
agaacggcuucgggguuuc

SEQ ID NO: 1893522 - RNA, 19 nt, Artificial Sequence
  Description of Artificial Sequence: Synthetic oligonucleotide
ccaacgcaaaccagcgccg

SEQ ID NO: 1893523 - RNA, 19 nt, Artificial Sequence
  Description of Artificial Sequence: Synthetic oligonucleotide
uccgaaggacaugaagcua

SEQ ID NO: 1893524 - RNA, 19 nt, Artificial Sequence
  Description of Artificial Sequence: Synthetic oligonucleotide
gucucgaaccaaucuucga

SEQ ID NO: 1893525 - RNA, 19 nt, Artificial Sequence
  Description of Artificial Sequence: Synthetic oligonucleotide
ugucgggcuuccgacgcgc

SEQ ID NO: 1893526 - RNA, 19 nt, Artificial Sequence
  Description of Artificial Sequence: Synthetic oligonucleotide
aacaacccuacgaggguua

SEQ ID NO: 1893527 - RNA, 19 nt, Artificial Sequence
  Description of Artificial Sequence: Synthetic oligonucleotide
ucgggguuuccgacgguau

SEQ ID NO: 1893528 - RNA, 19 nt, Artificial Sequence
  Description of Artificial Sequence: Synthetic oligonucleotide
uugugccaauaggagacau

SEQ ID NO: 1893529 - RNA, 19 nt, Artificial Sequence
  Description of Artificial Sequence: Synthetic oligonucleotide
agcaaccccaaaaggggca

SEQ ID NO: 1893530 - RNA, 19 nt, Artificial Sequence
  Description of Artificial Sequence: Synthetic oligonucleotide
cauccagcgucucgaacca

SEQ ID NO: 1893531 - RNA, 19 nt, Artificial Sequence
  Description of Artificial Sequence: Synthetic oligonucleotide
uccgacgcgccucggcccu

SEQ ID NO: 1893532 - RNA, 19 nt, Artificial Sequence
  Description of Artificial Sequence: Synthetic oligonucleotide
cccuacgaggguuacagca

SEQ ID NO: 1893533 - RNA, 19 nt, Artificial Sequence
  Description of Artificial Sequence: Synthetic oligonucleotide
uccgacgguauagcucccc

SEQ ID NO: 1893534 - RNA, 19 nt, Artificial Sequence
  Description of Artificial Sequence: Synthetic oligonucleotide
ggaagaugguucagguaug

SEQ ID NO: 1893535 - RNA, 19 nt, Artificial Sequence
  Description of Artificial Sequence: Synthetic oligonucleotide
gugcuaauggcuagcugga

SEQ ID NO: 1893536 - RNA, 19 nt, Artificial Sequence
  Description of Artificial Sequence: Synthetic oligonucleotide
agcgccguuucacuccgaa

SEQ ID NO: 1893537 - RNA, 19 nt, Artificial Sequence
  Description of Artificial Sequence: Synthetic oligonucleotide
gacuccgcccucccuggac

SEQ ID NO: 1893538 - RNA, 19 nt, Artificial Sequence
  Description of Artificial Sequence: Synthetic oligonucleotide
uucgggguuuccgacggua

SEQ ID NO: 1893539 - RNA, 19 nt, Artificial Sequence
  Description of Artificial Sequence: Synthetic oligonucleotide
agccaagaugacagcagcu

SEQ ID NO: 1893540 - RNA, 19 nt, Artificial Sequence
  Description of Artificial Sequence: Synthetic oligonucleotide
aacugugcgcgaguacauu

SEQ ID NO: 1893541 - RNA, 19 nt, Artificial Sequence
  Description of Artificial Sequence: Synthetic oligonucleotide
ggucacguaguaaccugag

SEQ ID NO: 1893542 - RNA, 19 nt, Artificial Sequence
  Description of Artificial Sequence: Synthetic oligonucleotide
acacucucgccaaguaacu

SEQ ID NO: 1893543 - RNA, 19 nt, Artificial Sequence
  Description of Artificial Sequence: Synthetic oligonucleotide
caacaugagcuggcugaag

SEQ ID NO: 1893544 - RNA, 19 nt, Artificial Sequence
  Description of Artificial Sequence: Synthetic oligonucleotide
accaaucuucgaagacauc

SEQ ID NO: 1893545 - RNA, 19 nt, Artificial Sequence
  Description of Artificial Sequence: Synthetic oligonucleotide
ucgggcuuccgacgcgccu

SEQ ID NO: 1893546 - RNA, 19 nt, Artificial Sequence
  Description of Artificial Sequence: Synthetic oligonucleotide
cgucucgaaccaaucuucg

SEQ ID NO: 1893547 - RNA, 19 nt, Artificial Sequence
  Description of Artificial Sequence: Synthetic oligonucleotide
ccaaaucagccucucccug

SEQ ID NO: 1893548 - RNA, 19 nt, Artificial Sequence
  Description of Artificial Sequence: Synthetic oligonucleotide
gggacuccgcccucccugg

SEQ ID NO: 1893549 - RNA, 19 nt, Artificial Sequence
  Description of Artificial Sequence: Synthetic oligonucleotide
acgucgaguguugugccaa

SEQ ID NO: 1893550 - RNA, 19 nt, Artificial Sequence
  Description of Artificial Sequence: Synthetic oligonucleotide
gcagaacucagccaucagu

SEQ ID NO: 1893551 - RNA, 19 nt, Artificial Sequence
  Description of Artificial Sequence: Synthetic oligonucleotide
ucgacacgucgaguguugu

SEQ ID NO: 1893552 - RNA, 19 nt, Artificial Sequence
  Description of Artificial Sequence: Synthetic oligonucleotide
ucacuccgaaggacaugaa

SEQ ID NO: 1893553 - RNA, 19 nt, Artificial Sequence
  Description of Artificial Sequence: Synthetic oligonucleotide
gcgcgaguacauucggacc

SEQ ID NO: 1893554 - RNA, 19 nt, Artificial Sequence
  Description of Artificial Sequence: Synthetic oligonucleotide
cgaggguuacagcacgagg

SEQ ID NO: 1893555 - RNA, 19 nt, Artificial Sequence
  Description of Artificial Sequence: Synthetic oligonucleotide
ugcagcgaguaggccacac

SEQ ID NO: 1893556 - RNA, 19 nt, Artificial Sequence
  Description of Artificial Sequence: Synthetic oligonucleotide
agagaacggcuucgggguu

SEQ ID NO: 1893557 - RNA, 19 nt, Artificial Sequence
  Description of Artificial Sequence: Synthetic oligonucleotide
cgaaccaaucuucgaagac

SEQ ID NO: 1893558 - RNA, 19 nt, Artificial Sequence
  Description of Artificial Sequence: Synthetic oligonucleotide
ugauggcaacugugcgcga

SEQ ID NO: 1893559 - RNA, 19 nt, Artificial Sequence
  Description of Artificial Sequence: Synthetic oligonucleotide
cuuuagccaguccccguaa

SEQ ID NO: 1893560 - RNA, 19 nt, Artificial Sequence
  Description of Artificial Sequence: Synthetic oligonucleotide
acgcaaaccagcgccguuu

SEQ ID NO: 1893561 - RNA, 19 nt, Artificial Sequence
  Description of Artificial Sequence: Synthetic oligonucleotide
cccguaaagcacgaagaac

SEQ ID NO: 1893562 - RNA, 19 nt, Artificial Sequence
  Description of Artificial Sequence: Synthetic oligonucleotide
acucgacacgucgaguguu

SEQ ID NO: 1893563 - RNA, 19 nt, Artificial Sequence
  Description of Artificial Sequence: Synthetic oligonucleotide
caaguaacuucaucugguu

SEQ ID NO: 1893564 - RNA, 19 nt, Artificial Sequence
  Description of Artificial Sequence: Synthetic oligonucleotide
ccccguaauggacguagcc

SEQ ID NO: 1893565 - RNA, 19 nt, Artificial Sequence
  Description of Artificial Sequence: Synthetic oligonucleotide
auagcuccccggccccacu

SEQ ID NO: 1893566 - RNA, 19 nt, Artificial Sequence
  Description of Artificial Sequence: Synthetic oligonucleotide
agguuccaaaaggaauuuu

SEQ ID NO: 1893567 - RNA, 19 nt, Artificial Sequence
  Description of Artificial Sequence: Synthetic oligonucleotide
cgcccaacgcaaaccagcg

SEQ ID NO: 1893568 - RNA, 19 nt, Artificial Sequence
  Description of Artificial Sequence: Synthetic oligonucleotide
ccgacgguauagcuccccg

SEQ ID NO: 1893569 - RNA, 19 nt, Artificial Sequence
  Description of Artificial Sequence: Synthetic oligonucleotide
gcgaguaggccacacaaau

SEQ ID NO: 1893570 - RNA, 19 nt, Artificial Sequence
  Description of Artificial Sequence: Synthetic oligonucleotide
gcgcccaacgcaaaccagc

SEQ ID NO: 1893571 - RNA, 19 nt, Artificial Sequence
  Description of Artificial Sequence: Synthetic oligonucleotide
uggcaacugugcgcgagua

SEQ ID NO: 1893572 - RNA, 19 nt, Artificial Sequence
  Description of Artificial Sequence: Synthetic oligonucleotide
gccguuucacuccgaagga

SEQ ID NO: 1893573 - RNA, 19 nt, Artificial Sequence
  Description of Artificial Sequence: Synthetic oligonucleotide
cgaguaggccacacaaaug

SEQ ID NO: 1893574 - RNA, 19 nt, Artificial Sequence
  Description of Artificial Sequence: Synthetic oligonucleotide
caaaaggggcagcgcguga

SEQ ID NO: 1893575 - RNA, 19 nt, Artificial Sequence
  Description of Artificial Sequence: Synthetic oligonucleotide
ccagcgccguuucacuccg

SEQ ID NO: 1893576 - RNA, 19 nt, Artificial Sequence
  Description of Artificial Sequence: Synthetic oligonucleotide
cacgucgaguguugugcca

SEQ ID NO: 1893577 - RNA, 19 nt, Artificial Sequence
  Description of Artificial Sequence: Synthetic oligonucleotide
ggguuuccgacgguauagc

SEQ ID NO: 1893578 - RNA, 19 nt, Artificial Sequence
  Description of Artificial Sequence: Synthetic oligonucleotide
uucggaccuuuagccaguc

SEQ ID NO: 1893579 - RNA, 19 nt, Artificial Sequence
  Description of Artificial Sequence: Synthetic oligonucleotide
cuuacuccuuucgcaggga

SEQ ID NO: 1893580 - RNA, 19 nt, Artificial Sequence
  Description of Artificial Sequence: Synthetic oligonucleotide
gaguacauucggaccuuua

SEQ ID NO: 1893581 - RNA, 19 nt, Artificial Sequence
  Description of Artificial Sequence: Synthetic oligonucleotide
gcgucucgaaccaaucuuc

SEQ ID NO: 1893582 - RNA, 19 nt, Artificial Sequence
  Description of Artificial Sequence: Synthetic oligonucleotide
acguagccuccgauguaag

SEQ ID NO: 1893583 - RNA, 19 nt, Artificial Sequence
  Description of Artificial Sequence: Synthetic oligonucleotide
ggcaacugugcgcgaguac

SEQ ID NO: 1893584 - RNA, 19 nt, Artificial Sequence
  Description of Artificial Sequence: Synthetic oligonucleotide
ggggcagcgcgugagcagc

SEQ ID NO: 1893585 - RNA, 19 nt, Artificial Sequence
  Description of Artificial Sequence: Synthetic oligonucleotide
ccaaaaggggcagcgcgug

SEQ ID NO: 1893586 - RNA, 19 nt, Artificial Sequence
  Description of Artificial Sequence: Synthetic oligonucleotide
ccagaacucgacacgucga

SEQ ID NO: 1893587 - RNA, 19 nt, Artificial Sequence
  Description of Artificial Sequence: Synthetic oligonucleotide
gcuuccgacgcgccucggc

SEQ ID NO: 1893588 - RNA, 19 nt, Artificial Sequence
  Description of Artificial Sequence: Synthetic oligonucleotide
ccuuucgcagggacuccgc

SEQ ID NO: 1893589 - RNA, 19 nt, Artificial Sequence
  Description of Artificial Sequence: Synthetic oligonucleotide
gggcuuccgacgcgccucg

SEQ ID NO: 1893590 - RNA, 19 nt, Artificial Sequence
  Description of Artificial Sequence: Synthetic oligonucleotide
gguuuccgacgguauagcu

SEQ ID NO: 1893591 - RNA, 19 nt, Artificial Sequence
  Description of Artificial Sequence: Synthetic oligonucleotide
ccgauguaagcggcguagg

SEQ ID NO: 1893592 - RNA, 19 nt, Artificial Sequence
  Description of Artificial Sequence: Synthetic oligonucleotide
agcacacaacacagcugcu

SEQ ID NO: 1893593 - RNA, 19 nt, Artificial Sequence
  Description of Artificial Sequence: Synthetic oligonucleotide
cucggcccuuucagcguac

SEQ ID NO: 1893594 - RNA, 19 nt, Artificial Sequence
  Description of Artificial Sequence: Synthetic oligonucleotide
ccagcgucucgaaccaauc

SEQ ID NO: 1893595 - RNA, 19 nt, Artificial Sequence
  Description of Artificial Sequence: Synthetic oligonucleotide
ccacuccuaauaccugcac

SEQ ID NO: 1893596 - RNA, 19 nt, Artificial Sequence
  Description of Artificial Sequence: Synthetic oligonucleotide
cgacgguauagcuccccgg

SEQ ID NO: 1893597 - RNA, 19 nt, Artificial Sequence
  Description of Artificial Sequence: Synthetic oligonucleotide
gcgccguuucacuccgaag

SEQ ID NO: 1893598 - RNA, 19 nt, Artificial Sequence
  Description of Artificial Sequence: Synthetic oligonucleotide
aggaccccguaaagcacga

SEQ ID NO: 1893599 - RNA, 19 nt, Artificial Sequence
  Description of Artificial Sequence: Synthetic oligonucleotide
cagcgucucgaaccaaucu

SEQ ID NO: 1893600 - RNA, 19 nt, Artificial Sequence
  Description of Artificial Sequence: Synthetic oligonucleotide
aagcggcguaggugcuaau

SEQ ID NO: 1893601 - RNA, 19 nt, Artificial Sequence
  Description of Artificial Sequence: Synthetic oligonucleotide
gccuccgauguaagcggcg

SEQ ID NO: 1893602 - RNA, 19 nt, Artificial Sequence
  Description of Artificial Sequence: Synthetic oligonucleotide
acgcgccucggcccuuuca

SEQ ID NO: 1893603 - RNA, 19 nt, Artificial Sequence
  Description of Artificial Sequence: Synthetic oligonucleotide
agcgcgugagcagcaccga

SEQ ID NO: 1893604 - RNA, 19 nt, Artificial Sequence
  Description of Artificial Sequence: Synthetic oligonucleotide
gcagcgaguaggccacaca

SEQ ID NO: 1893605 - RNA, 19 nt, Artificial Sequence
  Description of Artificial Sequence: Synthetic oligonucleotide
ggcguaggugcuaauggcu

SEQ ID NO: 1893606 - RNA, 19 nt, Artificial Sequence
  Description of Artificial Sequence: Synthetic oligonucleotide
gcccaacgcaaaccagcgc

SEQ ID NO: 1893607 - RNA, 19 nt, Artificial Sequence
  Description of Artificial Sequence: Synthetic oligonucleotide
uagcuggagcgcggcgccc

SEQ ID NO: 1893608 - RNA, 19 nt, Artificial Sequence
  Description of Artificial Sequence: Synthetic oligonucleotide
cagcaccagaaagccacca

SEQ ID NO: 1893609 - RNA, 19 nt, Artificial Sequence
  Description of Artificial Sequence: Synthetic oligonucleotide
gugcgcgaguacauucgga

SEQ ID NO: 1893610 - RNA, 19 nt, Artificial Sequence
  Description of Artificial Sequence: Synthetic oligonucleotide
ccggucuuccuugcugugc

SEQ ID NO: 1893611 - RNA, 19 nt, Artificial Sequence
  Description of Artificial Sequence: Synthetic oligonucleotide
ggagcgcggcgcccaacgc

SEQ ID NO: 1893612 - RNA, 19 nt, Artificial Sequence
  Description of Artificial Sequence: Synthetic oligonucleotide
ccguuucacuccgaaggac

SEQ ID NO: 1893613 - RNA, 19 nt, Artificial Sequence
  Description of Artificial Sequence: Synthetic oligonucleotide
guauagcuccccggcccca

SEQ ID NO: 1893614 - RNA, 19 nt, Artificial Sequence
  Description of Artificial Sequence: Synthetic oligonucleotide
ggcgcccaacgcaaaccag

SEQ ID NO: 1893615 - RNA, 19 nt, Artificial Sequence
  Description of Artificial Sequence: Synthetic oligonucleotide
gucgaguguugugccaaua

SEQ ID NO: 1893616 - RNA, 19 nt, Artificial Sequence
  Description of Artificial Sequence: Synthetic oligonucleotide
guaagcggcguaggugcua

SEQ ID NO: 1893617 - RNA, 19 nt, Artificial Sequence
  Description of Artificial Sequence: Synthetic oligonucleotide
gguuacagcacgagggcuu

SEQ ID NO: 1893618 - RNA, 19 nt, Artificial Sequence
  Description of Artificial Sequence: Synthetic oligonucleotide
gcggcgcccaacgcaaacc

SEQ ID NO: 1893619 - RNA, 19 nt, Artificial Sequence
  Description of Artificial Sequence: Synthetic oligonucleotide
cgcgccucggcccuuucag

SEQ ID NO: 1893620 - RNA, 19 nt, Artificial Sequence
  Description of Artificial Sequence: Synthetic oligonucleotide
ccccguaaagcacgaagaa

SEQ ID NO: 1893621 - RNA, 19 nt, Artificial Sequence
  Description of Artificial Sequence: Synthetic oligonucleotide
gcaaaccagcgccguuuca

SEQ ID NO: 1893622 - RNA, 19 nt, Artificial Sequence
  Description of Artificial Sequence: Synthetic oligonucleotide
cccaaaucagccucucccu

SEQ ID NO: 1893623 - RNA, 19 nt, Artificial Sequence
  Description of Artificial Sequence: Synthetic oligonucleotide
caacccuacgaggguuaca

SEQ ID NO: 1893624 - RNA, 19 nt, Artificial Sequence
  Description of Artificial Sequence: Synthetic oligonucleotide
gguaugccagccggucuuc

SEQ ID NO: 1893625 - RNA, 19 nt, Artificial Sequence
  Description of Artificial Sequence: Synthetic oligonucleotide
caguccccguaauggacgu

SEQ ID NO: 1893626 - RNA, 19 nt, Artificial Sequence
  Description of Artificial Sequence: Synthetic oligonucleotide
gcguaggugcuaauggcua

SEQ ID NO: 1893627 - RNA, 19 nt, Artificial Sequence
  Description of Artificial Sequence: Synthetic oligonucleotide
cuccgauguaagcggcgua

SEQ ID NO: 1893628 - RNA, 19 nt, Artificial Sequence
  Description of Artificial Sequence: Synthetic oligonucleotide
gagaacggcuucgggguuu

SEQ ID NO: 1893629 - RNA, 19 nt, Artificial Sequence
  Description of Artificial Sequence: Synthetic oligonucleotide
gguaaggcacugggauguc

SEQ ID NO: 1893630 - RNA, 19 nt, Artificial Sequence
  Description of Artificial Sequence: Synthetic oligonucleotide
cgcgaguacauucggaccu

SEQ ID NO: 1893631 - RNA, 19 nt, Artificial Sequence
  Description of Artificial Sequence: Synthetic oligonucleotide
cccguaauggacguagccu

SEQ ID NO: 1893632 - RNA, 19 nt, Artificial Sequence
  Description of Artificial Sequence: Synthetic oligonucleotide
cagguuccaaaaggaauuu

SEQ ID NO: 1893633 - RNA, 19 nt, Artificial Sequence
  Description of Artificial Sequence: Synthetic oligonucleotide
ggacguagccuccgaugua

SEQ ID NO: 1893634 - RNA, 19 nt, Artificial Sequence
  Description of Artificial Sequence: Synthetic oligonucleotide
caacgcaaaccagcgccgu

SEQ ID NO: 1893635 - RNA, 19 nt, Artificial Sequence
  Description of Artificial Sequence: Synthetic oligonucleotide
gacgcgccucggcccuuuc

SEQ ID NO: 1893636 - RNA, 19 nt, Artificial Sequence
  Description of Artificial Sequence: Synthetic oligonucleotide
auccagcgucucgaaccaa

SEQ ID NO: 1893637 - RNA, 19 nt, Artificial Sequence
  Description of Artificial Sequence: Synthetic oligonucleotide
cgagggcuuccaucuuccc

SEQ ID NO: 1893638 - RNA, 19 nt, Artificial Sequence
  Description of Artificial Sequence: Synthetic oligonucleotide
cgcaaaccagcgccguuuc

SEQ ID NO: 1893639 - RNA, 19 nt, Artificial Sequence
  Description of Artificial Sequence: Synthetic oligonucleotide
aguccccguaauggacgua

SEQ ID NO: 1893640 - RNA, 19 nt, Artificial Sequence
  Description of Artificial Sequence: Synthetic oligonucleotide
cuggagcgcggcgcccaac

SEQ ID NO: 1893641 - RNA, 19 nt, Artificial Sequence
  Description of Artificial Sequence: Synthetic oligonucleotide
ccugugcccaaaucagccu

SEQ ID NO: 1893642 - RNA, 19 nt, Artificial Sequence
  Description of Artificial Sequence: Synthetic oligonucleotide
cccuccccuaaaacaguaa

SEQ ID NO: 1893643 - RNA, 19 nt, Artificial Sequence
  Description of Artificial Sequence: Synthetic oligonucleotide
gcgcgugagcagcaccgaa

SEQ ID NO: 1893644 - RNA, 19 nt, Artificial Sequence
  Description of Artificial Sequence: Synthetic oligonucleotide
cacucucgccaaguaacuu

SEQ ID NO: 1893645 - RNA, 19 nt, Artificial Sequence
  Description of Artificial Sequence: Synthetic oligonucleotide
gcccuccccuaaaacagua

SEQ ID NO: 1893646 - RNA, 19 nt, Artificial Sequence
  Description of Artificial Sequence: Synthetic oligonucleotide
ggcuuccgacgcgccucgg

SEQ ID NO: 1893647 - RNA, 19 nt, Artificial Sequence
  Description of Artificial Sequence: Synthetic oligonucleotide
cgauguaagcggcguaggu

SEQ ID NO: 1893648 - RNA, 19 nt, Artificial Sequence
  Description of Artificial Sequence: Synthetic oligonucleotide
gccucggcccuuucagcgu

SEQ ID NO: 1893649 - RNA, 19 nt, Artificial Sequence
  Description of Artificial Sequence: Synthetic oligonucleotide
cgcggcgcccaacgcaaac

SEQ ID NO: 1893650 - RNA, 19 nt, Artificial Sequence
  Description of Artificial Sequence: Synthetic oligonucleotide
cggcgcccaacgcaaacca

SEQ ID NO: 1893651 - RNA, 19 nt, Artificial Sequence
  Description of Artificial Sequence: Synthetic oligonucleotide
cuucgggguuuccgacggu

SEQ ID NO: 1893652 - RNA, 19 nt, Artificial Sequence
  Description of Artificial Sequence: Synthetic oligonucleotide
ccuccgauguaagcggcgu

SEQ ID NO: 1893653 - RNA, 19 nt, Artificial Sequence
  Description of Artificial Sequence: Synthetic oligonucleotide
cagcgccguuucacuccga

SEQ ID NO: 1893654 - RNA, 19 nt, Artificial Sequence
  Description of Artificial Sequence: Synthetic oligonucleotide
cugcagcgaguaggccaca

SEQ ID NO: 1893655 - RNA, 19 nt, Artificial Sequence
  Description of Artificial Sequence: Synthetic oligonucleotide
gcuggagcgcggcgcccaa

SEQ ID NO: 1893656 - RNA, 19 nt, Artificial Sequence
  Description of Artificial Sequence: Synthetic oligonucleotide
ggaccccguaaagcacgaa

SEQ ID NO: 1893657 - RNA, 19 nt, Artificial Sequence
  Description of Artificial Sequence: Synthetic oligonucleotide
gcaccccaccucugccuua

SEQ ID NO: 1893658 - RNA, 19 nt, Artificial Sequence
  Description of Artificial Sequence: Synthetic oligonucleotide
gcgaguacauucggaccuu

SEQ ID NO: 1893659 - RNA, 19 nt, Artificial Sequence
  Description of Artificial Sequence: Synthetic oligonucleotide
cgggguuuccgacgguaua

SEQ ID NO: 1893660 - RNA, 19 nt, Artificial Sequence
  Description of Artificial Sequence: Synthetic oligonucleotide
gcaccgaacccagcugcau

SEQ ID NO: 1893661 - RNA, 19 nt, Artificial Sequence
  Description of Artificial Sequence: Synthetic oligonucleotide
cgcccucccuggacacaug

SEQ ID NO: 1893662 - RNA, 19 nt, Artificial Sequence
  Description of Artificial Sequence: Synthetic oligonucleotide
cggcccuuucagcguacaa

SEQ ID NO: 1893663 - RNA, 19 nt, Artificial Sequence
  Description of Artificial Sequence: Synthetic oligonucleotide
cgucgaguguugugccaau

SEQ ID NO: 1893664 - RNA, 19 nt, Artificial Sequence
  Description of Artificial Sequence: Synthetic oligonucleotide
ccgcccucccuggacacau

SEQ ID NO: 1893665 - RNA, 19 nt, Artificial Sequence
  Description of Artificial Sequence: Synthetic oligonucleotide
ccgaacccagcugcaugau

SEQ ID NO: 1893666 - RNA, 19 nt, Artificial Sequence
  Description of Artificial Sequence: Synthetic oligonucleotide
cgaguacauucggaccuuu

SEQ ID NO: 1893667 - RNA, 19 nt, Artificial Sequence
  Description of Artificial Sequence: Synthetic oligonucleotide
agagucucaaaacaaaucc

SEQ ID NO: 1893668 - RNA, 19 nt, Artificial Sequence
  Description of Artificial Sequence: Synthetic oligonucleotide
aaaauagauacccacugug

SEQ ID NO: 1893669 - RNA, 19 nt, Artificial Sequence
  Description of Artificial Sequence: Synthetic oligonucleotide
ucaacaaauucauagagcu

SEQ ID NO: 1893670 - RNA, 19 nt, Artificial Sequence
  Description of Artificial Sequence: Synthetic oligonucleotide
aucaccacaauucugaaag

SEQ ID NO: 1893671 - RNA, 19 nt, Artificial Sequence
  Description of Artificial Sequence: Synthetic oligonucleotide
gacucaagaauucauaugc

SEQ ID NO: 1893672 - RNA, 19 nt, Artificial Sequence
  Description of Artificial Sequence: Synthetic oligonucleotide
gacacuauaugccagcggg

SEQ ID NO: 1893673 - RNA, 19 nt, Artificial Sequence
  Description of Artificial Sequence: Synthetic oligonucleotide
gaaaguuauccuuaggccc

SEQ ID NO: 1893674 - RNA, 19 nt, Artificial Sequence
  Description of Artificial Sequence: Synthetic oligonucleotide
aauccagugacauuugaca

SEQ ID NO: 1893675 - RNA, 19 nt, Artificial Sequence
  Description of Artificial Sequence: Synthetic oligonucleotide
guagcuaccagcaagaccc

SEQ ID NO: 1893676 - RNA, 19 nt, Artificial Sequence
  Description of Artificial Sequence: Synthetic oligonucleotide
aaaguuauccuuaggcccc

SEQ ID NO: 1893677 - RNA, 19 nt, Artificial Sequence
  Description of Artificial Sequence: Synthetic oligonucleotide
agcuuuguaucuccgaugc

SEQ ID NO: 1893678 - RNA, 19 nt, Artificial Sequence
  Description of Artificial Sequence: Synthetic oligonucleotide
caagaauucauaugcagcc

SEQ ID NO: 1893679 - RNA, 19 nt, Artificial Sequence
  Description of Artificial Sequence: Synthetic oligonucleotide
ugaaaguuauccuuaggcc

SEQ ID NO: 1893680 - RNA, 19 nt, Artificial Sequence
  Description of Artificial Sequence: Synthetic oligonucleotide
auugaguccauccucgagg

SEQ ID NO: 1893681 - RNA, 19 nt, Artificial Sequence
  Description of Artificial Sequence: Synthetic oligonucleotide
accaguagccacaagaucc

SEQ ID NO: 1893682 - RNA, 19 nt, Artificial Sequence
  Description of Artificial Sequence: Synthetic oligonucleotide
aauagauacccacuguggu

SEQ ID NO: 1893683 - RNA, 19 nt, Artificial Sequence
  Description of Artificial Sequence: Synthetic oligonucleotide
cugaaaguuauccuuaggc

SEQ ID NO: 1893684 - RNA, 19 nt, Artificial Sequence
  Description of Artificial Sequence: Synthetic oligonucleotide
aagggcauaggucaccagg

SEQ ID NO: 1893685 - RNA, 19 nt, Artificial Sequence
  Description of Artificial Sequence: Synthetic oligonucleotide
aaaacucucaacaaauuca

SEQ ID NO: 1893686 - RNA, 19 nt, Artificial Sequence
  Description of Artificial Sequence: Synthetic oligonucleotide
aggguaagcauccagagca

SEQ ID NO: 1893687 - RNA, 19 nt, Artificial Sequence
  Description of Artificial Sequence: Synthetic oligonucleotide
agguaagccaaaccuagcc

SEQ ID NO: 1893688 - RNA, 19 nt, Artificial Sequence
  Description of Artificial Sequence: Synthetic oligonucleotide
ucaagaaggagccaagggu

SEQ ID NO: 1893689 - RNA, 19 nt, Artificial Sequence
  Description of Artificial Sequence: Synthetic oligonucleotide
aagcgaaggagacucagag

SEQ ID NO: 1893690 - RNA, 19 nt, Artificial Sequence
  Description of Artificial Sequence: Synthetic oligonucleotide
gauccggcaaggcagaagg

SEQ ID NO: 1893691 - RNA, 19 nt, Artificial Sequence
  Description of Artificial Sequence: Synthetic oligonucleotide
aaauagauacccacugugg

SEQ ID NO: 1893692 - RNA, 19 nt, Artificial Sequence
  Description of Artificial Sequence: Synthetic oligonucleotide
aaggguuuccgccacguag

SEQ ID NO: 1893693 - RNA, 19 nt, Artificial Sequence
  Description of Artificial Sequence: Synthetic oligonucleotide
ucauaugcagccuggaucu

SEQ ID NO: 1893694 - RNA, 19 nt, Artificial Sequence
  Description of Artificial Sequence: Synthetic oligonucleotide
aguagcuaccagcaagacc

SEQ ID NO: 1893695 - RNA, 19 nt, Artificial Sequence
  Description of Artificial Sequence: Synthetic oligonucleotide
guaagccaaaccuagccgg

SEQ ID NO: 1893696 - RNA, 19 nt, Artificial Sequence
  Description of Artificial Sequence: Synthetic oligonucleotide
ucuggaaggcccaaaaccu

SEQ ID NO: 1893697 - RNA, 19 nt, Artificial Sequence
  Description of Artificial Sequence: Synthetic oligonucleotide
aaucucaagguccucugug

SEQ ID NO: 1893698 - RNA, 19 nt, Artificial Sequence
  Description of Artificial Sequence: Synthetic oligonucleotide
uucauaugcagccuggauc

SEQ ID NO: 1893699 - RNA, 19 nt, Artificial Sequence
  Description of Artificial Sequence: Synthetic oligonucleotide
gacauuugacauugaaugc

SEQ ID NO: 1893700 - RNA, 19 nt, Artificial Sequence
  Description of Artificial Sequence: Synthetic oligonucleotide
aggauccccaaccaguagc

SEQ ID NO: 1893701 - RNA, 19 nt, Artificial Sequence
  Description of Artificial Sequence: Synthetic oligonucleotide
agcgacaaagccugggagc

SEQ ID NO: 1893702 - RNA, 19 nt, Artificial Sequence
  Description of Artificial Sequence: Synthetic oligonucleotide
auagauacccacugugguc

SEQ ID NO: 1893703 - RNA, 19 nt, Artificial Sequence
  Description of Artificial Sequence: Synthetic oligonucleotide
ucugaaaguuauccuuagg

SEQ ID NO: 1893704 - RNA, 19 nt, Artificial Sequence
  Description of Artificial Sequence: Synthetic oligonucleotide
ugaucagagccacaagacc

SEQ ID NO: 1893705 - RNA, 19 nt, Artificial Sequence
  Description of Artificial Sequence: Synthetic oligonucleotide
ucugguugccaacaguagc

SEQ ID NO: 1893706 - RNA, 19 nt, Artificial Sequence
  Description of Artificial Sequence: Synthetic oligonucleotide
uuacuucucaccuccaaga

SEQ ID NO: 1893707 - RNA, 19 nt, Artificial Sequence
  Description of Artificial Sequence: Synthetic oligonucleotide
agccacaagaccaaaauag

SEQ ID NO: 1893708 - RNA, 19 nt, Artificial Sequence
  Description of Artificial Sequence: Synthetic oligonucleotide
agggcaagagucucaaaac

SEQ ID NO: 1893709 - RNA, 19 nt, Artificial Sequence
  Description of Artificial Sequence: Synthetic oligonucleotide
guuggcuugagcgacaaag

SEQ ID NO: 1893710 - RNA, 19 nt, Artificial Sequence
  Description of Artificial Sequence: Synthetic oligonucleotide
agaccccuaagccaacugc

SEQ ID NO: 1893711 - RNA, 19 nt, Artificial Sequence
  Description of Artificial Sequence: Synthetic oligonucleotide
uauccuuaggccccucagg

SEQ ID NO: 1893712 - RNA, 19 nt, Artificial Sequence
  Description of Artificial Sequence: Synthetic oligonucleotide
agaacucccacagccagcc

SEQ ID NO: 1893713 - RNA, 19 nt, Artificial Sequence
  Description of Artificial Sequence: Synthetic oligonucleotide
cuuuggucauccucuaggg

SEQ ID NO: 1893714 - RNA, 19 nt, Artificial Sequence
  Description of Artificial Sequence: Synthetic oligonucleotide
aaucgucucagacucugcu

SEQ ID NO: 1893715 - RNA, 19 nt, Artificial Sequence
  Description of Artificial Sequence: Synthetic oligonucleotide
augcagaaucucaaggucc

SEQ ID NO: 1893716 - RNA, 19 nt, Artificial Sequence
  Description of Artificial Sequence: Synthetic oligonucleotide
ugacucaagaauucauaug

SEQ ID NO: 1893717 - RNA, 19 nt, Artificial Sequence
  Description of Artificial Sequence: Synthetic oligonucleotide
uccuggaacugucuacugg

SEQ ID NO: 1893718 - RNA, 19 nt, Artificial Sequence
  Description of Artificial Sequence: Synthetic oligonucleotide
aagcugaaccaacucaaga

SEQ ID NO: 1893719 - RNA, 19 nt, Artificial Sequence
  Description of Artificial Sequence: Synthetic oligonucleotide
agaaucaccacaauucuga

SEQ ID NO: 1893720 - RNA, 19 nt, Artificial Sequence
  Description of Artificial Sequence: Synthetic oligonucleotide
uuauccuuaggccccucag

SEQ ID NO: 1893721 - RNA, 19 nt, Artificial Sequence
  Description of Artificial Sequence: Synthetic oligonucleotide
acaagauccggcaaggcag

SEQ ID NO: 1893722 - RNA, 19 nt, Artificial Sequence
  Description of Artificial Sequence: Synthetic oligonucleotide
cucaagaaggagccaaggg

SEQ ID NO: 1893723 - RNA, 19 nt, Artificial Sequence
  Description of Artificial Sequence: Synthetic oligonucleotide
ugucuacuggugaagccag

SEQ ID NO: 1893724 - RNA, 19 nt, Artificial Sequence
  Description of Artificial Sequence: Synthetic oligonucleotide
uuuguaucuccgaugcuuc

SEQ ID NO: 1893725 - RNA, 19 nt, Artificial Sequence
  Description of Artificial Sequence: Synthetic oligonucleotide
agauacaggugguggaguc

SEQ ID NO: 1893726 - RNA, 19 nt, Artificial Sequence
  Description of Artificial Sequence: Synthetic oligonucleotide
cuaggguaagcauccagag

SEQ ID NO: 1893727 - RNA, 19 nt, Artificial Sequence
  Description of Artificial Sequence: Synthetic oligonucleotide
uucugaaaguuauccuuag

SEQ ID NO: 1893728 - RNA, 19 nt, Artificial Sequence
  Description of Artificial Sequence: Synthetic oligonucleotide
uccgccacguagcucaggg

SEQ ID NO: 1893729 - RNA, 19 nt, Artificial Sequence
  Description of Artificial Sequence: Synthetic oligonucleotide
ucgucucagacucugcuga

SEQ ID NO: 1893730 - RNA, 19 nt, Artificial Sequence
  Description of Artificial Sequence: Synthetic oligonucleotide
aacacaggggacaugagaa

SEQ ID NO: 1893731 - RNA, 19 nt, Artificial Sequence
  Description of Artificial Sequence: Synthetic oligonucleotide
agaaguuggccauggaaga

SEQ ID NO: 1893732 - RNA, 19 nt, Artificial Sequence
  Description of Artificial Sequence: Synthetic oligonucleotide
gaauucauaugcagccugg

SEQ ID NO: 1893733 - RNA, 19 nt, Artificial Sequence
  Description of Artificial Sequence: Synthetic oligonucleotide
ugucccuucccagauacag

SEQ ID NO: 1893734 - RNA, 19 nt, Artificial Sequence
  Description of Artificial Sequence: Synthetic oligonucleotide
gaagagaggcugaucagag

SEQ ID NO: 1893735 - RNA, 19 nt, Artificial Sequence
  Description of Artificial Sequence: Synthetic oligonucleotide
agcugaaccaacucaagaa

SEQ ID NO: 1893736 - RNA, 19 nt, Artificial Sequence
  Description of Artificial Sequence: Synthetic oligonucleotide
uuggcuugagcgacaaagc

SEQ ID NO: 1893737 - RNA, 19 nt, Artificial Sequence
  Description of Artificial Sequence: Synthetic oligonucleotide
guuuccgccacguagcuca

SEQ ID NO: 1893738 - RNA, 19 nt, Artificial Sequence
  Description of Artificial Sequence: Synthetic oligonucleotide
cauugguugccccuucugg

SEQ ID NO: 1893739 - RNA, 19 nt, Artificial Sequence
  Description of Artificial Sequence: Synthetic oligonucleotide
aucuccgaugcuucugggc

SEQ ID NO: 1893740 - RNA, 19 nt, Artificial Sequence
  Description of Artificial Sequence: Synthetic oligonucleotide
aacucccacagccagccca

SEQ ID NO: 1893741 - RNA, 19 nt, Artificial Sequence
  Description of Artificial Sequence: Synthetic oligonucleotide
gguguuacuucucaccucc

SEQ ID NO: 1893742 - RNA, 19 nt, Artificial Sequence
  Description of Artificial Sequence: Synthetic oligonucleotide
uucauagagcuuuucccac

SEQ ID NO: 1893743 - RNA, 19 nt, Artificial Sequence
  Description of Artificial Sequence: Synthetic oligonucleotide
uagauacccacuguggucu

SEQ ID NO: 1893744 - RNA, 19 nt, Artificial Sequence
  Description of Artificial Sequence: Synthetic oligonucleotide
cugaucagagccacaagac

SEQ ID NO: 1893745 - RNA, 19 nt, Artificial Sequence
  Description of Artificial Sequence: Synthetic oligonucleotide
auccccaaccaguagccac

SEQ ID NO: 1893746 - RNA, 19 nt, Artificial Sequence
  Description of Artificial Sequence: Synthetic oligonucleotide
aaacucucaacaaauucau

SEQ ID NO: 1893747 - RNA, 19 nt, Artificial Sequence
  Description of Artificial Sequence: Synthetic oligonucleotide
ucauccugaaaacucucaa

SEQ ID NO: 1893748 - RNA, 19 nt, Artificial Sequence
  Description of Artificial Sequence: Synthetic oligonucleotide
gauugaguccauccucgag

SEQ ID NO: 1893749 - RNA, 19 nt, Artificial Sequence
  Description of Artificial Sequence: Synthetic oligonucleotide
ucaagguccucugugagaa

SEQ ID NO: 1893750 - RNA, 19 nt, Artificial Sequence
  Description of Artificial Sequence: Synthetic oligonucleotide
gguaagccaaaccuagccg

SEQ ID NO: 1893751 - RNA, 19 nt, Artificial Sequence
  Description of Artificial Sequence: Synthetic oligonucleotide
acauugaaugcagaaucuc

SEQ ID NO: 1893752 - RNA, 19 nt, Artificial Sequence
  Description of Artificial Sequence: Synthetic oligonucleotide
uauggggcggccauagaac

SEQ ID NO: 1893753 - RNA, 19 nt, Artificial Sequence
  Description of Artificial Sequence: Synthetic oligonucleotide
auagagcuuuucccacucc

SEQ ID NO: 1893754 - RNA, 19 nt, Artificial Sequence
  Description of Artificial Sequence: Synthetic oligonucleotide
auaugcagccuggaucucc

SEQ ID NO: 1893755 - RNA, 19 nt, Artificial Sequence
  Description of Artificial Sequence: Synthetic oligonucleotide
agagccacaagaccaaaau

SEQ ID NO: 1893756 - RNA, 19 nt, Artificial Sequence
  Description of Artificial Sequence: Synthetic oligonucleotide
cauugaaugcagaaucuca

SEQ ID NO: 1893757 - RNA, 19 nt, Artificial Sequence
  Description of Artificial Sequence: Synthetic oligonucleotide
ugagcgacaaagccuggga

SEQ ID NO: 1893758 - RNA, 19 nt, Artificial Sequence
  Description of Artificial Sequence: Synthetic oligonucleotide
ugaaaacucucaacaaauu

SEQ ID NO: 1893759 - RNA, 19 nt, Artificial Sequence
  Description of Artificial Sequence: Synthetic oligonucleotide
aaucaccacaauucugaaa

SEQ ID NO: 1893760 - RNA, 19 nt, Artificial Sequence
  Description of Artificial Sequence: Synthetic oligonucleotide
uaggguaagcauccagagc

SEQ ID NO: 1893761 - RNA, 19 nt, Artificial Sequence
  Description of Artificial Sequence: Synthetic oligonucleotide
guaagcauccagagcaggg

SEQ ID NO: 1893762 - RNA, 19 nt, Artificial Sequence
  Description of Artificial Sequence: Synthetic oligonucleotide
ugcuucugggcuguaaugc

SEQ ID NO: 1893763 - RNA, 19 nt, Artificial Sequence
  Description of Artificial Sequence: Synthetic oligonucleotide
uguugcacaggacacuaua

SEQ ID NO: 1893764 - RNA, 19 nt, Artificial Sequence
  Description of Artificial Sequence: Synthetic oligonucleotide
gugguauccccucuccugg

SEQ ID NO: 1893765 - RNA, 19 nt, Artificial Sequence
  Description of Artificial Sequence: Synthetic oligonucleotide
gacagacuccaagaggcgg

SEQ ID NO: 1893766 - RNA, 19 nt, Artificial Sequence
  Description of Artificial Sequence: Synthetic oligonucleotide
ugaagcuuuguaucuccga

SEQ ID NO: 1893767 - RNA, 19 nt, Artificial Sequence
  Description of Artificial Sequence: Synthetic oligonucleotide
agagccucaggcuaaucgu

SEQ ID NO: 1893768 - RNA, 19 nt, Artificial Sequence
  Description of Artificial Sequence: Synthetic oligonucleotide
ucccagauacagguggugg

SEQ ID NO: 1893769 - RNA, 19 nt, Artificial Sequence
  Description of Artificial Sequence: Synthetic oligonucleotide
ucuuaaagucugaggucug

SEQ ID NO: 1893770 - RNA, 19 nt, Artificial Sequence
  Description of Artificial Sequence: Synthetic oligonucleotide
agcgaaggagacucagagg

SEQ ID NO: 1893771 - RNA, 19 nt, Artificial Sequence
  Description of Artificial Sequence: Synthetic oligonucleotide
aaggcgagguaagccaaac

SEQ ID NO: 1893772 - RNA, 19 nt, Artificial Sequence
  Description of Artificial Sequence: Synthetic oligonucleotide
caggcuaaucgucucagac

SEQ ID NO: 1893773 - RNA, 19 nt, Artificial Sequence
  Description of Artificial Sequence: Synthetic oligonucleotide
uugaguccauccucgaggu

SEQ ID NO: 1893774 - RNA, 19 nt, Artificial Sequence
  Description of Artificial Sequence: Synthetic oligonucleotide
uucuugggcugacucaaga

SEQ ID NO: 1893775 - RNA, 19 nt, Artificial Sequence
  Description of Artificial Sequence: Synthetic oligonucleotide
uugacauugaaugcagaau

SEQ ID NO: 1893776 - RNA, 19 nt, Artificial Sequence
  Description of Artificial Sequence: Synthetic oligonucleotide
aggguuuccgccacguagc

SEQ ID NO: 1893777 - RNA, 19 nt, Artificial Sequence
  Description of Artificial Sequence: Synthetic oligonucleotide
aguagccacaagauccggc

SEQ ID NO: 1893778 - RNA, 19 nt, Artificial Sequence
  Description of Artificial Sequence: Synthetic oligonucleotide
uaugcagccuggaucucca

SEQ ID NO: 1893779 - RNA, 19 nt, Artificial Sequence
  Description of Artificial Sequence: Synthetic oligonucleotide
aagaccccuaagccaacug

SEQ ID NO: 1893780 - RNA, 19 nt, Artificial Sequence
  Description of Artificial Sequence: Synthetic oligonucleotide
uccucgagguguuacuucu

SEQ ID NO: 1893781 - RNA, 19 nt, Artificial Sequence
  Description of Artificial Sequence: Synthetic oligonucleotide
aauucauaugcagccugga

SEQ ID NO: 1893782 - RNA, 19 nt, Artificial Sequence
  Description of Artificial Sequence: Synthetic oligonucleotide
gagcgacaaagccugggag

SEQ ID NO: 1893783 - RNA, 19 nt, Artificial Sequence
  Description of Artificial Sequence: Synthetic oligonucleotide
ucauugguugccccuucug

SEQ ID NO: 1893784 - RNA, 19 nt, Artificial Sequence
  Description of Artificial Sequence: Synthetic oligonucleotide
agccacaagauccggcaag

SEQ ID NO: 1893785 - RNA, 19 nt, Artificial Sequence
  Description of Artificial Sequence: Synthetic oligonucleotide
ucauagagcuuuucccacu

SEQ ID NO: 1893786 - RNA, 19 nt, Artificial Sequence
  Description of Artificial Sequence: Synthetic oligonucleotide
auccagugacauuugacau

SEQ ID NO: 1893787 - RNA, 19 nt, Artificial Sequence
  Description of Artificial Sequence: Synthetic oligonucleotide
uguuacuucucaccuccaa

SEQ ID NO: 1893788 - RNA, 19 nt, Artificial Sequence
  Description of Artificial Sequence: Synthetic oligonucleotide
cacuauaugccagcgggcc

SEQ ID NO: 1893789 - RNA, 19 nt, Artificial Sequence
  Description of Artificial Sequence: Synthetic oligonucleotide
aggcuaaucgucucagacu

SEQ ID NO: 1893790 - RNA, 19 nt, Artificial Sequence
  Description of Artificial Sequence: Synthetic oligonucleotide
ggcuaaucgucucagacuc

SEQ ID NO: 1893791 - RNA, 19 nt, Artificial Sequence
  Description of Artificial Sequence: Synthetic oligonucleotide
guagccacaagauccggca

SEQ ID NO: 1893792 - RNA, 19 nt, Artificial Sequence
  Description of Artificial Sequence: Synthetic oligonucleotide
auugaaugcagaaucucaa

SEQ ID NO: 1893793 - RNA, 19 nt, Artificial Sequence
  Description of Artificial Sequence: Synthetic oligonucleotide
aacucaagaaggagccaag

SEQ ID NO: 1893794 - RNA, 19 nt, Artificial Sequence
  Description of Artificial Sequence: Synthetic oligonucleotide
uugagcgacaaagccuggg

SEQ ID NO: 1893795 - RNA, 19 nt, Artificial Sequence
  Description of Artificial Sequence: Synthetic oligonucleotide
auguagaaguuggccaugg

SEQ ID NO: 1893796 - RNA, 19 nt, Artificial Sequence
  Description of Artificial Sequence: Synthetic oligonucleotide
ugaaggcgagguaagccaa

SEQ ID NO: 1893797 - RNA, 19 nt, Artificial Sequence
  Description of Artificial Sequence: Synthetic oligonucleotide
uccgauguauuucuucauu

SEQ ID NO: 1893798 - RNA, 19 nt, Artificial Sequence
  Description of Artificial Sequence: Synthetic oligonucleotide
gagaaucaccacaauucug

SEQ ID NO: 1893799 - RNA, 19 nt, Artificial Sequence
  Description of Artificial Sequence: Synthetic oligonucleotide
uaugccagcgggccuguga

SEQ ID NO: 1893800 - RNA, 19 nt, Artificial Sequence
  Description of Artificial Sequence: Synthetic oligonucleotide
uucuucauugguugccccu

SEQ ID NO: 1893801 - RNA, 19 nt, Artificial Sequence
  Description of Artificial Sequence: Synthetic oligonucleotide
aaagggcauaggucaccag

SEQ ID NO: 1893802 - RNA, 19 nt, Artificial Sequence
  Description of Artificial Sequence: Synthetic oligonucleotide
agguguuacuucucaccuc

SEQ ID NO: 1893803 - RNA, 19 nt, Artificial Sequence
  Description of Artificial Sequence: Synthetic oligonucleotide
uguaucuccgaugcuucug

SEQ ID NO: 1893804 - RNA, 19 nt, Artificial Sequence
  Description of Artificial Sequence: Synthetic oligonucleotide
uuaaagucugaggucuggu

SEQ ID NO: 1893805 - RNA, 19 nt, Artificial Sequence
  Description of Artificial Sequence: Synthetic oligonucleotide
gcauaggucaccaggagcc

SEQ ID NO: 1893806 - RNA, 19 nt, Artificial Sequence
  Description of Artificial Sequence: Synthetic oligonucleotide
uacuucucaccuccaagau

SEQ ID NO: 1893807 - RNA, 19 nt, Artificial Sequence
  Description of Artificial Sequence: Synthetic oligonucleotide
ucuugggcugacucaagaa

SEQ ID NO: 1893808 - RNA, 19 nt, Artificial Sequence
  Description of Artificial Sequence: Synthetic oligonucleotide
ccuuuggucauccucuagg

SEQ ID NO: 1893809 - RNA, 19 nt, Artificial Sequence
  Description of Artificial Sequence: Synthetic oligonucleotide
auucauaugcagccuggau

SEQ ID NO: 1893810 - RNA, 19 nt, Artificial Sequence
  Description of Artificial Sequence: Synthetic oligonucleotide
cacaggggacaugagaaag

SEQ ID NO: 1893811 - RNA, 19 nt, Artificial Sequence
  Description of Artificial Sequence: Synthetic oligonucleotide
ggagccaaggguuuccgcc

SEQ ID NO: 1893812 - RNA, 19 nt, Artificial Sequence
  Description of Artificial Sequence: Synthetic oligonucleotide
aucgucucagacucugcug

SEQ ID NO: 1893813 - RNA, 19 nt, Artificial Sequence
  Description of Artificial Sequence: Synthetic oligonucleotide
uaaucgucucagacucugc

SEQ ID NO: 1893814 - RNA, 19 nt, Artificial Sequence
  Description of Artificial Sequence: Synthetic oligonucleotide
acacuauaugccagcgggc

SEQ ID NO: 1893815 - RNA, 19 nt, Artificial Sequence
  Description of Artificial Sequence: Synthetic oligonucleotide
cagugggaggcccacaaug

SEQ ID NO: 1893816 - RNA, 19 nt, Artificial Sequence
  Description of Artificial Sequence: Synthetic oligonucleotide
uaaagucugaggucugguu

SEQ ID NO: 1893817 - RNA, 19 nt, Artificial Sequence
  Description of Artificial Sequence: Synthetic oligonucleotide
aggacacuauaugccagcg

SEQ ID NO: 1893818 - RNA, 19 nt, Artificial Sequence
  Description of Artificial Sequence: Synthetic oligonucleotide
ugccagaccuucaccaggu

SEQ ID NO: 1893819 - RNA, 19 nt, Artificial Sequence
  Description of Artificial Sequence: Synthetic oligonucleotide
uaaugcuggcagccaaacu

SEQ ID NO: 1893820 - RNA, 19 nt, Artificial Sequence
  Description of Artificial Sequence: Synthetic oligonucleotide
cacaggacacuauaugcca

SEQ ID NO: 1893821 - RNA, 19 nt, Artificial Sequence
  Description of Artificial Sequence: Synthetic oligonucleotide
acaggggacaugagaaagg

SEQ ID NO: 1893822 - RNA, 19 nt, Artificial Sequence
  Description of Artificial Sequence: Synthetic oligonucleotide
gcugaucagagccacaaga

SEQ ID NO: 1893823 - RNA, 19 nt, Artificial Sequence
  Description of Artificial Sequence: Synthetic oligonucleotide
cagcuggcguuucucaucc

SEQ ID NO: 1893824 - RNA, 19 nt, Artificial Sequence
  Description of Artificial Sequence: Synthetic oligonucleotide
guaaguccgauguauuucu

SEQ ID NO: 1893825 - RNA, 19 nt, Artificial Sequence
  Description of Artificial Sequence: Synthetic oligonucleotide
gagguguuacuucucaccu

SEQ ID NO: 1893826 - RNA, 19 nt, Artificial Sequence
  Description of Artificial Sequence: Synthetic oligonucleotide
uucauugguugccccuucu

SEQ ID NO: 1893827 - RNA, 19 nt, Artificial Sequence
  Description of Artificial Sequence: Synthetic oligonucleotide
gugccagaccuucaccagg

SEQ ID NO: 1893828 - RNA, 19 nt, Artificial Sequence
  Description of Artificial Sequence: Synthetic oligonucleotide
uccagugacauuugacauu

SEQ ID NO: 1893829 - RNA, 19 nt, Artificial Sequence
  Description of Artificial Sequence: Synthetic oligonucleotide
caaagcgaaggagacucag

SEQ ID NO: 1893830 - RNA, 19 nt, Artificial Sequence
  Description of Artificial Sequence: Synthetic oligonucleotide
acuauaugccagcgggccu

SEQ ID NO: 1893831 - RNA, 19 nt, Artificial Sequence
  Description of Artificial Sequence: Synthetic oligonucleotide
cuucuggaaggcccaaaac

SEQ ID NO: 1893832 - RNA, 19 nt, Artificial Sequence
  Description of Artificial Sequence: Synthetic oligonucleotide
uguguugcacaggacacua

SEQ ID NO: 1893833 - RNA, 19 nt, Artificial Sequence
  Description of Artificial Sequence: Synthetic oligonucleotide
gaagcuuuguaucuccgau

SEQ ID NO: 1893834 - RNA, 19 nt, Artificial Sequence
  Description of Artificial Sequence: Synthetic oligonucleotide
aaagcgaaggagacucaga

SEQ ID NO: 1893835 - RNA, 19 nt, Artificial Sequence
  Description of Artificial Sequence: Synthetic oligonucleotide
cuauaugccagcgggccug

SEQ ID NO: 1893836 - RNA, 19 nt, Artificial Sequence
  Description of Artificial Sequence: Synthetic oligonucleotide
ucuagggcaagagucucaa

SEQ ID NO: 1893837 - RNA, 19 nt, Artificial Sequence
  Description of Artificial Sequence: Synthetic oligonucleotide
agcaagaccccuaagccaa

SEQ ID NO: 1893838 - RNA, 19 nt, Artificial Sequence
  Description of Artificial Sequence: Synthetic oligonucleotide
agaaggagccaaggguuuc

SEQ ID NO: 1893839 - RNA, 19 nt, Artificial Sequence
  Description of Artificial Sequence: Synthetic oligonucleotide
gcuugagcgacaaagccug

SEQ ID NO: 1893840 - RNA, 19 nt, Artificial Sequence
  Description of Artificial Sequence: Synthetic oligonucleotide
gaaggagccaaggguuucc

SEQ ID NO: 1893841 - RNA, 19 nt, Artificial Sequence
  Description of Artificial Sequence: Synthetic oligonucleotide
cacaagauccggcaaggca

SEQ ID NO: 1893842 - RNA, 19 nt, Artificial Sequence
  Description of Artificial Sequence: Synthetic oligonucleotide
gaggcccacaauguagaag

SEQ ID NO: 1893843 - RNA, 19 nt, Artificial Sequence
  Description of Artificial Sequence: Synthetic oligonucleotide
auggggcggccauagaaca

SEQ ID NO: 1893844 - RNA, 19 nt, Artificial Sequence
  Description of Artificial Sequence: Synthetic oligonucleotide
gucucgguaaguccgaugu

SEQ ID NO: 1893845 - RNA, 19 nt, Artificial Sequence
  Description of Artificial Sequence: Synthetic oligonucleotide
uuucccacuccuggaacug

SEQ ID NO: 1893846 - RNA, 19 nt, Artificial Sequence
  Description of Artificial Sequence: Synthetic oligonucleotide
acuccuggaacugucuacu

SEQ ID NO: 1893847 - RNA, 19 nt, Artificial Sequence
  Description of Artificial Sequence: Synthetic oligonucleotide
ccgauuguggucugggugc

SEQ ID NO: 1893848 - RNA, 19 nt, Artificial Sequence
  Description of Artificial Sequence: Synthetic oligonucleotide
uagccgguagagccucagg

SEQ ID NO: 1893849 - RNA, 19 nt, Artificial Sequence
  Description of Artificial Sequence: Synthetic oligonucleotide
ggcauaggucaccaggagc

SEQ ID NO: 1893850 - RNA, 19 nt, Artificial Sequence
  Description of Artificial Sequence: Synthetic oligonucleotide
gcgaaggagacucagaggu

SEQ ID NO: 1893851 - RNA, 19 nt, Artificial Sequence
  Description of Artificial Sequence: Synthetic oligonucleotide
agccaaacugaugggcagg

SEQ ID NO: 1893852 - RNA, 19 nt, Artificial Sequence
  Description of Artificial Sequence: Synthetic oligonucleotide
gaaucaccacaauucugaa

SEQ ID NO: 1893853 - RNA, 19 nt, Artificial Sequence
  Description of Artificial Sequence: Synthetic oligonucleotide
ucgagguguuacuucucac

SEQ ID NO: 1893854 - RNA, 19 nt, Artificial Sequence
  Description of Artificial Sequence: Synthetic oligonucleotide
agaggcggccaagaagagg

SEQ ID NO: 1893855 - RNA, 19 nt, Artificial Sequence
  Description of Artificial Sequence: Synthetic oligonucleotide
agauugaguccauccucga

SEQ ID NO: 1893856 - RNA, 19 nt, Artificial Sequence
  Description of Artificial Sequence: Synthetic oligonucleotide
ccgauguauuucuucauug

SEQ ID NO: 1893857 - RNA, 19 nt, Artificial Sequence
  Description of Artificial Sequence: Synthetic oligonucleotide
acaggacacuauaugccag

SEQ ID NO: 1893858 - RNA, 19 nt, Artificial Sequence
  Description of Artificial Sequence: Synthetic oligonucleotide
gacucagaggugguauccc

SEQ ID NO: 1893859 - RNA, 19 nt, Artificial Sequence
  Description of Artificial Sequence: Synthetic oligonucleotide
uccggcaaggcagaaggaa

SEQ ID NO: 1893860 - RNA, 19 nt, Artificial Sequence
  Description of Artificial Sequence: Synthetic oligonucleotide
uccuuaggccccucaggca

SEQ ID NO: 1893861 - RNA, 19 nt, Artificial Sequence
  Description of Artificial Sequence: Synthetic oligonucleotide
aggauggcuauggggcggc

SEQ ID NO: 1893862 - RNA, 19 nt, Artificial Sequence
  Description of Artificial Sequence: Synthetic oligonucleotide
gagguaagccaaaccuagc

SEQ ID NO: 1893863 - RNA, 19 nt, Artificial Sequence
  Description of Artificial Sequence: Synthetic oligonucleotide
cucaggcuaaucgucucag

SEQ ID NO: 1893864 - RNA, 19 nt, Artificial Sequence
  Description of Artificial Sequence: Synthetic oligonucleotide
ucgguaaguccgauguauu

SEQ ID NO: 1893865 - RNA, 19 nt, Artificial Sequence
  Description of Artificial Sequence: Synthetic oligonucleotide
ccaaccaguagccacaaga

SEQ ID NO: 1893866 - RNA, 19 nt, Artificial Sequence
  Description of Artificial Sequence: Synthetic oligonucleotide
ccagugacauuugacauug

SEQ ID NO: 1893867 - RNA, 19 nt, Artificial Sequence
  Description of Artificial Sequence: Synthetic oligonucleotide
gcguuucucauccugaaaa

SEQ ID NO: 1893868 - RNA, 19 nt, Artificial Sequence
  Description of Artificial Sequence: Synthetic oligonucleotide
gaguccauccucgaggugu

SEQ ID NO: 1893869 - RNA, 19 nt, Artificial Sequence
  Description of Artificial Sequence: Synthetic oligonucleotide
gagccaaggguuuccgcca

SEQ ID NO: 1893870 - RNA, 19 nt, Artificial Sequence
  Description of Artificial Sequence: Synthetic oligonucleotide
gguaaguccgauguauuuc

SEQ ID NO: 1893871 - RNA, 19 nt, Artificial Sequence
  Description of Artificial Sequence: Synthetic oligonucleotide
guaaugcuggcagccaaac

SEQ ID NO: 1893872 - RNA, 19 nt, Artificial Sequence
  Description of Artificial Sequence: Synthetic oligonucleotide
gacauugaaugcagaaucu

SEQ ID NO: 1893873 - RNA, 19 nt, Artificial Sequence
  Description of Artificial Sequence: Synthetic oligonucleotide
ggacacuauaugccagcgg

SEQ ID NO: 1893874 - RNA, 19 nt, Artificial Sequence
  Description of Artificial Sequence: Synthetic oligonucleotide
cuauggggcggccauagaa

SEQ ID NO: 1893875 - RNA, 19 nt, Artificial Sequence
  Description of Artificial Sequence: Synthetic oligonucleotide
ccuaauguguucuuaaagu

SEQ ID NO: 1893876 - RNA, 19 nt, Artificial Sequence
  Description of Artificial Sequence: Synthetic oligonucleotide
uccauccucgagguguuac

SEQ ID NO: 1893877 - RNA, 19 nt, Artificial Sequence
  Description of Artificial Sequence: Synthetic oligonucleotide
cucuggguuucuugggcug

SEQ ID NO: 1893878 - RNA, 19 nt, Artificial Sequence
  Description of Artificial Sequence: Synthetic oligonucleotide
cuaagccaacugccagugg

SEQ ID NO: 1893879 - RNA, 19 nt, Artificial Sequence
  Description of Artificial Sequence: Synthetic oligonucleotide
gaugcuucugggcuguaau

SEQ ID NO: 1893880 - RNA, 19 nt, Artificial Sequence
  Description of Artificial Sequence: Synthetic oligonucleotide
gguaagcauccagagcagg

SEQ ID NO: 1893881 - RNA, 19 nt, Artificial Sequence
  Description of Artificial Sequence: Synthetic oligonucleotide
caaagcccaaagggcauag

SEQ ID NO: 1893882 - RNA, 19 nt, Artificial Sequence
  Description of Artificial Sequence: Synthetic oligonucleotide
gagccacaagaccaaaaua

SEQ ID NO: 1893883 - RNA, 19 nt, Artificial Sequence
  Description of Artificial Sequence: Synthetic oligonucleotide
gggcaagagucucaaaaca

SEQ ID NO: 1893884 - RNA, 19 nt, Artificial Sequence
  Description of Artificial Sequence: Synthetic oligonucleotide
cugacucaagaauucauau

SEQ ID NO: 1893885 - RNA, 19 nt, Artificial Sequence
  Description of Artificial Sequence: Synthetic oligonucleotide
agugggaggcccacaaugu

SEQ ID NO: 1893886 - RNA, 19 nt, Artificial Sequence
  Description of Artificial Sequence: Synthetic oligonucleotide
accugguaagccagcuggc

SEQ ID NO: 1893887 - RNA, 19 nt, Artificial Sequence
  Description of Artificial Sequence: Synthetic oligonucleotide
gcacaggacacuauaugcc

SEQ ID NO: 1893888 - RNA, 19 nt, Artificial Sequence
  Description of Artificial Sequence: Synthetic oligonucleotide
gcugucccuucccagauac

SEQ ID NO: 1893889 - RNA, 19 nt, Artificial Sequence
  Description of Artificial Sequence: Synthetic oligonucleotide
uaccagcaagaccccuaag

SEQ ID NO: 1893890 - RNA, 19 nt, Artificial Sequence
  Description of Artificial Sequence: Synthetic oligonucleotide
gccgauuguggucugggug

SEQ ID NO: 1893891 - RNA, 19 nt, Artificial Sequence
  Description of Artificial Sequence: Synthetic oligonucleotide
gucugguugccaacaguag

SEQ ID NO: 1893892 - RNA, 19 nt, Artificial Sequence
  Description of Artificial Sequence: Synthetic oligonucleotide
ugguauccccucuccuggc

SEQ ID NO: 1893893 - RNA, 19 nt, Artificial Sequence
  Description of Artificial Sequence: Synthetic oligonucleotide
uggcguuucucauccugaa

SEQ ID NO: 1893894 - RNA, 19 nt, Artificial Sequence
  Description of Artificial Sequence: Synthetic oligonucleotide
guuauccuuaggccccuca

SEQ ID NO: 1893895 - RNA, 19 nt, Artificial Sequence
  Description of Artificial Sequence: Synthetic oligonucleotide
cucgagguguuacuucuca

SEQ ID NO: 1893896 - RNA, 19 nt, Artificial Sequence
  Description of Artificial Sequence: Synthetic oligonucleotide
cgagguguuacuucucacc

SEQ ID NO: 1893897 - RNA, 19 nt, Artificial Sequence
  Description of Artificial Sequence: Synthetic oligonucleotide
ugaguccauccucgaggug

SEQ ID NO: 1893898 - RNA, 19 nt, Artificial Sequence
  Description of Artificial Sequence: Synthetic oligonucleotide
uagccacaagauccggcaa

SEQ ID NO: 1893899 - RNA, 19 nt, Artificial Sequence
  Description of Artificial Sequence: Synthetic oligonucleotide
caacucaagaaggagccaa

SEQ ID NO: 1893900 - RNA, 19 nt, Artificial Sequence
  Description of Artificial Sequence: Synthetic oligonucleotide
cucaagguccucugugaga

SEQ ID NO: 1893901 - RNA, 19 nt, Artificial Sequence
  Description of Artificial Sequence: Synthetic oligonucleotide
accuagccgguagagccuc

SEQ ID NO: 1893902 - RNA, 19 nt, Artificial Sequence
  Description of Artificial Sequence: Synthetic oligonucleotide
cugaggucugguugccaac

SEQ ID NO: 1893903 - RNA, 19 nt, Artificial Sequence
  Description of Artificial Sequence: Synthetic oligonucleotide
caggauggcuauggggcgg

SEQ ID NO: 1893904 - RNA, 19 nt, Artificial Sequence
  Description of Artificial Sequence: Synthetic oligonucleotide
aaccuagccgguagagccu

SEQ ID NO: 1893905 - RNA, 19 nt, Artificial Sequence
  Description of Artificial Sequence: Synthetic oligonucleotide
uggaguccaacaggacccc

SEQ ID NO: 1893906 - RNA, 19 nt, Artificial Sequence
  Description of Artificial Sequence: Synthetic oligonucleotide
uuuccgccacguagcucag

SEQ ID NO: 1893907 - RNA, 19 nt, Artificial Sequence
  Description of Artificial Sequence: Synthetic oligonucleotide
caagauccggcaaggcaga

SEQ ID NO: 1893908 - RNA, 19 nt, Artificial Sequence
  Description of Artificial Sequence: Synthetic oligonucleotide
guuucucauccugaaaacu

SEQ ID NO: 1893909 - RNA, 19 nt, Artificial Sequence
  Description of Artificial Sequence: Synthetic oligonucleotide
ucucgguaaguccgaugua

SEQ ID NO: 1893910 - RNA, 19 nt, Artificial Sequence
  Description of Artificial Sequence: Synthetic oligonucleotide
uggggcggccauagaacac

SEQ ID NO: 1893911 - RNA, 19 nt, Artificial Sequence
  Description of Artificial Sequence: Synthetic oligonucleotide
aaggagacucagagguggu

SEQ ID NO: 1893912 - RNA, 19 nt, Artificial Sequence
  Description of Artificial Sequence: Synthetic oligonucleotide
cugggagcuuccagaacuc

SEQ ID NO: 1893913 - RNA, 19 nt, Artificial Sequence
  Description of Artificial Sequence: Synthetic oligonucleotide
ccuaggguaagcauccaga

SEQ ID NO: 1893914 - RNA, 19 nt, Artificial Sequence
  Description of Artificial Sequence: Synthetic oligonucleotide
agauacccacuguggucug

SEQ ID NO: 1893915 - RNA, 19 nt, Artificial Sequence
  Description of Artificial Sequence: Synthetic oligonucleotide
aacucucaacaaauucaua

SEQ ID NO: 1893916 - RNA, 19 nt, Artificial Sequence
  Description of Artificial Sequence: Synthetic oligonucleotide
gccacaagauccggcaagg

SEQ ID NO: 1893917 - RNA, 19 nt, Artificial Sequence
  Description of Artificial Sequence: Synthetic oligonucleotide
cuccgaugcuucugggcug

SEQ ID NO: 1893918 - RNA, 19 nt, Artificial Sequence
  Description of Artificial Sequence: Synthetic oligonucleotide
gguugccaacaguagcuac

SEQ ID NO: 1893919 - RNA, 19 nt, Artificial Sequence
  Description of Artificial Sequence: Synthetic oligonucleotide
gagccucaggcuaaucguc

SEQ ID NO: 1893920 - RNA, 19 nt, Artificial Sequence
  Description of Artificial Sequence: Synthetic oligonucleotide
gugacauuugacauugaau

SEQ ID NO: 1893921 - RNA, 19 nt, Artificial Sequence
  Description of Artificial Sequence: Synthetic oligonucleotide
ccggcaaggcagaaggaag

SEQ ID NO: 1893922 - RNA, 19 nt, Artificial Sequence
  Description of Artificial Sequence: Synthetic oligonucleotide
uccgaugcuucugggcugu

SEQ ID NO: 1893923 - RNA, 19 nt, Artificial Sequence
  Description of Artificial Sequence: Synthetic oligonucleotide
ugccgauuguggucugggu

SEQ ID NO: 1893924 - RNA, 19 nt, Artificial Sequence
  Description of Artificial Sequence: Synthetic oligonucleotide
auagaacacaggggacaug

SEQ ID NO: 1893925 - RNA, 19 nt, Artificial Sequence
  Description of Artificial Sequence: Synthetic oligonucleotide
ugcuccuaauguguucuua

SEQ ID NO: 1893926 - RNA, 19 nt, Artificial Sequence
  Description of Artificial Sequence: Synthetic oligonucleotide
caaccaguagccacaagau

SEQ ID NO: 1893927 - RNA, 19 nt, Artificial Sequence
  Description of Artificial Sequence: Synthetic oligonucleotide
cagacuccaagaggcggcc

SEQ ID NO: 1893928 - RNA, 19 nt, Artificial Sequence
  Description of Artificial Sequence: Synthetic oligonucleotide
cuugggcugacucaagaau

SEQ ID NO: 1893929 - RNA, 19 nt, Artificial Sequence
  Description of Artificial Sequence: Synthetic oligonucleotide
ggcaagagucucaaaacaa

SEQ ID NO: 1893930 - RNA, 19 nt, Artificial Sequence
  Description of Artificial Sequence: Synthetic oligonucleotide
gguauccccucuccuggcc

SEQ ID NO: 1893931 - RNA, 19 nt, Artificial Sequence
  Description of Artificial Sequence: Synthetic oligonucleotide
cuucaccaggucucgguaa

SEQ ID NO: 1893932 - RNA, 19 nt, Artificial Sequence
  Description of Artificial Sequence: Synthetic oligonucleotide
cucugcugaagcuuuguau

SEQ ID NO: 1893933 - RNA, 19 nt, Artificial Sequence
  Description of Artificial Sequence: Synthetic oligonucleotide
cuaccagcaagaccccuaa

SEQ ID NO: 1893934 - RNA, 19 nt, Artificial Sequence
  Description of Artificial Sequence: Synthetic oligonucleotide
cguuucucauccugaaaac

SEQ ID NO: 1893935 - RNA, 19 nt, Artificial Sequence
  Description of Artificial Sequence: Synthetic oligonucleotide
gggagcuuccagaacuccc

SEQ ID NO: 1893936 - RNA, 19 nt, Artificial Sequence
  Description of Artificial Sequence: Synthetic oligonucleotide
aagccaaaccuagccggua

SEQ ID NO: 1893937 - RNA, 19 nt, Artificial Sequence
  Description of Artificial Sequence: Synthetic oligonucleotide
cuagccgguagagccucag

SEQ ID NO: 1893938 - RNA, 19 nt, Artificial Sequence
  Description of Artificial Sequence: Synthetic oligonucleotide
aggaagcgccucugggccu

SEQ ID NO: 1893939 - RNA, 19 nt, Artificial Sequence
  Description of Artificial Sequence: Synthetic oligonucleotide
ggucugguugccaacagua

SEQ ID NO: 1893940 - RNA, 19 nt, Artificial Sequence
  Description of Artificial Sequence: Synthetic oligonucleotide
gccacaagaccaaaauaga

SEQ ID NO: 1893941 - RNA, 19 nt, Artificial Sequence
  Description of Artificial Sequence: Synthetic oligonucleotide
ugccagcgggccugugaag

SEQ ID NO: 1893942 - RNA, 19 nt, Artificial Sequence
  Description of Artificial Sequence: Synthetic oligonucleotide
gcccacaauguagaaguug

SEQ ID NO: 1893943 - RNA, 19 nt, Artificial Sequence
  Description of Artificial Sequence: Synthetic oligonucleotide
gaacucccacagccagccc

SEQ ID NO: 1893944 - RNA, 19 nt, Artificial Sequence
  Description of Artificial Sequence: Synthetic oligonucleotide
ggcugaucagagccacaag

SEQ ID NO: 1893945 - RNA, 19 nt, Artificial Sequence
  Description of Artificial Sequence: Synthetic oligonucleotide
ggucucgguaaguccgaug

SEQ ID NO: 1893946 - RNA, 19 nt, Artificial Sequence
  Description of Artificial Sequence: Synthetic oligonucleotide
ccaaaccuagccgguagag

SEQ ID NO: 1893947 - RNA, 19 nt, Artificial Sequence
  Description of Artificial Sequence: Synthetic oligonucleotide
gauccccaaccaguagcca

SEQ ID NO: 1893948 - RNA, 19 nt, Artificial Sequence
  Description of Artificial Sequence: Synthetic oligonucleotide
aagauccggcaaggcagaa

SEQ ID NO: 1893949 - RNA, 19 nt, Artificial Sequence
  Description of Artificial Sequence: Synthetic oligonucleotide
gcugacucaagaauucaua

SEQ ID NO: 1893950 - RNA, 19 nt, Artificial Sequence
  Description of Artificial Sequence: Synthetic oligonucleotide
aggggacaugagaaaggcu

SEQ ID NO: 1893951 - RNA, 19 nt, Artificial Sequence
  Description of Artificial Sequence: Synthetic oligonucleotide
ggguaagcauccagagcag

SEQ ID NO: 1893952 - RNA, 19 nt, Artificial Sequence
  Description of Artificial Sequence: Synthetic oligonucleotide
cgccacguagcucagggug

SEQ ID NO: 1893953 - RNA, 19 nt, Artificial Sequence
  Description of Artificial Sequence: Synthetic oligonucleotide
cugguaagccagcuggcgu

SEQ ID NO: 1893954 - RNA, 19 nt, Artificial Sequence
  Description of Artificial Sequence: Synthetic oligonucleotide
caacaaauucauagagcuu

SEQ ID NO: 1893955 - RNA, 19 nt, Artificial Sequence
  Description of Artificial Sequence: Synthetic oligonucleotide
ccaaagggcauaggucacc

SEQ ID NO: 1893956 - RNA, 19 nt, Artificial Sequence
  Description of Artificial Sequence: Synthetic oligonucleotide
ccugggagcuuccagaacu

SEQ ID NO: 1893957 - RNA, 19 nt, Artificial Sequence
  Description of Artificial Sequence: Synthetic oligonucleotide
cuucccagauacagguggu

SEQ ID NO: 1893958 - RNA, 19 nt, Artificial Sequence
  Description of Artificial Sequence: Synthetic oligonucleotide
caggucucgguaaguccga

SEQ ID NO: 1893959 - RNA, 19 nt, Artificial Sequence
  Description of Artificial Sequence: Synthetic oligonucleotide
cccaaagggcauaggucac

SEQ ID NO: 1893960 - RNA, 19 nt, Artificial Sequence
  Description of Artificial Sequence: Synthetic oligonucleotide
gugggaggcccacaaugua

SEQ ID NO: 1893961 - RNA, 19 nt, Artificial Sequence
  Description of Artificial Sequence: Synthetic oligonucleotide
caacaguagcuaccagcaa

SEQ ID NO: 1893962 - RNA, 19 nt, Artificial Sequence
  Description of Artificial Sequence: Synthetic oligonucleotide
guauccccucuccuggccu

SEQ ID NO: 1893963 - RNA, 19 nt, Artificial Sequence
  Description of Artificial Sequence: Synthetic oligonucleotide
cauaugcagccuggaucuc

SEQ ID NO: 1893964 - RNA, 19 nt, Artificial Sequence
  Description of Artificial Sequence: Synthetic oligonucleotide
ggcugcuccuaauguguuc

SEQ ID NO: 1893965 - RNA, 19 nt, Artificial Sequence
  Description of Artificial Sequence: Synthetic oligonucleotide
aggagacucagagguggua

SEQ ID NO: 1893966 - RNA, 19 nt, Artificial Sequence
  Description of Artificial Sequence: Synthetic oligonucleotide
cugggcuguaaugcuggca

SEQ ID NO: 1893967 - RNA, 19 nt, Artificial Sequence
  Description of Artificial Sequence: Synthetic oligonucleotide
gccaaggguuuccgccacg

SEQ ID NO: 1893968 - RNA, 19 nt, Artificial Sequence
  Description of Artificial Sequence: Synthetic oligonucleotide
ggggcggccauagaacaca

SEQ ID NO: 1893969 - RNA, 19 nt, Artificial Sequence
  Description of Artificial Sequence: Synthetic oligonucleotide
ccacaagaccaaaauagau

SEQ ID NO: 1893970 - RNA, 19 nt, Artificial Sequence
  Description of Artificial Sequence: Synthetic oligonucleotide
cucuucucuuuggugccga

SEQ ID NO: 1893971 - RNA, 19 nt, Artificial Sequence
  Description of Artificial Sequence: Synthetic oligonucleotide
gccaaaccuagccgguaga

SEQ ID NO: 1893972 - RNA, 19 nt, Artificial Sequence
  Description of Artificial Sequence: Synthetic oligonucleotide
ggcguuucucauccugaaa

SEQ ID NO: 1893973 - RNA, 19 nt, Artificial Sequence
  Description of Artificial Sequence: Synthetic oligonucleotide
agacuccaagaggcggcca

SEQ ID NO: 1893974 - RNA, 19 nt, Artificial Sequence
  Description of Artificial Sequence: Synthetic oligonucleotide
aguccauccucgagguguu

SEQ ID NO: 1893975 - RNA, 19 nt, Artificial Sequence
  Description of Artificial Sequence: Synthetic oligonucleotide
ccagcgggccugugaaggc

SEQ ID NO: 1893976 - RNA, 19 nt, Artificial Sequence
  Description of Artificial Sequence: Synthetic oligonucleotide
cuacuggugaagccaggau

SEQ ID NO: 1893977 - RNA, 19 nt, Artificial Sequence
  Description of Artificial Sequence: Synthetic oligonucleotide
agcgggccugugaaggcga

SEQ ID NO: 1893978 - RNA, 19 nt, Artificial Sequence
  Description of Artificial Sequence: Synthetic oligonucleotide
cuagggcaagagucucaaa

SEQ ID NO: 1893979 - RNA, 19 nt, Artificial Sequence
  Description of Artificial Sequence: Synthetic oligonucleotide
gccucaggcuaaucgucuc

SEQ ID NO: 1893980 - RNA, 19 nt, Artificial Sequence
  Description of Artificial Sequence: Synthetic oligonucleotide
gcccuguuggcuugagcga

SEQ ID NO: 1893981 - RNA, 19 nt, Artificial Sequence
  Description of Artificial Sequence: Synthetic oligonucleotide
ugggcccuguuggcuugag

SEQ ID NO: 1893982 - RNA, 19 nt, Artificial Sequence
  Description of Artificial Sequence: Synthetic oligonucleotide
gcgacaaagccugggagcu

SEQ ID NO: 1893983 - RNA, 19 nt, Artificial Sequence
  Description of Artificial Sequence: Synthetic oligonucleotide
guguuacuucucaccucca

SEQ ID NO: 1893984 - RNA, 19 nt, Artificial Sequence
  Description of Artificial Sequence: Synthetic oligonucleotide
cccuuuggucauccucuag

SEQ ID NO: 1893985 - RNA, 19 nt, Artificial Sequence
  Description of Artificial Sequence: Synthetic oligonucleotide
ggucaccaggagcccuuug

SEQ ID NO: 1893986 - RNA, 19 nt, Artificial Sequence
  Description of Artificial Sequence: Synthetic oligonucleotide
guagagccucaggcuaauc

SEQ ID NO: 1893987 - RNA, 19 nt, Artificial Sequence
  Description of Artificial Sequence: Synthetic oligonucleotide
gggcugacucaagaauuca

SEQ ID NO: 1893988 - RNA, 19 nt, Artificial Sequence
  Description of Artificial Sequence: Synthetic oligonucleotide
auccggcaaggcagaagga

SEQ ID NO: 1893989 - RNA, 19 nt, Artificial Sequence
  Description of Artificial Sequence: Synthetic oligonucleotide
ggcggccauagaacacagg

SEQ ID NO: 1893990 - RNA, 19 nt, Artificial Sequence
  Description of Artificial Sequence: Synthetic oligonucleotide
cugucccuucccagauaca

SEQ ID NO: 1893991 - RNA, 19 nt, Artificial Sequence
  Description of Artificial Sequence: Synthetic oligonucleotide
gccgguagagccucaggcu

SEQ ID NO: 1893992 - RNA, 19 nt, Artificial Sequence
  Description of Artificial Sequence: Synthetic oligonucleotide
gcgagguaagccaaaccua

SEQ ID NO: 1893993 - RNA, 19 nt, Artificial Sequence
  Description of Artificial Sequence: Synthetic oligonucleotide
cuuaggccccucaggcagu

SEQ ID NO: 1893994 - RNA, 19 nt, Artificial Sequence
  Description of Artificial Sequence: Synthetic oligonucleotide
cagugacauuugacauuga

SEQ ID NO: 1893995 - RNA, 19 nt, Artificial Sequence
  Description of Artificial Sequence: Synthetic oligonucleotide
aggucucgguaaguccgau

SEQ ID NO: 1893996 - RNA, 19 nt, Artificial Sequence
  Description of Artificial Sequence: Synthetic oligonucleotide
cuguguugcacaggacacu

SEQ ID NO: 1893997 - RNA, 19 nt, Artificial Sequence
  Description of Artificial Sequence: Synthetic oligonucleotide
gggcggccauagaacacag

SEQ ID NO: 1893998 - RNA, 19 nt, Artificial Sequence
  Description of Artificial Sequence: Synthetic oligonucleotide
auccccucuccuggccucu

SEQ ID NO: 1893999 - RNA, 19 nt, Artificial Sequence
  Description of Artificial Sequence: Synthetic oligonucleotide
ccucaggcuaaucgucuca

SEQ ID NO: 1894000 - RNA, 19 nt, Artificial Sequence
  Description of Artificial Sequence: Synthetic oligonucleotide
ccucgagguguuacuucuc

SEQ ID NO: 1894001 - RNA, 19 nt, Artificial Sequence
  Description of Artificial Sequence: Synthetic oligonucleotide
caaggguuuccgccacgua

SEQ ID NO: 1894002 - RNA, 19 nt, Artificial Sequence
  Description of Artificial Sequence: Synthetic oligonucleotide
ccgguagagccucaggcua

SEQ ID NO: 1894003 - RNA, 19 nt, Artificial Sequence
  Description of Artificial Sequence: Synthetic oligonucleotide
gcggccaagaagagggaaa

SEQ ID NO: 1894004 - RNA, 19 nt, Artificial Sequence
  Description of Artificial Sequence: Synthetic oligonucleotide
cagaggugguauccccucu

SEQ ID NO: 1894005 - RNA, 19 nt, Artificial Sequence
  Description of Artificial Sequence: Synthetic oligonucleotide
uggcuauggggcggccaua

SEQ ID NO: 1894006 - RNA, 19 nt, Artificial Sequence
  Description of Artificial Sequence: Synthetic oligonucleotide
gguuuccgccacguagcuc

SEQ ID NO: 1894007 - RNA, 19 nt, Artificial Sequence
  Description of Artificial Sequence: Synthetic oligonucleotide
caagaccccuaagccaacu

SEQ ID NO: 1894008 - RNA, 19 nt, Artificial Sequence
  Description of Artificial Sequence: Synthetic oligonucleotide
caccuccuaggguaagcau

SEQ ID NO: 1894009 - RNA, 19 nt, Artificial Sequence
  Description of Artificial Sequence: Synthetic oligonucleotide
cugugagaaucaccacaau

SEQ ID NO: 1894010 - RNA, 19 nt, Artificial Sequence
  Description of Artificial Sequence: Synthetic oligonucleotide
cauccucgagguguuacuu

SEQ ID NO: 1894011 - RNA, 19 nt, Artificial Sequence
  Description of Artificial Sequence: Synthetic oligonucleotide
gcuauggggcggccauaga

SEQ ID NO: 1894012 - RNA, 19 nt, Artificial Sequence
  Description of Artificial Sequence: Synthetic oligonucleotide
cuccuaggguaagcaucca

SEQ ID NO: 1894013 - RNA, 19 nt, Artificial Sequence
  Description of Artificial Sequence: Synthetic oligonucleotide
gcaagaccccuaagccaac

SEQ ID NO: 1894014 - RNA, 19 nt, Artificial Sequence
  Description of Artificial Sequence: Synthetic oligonucleotide
ccaacucaagaaggagcca

SEQ ID NO: 1894015 - RNA, 19 nt, Artificial Sequence
  Description of Artificial Sequence: Synthetic oligonucleotide
ggguuuccgccacguagcu

SEQ ID NO: 1894016 - RNA, 19 nt, Artificial Sequence
  Description of Artificial Sequence: Synthetic oligonucleotide
ccauccucgagguguuacu

SEQ ID NO: 1894017 - RNA, 19 nt, Artificial Sequence
  Description of Artificial Sequence: Synthetic oligonucleotide
guguugcacaggacacuau

SEQ ID NO: 1894018 - RNA, 19 nt, Artificial Sequence
  Description of Artificial Sequence: Synthetic oligonucleotide
gcuaaucgucucagacucu

SEQ ID NO: 1894019 - RNA, 19 nt, Artificial Sequence
  Description of Artificial Sequence: Synthetic oligonucleotide
caagguccucugugagaau

SEQ ID NO: 1894020 - RNA, 19 nt, Artificial Sequence
  Description of Artificial Sequence: Synthetic oligonucleotide
ccaaagcccaaagggcaua

SEQ ID NO: 1894021 - RNA, 19 nt, Artificial Sequence
  Description of Artificial Sequence: Synthetic oligonucleotide
gguaagccagcuggcguuu

SEQ ID NO: 1894022 - RNA, 19 nt, Artificial Sequence
  Description of Artificial Sequence: Synthetic oligonucleotide
cugggcccuguuggcuuga

SEQ ID NO: 1894023 - RNA, 19 nt, Artificial Sequence
  Description of Artificial Sequence: Synthetic oligonucleotide
ggccucuguuucugagccu

SEQ ID NO: 1894024 - RNA, 19 nt, Artificial Sequence
  Description of Artificial Sequence: Synthetic oligonucleotide
ccaaggguuuccgccacgu

SEQ ID NO: 1894025 - RNA, 19 nt, Artificial Sequence
  Description of Artificial Sequence: Synthetic oligonucleotide
cgguaaguccgauguauuu

SEQ ID NO: 1894026 - RNA, 19 nt, Artificial Sequence
  Description of Artificial Sequence: Synthetic oligonucleotide
cgucucagacucugcugaa

SEQ ID NO: 1894027 - RNA, 19 nt, Artificial Sequence
  Description of Artificial Sequence: Synthetic oligonucleotide
ccuagccgguagagccuca

SEQ ID NO: 1894028 - RNA, 19 nt, Artificial Sequence
  Description of Artificial Sequence: Synthetic oligonucleotide
cgaugcuucugggcuguaa

SEQ ID NO: 1894029 - RNA, 19 nt, Artificial Sequence
  Description of Artificial Sequence: Synthetic oligonucleotide
ccgccacguagcucagggu

SEQ ID NO: 1894030 - RNA, 19 nt, Artificial Sequence
  Description of Artificial Sequence: Synthetic oligonucleotide
ccgaugcuucugggcugua

SEQ ID NO: 1894031 - RNA, 19 nt, Artificial Sequence
  Description of Artificial Sequence: Synthetic oligonucleotide
aauacagugaguuaggagc

SEQ ID NO: 1894032 - RNA, 19 nt, Artificial Sequence
  Description of Artificial Sequence: Synthetic oligonucleotide
aauaauaccacuuugaagu

SEQ ID NO: 1894033 - RNA, 19 nt, Artificial Sequence
  Description of Artificial Sequence: Synthetic oligonucleotide
aaacuuaagccacaaaugc

SEQ ID NO: 1894034 - RNA, 19 nt, Artificial Sequence
  Description of Artificial Sequence: Synthetic oligonucleotide
aguaaaaggguauugcugc

SEQ ID NO: 1894035 - RNA, 19 nt, Artificial Sequence
  Description of Artificial Sequence: Synthetic oligonucleotide
aauagucugauguucaauc

SEQ ID NO: 1894036 - RNA, 19 nt, Artificial Sequence
  Description of Artificial Sequence: Synthetic oligonucleotide
uauuuguccacccagaggc

SEQ ID NO: 1894037 - RNA, 19 nt, Artificial Sequence
  Description of Artificial Sequence: Synthetic oligonucleotide
ucauuauuaucucaggagg

SEQ ID NO: 1894038 - RNA, 19 nt, Artificial Sequence
  Description of Artificial Sequence: Synthetic oligonucleotide
uauaaaguagccauaaacu

SEQ ID NO: 1894039 - RNA, 19 nt, Artificial Sequence
  Description of Artificial Sequence: Synthetic oligonucleotide
aagcuaguuuauuauaccc

SEQ ID NO: 1894040 - RNA, 19 nt, Artificial Sequence
  Description of Artificial Sequence: Synthetic oligonucleotide
aaagcuaguuuauuauacc

SEQ ID NO: 1894041 - RNA, 19 nt, Artificial Sequence
  Description of Artificial Sequence: Synthetic oligonucleotide
aucacaguuauguaggagc

SEQ ID NO: 1894042 - RNA, 19 nt, Artificial Sequence
  Description of Artificial Sequence: Synthetic oligonucleotide
uuauaaaguagccauaaac

SEQ ID NO: 1894043 - RNA, 19 nt, Artificial Sequence
  Description of Artificial Sequence: Synthetic oligonucleotide
auugcaaauaucuucaaug

SEQ ID NO: 1894044 - RNA, 19 nt, Artificial Sequence
  Description of Artificial Sequence: Synthetic oligonucleotide
uucauuauuaucucaggag

SEQ ID NO: 1894045 - RNA, 19 nt, Artificial Sequence
  Description of Artificial Sequence: Synthetic oligonucleotide
aacacaacuucugagguac

SEQ ID NO: 1894046 - RNA, 19 nt, Artificial Sequence
  Description of Artificial Sequence: Synthetic oligonucleotide
auaaacuuaagccacaaau

SEQ ID NO: 1894047 - RNA, 19 nt, Artificial Sequence
  Description of Artificial Sequence: Synthetic oligonucleotide
uaguuuauuauacccacag

SEQ ID NO: 1894048 - RNA, 19 nt, Artificial Sequence
  Description of Artificial Sequence: Synthetic oligonucleotide
ugauguucaauccucaacu

SEQ ID NO: 1894049 - RNA, 19 nt, Artificial Sequence
  Description of Artificial Sequence: Synthetic oligonucleotide
ugaauuaugacccggucac

SEQ ID NO: 1894050 - RNA, 19 nt, Artificial Sequence
  Description of Artificial Sequence: Synthetic oligonucleotide
auaucuucaaugcugggag

SEQ ID NO: 1894051 - RNA, 19 nt, Artificial Sequence
  Description of Artificial Sequence: Synthetic oligonucleotide
uacauugcaaauaucuuca

SEQ ID NO: 1894052 - RNA, 19 nt, Artificial Sequence
  Description of Artificial Sequence: Synthetic oligonucleotide
ugaugguccauauacuagg

SEQ ID NO: 1894053 - RNA, 19 nt, Artificial Sequence
  Description of Artificial Sequence: Synthetic oligonucleotide
caaauaucuucaaugcugg

SEQ ID NO: 1894054 - RNA, 19 nt, Artificial Sequence
  Description of Artificial Sequence: Synthetic oligonucleotide
ucucguaggauacacauaa

SEQ ID NO: 1894055 - RNA, 19 nt, Artificial Sequence
  Description of Artificial Sequence: Synthetic oligonucleotide
cuuagaaguggaauuacag

SEQ ID NO: 1894056 - RNA, 19 nt, Artificial Sequence
  Description of Artificial Sequence: Synthetic oligonucleotide
uuagaaguggaauuacagc

SEQ ID NO: 1894057 - RNA, 19 nt, Artificial Sequence
  Description of Artificial Sequence: Synthetic oligonucleotide
aauaggcugccaucugugc

SEQ ID NO: 1894058 - RNA, 19 nt, Artificial Sequence
  Description of Artificial Sequence: Synthetic oligonucleotide
aguuuauuauacccacagc

SEQ ID NO: 1894059 - RNA, 19 nt, Artificial Sequence
  Description of Artificial Sequence: Synthetic oligonucleotide
augaauuucuuauaaagua

SEQ ID NO: 1894060 - RNA, 19 nt, Artificial Sequence
  Description of Artificial Sequence: Synthetic oligonucleotide
gacauguacuucuccaugg

SEQ ID NO: 1894061 - RNA, 19 nt, Artificial Sequence
  Description of Artificial Sequence: Synthetic oligonucleotide
uccuuugugaguuugucca

SEQ ID NO: 1894062 - RNA, 19 nt, Artificial Sequence
  Description of Artificial Sequence: Synthetic oligonucleotide
gaguuaggagcucauagag

SEQ ID NO: 1894063 - RNA, 19 nt, Artificial Sequence
  Description of Artificial Sequence: Synthetic oligonucleotide
gaggaauacagugaguuag

SEQ ID NO: 1894064 - RNA, 19 nt, Artificial Sequence
  Description of Artificial Sequence: Synthetic oligonucleotide
uuauguaggagcucggaga

SEQ ID NO: 1894065 - RNA, 19 nt, Artificial Sequence
  Description of Artificial Sequence: Synthetic oligonucleotide
ucgauguucauaauaggcu

SEQ ID NO: 1894066 - RNA, 19 nt, Artificial Sequence
  Description of Artificial Sequence: Synthetic oligonucleotide
aguguaaaucugcaugaac

SEQ ID NO: 1894067 - RNA, 19 nt, Artificial Sequence
  Description of Artificial Sequence: Synthetic oligonucleotide
cugagucagaaaaucaugc

SEQ ID NO: 1894068 - RNA, 19 nt, Artificial Sequence
  Description of Artificial Sequence: Synthetic oligonucleotide
uagccauaaacuuaagcca

SEQ ID NO: 1894069 - RNA, 19 nt, Artificial Sequence
  Description of Artificial Sequence: Synthetic oligonucleotide
ugucaauaauaccacuuug

SEQ ID NO: 1894070 - RNA, 19 nt, Artificial Sequence
  Description of Artificial Sequence: Synthetic oligonucleotide
acaguuauguaggagcucg

SEQ ID NO: 1894071 - RNA, 19 nt, Artificial Sequence
  Description of Artificial Sequence: Synthetic oligonucleotide
auaggcugccaucugugcc

SEQ ID NO: 1894072 - RNA, 19 nt, Artificial Sequence
  Description of Artificial Sequence: Synthetic oligonucleotide
ucgaacuucaagaagccuc

SEQ ID NO: 1894073 - RNA, 19 nt, Artificial Sequence
  Description of Artificial Sequence: Synthetic oligonucleotide
auaaaguagccauaaacuu

SEQ ID NO: 1894074 - RNA, 19 nt, Artificial Sequence
  Description of Artificial Sequence: Synthetic oligonucleotide
uaguuacuggcaauggugc

SEQ ID NO: 1894075 - RNA, 19 nt, Artificial Sequence
  Description of Artificial Sequence: Synthetic oligonucleotide
gaauacagugaguuaggag

SEQ ID NO: 1894076 - RNA, 19 nt, Artificial Sequence
  Description of Artificial Sequence: Synthetic oligonucleotide
accauaaaguucucguagg

SEQ ID NO: 1894077 - RNA, 19 nt, Artificial Sequence
  Description of Artificial Sequence: Synthetic oligonucleotide
aaauaucuucaaugcuggg

SEQ ID NO: 1894078 - RNA, 19 nt, Artificial Sequence
  Description of Artificial Sequence: Synthetic oligonucleotide
cagucgauguucauaauag

SEQ ID NO: 1894079 - RNA, 19 nt, Artificial Sequence
  Description of Artificial Sequence: Synthetic oligonucleotide
ucaguaaaaggguauugcu

SEQ ID NO: 1894080 - RNA, 19 nt, Artificial Sequence
  Description of Artificial Sequence: Synthetic oligonucleotide
uguucaauccucaacuuuu

SEQ ID NO: 1894081 - RNA, 19 nt, Artificial Sequence
  Description of Artificial Sequence: Synthetic oligonucleotide
aaaaggguauugcugcacu

SEQ ID NO: 1894082 - RNA, 19 nt, Artificial Sequence
  Description of Artificial Sequence: Synthetic oligonucleotide
ugggauuaacuucaaggug

SEQ ID NO: 1894083 - RNA, 19 nt, Artificial Sequence
  Description of Artificial Sequence: Synthetic oligonucleotide
uuaacuucaaggugguagu

SEQ ID NO: 1894084 - RNA, 19 nt, Artificial Sequence
  Description of Artificial Sequence: Synthetic oligonucleotide
uuacagcacaagaucagcc

SEQ ID NO: 1894085 - RNA, 19 nt, Artificial Sequence
  Description of Artificial Sequence: Synthetic oligonucleotide
agauacaccucccagucug

SEQ ID NO: 1894086 - RNA, 19 nt, Artificial Sequence
  Description of Artificial Sequence: Synthetic oligonucleotide
auccuuugugaguuugucc

SEQ ID NO: 1894087 - RNA, 19 nt, Artificial Sequence
  Description of Artificial Sequence: Synthetic oligonucleotide
uuuagauggaguuguaaua

SEQ ID NO: 1894088 - RNA, 19 nt, Artificial Sequence
  Description of Artificial Sequence: Synthetic oligonucleotide
aauuaugacccggucacug

SEQ ID NO: 1894089 - RNA, 19 nt, Artificial Sequence
  Description of Artificial Sequence: Synthetic oligonucleotide
auaaaguucucguaggaua

SEQ ID NO: 1894090 - RNA, 19 nt, Artificial Sequence
  Description of Artificial Sequence: Synthetic oligonucleotide
aaaguagccauaaacuuaa

SEQ ID NO: 1894091 - RNA, 19 nt, Artificial Sequence
  Description of Artificial Sequence: Synthetic oligonucleotide
aagugauaaauggcuuugc

SEQ ID NO: 1894092 - RNA, 19 nt, Artificial Sequence
  Description of Artificial Sequence: Synthetic oligonucleotide
uucaguaaaaggguauugc

SEQ ID NO: 1894093 - RNA, 19 nt, Artificial Sequence
  Description of Artificial Sequence: Synthetic oligonucleotide
aauuacagcacaagaucag

SEQ ID NO: 1894094 - RNA, 19 nt, Artificial Sequence
  Description of Artificial Sequence: Synthetic oligonucleotide
gugaguuaggagcucauag

SEQ ID NO: 1894095 - RNA, 19 nt, Artificial Sequence
  Description of Artificial Sequence: Synthetic oligonucleotide
ucagauacaccucccaguc

SEQ ID NO: 1894096 - RNA, 19 nt, Artificial Sequence
  Description of Artificial Sequence: Synthetic oligonucleotide
caauccucaacuuuuccac

SEQ ID NO: 1894097 - RNA, 19 nt, Artificial Sequence
  Description of Artificial Sequence: Synthetic oligonucleotide
auggaguuguaauagucug

SEQ ID NO: 1894098 - RNA, 19 nt, Artificial Sequence
  Description of Artificial Sequence: Synthetic oligonucleotide
auacacauaauucuugcuu

SEQ ID NO: 1894099 - RNA, 19 nt, Artificial Sequence
  Description of Artificial Sequence: Synthetic oligonucleotide
accucugucaauaauacca

SEQ ID NO: 1894100 - RNA, 19 nt, Artificial Sequence
  Description of Artificial Sequence: Synthetic oligonucleotide
ugaguuaggagcucauaga

SEQ ID NO: 1894101 - RNA, 19 nt, Artificial Sequence
  Description of Artificial Sequence: Synthetic oligonucleotide
uggucuucaguaaaagggu

SEQ ID NO: 1894102 - RNA, 19 nt, Artificial Sequence
  Description of Artificial Sequence: Synthetic oligonucleotide
gauaaauggcuuugcugcc

SEQ ID NO: 1894103 - RNA, 19 nt, Artificial Sequence
  Description of Artificial Sequence: Synthetic oligonucleotide
aguuuguccaccucuguca

SEQ ID NO: 1894104 - RNA, 19 nt, Artificial Sequence
  Description of Artificial Sequence: Synthetic oligonucleotide
gugauaaauggcuuugcug

SEQ ID NO: 1894105 - RNA, 19 nt, Artificial Sequence
  Description of Artificial Sequence: Synthetic oligonucleotide
uucaaggugguaguuacug

SEQ ID NO: 1894106 - RNA, 19 nt, Artificial Sequence
  Description of Artificial Sequence: Synthetic oligonucleotide
caccauaaaguucucguag

SEQ ID NO: 1894107 - RNA, 19 nt, Artificial Sequence
  Description of Artificial Sequence: Synthetic oligonucleotide
auaaauggcuuugcugccc

SEQ ID NO: 1894108 - RNA, 19 nt, Artificial Sequence
  Description of Artificial Sequence: Synthetic oligonucleotide
ucaaggugguaguuacugg

SEQ ID NO: 1894109 - RNA, 19 nt, Artificial Sequence
  Description of Artificial Sequence: Synthetic oligonucleotide
uauacuaggaggugaggaa

SEQ ID NO: 1894110 - RNA, 19 nt, Artificial Sequence
  Description of Artificial Sequence: Synthetic oligonucleotide
uggauaauacauugcaaau

SEQ ID NO: 1894111 - RNA, 19 nt, Artificial Sequence
  Description of Artificial Sequence: Synthetic oligonucleotide
caccugaugguccauauac

SEQ ID NO: 1894112 - RNA, 19 nt, Artificial Sequence
  Description of Artificial Sequence: Synthetic oligonucleotide
acuuugaagucucuuugug

SEQ ID NO: 1894113 - RNA, 19 nt, Artificial Sequence
  Description of Artificial Sequence: Synthetic oligonucleotide
gaauuacagcacaagauca

SEQ ID NO: 1894114 - RNA, 19 nt, Artificial Sequence
  Description of Artificial Sequence: Synthetic oligonucleotide
ucauaauaggcugccaucu

SEQ ID NO: 1894115 - RNA, 19 nt, Artificial Sequence
  Description of Artificial Sequence: Synthetic oligonucleotide
uguaggagcucggagagca

SEQ ID NO: 1894116 - RNA, 19 nt, Artificial Sequence
  Description of Artificial Sequence: Synthetic oligonucleotide
agucgauguucauaauagg

SEQ ID NO: 1894117 - RNA, 19 nt, Artificial Sequence
  Description of Artificial Sequence: Synthetic oligonucleotide
gucgauguucauaauaggc

SEQ ID NO: 1894118 - RNA, 19 nt, Artificial Sequence
  Description of Artificial Sequence: Synthetic oligonucleotide
guauuuguccacccagagg

SEQ ID NO: 1894119 - RNA, 19 nt, Artificial Sequence
  Description of Artificial Sequence: Synthetic oligonucleotide
uguacuucuccaugguucu

SEQ ID NO: 1894120 - RNA, 19 nt, Artificial Sequence
  Description of Artificial Sequence: Synthetic oligonucleotide
uacacauaauucuugcuuu

SEQ ID NO: 1894121 - RNA, 19 nt, Artificial Sequence
  Description of Artificial Sequence: Synthetic oligonucleotide
acuuaagccacaaaugccu

SEQ ID NO: 1894122 - RNA, 19 nt, Artificial Sequence
  Description of Artificial Sequence: Synthetic oligonucleotide
uagucugauguucaauccu

SEQ ID NO: 1894123 - RNA, 19 nt, Artificial Sequence
  Description of Artificial Sequence: Synthetic oligonucleotide
ucguaggauacacauaauu

SEQ ID NO: 1894124 - RNA, 19 nt, Artificial Sequence
  Description of Artificial Sequence: Synthetic oligonucleotide
uaggauacacauaauucuu

SEQ ID NO: 1894125 - RNA, 19 nt, Artificial Sequence
  Description of Artificial Sequence: Synthetic oligonucleotide
aaaucugcaugaacacaac

SEQ ID NO: 1894126 - RNA, 19 nt, Artificial Sequence
  Description of Artificial Sequence: Synthetic oligonucleotide
cugaugguccauauacuag

SEQ ID NO: 1894127 - RNA, 19 nt, Artificial Sequence
  Description of Artificial Sequence: Synthetic oligonucleotide
uucauaauaggcugccauc

SEQ ID NO: 1894128 - RNA, 19 nt, Artificial Sequence
  Description of Artificial Sequence: Synthetic oligonucleotide
auauacuaggaggugagga

SEQ ID NO: 1894129 - RNA, 19 nt, Artificial Sequence
  Description of Artificial Sequence: Synthetic oligonucleotide
caugaguaaggcuuuccug

SEQ ID NO: 1894130 - RNA, 19 nt, Artificial Sequence
  Description of Artificial Sequence: Synthetic oligonucleotide
gauguucauaauaggcugc

SEQ ID NO: 1894131 - RNA, 19 nt, Artificial Sequence
  Description of Artificial Sequence: Synthetic oligonucleotide
aagucucuuugugaacugg

SEQ ID NO: 1894132 - RNA, 19 nt, Artificial Sequence
  Description of Artificial Sequence: Synthetic oligonucleotide
uccauauacuaggagguga

SEQ ID NO: 1894133 - RNA, 19 nt, Artificial Sequence
  Description of Artificial Sequence: Synthetic oligonucleotide
gccuccaagugauaaaugg

SEQ ID NO: 1894134 - RNA, 19 nt, Artificial Sequence
  Description of Artificial Sequence: Synthetic oligonucleotide
gguaucaccuuagaagugg

SEQ ID NO: 1894135 - RNA, 19 nt, Artificial Sequence
  Description of Artificial Sequence: Synthetic oligonucleotide
uggaguuguaauagucuga

SEQ ID NO: 1894136 - RNA, 19 nt, Artificial Sequence
  Description of Artificial Sequence: Synthetic oligonucleotide
cagcuucgaaggaagagcc

SEQ ID NO: 1894137 - RNA, 19 nt, Artificial Sequence
  Description of Artificial Sequence: Synthetic oligonucleotide
ucuuggucuucaguaaaag

SEQ ID NO: 1894138 - RNA, 19 nt, Artificial Sequence
  Description of Artificial Sequence: Synthetic oligonucleotide
acaugaguaaggcuuuccu

SEQ ID NO: 1894139 - RNA, 19 nt, Artificial Sequence
  Description of Artificial Sequence: Synthetic oligonucleotide
uguuuccggcaucacuggg

SEQ ID NO: 1894140 - RNA, 19 nt, Artificial Sequence
  Description of Artificial Sequence: Synthetic oligonucleotide
ugagguuucugcaggacuu

SEQ ID NO: 1894141 - RNA, 19 nt, Artificial Sequence
  Description of Artificial Sequence: Synthetic oligonucleotide
aguggaauuacagcacaag

SEQ ID NO: 1894142 - RNA, 19 nt, Artificial Sequence
  Description of Artificial Sequence: Synthetic oligonucleotide
ucaccuuagaaguggaauu

SEQ ID NO: 1894143 - RNA, 19 nt, Artificial Sequence
  Description of Artificial Sequence: Synthetic oligonucleotide
uucugcgcaaggcaugcug

SEQ ID NO: 1894144 - RNA, 19 nt, Artificial Sequence
  Description of Artificial Sequence: Synthetic oligonucleotide
acuuggaggagccgcuaac

SEQ ID NO: 1894145 - RNA, 19 nt, Artificial Sequence
  Description of Artificial Sequence: Synthetic oligonucleotide
ucuccugaauuaugacccg

SEQ ID NO: 1894146 - RNA, 19 nt, Artificial Sequence
  Description of Artificial Sequence: Synthetic oligonucleotide
agucugauguucaauccuc

SEQ ID NO: 1894147 - RNA, 19 nt, Artificial Sequence
  Description of Artificial Sequence: Synthetic oligonucleotide
aaaugccuccaagugauaa

SEQ ID NO: 1894148 - RNA, 19 nt, Artificial Sequence
  Description of Artificial Sequence: Synthetic oligonucleotide
uuugugaguuuguccaccu

SEQ ID NO: 1894149 - RNA, 19 nt, Artificial Sequence
  Description of Artificial Sequence: Synthetic oligonucleotide
acugacaauagcauuugca

SEQ ID NO: 1894150 - RNA, 19 nt, Artificial Sequence
  Description of Artificial Sequence: Synthetic oligonucleotide
gaguaaggcuuuccugagg

SEQ ID NO: 1894151 - RNA, 19 nt, Artificial Sequence
  Description of Artificial Sequence: Synthetic oligonucleotide
ucugcgcaaggcaugcuga

SEQ ID NO: 1894152 - RNA, 19 nt, Artificial Sequence
  Description of Artificial Sequence: Synthetic oligonucleotide
uuggaggagccgcuaacug

SEQ ID NO: 1894153 - RNA, 19 nt, Artificial Sequence
  Description of Artificial Sequence: Synthetic oligonucleotide
uucuuauaaaguagccaua

SEQ ID NO: 1894154 - RNA, 19 nt, Artificial Sequence
  Description of Artificial Sequence: Synthetic oligonucleotide
caugaauuucuuauaaagu

SEQ ID NO: 1894155 - RNA, 19 nt, Artificial Sequence
  Description of Artificial Sequence: Synthetic oligonucleotide
ugagcauccuuugugaguu

SEQ ID NO: 1894156 - RNA, 19 nt, Artificial Sequence
  Description of Artificial Sequence: Synthetic oligonucleotide
gugauaguccagccgggcg

SEQ ID NO: 1894157 - RNA, 19 nt, Artificial Sequence
  Description of Artificial Sequence: Synthetic oligonucleotide
cccaucacaguuauguagg

SEQ ID NO: 1894158 - RNA, 19 nt, Artificial Sequence
  Description of Artificial Sequence: Synthetic oligonucleotide
ucccucgaacuucaagaag

SEQ ID NO: 1894159 - RNA, 19 nt, Artificial Sequence
  Description of Artificial Sequence: Synthetic oligonucleotide
caagugauaaauggcuuug

SEQ ID NO: 1894160 - RNA, 19 nt, Artificial Sequence
  Description of Artificial Sequence: Synthetic oligonucleotide
acaaaugccuccaagugau

SEQ ID NO: 1894161 - RNA, 19 nt, Artificial Sequence
  Description of Artificial Sequence: Synthetic oligonucleotide
gacccggucacuguuuccg

SEQ ID NO: 1894162 - RNA, 19 nt, Artificial Sequence
  Description of Artificial Sequence: Synthetic oligonucleotide
cuuugaagucucuuuguga

SEQ ID NO: 1894163 - RNA, 19 nt, Artificial Sequence
  Description of Artificial Sequence: Synthetic oligonucleotide
ucuugcagacaguggauaa

SEQ ID NO: 1894164 - RNA, 19 nt, Artificial Sequence
  Description of Artificial Sequence: Synthetic oligonucleotide
accuuagaaguggaauuac

SEQ ID NO: 1894165 - RNA, 19 nt, Artificial Sequence
  Description of Artificial Sequence: Synthetic oligonucleotide
cccucgaacuucaagaagc

SEQ ID NO: 1894166 - RNA, 19 nt, Artificial Sequence
  Description of Artificial Sequence: Synthetic oligonucleotide
uggaggagccgcuaacuga

SEQ ID NO: 1894167 - RNA, 19 nt, Artificial Sequence
  Description of Artificial Sequence: Synthetic oligonucleotide
cagccugugagccagcuuc

SEQ ID NO: 1894168 - RNA, 19 nt, Artificial Sequence
  Description of Artificial Sequence: Synthetic oligonucleotide
auuaugacccggucacugu

SEQ ID NO: 1894169 - RNA, 19 nt, Artificial Sequence
  Description of Artificial Sequence: Synthetic oligonucleotide
ugcagacaguggauaauac

SEQ ID NO: 1894170 - RNA, 19 nt, Artificial Sequence
  Description of Artificial Sequence: Synthetic oligonucleotide
cugaauuaugacccgguca

SEQ ID NO: 1894171 - RNA, 19 nt, Artificial Sequence
  Description of Artificial Sequence: Synthetic oligonucleotide
augguccauauacuaggag

SEQ ID NO: 1894172 - RNA, 19 nt, Artificial Sequence
  Description of Artificial Sequence: Synthetic oligonucleotide
uccggcaucacugggauua

SEQ ID NO: 1894173 - RNA, 19 nt, Artificial Sequence
  Description of Artificial Sequence: Synthetic oligonucleotide
accuccccuuuccagcugc

SEQ ID NO: 1894174 - RNA, 19 nt, Artificial Sequence
  Description of Artificial Sequence: Synthetic oligonucleotide
uuacuggcaauggugcuga

SEQ ID NO: 1894175 - RNA, 19 nt, Artificial Sequence
  Description of Artificial Sequence: Synthetic oligonucleotide
aggagccgcuaacugaguc

SEQ ID NO: 1894176 - RNA, 19 nt, Artificial Sequence
  Description of Artificial Sequence: Synthetic oligonucleotide
cuuugugaguuuguccacc

SEQ ID NO: 1894177 - RNA, 19 nt, Artificial Sequence
  Description of Artificial Sequence: Synthetic oligonucleotide
uuauuaucucaggaggaau

SEQ ID NO: 1894178 - RNA, 19 nt, Artificial Sequence
  Description of Artificial Sequence: Synthetic oligonucleotide
uccucaacuuuuccacccc

SEQ ID NO: 1894179 - RNA, 19 nt, Artificial Sequence
  Description of Artificial Sequence: Synthetic oligonucleotide
uuuccggcaucacugggau

SEQ ID NO: 1894180 - RNA, 19 nt, Artificial Sequence
  Description of Artificial Sequence: Synthetic oligonucleotide
aggaauacagugaguuagg

SEQ ID NO: 1894181 - RNA, 19 nt, Artificial Sequence
  Description of Artificial Sequence: Synthetic oligonucleotide
ucgaaggaagagccagacc

SEQ ID NO: 1894182 - RNA, 19 nt, Artificial Sequence
  Description of Artificial Sequence: Synthetic oligonucleotide
cagcacaagaucagccugc

SEQ ID NO: 1894183 - RNA, 19 nt, Artificial Sequence
  Description of Artificial Sequence: Synthetic oligonucleotide
aucaccuuagaaguggaau

SEQ ID NO: 1894184 - RNA, 19 nt, Artificial Sequence
  Description of Artificial Sequence: Synthetic oligonucleotide
guuacuggcaauggugcug

SEQ ID NO: 1894185 - RNA, 19 nt, Artificial Sequence
  Description of Artificial Sequence: Synthetic oligonucleotide
cuucaguaaaaggguauug

SEQ ID NO: 1894186 - RNA, 19 nt, Artificial Sequence
  Description of Artificial Sequence: Synthetic oligonucleotide
augacccggucacuguuuc

SEQ ID NO: 1894187 - RNA, 19 nt, Artificial Sequence
  Description of Artificial Sequence: Synthetic oligonucleotide
auagagccucccucgaacu

SEQ ID NO: 1894188 - RNA, 19 nt, Artificial Sequence
  Description of Artificial Sequence: Synthetic oligonucleotide
aggauacacauaauucuug

SEQ ID NO: 1894189 - RNA, 19 nt, Artificial Sequence
  Description of Artificial Sequence: Synthetic oligonucleotide
cuucaaugcugggagcagg

SEQ ID NO: 1894190 - RNA, 19 nt, Artificial Sequence
  Description of Artificial Sequence: Synthetic oligonucleotide
cauaauaggcugccaucug

SEQ ID NO: 1894191 - RNA, 19 nt, Artificial Sequence
  Description of Artificial Sequence: Synthetic oligonucleotide
auuauacccacagccccag

SEQ ID NO: 1894192 - RNA, 19 nt, Artificial Sequence
  Description of Artificial Sequence: Synthetic oligonucleotide
cacaaaugccuccaaguga

SEQ ID NO: 1894193 - RNA, 19 nt, Artificial Sequence
  Description of Artificial Sequence: Synthetic oligonucleotide
agagccucccucgaacuuc

SEQ ID NO: 1894194 - RNA, 19 nt, Artificial Sequence
  Description of Artificial Sequence: Synthetic oligonucleotide
gagccgcuaacugagucag

SEQ ID NO: 1894195 - RNA, 19 nt, Artificial Sequence
  Description of Artificial Sequence: Synthetic oligonucleotide
cugggauuaacuucaaggu

SEQ ID NO: 1894196 - RNA, 19 nt, Artificial Sequence
  Description of Artificial Sequence: Synthetic oligonucleotide
cccuucauuauuaucucag

SEQ ID NO: 1894197 - RNA, 19 nt, Artificial Sequence
  Description of Artificial Sequence: Synthetic oligonucleotide
cguaggauacacauaauuc

SEQ ID NO: 1894198 - RNA, 19 nt, Artificial Sequence
  Description of Artificial Sequence: Synthetic oligonucleotide
cccaguguaaaucugcaug

SEQ ID NO: 1894199 - RNA, 19 nt, Artificial Sequence
  Description of Artificial Sequence: Synthetic oligonucleotide
cauauacuaggaggugagg

SEQ ID NO: 1894200 - RNA, 19 nt, Artificial Sequence
  Description of Artificial Sequence: Synthetic oligonucleotide
aaaguucucguaggauaca

SEQ ID NO: 1894201 - RNA, 19 nt, Artificial Sequence
  Description of Artificial Sequence: Synthetic oligonucleotide
uaauagucugauguucaau

SEQ ID NO: 1894202 - RNA, 19 nt, Artificial Sequence
  Description of Artificial Sequence: Synthetic oligonucleotide
ucuucaguaaaaggguauu

SEQ ID NO: 1894203 - RNA, 19 nt, Artificial Sequence
  Description of Artificial Sequence: Synthetic oligonucleotide
uuaugacccggucacuguu

SEQ ID NO: 1894204 - RNA, 19 nt, Artificial Sequence
  Description of Artificial Sequence: Synthetic oligonucleotide
gugguaguuacuggcaaug

SEQ ID NO: 1894205 - RNA, 19 nt, Artificial Sequence
  Description of Artificial Sequence: Synthetic oligonucleotide
gaguuguaauagucugaug

SEQ ID NO: 1894206 - RNA, 19 nt, Artificial Sequence
  Description of Artificial Sequence: Synthetic oligonucleotide
aacuucaaggugguaguua

SEQ ID NO: 1894207 - RNA, 19 nt, Artificial Sequence
  Description of Artificial Sequence: Synthetic oligonucleotide
ugguucugcgcaaggcaug

SEQ ID NO: 1894208 - RNA, 19 nt, Artificial Sequence
  Description of Artificial Sequence: Synthetic oligonucleotide
uuuccagcaccugaugguc

SEQ ID NO: 1894209 - RNA, 19 nt, Artificial Sequence
  Description of Artificial Sequence: Synthetic oligonucleotide
ugcagguggacauguacuu

SEQ ID NO: 1894210 - RNA, 19 nt, Artificial Sequence
  Description of Artificial Sequence: Synthetic oligonucleotide
aagaagccucuguggcguc

SEQ ID NO: 1894211 - RNA, 19 nt, Artificial Sequence
  Description of Artificial Sequence: Synthetic oligonucleotide
cuccaagugauaaauggcu

SEQ ID NO: 1894212 - RNA, 19 nt, Artificial Sequence
  Description of Artificial Sequence: Synthetic oligonucleotide
uuucggggauuucuugguc

SEQ ID NO: 1894213 - RNA, 19 nt, Artificial Sequence
  Description of Artificial Sequence: Synthetic oligonucleotide
ugcaagcuucacacaugag

SEQ ID NO: 1894214 - RNA, 19 nt, Artificial Sequence
  Description of Artificial Sequence: Synthetic oligonucleotide
acaccauaaaguucucgua

SEQ ID NO: 1894215 - RNA, 19 nt, Artificial Sequence
  Description of Artificial Sequence: Synthetic oligonucleotide
uaucaccuuagaaguggaa

SEQ ID NO: 1894216 - RNA, 19 nt, Artificial Sequence
  Description of Artificial Sequence: Synthetic oligonucleotide
ccauauacuaggaggugag

SEQ ID NO: 1894217 - RNA, 19 nt, Artificial Sequence
  Description of Artificial Sequence: Synthetic oligonucleotide
accccgacaccauaaaguu

SEQ ID NO: 1894218 - RNA, 19 nt, Artificial Sequence
  Description of Artificial Sequence: Synthetic oligonucleotide
ccuccaagugauaaauggc

SEQ ID NO: 1894219 - RNA, 19 nt, Artificial Sequence
  Description of Artificial Sequence: Synthetic oligonucleotide
cugcagucgauguucauaa

SEQ ID NO: 1894220 - RNA, 19 nt, Artificial Sequence
  Description of Artificial Sequence: Synthetic oligonucleotide
aguuauguaggagcucgga

SEQ ID NO: 1894221 - RNA, 19 nt, Artificial Sequence
  Description of Artificial Sequence: Synthetic oligonucleotide
gguauugcugcacucugca

SEQ ID NO: 1894222 - RNA, 19 nt, Artificial Sequence
  Description of Artificial Sequence: Synthetic oligonucleotide
auacuaggaggugaggaaa

SEQ ID NO: 1894223 - RNA, 19 nt, Artificial Sequence
  Description of Artificial Sequence: Synthetic oligonucleotide
caguuauguaggagcucgg

SEQ ID NO: 1894224 - RNA, 19 nt, Artificial Sequence
  Description of Artificial Sequence: Synthetic oligonucleotide
uguggcgucugcugacuga

SEQ ID NO: 1894225 - RNA, 19 nt, Artificial Sequence
  Description of Artificial Sequence: Synthetic oligonucleotide
guucucguaggauacacau

SEQ ID NO: 1894226 - RNA, 19 nt, Artificial Sequence
  Description of Artificial Sequence: Synthetic oligonucleotide
uucucguaggauacacaua

SEQ ID NO: 1894227 - RNA, 19 nt, Artificial Sequence
  Description of Artificial Sequence: Synthetic oligonucleotide
uguucauaauaggcugcca

SEQ ID NO: 1894228 - RNA, 19 nt, Artificial Sequence
  Description of Artificial Sequence: Synthetic oligonucleotide
gagccagcuucgaaggaag

SEQ ID NO: 1894229 - RNA, 19 nt, Artificial Sequence
  Description of Artificial Sequence: Synthetic oligonucleotide
acggccgguauuuguccac

SEQ ID NO: 1894230 - RNA, 19 nt, Artificial Sequence
  Description of Artificial Sequence: Synthetic oligonucleotide
gaugguccauauacuagga

SEQ ID NO: 1894231 - RNA, 19 nt, Artificial Sequence
  Description of Artificial Sequence: Synthetic oligonucleotide
ggaggugaggaaaagucac

SEQ ID NO: 1894232 - RNA, 19 nt, Artificial Sequence
  Description of Artificial Sequence: Synthetic oligonucleotide
cuccugaauuaugacccgg

SEQ ID NO: 1894233 - RNA, 19 nt, Artificial Sequence
  Description of Artificial Sequence: Synthetic oligonucleotide
uuuguccacccagaggcuc

SEQ ID NO: 1894234 - RNA, 19 nt, Artificial Sequence
  Description of Artificial Sequence: Synthetic oligonucleotide
gggguaucaccuuagaagu

SEQ ID NO: 1894235 - RNA, 19 nt, Artificial Sequence
  Description of Artificial Sequence: Synthetic oligonucleotide
uggugcugauuucaauuuu

SEQ ID NO: 1894236 - RNA, 19 nt, Artificial Sequence
  Description of Artificial Sequence: Synthetic oligonucleotide
gcaagcuucacacaugagu

SEQ ID NO: 1894237 - RNA, 19 nt, Artificial Sequence
  Description of Artificial Sequence: Synthetic oligonucleotide
aggugguaguuacuggcaa

SEQ ID NO: 1894238 - RNA, 19 nt, Artificial Sequence
  Description of Artificial Sequence: Synthetic oligonucleotide
agagcaggcccuucauuau

SEQ ID NO: 1894239 - RNA, 19 nt, Artificial Sequence
  Description of Artificial Sequence: Synthetic oligonucleotide
auuugcagucucccucaga

SEQ ID NO: 1894240 - RNA, 19 nt, Artificial Sequence
  Description of Artificial Sequence: Synthetic oligonucleotide
gcucauggcugcuacaguc

SEQ ID NO: 1894241 - RNA, 19 nt, Artificial Sequence
  Description of Artificial Sequence: Synthetic oligonucleotide
aaguggaauuacagcacaa

SEQ ID NO: 1894242 - RNA, 19 nt, Artificial Sequence
  Description of Artificial Sequence: Synthetic oligonucleotide
agucucuuugugaacuggu

SEQ ID NO: 1894243 - RNA, 19 nt, Artificial Sequence
  Description of Artificial Sequence: Synthetic oligonucleotide
cugacugacaauagcauuu

SEQ ID NO: 1894244 - RNA, 19 nt, Artificial Sequence
  Description of Artificial Sequence: Synthetic oligonucleotide
agcaggcacucgaacugcc

SEQ ID NO: 1894245 - RNA, 19 nt, Artificial Sequence
  Description of Artificial Sequence: Synthetic oligonucleotide
ggauaauacauugcaaaua

SEQ ID NO: 1894246 - RNA, 19 nt, Artificial Sequence
  Description of Artificial Sequence: Synthetic oligonucleotide
caguccaucuccaugaauu

SEQ ID NO: 1894247 - RNA, 19 nt, Artificial Sequence
  Description of Artificial Sequence: Synthetic oligonucleotide
ccagcuucgaaggaagagc

SEQ ID NO: 1894248 - RNA, 19 nt, Artificial Sequence
  Description of Artificial Sequence: Synthetic oligonucleotide
ccaguguaaaucugcauga

SEQ ID NO: 1894249 - RNA, 19 nt, Artificial Sequence
  Description of Artificial Sequence: Synthetic oligonucleotide
ucaaugcugggagcaggca

SEQ ID NO: 1894250 - RNA, 19 nt, Artificial Sequence
  Description of Artificial Sequence: Synthetic oligonucleotide
ugcgcaaggcaugcugagc

SEQ ID NO: 1894251 - RNA, 19 nt, Artificial Sequence
  Description of Artificial Sequence: Synthetic oligonucleotide
acccggucacuguuuccgg

SEQ ID NO: 1894252 - RNA, 19 nt, Artificial Sequence
  Description of Artificial Sequence: Synthetic oligonucleotide
cacugggauuaacuucaag

SEQ ID NO: 1894253 - RNA, 19 nt, Artificial Sequence
  Description of Artificial Sequence: Synthetic oligonucleotide
cucaacuuuuccaccccga

SEQ ID NO: 1894254 - RNA, 19 nt, Artificial Sequence
  Description of Artificial Sequence: Synthetic oligonucleotide
guccauauacuaggaggug

SEQ ID NO: 1894255 - RNA, 19 nt, Artificial Sequence
  Description of Artificial Sequence: Synthetic oligonucleotide
gauguucaauccucaacuu

SEQ ID NO: 1894256 - RNA, 19 nt, Artificial Sequence
  Description of Artificial Sequence: Synthetic oligonucleotide
cugcgcaaggcaugcugag

SEQ ID NO: 1894257 - RNA, 19 nt, Artificial Sequence
  Description of Artificial Sequence: Synthetic oligonucleotide
cucagauacaccucccagu

SEQ ID NO: 1894258 - RNA, 19 nt, Artificial Sequence
  Description of Artificial Sequence: Synthetic oligonucleotide
ccucccucgaacuucaaga

SEQ ID NO: 1894259 - RNA, 19 nt, Artificial Sequence
  Description of Artificial Sequence: Synthetic oligonucleotide
cacacugcaccagguugcg

SEQ ID NO: 1894260 - RNA, 19 nt, Artificial Sequence
  Description of Artificial Sequence: Synthetic oligonucleotide
guuuccggcaucacuggga

SEQ ID NO: 1894261 - RNA, 19 nt, Artificial Sequence
  Description of Artificial Sequence: Synthetic oligonucleotide
ugacccggucacuguuucc

SEQ ID NO: 1894262 - RNA, 19 nt, Artificial Sequence
  Description of Artificial Sequence: Synthetic oligonucleotide
ccucagauacaccucccag

SEQ ID NO: 1894263 - RNA, 19 nt, Artificial Sequence
  Description of Artificial Sequence: Synthetic oligonucleotide
gaagccucuguggcgucug

SEQ ID NO: 1894264 - RNA, 19 nt, Artificial Sequence
  Description of Artificial Sequence: Synthetic oligonucleotide
caccccgacaccauaaagu

SEQ ID NO: 1894265 - RNA, 19 nt, Artificial Sequence
  Description of Artificial Sequence: Synthetic oligonucleotide
ccgguauuuguccacccag

SEQ ID NO: 1894266 - RNA, 19 nt, Artificial Sequence
  Description of Artificial Sequence: Synthetic oligonucleotide
gucugcugacugacaauag

SEQ ID NO: 1894267 - RNA, 19 nt, Artificial Sequence
  Description of Artificial Sequence: Synthetic oligonucleotide
augguucugcgcaaggcau

SEQ ID NO: 1894268 - RNA, 19 nt, Artificial Sequence
  Description of Artificial Sequence: Synthetic oligonucleotide
gaacuucaagaagccucug

SEQ ID NO: 1894269 - RNA, 19 nt, Artificial Sequence
  Description of Artificial Sequence: Synthetic oligonucleotide
gcauuugcagucucccuca

SEQ ID NO: 1894270 - RNA, 19 nt, Artificial Sequence
  Description of Artificial Sequence: Synthetic oligonucleotide
agcacaagaucagccugca

SEQ ID NO: 1894271 - RNA, 19 nt, Artificial Sequence
  Description of Artificial Sequence: Synthetic oligonucleotide
ugcccaucacaguuaugua

SEQ ID NO: 1894272 - RNA, 19 nt, Artificial Sequence
  Description of Artificial Sequence: Synthetic oligonucleotide
cucccucgaacuucaagaa

SEQ ID NO: 1894273 - RNA, 19 nt, Artificial Sequence
  Description of Artificial Sequence: Synthetic oligonucleotide
ggagccgcuaacugaguca

SEQ ID NO: 1894274 - RNA, 19 nt, Artificial Sequence
  Description of Artificial Sequence: Synthetic oligonucleotide
uaacuucaaggugguaguu

SEQ ID NO: 1894275 - RNA, 19 nt, Artificial Sequence
  Description of Artificial Sequence: Synthetic oligonucleotide
ccugcagguggacauguac

SEQ ID NO: 1894276 - RNA, 19 nt, Artificial Sequence
  Description of Artificial Sequence: Synthetic oligonucleotide
ucgaacugccaggcaccgg

SEQ ID NO: 1894277 - RNA, 19 nt, Artificial Sequence
  Description of Artificial Sequence: Synthetic oligonucleotide
accugaugguccauauacu

SEQ ID NO: 1894278 - RNA, 19 nt, Artificial Sequence
  Description of Artificial Sequence: Synthetic oligonucleotide
cccgacaccauaaaguucu

SEQ ID NO: 1894279 - RNA, 19 nt, Artificial Sequence
  Description of Artificial Sequence: Synthetic oligonucleotide
cucugcaagcuucacacau

SEQ ID NO: 1894280 - RNA, 19 nt, Artificial Sequence
  Description of Artificial Sequence: Synthetic oligonucleotide
gguccauauacuaggaggu

SEQ ID NO: 1894281 - RNA, 19 nt, Artificial Sequence
  Description of Artificial Sequence: Synthetic oligonucleotide
caagaucagccugcaggug

SEQ ID NO: 1894282 - RNA, 19 nt, Artificial Sequence
  Description of Artificial Sequence: Synthetic oligonucleotide
ccuuagaaguggaauuaca

SEQ ID NO: 1894283 - RNA, 19 nt, Artificial Sequence
  Description of Artificial Sequence: Synthetic oligonucleotide
agugaguuaggagcucaua

SEQ ID NO: 1894284 - RNA, 19 nt, Artificial Sequence
  Description of Artificial Sequence: Synthetic oligonucleotide
cauugcaaauaucuucaau

SEQ ID NO: 1894285 - RNA, 19 nt, Artificial Sequence
  Description of Artificial Sequence: Synthetic oligonucleotide
uccagccgggcgagggagc

SEQ ID NO: 1894286 - RNA, 19 nt, Artificial Sequence
  Description of Artificial Sequence: Synthetic oligonucleotide
ugcagucgauguucauaau

SEQ ID NO: 1894287 - RNA, 19 nt, Artificial Sequence
  Description of Artificial Sequence: Synthetic oligonucleotide
accucccagucuguuucgg

SEQ ID NO: 1894288 - RNA, 19 nt, Artificial Sequence
  Description of Artificial Sequence: Synthetic oligonucleotide
gucuguuucggggauuucu

SEQ ID NO: 1894289 - RNA, 19 nt, Artificial Sequence
  Description of Artificial Sequence: Synthetic oligonucleotide
caccuuagaaguggaauua

SEQ ID NO: 1894290 - RNA, 19 nt, Artificial Sequence
  Description of Artificial Sequence: Synthetic oligonucleotide
ccugaauuaugacccgguc

SEQ ID NO: 1894291 - RNA, 19 nt, Artificial Sequence
  Description of Artificial Sequence: Synthetic oligonucleotide
aggcaugcugagcauccuu

SEQ ID NO: 1894292 - RNA, 19 nt, Artificial Sequence
  Description of Artificial Sequence: Synthetic oligonucleotide
auuuguccacccagaggcu

SEQ ID NO: 1894293 - RNA, 19 nt, Artificial Sequence
  Description of Artificial Sequence: Synthetic oligonucleotide
aguccagccgggcgaggga

SEQ ID NO: 1894294 - RNA, 19 nt, Artificial Sequence
  Description of Artificial Sequence: Synthetic oligonucleotide
cauaaaguucucguaggau

SEQ ID NO: 1894295 - RNA, 19 nt, Artificial Sequence
  Description of Artificial Sequence: Synthetic oligonucleotide
gcugggagcaggcacucga

SEQ ID NO: 1894296 - RNA, 19 nt, Artificial Sequence
  Description of Artificial Sequence: Synthetic oligonucleotide
ccugaugguccauauacua

SEQ ID NO: 1894297 - RNA, 19 nt, Artificial Sequence
  Description of Artificial Sequence: Synthetic oligonucleotide
ugcugggagcaggcacucg

SEQ ID NO: 1894298 - RNA, 19 nt, Artificial Sequence
  Description of Artificial Sequence: Synthetic oligonucleotide
ccauaaaguucucguagga

SEQ ID NO: 1894299 - RNA, 19 nt, Artificial Sequence
  Description of Artificial Sequence: Synthetic oligonucleotide
cuccaugguucugcgcaag

SEQ ID NO: 1894300 - RNA, 19 nt, Artificial Sequence
  Description of Artificial Sequence: Synthetic oligonucleotide
ggaguuguaauagucugau

SEQ ID NO: 1894301 - RNA, 19 nt, Artificial Sequence
  Description of Artificial Sequence: Synthetic oligonucleotide
agaagccucuguggcgucu

SEQ ID NO: 1894302 - RNA, 19 nt, Artificial Sequence
  Description of Artificial Sequence: Synthetic oligonucleotide
gcacggccgguauuugucc

SEQ ID NO: 1894303 - RNA, 19 nt, Artificial Sequence
  Description of Artificial Sequence: Synthetic oligonucleotide
agcaggcccuucauuauua

SEQ ID NO: 1894304 - RNA, 19 nt, Artificial Sequence
  Description of Artificial Sequence: Synthetic oligonucleotide
cuguggcgucugcugacug

SEQ ID NO: 1894305 - RNA, 19 nt, Artificial Sequence
  Description of Artificial Sequence: Synthetic oligonucleotide
caugcugagcauccuuugu

SEQ ID NO: 1894306 - RNA, 19 nt, Artificial Sequence
  Description of Artificial Sequence: Synthetic oligonucleotide
ggguauugcugcacucugc

SEQ ID NO: 1894307 - RNA, 19 nt, Artificial Sequence
  Description of Artificial Sequence: Synthetic oligonucleotide
cacccagaggcucauggcu

SEQ ID NO: 1894308 - RNA, 19 nt, Artificial Sequence
  Description of Artificial Sequence: Synthetic oligonucleotide
ggguaucaccuuagaagug

SEQ ID NO: 1894309 - RNA, 19 nt, Artificial Sequence
  Description of Artificial Sequence: Synthetic oligonucleotide
agcuucgaaggaagagcca

SEQ ID NO: 1894310 - RNA, 19 nt, Artificial Sequence
  Description of Artificial Sequence: Synthetic oligonucleotide
caccggcugcggaucgggg

SEQ ID NO: 1894311 - RNA, 19 nt, Artificial Sequence
  Description of Artificial Sequence: Synthetic oligonucleotide
gaauuaugacccggucacu

SEQ ID NO: 1894312 - RNA, 19 nt, Artificial Sequence
  Description of Artificial Sequence: Synthetic oligonucleotide
cgccuguuccuugugauag

SEQ ID NO: 1894313 - RNA, 19 nt, Artificial Sequence
  Description of Artificial Sequence: Synthetic oligonucleotide
auaguccagccgggcgagg

SEQ ID NO: 1894314 - RNA, 19 nt, Artificial Sequence
  Description of Artificial Sequence: Synthetic oligonucleotide
cuccccuuuccagcugccc

SEQ ID NO: 1894315 - RNA, 19 nt, Artificial Sequence
  Description of Artificial Sequence: Synthetic oligonucleotide
uggcugcuacagucccacc

SEQ ID NO: 1894316 - RNA, 19 nt, Artificial Sequence
  Description of Artificial Sequence: Synthetic oligonucleotide
ggcaucacugggauuaacu

SEQ ID NO: 1894317 - RNA, 19 nt, Artificial Sequence
  Description of Artificial Sequence: Synthetic oligonucleotide
cuuggaggagccgcuaacu

SEQ ID NO: 1894318 - RNA, 19 nt, Artificial Sequence
  Description of Artificial Sequence: Synthetic oligonucleotide
gccgcuaacugagucagaa

SEQ ID NO: 1894319 - RNA, 19 nt, Artificial Sequence
  Description of Artificial Sequence: Synthetic oligonucleotide
cacggccgguauuugucca

SEQ ID NO: 1894320 - RNA, 19 nt, Artificial Sequence
  Description of Artificial Sequence: Synthetic oligonucleotide
gcccuucauuauuaucuca

SEQ ID NO: 1894321 - RNA, 19 nt, Artificial Sequence
  Description of Artificial Sequence: Synthetic oligonucleotide
cacacaugaguaaggcuuu

SEQ ID NO: 1894322 - RNA, 19 nt, Artificial Sequence
  Description of Artificial Sequence: Synthetic oligonucleotide
agcugcagucgauguucau

SEQ ID NO: 1894323 - RNA, 19 nt, Artificial Sequence
  Description of Artificial Sequence: Synthetic oligonucleotide
gagcacggccgguauuugu

SEQ ID NO: 1894324 - RNA, 19 nt, Artificial Sequence
  Description of Artificial Sequence: Synthetic oligonucleotide
gcacaagaucagccugcag

SEQ ID NO: 1894325 - RNA, 19 nt, Artificial Sequence
  Description of Artificial Sequence: Synthetic oligonucleotide
gauacaccucccagucugu

SEQ ID NO: 1894326 - RNA, 19 nt, Artificial Sequence
  Description of Artificial Sequence: Synthetic oligonucleotide
caauggugcugauuucaau

SEQ ID NO: 1894327 - RNA, 19 nt, Artificial Sequence
  Description of Artificial Sequence: Synthetic oligonucleotide
gcugacugacaauagcauu

SEQ ID NO: 1894328 - RNA, 19 nt, Artificial Sequence
  Description of Artificial Sequence: Synthetic oligonucleotide
gcugcagucgauguucaua

SEQ ID NO: 1894329 - RNA, 19 nt, Artificial Sequence
  Description of Artificial Sequence: Synthetic oligonucleotide
cccggucacuguuuccggc

SEQ ID NO: 1894330 - RNA, 19 nt, Artificial Sequence
  Description of Artificial Sequence: Synthetic oligonucleotide
acacaacuucugagguacu

SEQ ID NO: 1894331 - RNA, 19 nt, Artificial Sequence
  Description of Artificial Sequence: Synthetic oligonucleotide
gagcaggcccuucauuauu

SEQ ID NO: 1894332 - RNA, 19 nt, Artificial Sequence
  Description of Artificial Sequence: Synthetic oligonucleotide
ccagguugcgcagcugcgc

SEQ ID NO: 1894333 - RNA, 19 nt, Artificial Sequence
  Description of Artificial Sequence: Synthetic oligonucleotide
ggugguaguuacuggcaau

SEQ ID NO: 1894334 - RNA, 19 nt, Artificial Sequence
  Description of Artificial Sequence: Synthetic oligonucleotide
caggcaccggcugcggauc

SEQ ID NO: 1894335 - RNA, 19 nt, Artificial Sequence
  Description of Artificial Sequence: Synthetic oligonucleotide
gcuaacugagucagaaaau

SEQ ID NO: 1894336 - RNA, 19 nt, Artificial Sequence
  Description of Artificial Sequence: Synthetic oligonucleotide
agggagcacggccgguauu

SEQ ID NO: 1894337 - RNA, 19 nt, Artificial Sequence
  Description of Artificial Sequence: Synthetic oligonucleotide
gcaauggugcugauuucaa

SEQ ID NO: 1894338 - RNA, 19 nt, Artificial Sequence
  Description of Artificial Sequence: Synthetic oligonucleotide
ccccgacaccauaaaguuc

SEQ ID NO: 1894339 - RNA, 19 nt, Artificial Sequence
  Description of Artificial Sequence: Synthetic oligonucleotide
cucgaacuucaagaagccu

SEQ ID NO: 1894340 - RNA, 19 nt, Artificial Sequence
  Description of Artificial Sequence: Synthetic oligonucleotide
cagauacaccucccagucu

SEQ ID NO: 1894341 - RNA, 19 nt, Artificial Sequence
  Description of Artificial Sequence: Synthetic oligonucleotide
gucucuuugugaacugguu

SEQ ID NO: 1894342 - RNA, 19 nt, Artificial Sequence
  Description of Artificial Sequence: Synthetic oligonucleotide
uuccggcaucacugggauu

SEQ ID NO: 1894343 - RNA, 19 nt, Artificial Sequence
  Description of Artificial Sequence: Synthetic oligonucleotide
cugcgccgccuguuccuug

SEQ ID NO: 1894344 - RNA, 19 nt, Artificial Sequence
  Description of Artificial Sequence: Synthetic oligonucleotide
guccaccucugucaauaau

SEQ ID NO: 1894345 - RNA, 19 nt, Artificial Sequence
  Description of Artificial Sequence: Synthetic oligonucleotide
ccggucacuguuuccggca

SEQ ID NO: 1894346 - RNA, 19 nt, Artificial Sequence
  Description of Artificial Sequence: Synthetic oligonucleotide
cucguaggauacacauaau

SEQ ID NO: 1894347 - RNA, 19 nt, Artificial Sequence
  Description of Artificial Sequence: Synthetic oligonucleotide
ggagcacggccgguauuug

SEQ ID NO: 1894348 - RNA, 19 nt, Artificial Sequence
  Description of Artificial Sequence: Synthetic oligonucleotide
cgguauuuguccacccaga

SEQ ID NO: 1894349 - RNA, 19 nt, Artificial Sequence
  Description of Artificial Sequence: Synthetic oligonucleotide
cccucagauacaccuccca

SEQ ID NO: 1894350 - RNA, 19 nt, Artificial Sequence
  Description of Artificial Sequence: Synthetic oligonucleotide
cagugaguuaggagcucau

SEQ ID NO: 1894351 - RNA, 19 nt, Artificial Sequence
  Description of Artificial Sequence: Synthetic oligonucleotide
gcugugacugugccacugu

SEQ ID NO: 1894352 - RNA, 19 nt, Artificial Sequence
  Description of Artificial Sequence: Synthetic oligonucleotide
gcaccugaugguccauaua

SEQ ID NO: 1894353 - RNA, 19 nt, Artificial Sequence
  Description of Artificial Sequence: Synthetic oligonucleotide
ccugugagccagcuucgaa

SEQ ID NO: 1894354 - RNA, 19 nt, Artificial Sequence
  Description of Artificial Sequence: Synthetic oligonucleotide
cagucuguuucggggauuu

SEQ ID NO: 1894355 - RNA, 19 nt, Artificial Sequence
  Description of Artificial Sequence: Synthetic oligonucleotide
cgucugcugacugacaaua

SEQ ID NO: 1894356 - RNA, 19 nt, Artificial Sequence
  Description of Artificial Sequence: Synthetic oligonucleotide
ggcucauggcugcuacagu

SEQ ID NO: 1894357 - RNA, 19 nt, Artificial Sequence
  Description of Artificial Sequence: Synthetic oligonucleotide
ccgacaccauaaaguucuc

SEQ ID NO: 1894358 - RNA, 19 nt, Artificial Sequence
  Description of Artificial Sequence: Synthetic oligonucleotide
agccgcuaacugagucaga

SEQ ID NO: 1894359 - RNA, 19 nt, Artificial Sequence
  Description of Artificial Sequence: Synthetic oligonucleotide
gaggagccgcuaacugagu

SEQ ID NO: 1894360 - RNA, 19 nt, Artificial Sequence
  Description of Artificial Sequence: Synthetic oligonucleotide
gccgccuguuccuugugau

SEQ ID NO: 1894361 - RNA, 19 nt, Artificial Sequence
  Description of Artificial Sequence: Synthetic oligonucleotide
gagcauccuuugugaguuu

SEQ ID NO: 1894362 - RNA, 19 nt, Artificial Sequence
  Description of Artificial Sequence: Synthetic oligonucleotide
gggagcacggccgguauuu

SEQ ID NO: 1894363 - RNA, 19 nt, Artificial Sequence
  Description of Artificial Sequence: Synthetic oligonucleotide
ccgcuaacugagucagaaa

SEQ ID NO: 1894364 - RNA, 19 nt, Artificial Sequence
  Description of Artificial Sequence: Synthetic oligonucleotide
guucugcgcaaggcaugcu

SEQ ID NO: 1894365 - RNA, 19 nt, Artificial Sequence
  Description of Artificial Sequence: Synthetic oligonucleotide
ccaccuccccuuuccagcu

SEQ ID NO: 1894366 - RNA, 19 nt, Artificial Sequence
  Description of Artificial Sequence: Synthetic oligonucleotide
gccugugagccagcuucga

SEQ ID NO: 1894367 - RNA, 19 nt, Artificial Sequence
  Description of Artificial Sequence: Synthetic oligonucleotide
gccgggcgagggagcacgg

SEQ ID NO: 1894368 - RNA, 19 nt, Artificial Sequence
  Description of Artificial Sequence: Synthetic oligonucleotide
gcgucugcugacugacaau

SEQ ID NO: 1894369 - RNA, 19 nt, Artificial Sequence
  Description of Artificial Sequence: Synthetic oligonucleotide
cugcccagcugcagucgau

SEQ ID NO: 1894370 - RNA, 19 nt, Artificial Sequence
  Description of Artificial Sequence: Synthetic oligonucleotide
gcgccgccuguuccuugug

SEQ ID NO: 1894371 - RNA, 19 nt, Artificial Sequence
  Description of Artificial Sequence: Synthetic oligonucleotide
ccgccuguuccuugugaua

SEQ ID NO: 1894372 - RNA, 19 nt, Artificial Sequence
  Description of Artificial Sequence: Synthetic oligonucleotide
ccccaguguaaaucugcau

SEQ ID NO: 1894373 - RNA, 19 nt, Artificial Sequence
  Description of Artificial Sequence: Synthetic oligonucleotide
cccagucuguuucggggau

SEQ ID NO: 1894374 - RNA, 19 nt, Artificial Sequence
  Description of Artificial Sequence: Synthetic oligonucleotide
cggcaucacugggauuaac

SEQ ID NO: 1894375 - RNA, 19 nt, Artificial Sequence
  Description of Artificial Sequence: Synthetic oligonucleotide
gccugcagguggacaugua

SEQ ID NO: 1894376 - RNA, 19 nt, Artificial Sequence
  Description of Artificial Sequence: Synthetic oligonucleotide
ccggcaucacugggauuaa

SEQ ID NO: 1894377 - RNA, 19 nt, Artificial Sequence
  Description of Artificial Sequence: Synthetic oligonucleotide
ccagucuguuucggggauu

SEQ ID NO: 1894378 - RNA, 19 nt, Artificial Sequence
  Description of Artificial Sequence: Synthetic oligonucleotide
auaagaggcacauauaucc

SEQ ID NO: 1894379 - RNA, 19 nt, Artificial Sequence
  Description of Artificial Sequence: Synthetic oligonucleotide
aaauuaaaauccccagacc

SEQ ID NO: 1894380 - RNA, 19 nt, Artificial Sequence
  Description of Artificial Sequence: Synthetic oligonucleotide
cuuuggaauguuuagaagg

SEQ ID NO: 1894381 - RNA, 19 nt, Artificial Sequence
  Description of Artificial Sequence: Synthetic oligonucleotide
auugucaucaaucugcauc

SEQ ID NO: 1894382 - RNA, 19 nt, Artificial Sequence
  Description of Artificial Sequence: Synthetic oligonucleotide
aaagcaaucagauacugaa

SEQ ID NO: 1894383 - RNA, 19 nt, Artificial Sequence
  Description of Artificial Sequence: Synthetic oligonucleotide
agcaaucagauacugaaac

SEQ ID NO: 1894384 - RNA, 19 nt, Artificial Sequence
  Description of Artificial Sequence: Synthetic oligonucleotide
acaacugucacaaagugac

SEQ ID NO: 1894385 - RNA, 19 nt, Artificial Sequence
  Description of Artificial Sequence: Synthetic oligonucleotide
aggaauuggcuuuagacuc

SEQ ID NO: 1894386 - RNA, 19 nt, Artificial Sequence
  Description of Artificial Sequence: Synthetic oligonucleotide
auuggcuuuagacucaggg

SEQ ID NO: 1894387 - RNA, 19 nt, Artificial Sequence
  Description of Artificial Sequence: Synthetic oligonucleotide
aaggaauuggcuuuagacu

SEQ ID NO: 1894388 - RNA, 19 nt, Artificial Sequence
  Description of Artificial Sequence: Synthetic oligonucleotide
ucuacaagggcacauacaa

SEQ ID NO: 1894389 - RNA, 19 nt, Artificial Sequence
  Description of Artificial Sequence: Synthetic oligonucleotide
gaaggaauuggcuuuagac

SEQ ID NO: 1894390 - RNA, 19 nt, Artificial Sequence
  Description of Artificial Sequence: Synthetic oligonucleotide
gauaggagagaccugaaac

SEQ ID NO: 1894391 - RNA, 19 nt, Artificial Sequence
  Description of Artificial Sequence: Synthetic oligonucleotide
uuuugauuggcaaagcgaa

SEQ ID NO: 1894392 - RNA, 19 nt, Artificial Sequence
  Description of Artificial Sequence: Synthetic oligonucleotide
gauguugcgguguacagcc

SEQ ID NO: 1894393 - RNA, 19 nt, Artificial Sequence
  Description of Artificial Sequence: Synthetic oligonucleotide
agauguguuccuuaguagg

SEQ ID NO: 1894394 - RNA, 19 nt, Artificial Sequence
  Description of Artificial Sequence: Synthetic oligonucleotide
acauacaacugucacaaag

SEQ ID NO: 1894395 - RNA, 19 nt, Artificial Sequence
  Description of Artificial Sequence: Synthetic oligonucleotide
guaagaaucuuguagcuug

SEQ ID NO: 1894396 - RNA, 19 nt, Artificial Sequence
  Description of Artificial Sequence: Synthetic oligonucleotide
aauguuuagaaggcuuucg

SEQ ID NO: 1894397 - RNA, 19 nt, Artificial Sequence
  Description of Artificial Sequence: Synthetic oligonucleotide
aaacaugacauucucccgu

SEQ ID NO: 1894398 - RNA, 19 nt, Artificial Sequence
  Description of Artificial Sequence: Synthetic oligonucleotide
aucuccuuuguuuuggagg

SEQ ID NO: 1894399 - RNA, 19 nt, Artificial Sequence
  Description of Artificial Sequence: Synthetic oligonucleotide
uaguaggaaaacuagauuu

SEQ ID NO: 1894400 - RNA, 19 nt, Artificial Sequence
  Description of Artificial Sequence: Synthetic oligonucleotide
uuagacaagugucccaugc

SEQ ID NO: 1894401 - RNA, 19 nt, Artificial Sequence
  Description of Artificial Sequence: Synthetic oligonucleotide
aagaaaacccauaacuaag

SEQ ID NO: 1894402 - RNA, 19 nt, Artificial Sequence
  Description of Artificial Sequence: Synthetic oligonucleotide
gaacuuucucaucacauug

SEQ ID NO: 1894403 - RNA, 19 nt, Artificial Sequence
  Description of Artificial Sequence: Synthetic oligonucleotide
aaucagauacugaaacugg

SEQ ID NO: 1894404 - RNA, 19 nt, Artificial Sequence
  Description of Artificial Sequence: Synthetic oligonucleotide
ugaggucagauccagguca

SEQ ID NO: 1894405 - RNA, 19 nt, Artificial Sequence
  Description of Artificial Sequence: Synthetic oligonucleotide
uuguuuuggaggcaaaacu

SEQ ID NO: 1894406 - RNA, 19 nt, Artificial Sequence
  Description of Artificial Sequence: Synthetic oligonucleotide
ugaaguucagauguguucc

SEQ ID NO: 1894407 - RNA, 19 nt, Artificial Sequence
  Description of Artificial Sequence: Synthetic oligonucleotide
aaggcuuucgugcaccaag

SEQ ID NO: 1894408 - RNA, 19 nt, Artificial Sequence
  Description of Artificial Sequence: Synthetic oligonucleotide
uuucccauuggcaaauggc

SEQ ID NO: 1894409 - RNA, 19 nt, Artificial Sequence
  Description of Artificial Sequence: Synthetic oligonucleotide
cucgaagaagcccaggugg

SEQ ID NO: 1894410 - RNA, 19 nt, Artificial Sequence
  Description of Artificial Sequence: Synthetic oligonucleotide
ugaaacuggacagaaaggu

SEQ ID NO: 1894411 - RNA, 19 nt, Artificial Sequence
  Description of Artificial Sequence: Synthetic oligonucleotide
uuagacucagggaaucucc

SEQ ID NO: 1894412 - RNA, 19 nt, Artificial Sequence
  Description of Artificial Sequence: Synthetic oligonucleotide
auuggcaaauggcauuggc

SEQ ID NO: 1894413 - RNA, 19 nt, Artificial Sequence
  Description of Artificial Sequence: Synthetic oligonucleotide
ucucaugcagcuuucuucc

SEQ ID NO: 1894414 - RNA, 19 nt, Artificial Sequence
  Description of Artificial Sequence: Synthetic oligonucleotide
ucucccguuucucugagag

SEQ ID NO: 1894415 - RNA, 19 nt, Artificial Sequence
  Description of Artificial Sequence: Synthetic oligonucleotide
accacgagcuuauccaucc

SEQ ID NO: 1894416 - RNA, 19 nt, Artificial Sequence
  Description of Artificial Sequence: Synthetic oligonucleotide
uuuaacuggcaugaaagca

SEQ ID NO: 1894417 - RNA, 19 nt, Artificial Sequence
  Description of Artificial Sequence: Synthetic oligonucleotide
gauggugagaaggaauugg

SEQ ID NO: 1894418 - RNA, 19 nt, Artificial Sequence
  Description of Artificial Sequence: Synthetic oligonucleotide
aacccaccaagucagcauc

SEQ ID NO: 1894419 - RNA, 19 nt, Artificial Sequence
  Description of Artificial Sequence: Synthetic oligonucleotide
gaagaaaacccauaacuaa

SEQ ID NO: 1894420 - RNA, 19 nt, Artificial Sequence
  Description of Artificial Sequence: Synthetic oligonucleotide
uuuagaaggcuuucgugca

SEQ ID NO: 1894421 - RNA, 19 nt, Artificial Sequence
  Description of Artificial Sequence: Synthetic oligonucleotide
aacuagauuuaacuggcau

SEQ ID NO: 1894422 - RNA, 19 nt, Artificial Sequence
  Description of Artificial Sequence: Synthetic oligonucleotide
ucagcaucgucccagggga

SEQ ID NO: 1894423 - RNA, 19 nt, Artificial Sequence
  Description of Artificial Sequence: Synthetic oligonucleotide
uguuuagaaggcuuucgug

SEQ ID NO: 1894424 - RNA, 19 nt, Artificial Sequence
  Description of Artificial Sequence: Synthetic oligonucleotide
aaaauccccagaccccuuc

SEQ ID NO: 1894425 - RNA, 19 nt, Artificial Sequence
  Description of Artificial Sequence: Synthetic oligonucleotide
aagaggcacauauauccug

SEQ ID NO: 1894426 - RNA, 19 nt, Artificial Sequence
  Description of Artificial Sequence: Synthetic oligonucleotide
auaggagagaccugaaaca

SEQ ID NO: 1894427 - RNA, 19 nt, Artificial Sequence
  Description of Artificial Sequence: Synthetic oligonucleotide
caucacauugucaucaauc

SEQ ID NO: 1894428 - RNA, 19 nt, Artificial Sequence
  Description of Artificial Sequence: Synthetic oligonucleotide
ggaggcaaaacucaggccc

SEQ ID NO: 1894429 - RNA, 19 nt, Artificial Sequence
  Description of Artificial Sequence: Synthetic oligonucleotide
auggaagaaaacccauaac

SEQ ID NO: 1894430 - RNA, 19 nt, Artificial Sequence
  Description of Artificial Sequence: Synthetic oligonucleotide
auacaacugucacaaagug

SEQ ID NO: 1894431 - RNA, 19 nt, Artificial Sequence
  Description of Artificial Sequence: Synthetic oligonucleotide
ucccguuucucugagagag

SEQ ID NO: 1894432 - RNA, 19 nt, Artificial Sequence
  Description of Artificial Sequence: Synthetic oligonucleotide
gaugguaugaggucagauc

SEQ ID NO: 1894433 - RNA, 19 nt, Artificial Sequence
  Description of Artificial Sequence: Synthetic oligonucleotide
uguugcgguguacagccgg

SEQ ID NO: 1894434 - RNA, 19 nt, Artificial Sequence
  Description of Artificial Sequence: Synthetic oligonucleotide
aggcucucaaagcugaguc

SEQ ID NO: 1894435 - RNA, 19 nt, Artificial Sequence
  Description of Artificial Sequence: Synthetic oligonucleotide
acucuacaagggcacauac

SEQ ID NO: 1894436 - RNA, 19 nt, Artificial Sequence
  Description of Artificial Sequence: Synthetic oligonucleotide
ucucaucacauugucauca

SEQ ID NO: 1894437 - RNA, 19 nt, Artificial Sequence
  Description of Artificial Sequence: Synthetic oligonucleotide
acuugagacagguugcaug

SEQ ID NO: 1894438 - RNA, 19 nt, Artificial Sequence
  Description of Artificial Sequence: Synthetic oligonucleotide
ucagauccaggucacguga

SEQ ID NO: 1894439 - RNA, 19 nt, Artificial Sequence
  Description of Artificial Sequence: Synthetic oligonucleotide
uggugcuuccuucaguuug

SEQ ID NO: 1894440 - RNA, 19 nt, Artificial Sequence
  Description of Artificial Sequence: Synthetic oligonucleotide
ugggugaugagaauucccu

SEQ ID NO: 1894441 - RNA, 19 nt, Artificial Sequence
  Description of Artificial Sequence: Synthetic oligonucleotide
uuguuggggacucuacaag

SEQ ID NO: 1894442 - RNA, 19 nt, Artificial Sequence
  Description of Artificial Sequence: Synthetic oligonucleotide
aaacuggacagaaagguaa

SEQ ID NO: 1894443 - RNA, 19 nt, Artificial Sequence
  Description of Artificial Sequence: Synthetic oligonucleotide
ucacgugagggauaggaga

SEQ ID NO: 1894444 - RNA, 19 nt, Artificial Sequence
  Description of Artificial Sequence: Synthetic oligonucleotide
gaaaacccauaacuaagac

SEQ ID NO: 1894445 - RNA, 19 nt, Artificial Sequence
  Description of Artificial Sequence: Synthetic oligonucleotide
caauguaauggaagaaaac

SEQ ID NO: 1894446 - RNA, 19 nt, Artificial Sequence
  Description of Artificial Sequence: Synthetic oligonucleotide
uugauuggcaaagcgaaac

SEQ ID NO: 1894447 - RNA, 19 nt, Artificial Sequence
  Description of Artificial Sequence: Synthetic oligonucleotide
ugagacagguugcaugaug

SEQ ID NO: 1894448 - RNA, 19 nt, Artificial Sequence
  Description of Artificial Sequence: Synthetic oligonucleotide
uggcaaauggcauuggcau

SEQ ID NO: 1894449 - RNA, 19 nt, Artificial Sequence
  Description of Artificial Sequence: Synthetic oligonucleotide
uuggcuuuagacucaggga

SEQ ID NO: 1894450 - RNA, 19 nt, Artificial Sequence
  Description of Artificial Sequence: Synthetic oligonucleotide
cuuuugauuggcaaagcga

SEQ ID NO: 1894451 - RNA, 19 nt, Artificial Sequence
  Description of Artificial Sequence: Synthetic oligonucleotide
uuuguuuuggaggcaaaac

SEQ ID NO: 1894452 - RNA, 19 nt, Artificial Sequence
  Description of Artificial Sequence: Synthetic oligonucleotide
uauuccuucagggaguuau

SEQ ID NO: 1894453 - RNA, 19 nt, Artificial Sequence
  Description of Artificial Sequence: Synthetic oligonucleotide
uucaugguuaucagggaaa

SEQ ID NO: 1894454 - RNA, 19 nt, Artificial Sequence
  Description of Artificial Sequence: Synthetic oligonucleotide
cuagauuuaacuggcauga

SEQ ID NO: 1894455 - RNA, 19 nt, Artificial Sequence
  Description of Artificial Sequence: Synthetic oligonucleotide
acaagugucccaugcaacu

SEQ ID NO: 1894456 - RNA, 19 nt, Artificial Sequence
  Description of Artificial Sequence: Synthetic oligonucleotide
uggaacuuucucaucacau

SEQ ID NO: 1894457 - RNA, 19 nt, Artificial Sequence
  Description of Artificial Sequence: Synthetic oligonucleotide
agagaccugaaacagccgu

SEQ ID NO: 1894458 - RNA, 19 nt, Artificial Sequence
  Description of Artificial Sequence: Synthetic oligonucleotide
ucuuguuggggacucuaca

SEQ ID NO: 1894459 - RNA, 19 nt, Artificial Sequence
  Description of Artificial Sequence: Synthetic oligonucleotide
uguagcuugucaccauggc

SEQ ID NO: 1894460 - RNA, 19 nt, Artificial Sequence
  Description of Artificial Sequence: Synthetic oligonucleotide
ugggacuuauuccuuuccc

SEQ ID NO: 1894461 - RNA, 19 nt, Artificial Sequence
  Description of Artificial Sequence: Synthetic oligonucleotide
auuggucagagaugcugac

SEQ ID NO: 1894462 - RNA, 19 nt, Artificial Sequence
  Description of Artificial Sequence: Synthetic oligonucleotide
ggaguuauagccauggaac

SEQ ID NO: 1894463 - RNA, 19 nt, Artificial Sequence
  Description of Artificial Sequence: Synthetic oligonucleotide
uuuuagacaagugucccau

SEQ ID NO: 1894464 - RNA, 19 nt, Artificial Sequence
  Description of Artificial Sequence: Synthetic oligonucleotide
acagccguggguuccagag

SEQ ID NO: 1894465 - RNA, 19 nt, Artificial Sequence
  Description of Artificial Sequence: Synthetic oligonucleotide
agauuuaacuggcaugaaa

SEQ ID NO: 1894466 - RNA, 19 nt, Artificial Sequence
  Description of Artificial Sequence: Synthetic oligonucleotide
acuggcaugaaagcaauca

SEQ ID NO: 1894467 - RNA, 19 nt, Artificial Sequence
  Description of Artificial Sequence: Synthetic oligonucleotide
aaggccuuuugauuggcaa

SEQ ID NO: 1894468 - RNA, 19 nt, Artificial Sequence
  Description of Artificial Sequence: Synthetic oligonucleotide
cugaaguucagauguguuc

SEQ ID NO: 1894469 - RNA, 19 nt, Artificial Sequence
  Description of Artificial Sequence: Synthetic oligonucleotide
cauaagaggcacauauauc

SEQ ID NO: 1894470 - RNA, 19 nt, Artificial Sequence
  Description of Artificial Sequence: Synthetic oligonucleotide
ucaugguuaucagggaaag

SEQ ID NO: 1894471 - RNA, 19 nt, Artificial Sequence
  Description of Artificial Sequence: Synthetic oligonucleotide
augagaauucccuggggca

SEQ ID NO: 1894472 - RNA, 19 nt, Artificial Sequence
  Description of Artificial Sequence: Synthetic oligonucleotide
ugcagguaucucaugcagc

SEQ ID NO: 1894473 - RNA, 19 nt, Artificial Sequence
  Description of Artificial Sequence: Synthetic oligonucleotide
aaacccaccaagucagcau

SEQ ID NO: 1894474 - RNA, 19 nt, Artificial Sequence
  Description of Artificial Sequence: Synthetic oligonucleotide
ugcaacucucagcagcagc

SEQ ID NO: 1894475 - RNA, 19 nt, Artificial Sequence
  Description of Artificial Sequence: Synthetic oligonucleotide
gaguccagaggccucauuc

SEQ ID NO: 1894476 - RNA, 19 nt, Artificial Sequence
  Description of Artificial Sequence: Synthetic oligonucleotide
uuggggacucuacaagggc

SEQ ID NO: 1894477 - RNA, 19 nt, Artificial Sequence
  Description of Artificial Sequence: Synthetic oligonucleotide
aacugaaguucagaugugu

SEQ ID NO: 1894478 - RNA, 19 nt, Artificial Sequence
  Description of Artificial Sequence: Synthetic oligonucleotide
cagcauuggucagagaugc

SEQ ID NO: 1894479 - RNA, 19 nt, Artificial Sequence
  Description of Artificial Sequence: Synthetic oligonucleotide
auauauccugugcagguau

SEQ ID NO: 1894480 - RNA, 19 nt, Artificial Sequence
  Description of Artificial Sequence: Synthetic oligonucleotide
uccgugucugagcacuggg

SEQ ID NO: 1894481 - RNA, 19 nt, Artificial Sequence
  Description of Artificial Sequence: Synthetic oligonucleotide
aguauggugcuuccuucag

SEQ ID NO: 1894482 - RNA, 19 nt, Artificial Sequence
  Description of Artificial Sequence: Synthetic oligonucleotide
acugggacuuauuccuuuc

SEQ ID NO: 1894483 - RNA, 19 nt, Artificial Sequence
  Description of Artificial Sequence: Synthetic oligonucleotide
cauacauccuucaugguua

SEQ ID NO: 1894484 - RNA, 19 nt, Artificial Sequence
  Description of Artificial Sequence: Synthetic oligonucleotide
cacauauauccugugcagg

SEQ ID NO: 1894485 - RNA, 19 nt, Artificial Sequence
  Description of Artificial Sequence: Synthetic oligonucleotide
cuuucccauuggcaaaugg

SEQ ID NO: 1894486 - RNA, 19 nt, Artificial Sequence
  Description of Artificial Sequence: Synthetic oligonucleotide
agguaagaaucuuguagcu

SEQ ID NO: 1894487 - RNA, 19 nt, Artificial Sequence
  Description of Artificial Sequence: Synthetic oligonucleotide
gccuacuugagacagguug

SEQ ID NO: 1894488 - RNA, 19 nt, Artificial Sequence
  Description of Artificial Sequence: Synthetic oligonucleotide
aagugacauacauccuuca

SEQ ID NO: 1894489 - RNA, 19 nt, Artificial Sequence
  Description of Artificial Sequence: Synthetic oligonucleotide
augaggucagauccagguc

SEQ ID NO: 1894490 - RNA, 19 nt, Artificial Sequence
  Description of Artificial Sequence: Synthetic oligonucleotide
gagcacugggacuuauucc

SEQ ID NO: 1894491 - RNA, 19 nt, Artificial Sequence
  Description of Artificial Sequence: Synthetic oligonucleotide
ugucacaaagugacauaca

SEQ ID NO: 1894492 - RNA, 19 nt, Artificial Sequence
  Description of Artificial Sequence: Synthetic oligonucleotide
cuggcaugaaagcaaucag

SEQ ID NO: 1894493 - RNA, 19 nt, Artificial Sequence
  Description of Artificial Sequence: Synthetic oligonucleotide
uuugauuggcaaagcgaaa

SEQ ID NO: 1894494 - RNA, 19 nt, Artificial Sequence
  Description of Artificial Sequence: Synthetic oligonucleotide
uguuccuuaguaggaaaac

SEQ ID NO: 1894495 - RNA, 19 nt, Artificial Sequence
  Description of Artificial Sequence: Synthetic oligonucleotide
acagguugcaugaugggug

SEQ ID NO: 1894496 - RNA, 19 nt, Artificial Sequence
  Description of Artificial Sequence: Synthetic oligonucleotide
aacuuucucaucacauugu

SEQ ID NO: 1894497 - RNA, 19 nt, Artificial Sequence
  Description of Artificial Sequence: Synthetic oligonucleotide
acaauguaauggaagaaaa

SEQ ID NO: 1894498 - RNA, 19 nt, Artificial Sequence
  Description of Artificial Sequence: Synthetic oligonucleotide
agaaaacccauaacuaaga

SEQ ID NO: 1894499 - RNA, 19 nt, Artificial Sequence
  Description of Artificial Sequence: Synthetic oligonucleotide
cuuaguaggaaaacuagau

SEQ ID NO: 1894500 - RNA, 19 nt, Artificial Sequence
  Description of Artificial Sequence: Synthetic oligonucleotide
agacaagugucccaugcaa

SEQ ID NO: 1894501 - RNA, 19 nt, Artificial Sequence
  Description of Artificial Sequence: Synthetic oligonucleotide
uucagggaguuauagccau

SEQ ID NO: 1894502 - RNA, 19 nt, Artificial Sequence
  Description of Artificial Sequence: Synthetic oligonucleotide
cagguugcaugaugggugg

SEQ ID NO: 1894503 - RNA, 19 nt, Artificial Sequence
  Description of Artificial Sequence: Synthetic oligonucleotide
aacaugacauucucccguu

SEQ ID NO: 1894504 - RNA, 19 nt, Artificial Sequence
  Description of Artificial Sequence: Synthetic oligonucleotide
uguguuccuuaguaggaaa

SEQ ID NO: 1894505 - RNA, 19 nt, Artificial Sequence
  Description of Artificial Sequence: Synthetic oligonucleotide
uuuagacucagggaaucuc

SEQ ID NO: 1894506 - RNA, 19 nt, Artificial Sequence
  Description of Artificial Sequence: Synthetic oligonucleotide
cauggcuaacaauguaaug

SEQ ID NO: 1894507 - RNA, 19 nt, Artificial Sequence
  Description of Artificial Sequence: Synthetic oligonucleotide
ggacagaaagguaagaauc

SEQ ID NO: 1894508 - RNA, 19 nt, Artificial Sequence
  Description of Artificial Sequence: Synthetic oligonucleotide
guuggggacucuacaaggg

SEQ ID NO: 1894509 - RNA, 19 nt, Artificial Sequence
  Description of Artificial Sequence: Synthetic oligonucleotide
cuuucgugcaccaaggggu

SEQ ID NO: 1894510 - RNA, 19 nt, Artificial Sequence
  Description of Artificial Sequence: Synthetic oligonucleotide
uucccaaacccaccaaguc

SEQ ID NO: 1894511 - RNA, 19 nt, Artificial Sequence
  Description of Artificial Sequence: Synthetic oligonucleotide
uaacaauguaauggaagaa

SEQ ID NO: 1894512 - RNA, 19 nt, Artificial Sequence
  Description of Artificial Sequence: Synthetic oligonucleotide
gauguguuccuuaguagga

SEQ ID NO: 1894513 - RNA, 19 nt, Artificial Sequence
  Description of Artificial Sequence: Synthetic oligonucleotide
ugagaauucccuggggcac

SEQ ID NO: 1894514 - RNA, 19 nt, Artificial Sequence
  Description of Artificial Sequence: Synthetic oligonucleotide
uuugggagauggugagaag

SEQ ID NO: 1894515 - RNA, 19 nt, Artificial Sequence
  Description of Artificial Sequence: Synthetic oligonucleotide
gcuuucgugcaccaagggg

SEQ ID NO: 1894516 - RNA, 19 nt, Artificial Sequence
  Description of Artificial Sequence: Synthetic oligonucleotide
uacgggaacacgccagagu

SEQ ID NO: 1894517 - RNA, 19 nt, Artificial Sequence
  Description of Artificial Sequence: Synthetic oligonucleotide
cauacaacugucacaaagu

SEQ ID NO: 1894518 - RNA, 19 nt, Artificial Sequence
  Description of Artificial Sequence: Synthetic oligonucleotide
agacuuuggaauguuuaga

SEQ ID NO: 1894519 - RNA, 19 nt, Artificial Sequence
  Description of Artificial Sequence: Synthetic oligonucleotide
agcacggagcccucgaaga

SEQ ID NO: 1894520 - RNA, 19 nt, Artificial Sequence
  Description of Artificial Sequence: Synthetic oligonucleotide
ggaaaggccuuuugauugg

SEQ ID NO: 1894521 - RNA, 19 nt, Artificial Sequence
  Description of Artificial Sequence: Synthetic oligonucleotide
guuuuggaggcaaaacuca

SEQ ID NO: 1894522 - RNA, 19 nt, Artificial Sequence
  Description of Artificial Sequence: Synthetic oligonucleotide
agccauggaacuuucucau

SEQ ID NO: 1894523 - RNA, 19 nt, Artificial Sequence
  Description of Artificial Sequence: Synthetic oligonucleotide
cauggaacuuucucaucac

SEQ ID NO: 1894524 - RNA, 19 nt, Artificial Sequence
  Description of Artificial Sequence: Synthetic oligonucleotide
ccuuuugauuggcaaagcg

SEQ ID NO: 1894525 - RNA, 19 nt, Artificial Sequence
  Description of Artificial Sequence: Synthetic oligonucleotide
gagggcuacgggaacacgc

SEQ ID NO: 1894526 - RNA, 19 nt, Artificial Sequence
  Description of Artificial Sequence: Synthetic oligonucleotide
agggaaucuccuuuguuuu

SEQ ID NO: 1894527 - RNA, 19 nt, Artificial Sequence
  Description of Artificial Sequence: Synthetic oligonucleotide
agaaggaauuggcuuuaga

SEQ ID NO: 1894528 - RNA, 19 nt, Artificial Sequence
  Description of Artificial Sequence: Synthetic oligonucleotide
aguccagaggccucauucu

SEQ ID NO: 1894529 - RNA, 19 nt, Artificial Sequence
  Description of Artificial Sequence: Synthetic oligonucleotide
uuauagccauggaacuuuc

SEQ ID NO: 1894530 - RNA, 19 nt, Artificial Sequence
  Description of Artificial Sequence: Synthetic oligonucleotide
agccguggguuccagagga

SEQ ID NO: 1894531 - RNA, 19 nt, Artificial Sequence
  Description of Artificial Sequence: Synthetic oligonucleotide
uauauccugugcagguauc

SEQ ID NO: 1894532 - RNA, 19 nt, Artificial Sequence
  Description of Artificial Sequence: Synthetic oligonucleotide
ucucaaagcugagucauuu

SEQ ID NO: 1894533 - RNA, 19 nt, Artificial Sequence
  Description of Artificial Sequence: Synthetic oligonucleotide
accugaaacagccgugggu

SEQ ID NO: 1894534 - RNA, 19 nt, Artificial Sequence
  Description of Artificial Sequence: Synthetic oligonucleotide
uagaaggcuuucgugcacc

SEQ ID NO: 1894535 - RNA, 19 nt, Artificial Sequence
  Description of Artificial Sequence: Synthetic oligonucleotide
acggagcccucgaagaagc

SEQ ID NO: 1894536 - RNA, 19 nt, Artificial Sequence
  Description of Artificial Sequence: Synthetic oligonucleotide
ccuacuugagacagguugc

SEQ ID NO: 1894537 - RNA, 19 nt, Artificial Sequence
  Description of Artificial Sequence: Synthetic oligonucleotide
agggcuacgggaacacgcc

SEQ ID NO: 1894538 - RNA, 19 nt, Artificial Sequence
  Description of Artificial Sequence: Synthetic oligonucleotide
gaguuauagccauggaacu

SEQ ID NO: 1894539 - RNA, 19 nt, Artificial Sequence
  Description of Artificial Sequence: Synthetic oligonucleotide
uauagccauggaacuuucu

SEQ ID NO: 1894540 - RNA, 19 nt, Artificial Sequence
  Description of Artificial Sequence: Synthetic oligonucleotide
gcacauauauccugugcag

SEQ ID NO: 1894541 - RNA, 19 nt, Artificial Sequence
  Description of Artificial Sequence: Synthetic oligonucleotide
uuucgugcaccaagggguc

SEQ ID NO: 1894542 - RNA, 19 nt, Artificial Sequence
  Description of Artificial Sequence: Synthetic oligonucleotide
gacagaaagguaagaaucu

SEQ ID NO: 1894543 - RNA, 19 nt, Artificial Sequence
  Description of Artificial Sequence: Synthetic oligonucleotide
caugcaacucucagcagca

SEQ ID NO: 1894544 - RNA, 19 nt, Artificial Sequence
  Description of Artificial Sequence: Synthetic oligonucleotide
uaucucaugcagcuuucuu

SEQ ID NO: 1894545 - RNA, 19 nt, Artificial Sequence
  Description of Artificial Sequence: Synthetic oligonucleotide
cccaaacccaccaagucag

SEQ ID NO: 1894546 - RNA, 19 nt, Artificial Sequence
  Description of Artificial Sequence: Synthetic oligonucleotide
gacaagugucccaugcaac

SEQ ID NO: 1894547 - RNA, 19 nt, Artificial Sequence
  Description of Artificial Sequence: Synthetic oligonucleotide
cuuguuggggacucuacaa

SEQ ID NO: 1894548 - RNA, 19 nt, Artificial Sequence
  Description of Artificial Sequence: Synthetic oligonucleotide
aguucagauguguuccuua

SEQ ID NO: 1894549 - RNA, 19 nt, Artificial Sequence
  Description of Artificial Sequence: Synthetic oligonucleotide
cagaccccuucccaaaccc

SEQ ID NO: 1894550 - RNA, 19 nt, Artificial Sequence
  Description of Artificial Sequence: Synthetic oligonucleotide
gagcuuauccauccauguc

SEQ ID NO: 1894551 - RNA, 19 nt, Artificial Sequence
  Description of Artificial Sequence: Synthetic oligonucleotide
gguggucuuugggagaugg

SEQ ID NO: 1894552 - RNA, 19 nt, Artificial Sequence
  Description of Artificial Sequence: Synthetic oligonucleotide
ccaugcaacucucagcagc

SEQ ID NO: 1894553 - RNA, 19 nt, Artificial Sequence
  Description of Artificial Sequence: Synthetic oligonucleotide
aaacuagauuuaacuggca

SEQ ID NO: 1894554 - RNA, 19 nt, Artificial Sequence
  Description of Artificial Sequence: Synthetic oligonucleotide
gaggcacauauauccugug

SEQ ID NO: 1894555 - RNA, 19 nt, Artificial Sequence
  Description of Artificial Sequence: Synthetic oligonucleotide
cuugucaccauggcuaaca

SEQ ID NO: 1894556 - RNA, 19 nt, Artificial Sequence
  Description of Artificial Sequence: Synthetic oligonucleotide
agaggcacauauauccugu

SEQ ID NO: 1894557 - RNA, 19 nt, Artificial Sequence
  Description of Artificial Sequence: Synthetic oligonucleotide
gaagguggucuuugggaga

SEQ ID NO: 1894558 - RNA, 19 nt, Artificial Sequence
  Description of Artificial Sequence: Synthetic oligonucleotide
agcugcauucaccagcaua

SEQ ID NO: 1894559 - RNA, 19 nt, Artificial Sequence
  Description of Artificial Sequence: Synthetic oligonucleotide
uucucaucacauugucauc

SEQ ID NO: 1894560 - RNA, 19 nt, Artificial Sequence
  Description of Artificial Sequence: Synthetic oligonucleotide
guugcaugauggguggccc

SEQ ID NO: 1894561 - RNA, 19 nt, Artificial Sequence
  Description of Artificial Sequence: Synthetic oligonucleotide
gguaugaggucagauccag

SEQ ID NO: 1894562 - RNA, 19 nt, Artificial Sequence
  Description of Artificial Sequence: Synthetic oligonucleotide
ugaugguaugaggucagau

SEQ ID NO: 1894563 - RNA, 19 nt, Artificial Sequence
  Description of Artificial Sequence: Synthetic oligonucleotide
gaaaggccuuuugauuggc

SEQ ID NO: 1894564 - RNA, 19 nt, Artificial Sequence
  Description of Artificial Sequence: Synthetic oligonucleotide
aagcaaucagauacugaaa

SEQ ID NO: 1894565 - RNA, 19 nt, Artificial Sequence
  Description of Artificial Sequence: Synthetic oligonucleotide
auauccugugcagguaucu

SEQ ID NO: 1894566 - RNA, 19 nt, Artificial Sequence
  Description of Artificial Sequence: Synthetic oligonucleotide
uugcaugauggguggcccc

SEQ ID NO: 1894567 - RNA, 19 nt, Artificial Sequence
  Description of Artificial Sequence: Synthetic oligonucleotide
aguuugcugggugaugaga

SEQ ID NO: 1894568 - RNA, 19 nt, Artificial Sequence
  Description of Artificial Sequence: Synthetic oligonucleotide
caucaaucugcaucaggga

SEQ ID NO: 1894569 - RNA, 19 nt, Artificial Sequence
  Description of Artificial Sequence: Synthetic oligonucleotide
gaaacuggacagaaaggua

SEQ ID NO: 1894570 - RNA, 19 nt, Artificial Sequence
  Description of Artificial Sequence: Synthetic oligonucleotide
aguuauagccauggaacuu

SEQ ID NO: 1894571 - RNA, 19 nt, Artificial Sequence
  Description of Artificial Sequence: Synthetic oligonucleotide
gagagaccugaaacagccg

SEQ ID NO: 1894572 - RNA, 19 nt, Artificial Sequence
  Description of Artificial Sequence: Synthetic oligonucleotide
gggaguuauagccauggaa

SEQ ID NO: 1894573 - RNA, 19 nt, Artificial Sequence
  Description of Artificial Sequence: Synthetic oligonucleotide
agcaucgucccaggggagg

SEQ ID NO: 1894574 - RNA, 19 nt, Artificial Sequence
  Description of Artificial Sequence: Synthetic oligonucleotide
guuugcugggugaugagaa

SEQ ID NO: 1894575 - RNA, 19 nt, Artificial Sequence
  Description of Artificial Sequence: Synthetic oligonucleotide
uucaguuugcugggugaug

SEQ ID NO: 1894576 - RNA, 19 nt, Artificial Sequence
  Description of Artificial Sequence: Synthetic oligonucleotide
cagauccaggucacgugag

SEQ ID NO: 1894577 - RNA, 19 nt, Artificial Sequence
  Description of Artificial Sequence: Synthetic oligonucleotide
cucugagagagacuuugga

SEQ ID NO: 1894578 - RNA, 19 nt, Artificial Sequence
  Description of Artificial Sequence: Synthetic oligonucleotide
ugagaaggaauuggcuuua

SEQ ID NO: 1894579 - RNA, 19 nt, Artificial Sequence
  Description of Artificial Sequence: Synthetic oligonucleotide
guuucucugagagagacuu

SEQ ID NO: 1894580 - RNA, 19 nt, Artificial Sequence
  Description of Artificial Sequence: Synthetic oligonucleotide
aggcuuucgugcaccaagg

SEQ ID NO: 1894581 - RNA, 19 nt, Artificial Sequence
  Description of Artificial Sequence: Synthetic oligonucleotide
agggauguugcgguguaca

SEQ ID NO: 1894582 - RNA, 19 nt, Artificial Sequence
  Description of Artificial Sequence: Synthetic oligonucleotide
uuggucagagaugcugacu

SEQ ID NO: 1894583 - RNA, 19 nt, Artificial Sequence
  Description of Artificial Sequence: Synthetic oligonucleotide
ucagggauguugcggugua

SEQ ID NO: 1894584 - RNA, 19 nt, Artificial Sequence
  Description of Artificial Sequence: Synthetic oligonucleotide
caggucacgugagggauag

SEQ ID NO: 1894585 - RNA, 19 nt, Artificial Sequence
  Description of Artificial Sequence: Synthetic oligonucleotide
acgagcuuauccauccaug

SEQ ID NO: 1894586 - RNA, 19 nt, Artificial Sequence
  Description of Artificial Sequence: Synthetic oligonucleotide
cucuacaagggcacauaca

SEQ ID NO: 1894587 - RNA, 19 nt, Artificial Sequence
  Description of Artificial Sequence: Synthetic oligonucleotide
gcauaagaggcacauauau

SEQ ID NO: 1894588 - RNA, 19 nt, Artificial Sequence
  Description of Artificial Sequence: Synthetic oligonucleotide
gcugcauucaccagcauaa

SEQ ID NO: 1894589 - RNA, 19 nt, Artificial Sequence
  Description of Artificial Sequence: Synthetic oligonucleotide
gagaaggaauuggcuuuag

SEQ ID NO: 1894590 - RNA, 19 nt, Artificial Sequence
  Description of Artificial Sequence: Synthetic oligonucleotide
cauucucccguuucucuga

SEQ ID NO: 1894591 - RNA, 19 nt, Artificial Sequence
  Description of Artificial Sequence: Synthetic oligonucleotide
gucgucagcugcauucacc

SEQ ID NO: 1894592 - RNA, 19 nt, Artificial Sequence
  Description of Artificial Sequence: Synthetic oligonucleotide
caugucaguggcucaggga

SEQ ID NO: 1894593 - RNA, 19 nt, Artificial Sequence
  Description of Artificial Sequence: Synthetic oligonucleotide
ucuuugggagauggugaga

SEQ ID NO: 1894594 - RNA, 19 nt, Artificial Sequence
  Description of Artificial Sequence: Synthetic oligonucleotide
gaccccuucccaaacccac

SEQ ID NO: 1894595 - RNA, 19 nt, Artificial Sequence
  Description of Artificial Sequence: Synthetic oligonucleotide
uucgugcaccaaggggucg

SEQ ID NO: 1894596 - RNA, 19 nt, Artificial Sequence
  Description of Artificial Sequence: Synthetic oligonucleotide
gcuuauccauccaugucag

SEQ ID NO: 1894597 - RNA, 19 nt, Artificial Sequence
  Description of Artificial Sequence: Synthetic oligonucleotide
cacugaugguaugagguca

SEQ ID NO: 1894598 - RNA, 19 nt, Artificial Sequence
  Description of Artificial Sequence: Synthetic oligonucleotide
aacagccguggguuccaga

SEQ ID NO: 1894599 - RNA, 19 nt, Artificial Sequence
  Description of Artificial Sequence: Synthetic oligonucleotide
ugcgguguacagccggcuc

SEQ ID NO: 1894600 - RNA, 19 nt, Artificial Sequence
  Description of Artificial Sequence: Synthetic oligonucleotide
aaguucagauguguuccuu

SEQ ID NO: 1894601 - RNA, 19 nt, Artificial Sequence
  Description of Artificial Sequence: Synthetic oligonucleotide
agcuugucaccauggcuaa

SEQ ID NO: 1894602 - RNA, 19 nt, Artificial Sequence
  Description of Artificial Sequence: Synthetic oligonucleotide
ccauggaacuuucucauca

SEQ ID NO: 1894603 - RNA, 19 nt, Artificial Sequence
  Description of Artificial Sequence: Synthetic oligonucleotide
gggauguugcgguguacag

SEQ ID NO: 1894604 - RNA, 19 nt, Artificial Sequence
  Description of Artificial Sequence: Synthetic oligonucleotide
gggugaugagaauucccug

SEQ ID NO: 1894605 - RNA, 19 nt, Artificial Sequence
  Description of Artificial Sequence: Synthetic oligonucleotide
cauuggcaaauggcauugg

SEQ ID NO: 1894606 - RNA, 19 nt, Artificial Sequence
  Description of Artificial Sequence: Synthetic oligonucleotide
ggggucgucagcugcauuc

SEQ ID NO: 1894607 - RNA, 19 nt, Artificial Sequence
  Description of Artificial Sequence: Synthetic oligonucleotide
cugaaacagccguggguuc

SEQ ID NO: 1894608 - RNA, 19 nt, Artificial Sequence
  Description of Artificial Sequence: Synthetic oligonucleotide
gggcacauacaacugucac

SEQ ID NO: 1894609 - RNA, 19 nt, Artificial Sequence
  Description of Artificial Sequence: Synthetic oligonucleotide
cgaaacugaaguucagaug

SEQ ID NO: 1894610 - RNA, 19 nt, Artificial Sequence
  Description of Artificial Sequence: Synthetic oligonucleotide
guuccuuaguaggaaaacu

SEQ ID NO: 1894611 - RNA, 19 nt, Artificial Sequence
  Description of Artificial Sequence: Synthetic oligonucleotide
cagcacggagcccucgaag

SEQ ID NO: 1894612 - RNA, 19 nt, Artificial Sequence
  Description of Artificial Sequence: Synthetic oligonucleotide
ggucacgugagggauagga

SEQ ID NO: 1894613 - RNA, 19 nt, Artificial Sequence
  Description of Artificial Sequence: Synthetic oligonucleotide
ccuuaguaggaaaacuaga

SEQ ID NO: 1894614 - RNA, 19 nt, Artificial Sequence
  Description of Artificial Sequence: Synthetic oligonucleotide
gaaguucagauguguuccu

SEQ ID NO: 1894615 - RNA, 19 nt, Artificial Sequence
  Description of Artificial Sequence: Synthetic oligonucleotide
acugaaguucagauguguu

SEQ ID NO: 1894616 - RNA, 19 nt, Artificial Sequence
  Description of Artificial Sequence: Synthetic oligonucleotide
auguguuccuuaguaggaa

SEQ ID NO: 1894617 - RNA, 19 nt, Artificial Sequence
  Description of Artificial Sequence: Synthetic oligonucleotide
agggaguuauagccaugga

SEQ ID NO: 1894618 - RNA, 19 nt, Artificial Sequence
  Description of Artificial Sequence: Synthetic oligonucleotide
gguugcaugauggguggcc

SEQ ID NO: 1894619 - RNA, 19 nt, Artificial Sequence
  Description of Artificial Sequence: Synthetic oligonucleotide
ggauguugcgguguacagc

SEQ ID NO: 1894620 - RNA, 19 nt, Artificial Sequence
  Description of Artificial Sequence: Synthetic oligonucleotide
cacggagcccucgaagaag

SEQ ID NO: 1894621 - RNA, 19 nt, Artificial Sequence
  Description of Artificial Sequence: Synthetic oligonucleotide
ggcuuucgugcaccaaggg

SEQ ID NO: 1894622 - RNA, 19 nt, Artificial Sequence
  Description of Artificial Sequence: Synthetic oligonucleotide
ggugagaaggaauuggcuu

SEQ ID NO: 1894623 - RNA, 19 nt, Artificial Sequence
  Description of Artificial Sequence: Synthetic oligonucleotide
ccuucccaaacccaccaag

SEQ ID NO: 1894624 - RNA, 19 nt, Artificial Sequence
  Description of Artificial Sequence: Synthetic oligonucleotide
gacucagggaaucuccuuu

SEQ ID NO: 1894625 - RNA, 19 nt, Artificial Sequence
  Description of Artificial Sequence: Synthetic oligonucleotide
guuauagccauggaacuuu

SEQ ID NO: 1894626 - RNA, 19 nt, Artificial Sequence
  Description of Artificial Sequence: Synthetic oligonucleotide
ggucuuugggagaugguga

SEQ ID NO: 1894627 - RNA, 19 nt, Artificial Sequence
  Description of Artificial Sequence: Synthetic oligonucleotide
accaaggggucgucagcug

SEQ ID NO: 1894628 - RNA, 19 nt, Artificial Sequence
  Description of Artificial Sequence: Synthetic oligonucleotide
acccaccaagucagcaucg

SEQ ID NO: 1894629 - RNA, 19 nt, Artificial Sequence
  Description of Artificial Sequence: Synthetic oligonucleotide
auauuccaccacgagcuua

SEQ ID NO: 1894630 - RNA, 19 nt, Artificial Sequence
  Description of Artificial Sequence: Synthetic oligonucleotide
caccacgagcuuauccauc

SEQ ID NO: 1894631 - RNA, 19 nt, Artificial Sequence
  Description of Artificial Sequence: Synthetic oligonucleotide
gaaacagccguggguucca

SEQ ID NO: 1894632 - RNA, 19 nt, Artificial Sequence
  Description of Artificial Sequence: Synthetic oligonucleotide
aaauagccuggagcuccca

SEQ ID NO: 1894633 - RNA, 19 nt, Artificial Sequence
  Description of Artificial Sequence: Synthetic oligonucleotide
guugcgguguacagccggc

SEQ ID NO: 1894634 - RNA, 19 nt, Artificial Sequence
  Description of Artificial Sequence: Synthetic oligonucleotide
caaacccaccaagucagca

SEQ ID NO: 1894635 - RNA, 19 nt, Artificial Sequence
  Description of Artificial Sequence: Synthetic oligonucleotide
ucgucccaggggaggggag

SEQ ID NO: 1894636 - RNA, 19 nt, Artificial Sequence
  Description of Artificial Sequence: Synthetic oligonucleotide
guuccagaggagggcuacg

SEQ ID NO: 1894637 - RNA, 19 nt, Artificial Sequence
  Description of Artificial Sequence: Synthetic oligonucleotide
cuacgggaacacgccagag

SEQ ID NO: 1894638 - RNA, 19 nt, Artificial Sequence
  Description of Artificial Sequence: Synthetic oligonucleotide
uacuugagacagguugcau

SEQ ID NO: 1894639 - RNA, 19 nt, Artificial Sequence
  Description of Artificial Sequence: Synthetic oligonucleotide
cuacuugagacagguugca

SEQ ID NO: 1894640 - RNA, 19 nt, Artificial Sequence
  Description of Artificial Sequence: Synthetic oligonucleotide
ucgugcaccaaggggucgu

SEQ ID NO: 1894641 - RNA, 19 nt, Artificial Sequence
  Description of Artificial Sequence: Synthetic oligonucleotide
gaggcagcacaaacaugac

SEQ ID NO: 1894642 - RNA, 19 nt, Artificial Sequence
  Description of Artificial Sequence: Synthetic oligonucleotide
gacuuauuccuuucccauu

SEQ ID NO: 1894643 - RNA, 19 nt, Artificial Sequence
  Description of Artificial Sequence: Synthetic oligonucleotide
cguggguuccagaggaggg

SEQ ID NO: 1894644 - RNA, 19 nt, Artificial Sequence
  Description of Artificial Sequence: Synthetic oligonucleotide
guguuccuuaguaggaaaa

SEQ ID NO: 1894645 - RNA, 19 nt, Artificial Sequence
  Description of Artificial Sequence: Synthetic oligonucleotide
ccauuggcaaauggcauug

SEQ ID NO: 1894646 - RNA, 19 nt, Artificial Sequence
  Description of Artificial Sequence: Synthetic oligonucleotide
ccaugucaguggcucaggg

SEQ ID NO: 1894647 - RNA, 19 nt, Artificial Sequence
  Description of Artificial Sequence: Synthetic oligonucleotide
gugagggauaggagagacc

SEQ ID NO: 1894648 - RNA, 19 nt, Artificial Sequence
  Description of Artificial Sequence: Synthetic oligonucleotide
ccagaggccucauucuaac

SEQ ID NO: 1894649 - RNA, 19 nt, Artificial Sequence
  Description of Artificial Sequence: Synthetic oligonucleotide
caguggcucagggaacagc

SEQ ID NO: 1894650 - RNA, 19 nt, Artificial Sequence
  Description of Artificial Sequence: Synthetic oligonucleotide
agcauaagaggcacauaua

SEQ ID NO: 1894651 - RNA, 19 nt, Artificial Sequence
  Description of Artificial Sequence: Synthetic oligonucleotide
ggcaugaaagcaaucagau

SEQ ID NO: 1894652 - RNA, 19 nt, Artificial Sequence
  Description of Artificial Sequence: Synthetic oligonucleotide
gccggcucaagucuguguc

SEQ ID NO: 1894653 - RNA, 19 nt, Artificial Sequence
  Description of Artificial Sequence: Synthetic oligonucleotide
agggcacauacaacuguca

SEQ ID NO: 1894654 - RNA, 19 nt, Artificial Sequence
  Description of Artificial Sequence: Synthetic oligonucleotide
agccggcucaagucugugu

SEQ ID NO: 1894655 - RNA, 19 nt, Artificial Sequence
  Description of Artificial Sequence: Synthetic oligonucleotide
gacucuacaagggcacaua

SEQ ID NO: 1894656 - RNA, 19 nt, Artificial Sequence
  Description of Artificial Sequence: Synthetic oligonucleotide
ucccagggagagcugccua

SEQ ID NO: 1894657 - RNA, 19 nt, Artificial Sequence
  Description of Artificial Sequence: Synthetic oligonucleotide
aggucagauccaggucacg

SEQ ID NO: 1894658 - RNA, 19 nt, Artificial Sequence
  Description of Artificial Sequence: Synthetic oligonucleotide
ggcucucaaagcugaguca

SEQ ID NO: 1894659 - RNA, 19 nt, Artificial Sequence
  Description of Artificial Sequence: Synthetic oligonucleotide
acagcacggagcccucgaa

SEQ ID NO: 1894660 - RNA, 19 nt, Artificial Sequence
  Description of Artificial Sequence: Synthetic oligonucleotide
gcuuuagacucagggaauc

SEQ ID NO: 1894661 - RNA, 19 nt, Artificial Sequence
  Description of Artificial Sequence: Synthetic oligonucleotide
ccauaacuaagacaacaaa

SEQ ID NO: 1894662 - RNA, 19 nt, Artificial Sequence
  Description of Artificial Sequence: Synthetic oligonucleotide
acaugacauucucccguuu

SEQ ID NO: 1894663 - RNA, 19 nt, Artificial Sequence
  Description of Artificial Sequence: Synthetic oligonucleotide
ggcuacgggaacacgccag

SEQ ID NO: 1894664 - RNA, 19 nt, Artificial Sequence
  Description of Artificial Sequence: Synthetic oligonucleotide
gcgaaacugaaguucagau

SEQ ID NO: 1894665 - RNA, 19 nt, Artificial Sequence
  Description of Artificial Sequence: Synthetic oligonucleotide
ccguuucucugagagagac

SEQ ID NO: 1894666 - RNA, 19 nt, Artificial Sequence
  Description of Artificial Sequence: Synthetic oligonucleotide
guauggugcuuccuucagu

SEQ ID NO: 1894667 - RNA, 19 nt, Artificial Sequence
  Description of Artificial Sequence: Synthetic oligonucleotide
cauccaugucaguggcuca

SEQ ID NO: 1894668 - RNA, 19 nt, Artificial Sequence
  Description of Artificial Sequence: Synthetic oligonucleotide
augcaacucucagcagcag

SEQ ID NO: 1894669 - RNA, 19 nt, Artificial Sequence
  Description of Artificial Sequence: Synthetic oligonucleotide
uaucagggaaaggccuuuu

SEQ ID NO: 1894670 - RNA, 19 nt, Artificial Sequence
  Description of Artificial Sequence: Synthetic oligonucleotide
cccacugaugguaugaggu

SEQ ID NO: 1894671 - RNA, 19 nt, Artificial Sequence
  Description of Artificial Sequence: Synthetic oligonucleotide
uugagacagguugcaugau

SEQ ID NO: 1894672 - RNA, 19 nt, Artificial Sequence
  Description of Artificial Sequence: Synthetic oligonucleotide
ccagaggagggcuacggga

SEQ ID NO: 1894673 - RNA, 19 nt, Artificial Sequence
  Description of Artificial Sequence: Synthetic oligonucleotide
gcaucgucccaggggaggg

SEQ ID NO: 1894674 - RNA, 19 nt, Artificial Sequence
  Description of Artificial Sequence: Synthetic oligonucleotide
cagcaucgucccaggggag

SEQ ID NO: 1894675 - RNA, 19 nt, Artificial Sequence
  Description of Artificial Sequence: Synthetic oligonucleotide
aaggggucgucagcugcau

SEQ ID NO: 1894676 - RNA, 19 nt, Artificial Sequence
  Description of Artificial Sequence: Synthetic oligonucleotide
aucgucccaggggagggga

SEQ ID NO: 1894677 - RNA, 19 nt, Artificial Sequence
  Description of Artificial Sequence: Synthetic oligonucleotide
ccccacugaugguaugagg

SEQ ID NO: 1894678 - RNA, 19 nt, Artificial Sequence
  Description of Artificial Sequence: Synthetic oligonucleotide
caucgucccaggggagggg

SEQ ID NO: 1894679 - RNA, 19 nt, Artificial Sequence
  Description of Artificial Sequence: Synthetic oligonucleotide
cuuccucauaauauuccuu

SEQ ID NO: 1894680 - RNA, 19 nt, Artificial Sequence
  Description of Artificial Sequence: Synthetic oligonucleotide
ggagcucccagggagagcu

SEQ ID NO: 1894681 - RNA, 19 nt, Artificial Sequence
  Description of Artificial Sequence: Synthetic oligonucleotide
gguaucucaugcagcuuuc

SEQ ID NO: 1894682 - RNA, 19 nt, Artificial Sequence
  Description of Artificial Sequence: Synthetic oligonucleotide
auguugcgguguacagccg

SEQ ID NO: 1894683 - RNA, 19 nt, Artificial Sequence
  Description of Artificial Sequence: Synthetic oligonucleotide
acgugagggauaggagaga

SEQ ID NO: 1894684 - RNA, 19 nt, Artificial Sequence
  Description of Artificial Sequence: Synthetic oligonucleotide
agaccccuucccaaaccca

SEQ ID NO: 1894685 - RNA, 19 nt, Artificial Sequence
  Description of Artificial Sequence: Synthetic oligonucleotide
ccaggaggccccaggcucc

SEQ ID NO: 1894686 - RNA, 19 nt, Artificial Sequence
  Description of Artificial Sequence: Synthetic oligonucleotide
ccagaccccuucccaaacc

SEQ ID NO: 1894687 - RNA, 19 nt, Artificial Sequence
  Description of Artificial Sequence: Synthetic oligonucleotide
gcuacgggaacacgccaga

SEQ ID NO: 1894688 - RNA, 19 nt, Artificial Sequence
  Description of Artificial Sequence: Synthetic oligonucleotide
cuuuagacucagggaaucu

SEQ ID NO: 1894689 - RNA, 19 nt, Artificial Sequence
  Description of Artificial Sequence: Synthetic oligonucleotide
ggcaaauggcauuggcaua

SEQ ID NO: 1894690 - RNA, 19 nt, Artificial Sequence
  Description of Artificial Sequence: Synthetic oligonucleotide
guuaucagggaaaggccuu

SEQ ID NO: 1894691 - RNA, 19 nt, Artificial Sequence
  Description of Artificial Sequence: Synthetic oligonucleotide
ccggcucaagucugugucc

SEQ ID NO: 1894692 - RNA, 19 nt, Artificial Sequence
  Description of Artificial Sequence: Synthetic oligonucleotide
gaaggcuuucgugcaccaa

SEQ ID NO: 1894693 - RNA, 19 nt, Artificial Sequence
  Description of Artificial Sequence: Synthetic oligonucleotide
uacauccuucaugguuauc

SEQ ID NO: 1894694 - RNA, 19 nt, Artificial Sequence
  Description of Artificial Sequence: Synthetic oligonucleotide
gccuuuugauuggcaaagc

SEQ ID NO: 1894695 - RNA, 19 nt, Artificial Sequence
  Description of Artificial Sequence: Synthetic oligonucleotide
ggagggcuacgggaacacg

SEQ ID NO: 1894696 - RNA, 19 nt, Artificial Sequence
  Description of Artificial Sequence: Synthetic oligonucleotide
cccagggagagcugccuac

SEQ ID NO: 1894697 - RNA, 19 nt, Artificial Sequence
  Description of Artificial Sequence: Synthetic oligonucleotide
ccaaacccaccaagucagc

SEQ ID NO: 1894698 - RNA, 19 nt, Artificial Sequence
  Description of Artificial Sequence: Synthetic oligonucleotide
ggucgucagcugcauucac

SEQ ID NO: 1894699 - RNA, 19 nt, Artificial Sequence
  Description of Artificial Sequence: Synthetic oligonucleotide
agaauucccuggggcacuu

SEQ ID NO: 1894700 - RNA, 19 nt, Artificial Sequence
  Description of Artificial Sequence: Synthetic oligonucleotide
cccaggcucucaaagcuga

SEQ ID NO: 1894701 - RNA, 19 nt, Artificial Sequence
  Description of Artificial Sequence: Synthetic oligonucleotide
acagccggcucaagucugu

SEQ ID NO: 1894702 - RNA, 19 nt, Artificial Sequence
  Description of Artificial Sequence: Synthetic oligonucleotide
ggucagauccaggucacgu

SEQ ID NO: 1894703 - RNA, 19 nt, Artificial Sequence
  Description of Artificial Sequence: Synthetic oligonucleotide
agcauuggucagagaugcu

SEQ ID NO: 1894704 - RNA, 19 nt, Artificial Sequence
  Description of Artificial Sequence: Synthetic oligonucleotide
ccucauucuaacucagccu

SEQ ID NO: 1894705 - RNA, 19 nt, Artificial Sequence
  Description of Artificial Sequence: Synthetic oligonucleotide
cacgagcuuauccauccau

SEQ ID NO: 1894706 - RNA, 19 nt, Artificial Sequence
  Description of Artificial Sequence: Synthetic oligonucleotide
cucagggaaucuccuuugu

SEQ ID NO: 1894707 - RNA, 19 nt, Artificial Sequence
  Description of Artificial Sequence: Synthetic oligonucleotide
cacauacaacugucacaaa

SEQ ID NO: 1894708 - RNA, 19 nt, Artificial Sequence
  Description of Artificial Sequence: Synthetic oligonucleotide
gcucucaaagcugagucau

SEQ ID NO: 1894709 - RNA, 19 nt, Artificial Sequence
  Description of Artificial Sequence: Synthetic oligonucleotide
cagggauguugcgguguac

SEQ ID NO: 1894710 - RNA, 19 nt, Artificial Sequence
  Description of Artificial Sequence: Synthetic oligonucleotide
caggcucccaggcucucaa

SEQ ID NO: 1894711 - RNA, 19 nt, Artificial Sequence
  Description of Artificial Sequence: Synthetic oligonucleotide
cugaugguaugaggucaga

SEQ ID NO: 1894712 - RNA, 19 nt, Artificial Sequence
  Description of Artificial Sequence: Synthetic oligonucleotide
caccaaggggucgucagcu

SEQ ID NO: 1894713 - RNA, 19 nt, Artificial Sequence
  Description of Artificial Sequence: Synthetic oligonucleotide
caacucucagcagcagcaa

SEQ ID NO: 1894714 - RNA, 19 nt, Artificial Sequence
  Description of Artificial Sequence: Synthetic oligonucleotide
cugcuccgugucugagcac

SEQ ID NO: 1894715 - RNA, 19 nt, Artificial Sequence
  Description of Artificial Sequence: Synthetic oligonucleotide
aggucacgugagggauagg

SEQ ID NO: 1894716 - RNA, 19 nt, Artificial Sequence
  Description of Artificial Sequence: Synthetic oligonucleotide
cccagaccccuucccaaac

SEQ ID NO: 1894717 - RNA, 19 nt, Artificial Sequence
  Description of Artificial Sequence: Synthetic oligonucleotide
ccauggcuaacaauguaau

SEQ ID NO: 1894718 - RNA, 19 nt, Artificial Sequence
  Description of Artificial Sequence: Synthetic oligonucleotide
cuccuuuguuuuggaggca

SEQ ID NO: 1894719 - RNA, 19 nt, Artificial Sequence
  Description of Artificial Sequence: Synthetic oligonucleotide
gggcuacgggaacacgcca

SEQ ID NO: 1894720 - RNA, 19 nt, Artificial Sequence
  Description of Artificial Sequence: Synthetic oligonucleotide
auauuccuucagggaguua

SEQ ID NO: 1894721 - RNA, 19 nt, Artificial Sequence
  Description of Artificial Sequence: Synthetic oligonucleotide
cagccggcucaagucugug

SEQ ID NO: 1894722 - RNA, 19 nt, Artificial Sequence
  Description of Artificial Sequence: Synthetic oligonucleotide
cgagcuuauccauccaugu

SEQ ID NO: 1894723 - RNA, 19 nt, Artificial Sequence
  Description of Artificial Sequence: Synthetic oligonucleotide
caggcucucaaagcugagu

SEQ ID NO: 1894724 - RNA, 19 nt, Artificial Sequence
  Description of Artificial Sequence: Synthetic oligonucleotide
ccgugucugagcacuggga

SEQ ID NO: 1894725 - RNA, 19 nt, Artificial Sequence
  Description of Artificial Sequence: Synthetic oligonucleotide
gugcaccaaggggucguca

SEQ ID NO: 1894726 - RNA, 19 nt, Artificial Sequence
  Description of Artificial Sequence: Synthetic oligonucleotide
ggcuuuagacucagggaau

SEQ ID NO: 1894727 - RNA, 19 nt, Artificial Sequence
  Description of Artificial Sequence: Synthetic oligonucleotide
gcucagggaacagcacgga

SEQ ID NO: 1894728 - RNA, 19 nt, Artificial Sequence
  Description of Artificial Sequence: Synthetic oligonucleotide
gggauaggagagaccugaa

SEQ ID NO: 1894729 - RNA, 19 nt, Artificial Sequence
  Description of Artificial Sequence: Synthetic oligonucleotide
ccuuucccauuggcaaaug

SEQ ID NO: 1894730 - RNA, 19 nt, Artificial Sequence
  Description of Artificial Sequence: Synthetic oligonucleotide
gcuugucaccauggcuaac

SEQ ID NO: 1894731 - RNA, 19 nt, Artificial Sequence
  Description of Artificial Sequence: Synthetic oligonucleotide
guggucuuugggagauggu

SEQ ID NO: 1894732 - RNA, 19 nt, Artificial Sequence
  Description of Artificial Sequence: Synthetic oligonucleotide
ccgugcagaggcagcacaa

SEQ ID NO: 1894733 - RNA, 19 nt, Artificial Sequence
  Description of Artificial Sequence: Synthetic oligonucleotide
cccauuggcaaauggcauu

SEQ ID NO: 1894734 - RNA, 19 nt, Artificial Sequence
  Description of Artificial Sequence: Synthetic oligonucleotide
ggacucuacaagggcacau

SEQ ID NO: 1894735 - RNA, 19 nt, Artificial Sequence
  Description of Artificial Sequence: Synthetic oligonucleotide
gccguggguuccagaggag

SEQ ID NO: 1894736 - RNA, 19 nt, Artificial Sequence
  Description of Artificial Sequence: Synthetic oligonucleotide
ccacgagcuuauccaucca

SEQ ID NO: 1894737 - RNA, 19 nt, Artificial Sequence
  Description of Artificial Sequence: Synthetic oligonucleotide
ccccagaccccuucccaaa

SEQ ID NO: 1894738 - RNA, 19 nt, Artificial Sequence
  Description of Artificial Sequence: Synthetic oligonucleotide
cagguaucucaugcagcuu

SEQ ID NO: 1894739 - RNA, 19 nt, Artificial Sequence
  Description of Artificial Sequence: Synthetic oligonucleotide
ccagcauaagaggcacaua

SEQ ID NO: 1894740 - RNA, 19 nt, Artificial Sequence
  Description of Artificial Sequence: Synthetic oligonucleotide
cguuucucugagagagacu

SEQ ID NO: 1894741 - RNA, 19 nt, Artificial Sequence
  Description of Artificial Sequence: Synthetic oligonucleotide
cccuucccaaacccaccaa

SEQ ID NO: 1894742 - RNA, 19 nt, Artificial Sequence
  Description of Artificial Sequence: Synthetic oligonucleotide
cgucccaggggaggggagu

SEQ ID NO: 1894743 - RNA, 19 nt, Artificial Sequence
  Description of Artificial Sequence: Synthetic oligonucleotide
aauucaauugaucugaagc

SEQ ID NO: 1894744 - RNA, 19 nt, Artificial Sequence
  Description of Artificial Sequence: Synthetic oligonucleotide
ucuauaaucagaaacaagg

SEQ ID NO: 1894745 - RNA, 19 nt, Artificial Sequence
  Description of Artificial Sequence: Synthetic oligonucleotide
uuaacaaaauaacagaggc

SEQ ID NO: 1894746 - RNA, 19 nt, Artificial Sequence
  Description of Artificial Sequence: Synthetic oligonucleotide
uuuaaaaucucuuugggga

SEQ ID NO: 1894747 - RNA, 19 nt, Artificial Sequence
  Description of Artificial Sequence: Synthetic oligonucleotide
aucugaagcaaucagauuc

SEQ ID NO: 1894748 - RNA, 19 nt, Artificial Sequence
  Description of Artificial Sequence: Synthetic oligonucleotide
uuacuaaugcacauaagag

SEQ ID NO: 1894749 - RNA, 19 nt, Artificial Sequence
  Description of Artificial Sequence: Synthetic oligonucleotide
uguguaaucucuuguaagg

SEQ ID NO: 1894750 - RNA, 19 nt, Artificial Sequence
  Description of Artificial Sequence: Synthetic oligonucleotide
ucuaguuaacaaaauaaca

SEQ ID NO: 1894751 - RNA, 19 nt, Artificial Sequence
  Description of Artificial Sequence: Synthetic oligonucleotide
auagguacauacuaucuac

SEQ ID NO: 1894752 - RNA, 19 nt, Artificial Sequence
  Description of Artificial Sequence: Synthetic oligonucleotide
uucaaaacccuccugagca

SEQ ID NO: 1894753 - RNA, 19 nt, Artificial Sequence
  Description of Artificial Sequence: Synthetic oligonucleotide
ucaaguuuggaagagaagc

SEQ ID NO: 1894754 - RNA, 19 nt, Artificial Sequence
  Description of Artificial Sequence: Synthetic oligonucleotide
uucuaauaaauucaauuga

SEQ ID NO: 1894755 - RNA, 19 nt, Artificial Sequence
  Description of Artificial Sequence: Synthetic oligonucleotide
ucaacaguggcccagaauc

SEQ ID NO: 1894756 - RNA, 19 nt, Artificial Sequence
  Description of Artificial Sequence: Synthetic oligonucleotide
acuuaagcugcccaggagc

SEQ ID NO: 1894757 - RNA, 19 nt, Artificial Sequence
  Description of Artificial Sequence: Synthetic oligonucleotide
uaagagugagagcaaaagg

SEQ ID NO: 1894758 - RNA, 19 nt, Artificial Sequence
  Description of Artificial Sequence: Synthetic oligonucleotide
auuagauggggccagguuc

SEQ ID NO: 1894759 - RNA, 19 nt, Artificial Sequence
  Description of Artificial Sequence: Synthetic oligonucleotide
guaaggaaaauuaacgagg

SEQ ID NO: 1894760 - RNA, 19 nt, Artificial Sequence
  Description of Artificial Sequence: Synthetic oligonucleotide
aauuaacgaggaaacaucg

SEQ ID NO: 1894761 - RNA, 19 nt, Artificial Sequence
  Description of Artificial Sequence: Synthetic oligonucleotide
aaaagugaaucuucaaaga

SEQ ID NO: 1894762 - RNA, 19 nt, Artificial Sequence
  Description of Artificial Sequence: Synthetic oligonucleotide
aauacucaaguuuggaaga

SEQ ID NO: 1894763 - RNA, 19 nt, Artificial Sequence
  Description of Artificial Sequence: Synthetic oligonucleotide
aaauuaacgaggaaacauc

SEQ ID NO: 1894764 - RNA, 19 nt, Artificial Sequence
  Description of Artificial Sequence: Synthetic oligonucleotide
aauuugauccuacuccuug

SEQ ID NO: 1894765 - RNA, 19 nt, Artificial Sequence
  Description of Artificial Sequence: Synthetic oligonucleotide
uguguguggaaaauggaag

SEQ ID NO: 1894766 - RNA, 19 nt, Artificial Sequence
  Description of Artificial Sequence: Synthetic oligonucleotide
uuaacgaggaaacaucgga

SEQ ID NO: 1894767 - RNA, 19 nt, Artificial Sequence
  Description of Artificial Sequence: Synthetic oligonucleotide
aaaauuaacgaggaaacau

SEQ ID NO: 1894768 - RNA, 19 nt, Artificial Sequence
  Description of Artificial Sequence: Synthetic oligonucleotide
ucuacauaagaaaagcauc

SEQ ID NO: 1894769 - RNA, 19 nt, Artificial Sequence
  Description of Artificial Sequence: Synthetic oligonucleotide
ggaaacaucggauuuaucc

SEQ ID NO: 1894770 - RNA, 19 nt, Artificial Sequence
  Description of Artificial Sequence: Synthetic oligonucleotide
uucuaguuaacaaaauaac

SEQ ID NO: 1894771 - RNA, 19 nt, Artificial Sequence
  Description of Artificial Sequence: Synthetic oligonucleotide
uaguuaacaaaauaacaga

SEQ ID NO: 1894772 - RNA, 19 nt, Artificial Sequence
  Description of Artificial Sequence: Synthetic oligonucleotide
aaacaucggauuuauccag

SEQ ID NO: 1894773 - RNA, 19 nt, Artificial Sequence
  Description of Artificial Sequence: Synthetic oligonucleotide
aaagugaaucuucaaagaa

SEQ ID NO: 1894774 - RNA, 19 nt, Artificial Sequence
  Description of Artificial Sequence: Synthetic oligonucleotide
aauagacacauuuacuaau

SEQ ID NO: 1894775 - RNA, 19 nt, Artificial Sequence
  Description of Artificial Sequence: Synthetic oligonucleotide
uaaucagaaacaaggugag

SEQ ID NO: 1894776 - RNA, 19 nt, Artificial Sequence
  Description of Artificial Sequence: Synthetic oligonucleotide
uuguaaggaaaauuaacga

SEQ ID NO: 1894777 - RNA, 19 nt, Artificial Sequence
  Description of Artificial Sequence: Synthetic oligonucleotide
auaaucagaaacaagguga

SEQ ID NO: 1894778 - RNA, 19 nt, Artificial Sequence
  Description of Artificial Sequence: Synthetic oligonucleotide
aagguagcaacagagagcu

SEQ ID NO: 1894779 - RNA, 19 nt, Artificial Sequence
  Description of Artificial Sequence: Synthetic oligonucleotide
auucaauugaucugaagca

SEQ ID NO: 1894780 - RNA, 19 nt, Artificial Sequence
  Description of Artificial Sequence: Synthetic oligonucleotide
uucaagucuauucugugga

SEQ ID NO: 1894781 - RNA, 19 nt, Artificial Sequence
  Description of Artificial Sequence: Synthetic oligonucleotide
ucucuuguaaggaaaauua

SEQ ID NO: 1894782 - RNA, 19 nt, Artificial Sequence
  Description of Artificial Sequence: Synthetic oligonucleotide
ucuuucagaguucuugcag

SEQ ID NO: 1894783 - RNA, 19 nt, Artificial Sequence
  Description of Artificial Sequence: Synthetic oligonucleotide
uacuaaugcacauaagagu

SEQ ID NO: 1894784 - RNA, 19 nt, Artificial Sequence
  Description of Artificial Sequence: Synthetic oligonucleotide
uacauuuuggugugugugg

SEQ ID NO: 1894785 - RNA, 19 nt, Artificial Sequence
  Description of Artificial Sequence: Synthetic oligonucleotide
ugacuuaauacucaaguuu

SEQ ID NO: 1894786 - RNA, 19 nt, Artificial Sequence
  Description of Artificial Sequence: Synthetic oligonucleotide
uuugucuucaagucuauuc

SEQ ID NO: 1894787 - RNA, 19 nt, Artificial Sequence
  Description of Artificial Sequence: Synthetic oligonucleotide
aaauucaauugaucugaag

SEQ ID NO: 1894788 - RNA, 19 nt, Artificial Sequence
  Description of Artificial Sequence: Synthetic oligonucleotide
auaauuugauccuacuccu

SEQ ID NO: 1894789 - RNA, 19 nt, Artificial Sequence
  Description of Artificial Sequence: Synthetic oligonucleotide
aacucuuguccuugguuac

SEQ ID NO: 1894790 - RNA, 19 nt, Artificial Sequence
  Description of Artificial Sequence: Synthetic oligonucleotide
auuguuucuaguuaacaaa

SEQ ID NO: 1894791 - RNA, 19 nt, Artificial Sequence
  Description of Artificial Sequence: Synthetic oligonucleotide
ugaucugaagcaaucagau

SEQ ID NO: 1894792 - RNA, 19 nt, Artificial Sequence
  Description of Artificial Sequence: Synthetic oligonucleotide
uuaauacucaaguuuggaa

SEQ ID NO: 1894793 - RNA, 19 nt, Artificial Sequence
  Description of Artificial Sequence: Synthetic oligonucleotide
ucacccuugacuuaauacu

SEQ ID NO: 1894794 - RNA, 19 nt, Artificial Sequence
  Description of Artificial Sequence: Synthetic oligonucleotide
ucuauagguacauacuauc

SEQ ID NO: 1894795 - RNA, 19 nt, Artificial Sequence
  Description of Artificial Sequence: Synthetic oligonucleotide
ucucucuauagguacauac

SEQ ID NO: 1894796 - RNA, 19 nt, Artificial Sequence
  Description of Artificial Sequence: Synthetic oligonucleotide
aucgccauguuccagaagu

SEQ ID NO: 1894797 - RNA, 19 nt, Artificial Sequence
  Description of Artificial Sequence: Synthetic oligonucleotide
augcacauaagagugagag

SEQ ID NO: 1894798 - RNA, 19 nt, Artificial Sequence
  Description of Artificial Sequence: Synthetic oligonucleotide
ucugcauaccaagagaugu

SEQ ID NO: 1894799 - RNA, 19 nt, Artificial Sequence
  Description of Artificial Sequence: Synthetic oligonucleotide
ugcagcguuuauuuuacag

SEQ ID NO: 1894800 - RNA, 19 nt, Artificial Sequence
  Description of Artificial Sequence: Synthetic oligonucleotide
uuaaaaucucuuuggggac

SEQ ID NO: 1894801 - RNA, 19 nt, Artificial Sequence
  Description of Artificial Sequence: Synthetic oligonucleotide
aagucuauucuguggauau

SEQ ID NO: 1894802 - RNA, 19 nt, Artificial Sequence
  Description of Artificial Sequence: Synthetic oligonucleotide
uauuugugggguaggaaga

SEQ ID NO: 1894803 - RNA, 19 nt, Artificial Sequence
  Description of Artificial Sequence: Synthetic oligonucleotide
cuacauaagaaaagcauca

SEQ ID NO: 1894804 - RNA, 19 nt, Artificial Sequence
  Description of Artificial Sequence: Synthetic oligonucleotide
cuucaagucuauucugugg

SEQ ID NO: 1894805 - RNA, 19 nt, Artificial Sequence
  Description of Artificial Sequence: Synthetic oligonucleotide
acaaggugaggguuucugc

SEQ ID NO: 1894806 - RNA, 19 nt, Artificial Sequence
  Description of Artificial Sequence: Synthetic oligonucleotide
ucauccuacucaacagugg

SEQ ID NO: 1894807 - RNA, 19 nt, Artificial Sequence
  Description of Artificial Sequence: Synthetic oligonucleotide
agaggcacucuauaaauca

SEQ ID NO: 1894808 - RNA, 19 nt, Artificial Sequence
  Description of Artificial Sequence: Synthetic oligonucleotide
caaguuuggaagagaagcc

SEQ ID NO: 1894809 - RNA, 19 nt, Artificial Sequence
  Description of Artificial Sequence: Synthetic oligonucleotide
ucucuauagguacauacua

SEQ ID NO: 1894810 - RNA, 19 nt, Artificial Sequence
  Description of Artificial Sequence: Synthetic oligonucleotide
aagagaagccuggaaagag

SEQ ID NO: 1894811 - RNA, 19 nt, Artificial Sequence
  Description of Artificial Sequence: Synthetic oligonucleotide
uauagguacauacuaucua

SEQ ID NO: 1894812 - RNA, 19 nt, Artificial Sequence
  Description of Artificial Sequence: Synthetic oligonucleotide
aaauacauuuuggugugug

SEQ ID NO: 1894813 - RNA, 19 nt, Artificial Sequence
  Description of Artificial Sequence: Synthetic oligonucleotide
ucagaguucuugcaguaga

SEQ ID NO: 1894814 - RNA, 19 nt, Artificial Sequence
  Description of Artificial Sequence: Synthetic oligonucleotide
ugauccuacuccuuggcca

SEQ ID NO: 1894815 - RNA, 19 nt, Artificial Sequence
  Description of Artificial Sequence: Synthetic oligonucleotide
caaggugaggguuucugcg

SEQ ID NO: 1894816 - RNA, 19 nt, Artificial Sequence
  Description of Artificial Sequence: Synthetic oligonucleotide
gguagcaacagagagcugg

SEQ ID NO: 1894817 - RNA, 19 nt, Artificial Sequence
  Description of Artificial Sequence: Synthetic oligonucleotide
gaccucggcagacacaggg

SEQ ID NO: 1894818 - RNA, 19 nt, Artificial Sequence
  Description of Artificial Sequence: Synthetic oligonucleotide
uuaaguaaucugcagcguu

SEQ ID NO: 1894819 - RNA, 19 nt, Artificial Sequence
  Description of Artificial Sequence: Synthetic oligonucleotide
caucucuacauaagaaaag

SEQ ID NO: 1894820 - RNA, 19 nt, Artificial Sequence
  Description of Artificial Sequence: Synthetic oligonucleotide
aauugaucugaagcaauca

SEQ ID NO: 1894821 - RNA, 19 nt, Artificial Sequence
  Description of Artificial Sequence: Synthetic oligonucleotide
aagggacuccuccaccugg

SEQ ID NO: 1894822 - RNA, 19 nt, Artificial Sequence
  Description of Artificial Sequence: Synthetic oligonucleotide
uguaaucucuuguaaggaa

SEQ ID NO: 1894823 - RNA, 19 nt, Artificial Sequence
  Description of Artificial Sequence: Synthetic oligonucleotide
aaucucgccuguccucgcc

SEQ ID NO: 1894824 - RNA, 19 nt, Artificial Sequence
  Description of Artificial Sequence: Synthetic oligonucleotide
uuagauggggccagguucu

SEQ ID NO: 1894825 - RNA, 19 nt, Artificial Sequence
  Description of Artificial Sequence: Synthetic oligonucleotide
cuguguaaucucuuguaag

SEQ ID NO: 1894826 - RNA, 19 nt, Artificial Sequence
  Description of Artificial Sequence: Synthetic oligonucleotide
gcucccucacauuagaugg

SEQ ID NO: 1894827 - RNA, 19 nt, Artificial Sequence
  Description of Artificial Sequence: Synthetic oligonucleotide
ucugcagcguuuauuuuac

SEQ ID NO: 1894828 - RNA, 19 nt, Artificial Sequence
  Description of Artificial Sequence: Synthetic oligonucleotide
cucuauaaucagaaacaag

SEQ ID NO: 1894829 - RNA, 19 nt, Artificial Sequence
  Description of Artificial Sequence: Synthetic oligonucleotide
gaguucauauaauuugauc

SEQ ID NO: 1894830 - RNA, 19 nt, Artificial Sequence
  Description of Artificial Sequence: Synthetic oligonucleotide
cauccuacucaacaguggc

SEQ ID NO: 1894831 - RNA, 19 nt, Artificial Sequence
  Description of Artificial Sequence: Synthetic oligonucleotide
uaaucucuuguaaggaaaa

SEQ ID NO: 1894832 - RNA, 19 nt, Artificial Sequence
  Description of Artificial Sequence: Synthetic oligonucleotide
aucaagggacuccuccacc

SEQ ID NO: 1894833 - RNA, 19 nt, Artificial Sequence
  Description of Artificial Sequence: Synthetic oligonucleotide
aucagcacucuauaaucag

SEQ ID NO: 1894834 - RNA, 19 nt, Artificial Sequence
  Description of Artificial Sequence: Synthetic oligonucleotide
ucaauugaucugaagcaau

SEQ ID NO: 1894835 - RNA, 19 nt, Artificial Sequence
  Description of Artificial Sequence: Synthetic oligonucleotide
ucagaaacaaggugagggu

SEQ ID NO: 1894836 - RNA, 19 nt, Artificial Sequence
  Description of Artificial Sequence: Synthetic oligonucleotide
auaaauagacacauuuacu

SEQ ID NO: 1894837 - RNA, 19 nt, Artificial Sequence
  Description of Artificial Sequence: Synthetic oligonucleotide
uccagacucacccuugacu

SEQ ID NO: 1894838 - RNA, 19 nt, Artificial Sequence
  Description of Artificial Sequence: Synthetic oligonucleotide
aucaucagcacucuauaau

SEQ ID NO: 1894839 - RNA, 19 nt, Artificial Sequence
  Description of Artificial Sequence: Synthetic oligonucleotide
guguguggaaaauggaagc

SEQ ID NO: 1894840 - RNA, 19 nt, Artificial Sequence
  Description of Artificial Sequence: Synthetic oligonucleotide
uccuacucaacaguggccc

SEQ ID NO: 1894841 - RNA, 19 nt, Artificial Sequence
  Description of Artificial Sequence: Synthetic oligonucleotide
uccaucaucagcacucuau

SEQ ID NO: 1894842 - RNA, 19 nt, Artificial Sequence
  Description of Artificial Sequence: Synthetic oligonucleotide
aacgaggaaacaucggauu

SEQ ID NO: 1894843 - RNA, 19 nt, Artificial Sequence
  Description of Artificial Sequence: Synthetic oligonucleotide
uucacuuaagcugcccagg

SEQ ID NO: 1894844 - RNA, 19 nt, Artificial Sequence
  Description of Artificial Sequence: Synthetic oligonucleotide
ggaaaauuaacgaggaaac

SEQ ID NO: 1894845 - RNA, 19 nt, Artificial Sequence
  Description of Artificial Sequence: Synthetic oligonucleotide
uccugagcaggucgaagcg

SEQ ID NO: 1894846 - RNA, 19 nt, Artificial Sequence
  Description of Artificial Sequence: Synthetic oligonucleotide
ucagcacucuauaaucaga

SEQ ID NO: 1894847 - RNA, 19 nt, Artificial Sequence
  Description of Artificial Sequence: Synthetic oligonucleotide
ucuauucuguggauauucu

SEQ ID NO: 1894848 - RNA, 19 nt, Artificial Sequence
  Description of Artificial Sequence: Synthetic oligonucleotide
ggacaugaguauuuguggg

SEQ ID NO: 1894849 - RNA, 19 nt, Artificial Sequence
  Description of Artificial Sequence: Synthetic oligonucleotide
gauccuacuccuuggccag

SEQ ID NO: 1894850 - RNA, 19 nt, Artificial Sequence
  Description of Artificial Sequence: Synthetic oligonucleotide
auacauuuuggugugugug

SEQ ID NO: 1894851 - RNA, 19 nt, Artificial Sequence
  Description of Artificial Sequence: Synthetic oligonucleotide
cacucuauaaaucaucaaa

SEQ ID NO: 1894852 - RNA, 19 nt, Artificial Sequence
  Description of Artificial Sequence: Synthetic oligonucleotide
uugacuuaauacucaaguu

SEQ ID NO: 1894853 - RNA, 19 nt, Artificial Sequence
  Description of Artificial Sequence: Synthetic oligonucleotide
ucuucauuucuuucagagu

SEQ ID NO: 1894854 - RNA, 19 nt, Artificial Sequence
  Description of Artificial Sequence: Synthetic oligonucleotide
aacaaggugaggguuucug

SEQ ID NO: 1894855 - RNA, 19 nt, Artificial Sequence
  Description of Artificial Sequence: Synthetic oligonucleotide
uacagcauuguuucuaguu

SEQ ID NO: 1894856 - RNA, 19 nt, Artificial Sequence
  Description of Artificial Sequence: Synthetic oligonucleotide
cuucaaaacccuccugagc

SEQ ID NO: 1894857 - RNA, 19 nt, Artificial Sequence
  Description of Artificial Sequence: Synthetic oligonucleotide
uucaaucaccagauccaag

SEQ ID NO: 1894858 - RNA, 19 nt, Artificial Sequence
  Description of Artificial Sequence: Synthetic oligonucleotide
ucauccagcuuccauccac

SEQ ID NO: 1894859 - RNA, 19 nt, Artificial Sequence
  Description of Artificial Sequence: Synthetic oligonucleotide
auaccaagagaugucaacu

SEQ ID NO: 1894860 - RNA, 19 nt, Artificial Sequence
  Description of Artificial Sequence: Synthetic oligonucleotide
aggucgaagcgccucacuc

SEQ ID NO: 1894861 - RNA, 19 nt, Artificial Sequence
  Description of Artificial Sequence: Synthetic oligonucleotide
uaaguaaucugcagcguuu

SEQ ID NO: 1894862 - RNA, 19 nt, Artificial Sequence
  Description of Artificial Sequence: Synthetic oligonucleotide
uaacgaggaaacaucggau

SEQ ID NO: 1894863 - RNA, 19 nt, Artificial Sequence
  Description of Artificial Sequence: Synthetic oligonucleotide
agaaucucgccuguccucg

SEQ ID NO: 1894864 - RNA, 19 nt, Artificial Sequence
  Description of Artificial Sequence: Synthetic oligonucleotide
uucaauugaucugaagcaa

SEQ ID NO: 1894865 - RNA, 19 nt, Artificial Sequence
  Description of Artificial Sequence: Synthetic oligonucleotide
uugauccuacuccuuggcc

SEQ ID NO: 1894866 - RNA, 19 nt, Artificial Sequence
  Description of Artificial Sequence: Synthetic oligonucleotide
uagguacauacuaucuacu

SEQ ID NO: 1894867 - RNA, 19 nt, Artificial Sequence
  Description of Artificial Sequence: Synthetic oligonucleotide
ucagccaagguagcaacag

SEQ ID NO: 1894868 - RNA, 19 nt, Artificial Sequence
  Description of Artificial Sequence: Synthetic oligonucleotide
caauugaucugaagcaauc

SEQ ID NO: 1894869 - RNA, 19 nt, Artificial Sequence
  Description of Artificial Sequence: Synthetic oligonucleotide
aaggugaggguuucugcga

SEQ ID NO: 1894870 - RNA, 19 nt, Artificial Sequence
  Description of Artificial Sequence: Synthetic oligonucleotide
ucggauuuauccagauucu

SEQ ID NO: 1894871 - RNA, 19 nt, Artificial Sequence
  Description of Artificial Sequence: Synthetic oligonucleotide
ucacuuaagcugcccagga

SEQ ID NO: 1894872 - RNA, 19 nt, Artificial Sequence
  Description of Artificial Sequence: Synthetic oligonucleotide
agcaacagagagcuggccu

SEQ ID NO: 1894873 - RNA, 19 nt, Artificial Sequence
  Description of Artificial Sequence: Synthetic oligonucleotide
cucuuuggggacauuuaag

SEQ ID NO: 1894874 - RNA, 19 nt, Artificial Sequence
  Description of Artificial Sequence: Synthetic oligonucleotide
guuuggaagagaagccugg

SEQ ID NO: 1894875 - RNA, 19 nt, Artificial Sequence
  Description of Artificial Sequence: Synthetic oligonucleotide
auuaacgaggaaacaucgg

SEQ ID NO: 1894876 - RNA, 19 nt, Artificial Sequence
  Description of Artificial Sequence: Synthetic oligonucleotide
aauaacagaggcacucuau

SEQ ID NO: 1894877 - RNA, 19 nt, Artificial Sequence
  Description of Artificial Sequence: Synthetic oligonucleotide
ugaagcaaucagauucagu

SEQ ID NO: 1894878 - RNA, 19 nt, Artificial Sequence
  Description of Artificial Sequence: Synthetic oligonucleotide
aagcgccucacucuguaga

SEQ ID NO: 1894879 - RNA, 19 nt, Artificial Sequence
  Description of Artificial Sequence: Synthetic oligonucleotide
gcacauaagagugagagca

SEQ ID NO: 1894880 - RNA, 19 nt, Artificial Sequence
  Description of Artificial Sequence: Synthetic oligonucleotide
cagcguuuauuuuacagca

SEQ ID NO: 1894881 - RNA, 19 nt, Artificial Sequence
  Description of Artificial Sequence: Synthetic oligonucleotide
acuuaauacucaaguuugg

SEQ ID NO: 1894882 - RNA, 19 nt, Artificial Sequence
  Description of Artificial Sequence: Synthetic oligonucleotide
aacuucauuuuggaaggcu

SEQ ID NO: 1894883 - RNA, 19 nt, Artificial Sequence
  Description of Artificial Sequence: Synthetic oligonucleotide
ugaguauuugugggguagg

SEQ ID NO: 1894884 - RNA, 19 nt, Artificial Sequence
  Description of Artificial Sequence: Synthetic oligonucleotide
aagcaaucagauucaguuu

SEQ ID NO: 1894885 - RNA, 19 nt, Artificial Sequence
  Description of Artificial Sequence: Synthetic oligonucleotide
ugcacauaagagugagagc

SEQ ID NO: 1894886 - RNA, 19 nt, Artificial Sequence
  Description of Artificial Sequence: Synthetic oligonucleotide
ugcauaccaagagauguca

SEQ ID NO: 1894887 - RNA, 19 nt, Artificial Sequence
  Description of Artificial Sequence: Synthetic oligonucleotide
acagcauuguuucuaguua

SEQ ID NO: 1894888 - RNA, 19 nt, Artificial Sequence
  Description of Artificial Sequence: Synthetic oligonucleotide
guucauauaauuugauccu

SEQ ID NO: 1894889 - RNA, 19 nt, Artificial Sequence
  Description of Artificial Sequence: Synthetic oligonucleotide
cugagcaggucgaagcgcc

SEQ ID NO: 1894890 - RNA, 19 nt, Artificial Sequence
  Description of Artificial Sequence: Synthetic oligonucleotide
agcucccucacauuagaug

SEQ ID NO: 1894891 - RNA, 19 nt, Artificial Sequence
  Description of Artificial Sequence: Synthetic oligonucleotide
uggaaagaguucauauaau

SEQ ID NO: 1894892 - RNA, 19 nt, Artificial Sequence
  Description of Artificial Sequence: Synthetic oligonucleotide
cagaagucaacagccaggc

SEQ ID NO: 1894893 - RNA, 19 nt, Artificial Sequence
  Description of Artificial Sequence: Synthetic oligonucleotide
ucugcgaaggugagccucc

SEQ ID NO: 1894894 - RNA, 19 nt, Artificial Sequence
  Description of Artificial Sequence: Synthetic oligonucleotide
cucaaguuuggaagagaag

SEQ ID NO: 1894895 - RNA, 19 nt, Artificial Sequence
  Description of Artificial Sequence: Synthetic oligonucleotide
aguagaggcgcugccgggc

SEQ ID NO: 1894896 - RNA, 19 nt, Artificial Sequence
  Description of Artificial Sequence: Synthetic oligonucleotide
acugcguauacuucugaau

SEQ ID NO: 1894897 - RNA, 19 nt, Artificial Sequence
  Description of Artificial Sequence: Synthetic oligonucleotide
uggccucuuucacuuaagc

SEQ ID NO: 1894898 - RNA, 19 nt, Artificial Sequence
  Description of Artificial Sequence: Synthetic oligonucleotide
uuuugguguguguggaaaa

SEQ ID NO: 1894899 - RNA, 19 nt, Artificial Sequence
  Description of Artificial Sequence: Synthetic oligonucleotide
ugcaguagaggcgcugccg

SEQ ID NO: 1894900 - RNA, 19 nt, Artificial Sequence
  Description of Artificial Sequence: Synthetic oligonucleotide
acacauuuacuaaugcaca

SEQ ID NO: 1894901 - RNA, 19 nt, Artificial Sequence
  Description of Artificial Sequence: Synthetic oligonucleotide
ucccucacauuagaugggg

SEQ ID NO: 1894902 - RNA, 19 nt, Artificial Sequence
  Description of Artificial Sequence: Synthetic oligonucleotide
agccaagguagcaacagag

SEQ ID NO: 1894903 - RNA, 19 nt, Artificial Sequence
  Description of Artificial Sequence: Synthetic oligonucleotide
ucacauuagauggggccag

SEQ ID NO: 1894904 - RNA, 19 nt, Artificial Sequence
  Description of Artificial Sequence: Synthetic oligonucleotide
uucauauaauuugauccua

SEQ ID NO: 1894905 - RNA, 19 nt, Artificial Sequence
  Description of Artificial Sequence: Synthetic oligonucleotide
aguggcccagaaucucgcc

SEQ ID NO: 1894906 - RNA, 19 nt, Artificial Sequence
  Description of Artificial Sequence: Synthetic oligonucleotide
uggaaggcuuucuucauuu

SEQ ID NO: 1894907 - RNA, 19 nt, Artificial Sequence
  Description of Artificial Sequence: Synthetic oligonucleotide
acaugaguauuuguggggu

SEQ ID NO: 1894908 - RNA, 19 nt, Artificial Sequence
  Description of Artificial Sequence: Synthetic oligonucleotide
gaaggugagccuccacagc

SEQ ID NO: 1894909 - RNA, 19 nt, Artificial Sequence
  Description of Artificial Sequence: Synthetic oligonucleotide
ggaaaauggaagccaugag

SEQ ID NO: 1894910 - RNA, 19 nt, Artificial Sequence
  Description of Artificial Sequence: Synthetic oligonucleotide
accagauccaagaaacucu

SEQ ID NO: 1894911 - RNA, 19 nt, Artificial Sequence
  Description of Artificial Sequence: Synthetic oligonucleotide
uucagaguucuugcaguag

SEQ ID NO: 1894912 - RNA, 19 nt, Artificial Sequence
  Description of Artificial Sequence: Synthetic oligonucleotide
agagcuggccucuuucacu

SEQ ID NO: 1894913 - RNA, 19 nt, Artificial Sequence
  Description of Artificial Sequence: Synthetic oligonucleotide
ugucaacuucauuuuggaa

SEQ ID NO: 1894914 - RNA, 19 nt, Artificial Sequence
  Description of Artificial Sequence: Synthetic oligonucleotide
auacucaaguuuggaagag

SEQ ID NO: 1894915 - RNA, 19 nt, Artificial Sequence
  Description of Artificial Sequence: Synthetic oligonucleotide
uucagccaagguagcaaca

SEQ ID NO: 1894916 - RNA, 19 nt, Artificial Sequence
  Description of Artificial Sequence: Synthetic oligonucleotide
acucuauaaucagaaacaa

SEQ ID NO: 1894917 - RNA, 19 nt, Artificial Sequence
  Description of Artificial Sequence: Synthetic oligonucleotide
aguuuggaagagaagccug

SEQ ID NO: 1894918 - RNA, 19 nt, Artificial Sequence
  Description of Artificial Sequence: Synthetic oligonucleotide
cuauaaucagaaacaaggu

SEQ ID NO: 1894919 - RNA, 19 nt, Artificial Sequence
  Description of Artificial Sequence: Synthetic oligonucleotide
uggauauucuucaggcauu

SEQ ID NO: 1894920 - RNA, 19 nt, Artificial Sequence
  Description of Artificial Sequence: Synthetic oligonucleotide
cuuaauacucaaguuugga

SEQ ID NO: 1894921 - RNA, 19 nt, Artificial Sequence
  Description of Artificial Sequence: Synthetic oligonucleotide
acucuuguccuugguuacc

SEQ ID NO: 1894922 - RNA, 19 nt, Artificial Sequence
  Description of Artificial Sequence: Synthetic oligonucleotide
agguacauacuaucuacuu

SEQ ID NO: 1894923 - RNA, 19 nt, Artificial Sequence
  Description of Artificial Sequence: Synthetic oligonucleotide
ucaccagauccaagaaacu

SEQ ID NO: 1894924 - RNA, 19 nt, Artificial Sequence
  Description of Artificial Sequence: Synthetic oligonucleotide
ugcguauacuucugaauuu

SEQ ID NO: 1894925 - RNA, 19 nt, Artificial Sequence
  Description of Artificial Sequence: Synthetic oligonucleotide
cucuacauaagaaaagcau

SEQ ID NO: 1894926 - RNA, 19 nt, Artificial Sequence
  Description of Artificial Sequence: Synthetic oligonucleotide
gugaggguuucugcgaagg

SEQ ID NO: 1894927 - RNA, 19 nt, Artificial Sequence
  Description of Artificial Sequence: Synthetic oligonucleotide
cuccaguucaaucaccaga

SEQ ID NO: 1894928 - RNA, 19 nt, Artificial Sequence
  Description of Artificial Sequence: Synthetic oligonucleotide
acauacuaucuacuuuuau

SEQ ID NO: 1894929 - RNA, 19 nt, Artificial Sequence
  Description of Artificial Sequence: Synthetic oligonucleotide
cucuguagagcaguucagc

SEQ ID NO: 1894930 - RNA, 19 nt, Artificial Sequence
  Description of Artificial Sequence: Synthetic oligonucleotide
uccuuggccagacugcgua

SEQ ID NO: 1894931 - RNA, 19 nt, Artificial Sequence
  Description of Artificial Sequence: Synthetic oligonucleotide
guuaccuugccucgaccug

SEQ ID NO: 1894932 - RNA, 19 nt, Artificial Sequence
  Description of Artificial Sequence: Synthetic oligonucleotide
uggcccagaaucucgccug

SEQ ID NO: 1894933 - RNA, 19 nt, Artificial Sequence
  Description of Artificial Sequence: Synthetic oligonucleotide
agcgccucacucuguagag

SEQ ID NO: 1894934 - RNA, 19 nt, Artificial Sequence
  Description of Artificial Sequence: Synthetic oligonucleotide
guaaucucuuguaaggaaa

SEQ ID NO: 1894935 - RNA, 19 nt, Artificial Sequence
  Description of Artificial Sequence: Synthetic oligonucleotide
gaagagaagccuggaaaga

SEQ ID NO: 1894936 - RNA, 19 nt, Artificial Sequence
  Description of Artificial Sequence: Synthetic oligonucleotide
caucagcacucuauaauca

SEQ ID NO: 1894937 - RNA, 19 nt, Artificial Sequence
  Description of Artificial Sequence: Synthetic oligonucleotide
aacaucggauuuauccaga

SEQ ID NO: 1894938 - RNA, 19 nt, Artificial Sequence
  Description of Artificial Sequence: Synthetic oligonucleotide
ccucacauuagauggggcc

SEQ ID NO: 1894939 - RNA, 19 nt, Artificial Sequence
  Description of Artificial Sequence: Synthetic oligonucleotide
acgaggaaacaucggauuu

SEQ ID NO: 1894940 - RNA, 19 nt, Artificial Sequence
  Description of Artificial Sequence: Synthetic oligonucleotide
cagggcucugcauaccaag

SEQ ID NO: 1894941 - RNA, 19 nt, Artificial Sequence
  Description of Artificial Sequence: Synthetic oligonucleotide
uaauuugauccuacuccuu

SEQ ID NO: 1894942 - RNA, 19 nt, Artificial Sequence
  Description of Artificial Sequence: Synthetic oligonucleotide
agaaacucuuguccuuggu

SEQ ID NO: 1894943 - RNA, 19 nt, Artificial Sequence
  Description of Artificial Sequence: Synthetic oligonucleotide
uuaccuugccucgaccugu

SEQ ID NO: 1894944 - RNA, 19 nt, Artificial Sequence
  Description of Artificial Sequence: Synthetic oligonucleotide
uuugguguguguggaaaau

SEQ ID NO: 1894945 - RNA, 19 nt, Artificial Sequence
  Description of Artificial Sequence: Synthetic oligonucleotide
gucgaagcgccucacucug

SEQ ID NO: 1894946 - RNA, 19 nt, Artificial Sequence
  Description of Artificial Sequence: Synthetic oligonucleotide
cuauagguacauacuaucu

SEQ ID NO: 1894947 - RNA, 19 nt, Artificial Sequence
  Description of Artificial Sequence: Synthetic oligonucleotide
ucaagucuauucuguggau

SEQ ID NO: 1894948 - RNA, 19 nt, Artificial Sequence
  Description of Artificial Sequence: Synthetic oligonucleotide
aucucuuguaaggaaaauu

SEQ ID NO: 1894949 - RNA, 19 nt, Artificial Sequence
  Description of Artificial Sequence: Synthetic oligonucleotide
cucccucacauuagauggg

SEQ ID NO: 1894950 - RNA, 19 nt, Artificial Sequence
  Description of Artificial Sequence: Synthetic oligonucleotide
gaaacaaggugaggguuuc

SEQ ID NO: 1894951 - RNA, 19 nt, Artificial Sequence
  Description of Artificial Sequence: Synthetic oligonucleotide
acaguggcccagaaucucg

SEQ ID NO: 1894952 - RNA, 19 nt, Artificial Sequence
  Description of Artificial Sequence: Synthetic oligonucleotide
caucaagggacuccuccac

SEQ ID NO: 1894953 - RNA, 19 nt, Artificial Sequence
  Description of Artificial Sequence: Synthetic oligonucleotide
cucugcauaccaagagaug

SEQ ID NO: 1894954 - RNA, 19 nt, Artificial Sequence
  Description of Artificial Sequence: Synthetic oligonucleotide
caccagauccaagaaacuc

SEQ ID NO: 1894955 - RNA, 19 nt, Artificial Sequence
  Description of Artificial Sequence: Synthetic oligonucleotide
uacucaaguuuggaagaga

SEQ ID NO: 1894956 - RNA, 19 nt, Artificial Sequence
  Description of Artificial Sequence: Synthetic oligonucleotide
agggcacaucgccauguuc

SEQ ID NO: 1894957 - RNA, 19 nt, Artificial Sequence
  Description of Artificial Sequence: Synthetic oligonucleotide
aucucgccuguccucgccg

SEQ ID NO: 1894958 - RNA, 19 nt, Artificial Sequence
  Description of Artificial Sequence: Synthetic oligonucleotide
cugcauaccaagagauguc

SEQ ID NO: 1894959 - RNA, 19 nt, Artificial Sequence
  Description of Artificial Sequence: Synthetic oligonucleotide
aaguaaucugcagcguuua

SEQ ID NO: 1894960 - RNA, 19 nt, Artificial Sequence
  Description of Artificial Sequence: Synthetic oligonucleotide
ccggacaugaguauuugug

SEQ ID NO: 1894961 - RNA, 19 nt, Artificial Sequence
  Description of Artificial Sequence: Synthetic oligonucleotide
gggcacaucgccauguucc

SEQ ID NO: 1894962 - RNA, 19 nt, Artificial Sequence
  Description of Artificial Sequence: Synthetic oligonucleotide
acauaagagugagagcaaa

SEQ ID NO: 1894963 - RNA, 19 nt, Artificial Sequence
  Description of Artificial Sequence: Synthetic oligonucleotide
uugcaguagaggcgcugcc

SEQ ID NO: 1894964 - RNA, 19 nt, Artificial Sequence
  Description of Artificial Sequence: Synthetic oligonucleotide
aaugcacauaagagugaga

SEQ ID NO: 1894965 - RNA, 19 nt, Artificial Sequence
  Description of Artificial Sequence: Synthetic oligonucleotide
ucucgccuguccucgccgg

SEQ ID NO: 1894966 - RNA, 19 nt, Artificial Sequence
  Description of Artificial Sequence: Synthetic oligonucleotide
ugguuaccuugccucgacc

SEQ ID NO: 1894967 - RNA, 19 nt, Artificial Sequence
  Description of Artificial Sequence: Synthetic oligonucleotide
cagcacucuauaaucagaa

SEQ ID NO: 1894968 - RNA, 19 nt, Artificial Sequence
  Description of Artificial Sequence: Synthetic oligonucleotide
cagacugcguauacuucug

SEQ ID NO: 1894969 - RNA, 19 nt, Artificial Sequence
  Description of Artificial Sequence: Synthetic oligonucleotide
gaagcgccucacucuguag

SEQ ID NO: 1894970 - RNA, 19 nt, Artificial Sequence
  Description of Artificial Sequence: Synthetic oligonucleotide
acaucggauuuauccagau

SEQ ID NO: 1894971 - RNA, 19 nt, Artificial Sequence
  Description of Artificial Sequence: Synthetic oligonucleotide
acagcugcuuugucugucu

SEQ ID NO: 1894972 - RNA, 19 nt, Artificial Sequence
  Description of Artificial Sequence: Synthetic oligonucleotide
caugagccggacaugagua

SEQ ID NO: 1894973 - RNA, 19 nt, Artificial Sequence
  Description of Artificial Sequence: Synthetic oligonucleotide
acauuuacuaaugcacaua

SEQ ID NO: 1894974 - RNA, 19 nt, Artificial Sequence
  Description of Artificial Sequence: Synthetic oligonucleotide
cuuucagaguucuugcagu

SEQ ID NO: 1894975 - RNA, 19 nt, Artificial Sequence
  Description of Artificial Sequence: Synthetic oligonucleotide
ucgccggagaccuccagaa

SEQ ID NO: 1894976 - RNA, 19 nt, Artificial Sequence
  Description of Artificial Sequence: Synthetic oligonucleotide
guguaaucucuuguaagga

SEQ ID NO: 1894977 - RNA, 19 nt, Artificial Sequence
  Description of Artificial Sequence: Synthetic oligonucleotide
guagcaacagagagcuggc

SEQ ID NO: 1894978 - RNA, 19 nt, Artificial Sequence
  Description of Artificial Sequence: Synthetic oligonucleotide
cggacaugaguauuugugg

SEQ ID NO: 1894979 - RNA, 19 nt, Artificial Sequence
  Description of Artificial Sequence: Synthetic oligonucleotide
agagcaaaaggaagacacu

SEQ ID NO: 1894980 - RNA, 19 nt, Artificial Sequence
  Description of Artificial Sequence: Synthetic oligonucleotide
cacaucgccauguuccaga

SEQ ID NO: 1894981 - RNA, 19 nt, Artificial Sequence
  Description of Artificial Sequence: Synthetic oligonucleotide
cuacucaacaguggcccag

SEQ ID NO: 1894982 - RNA, 19 nt, Artificial Sequence
  Description of Artificial Sequence: Synthetic oligonucleotide
uucugcgaaggugagccuc

SEQ ID NO: 1894983 - RNA, 19 nt, Artificial Sequence
  Description of Artificial Sequence: Synthetic oligonucleotide
agcacucuauaaucagaaa

SEQ ID NO: 1894984 - RNA, 19 nt, Artificial Sequence
  Description of Artificial Sequence: Synthetic oligonucleotide
agauucucaccaaucucca

SEQ ID NO: 1894985 - RNA, 19 nt, Artificial Sequence
  Description of Artificial Sequence: Synthetic oligonucleotide
ucuugcaguagaggcgcug

SEQ ID NO: 1894986 - RNA, 19 nt, Artificial Sequence
  Description of Artificial Sequence: Synthetic oligonucleotide
agaguucauauaauuugau

SEQ ID NO: 1894987 - RNA, 19 nt, Artificial Sequence
  Description of Artificial Sequence: Synthetic oligonucleotide
cucacauuagauggggcca

SEQ ID NO: 1894988 - RNA, 19 nt, Artificial Sequence
  Description of Artificial Sequence: Synthetic oligonucleotide
acacagggcacaucgccau

SEQ ID NO: 1894989 - RNA, 19 nt, Artificial Sequence
  Description of Artificial Sequence: Synthetic oligonucleotide
cagcauuguuucuaguuaa

SEQ ID NO: 1894990 - RNA, 19 nt, Artificial Sequence
  Description of Artificial Sequence: Synthetic oligonucleotide
gaaacucuuguccuugguu

SEQ ID NO: 1894991 - RNA, 19 nt, Artificial Sequence
  Description of Artificial Sequence: Synthetic oligonucleotide
cagaaucucgccuguccuc

SEQ ID NO: 1894992 - RNA, 19 nt, Artificial Sequence
  Description of Artificial Sequence: Synthetic oligonucleotide
ucggcagacacagggcaca

SEQ ID NO: 1894993 - RNA, 19 nt, Artificial Sequence
  Description of Artificial Sequence: Synthetic oligonucleotide
agcuuccauccacucagca

SEQ ID NO: 1894994 - RNA, 19 nt, Artificial Sequence
  Description of Artificial Sequence: Synthetic oligonucleotide
cucucuauagguacauacu

SEQ ID NO: 1894995 - RNA, 19 nt, Artificial Sequence
  Description of Artificial Sequence: Synthetic oligonucleotide
accucggcagacacagggc

SEQ ID NO: 1894996 - RNA, 19 nt, Artificial Sequence
  Description of Artificial Sequence: Synthetic oligonucleotide
agacugcguauacuucuga

SEQ ID NO: 1894997 - RNA, 19 nt, Artificial Sequence
  Description of Artificial Sequence: Synthetic oligonucleotide
ucgaccuguguaaucucuu

SEQ ID NO: 1894998 - RNA, 19 nt, Artificial Sequence
  Description of Artificial Sequence: Synthetic oligonucleotide
caguggcccagaaucucgc

SEQ ID NO: 1894999 - RNA, 19 nt, Artificial Sequence
  Description of Artificial Sequence: Synthetic oligonucleotide
ggaaagaguucauauaauu

SEQ ID NO: 1895000 - RNA, 19 nt, Artificial Sequence
  Description of Artificial Sequence: Synthetic oligonucleotide
gaguauuugugggguagga

SEQ ID NO: 1895001 - RNA, 19 nt, Artificial Sequence
  Description of Artificial Sequence: Synthetic oligonucleotide
agccaugagccggacauga

SEQ ID NO: 1895002 - RNA, 19 nt, Artificial Sequence
  Description of Artificial Sequence: Synthetic oligonucleotide
ggcacucuauaaaucauca

SEQ ID NO: 1895003 - RNA, 19 nt, Artificial Sequence
  Description of Artificial Sequence: Synthetic oligonucleotide
uaccuugccucgaccugug

SEQ ID NO: 1895004 - RNA, 19 nt, Artificial Sequence
  Description of Artificial Sequence: Synthetic oligonucleotide
gacacagggcacaucgcca

SEQ ID NO: 1895005 - RNA, 19 nt, Artificial Sequence
  Description of Artificial Sequence: Synthetic oligonucleotide
agaagucaacagccaggcu

SEQ ID NO: 1895006 - RNA, 19 nt, Artificial Sequence
  Description of Artificial Sequence: Synthetic oligonucleotide
ccuugguuaccuugccucg

SEQ ID NO: 1895007 - RNA, 19 nt, Artificial Sequence
  Description of Artificial Sequence: Synthetic oligonucleotide
agcaggucgaagcgccuca

SEQ ID NO: 1895008 - RNA, 19 nt, Artificial Sequence
  Description of Artificial Sequence: Synthetic oligonucleotide
cuuaagcugcccaggagcu

SEQ ID NO: 1895009 - RNA, 19 nt, Artificial Sequence
  Description of Artificial Sequence: Synthetic oligonucleotide
agacucacccuugacuuaa

SEQ ID NO: 1895010 - RNA, 19 nt, Artificial Sequence
  Description of Artificial Sequence: Synthetic oligonucleotide
cagacacagggcacaucgc

SEQ ID NO: 1895011 - RNA, 19 nt, Artificial Sequence
  Description of Artificial Sequence: Synthetic oligonucleotide
ucuccaucaucagcacucu

SEQ ID NO: 1895012 - RNA, 19 nt, Artificial Sequence
  Description of Artificial Sequence: Synthetic oligonucleotide
gcaacagagagcuggccuc

SEQ ID NO: 1895013 - RNA, 19 nt, Artificial Sequence
  Description of Artificial Sequence: Synthetic oligonucleotide
uacucaacaguggcccaga

SEQ ID NO: 1895014 - RNA, 19 nt, Artificial Sequence
  Description of Artificial Sequence: Synthetic oligonucleotide
gaaucucgccuguccucgc

SEQ ID NO: 1895015 - RNA, 19 nt, Artificial Sequence
  Description of Artificial Sequence: Synthetic oligonucleotide
aggugaggguuucugcgaa

SEQ ID NO: 1895016 - RNA, 19 nt, Artificial Sequence
  Description of Artificial Sequence: Synthetic oligonucleotide
caucaucagcacucuauaa

SEQ ID NO: 1895017 - RNA, 19 nt, Artificial Sequence
  Description of Artificial Sequence: Synthetic oligonucleotide
aaacaaggugaggguuucu

SEQ ID NO: 1895018 - RNA, 19 nt, Artificial Sequence
  Description of Artificial Sequence: Synthetic oligonucleotide
agguucucagccacaucuc

SEQ ID NO: 1895019 - RNA, 19 nt, Artificial Sequence
  Description of Artificial Sequence: Synthetic oligonucleotide
ucgccauguuccagaaguc

SEQ ID NO: 1895020 - RNA, 19 nt, Artificial Sequence
  Description of Artificial Sequence: Synthetic oligonucleotide
cucuauagguacauacuau

SEQ ID NO: 1895021 - RNA, 19 nt, Artificial Sequence
  Description of Artificial Sequence: Synthetic oligonucleotide
uagcaacagagagcuggcc

SEQ ID NO: 1895022 - RNA, 19 nt, Artificial Sequence
  Description of Artificial Sequence: Synthetic oligonucleotide
caaucaccagauccaagaa

SEQ ID NO: 1895023 - RNA, 19 nt, Artificial Sequence
  Description of Artificial Sequence: Synthetic oligonucleotide
cugcguauacuucugaauu

SEQ ID NO: 1895024 - RNA, 19 nt, Artificial Sequence
  Description of Artificial Sequence: Synthetic oligonucleotide
uuucugcgaaggugagccu

SEQ ID NO: 1895025 - RNA, 19 nt, Artificial Sequence
  Description of Artificial Sequence: Synthetic oligonucleotide
ugagccggacaugaguauu

SEQ ID NO: 1895026 - RNA, 19 nt, Artificial Sequence
  Description of Artificial Sequence: Synthetic oligonucleotide
cacauuagauggggccagg

SEQ ID NO: 1895027 - RNA, 19 nt, Artificial Sequence
  Description of Artificial Sequence: Synthetic oligonucleotide
aagccaugagccggacaug

SEQ ID NO: 1895028 - RNA, 19 nt, Artificial Sequence
  Description of Artificial Sequence: Synthetic oligonucleotide
augagccggacaugaguau

SEQ ID NO: 1895029 - RNA, 19 nt, Artificial Sequence
  Description of Artificial Sequence: Synthetic oligonucleotide
uuuugucuucaagucuauu

SEQ ID NO: 1895030 - RNA, 19 nt, Artificial Sequence
  Description of Artificial Sequence: Synthetic oligonucleotide
ggcucugcauaccaagaga

SEQ ID NO: 1895031 - RNA, 19 nt, Artificial Sequence
  Description of Artificial Sequence: Synthetic oligonucleotide
cacauuuacuaaugcacau

SEQ ID NO: 1895032 - RNA, 19 nt, Artificial Sequence
  Description of Artificial Sequence: Synthetic oligonucleotide
uccuacuccuuggccagac

SEQ ID NO: 1895033 - RNA, 19 nt, Artificial Sequence
  Description of Artificial Sequence: Synthetic oligonucleotide
gcgaaggugagccuccaca

SEQ ID NO: 1895034 - RNA, 19 nt, Artificial Sequence
  Description of Artificial Sequence: Synthetic oligonucleotide
aggagcucccucacauuag

SEQ ID NO: 1895035 - RNA, 19 nt, Artificial Sequence
  Description of Artificial Sequence: Synthetic oligonucleotide
ugcgaaggugagccuccac

SEQ ID NO: 1895036 - RNA, 19 nt, Artificial Sequence
  Description of Artificial Sequence: Synthetic oligonucleotide
uuaagcugcccaggagcuc

SEQ ID NO: 1895037 - RNA, 19 nt, Artificial Sequence
  Description of Artificial Sequence: Synthetic oligonucleotide
gguacauacuaucuacuuu

SEQ ID NO: 1895038 - RNA, 19 nt, Artificial Sequence
  Description of Artificial Sequence: Synthetic oligonucleotide
ucucaccaaucuccaucau

SEQ ID NO: 1895039 - RNA, 19 nt, Artificial Sequence
  Description of Artificial Sequence: Synthetic oligonucleotide
ucgaagcgccucacucugu

SEQ ID NO: 1895040 - RNA, 19 nt, Artificial Sequence
  Description of Artificial Sequence: Synthetic oligonucleotide
acucacccuugacuuaaua

SEQ ID NO: 1895041 - RNA, 19 nt, Artificial Sequence
  Description of Artificial Sequence: Synthetic oligonucleotide
cuccaccugguggaugacc

SEQ ID NO: 1895042 - RNA, 19 nt, Artificial Sequence
  Description of Artificial Sequence: Synthetic oligonucleotide
gguuaccuugccucgaccu

SEQ ID NO: 1895043 - RNA, 19 nt, Artificial Sequence
  Description of Artificial Sequence: Synthetic oligonucleotide
ucgccuguccucgccggag

SEQ ID NO: 1895044 - RNA, 19 nt, Artificial Sequence
  Description of Artificial Sequence: Synthetic oligonucleotide
ggugaggguuucugcgaag

SEQ ID NO: 1895045 - RNA, 19 nt, Artificial Sequence
  Description of Artificial Sequence: Synthetic oligonucleotide
caagucuauucuguggaua

SEQ ID NO: 1895046 - RNA, 19 nt, Artificial Sequence
  Description of Artificial Sequence: Synthetic oligonucleotide
cauuuugguguguguggaa

SEQ ID NO: 1895047 - RNA, 19 nt, Artificial Sequence
  Description of Artificial Sequence: Synthetic oligonucleotide
gggguaggaagaaaacaca

SEQ ID NO: 1895048 - RNA, 19 nt, Artificial Sequence
  Description of Artificial Sequence: Synthetic oligonucleotide
gaucugaagcaaucagauu

SEQ ID NO: 1895049 - RNA, 19 nt, Artificial Sequence
  Description of Artificial Sequence: Synthetic oligonucleotide
cagcuuccauccacucagc

SEQ ID NO: 1895050 - RNA, 19 nt, Artificial Sequence
  Description of Artificial Sequence: Synthetic oligonucleotide
agccggacaugaguauuug

SEQ ID NO: 1895051 - RNA, 19 nt, Artificial Sequence
  Description of Artificial Sequence: Synthetic oligonucleotide
agcguuuauuuuacagcau

SEQ ID NO: 1895052 - RNA, 19 nt, Artificial Sequence
  Description of Artificial Sequence: Synthetic oligonucleotide
caugaguauuuguggggua

SEQ ID NO: 1895053 - RNA, 19 nt, Artificial Sequence
  Description of Artificial Sequence: Synthetic oligonucleotide
ugccucgaccuguguaauc

SEQ ID NO: 1895054 - RNA, 19 nt, Artificial Sequence
  Description of Artificial Sequence: Synthetic oligonucleotide
aagccuggaaagaguucau

SEQ ID NO: 1895055 - RNA, 19 nt, Artificial Sequence
  Description of Artificial Sequence: Synthetic oligonucleotide
cuugguuaccuugccucga

SEQ ID NO: 1895056 - RNA, 19 nt, Artificial Sequence
  Description of Artificial Sequence: Synthetic oligonucleotide
ucgccggcucauccuacuc

SEQ ID NO: 1895057 - RNA, 19 nt, Artificial Sequence
  Description of Artificial Sequence: Synthetic oligonucleotide
cucgaccuguguaaucucu

SEQ ID NO: 1895058 - RNA, 19 nt, Artificial Sequence
  Description of Artificial Sequence: Synthetic oligonucleotide
ccacaucucuacauaagaa

SEQ ID NO: 1895059 - RNA, 19 nt, Artificial Sequence
  Description of Artificial Sequence: Synthetic oligonucleotide
caacaguggcccagaaucu

SEQ ID NO: 1895060 - RNA, 19 nt, Artificial Sequence
  Description of Artificial Sequence: Synthetic oligonucleotide
gguuucugcgaaggugagc

SEQ ID NO: 1895061 - RNA, 19 nt, Artificial Sequence
  Description of Artificial Sequence: Synthetic oligonucleotide
gagcaggucgaagcgccuc

SEQ ID NO: 1895062 - RNA, 19 nt, Artificial Sequence
  Description of Artificial Sequence: Synthetic oligonucleotide
agucuauucuguggauauu

SEQ ID NO: 1895063 - RNA, 19 nt, Artificial Sequence
  Description of Artificial Sequence: Synthetic oligonucleotide
ccuggaaagaguucauaua

SEQ ID NO: 1895064 - RNA, 19 nt, Artificial Sequence
  Description of Artificial Sequence: Synthetic oligonucleotide
aggugagccuccacagcug

SEQ ID NO: 1895065 - RNA, 19 nt, Artificial Sequence
  Description of Artificial Sequence: Synthetic oligonucleotide
gguucucagccacaucucu

SEQ ID NO: 1895066 - RNA, 19 nt, Artificial Sequence
  Description of Artificial Sequence: Synthetic oligonucleotide
uugccucgaccuguguaau

SEQ ID NO: 1895067 - RNA, 19 nt, Artificial Sequence
  Description of Artificial Sequence: Synthetic oligonucleotide
guggcccagaaucucgccu

SEQ ID NO: 1895068 - RNA, 19 nt, Artificial Sequence
  Description of Artificial Sequence: Synthetic oligonucleotide
gccuggaaagaguucauau

SEQ ID NO: 1895069 - RNA, 19 nt, Artificial Sequence
  Description of Artificial Sequence: Synthetic oligonucleotide
gcguuuauuuuacagcauu

SEQ ID NO: 1895070 - RNA, 19 nt, Artificial Sequence
  Description of Artificial Sequence: Synthetic oligonucleotide
agccuggaaagaguucaua

SEQ ID NO: 1895071 - RNA, 19 nt, Artificial Sequence
  Description of Artificial Sequence: Synthetic oligonucleotide
ggcggucgccggcucaucc

SEQ ID NO: 1895072 - RNA, 19 nt, Artificial Sequence
  Description of Artificial Sequence: Synthetic oligonucleotide
ggucgaagcgccucacucu

SEQ ID NO: 1895073 - RNA, 19 nt, Artificial Sequence
  Description of Artificial Sequence: Synthetic oligonucleotide
ccagacugcguauacuucu

SEQ ID NO: 1895074 - RNA, 19 nt, Artificial Sequence
  Description of Artificial Sequence: Synthetic oligonucleotide
gccaagguagcaacagaga

SEQ ID NO: 1895075 - RNA, 19 nt, Artificial Sequence
  Description of Artificial Sequence: Synthetic oligonucleotide
cauuagauggggccagguu

SEQ ID NO: 1895076 - RNA, 19 nt, Artificial Sequence
  Description of Artificial Sequence: Synthetic oligonucleotide
cagacucacccuugacuua

SEQ ID NO: 1895077 - RNA, 19 nt, Artificial Sequence
  Description of Artificial Sequence: Synthetic oligonucleotide
cuguccucgccggagaccu

SEQ ID NO: 1895078 - RNA, 19 nt, Artificial Sequence
  Description of Artificial Sequence: Synthetic oligonucleotide
ggguuucugcgaaggugag

SEQ ID NO: 1895079 - RNA, 19 nt, Artificial Sequence
  Description of Artificial Sequence: Synthetic oligonucleotide
gcucugcauaccaagagau

SEQ ID NO: 1895080 - RNA, 19 nt, Artificial Sequence
  Description of Artificial Sequence: Synthetic oligonucleotide
cagaaacaaggugaggguu

SEQ ID NO: 1895081 - RNA, 19 nt, Artificial Sequence
  Description of Artificial Sequence: Synthetic oligonucleotide
accuugccucgaccugugu

SEQ ID NO: 1895082 - RNA, 19 nt, Artificial Sequence
  Description of Artificial Sequence: Synthetic oligonucleotide
ccagacucacccuugacuu

SEQ ID NO: 1895083 - RNA, 19 nt, Artificial Sequence
  Description of Artificial Sequence: Synthetic oligonucleotide
ggccagacugcguauacuu

SEQ ID NO: 1895084 - RNA, 19 nt, Artificial Sequence
  Description of Artificial Sequence: Synthetic oligonucleotide
cuuggccagacugcguaua

SEQ ID NO: 1895085 - RNA, 19 nt, Artificial Sequence
  Description of Artificial Sequence: Synthetic oligonucleotide
cugcagcguuuauuuuaca

SEQ ID NO: 1895086 - RNA, 19 nt, Artificial Sequence
  Description of Artificial Sequence: Synthetic oligonucleotide
gggacuccuccaccuggug

SEQ ID NO: 1895087 - RNA, 19 nt, Artificial Sequence
  Description of Artificial Sequence: Synthetic oligonucleotide
gccggcucauccuacucaa

SEQ ID NO: 1895088 - RNA, 19 nt, Artificial Sequence
  Description of Artificial Sequence: Synthetic oligonucleotide
cccuugacuuaauacucaa

SEQ ID NO: 1895089 - RNA, 19 nt, Artificial Sequence
  Description of Artificial Sequence: Synthetic oligonucleotide
ggcgcugccgggcggucgc

SEQ ID NO: 1895090 - RNA, 19 nt, Artificial Sequence
  Description of Artificial Sequence: Synthetic oligonucleotide
acccuccugagcaggucga

SEQ ID NO: 1895091 - RNA, 19 nt, Artificial Sequence
  Description of Artificial Sequence: Synthetic oligonucleotide
uguccucgccggagaccuc

SEQ ID NO: 1895092 - RNA, 19 nt, Artificial Sequence
  Description of Artificial Sequence: Synthetic oligonucleotide
gccagacugcguauacuuc

SEQ ID NO: 1895093 - RNA, 19 nt, Artificial Sequence
  Description of Artificial Sequence: Synthetic oligonucleotide
cggauuuauccagauucuc

SEQ ID NO: 1895094 - RNA, 19 nt, Artificial Sequence
  Description of Artificial Sequence: Synthetic oligonucleotide
gagccggacaugaguauuu

SEQ ID NO: 1895095 - RNA, 19 nt, Artificial Sequence
  Description of Artificial Sequence: Synthetic oligonucleotide
cggcucauccuacucaaca

SEQ ID NO: 1895096 - RNA, 19 nt, Artificial Sequence
  Description of Artificial Sequence: Synthetic oligonucleotide
gcauaccaagagaugucaa

SEQ ID NO: 1895097 - RNA, 19 nt, Artificial Sequence
  Description of Artificial Sequence: Synthetic oligonucleotide
auccuacuccuuggccaga

SEQ ID NO: 1895098 - RNA, 19 nt, Artificial Sequence
  Description of Artificial Sequence: Synthetic oligonucleotide
gcaaucagauucaguuucu

SEQ ID NO: 1895099 - RNA, 19 nt, Artificial Sequence
  Description of Artificial Sequence: Synthetic oligonucleotide
caucggauuuauccagauu

SEQ ID NO: 1895100 - RNA, 19 nt, Artificial Sequence
  Description of Artificial Sequence: Synthetic oligonucleotide
ggauauucuucaggcauuu

SEQ ID NO: 1895101 - RNA, 19 nt, Artificial Sequence
  Description of Artificial Sequence: Synthetic oligonucleotide
caacagagagcuggccucu

SEQ ID NO: 1895102 - RNA, 19 nt, Artificial Sequence
  Description of Artificial Sequence: Synthetic oligonucleotide
ccuacucaacaguggccca

SEQ ID NO: 1895103 - RNA, 19 nt, Artificial Sequence
  Description of Artificial Sequence: Synthetic oligonucleotide
ccaugagccggacaugagu

SEQ ID NO: 1895104 - RNA, 19 nt, Artificial Sequence
  Description of Artificial Sequence: Synthetic oligonucleotide
ccuguccucgccggagacc

SEQ ID NO: 1895105 - RNA, 19 nt, Artificial Sequence
  Description of Artificial Sequence: Synthetic oligonucleotide
gcguauacuucugaauuuu

SEQ ID NO: 1895106 - RNA, 19 nt, Artificial Sequence
  Description of Artificial Sequence: Synthetic oligonucleotide
gucgccggcucauccuacu

SEQ ID NO: 1895107 - RNA, 19 nt, Artificial Sequence
  Description of Artificial Sequence: Synthetic oligonucleotide
gccuguccucgccggagac

SEQ ID NO: 1895108 - RNA, 19 nt, Artificial Sequence
  Description of Artificial Sequence: Synthetic oligonucleotide
gcgccucacucuguagagc

SEQ ID NO: 1895109 - RNA, 19 nt, Artificial Sequence
  Description of Artificial Sequence: Synthetic oligonucleotide
cuccaucaucagcacucua

SEQ ID NO: 1895110 - RNA, 19 nt, Artificial Sequence
  Description of Artificial Sequence: Synthetic oligonucleotide
gagcucccucacauuagau

SEQ ID NO: 1895111 - RNA, 19 nt, Artificial Sequence
  Description of Artificial Sequence: Synthetic oligonucleotide
cucgccuguccucgccgga

SEQ ID NO: 1895112 - RNA, 19 nt, Artificial Sequence
  Description of Artificial Sequence: Synthetic oligonucleotide
ccuugccucgaccugugua

SEQ ID NO: 1895113 - RNA, 19 nt, Artificial Sequence
  Description of Artificial Sequence: Synthetic oligonucleotide
gcucucauccagcuuccau

SEQ ID NO: 1895114 - RNA, 19 nt, Artificial Sequence
  Description of Artificial Sequence: Synthetic oligonucleotide
gccggacaugaguauuugu

SEQ ID NO: 1895115 - RNA, 19 nt, Artificial Sequence
  Description of Artificial Sequence: Synthetic oligonucleotide
gcaggucgaagcgccucac

SEQ ID NO: 1895116 - RNA, 19 nt, Artificial Sequence
  Description of Artificial Sequence: Synthetic oligonucleotide
ccggcucauccuacucaac

SEQ ID NO: 1895117 - RNA, 19 nt, Artificial Sequence
  Description of Artificial Sequence: Synthetic oligonucleotide
cugcgaaggugagccucca

SEQ ID NO: 1895118 - RNA, 19 nt, Artificial Sequence
  Description of Artificial Sequence: Synthetic oligonucleotide
ggucgccggcucauccuac

SEQ ID NO: 1895119 - RNA, 19 nt, Artificial Sequence
  Description of Artificial Sequence: Synthetic oligonucleotide
cccaggagcucccucacau

SEQ ID NO: 1895120 - RNA, 19 nt, Artificial Sequence
  Description of Artificial Sequence: Synthetic oligonucleotide
gacucacccuugacuuaau

SEQ ID NO: 1895121 - RNA, 19 nt, Artificial Sequence
  Description of Artificial Sequence: Synthetic oligonucleotide
ggcccagaaucucgccugu

SEQ ID NO: 1895122 - RNA, 19 nt, Artificial Sequence
  Description of Artificial Sequence: Synthetic oligonucleotide
cgaagcgccucacucugua

SEQ ID NO: 1895123 - RNA, 19 nt, Artificial Sequence
  Description of Artificial Sequence: Synthetic oligonucleotide
ggcucucauccagcuucca

SEQ ID NO: 1895124 - RNA, 19 nt, Artificial Sequence
  Description of Artificial Sequence: Synthetic oligonucleotide
gcggucgccggcucauccu

SEQ ID NO: 1895125 - RNA, 19 nt, Artificial Sequence
  Description of Artificial Sequence: Synthetic oligonucleotide
ccuccaccugguggaugac

SEQ ID NO: 1895126 - RNA, 19 nt, Artificial Sequence
  Description of Artificial Sequence: Synthetic oligonucleotide
ccuacuccuuggccagacu

SEQ ID NO: 1895127 - RNA, 19 nt, Artificial Sequence
  Description of Artificial Sequence: Synthetic oligonucleotide
ccaggagcucccucacauu

SEQ ID NO: 1895128 - RNA, 19 nt, Artificial Sequence
  Description of Artificial Sequence: Synthetic oligonucleotide
cggucgccggcucauccua

SEQ ID NO: 1895129 - RNA, 19 nt, Artificial Sequence
  Description of Artificial Sequence: Synthetic oligonucleotide
cccuccugagcaggucgaa

SEQ ID NO: 1895130 - RNA, 19 nt, Artificial Sequence
  Description of Artificial Sequence: Synthetic oligonucleotide
ccaggcucucauccagcuu

SEQ ID NO: 1895131 - RNA, 19 nt, Artificial Sequence
  Description of Artificial Sequence: Synthetic oligonucleotide
gggcggucgccggcucauc

SEQ ID NO: 1895132 - RNA, 19 nt, Artificial Sequence
  Description of Artificial Sequence: Synthetic oligonucleotide
ccgggcggucgccggcuca

SEQ ID NO: 1895133 - RNA, 19 nt, Artificial Sequence
  Description of Artificial Sequence: Synthetic oligonucleotide
aacuuggugaacuuaaggc

SEQ ID NO: 1895134 - RNA, 19 nt, Artificial Sequence
  Description of Artificial Sequence: Synthetic oligonucleotide
uuuacaaucuaaaggcugg

SEQ ID NO: 1895135 - RNA, 19 nt, Artificial Sequence
  Description of Artificial Sequence: Synthetic oligonucleotide
uuucguacuccucagagag

SEQ ID NO: 1895136 - RNA, 19 nt, Artificial Sequence
  Description of Artificial Sequence: Synthetic oligonucleotide
aguuaaaucuuccucaucu

SEQ ID NO: 1895137 - RNA, 19 nt, Artificial Sequence
  Description of Artificial Sequence: Synthetic oligonucleotide
uuucacaugagccagguuc

SEQ ID NO: 1895138 - RNA, 19 nt, Artificial Sequence
  Description of Artificial Sequence: Synthetic oligonucleotide
aaaagucacucucuggguc

SEQ ID NO: 1895139 - RNA, 19 nt, Artificial Sequence
  Description of Artificial Sequence: Synthetic oligonucleotide
aauugguaaggauuggucu

SEQ ID NO: 1895140 - RNA, 19 nt, Artificial Sequence
  Description of Artificial Sequence: Synthetic oligonucleotide
auugacaauccuuucguac

SEQ ID NO: 1895141 - RNA, 19 nt, Artificial Sequence
  Description of Artificial Sequence: Synthetic oligonucleotide
uuuuacaaucuaaaggcug

SEQ ID NO: 1895142 - RNA, 19 nt, Artificial Sequence
  Description of Artificial Sequence: Synthetic oligonucleotide
aaugccugacauugguucc

SEQ ID NO: 1895143 - RNA, 19 nt, Artificial Sequence
  Description of Artificial Sequence: Synthetic oligonucleotide
aacgugaugucacucacag

SEQ ID NO: 1895144 - RNA, 19 nt, Artificial Sequence
  Description of Artificial Sequence: Synthetic oligonucleotide
agcuacgucaguuaggguc

SEQ ID NO: 1895145 - RNA, 19 nt, Artificial Sequence
  Description of Artificial Sequence: Synthetic oligonucleotide
acaaucuaaaggcuggagg

SEQ ID NO: 1895146 - RNA, 19 nt, Artificial Sequence
  Description of Artificial Sequence: Synthetic oligonucleotide
aggauuggucuccagaagc

SEQ ID NO: 1895147 - RNA, 19 nt, Artificial Sequence
  Description of Artificial Sequence: Synthetic oligonucleotide
aagaggagaagcauuuacc

SEQ ID NO: 1895148 - RNA, 19 nt, Artificial Sequence
  Description of Artificial Sequence: Synthetic oligonucleotide
acauugguuccucaaagac

SEQ ID NO: 1895149 - RNA, 19 nt, Artificial Sequence
  Description of Artificial Sequence: Synthetic oligonucleotide
ugagcuguggcaauaaggu

SEQ ID NO: 1895150 - RNA, 19 nt, Artificial Sequence
  Description of Artificial Sequence: Synthetic oligonucleotide
aauaagguugcggagacgu

SEQ ID NO: 1895151 - RNA, 19 nt, Artificial Sequence
  Description of Artificial Sequence: Synthetic oligonucleotide
cuaaucugcagcauguaag

SEQ ID NO: 1895152 - RNA, 19 nt, Artificial Sequence
  Description of Artificial Sequence: Synthetic oligonucleotide
uuuaccucugcacucgaag

SEQ ID NO: 1895153 - RNA, 19 nt, Artificial Sequence
  Description of Artificial Sequence: Synthetic oligonucleotide
aaugcaguuaaaucuuccu

SEQ ID NO: 1895154 - RNA, 19 nt, Artificial Sequence
  Description of Artificial Sequence: Synthetic oligonucleotide
ugagcuacgucaguuaggg

SEQ ID NO: 1895155 - RNA, 19 nt, Artificial Sequence
  Description of Artificial Sequence: Synthetic oligonucleotide
aauuucuggagggagagca

SEQ ID NO: 1895156 - RNA, 19 nt, Artificial Sequence
  Description of Artificial Sequence: Synthetic oligonucleotide
aggauugacaauccuuucg

SEQ ID NO: 1895157 - RNA, 19 nt, Artificial Sequence
  Description of Artificial Sequence: Synthetic oligonucleotide
ucacugauaggaaacguga

SEQ ID NO: 1895158 - RNA, 19 nt, Artificial Sequence
  Description of Artificial Sequence: Synthetic oligonucleotide
ugacauugguuccucaaag

SEQ ID NO: 1895159 - RNA, 19 nt, Artificial Sequence
  Description of Artificial Sequence: Synthetic oligonucleotide
aggagaagcauuuaccucu

SEQ ID NO: 1895160 - RNA, 19 nt, Artificial Sequence
  Description of Artificial Sequence: Synthetic oligonucleotide
cuuggugaacuuaaggcag

SEQ ID NO: 1895161 - RNA, 19 nt, Artificial Sequence
  Description of Artificial Sequence: Synthetic oligonucleotide
uggucuacaaugcaguuaa

SEQ ID NO: 1895162 - RNA, 19 nt, Artificial Sequence
  Description of Artificial Sequence: Synthetic oligonucleotide
aagcauuuaccucugcacu

SEQ ID NO: 1895163 - RNA, 19 nt, Artificial Sequence
  Description of Artificial Sequence: Synthetic oligonucleotide
agugugauaguccuugaug

SEQ ID NO: 1895164 - RNA, 19 nt, Artificial Sequence
  Description of Artificial Sequence: Synthetic oligonucleotide
aagcgcagcaacuugguga

SEQ ID NO: 1895165 - RNA, 19 nt, Artificial Sequence
  Description of Artificial Sequence: Synthetic oligonucleotide
gugugauaguccuugaugc

SEQ ID NO: 1895166 - RNA, 19 nt, Artificial Sequence
  Description of Artificial Sequence: Synthetic oligonucleotide
uuggucuccagaagcaagg

SEQ ID NO: 1895167 - RNA, 19 nt, Artificial Sequence
  Description of Artificial Sequence: Synthetic oligonucleotide
uuacuaaucugcagcaugu

SEQ ID NO: 1895168 - RNA, 19 nt, Artificial Sequence
  Description of Artificial Sequence: Synthetic oligonucleotide
acugaguucagucacuggu

SEQ ID NO: 1895169 - RNA, 19 nt, Artificial Sequence
  Description of Artificial Sequence: Synthetic oligonucleotide
acuuggugaacuuaaggca

SEQ ID NO: 1895170 - RNA, 19 nt, Artificial Sequence
  Description of Artificial Sequence: Synthetic oligonucleotide
uugaaaacaggggaggacc

SEQ ID NO: 1895171 - RNA, 19 nt, Artificial Sequence
  Description of Artificial Sequence: Synthetic oligonucleotide
ugguuccucaaagacaucg

SEQ ID NO: 1895172 - RNA, 19 nt, Artificial Sequence
  Description of Artificial Sequence: Synthetic oligonucleotide
ugugauaguccuugaugcg

SEQ ID NO: 1895173 - RNA, 19 nt, Artificial Sequence
  Description of Artificial Sequence: Synthetic oligonucleotide
ucaguuagggucuccagga

SEQ ID NO: 1895174 - RNA, 19 nt, Artificial Sequence
  Description of Artificial Sequence: Synthetic oligonucleotide
uaagguugcggagacgucg

SEQ ID NO: 1895175 - RNA, 19 nt, Artificial Sequence
  Description of Artificial Sequence: Synthetic oligonucleotide
guacucaugagcuacguca

SEQ ID NO: 1895176 - RNA, 19 nt, Artificial Sequence
  Description of Artificial Sequence: Synthetic oligonucleotide
ugaacuuaaggcaguacuc

SEQ ID NO: 1895177 - RNA, 19 nt, Artificial Sequence
  Description of Artificial Sequence: Synthetic oligonucleotide
aaagucacucucuggguca

SEQ ID NO: 1895178 - RNA, 19 nt, Artificial Sequence
  Description of Artificial Sequence: Synthetic oligonucleotide
cagcauguaagugugauag

SEQ ID NO: 1895179 - RNA, 19 nt, Artificial Sequence
  Description of Artificial Sequence: Synthetic oligonucleotide
ugaggcuccauuuucacau

SEQ ID NO: 1895180 - RNA, 19 nt, Artificial Sequence
  Description of Artificial Sequence: Synthetic oligonucleotide
auagcugcuguccgagucc

SEQ ID NO: 1895181 - RNA, 19 nt, Artificial Sequence
  Description of Artificial Sequence: Synthetic oligonucleotide
ugccuaauaccccaugccc

SEQ ID NO: 1895182 - RNA, 19 nt, Artificial Sequence
  Description of Artificial Sequence: Synthetic oligonucleotide
uucacaugagccagguucc

SEQ ID NO: 1895183 - RNA, 19 nt, Artificial Sequence
  Description of Artificial Sequence: Synthetic oligonucleotide
cuuacuaaucugcagcaug

SEQ ID NO: 1895184 - RNA, 19 nt, Artificial Sequence
  Description of Artificial Sequence: Synthetic oligonucleotide
uucacuuucuugaggcucc

SEQ ID NO: 1895185 - RNA, 19 nt, Artificial Sequence
  Description of Artificial Sequence: Synthetic oligonucleotide
ucaggauugacaauccuuu

SEQ ID NO: 1895186 - RNA, 19 nt, Artificial Sequence
  Description of Artificial Sequence: Synthetic oligonucleotide
uaaugccugacauugguuc

SEQ ID NO: 1895187 - RNA, 19 nt, Artificial Sequence
  Description of Artificial Sequence: Synthetic oligonucleotide
uaaggauuggucuccagaa

SEQ ID NO: 1895188 - RNA, 19 nt, Artificial Sequence
  Description of Artificial Sequence: Synthetic oligonucleotide
auaggaaacgugaugucac

SEQ ID NO: 1895189 - RNA, 19 nt, Artificial Sequence
  Description of Artificial Sequence: Synthetic oligonucleotide
auaccccaugcccagacac

SEQ ID NO: 1895190 - RNA, 19 nt, Artificial Sequence
  Description of Artificial Sequence: Synthetic oligonucleotide
agcauuuaccucugcacuc

SEQ ID NO: 1895191 - RNA, 19 nt, Artificial Sequence
  Description of Artificial Sequence: Synthetic oligonucleotide
cugagcuguggcaauaagg

SEQ ID NO: 1895192 - RNA, 19 nt, Artificial Sequence
  Description of Artificial Sequence: Synthetic oligonucleotide
cugcuuacuaaucugcagc

SEQ ID NO: 1895193 - RNA, 19 nt, Artificial Sequence
  Description of Artificial Sequence: Synthetic oligonucleotide
uaaucugcagcauguaagu

SEQ ID NO: 1895194 - RNA, 19 nt, Artificial Sequence
  Description of Artificial Sequence: Synthetic oligonucleotide
gaggcuaucaguggagugg

SEQ ID NO: 1895195 - RNA, 19 nt, Artificial Sequence
  Description of Artificial Sequence: Synthetic oligonucleotide
gaggacuccaauugguaag

SEQ ID NO: 1895196 - RNA, 19 nt, Artificial Sequence
  Description of Artificial Sequence: Synthetic oligonucleotide
auguaagugugauaguccu

SEQ ID NO: 1895197 - RNA, 19 nt, Artificial Sequence
  Description of Artificial Sequence: Synthetic oligonucleotide
agacacauugccuucuuca

SEQ ID NO: 1895198 - RNA, 19 nt, Artificial Sequence
  Description of Artificial Sequence: Synthetic oligonucleotide
aggagugccaacugaguuc

SEQ ID NO: 1895199 - RNA, 19 nt, Artificial Sequence
  Description of Artificial Sequence: Synthetic oligonucleotide
acuuucauuagcacacucg

SEQ ID NO: 1895200 - RNA, 19 nt, Artificial Sequence
  Description of Artificial Sequence: Synthetic oligonucleotide
cuccaauugguaaggauug

SEQ ID NO: 1895201 - RNA, 19 nt, Artificial Sequence
  Description of Artificial Sequence: Synthetic oligonucleotide
ugccagaauuucuggaggg

SEQ ID NO: 1895202 - RNA, 19 nt, Artificial Sequence
  Description of Artificial Sequence: Synthetic oligonucleotide
gucaguuagggucuccagg

SEQ ID NO: 1895203 - RNA, 19 nt, Artificial Sequence
  Description of Artificial Sequence: Synthetic oligonucleotide
acuaaugccugacauuggu

SEQ ID NO: 1895204 - RNA, 19 nt, Artificial Sequence
  Description of Artificial Sequence: Synthetic oligonucleotide
acucgaagccugcaugggc

SEQ ID NO: 1895205 - RNA, 19 nt, Artificial Sequence
  Description of Artificial Sequence: Synthetic oligonucleotide
ucuacggcaaagcgcagca

SEQ ID NO: 1895206 - RNA, 19 nt, Artificial Sequence
  Description of Artificial Sequence: Synthetic oligonucleotide
cuuaaggcaguacucauga

SEQ ID NO: 1895207 - RNA, 19 nt, Artificial Sequence
  Description of Artificial Sequence: Synthetic oligonucleotide
agggaagaggcucacucuc

SEQ ID NO: 1895208 - RNA, 19 nt, Artificial Sequence
  Description of Artificial Sequence: Synthetic oligonucleotide
ugguugaaaacaggggagg

SEQ ID NO: 1895209 - RNA, 19 nt, Artificial Sequence
  Description of Artificial Sequence: Synthetic oligonucleotide
acacucgaagccugcaugg

SEQ ID NO: 1895210 - RNA, 19 nt, Artificial Sequence
  Description of Artificial Sequence: Synthetic oligonucleotide
ugcacucgaagccuguggc

SEQ ID NO: 1895211 - RNA, 19 nt, Artificial Sequence
  Description of Artificial Sequence: Synthetic oligonucleotide
ucuugaggcuccauuuuca

SEQ ID NO: 1895212 - RNA, 19 nt, Artificial Sequence
  Description of Artificial Sequence: Synthetic oligonucleotide
ugcuuacuaaucugcagca

SEQ ID NO: 1895213 - RNA, 19 nt, Artificial Sequence
  Description of Artificial Sequence: Synthetic oligonucleotide
agaauuucuggagggagag

SEQ ID NO: 1895214 - RNA, 19 nt, Artificial Sequence
  Description of Artificial Sequence: Synthetic oligonucleotide
auugguuccucaaagacau

SEQ ID NO: 1895215 - RNA, 19 nt, Artificial Sequence
  Description of Artificial Sequence: Synthetic oligonucleotide
gagacgucgguugugcugg

SEQ ID NO: 1895216 - RNA, 19 nt, Artificial Sequence
  Description of Artificial Sequence: Synthetic oligonucleotide
uucagucccagcacucggg

SEQ ID NO: 1895217 - RNA, 19 nt, Artificial Sequence
  Description of Artificial Sequence: Synthetic oligonucleotide
cuaucaguggagugggagc

SEQ ID NO: 1895218 - RNA, 19 nt, Artificial Sequence
  Description of Artificial Sequence: Synthetic oligonucleotide
gauaggaaacgugauguca

SEQ ID NO: 1895219 - RNA, 19 nt, Artificial Sequence
  Description of Artificial Sequence: Synthetic oligonucleotide
cucacugauaggaaacgug

SEQ ID NO: 1895220 - RNA, 19 nt, Artificial Sequence
  Description of Artificial Sequence: Synthetic oligonucleotide
cuuucauuagcacacucga

SEQ ID NO: 1895221 - RNA, 19 nt, Artificial Sequence
  Description of Artificial Sequence: Synthetic oligonucleotide
agagcugcuuacuaaucug

SEQ ID NO: 1895222 - RNA, 19 nt, Artificial Sequence
  Description of Artificial Sequence: Synthetic oligonucleotide
uaccucugcacucgaagcc

SEQ ID NO: 1895223 - RNA, 19 nt, Artificial Sequence
  Description of Artificial Sequence: Synthetic oligonucleotide
agcuguggcaauaagguug

SEQ ID NO: 1895224 - RNA, 19 nt, Artificial Sequence
  Description of Artificial Sequence: Synthetic oligonucleotide
caugacaucagggaaagga

SEQ ID NO: 1895225 - RNA, 19 nt, Artificial Sequence
  Description of Artificial Sequence: Synthetic oligonucleotide
uaucaguggagugggagcc

SEQ ID NO: 1895226 - RNA, 19 nt, Artificial Sequence
  Description of Artificial Sequence: Synthetic oligonucleotide
uacggcaaagcgcagcaac

SEQ ID NO: 1895227 - RNA, 19 nt, Artificial Sequence
  Description of Artificial Sequence: Synthetic oligonucleotide
caauugguaaggauugguc

SEQ ID NO: 1895228 - RNA, 19 nt, Artificial Sequence
  Description of Artificial Sequence: Synthetic oligonucleotide
caaugcaguuaaaucuucc

SEQ ID NO: 1895229 - RNA, 19 nt, Artificial Sequence
  Description of Artificial Sequence: Synthetic oligonucleotide
ucaaagacaucgcugccua

SEQ ID NO: 1895230 - RNA, 19 nt, Artificial Sequence
  Description of Artificial Sequence: Synthetic oligonucleotide
ugauaguccuugaugcggu

SEQ ID NO: 1895231 - RNA, 19 nt, Artificial Sequence
  Description of Artificial Sequence: Synthetic oligonucleotide
gagagcaugcugccaaugc

SEQ ID NO: 1895232 - RNA, 19 nt, Artificial Sequence
  Description of Artificial Sequence: Synthetic oligonucleotide
uggaauggugcauugggau

SEQ ID NO: 1895233 - RNA, 19 nt, Artificial Sequence
  Description of Artificial Sequence: Synthetic oligonucleotide
caugagcuacgucaguuag

SEQ ID NO: 1895234 - RNA, 19 nt, Artificial Sequence
  Description of Artificial Sequence: Synthetic oligonucleotide
augggaagcgcucacucug

SEQ ID NO: 1895235 - RNA, 19 nt, Artificial Sequence
  Description of Artificial Sequence: Synthetic oligonucleotide
guuuagugucuucuguggc

SEQ ID NO: 1895236 - RNA, 19 nt, Artificial Sequence
  Description of Artificial Sequence: Synthetic oligonucleotide
aacaccugcuccaugacau

SEQ ID NO: 1895237 - RNA, 19 nt, Artificial Sequence
  Description of Artificial Sequence: Synthetic oligonucleotide
uccacgguaaaagucacuc

SEQ ID NO: 1895238 - RNA, 19 nt, Artificial Sequence
  Description of Artificial Sequence: Synthetic oligonucleotide
ucguacuccucagagagcu

SEQ ID NO: 1895239 - RNA, 19 nt, Artificial Sequence
  Description of Artificial Sequence: Synthetic oligonucleotide
gaccccaugaggcuaucag

SEQ ID NO: 1895240 - RNA, 19 nt, Artificial Sequence
  Description of Artificial Sequence: Synthetic oligonucleotide
guugcggagacgucgguug

SEQ ID NO: 1895241 - RNA, 19 nt, Artificial Sequence
  Description of Artificial Sequence: Synthetic oligonucleotide
aaagacaucgcugccuaau

SEQ ID NO: 1895242 - RNA, 19 nt, Artificial Sequence
  Description of Artificial Sequence: Synthetic oligonucleotide
uucucucuguugcugacuc

SEQ ID NO: 1895243 - RNA, 19 nt, Artificial Sequence
  Description of Artificial Sequence: Synthetic oligonucleotide
ucagagagcugcuuacuaa

SEQ ID NO: 1895244 - RNA, 19 nt, Artificial Sequence
  Description of Artificial Sequence: Synthetic oligonucleotide
acuaaucugcagcauguaa

SEQ ID NO: 1895245 - RNA, 19 nt, Artificial Sequence
  Description of Artificial Sequence: Synthetic oligonucleotide
uccucacugauaggaaacg

SEQ ID NO: 1895246 - RNA, 19 nt, Artificial Sequence
  Description of Artificial Sequence: Synthetic oligonucleotide
uaauaccccaugcccagac

SEQ ID NO: 1895247 - RNA, 19 nt, Artificial Sequence
  Description of Artificial Sequence: Synthetic oligonucleotide
uacaaucuaaaggcuggag

SEQ ID NO: 1895248 - RNA, 19 nt, Artificial Sequence
  Description of Artificial Sequence: Synthetic oligonucleotide
uguggcgaagccuccaccu

SEQ ID NO: 1895249 - RNA, 19 nt, Artificial Sequence
  Description of Artificial Sequence: Synthetic oligonucleotide
aguuagggucuccaggaca

SEQ ID NO: 1895250 - RNA, 19 nt, Artificial Sequence
  Description of Artificial Sequence: Synthetic oligonucleotide
gucacucacagguuccucc

SEQ ID NO: 1895251 - RNA, 19 nt, Artificial Sequence
  Description of Artificial Sequence: Synthetic oligonucleotide
cugccagaauuucuggagg

SEQ ID NO: 1895252 - RNA, 19 nt, Artificial Sequence
  Description of Artificial Sequence: Synthetic oligonucleotide
aaaacaggggaggacccca

SEQ ID NO: 1895253 - RNA, 19 nt, Artificial Sequence
  Description of Artificial Sequence: Synthetic oligonucleotide
guaaggauuggucuccaga

SEQ ID NO: 1895254 - RNA, 19 nt, Artificial Sequence
  Description of Artificial Sequence: Synthetic oligonucleotide
ugacaauccuuucguacuc

SEQ ID NO: 1895255 - RNA, 19 nt, Artificial Sequence
  Description of Artificial Sequence: Synthetic oligonucleotide
aggagucugucccagcaug

SEQ ID NO: 1895256 - RNA, 19 nt, Artificial Sequence
  Description of Artificial Sequence: Synthetic oligonucleotide
gaugucacucacagguucc

SEQ ID NO: 1895257 - RNA, 19 nt, Artificial Sequence
  Description of Artificial Sequence: Synthetic oligonucleotide
aagugugauaguccuugau

SEQ ID NO: 1895258 - RNA, 19 nt, Artificial Sequence
  Description of Artificial Sequence: Synthetic oligonucleotide
gacauugguuccucaaaga

SEQ ID NO: 1895259 - RNA, 19 nt, Artificial Sequence
  Description of Artificial Sequence: Synthetic oligonucleotide
cucacucugagccccgagg

SEQ ID NO: 1895260 - RNA, 19 nt, Artificial Sequence
  Description of Artificial Sequence: Synthetic oligonucleotide
gaggagaagcauuuaccuc

SEQ ID NO: 1895261 - RNA, 19 nt, Artificial Sequence
  Description of Artificial Sequence: Synthetic oligonucleotide
aggacuccaauugguaagg

SEQ ID NO: 1895262 - RNA, 19 nt, Artificial Sequence
  Description of Artificial Sequence: Synthetic oligonucleotide
aguggagugggagccauag

SEQ ID NO: 1895263 - RNA, 19 nt, Artificial Sequence
  Description of Artificial Sequence: Synthetic oligonucleotide
uggcaauaagguugcggag

SEQ ID NO: 1895264 - RNA, 19 nt, Artificial Sequence
  Description of Artificial Sequence: Synthetic oligonucleotide
aucgcugccuaauacccca

SEQ ID NO: 1895265 - RNA, 19 nt, Artificial Sequence
  Description of Artificial Sequence: Synthetic oligonucleotide
cugccuaauaccccaugcc

SEQ ID NO: 1895266 - RNA, 19 nt, Artificial Sequence
  Description of Artificial Sequence: Synthetic oligonucleotide
cuccucacugauaggaaac

SEQ ID NO: 1895267 - RNA, 19 nt, Artificial Sequence
  Description of Artificial Sequence: Synthetic oligonucleotide
aaucugcagcauguaagug

SEQ ID NO: 1895268 - RNA, 19 nt, Artificial Sequence
  Description of Artificial Sequence: Synthetic oligonucleotide
caaucuaaaggcuggaggu

SEQ ID NO: 1895269 - RNA, 19 nt, Artificial Sequence
  Description of Artificial Sequence: Synthetic oligonucleotide
uccaauugguaaggauugg

SEQ ID NO: 1895270 - RNA, 19 nt, Artificial Sequence
  Description of Artificial Sequence: Synthetic oligonucleotide
ugccaacugaguucaguca

SEQ ID NO: 1895271 - RNA, 19 nt, Artificial Sequence
  Description of Artificial Sequence: Synthetic oligonucleotide
gugaacuuaaggcaguacu

SEQ ID NO: 1895272 - RNA, 19 nt, Artificial Sequence
  Description of Artificial Sequence: Synthetic oligonucleotide
uggcgaagccuccaccucc

SEQ ID NO: 1895273 - RNA, 19 nt, Artificial Sequence
  Description of Artificial Sequence: Synthetic oligonucleotide
gcugguugaaaacagggga

SEQ ID NO: 1895274 - RNA, 19 nt, Artificial Sequence
  Description of Artificial Sequence: Synthetic oligonucleotide
acgucgguugugcuggauc

SEQ ID NO: 1895275 - RNA, 19 nt, Artificial Sequence
  Description of Artificial Sequence: Synthetic oligonucleotide
aauaccccaugcccagaca

SEQ ID NO: 1895276 - RNA, 19 nt, Artificial Sequence
  Description of Artificial Sequence: Synthetic oligonucleotide
ugcuguccgaguccucagg

SEQ ID NO: 1895277 - RNA, 19 nt, Artificial Sequence
  Description of Artificial Sequence: Synthetic oligonucleotide
agcgcucacucugagcccc

SEQ ID NO: 1895278 - RNA, 19 nt, Artificial Sequence
  Description of Artificial Sequence: Synthetic oligonucleotide
aagacaucgcugccuaaua

SEQ ID NO: 1895279 - RNA, 19 nt, Artificial Sequence
  Description of Artificial Sequence: Synthetic oligonucleotide
aucuaaaggcuggagguca

SEQ ID NO: 1895280 - RNA, 19 nt, Artificial Sequence
  Description of Artificial Sequence: Synthetic oligonucleotide
cuugguagaggagcugccg

SEQ ID NO: 1895281 - RNA, 19 nt, Artificial Sequence
  Description of Artificial Sequence: Synthetic oligonucleotide
acacauugccuucuucacu

SEQ ID NO: 1895282 - RNA, 19 nt, Artificial Sequence
  Description of Artificial Sequence: Synthetic oligonucleotide
ugauaggaaacgugauguc

SEQ ID NO: 1895283 - RNA, 19 nt, Artificial Sequence
  Description of Artificial Sequence: Synthetic oligonucleotide
cuguugcugacucuggguc

SEQ ID NO: 1895284 - RNA, 19 nt, Artificial Sequence
  Description of Artificial Sequence: Synthetic oligonucleotide
cauagcugcuguccgaguc

SEQ ID NO: 1895285 - RNA, 19 nt, Artificial Sequence
  Description of Artificial Sequence: Synthetic oligonucleotide
cuucagucccagcacucgg

SEQ ID NO: 1895286 - RNA, 19 nt, Artificial Sequence
  Description of Artificial Sequence: Synthetic oligonucleotide
acuccaauugguaaggauu

SEQ ID NO: 1895287 - RNA, 19 nt, Artificial Sequence
  Description of Artificial Sequence: Synthetic oligonucleotide
agcuucacuaaugccugac

SEQ ID NO: 1895288 - RNA, 19 nt, Artificial Sequence
  Description of Artificial Sequence: Synthetic oligonucleotide
ugugccggaccuggaaugg

SEQ ID NO: 1895289 - RNA, 19 nt, Artificial Sequence
  Description of Artificial Sequence: Synthetic oligonucleotide
caggacacuuucauuagca

SEQ ID NO: 1895290 - RNA, 19 nt, Artificial Sequence
  Description of Artificial Sequence: Synthetic oligonucleotide
ucucaggauugacaauccu

SEQ ID NO: 1895291 - RNA, 19 nt, Artificial Sequence
  Description of Artificial Sequence: Synthetic oligonucleotide
gagcugcuuacuaaucugc

SEQ ID NO: 1895292 - RNA, 19 nt, Artificial Sequence
  Description of Artificial Sequence: Synthetic oligonucleotide
acaaugcaguuaaaucuuc

SEQ ID NO: 1895293 - RNA, 19 nt, Artificial Sequence
  Description of Artificial Sequence: Synthetic oligonucleotide
ucagucccagcacucggga

SEQ ID NO: 1895294 - RNA, 19 nt, Artificial Sequence
  Description of Artificial Sequence: Synthetic oligonucleotide
cacacucgaagccugcaug

SEQ ID NO: 1895295 - RNA, 19 nt, Artificial Sequence
  Description of Artificial Sequence: Synthetic oligonucleotide
aggaaacgugaugucacuc

SEQ ID NO: 1895296 - RNA, 19 nt, Artificial Sequence
  Description of Artificial Sequence: Synthetic oligonucleotide
guacuccucagagagcugc

SEQ ID NO: 1895297 - RNA, 19 nt, Artificial Sequence
  Description of Artificial Sequence: Synthetic oligonucleotide
uaggaaacgugaugucacu

SEQ ID NO: 1895298 - RNA, 19 nt, Artificial Sequence
  Description of Artificial Sequence: Synthetic oligonucleotide
uuacaaucuaaaggcugga

SEQ ID NO: 1895299 - RNA, 19 nt, Artificial Sequence
  Description of Artificial Sequence: Synthetic oligonucleotide
acaauccuuucguacuccu

SEQ ID NO: 1895300 - RNA, 19 nt, Artificial Sequence
  Description of Artificial Sequence: Synthetic oligonucleotide
ucaugagcuacgucaguua

SEQ ID NO: 1895301 - RNA, 19 nt, Artificial Sequence
  Description of Artificial Sequence: Synthetic oligonucleotide
cacuaaugccugacauugg

SEQ ID NO: 1895302 - RNA, 19 nt, Artificial Sequence
  Description of Artificial Sequence: Synthetic oligonucleotide
guugaaaacaggggaggac

SEQ ID NO: 1895303 - RNA, 19 nt, Artificial Sequence
  Description of Artificial Sequence: Synthetic oligonucleotide
acaggggaggaccccauga

SEQ ID NO: 1895304 - RNA, 19 nt, Artificial Sequence
  Description of Artificial Sequence: Synthetic oligonucleotide
uucguacuccucagagagc

SEQ ID NO: 1895305 - RNA, 19 nt, Artificial Sequence
  Description of Artificial Sequence: Synthetic oligonucleotide
augcccacuucauggaaca

SEQ ID NO: 1895306 - RNA, 19 nt, Artificial Sequence
  Description of Artificial Sequence: Synthetic oligonucleotide
ugcagcauguaagugugau

SEQ ID NO: 1895307 - RNA, 19 nt, Artificial Sequence
  Description of Artificial Sequence: Synthetic oligonucleotide
acuuaaggcaguacucaug

SEQ ID NO: 1895308 - RNA, 19 nt, Artificial Sequence
  Description of Artificial Sequence: Synthetic oligonucleotide
gacaauccuuucguacucc

SEQ ID NO: 1895309 - RNA, 19 nt, Artificial Sequence
  Description of Artificial Sequence: Synthetic oligonucleotide
gauaguccuugaugcggug

SEQ ID NO: 1895310 - RNA, 19 nt, Artificial Sequence
  Description of Artificial Sequence: Synthetic oligonucleotide
ugcagcgcugguugaaaac

SEQ ID NO: 1895311 - RNA, 19 nt, Artificial Sequence
  Description of Artificial Sequence: Synthetic oligonucleotide
uguaagugugauaguccuu

SEQ ID NO: 1895312 - RNA, 19 nt, Artificial Sequence
  Description of Artificial Sequence: Synthetic oligonucleotide
ugguagaggagcugccgac

SEQ ID NO: 1895313 - RNA, 19 nt, Artificial Sequence
  Description of Artificial Sequence: Synthetic oligonucleotide
cugauaggaaacgugaugu

SEQ ID NO: 1895314 - RNA, 19 nt, Artificial Sequence
  Description of Artificial Sequence: Synthetic oligonucleotide
gcuccauuuucacaugagc

SEQ ID NO: 1895315 - RNA, 19 nt, Artificial Sequence
  Description of Artificial Sequence: Synthetic oligonucleotide
ggacacuuucauuagcaca

SEQ ID NO: 1895316 - RNA, 19 nt, Artificial Sequence
  Description of Artificial Sequence: Synthetic oligonucleotide
cugcacucgaagccugugg

SEQ ID NO: 1895317 - RNA, 19 nt, Artificial Sequence
  Description of Artificial Sequence: Synthetic oligonucleotide
cagggagaggaggugaccc

SEQ ID NO: 1895318 - RNA, 19 nt, Artificial Sequence
  Description of Artificial Sequence: Synthetic oligonucleotide
uuccaaagaggagaagcau

SEQ ID NO: 1895319 - RNA, 19 nt, Artificial Sequence
  Description of Artificial Sequence: Synthetic oligonucleotide
ggaaacgugaugucacuca

SEQ ID NO: 1895320 - RNA, 19 nt, Artificial Sequence
  Description of Artificial Sequence: Synthetic oligonucleotide
gcugcuuacuaaucugcag

SEQ ID NO: 1895321 - RNA, 19 nt, Artificial Sequence
  Description of Artificial Sequence: Synthetic oligonucleotide
ccuuucguacuccucagag

SEQ ID NO: 1895322 - RNA, 19 nt, Artificial Sequence
  Description of Artificial Sequence: Synthetic oligonucleotide
gcaaagcgcagcaacuugg

SEQ ID NO: 1895323 - RNA, 19 nt, Artificial Sequence
  Description of Artificial Sequence: Synthetic oligonucleotide
ugacucugggucugagcug

SEQ ID NO: 1895324 - RNA, 19 nt, Artificial Sequence
  Description of Artificial Sequence: Synthetic oligonucleotide
uccuuucguacuccucaga

SEQ ID NO: 1895325 - RNA, 19 nt, Artificial Sequence
  Description of Artificial Sequence: Synthetic oligonucleotide
agccagguuccaaagagga

SEQ ID NO: 1895326 - RNA, 19 nt, Artificial Sequence
  Description of Artificial Sequence: Synthetic oligonucleotide
cuuucguacuccucagaga

SEQ ID NO: 1895327 - RNA, 19 nt, Artificial Sequence
  Description of Artificial Sequence: Synthetic oligonucleotide
ugggaagcgcucacucuga

SEQ ID NO: 1895328 - RNA, 19 nt, Artificial Sequence
  Description of Artificial Sequence: Synthetic oligonucleotide
augagcuacgucaguuagg

SEQ ID NO: 1895329 - RNA, 19 nt, Artificial Sequence
  Description of Artificial Sequence: Synthetic oligonucleotide
uucagucacugguucuccu

SEQ ID NO: 1895330 - RNA, 19 nt, Artificial Sequence
  Description of Artificial Sequence: Synthetic oligonucleotide
gcauuuaccucugcacucg

SEQ ID NO: 1895331 - RNA, 19 nt, Artificial Sequence
  Description of Artificial Sequence: Synthetic oligonucleotide
gcauguaagugugauaguc

SEQ ID NO: 1895332 - RNA, 19 nt, Artificial Sequence
  Description of Artificial Sequence: Synthetic oligonucleotide
gauugacaauccuuucgua

SEQ ID NO: 1895333 - RNA, 19 nt, Artificial Sequence
  Description of Artificial Sequence: Synthetic oligonucleotide
ccuaauaccccaugcccag

SEQ ID NO: 1895334 - RNA, 19 nt, Artificial Sequence
  Description of Artificial Sequence: Synthetic oligonucleotide
acgugaugucacucacagg

SEQ ID NO: 1895335 - RNA, 19 nt, Artificial Sequence
  Description of Artificial Sequence: Synthetic oligonucleotide
agcauguaagugugauagu

SEQ ID NO: 1895336 - RNA, 19 nt, Artificial Sequence
  Description of Artificial Sequence: Synthetic oligonucleotide
gcaauaagguugcggagac

SEQ ID NO: 1895337 - RNA, 19 nt, Artificial Sequence
  Description of Artificial Sequence: Synthetic oligonucleotide
gccaacugaguucagucac

SEQ ID NO: 1895338 - RNA, 19 nt, Artificial Sequence
  Description of Artificial Sequence: Synthetic oligonucleotide
ccugcaugggccaggauug

SEQ ID NO: 1895339 - RNA, 19 nt, Artificial Sequence
  Description of Artificial Sequence: Synthetic oligonucleotide
ugcggugcugccagaauuu

SEQ ID NO: 1895340 - RNA, 19 nt, Artificial Sequence
  Description of Artificial Sequence: Synthetic oligonucleotide
gcugccuaauaccccaugc

SEQ ID NO: 1895341 - RNA, 19 nt, Artificial Sequence
  Description of Artificial Sequence: Synthetic oligonucleotide
cugugccggaccuggaaug

SEQ ID NO: 1895342 - RNA, 19 nt, Artificial Sequence
  Description of Artificial Sequence: Synthetic oligonucleotide
caggauugacaauccuuuc

SEQ ID NO: 1895343 - RNA, 19 nt, Artificial Sequence
  Description of Artificial Sequence: Synthetic oligonucleotide
gcuguccgaguccucaggg

SEQ ID NO: 1895344 - RNA, 19 nt, Artificial Sequence
  Description of Artificial Sequence: Synthetic oligonucleotide
cuguccgaguccucagggc

SEQ ID NO: 1895345 - RNA, 19 nt, Artificial Sequence
  Description of Artificial Sequence: Synthetic oligonucleotide
ggcaguacucaugagcuac

SEQ ID NO: 1895346 - RNA, 19 nt, Artificial Sequence
  Description of Artificial Sequence: Synthetic oligonucleotide
aggcuccauuuucacauga

SEQ ID NO: 1895347 - RNA, 19 nt, Artificial Sequence
  Description of Artificial Sequence: Synthetic oligonucleotide
acgguaaaagucacucucu

SEQ ID NO: 1895348 - RNA, 19 nt, Artificial Sequence
  Description of Artificial Sequence: Synthetic oligonucleotide
gaccuggaauggugcauug

SEQ ID NO: 1895349 - RNA, 19 nt, Artificial Sequence
  Description of Artificial Sequence: Synthetic oligonucleotide
acaucagggaaaggagucu

SEQ ID NO: 1895350 - RNA, 19 nt, Artificial Sequence
  Description of Artificial Sequence: Synthetic oligonucleotide
gagaagcauuuaccucugc

SEQ ID NO: 1895351 - RNA, 19 nt, Artificial Sequence
  Description of Artificial Sequence: Synthetic oligonucleotide
caauccuuucguacuccuc

SEQ ID NO: 1895352 - RNA, 19 nt, Artificial Sequence
  Description of Artificial Sequence: Synthetic oligonucleotide
uagcacacucgaagccugc

SEQ ID NO: 1895353 - RNA, 19 nt, Artificial Sequence
  Description of Artificial Sequence: Synthetic oligonucleotide
agguuccuccuugaucuuc

SEQ ID NO: 1895354 - RNA, 19 nt, Artificial Sequence
  Description of Artificial Sequence: Synthetic oligonucleotide
gugcuggaucagcugaaug

SEQ ID NO: 1895355 - RNA, 19 nt, Artificial Sequence
  Description of Artificial Sequence: Synthetic oligonucleotide
uucacaccuucucucuguu

SEQ ID NO: 1895356 - RNA, 19 nt, Artificial Sequence
  Description of Artificial Sequence: Synthetic oligonucleotide
uucagccuucacaccuucu

SEQ ID NO: 1895357 - RNA, 19 nt, Artificial Sequence
  Description of Artificial Sequence: Synthetic oligonucleotide
cucgugaggggauguccag

SEQ ID NO: 1895358 - RNA, 19 nt, Artificial Sequence
  Description of Artificial Sequence: Synthetic oligonucleotide
ggagacgucgguugugcug

SEQ ID NO: 1895359 - RNA, 19 nt, Artificial Sequence
  Description of Artificial Sequence: Synthetic oligonucleotide
augcggugcugccagaauu

SEQ ID NO: 1895360 - RNA, 19 nt, Artificial Sequence
  Description of Artificial Sequence: Synthetic oligonucleotide
ggauugacaauccuuucgu

SEQ ID NO: 1895361 - RNA, 19 nt, Artificial Sequence
  Description of Artificial Sequence: Synthetic oligonucleotide
ucugcacucgaagccugug

SEQ ID NO: 1895362 - RNA, 19 nt, Artificial Sequence
  Description of Artificial Sequence: Synthetic oligonucleotide
auaagguugcggagacguc

SEQ ID NO: 1895363 - RNA, 19 nt, Artificial Sequence
  Description of Artificial Sequence: Synthetic oligonucleotide
ucuggagggagagcaugcu

SEQ ID NO: 1895364 - RNA, 19 nt, Artificial Sequence
  Description of Artificial Sequence: Synthetic oligonucleotide
caauaagguugcggagacg

SEQ ID NO: 1895365 - RNA, 19 nt, Artificial Sequence
  Description of Artificial Sequence: Synthetic oligonucleotide
ggaaaggagucugucccag

SEQ ID NO: 1895366 - RNA, 19 nt, Artificial Sequence
  Description of Artificial Sequence: Synthetic oligonucleotide
ucgugaggggauguccagc

SEQ ID NO: 1895367 - RNA, 19 nt, Artificial Sequence
  Description of Artificial Sequence: Synthetic oligonucleotide
cuuucuugaggcuccauuu

SEQ ID NO: 1895368 - RNA, 19 nt, Artificial Sequence
  Description of Artificial Sequence: Synthetic oligonucleotide
acucaugagcuacgucagu

SEQ ID NO: 1895369 - RNA, 19 nt, Artificial Sequence
  Description of Artificial Sequence: Synthetic oligonucleotide
gguguggauggugaggcug

SEQ ID NO: 1895370 - RNA, 19 nt, Artificial Sequence
  Description of Artificial Sequence: Synthetic oligonucleotide
gaugggaagcgcucacucu

SEQ ID NO: 1895371 - RNA, 19 nt, Artificial Sequence
  Description of Artificial Sequence: Synthetic oligonucleotide
uuuucacaugagccagguu

SEQ ID NO: 1895372 - RNA, 19 nt, Artificial Sequence
  Description of Artificial Sequence: Synthetic oligonucleotide
cuucacuaaugccugacau

SEQ ID NO: 1895373 - RNA, 19 nt, Artificial Sequence
  Description of Artificial Sequence: Synthetic oligonucleotide
cgugaugucacucacaggu

SEQ ID NO: 1895374 - RNA, 19 nt, Artificial Sequence
  Description of Artificial Sequence: Synthetic oligonucleotide
gucuacggcaaagcgcagc

SEQ ID NO: 1895375 - RNA, 19 nt, Artificial Sequence
  Description of Artificial Sequence: Synthetic oligonucleotide
uugcagcgcugguugaaaa

SEQ ID NO: 1895376 - RNA, 19 nt, Artificial Sequence
  Description of Artificial Sequence: Synthetic oligonucleotide
uugcggagacgucgguugu

SEQ ID NO: 1895377 - RNA, 19 nt, Artificial Sequence
  Description of Artificial Sequence: Synthetic oligonucleotide
cacucgaagccugcauggg

SEQ ID NO: 1895378 - RNA, 19 nt, Artificial Sequence
  Description of Artificial Sequence: Synthetic oligonucleotide
gaauggugcauugggauuu

SEQ ID NO: 1895379 - RNA, 19 nt, Artificial Sequence
  Description of Artificial Sequence: Synthetic oligonucleotide
ggagugccaacugaguuca

SEQ ID NO: 1895380 - RNA, 19 nt, Artificial Sequence
  Description of Artificial Sequence: Synthetic oligonucleotide
agcugcuuacuaaucugca

SEQ ID NO: 1895381 - RNA, 19 nt, Artificial Sequence
  Description of Artificial Sequence: Synthetic oligonucleotide
cuguggcgaagccuccacc

SEQ ID NO: 1895382 - RNA, 19 nt, Artificial Sequence
  Description of Artificial Sequence: Synthetic oligonucleotide
guuggaugggaagcgcuca

SEQ ID NO: 1895383 - RNA, 19 nt, Artificial Sequence
  Description of Artificial Sequence: Synthetic oligonucleotide
gcacucgaagccuguggcg

SEQ ID NO: 1895384 - RNA, 19 nt, Artificial Sequence
  Description of Artificial Sequence: Synthetic oligonucleotide
ggaugggaagcgcucacuc

SEQ ID NO: 1895385 - RNA, 19 nt, Artificial Sequence
  Description of Artificial Sequence: Synthetic oligonucleotide
uucacagguuuagugucuu

SEQ ID NO: 1895386 - RNA, 19 nt, Artificial Sequence
  Description of Artificial Sequence: Synthetic oligonucleotide
gccccgaggacuccaauug

SEQ ID NO: 1895387 - RNA, 19 nt, Artificial Sequence
  Description of Artificial Sequence: Synthetic oligonucleotide
ccggucuacggcaaagcgc

SEQ ID NO: 1895388 - RNA, 19 nt, Artificial Sequence
  Description of Artificial Sequence: Synthetic oligonucleotide
gacuccaauugguaaggau

SEQ ID NO: 1895389 - RNA, 19 nt, Artificial Sequence
  Description of Artificial Sequence: Synthetic oligonucleotide
ugaugcggugcugccagaa

SEQ ID NO: 1895390 - RNA, 19 nt, Artificial Sequence
  Description of Artificial Sequence: Synthetic oligonucleotide
acgucaguuagggucucca

SEQ ID NO: 1895391 - RNA, 19 nt, Artificial Sequence
  Description of Artificial Sequence: Synthetic oligonucleotide
ugguaaggauuggucucca

SEQ ID NO: 1895392 - RNA, 19 nt, Artificial Sequence
  Description of Artificial Sequence: Synthetic oligonucleotide
gacucugggucugagcugu

SEQ ID NO: 1895393 - RNA, 19 nt, Artificial Sequence
  Description of Artificial Sequence: Synthetic oligonucleotide
ucccggucuacggcaaagc

SEQ ID NO: 1895394 - RNA, 19 nt, Artificial Sequence
  Description of Artificial Sequence: Synthetic oligonucleotide
uggaugggaagcgcucacu

SEQ ID NO: 1895395 - RNA, 19 nt, Artificial Sequence
  Description of Artificial Sequence: Synthetic oligonucleotide
acggcaaagcgcagcaacu

SEQ ID NO: 1895396 - RNA, 19 nt, Artificial Sequence
  Description of Artificial Sequence: Synthetic oligonucleotide
acaggagugccaacugagu

SEQ ID NO: 1895397 - RNA, 19 nt, Artificial Sequence
  Description of Artificial Sequence: Synthetic oligonucleotide
gucuacaaugcaguuaaau

SEQ ID NO: 1895398 - RNA, 19 nt, Artificial Sequence
  Description of Artificial Sequence: Synthetic oligonucleotide
agcugccgacaggagugcc

SEQ ID NO: 1895399 - RNA, 19 nt, Artificial Sequence
  Description of Artificial Sequence: Synthetic oligonucleotide
caucagggagaggagguga

SEQ ID NO: 1895400 - RNA, 19 nt, Artificial Sequence
  Description of Artificial Sequence: Synthetic oligonucleotide
cgcugguugaaaacagggg

SEQ ID NO: 1895401 - RNA, 19 nt, Artificial Sequence
  Description of Artificial Sequence: Synthetic oligonucleotide
agguuggaugggaagcgcu

SEQ ID NO: 1895402 - RNA, 19 nt, Artificial Sequence
  Description of Artificial Sequence: Synthetic oligonucleotide
ccagguuggaugggaagcg

SEQ ID NO: 1895403 - RNA, 19 nt, Artificial Sequence
  Description of Artificial Sequence: Synthetic oligonucleotide
uggugaacuuaaggcagua

SEQ ID NO: 1895404 - RNA, 19 nt, Artificial Sequence
  Description of Artificial Sequence: Synthetic oligonucleotide
gcaguacucaugagcuacg

SEQ ID NO: 1895405 - RNA, 19 nt, Artificial Sequence
  Description of Artificial Sequence: Synthetic oligonucleotide
caucuucuucuugcagcgc

SEQ ID NO: 1895406 - RNA, 19 nt, Artificial Sequence
  Description of Artificial Sequence: Synthetic oligonucleotide
gguugaaaacaggggagga

SEQ ID NO: 1895407 - RNA, 19 nt, Artificial Sequence
  Description of Artificial Sequence: Synthetic oligonucleotide
aggucaucagggagaggag

SEQ ID NO: 1895408 - RNA, 19 nt, Artificial Sequence
  Description of Artificial Sequence: Synthetic oligonucleotide
ugcggagacgucgguugug

SEQ ID NO: 1895409 - RNA, 19 nt, Artificial Sequence
  Description of Artificial Sequence: Synthetic oligonucleotide
agccccgaggacuccaauu

SEQ ID NO: 1895410 - RNA, 19 nt, Artificial Sequence
  Description of Artificial Sequence: Synthetic oligonucleotide
augcccagacacauugccu

SEQ ID NO: 1895411 - RNA, 19 nt, Artificial Sequence
  Description of Artificial Sequence: Synthetic oligonucleotide
cccggucuacggcaaagcg

SEQ ID NO: 1895412 - RNA, 19 nt, Artificial Sequence
  Description of Artificial Sequence: Synthetic oligonucleotide
uacgucaguuagggucucc

SEQ ID NO: 1895413 - RNA, 19 nt, Artificial Sequence
  Description of Artificial Sequence: Synthetic oligonucleotide
uugguuccucaaagacauc

SEQ ID NO: 1895414 - RNA, 19 nt, Artificial Sequence
  Description of Artificial Sequence: Synthetic oligonucleotide
cagguuuagugucuucugu

SEQ ID NO: 1895415 - RNA, 19 nt, Artificial Sequence
  Description of Artificial Sequence: Synthetic oligonucleotide
cucgaagccuguggcgaag

SEQ ID NO: 1895416 - RNA, 19 nt, Artificial Sequence
  Description of Artificial Sequence: Synthetic oligonucleotide
gcccacuucauggaacacc

SEQ ID NO: 1895417 - RNA, 19 nt, Artificial Sequence
  Description of Artificial Sequence: Synthetic oligonucleotide
aaacaggggaggaccccau

SEQ ID NO: 1895418 - RNA, 19 nt, Artificial Sequence
  Description of Artificial Sequence: Synthetic oligonucleotide
ggcuccauuuucacaugag

SEQ ID NO: 1895419 - RNA, 19 nt, Artificial Sequence
  Description of Artificial Sequence: Synthetic oligonucleotide
gccauagcugcuguccgag

SEQ ID NO: 1895420 - RNA, 19 nt, Artificial Sequence
  Description of Artificial Sequence: Synthetic oligonucleotide
ggugaacuuaaggcaguac

SEQ ID NO: 1895421 - RNA, 19 nt, Artificial Sequence
  Description of Artificial Sequence: Synthetic oligonucleotide
cuaaaggcuggaggucauc

SEQ ID NO: 1895422 - RNA, 19 nt, Artificial Sequence
  Description of Artificial Sequence: Synthetic oligonucleotide
cggucuacggcaaagcgca

SEQ ID NO: 1895423 - RNA, 19 nt, Artificial Sequence
  Description of Artificial Sequence: Synthetic oligonucleotide
gucgguugugcuggaucag

SEQ ID NO: 1895424 - RNA, 19 nt, Artificial Sequence
  Description of Artificial Sequence: Synthetic oligonucleotide
gucaucagggagaggaggu

SEQ ID NO: 1895425 - RNA, 19 nt, Artificial Sequence
  Description of Artificial Sequence: Synthetic oligonucleotide
agcacacucgaagccugca

SEQ ID NO: 1895426 - RNA, 19 nt, Artificial Sequence
  Description of Artificial Sequence: Synthetic oligonucleotide
cucccggucuacggcaaag

SEQ ID NO: 1895427 - RNA, 19 nt, Artificial Sequence
  Description of Artificial Sequence: Synthetic oligonucleotide
gcagcgcugguugaaaaca

SEQ ID NO: 1895428 - RNA, 19 nt, Artificial Sequence
  Description of Artificial Sequence: Synthetic oligonucleotide
cauuuaccucugcacucga

SEQ ID NO: 1895429 - RNA, 19 nt, Artificial Sequence
  Description of Artificial Sequence: Synthetic oligonucleotide
ccucaaagacaucgcugcc

SEQ ID NO: 1895430 - RNA, 19 nt, Artificial Sequence
  Description of Artificial Sequence: Synthetic oligonucleotide
gccuaauaccccaugccca

SEQ ID NO: 1895431 - RNA, 19 nt, Artificial Sequence
  Description of Artificial Sequence: Synthetic oligonucleotide
ccuucagucccagcacucg

SEQ ID NO: 1895432 - RNA, 19 nt, Artificial Sequence
  Description of Artificial Sequence: Synthetic oligonucleotide
auuucuggagggagagcau

SEQ ID NO: 1895433 - RNA, 19 nt, Artificial Sequence
  Description of Artificial Sequence: Synthetic oligonucleotide
gggaaaggagucuguccca

SEQ ID NO: 1895434 - RNA, 19 nt, Artificial Sequence
  Description of Artificial Sequence: Synthetic oligonucleotide
cugagggauuccagcuuca

SEQ ID NO: 1895435 - RNA, 19 nt, Artificial Sequence
  Description of Artificial Sequence: Synthetic oligonucleotide
gcuccucacugauaggaaa

SEQ ID NO: 1895436 - RNA, 19 nt, Artificial Sequence
  Description of Artificial Sequence: Synthetic oligonucleotide
cuggucuacaaugcaguua

SEQ ID NO: 1895437 - RNA, 19 nt, Artificial Sequence
  Description of Artificial Sequence: Synthetic oligonucleotide
auuuaccucugcacucgaa

SEQ ID NO: 1895438 - RNA, 19 nt, Artificial Sequence
  Description of Artificial Sequence: Synthetic oligonucleotide
aggcaguacucaugagcua

SEQ ID NO: 1895439 - RNA, 19 nt, Artificial Sequence
  Description of Artificial Sequence: Synthetic oligonucleotide
ucugagccccgaggacucc

SEQ ID NO: 1895440 - RNA, 19 nt, Artificial Sequence
  Description of Artificial Sequence: Synthetic oligonucleotide
ccaugaggcuaucagugga

SEQ ID NO: 1895441 - RNA, 19 nt, Artificial Sequence
  Description of Artificial Sequence: Synthetic oligonucleotide
ggcucgugaggggaugucc

SEQ ID NO: 1895442 - RNA, 19 nt, Artificial Sequence
  Description of Artificial Sequence: Synthetic oligonucleotide
gguuggaugggaagcgcuc

SEQ ID NO: 1895443 - RNA, 19 nt, Artificial Sequence
  Description of Artificial Sequence: Synthetic oligonucleotide
cuccuuuuccacgguaaaa

SEQ ID NO: 1895444 - RNA, 19 nt, Artificial Sequence
  Description of Artificial Sequence: Synthetic oligonucleotide
ugccugacauugguuccuc

SEQ ID NO: 1895445 - RNA, 19 nt, Artificial Sequence
  Description of Artificial Sequence: Synthetic oligonucleotide
gggauuccagcuucacuaa

SEQ ID NO: 1895446 - RNA, 19 nt, Artificial Sequence
  Description of Artificial Sequence: Synthetic oligonucleotide
cacugauaggaaacgugau

SEQ ID NO: 1895447 - RNA, 19 nt, Artificial Sequence
  Description of Artificial Sequence: Synthetic oligonucleotide
ggagagcaugcugccaaug

SEQ ID NO: 1895448 - RNA, 19 nt, Artificial Sequence
  Description of Artificial Sequence: Synthetic oligonucleotide
ccaggauuguggccacugc

SEQ ID NO: 1895449 - RNA, 19 nt, Artificial Sequence
  Description of Artificial Sequence: Synthetic oligonucleotide
cuaaugccugacauugguu

SEQ ID NO: 1895450 - RNA, 19 nt, Artificial Sequence
  Description of Artificial Sequence: Synthetic oligonucleotide
ucgcugccuaauaccccau

SEQ ID NO: 1895451 - RNA, 19 nt, Artificial Sequence
  Description of Artificial Sequence: Synthetic oligonucleotide
ugcugccaaugcccacuuc

SEQ ID NO: 1895452 - RNA, 19 nt, Artificial Sequence
  Description of Artificial Sequence: Synthetic oligonucleotide
ugcccacuucauggaacac

SEQ ID NO: 1895453 - RNA, 19 nt, Artificial Sequence
  Description of Artificial Sequence: Synthetic oligonucleotide
gagcuguggcaauaagguu

SEQ ID NO: 1895454 - RNA, 19 nt, Artificial Sequence
  Description of Artificial Sequence: Synthetic oligonucleotide
gcuacgucaguuagggucu

SEQ ID NO: 1895455 - RNA, 19 nt, Artificial Sequence
  Description of Artificial Sequence: Synthetic oligonucleotide
gccaggauuguggccacug

SEQ ID NO: 1895456 - RNA, 19 nt, Artificial Sequence
  Description of Artificial Sequence: Synthetic oligonucleotide
cuugcagcgcugguugaaa

SEQ ID NO: 1895457 - RNA, 19 nt, Artificial Sequence
  Description of Artificial Sequence: Synthetic oligonucleotide
ccccgaggacuccaauugg

SEQ ID NO: 1895458 - RNA, 19 nt, Artificial Sequence
  Description of Artificial Sequence: Synthetic oligonucleotide
agguugcggagacgucggu

SEQ ID NO: 1895459 - RNA, 19 nt, Artificial Sequence
  Description of Artificial Sequence: Synthetic oligonucleotide
caggagugccaacugaguu

SEQ ID NO: 1895460 - RNA, 19 nt, Artificial Sequence
  Description of Artificial Sequence: Synthetic oligonucleotide
cuaauaccccaugcccaga

SEQ ID NO: 1895461 - RNA, 19 nt, Artificial Sequence
  Description of Artificial Sequence: Synthetic oligonucleotide
gaugcggugcugccagaau

SEQ ID NO: 1895462 - RNA, 19 nt, Artificial Sequence
  Description of Artificial Sequence: Synthetic oligonucleotide
cucaugagcuacgucaguu

SEQ ID NO: 1895463 - RNA, 19 nt, Artificial Sequence
  Description of Artificial Sequence: Synthetic oligonucleotide
gcggagacgucgguugugc

SEQ ID NO: 1895464 - RNA, 19 nt, Artificial Sequence
  Description of Artificial Sequence: Synthetic oligonucleotide
ggaauggugcauugggauu

SEQ ID NO: 1895465 - RNA, 19 nt, Artificial Sequence
  Description of Artificial Sequence: Synthetic oligonucleotide
agggcucgugaggggaugu

SEQ ID NO: 1895466 - RNA, 19 nt, Artificial Sequence
  Description of Artificial Sequence: Synthetic oligonucleotide
aggagggaagaggcucacu

SEQ ID NO: 1895467 - RNA, 19 nt, Artificial Sequence
  Description of Artificial Sequence: Synthetic oligonucleotide
gcucacucugagccccgag

SEQ ID NO: 1895468 - RNA, 19 nt, Artificial Sequence
  Description of Artificial Sequence: Synthetic oligonucleotide
ccgacaggagugccaacug

SEQ ID NO: 1895469 - RNA, 19 nt, Artificial Sequence
  Description of Artificial Sequence: Synthetic oligonucleotide
cgucaguuagggucuccag

SEQ ID NO: 1895470 - RNA, 19 nt, Artificial Sequence
  Description of Artificial Sequence: Synthetic oligonucleotide
gccggaccuggaauggugc

SEQ ID NO: 1895471 - RNA, 19 nt, Artificial Sequence
  Description of Artificial Sequence: Synthetic oligonucleotide
gcagcauguaagugugaua

SEQ ID NO: 1895472 - RNA, 19 nt, Artificial Sequence
  Description of Artificial Sequence: Synthetic oligonucleotide
ugccgacaggagugccaac

SEQ ID NO: 1895473 - RNA, 19 nt, Artificial Sequence
  Description of Artificial Sequence: Synthetic oligonucleotide
agacgucgguugugcugga

SEQ ID NO: 1895474 - RNA, 19 nt, Artificial Sequence
  Description of Artificial Sequence: Synthetic oligonucleotide
gccagaauuucuggaggga

SEQ ID NO: 1895475 - RNA, 19 nt, Artificial Sequence
  Description of Artificial Sequence: Synthetic oligonucleotide
cagcuucacuaaugccuga

SEQ ID NO: 1895476 - RNA, 19 nt, Artificial Sequence
  Description of Artificial Sequence: Synthetic oligonucleotide
cgucgguugugcuggauca

SEQ ID NO: 1895477 - RNA, 19 nt, Artificial Sequence
  Description of Artificial Sequence: Synthetic oligonucleotide
ccuguggcgaagccuccac

SEQ ID NO: 1895478 - RNA, 19 nt, Artificial Sequence
  Description of Artificial Sequence: Synthetic oligonucleotide
gccugcaugggccaggauu

SEQ ID NO: 1895479 - RNA, 19 nt, Artificial Sequence
  Description of Artificial Sequence: Synthetic oligonucleotide
cuacgucaguuagggucuc

SEQ ID NO: 1895480 - RNA, 19 nt, Artificial Sequence
  Description of Artificial Sequence: Synthetic oligonucleotide
cagggcucgugaggggaug

SEQ ID NO: 1895481 - RNA, 19 nt, Artificial Sequence
  Description of Artificial Sequence: Synthetic oligonucleotide
cacaugagccagguuccaa

SEQ ID NO: 1895482 - RNA, 19 nt, Artificial Sequence
  Description of Artificial Sequence: Synthetic oligonucleotide
cugucccagcauggccucc

SEQ ID NO: 1895483 - RNA, 19 nt, Artificial Sequence
  Description of Artificial Sequence: Synthetic oligonucleotide
cgaggacuccaauugguaa

SEQ ID NO: 1895484 - RNA, 19 nt, Artificial Sequence
  Description of Artificial Sequence: Synthetic oligonucleotide
ccagcauggccucccgguc

SEQ ID NO: 1895485 - RNA, 19 nt, Artificial Sequence
  Description of Artificial Sequence: Synthetic oligonucleotide
gggcucugagggauuccag

SEQ ID NO: 1895486 - RNA, 19 nt, Artificial Sequence
  Description of Artificial Sequence: Synthetic oligonucleotide
cagucacugguucuccuuu

SEQ ID NO: 1895487 - RNA, 19 nt, Artificial Sequence
  Description of Artificial Sequence: Synthetic oligonucleotide
gagcuacgucaguuagggu

SEQ ID NO: 1895488 - RNA, 19 nt, Artificial Sequence
  Description of Artificial Sequence: Synthetic oligonucleotide
cucugagggauuccagcuu

SEQ ID NO: 1895489 - RNA, 19 nt, Artificial Sequence
  Description of Artificial Sequence: Synthetic oligonucleotide
ggacuccaauugguaagga

SEQ ID NO: 1895490 - RNA, 19 nt, Artificial Sequence
  Description of Artificial Sequence: Synthetic oligonucleotide
gggaggaccccaugaggcu

SEQ ID NO: 1895491 - RNA, 19 nt, Artificial Sequence
  Description of Artificial Sequence: Synthetic oligonucleotide
ggaggucaucagggagagg

SEQ ID NO: 1895492 - RNA, 19 nt, Artificial Sequence
  Description of Artificial Sequence: Synthetic oligonucleotide
caguacucaugagcuacgu

SEQ ID NO: 1895493 - RNA, 19 nt, Artificial Sequence
  Description of Artificial Sequence: Synthetic oligonucleotide
ccaauugguaaggauuggu

SEQ ID NO: 1895494 - RNA, 19 nt, Artificial Sequence
  Description of Artificial Sequence: Synthetic oligonucleotide
ggaggaccccaugaggcua

SEQ ID NO: 1895495 - RNA, 19 nt, Artificial Sequence
  Description of Artificial Sequence: Synthetic oligonucleotide
cauggaacaccugcuccau

SEQ ID NO: 1895496 - RNA, 19 nt, Artificial Sequence
  Description of Artificial Sequence: Synthetic oligonucleotide
ggauuccagcuucacuaau

SEQ ID NO: 1895497 - RNA, 19 nt, Artificial Sequence
  Description of Artificial Sequence: Synthetic oligonucleotide
cucugcacucgaagccugu

SEQ ID NO: 1895498 - RNA, 19 nt, Artificial Sequence
  Description of Artificial Sequence: Synthetic oligonucleotide
gaggaccccaugaggcuau

SEQ ID NO: 1895499 - RNA, 19 nt, Artificial Sequence
  Description of Artificial Sequence: Synthetic oligonucleotide
ggucuacggcaaagcgcag

SEQ ID NO: 1895500 - RNA, 19 nt, Artificial Sequence
  Description of Artificial Sequence: Synthetic oligonucleotide
ccgaggacuccaauuggua

SEQ ID NO: 1895501 - RNA, 19 nt, Artificial Sequence
  Description of Artificial Sequence: Synthetic oligonucleotide
ccaacugaguucagucacu

SEQ ID NO: 1895502 - RNA, 19 nt, Artificial Sequence
  Description of Artificial Sequence: Synthetic oligonucleotide
gcgaagccuccaccuccag

SEQ ID NO: 1895503 - RNA, 19 nt, Artificial Sequence
  Description of Artificial Sequence: Synthetic oligonucleotide
gccugacauugguuccuca

SEQ ID NO: 1895504 - RNA, 19 nt, Artificial Sequence
  Description of Artificial Sequence: Synthetic oligonucleotide
gggaagaggcucacucucu

SEQ ID NO: 1895505 - RNA, 19 nt, Artificial Sequence
  Description of Artificial Sequence: Synthetic oligonucleotide
ccggaccuggaauggugca

SEQ ID NO: 1895506 - RNA, 19 nt, Artificial Sequence
  Description of Artificial Sequence: Synthetic oligonucleotide
gcggugcugccagaauuuc

SEQ ID NO: 1895507 - RNA, 19 nt, Artificial Sequence
  Description of Artificial Sequence: Synthetic oligonucleotide
ccacgguaaaagucacucu

SEQ ID NO: 1895508 - RNA, 19 nt, Artificial Sequence
  Description of Artificial Sequence: Synthetic oligonucleotide
ggaccuggaauggugcauu

SEQ ID NO: 1895509 - RNA, 19 nt, Artificial Sequence
  Description of Artificial Sequence: Synthetic oligonucleotide
gcuuacuaaucugcagcau

SEQ ID NO: 1895510 - RNA, 19 nt, Artificial Sequence
  Description of Artificial Sequence: Synthetic oligonucleotide
ggaccccaugaggcuauca

SEQ ID NO: 1895511 - RNA, 19 nt, Artificial Sequence
  Description of Artificial Sequence: Synthetic oligonucleotide
cgcugccuaauaccccaug

SEQ ID NO: 1895512 - RNA, 19 nt, Artificial Sequence
  Description of Artificial Sequence: Synthetic oligonucleotide
ggucuacaaugcaguuaaa

SEQ ID NO: 1895513 - RNA, 19 nt, Artificial Sequence
  Description of Artificial Sequence: Synthetic oligonucleotide
ggcuaucaguggaguggga

SEQ ID NO: 1895514 - RNA, 19 nt, Artificial Sequence
  Description of Artificial Sequence: Synthetic oligonucleotide
ccucacugauaggaaacgu

SEQ ID NO: 1895515 - RNA, 19 nt, Artificial Sequence
  Description of Artificial Sequence: Synthetic oligonucleotide
gggagagcaugcugccaau

SEQ ID NO: 1895516 - RNA, 19 nt, Artificial Sequence
  Description of Artificial Sequence: Synthetic oligonucleotide
gacgucgguugugcuggau

SEQ ID NO: 1895517 - RNA, 19 nt, Artificial Sequence
  Description of Artificial Sequence: Synthetic oligonucleotide
gguugcggagacgucgguu

SEQ ID NO: 1895518 - RNA, 19 nt, Artificial Sequence
  Description of Artificial Sequence: Synthetic oligonucleotide
gugccggaccuggaauggu

SEQ ID NO: 1895519 - RNA, 19 nt, Artificial Sequence
  Description of Artificial Sequence: Synthetic oligonucleotide
gggcucgugaggggauguc

SEQ ID NO: 1895520 - RNA, 19 nt, Artificial Sequence
  Description of Artificial Sequence: Synthetic oligonucleotide
cugcaugggccaggauugu

SEQ ID NO: 1895521 - RNA, 19 nt, Artificial Sequence
  Description of Artificial Sequence: Synthetic oligonucleotide
cacuuucuugaggcuccau

SEQ ID NO: 1895522 - RNA, 19 nt, Artificial Sequence
  Description of Artificial Sequence: Synthetic oligonucleotide
gcgcagcaacuuggugaac

SEQ ID NO: 1895523 - RNA, 19 nt, Artificial Sequence
  Description of Artificial Sequence: Synthetic oligonucleotide
gcagggcucgugaggggau

SEQ ID NO: 1895524 - RNA, 19 nt, Artificial Sequence
  Description of Artificial Sequence: Synthetic oligonucleotide
ccucccggucuacggcaaa

SEQ ID NO: 1895525 - RNA, 19 nt, Artificial Sequence
  Description of Artificial Sequence: Synthetic oligonucleotide
cggagacgucgguugugcu

SEQ ID NO: 1895526 - RNA, 19 nt, Artificial Sequence
  Description of Artificial Sequence: Synthetic oligonucleotide
cggaccuggaauggugcau

SEQ ID NO: 1895527 - RNA, 19 nt, Artificial Sequence
  Description of Artificial Sequence: Synthetic oligonucleotide
aguaaaacgauguaaauac

SEQ ID NO: 1895528 - RNA, 19 nt, Artificial Sequence
  Description of Artificial Sequence: Synthetic oligonucleotide
ucaggaaucaaguagaugg

SEQ ID NO: 1895529 - RNA, 19 nt, Artificial Sequence
  Description of Artificial Sequence: Synthetic oligonucleotide
uguagaugagauaacauag

SEQ ID NO: 1895530 - RNA, 19 nt, Artificial Sequence
  Description of Artificial Sequence: Synthetic oligonucleotide
auaacauagacuuccacuc

SEQ ID NO: 1895531 - RNA, 19 nt, Artificial Sequence
  Description of Artificial Sequence: Synthetic oligonucleotide
uuuugcgucucacaaagcg

SEQ ID NO: 1895532 - RNA, 19 nt, Artificial Sequence
  Description of Artificial Sequence: Synthetic oligonucleotide
ugagauaacauagacuucc

SEQ ID NO: 1895533 - RNA, 19 nt, Artificial Sequence
  Description of Artificial Sequence: Synthetic oligonucleotide
aacuauucgggcgaguagc

SEQ ID NO: 1895534 - RNA, 19 nt, Artificial Sequence
  Description of Artificial Sequence: Synthetic oligonucleotide
aauauccuggcaaggagcc

SEQ ID NO: 1895535 - RNA, 19 nt, Artificial Sequence
  Description of Artificial Sequence: Synthetic oligonucleotide
gaugagauaacauagacuu

SEQ ID NO: 1895536 - RNA, 19 nt, Artificial Sequence
  Description of Artificial Sequence: Synthetic oligonucleotide
uguaaauacuuaagguucc

SEQ ID NO: 1895537 - RNA, 19 nt, Artificial Sequence
  Description of Artificial Sequence: Synthetic oligonucleotide
aacgcguccgaccucaccg

SEQ ID NO: 1895538 - RNA, 19 nt, Artificial Sequence
  Description of Artificial Sequence: Synthetic oligonucleotide
auguaaauacuuaagguuc

SEQ ID NO: 1895539 - RNA, 19 nt, Artificial Sequence
  Description of Artificial Sequence: Synthetic oligonucleotide
aagaaaacgcguccgaccu

SEQ ID NO: 1895540 - RNA, 19 nt, Artificial Sequence
  Description of Artificial Sequence: Synthetic oligonucleotide
ugucuuagggguuuuacug

SEQ ID NO: 1895541 - RNA, 19 nt, Artificial Sequence
  Description of Artificial Sequence: Synthetic oligonucleotide
uguuauguagacuggcugc

SEQ ID NO: 1895542 - RNA, 19 nt, Artificial Sequence
  Description of Artificial Sequence: Synthetic oligonucleotide
aaguagaugggaugaacug

SEQ ID NO: 1895543 - RNA, 19 nt, Artificial Sequence
  Description of Artificial Sequence: Synthetic oligonucleotide
uuugcgucucacaaagcgg

SEQ ID NO: 1895544 - RNA, 19 nt, Artificial Sequence
  Description of Artificial Sequence: Synthetic oligonucleotide
ggugggaccaaguaaaacg

SEQ ID NO: 1895545 - RNA, 19 nt, Artificial Sequence
  Description of Artificial Sequence: Synthetic oligonucleotide
gaaucaaguagaugggaug

SEQ ID NO: 1895546 - RNA, 19 nt, Artificial Sequence
  Description of Artificial Sequence: Synthetic oligonucleotide
aaucaaguagaugggauga

SEQ ID NO: 1895547 - RNA, 19 nt, Artificial Sequence
  Description of Artificial Sequence: Synthetic oligonucleotide
aauacccggcacuaccuuc

SEQ ID NO: 1895548 - RNA, 19 nt, Artificial Sequence
  Description of Artificial Sequence: Synthetic oligonucleotide
gaagaaaacgcguccgacc

SEQ ID NO: 1895549 - RNA, 19 nt, Artificial Sequence
  Description of Artificial Sequence: Synthetic oligonucleotide
auacuuaagguuccacagg

SEQ ID NO: 1895550 - RNA, 19 nt, Artificial Sequence
  Description of Artificial Sequence: Synthetic oligonucleotide
gauaccaggagucccuugc

SEQ ID NO: 1895551 - RNA, 19 nt, Artificial Sequence
  Description of Artificial Sequence: Synthetic oligonucleotide
gauaacauagacuuccacu

SEQ ID NO: 1895552 - RNA, 19 nt, Artificial Sequence
  Description of Artificial Sequence: Synthetic oligonucleotide
agauaacauagacuuccac

SEQ ID NO: 1895553 - RNA, 19 nt, Artificial Sequence
  Description of Artificial Sequence: Synthetic oligonucleotide
uauuuagcugccuucuuuc

SEQ ID NO: 1895554 - RNA, 19 nt, Artificial Sequence
  Description of Artificial Sequence: Synthetic oligonucleotide
aacauagacuuccacucau

SEQ ID NO: 1895555 - RNA, 19 nt, Artificial Sequence
  Description of Artificial Sequence: Synthetic oligonucleotide
uggacagucagccucuuuc

SEQ ID NO: 1895556 - RNA, 19 nt, Artificial Sequence
  Description of Artificial Sequence: Synthetic oligonucleotide
agggacugcgccuucgggc

SEQ ID NO: 1895557 - RNA, 19 nt, Artificial Sequence
  Description of Artificial Sequence: Synthetic oligonucleotide
aaauguccaggaacuauuc

SEQ ID NO: 1895558 - RNA, 19 nt, Artificial Sequence
  Description of Artificial Sequence: Synthetic oligonucleotide
uguguagaugagauaacau

SEQ ID NO: 1895559 - RNA, 19 nt, Artificial Sequence
  Description of Artificial Sequence: Synthetic oligonucleotide
ucaccguaggcgcugagca

SEQ ID NO: 1895560 - RNA, 19 nt, Artificial Sequence
  Description of Artificial Sequence: Synthetic oligonucleotide
auugcguacgugcagggga

SEQ ID NO: 1895561 - RNA, 19 nt, Artificial Sequence
  Description of Artificial Sequence: Synthetic oligonucleotide
ugggacguugugcaaaugu

SEQ ID NO: 1895562 - RNA, 19 nt, Artificial Sequence
  Description of Artificial Sequence: Synthetic oligonucleotide
uugcgucucacaaagcggu

SEQ ID NO: 1895563 - RNA, 19 nt, Artificial Sequence
  Description of Artificial Sequence: Synthetic oligonucleotide
aaacgcguccgaccucacc

SEQ ID NO: 1895564 - RNA, 19 nt, Artificial Sequence
  Description of Artificial Sequence: Synthetic oligonucleotide
uccaaauauccuggcaagg

SEQ ID NO: 1895565 - RNA, 19 nt, Artificial Sequence
  Description of Artificial Sequence: Synthetic oligonucleotide
guuguguuccauguaaaug

SEQ ID NO: 1895566 - RNA, 19 nt, Artificial Sequence
  Description of Artificial Sequence: Synthetic oligonucleotide
aagucagucucucgcuuug

SEQ ID NO: 1895567 - RNA, 19 nt, Artificial Sequence
  Description of Artificial Sequence: Synthetic oligonucleotide
guaggcgcugagcagauug

SEQ ID NO: 1895568 - RNA, 19 nt, Artificial Sequence
  Description of Artificial Sequence: Synthetic oligonucleotide
auucgggcgaguagcaucc

SEQ ID NO: 1895569 - RNA, 19 nt, Artificial Sequence
  Description of Artificial Sequence: Synthetic oligonucleotide
cacaauacccggcacuacc

SEQ ID NO: 1895570 - RNA, 19 nt, Artificial Sequence
  Description of Artificial Sequence: Synthetic oligonucleotide
uauguagacuggcugccac

SEQ ID NO: 1895571 - RNA, 19 nt, Artificial Sequence
  Description of Artificial Sequence: Synthetic oligonucleotide
uauguguagaugagauaac

SEQ ID NO: 1895572 - RNA, 19 nt, Artificial Sequence
  Description of Artificial Sequence: Synthetic oligonucleotide
guguuauguagacuggcug

SEQ ID NO: 1895573 - RNA, 19 nt, Artificial Sequence
  Description of Artificial Sequence: Synthetic oligonucleotide
cauaacggaagggacugcg

SEQ ID NO: 1895574 - RNA, 19 nt, Artificial Sequence
  Description of Artificial Sequence: Synthetic oligonucleotide
ugcuugggcaaccucugcc

SEQ ID NO: 1895575 - RNA, 19 nt, Artificial Sequence
  Description of Artificial Sequence: Synthetic oligonucleotide
gaacuauucgggcgaguag

SEQ ID NO: 1895576 - RNA, 19 nt, Artificial Sequence
  Description of Artificial Sequence: Synthetic oligonucleotide
cugccauugcccaaugggc

SEQ ID NO: 1895577 - RNA, 19 nt, Artificial Sequence
  Description of Artificial Sequence: Synthetic oligonucleotide
augggcguguuauguagac

SEQ ID NO: 1895578 - RNA, 19 nt, Artificial Sequence
  Description of Artificial Sequence: Synthetic oligonucleotide
gucuuagggguuuuacugc

SEQ ID NO: 1895579 - RNA, 19 nt, Artificial Sequence
  Description of Artificial Sequence: Synthetic oligonucleotide
augcucaucaaaaggugac

SEQ ID NO: 1895580 - RNA, 19 nt, Artificial Sequence
  Description of Artificial Sequence: Synthetic oligonucleotide
agaugggaugaacuguucu

SEQ ID NO: 1895581 - RNA, 19 nt, Artificial Sequence
  Description of Artificial Sequence: Synthetic oligonucleotide
ugccauugcccaaugggcu

SEQ ID NO: 1895582 - RNA, 19 nt, Artificial Sequence
  Description of Artificial Sequence: Synthetic oligonucleotide
uuaagguuccacaggucau

SEQ ID NO: 1895583 - RNA, 19 nt, Artificial Sequence
  Description of Artificial Sequence: Synthetic oligonucleotide
uggaagaaaacgcguccga

SEQ ID NO: 1895584 - RNA, 19 nt, Artificial Sequence
  Description of Artificial Sequence: Synthetic oligonucleotide
aguagaugggaugaacugu

SEQ ID NO: 1895585 - RNA, 19 nt, Artificial Sequence
  Description of Artificial Sequence: Synthetic oligonucleotide
uauucgggcgaguagcauc

SEQ ID NO: 1895586 - RNA, 19 nt, Artificial Sequence
  Description of Artificial Sequence: Synthetic oligonucleotide
guuccacaggucauaacgg

SEQ ID NO: 1895587 - RNA, 19 nt, Artificial Sequence
  Description of Artificial Sequence: Synthetic oligonucleotide
uccgaccucaccguaggcg

SEQ ID NO: 1895588 - RNA, 19 nt, Artificial Sequence
  Description of Artificial Sequence: Synthetic oligonucleotide
ccuugcuguauuuagcugc

SEQ ID NO: 1895589 - RNA, 19 nt, Artificial Sequence
  Description of Artificial Sequence: Synthetic oligonucleotide
caucaaaaggugacaucag

SEQ ID NO: 1895590 - RNA, 19 nt, Artificial Sequence
  Description of Artificial Sequence: Synthetic oligonucleotide
uugccugcguaccuggcgc

SEQ ID NO: 1895591 - RNA, 19 nt, Artificial Sequence
  Description of Artificial Sequence: Synthetic oligonucleotide
ugcccaaugggcucaugag

SEQ ID NO: 1895592 - RNA, 19 nt, Artificial Sequence
  Description of Artificial Sequence: Synthetic oligonucleotide
gucauaacggaagggacug

SEQ ID NO: 1895593 - RNA, 19 nt, Artificial Sequence
  Description of Artificial Sequence: Synthetic oligonucleotide
cauguaaaugcucaucaaa

SEQ ID NO: 1895594 - RNA, 19 nt, Artificial Sequence
  Description of Artificial Sequence: Synthetic oligonucleotide
uagaagucagucucucgcu

SEQ ID NO: 1895595 - RNA, 19 nt, Artificial Sequence
  Description of Artificial Sequence: Synthetic oligonucleotide
agaugagauaacauagacu

SEQ ID NO: 1895596 - RNA, 19 nt, Artificial Sequence
  Description of Artificial Sequence: Synthetic oligonucleotide
guuauguagacuggcugcc

SEQ ID NO: 1895597 - RNA, 19 nt, Artificial Sequence
  Description of Artificial Sequence: Synthetic oligonucleotide
auguguagaugagauaaca

SEQ ID NO: 1895598 - RNA, 19 nt, Artificial Sequence
  Description of Artificial Sequence: Synthetic oligonucleotide
gcaaggagcccucuguugg

SEQ ID NO: 1895599 - RNA, 19 nt, Artificial Sequence
  Description of Artificial Sequence: Synthetic oligonucleotide
cuggaagaaaacgcguccg

SEQ ID NO: 1895600 - RNA, 19 nt, Artificial Sequence
  Description of Artificial Sequence: Synthetic oligonucleotide
gggcguguuauguagacug

SEQ ID NO: 1895601 - RNA, 19 nt, Artificial Sequence
  Description of Artificial Sequence: Synthetic oligonucleotide
gagguuauguguagaugag

SEQ ID NO: 1895602 - RNA, 19 nt, Artificial Sequence
  Description of Artificial Sequence: Synthetic oligonucleotide
aggucauaacggaagggac

SEQ ID NO: 1895603 - RNA, 19 nt, Artificial Sequence
  Description of Artificial Sequence: Synthetic oligonucleotide
ggugacaucagcagaguag

SEQ ID NO: 1895604 - RNA, 19 nt, Artificial Sequence
  Description of Artificial Sequence: Synthetic oligonucleotide
agccaucccugccauugcc

SEQ ID NO: 1895605 - RNA, 19 nt, Artificial Sequence
  Description of Artificial Sequence: Synthetic oligonucleotide
agauugcguacgugcaggg

SEQ ID NO: 1895606 - RNA, 19 nt, Artificial Sequence
  Description of Artificial Sequence: Synthetic oligonucleotide
ugcccuuaggcguugccug

SEQ ID NO: 1895607 - RNA, 19 nt, Artificial Sequence
  Description of Artificial Sequence: Synthetic oligonucleotide
agcguuguccccguucuac

SEQ ID NO: 1895608 - RNA, 19 nt, Artificial Sequence
  Description of Artificial Sequence: Synthetic oligonucleotide
uguugggugccagaucugc

SEQ ID NO: 1895609 - RNA, 19 nt, Artificial Sequence
  Description of Artificial Sequence: Synthetic oligonucleotide
ucagcggcaaggaagcguu

SEQ ID NO: 1895610 - RNA, 19 nt, Artificial Sequence
  Description of Artificial Sequence: Synthetic oligonucleotide
auaacggaagggacugcgc

SEQ ID NO: 1895611 - RNA, 19 nt, Artificial Sequence
  Description of Artificial Sequence: Synthetic oligonucleotide
uuaggcguugccugcguac

SEQ ID NO: 1895612 - RNA, 19 nt, Artificial Sequence
  Description of Artificial Sequence: Synthetic oligonucleotide
agucucucgcuuugcuugg

SEQ ID NO: 1895613 - RNA, 19 nt, Artificial Sequence
  Description of Artificial Sequence: Synthetic oligonucleotide
ugucacggaauuccaccca

SEQ ID NO: 1895614 - RNA, 19 nt, Artificial Sequence
  Description of Artificial Sequence: Synthetic oligonucleotide
cuauagcugcuguugggug

SEQ ID NO: 1895615 - RNA, 19 nt, Artificial Sequence
  Description of Artificial Sequence: Synthetic oligonucleotide
cagauugcguacgugcagg

SEQ ID NO: 1895616 - RNA, 19 nt, Artificial Sequence
  Description of Artificial Sequence: Synthetic oligonucleotide
cugggcauuagccaggcga

SEQ ID NO: 1895617 - RNA, 19 nt, Artificial Sequence
  Description of Artificial Sequence: Synthetic oligonucleotide
ugcaggggacggaaucgcg

SEQ ID NO: 1895618 - RNA, 19 nt, Artificial Sequence
  Description of Artificial Sequence: Synthetic oligonucleotide
cuucgggcaccgaugggcg

SEQ ID NO: 1895619 - RNA, 19 nt, Artificial Sequence
  Description of Artificial Sequence: Synthetic oligonucleotide
aaagcgguccucggccugg

SEQ ID NO: 1895620 - RNA, 19 nt, Artificial Sequence
  Description of Artificial Sequence: Synthetic oligonucleotide
gucacggaauuccacccag

SEQ ID NO: 1895621 - RNA, 19 nt, Artificial Sequence
  Description of Artificial Sequence: Synthetic oligonucleotide
cuggcuauagcugcuguug

SEQ ID NO: 1895622 - RNA, 19 nt, Artificial Sequence
  Description of Artificial Sequence: Synthetic oligonucleotide
uguauaguccuugcuguau

SEQ ID NO: 1895623 - RNA, 19 nt, Artificial Sequence
  Description of Artificial Sequence: Synthetic oligonucleotide
gaaaacgcguccgaccuca

SEQ ID NO: 1895624 - RNA, 19 nt, Artificial Sequence
  Description of Artificial Sequence: Synthetic oligonucleotide
uccuugcuguauuuagcug

SEQ ID NO: 1895625 - RNA, 19 nt, Artificial Sequence
  Description of Artificial Sequence: Synthetic oligonucleotide
gacuuccacucaucaaggc

SEQ ID NO: 1895626 - RNA, 19 nt, Artificial Sequence
  Description of Artificial Sequence: Synthetic oligonucleotide
gacguugugcaaaugucca

SEQ ID NO: 1895627 - RNA, 19 nt, Artificial Sequence
  Description of Artificial Sequence: Synthetic oligonucleotide
aucgcggcgggacgugucc

SEQ ID NO: 1895628 - RNA, 19 nt, Artificial Sequence
  Description of Artificial Sequence: Synthetic oligonucleotide
uuggaucuggccugguccu

SEQ ID NO: 1895629 - RNA, 19 nt, Artificial Sequence
  Description of Artificial Sequence: Synthetic oligonucleotide
ccugccauugcccaauggg

SEQ ID NO: 1895630 - RNA, 19 nt, Artificial Sequence
  Description of Artificial Sequence: Synthetic oligonucleotide
gauugcguacgugcagggg

SEQ ID NO: 1895631 - RNA, 19 nt, Artificial Sequence
  Description of Artificial Sequence: Synthetic oligonucleotide
auggagguuauguguagau

SEQ ID NO: 1895632 - RNA, 19 nt, Artificial Sequence
  Description of Artificial Sequence: Synthetic oligonucleotide
cucggccuggaagaaaacg

SEQ ID NO: 1895633 - RNA, 19 nt, Artificial Sequence
  Description of Artificial Sequence: Synthetic oligonucleotide
uaccuggcgcucaaaggca

SEQ ID NO: 1895634 - RNA, 19 nt, Artificial Sequence
  Description of Artificial Sequence: Synthetic oligonucleotide
agaaaacgcguccgaccuc

SEQ ID NO: 1895635 - RNA, 19 nt, Artificial Sequence
  Description of Artificial Sequence: Synthetic oligonucleotide
gucgcaggccgcuuccucg

SEQ ID NO: 1895636 - RNA, 19 nt, Artificial Sequence
  Description of Artificial Sequence: Synthetic oligonucleotide
cucguucccgcccuccugg

SEQ ID NO: 1895637 - RNA, 19 nt, Artificial Sequence
  Description of Artificial Sequence: Synthetic oligonucleotide
uacacaauacccggcacua

SEQ ID NO: 1895638 - RNA, 19 nt, Artificial Sequence
  Description of Artificial Sequence: Synthetic oligonucleotide
ucucgcuuugcuugggcaa

SEQ ID NO: 1895639 - RNA, 19 nt, Artificial Sequence
  Description of Artificial Sequence: Synthetic oligonucleotide
aggugggaccaaguaaaac

SEQ ID NO: 1895640 - RNA, 19 nt, Artificial Sequence
  Description of Artificial Sequence: Synthetic oligonucleotide
uguauuuagcugccuucuu

SEQ ID NO: 1895641 - RNA, 19 nt, Artificial Sequence
  Description of Artificial Sequence: Synthetic oligonucleotide
ggcaaggaagcguuguccc

SEQ ID NO: 1895642 - RNA, 19 nt, Artificial Sequence
  Description of Artificial Sequence: Synthetic oligonucleotide
uugcguacgugcaggggac

SEQ ID NO: 1895643 - RNA, 19 nt, Artificial Sequence
  Description of Artificial Sequence: Synthetic oligonucleotide
uguagacuggcugccacuc

SEQ ID NO: 1895644 - RNA, 19 nt, Artificial Sequence
  Description of Artificial Sequence: Synthetic oligonucleotide
ccaaguaaaacgauguaaa

SEQ ID NO: 1895645 - RNA, 19 nt, Artificial Sequence
  Description of Artificial Sequence: Synthetic oligonucleotide
cacucgcuuggcuaugcgc

SEQ ID NO: 1895646 - RNA, 19 nt, Artificial Sequence
  Description of Artificial Sequence: Synthetic oligonucleotide
augaacuguucuguggaca

SEQ ID NO: 1895647 - RNA, 19 nt, Artificial Sequence
  Description of Artificial Sequence: Synthetic oligonucleotide
guugugcaaauguccagga

SEQ ID NO: 1895648 - RNA, 19 nt, Artificial Sequence
  Description of Artificial Sequence: Synthetic oligonucleotide
aggaaucaaguagauggga

SEQ ID NO: 1895649 - RNA, 19 nt, Artificial Sequence
  Description of Artificial Sequence: Synthetic oligonucleotide
caggggacggaaucgcggc

SEQ ID NO: 1895650 - RNA, 19 nt, Artificial Sequence
  Description of Artificial Sequence: Synthetic oligonucleotide
cacccagccuucuguauag

SEQ ID NO: 1895651 - RNA, 19 nt, Artificial Sequence
  Description of Artificial Sequence: Synthetic oligonucleotide
agucccuugcuggcuaugg

SEQ ID NO: 1895652 - RNA, 19 nt, Artificial Sequence
  Description of Artificial Sequence: Synthetic oligonucleotide
uggaggggcuccaaauauc

SEQ ID NO: 1895653 - RNA, 19 nt, Artificial Sequence
  Description of Artificial Sequence: Synthetic oligonucleotide
acauagacuuccacucauc

SEQ ID NO: 1895654 - RNA, 19 nt, Artificial Sequence
  Description of Artificial Sequence: Synthetic oligonucleotide
guagacuggcugccacucg

SEQ ID NO: 1895655 - RNA, 19 nt, Artificial Sequence
  Description of Artificial Sequence: Synthetic oligonucleotide
ugugggacguugugcaaau

SEQ ID NO: 1895656 - RNA, 19 nt, Artificial Sequence
  Description of Artificial Sequence: Synthetic oligonucleotide
uuauguagacuggcugcca

SEQ ID NO: 1895657 - RNA, 19 nt, Artificial Sequence
  Description of Artificial Sequence: Synthetic oligonucleotide
ggcuaugguucuuucuugc

SEQ ID NO: 1895658 - RNA, 19 nt, Artificial Sequence
  Description of Artificial Sequence: Synthetic oligonucleotide
ugguggguuguguuccaug

SEQ ID NO: 1895659 - RNA, 19 nt, Artificial Sequence
  Description of Artificial Sequence: Synthetic oligonucleotide
cugcguucagcucugccuc

SEQ ID NO: 1895660 - RNA, 19 nt, Artificial Sequence
  Description of Artificial Sequence: Synthetic oligonucleotide
ggcuaugcgcuugucacgg

SEQ ID NO: 1895661 - RNA, 19 nt, Artificial Sequence
  Description of Artificial Sequence: Synthetic oligonucleotide
ucgcaggccgcuuccucgg

SEQ ID NO: 1895662 - RNA, 19 nt, Artificial Sequence
  Description of Artificial Sequence: Synthetic oligonucleotide
acuuaagguuccacagguc

SEQ ID NO: 1895663 - RNA, 19 nt, Artificial Sequence
  Description of Artificial Sequence: Synthetic oligonucleotide
uccccguucuacacuuuga

SEQ ID NO: 1895664 - RNA, 19 nt, Artificial Sequence
  Description of Artificial Sequence: Synthetic oligonucleotide
acggaaucgcggcgggacg

SEQ ID NO: 1895665 - RNA, 19 nt, Artificial Sequence
  Description of Artificial Sequence: Synthetic oligonucleotide
ugggaccaaguaaaacgau

SEQ ID NO: 1895666 - RNA, 19 nt, Artificial Sequence
  Description of Artificial Sequence: Synthetic oligonucleotide
cacucaucaaggcugaccu

SEQ ID NO: 1895667 - RNA, 19 nt, Artificial Sequence
  Description of Artificial Sequence: Synthetic oligonucleotide
ggacguugugcaaaugucc

SEQ ID NO: 1895668 - RNA, 19 nt, Artificial Sequence
  Description of Artificial Sequence: Synthetic oligonucleotide
gacggaaucgcggcgggac

SEQ ID NO: 1895669 - RNA, 19 nt, Artificial Sequence
  Description of Artificial Sequence: Synthetic oligonucleotide
ccuggaagaaaacgcgucc

SEQ ID NO: 1895670 - RNA, 19 nt, Artificial Sequence
  Description of Artificial Sequence: Synthetic oligonucleotide
cuuggcuaugcgcuuguca

SEQ ID NO: 1895671 - RNA, 19 nt, Artificial Sequence
  Description of Artificial Sequence: Synthetic oligonucleotide
ucugcccuuaggcguugcc

SEQ ID NO: 1895672 - RNA, 19 nt, Artificial Sequence
  Description of Artificial Sequence: Synthetic oligonucleotide
caucagcagaguaguucag

SEQ ID NO: 1895673 - RNA, 19 nt, Artificial Sequence
  Description of Artificial Sequence: Synthetic oligonucleotide
guuauguguagaugagaua

SEQ ID NO: 1895674 - RNA, 19 nt, Artificial Sequence
  Description of Artificial Sequence: Synthetic oligonucleotide
acaaagcgguccucggccu

SEQ ID NO: 1895675 - RNA, 19 nt, Artificial Sequence
  Description of Artificial Sequence: Synthetic oligonucleotide
ggacagucagccucuuucc

SEQ ID NO: 1895676 - RNA, 19 nt, Artificial Sequence
  Description of Artificial Sequence: Synthetic oligonucleotide
auaccaggagucccuugcu

SEQ ID NO: 1895677 - RNA, 19 nt, Artificial Sequence
  Description of Artificial Sequence: Synthetic oligonucleotide
ugcgccuucgggcaccgau

SEQ ID NO: 1895678 - RNA, 19 nt, Artificial Sequence
  Description of Artificial Sequence: Synthetic oligonucleotide
agguuauguguagaugaga

SEQ ID NO: 1895679 - RNA, 19 nt, Artificial Sequence
  Description of Artificial Sequence: Synthetic oligonucleotide
gagauaacauagacuucca

SEQ ID NO: 1895680 - RNA, 19 nt, Artificial Sequence
  Description of Artificial Sequence: Synthetic oligonucleotide
ggggcuccaaauauccugg

SEQ ID NO: 1895681 - RNA, 19 nt, Artificial Sequence
  Description of Artificial Sequence: Synthetic oligonucleotide
uuguccccguucuacacuu

SEQ ID NO: 1895682 - RNA, 19 nt, Artificial Sequence
  Description of Artificial Sequence: Synthetic oligonucleotide
ucgggcgaguagcaucccc

SEQ ID NO: 1895683 - RNA, 19 nt, Artificial Sequence
  Description of Artificial Sequence: Synthetic oligonucleotide
accgaugggcguguuaugu

SEQ ID NO: 1895684 - RNA, 19 nt, Artificial Sequence
  Description of Artificial Sequence: Synthetic oligonucleotide
acaauacccggcacuaccu

SEQ ID NO: 1895685 - RNA, 19 nt, Artificial Sequence
  Description of Artificial Sequence: Synthetic oligonucleotide
acacaauacccggcacuac

SEQ ID NO: 1895686 - RNA, 19 nt, Artificial Sequence
  Description of Artificial Sequence: Synthetic oligonucleotide
gggaccaaguaaaacgaug

SEQ ID NO: 1895687 - RNA, 19 nt, Artificial Sequence
  Description of Artificial Sequence: Synthetic oligonucleotide
cuggcgcucaaaggcaagg

SEQ ID NO: 1895688 - RNA, 19 nt, Artificial Sequence
  Description of Artificial Sequence: Synthetic oligonucleotide
agcagauugcguacgugca

SEQ ID NO: 1895689 - RNA, 19 nt, Artificial Sequence
  Description of Artificial Sequence: Synthetic oligonucleotide
accguaggcgcugagcaga

SEQ ID NO: 1895690 - RNA, 19 nt, Artificial Sequence
  Description of Artificial Sequence: Synthetic oligonucleotide
gcagauugcguacgugcag

SEQ ID NO: 1895691 - RNA, 19 nt, Artificial Sequence
  Description of Artificial Sequence: Synthetic oligonucleotide
guacacaauacccggcacu

SEQ ID NO: 1895692 - RNA, 19 nt, Artificial Sequence
  Description of Artificial Sequence: Synthetic oligonucleotide
ucauaacggaagggacugc

SEQ ID NO: 1895693 - RNA, 19 nt, Artificial Sequence
  Description of Artificial Sequence: Synthetic oligonucleotide
aggcgagcucguucccgcc

SEQ ID NO: 1895694 - RNA, 19 nt, Artificial Sequence
  Description of Artificial Sequence: Synthetic oligonucleotide
cucaccguaggcgcugagc

SEQ ID NO: 1895695 - RNA, 19 nt, Artificial Sequence
  Description of Artificial Sequence: Synthetic oligonucleotide
aggcgcugagcagauugcg

SEQ ID NO: 1895696 - RNA, 19 nt, Artificial Sequence
  Description of Artificial Sequence: Synthetic oligonucleotide
ucggacuccuccugauccu

SEQ ID NO: 1895697 - RNA, 19 nt, Artificial Sequence
  Description of Artificial Sequence: Synthetic oligonucleotide
aaaacgcguccgaccucac

SEQ ID NO: 1895698 - RNA, 19 nt, Artificial Sequence
  Description of Artificial Sequence: Synthetic oligonucleotide
guauuuagcugccuucuuu

SEQ ID NO: 1895699 - RNA, 19 nt, Artificial Sequence
  Description of Artificial Sequence: Synthetic oligonucleotide
acuauucgggcgaguagca

SEQ ID NO: 1895700 - RNA, 19 nt, Artificial Sequence
  Description of Artificial Sequence: Synthetic oligonucleotide
ucugugggacguugugcaa

SEQ ID NO: 1895701 - RNA, 19 nt, Artificial Sequence
  Description of Artificial Sequence: Synthetic oligonucleotide
cucgcuuugcuugggcaac

SEQ ID NO: 1895702 - RNA, 19 nt, Artificial Sequence
  Description of Artificial Sequence: Synthetic oligonucleotide
gguacacaauacccggcac

SEQ ID NO: 1895703 - RNA, 19 nt, Artificial Sequence
  Description of Artificial Sequence: Synthetic oligonucleotide
auacccggcacuaccuucu

SEQ ID NO: 1895704 - RNA, 19 nt, Artificial Sequence
  Description of Artificial Sequence: Synthetic oligonucleotide
gaugggcguguuauguaga

SEQ ID NO: 1895705 - RNA, 19 nt, Artificial Sequence
  Description of Artificial Sequence: Synthetic oligonucleotide
gguuauguguagaugagau

SEQ ID NO: 1895706 - RNA, 19 nt, Artificial Sequence
  Description of Artificial Sequence: Synthetic oligonucleotide
ggcaaggagcccucuguug

SEQ ID NO: 1895707 - RNA, 19 nt, Artificial Sequence
  Description of Artificial Sequence: Synthetic oligonucleotide
cguugugcaaauguccagg

SEQ ID NO: 1895708 - RNA, 19 nt, Artificial Sequence
  Description of Artificial Sequence: Synthetic oligonucleotide
ugcguacgugcaggggacg

SEQ ID NO: 1895709 - RNA, 19 nt, Artificial Sequence
  Description of Artificial Sequence: Synthetic oligonucleotide
ccgaccucaccguaggcgc

SEQ ID NO: 1895710 - RNA, 19 nt, Artificial Sequence
  Description of Artificial Sequence: Synthetic oligonucleotide
agcggcaaggaagcguugu

SEQ ID NO: 1895711 - RNA, 19 nt, Artificial Sequence
  Description of Artificial Sequence: Synthetic oligonucleotide
cagccuucuguauaguccu

SEQ ID NO: 1895712 - RNA, 19 nt, Artificial Sequence
  Description of Artificial Sequence: Synthetic oligonucleotide
uuccacccagccuucugua

SEQ ID NO: 1895713 - RNA, 19 nt, Artificial Sequence
  Description of Artificial Sequence: Synthetic oligonucleotide
aucaaguagaugggaugaa

SEQ ID NO: 1895714 - RNA, 19 nt, Artificial Sequence
  Description of Artificial Sequence: Synthetic oligonucleotide
ugggcguguuauguagacu

SEQ ID NO: 1895715 - RNA, 19 nt, Artificial Sequence
  Description of Artificial Sequence: Synthetic oligonucleotide
cccguucuacacuuugaag

SEQ ID NO: 1895716 - RNA, 19 nt, Artificial Sequence
  Description of Artificial Sequence: Synthetic oligonucleotide
ccuucgggcaccgaugggc

SEQ ID NO: 1895717 - RNA, 19 nt, Artificial Sequence
  Description of Artificial Sequence: Synthetic oligonucleotide
acccggcacuaccuucuuc

SEQ ID NO: 1895718 - RNA, 19 nt, Artificial Sequence
  Description of Artificial Sequence: Synthetic oligonucleotide
ggaagcguuguccccguuc

SEQ ID NO: 1895719 - RNA, 19 nt, Artificial Sequence
  Description of Artificial Sequence: Synthetic oligonucleotide
ggcguguuauguagacugg

SEQ ID NO: 1895720 - RNA, 19 nt, Artificial Sequence
  Description of Artificial Sequence: Synthetic oligonucleotide
ucgcuuugcuugggcaacc

SEQ ID NO: 1895721 - RNA, 19 nt, Artificial Sequence
  Description of Artificial Sequence: Synthetic oligonucleotide
caaagcgguccucggccug

SEQ ID NO: 1895722 - RNA, 19 nt, Artificial Sequence
  Description of Artificial Sequence: Synthetic oligonucleotide
gggacugcgccuucgggca

SEQ ID NO: 1895723 - RNA, 19 nt, Artificial Sequence
  Description of Artificial Sequence: Synthetic oligonucleotide
cgaugggcguguuauguag

SEQ ID NO: 1895724 - RNA, 19 nt, Artificial Sequence
  Description of Artificial Sequence: Synthetic oligonucleotide
gcaggggacggaaucgcgg

SEQ ID NO: 1895725 - RNA, 19 nt, Artificial Sequence
  Description of Artificial Sequence: Synthetic oligonucleotide
ggaucuggccugguccugg

SEQ ID NO: 1895726 - RNA, 19 nt, Artificial Sequence
  Description of Artificial Sequence: Synthetic oligonucleotide
cagcagaaaccaacacuga

SEQ ID NO: 1895727 - RNA, 19 nt, Artificial Sequence
  Description of Artificial Sequence: Synthetic oligonucleotide
ggcaaccucugcccuuagg

SEQ ID NO: 1895728 - RNA, 19 nt, Artificial Sequence
  Description of Artificial Sequence: Synthetic oligonucleotide
cuguugggugccagaucug

SEQ ID NO: 1895729 - RNA, 19 nt, Artificial Sequence
  Description of Artificial Sequence: Synthetic oligonucleotide
gaccucaccguaggcgcug

SEQ ID NO: 1895730 - RNA, 19 nt, Artificial Sequence
  Description of Artificial Sequence: Synthetic oligonucleotide
ccaaauauccuggcaagga

SEQ ID NO: 1895731 - RNA, 19 nt, Artificial Sequence
  Description of Artificial Sequence: Synthetic oligonucleotide
cgauguaaauacuuaaggu

SEQ ID NO: 1895732 - RNA, 19 nt, Artificial Sequence
  Description of Artificial Sequence: Synthetic oligonucleotide
cacugaccucagauaccag

SEQ ID NO: 1895733 - RNA, 19 nt, Artificial Sequence
  Description of Artificial Sequence: Synthetic oligonucleotide
guucgcugaggugggacca

SEQ ID NO: 1895734 - RNA, 19 nt, Artificial Sequence
  Description of Artificial Sequence: Synthetic oligonucleotide
ggaacuauucgggcgagua

SEQ ID NO: 1895735 - RNA, 19 nt, Artificial Sequence
  Description of Artificial Sequence: Synthetic oligonucleotide
gugcaggggacggaaucgc

SEQ ID NO: 1895736 - RNA, 19 nt, Artificial Sequence
  Description of Artificial Sequence: Synthetic oligonucleotide
ggaagggacugcgccuucg

SEQ ID NO: 1895737 - RNA, 19 nt, Artificial Sequence
  Description of Artificial Sequence: Synthetic oligonucleotide
gcguguuauguagacuggc

SEQ ID NO: 1895738 - RNA, 19 nt, Artificial Sequence
  Description of Artificial Sequence: Synthetic oligonucleotide
ggggacggaaucgcggcgg

SEQ ID NO: 1895739 - RNA, 19 nt, Artificial Sequence
  Description of Artificial Sequence: Synthetic oligonucleotide
guggaggggcuccaaauau

SEQ ID NO: 1895740 - RNA, 19 nt, Artificial Sequence
  Description of Artificial Sequence: Synthetic oligonucleotide
guauaguccuugcuguauu

SEQ ID NO: 1895741 - RNA, 19 nt, Artificial Sequence
  Description of Artificial Sequence: Synthetic oligonucleotide
guguucgcugaggugggac

SEQ ID NO: 1895742 - RNA, 19 nt, Artificial Sequence
  Description of Artificial Sequence: Synthetic oligonucleotide
guuguccccguucuacacu

SEQ ID NO: 1895743 - RNA, 19 nt, Artificial Sequence
  Description of Artificial Sequence: Synthetic oligonucleotide
caggaacuauucgggcgag

SEQ ID NO: 1895744 - RNA, 19 nt, Artificial Sequence
  Description of Artificial Sequence: Synthetic oligonucleotide
ccacucaucaaggcugacc

SEQ ID NO: 1895745 - RNA, 19 nt, Artificial Sequence
  Description of Artificial Sequence: Synthetic oligonucleotide
uggaucuggccugguccug

SEQ ID NO: 1895746 - RNA, 19 nt, Artificial Sequence
  Description of Artificial Sequence: Synthetic oligonucleotide
ucguucccgcccuccuggc

SEQ ID NO: 1895747 - RNA, 19 nt, Artificial Sequence
  Description of Artificial Sequence: Synthetic oligonucleotide
aggcguugccugcguaccu

SEQ ID NO: 1895748 - RNA, 19 nt, Artificial Sequence
  Description of Artificial Sequence: Synthetic oligonucleotide
gacugcgccuucgggcacc

SEQ ID NO: 1895749 - RNA, 19 nt, Artificial Sequence
  Description of Artificial Sequence: Synthetic oligonucleotide
gcucugugggacguugugc

SEQ ID NO: 1895750 - RNA, 19 nt, Artificial Sequence
  Description of Artificial Sequence: Synthetic oligonucleotide
gcguugccugcguaccugg

SEQ ID NO: 1895751 - RNA, 19 nt, Artificial Sequence
  Description of Artificial Sequence: Synthetic oligonucleotide
uucgggcaccgaugggcgu

SEQ ID NO: 1895752 - RNA, 19 nt, Artificial Sequence
  Description of Artificial Sequence: Synthetic oligonucleotide
ggaaucaaguagaugggau

SEQ ID NO: 1895753 - RNA, 19 nt, Artificial Sequence
  Description of Artificial Sequence: Synthetic oligonucleotide
gggacggaaucgcggcggg

SEQ ID NO: 1895754 - RNA, 19 nt, Artificial Sequence
  Description of Artificial Sequence: Synthetic oligonucleotide
gcgucucacaaagcggucc

SEQ ID NO: 1895755 - RNA, 19 nt, Artificial Sequence
  Description of Artificial Sequence: Synthetic oligonucleotide
cgggacgugucccagguac

SEQ ID NO: 1895756 - RNA, 19 nt, Artificial Sequence
  Description of Artificial Sequence: Synthetic oligonucleotide
gguggaggggcuccaaaua

SEQ ID NO: 1895757 - RNA, 19 nt, Artificial Sequence
  Description of Artificial Sequence: Synthetic oligonucleotide
caccgaugggcguguuaug

SEQ ID NO: 1895758 - RNA, 19 nt, Artificial Sequence
  Description of Artificial Sequence: Synthetic oligonucleotide
gcugucgcaggccgcuucc

SEQ ID NO: 1895759 - RNA, 19 nt, Artificial Sequence
  Description of Artificial Sequence: Synthetic oligonucleotide
acggaagggacugcgccuu

SEQ ID NO: 1895760 - RNA, 19 nt, Artificial Sequence
  Description of Artificial Sequence: Synthetic oligonucleotide
gaggugggaccaaguaaaa

SEQ ID NO: 1895761 - RNA, 19 nt, Artificial Sequence
  Description of Artificial Sequence: Synthetic oligonucleotide
uucgcugaggugggaccaa

SEQ ID NO: 1895762 - RNA, 19 nt, Artificial Sequence
  Description of Artificial Sequence: Synthetic oligonucleotide
gccuggaagaaaacgcguc

SEQ ID NO: 1895763 - RNA, 19 nt, Artificial Sequence
  Description of Artificial Sequence: Synthetic oligonucleotide
guccgaccucaccguaggc

SEQ ID NO: 1895764 - RNA, 19 nt, Artificial Sequence
  Description of Artificial Sequence: Synthetic oligonucleotide
cgugcaggggacggaaucg

SEQ ID NO: 1895765 - RNA, 19 nt, Artificial Sequence
  Description of Artificial Sequence: Synthetic oligonucleotide
aggaacuauucgggcgagu

SEQ ID NO: 1895766 - RNA, 19 nt, Artificial Sequence
  Description of Artificial Sequence: Synthetic oligonucleotide
gcuauagcugcuguugggu

SEQ ID NO: 1895767 - RNA, 19 nt, Artificial Sequence
  Description of Artificial Sequence: Synthetic oligonucleotide
gcguacgugcaggggacgg

SEQ ID NO: 1895768 - RNA, 19 nt, Artificial Sequence
  Description of Artificial Sequence: Synthetic oligonucleotide
gcccuuaggcguugccugc

SEQ ID NO: 1895769 - RNA, 19 nt, Artificial Sequence
  Description of Artificial Sequence: Synthetic oligonucleotide
uccacucaucaaggcugac

SEQ ID NO: 1895770 - RNA, 19 nt, Artificial Sequence
  Description of Artificial Sequence: Synthetic oligonucleotide
cguccgaccucaccguagg

SEQ ID NO: 1895771 - RNA, 19 nt, Artificial Sequence
  Description of Artificial Sequence: Synthetic oligonucleotide
uucgggcgaguagcauccc

SEQ ID NO: 1895772 - RNA, 19 nt, Artificial Sequence
  Description of Artificial Sequence: Synthetic oligonucleotide
uguccccguucuacacuuu

SEQ ID NO: 1895773 - RNA, 19 nt, Artificial Sequence
  Description of Artificial Sequence: Synthetic oligonucleotide
ggcguugccugcguaccug

SEQ ID NO: 1895774 - RNA, 19 nt, Artificial Sequence
  Description of Artificial Sequence: Synthetic oligonucleotide
uacccggcacuaccuucuu

SEQ ID NO: 1895775 - RNA, 19 nt, Artificial Sequence
  Description of Artificial Sequence: Synthetic oligonucleotide
cuuaggcguugccugcgua

SEQ ID NO: 1895776 - RNA, 19 nt, Artificial Sequence
  Description of Artificial Sequence: Synthetic oligonucleotide
gaacuguucuguggacagu

SEQ ID NO: 1895777 - RNA, 19 nt, Artificial Sequence
  Description of Artificial Sequence: Synthetic oligonucleotide
ucgcggcgggacguguccc

SEQ ID NO: 1895778 - RNA, 19 nt, Artificial Sequence
  Description of Artificial Sequence: Synthetic oligonucleotide
cagcggcaaggaagcguug

SEQ ID NO: 1895779 - RNA, 19 nt, Artificial Sequence
  Description of Artificial Sequence: Synthetic oligonucleotide
gcguuguccccguucuaca

SEQ ID NO: 1895780 - RNA, 19 nt, Artificial Sequence
  Description of Artificial Sequence: Synthetic oligonucleotide
gugggacguugugcaaaug

SEQ ID NO: 1895781 - RNA, 19 nt, Artificial Sequence
  Description of Artificial Sequence: Synthetic oligonucleotide
cggcaaggaagcguugucc

SEQ ID NO: 1895782 - RNA, 19 nt, Artificial Sequence
  Description of Artificial Sequence: Synthetic oligonucleotide
cucagcggcaaggaagcgu

SEQ ID NO: 1895783 - RNA, 19 nt, Artificial Sequence
  Description of Artificial Sequence: Synthetic oligonucleotide
ccacucgcuuggcuaugcg

SEQ ID NO: 1895784 - RNA, 19 nt, Artificial Sequence
  Description of Artificial Sequence: Synthetic oligonucleotide
gcggcaaggaagcguuguc

SEQ ID NO: 1895785 - RNA, 19 nt, Artificial Sequence
  Description of Artificial Sequence: Synthetic oligonucleotide
augguggguuguguuccau

SEQ ID NO: 1895786 - RNA, 19 nt, Artificial Sequence
  Description of Artificial Sequence: Synthetic oligonucleotide
ccaggcgagcucguucccg

SEQ ID NO: 1895787 - RNA, 19 nt, Artificial Sequence
  Description of Artificial Sequence: Synthetic oligonucleotide
cccuuaggcguugccugcg

SEQ ID NO: 1895788 - RNA, 19 nt, Artificial Sequence
  Description of Artificial Sequence: Synthetic oligonucleotide
ggaaucgcggcgggacgug

SEQ ID NO: 1895789 - RNA, 19 nt, Artificial Sequence
  Description of Artificial Sequence: Synthetic oligonucleotide
ugcguaccuggcgcucaaa

SEQ ID NO: 1895790 - RNA, 19 nt, Artificial Sequence
  Description of Artificial Sequence: Synthetic oligonucleotide
cccugccauugcccaaugg

SEQ ID NO: 1895791 - RNA, 19 nt, Artificial Sequence
  Description of Artificial Sequence: Synthetic oligonucleotide
cguucuacacuuugaagau

SEQ ID NO: 1895792 - RNA, 19 nt, Artificial Sequence
  Description of Artificial Sequence: Synthetic oligonucleotide
cucugcccuuaggcguugc

SEQ ID NO: 1895793 - RNA, 19 nt, Artificial Sequence
  Description of Artificial Sequence: Synthetic oligonucleotide
gcguccgaccucaccguag

SEQ ID NO: 1895794 - RNA, 19 nt, Artificial Sequence
  Description of Artificial Sequence: Synthetic oligonucleotide
cugcccuuaggcguugccu

SEQ ID NO: 1895795 - RNA, 19 nt, Artificial Sequence
  Description of Artificial Sequence: Synthetic oligonucleotide
cguguuauguagacuggcu

SEQ ID NO: 1895796 - RNA, 19 nt, Artificial Sequence
  Description of Artificial Sequence: Synthetic oligonucleotide
accucaccguaggcgcuga

SEQ ID NO: 1895797 - RNA, 19 nt, Artificial Sequence
  Description of Artificial Sequence: Synthetic oligonucleotide
aggaagcguuguccccguu

SEQ ID NO: 1895798 - RNA, 19 nt, Artificial Sequence
  Description of Artificial Sequence: Synthetic oligonucleotide
caauacccggcacuaccuu

SEQ ID NO: 1895799 - RNA, 19 nt, Artificial Sequence
  Description of Artificial Sequence: Synthetic oligonucleotide
gaaucgcggcgggacgugu

SEQ ID NO: 1895800 - RNA, 19 nt, Artificial Sequence
  Description of Artificial Sequence: Synthetic oligonucleotide
ggcgggacgugucccaggu

SEQ ID NO: 1895801 - RNA, 19 nt, Artificial Sequence
  Description of Artificial Sequence: Synthetic oligonucleotide
gcgccuucgggcaccgaug

SEQ ID NO: 1895802 - RNA, 19 nt, Artificial Sequence
  Description of Artificial Sequence: Synthetic oligonucleotide
ccucggccuggaagaaaac

SEQ ID NO: 1895803 - RNA, 19 nt, Artificial Sequence
  Description of Artificial Sequence: Synthetic oligonucleotide
gccaggcgagcucguuccc

SEQ ID NO: 1895804 - RNA, 19 nt, Artificial Sequence
  Description of Artificial Sequence: Synthetic oligonucleotide
gggacgugucccagguaca

SEQ ID NO: 1895805 - RNA, 19 nt, Artificial Sequence
  Description of Artificial Sequence: Synthetic oligonucleotide
ggacugcgccuucgggcac

SEQ ID NO: 1895806 - RNA, 19 nt, Artificial Sequence
  Description of Artificial Sequence: Synthetic oligonucleotide
ccacccagccuucuguaua

SEQ ID NO: 1895807 - RNA, 19 nt, Artificial Sequence
  Description of Artificial Sequence: Synthetic oligonucleotide
cuauucgggcgaguagcau

SEQ ID NO: 1895808 - RNA, 19 nt, Artificial Sequence
  Description of Artificial Sequence: Synthetic oligonucleotide
cugcguaccuggcgcucaa

SEQ ID NO: 1895809 - RNA, 19 nt, Artificial Sequence
  Description of Artificial Sequence: Synthetic oligonucleotide
guccucggccuggaagaaa

SEQ ID NO: 1895810 - RNA, 19 nt, Artificial Sequence
  Description of Artificial Sequence: Synthetic oligonucleotide
ccucagcggcaaggaagcg

SEQ ID NO: 1895811 - RNA, 19 nt, Artificial Sequence
  Description of Artificial Sequence: Synthetic oligonucleotide
ccgcccuccuggccgugcg

SEQ ID NO: 1895812 - RNA, 19 nt, Artificial Sequence
  Description of Artificial Sequence: Synthetic oligonucleotide
gguguucgcugagguggga

SEQ ID NO: 1895813 - RNA, 19 nt, Artificial Sequence
  Description of Artificial Sequence: Synthetic oligonucleotide
gccauguggcacagaugga

SEQ ID NO: 1895814 - RNA, 19 nt, Artificial Sequence
  Description of Artificial Sequence: Synthetic oligonucleotide
ggcaccgaugggcguguua

SEQ ID NO: 1895815 - RNA, 19 nt, Artificial Sequence
  Description of Artificial Sequence: Synthetic oligonucleotide
ccgaugggcguguuaugua

SEQ ID NO: 1895816 - RNA, 19 nt, Artificial Sequence
  Description of Artificial Sequence: Synthetic oligonucleotide
cguucccgcccuccuggcc

SEQ ID NO: 1895817 - RNA, 19 nt, Artificial Sequence
  Description of Artificial Sequence: Synthetic oligonucleotide
gcgagcucguucccgcccu

SEQ ID NO: 1895818 - RNA, 19 nt, Artificial Sequence
  Description of Artificial Sequence: Synthetic oligonucleotide
ccucaccguaggcgcugag

SEQ ID NO: 1895819 - RNA, 19 nt, Artificial Sequence
  Description of Artificial Sequence: Synthetic oligonucleotide
ccugcguaccuggcgcuca

SEQ ID NO: 1895820 - RNA, 19 nt, Artificial Sequence
  Description of Artificial Sequence: Synthetic oligonucleotide
ggacggaaucgcggcggga

SEQ ID NO: 1895821 - RNA, 19 nt, Artificial Sequence
  Description of Artificial Sequence: Synthetic oligonucleotide
ucccgcccuccuggccgug

SEQ ID NO: 1895822 - RNA, 19 nt, Artificial Sequence
  Description of Artificial Sequence: Synthetic oligonucleotide
gccugcguaccuggcgcuc

SEQ ID NO: 1895823 - RNA, 19 nt, Artificial Sequence
  Description of Artificial Sequence: Synthetic oligonucleotide
cgcucaaaggcaagguguu

SEQ ID NO: 1895824 - RNA, 19 nt, Artificial Sequence
  Description of Artificial Sequence: Synthetic oligonucleotide
ccucugcguucagcucugc

SEQ ID NO: 1895825 - RNA, 19 nt, Artificial Sequence
  Description of Artificial Sequence: Synthetic oligonucleotide
cauugcccaaugggcucau

SEQ ID NO: 1895826 - RNA, 19 nt, Artificial Sequence
  Description of Artificial Sequence: Synthetic oligonucleotide
cugucgcaggccgcuuccu

SEQ ID NO: 1895827 - RNA, 19 nt, Artificial Sequence
  Description of Artificial Sequence: Synthetic oligonucleotide
ccuuaggcguugccugcgu

SEQ ID NO: 1895828 - RNA, 19 nt, Artificial Sequence
  Description of Artificial Sequence: Synthetic oligonucleotide
cgagcucguucccgcccuc

SEQ ID NO: 1895829 - RNA, 19 nt, Artificial Sequence
  Description of Artificial Sequence: Synthetic oligonucleotide
cgcggcgggacguguccca

SEQ ID NO: 1895830 - RNA, 19 nt, Artificial Sequence
  Description of Artificial Sequence: Synthetic oligonucleotide
ccguaggcgcugagcagau

SEQ ID NO: 1895831 - RNA, 19 nt, Artificial Sequence
  Description of Artificial Sequence: Synthetic oligonucleotide
cgaccucaccguaggcgcu

SEQ ID NO: 1895832 - RNA, 19 nt, Artificial Sequence
  Description of Artificial Sequence: Synthetic oligonucleotide
cggaaucgcggcgggacgu

SEQ ID NO: 1895833 - RNA, 19 nt, Artificial Sequence
  Description of Artificial Sequence: Synthetic oligonucleotide
cugcgccuucgggcaccga

SEQ ID NO: 1895834 - RNA, 19 nt, Artificial Sequence
  Description of Artificial Sequence: Synthetic oligonucleotide
cgcguccgaccucaccgua

SEQ ID NO: 1895835 - RNA, 19 nt, Artificial Sequence
  Description of Artificial Sequence: Synthetic oligonucleotide
cgcuuugcuugggcaaccu

SEQ ID NO: 1895836 - RNA, 19 nt, Artificial Sequence
  Description of Artificial Sequence: Synthetic oligonucleotide
gggcaccgaugggcguguu

SEQ ID NO: 1895837 - RNA, 19 nt, Artificial Sequence
  Description of Artificial Sequence: Synthetic oligonucleotide
ucuaggagaacuaauaagg

SEQ ID NO: 1895838 - RNA, 19 nt, Artificial Sequence
  Description of Artificial Sequence: Synthetic oligonucleotide
agcaaaguuaccuucacgc

SEQ ID NO: 1895839 - RNA, 19 nt, Artificial Sequence
  Description of Artificial Sequence: Synthetic oligonucleotide
acuuacaaaguauuugugc

SEQ ID NO: 1895840 - RNA, 19 nt, Artificial Sequence
  Description of Artificial Sequence: Synthetic oligonucleotide
aauaaaaggacacccagaa

SEQ ID NO: 1895841 - RNA, 19 nt, Artificial Sequence
  Description of Artificial Sequence: Synthetic oligonucleotide
uucaacuacacacagaaau

SEQ ID NO: 1895842 - RNA, 19 nt, Artificial Sequence
  Description of Artificial Sequence: Synthetic oligonucleotide
aauaagguuuuccuaagca

SEQ ID NO: 1895843 - RNA, 19 nt, Artificial Sequence
  Description of Artificial Sequence: Synthetic oligonucleotide
ugaaagucuacccagaaua

SEQ ID NO: 1895844 - RNA, 19 nt, Artificial Sequence
  Description of Artificial Sequence: Synthetic oligonucleotide
ucaaccaugagaaacgccu

SEQ ID NO: 1895845 - RNA, 19 nt, Artificial Sequence
  Description of Artificial Sequence: Synthetic oligonucleotide
aacagaaggacugguaccc

SEQ ID NO: 1895846 - RNA, 19 nt, Artificial Sequence
  Description of Artificial Sequence: Synthetic oligonucleotide
uucaaggcauacaugaucc

SEQ ID NO: 1895847 - RNA, 19 nt, Artificial Sequence
  Description of Artificial Sequence: Synthetic oligonucleotide
agaaugaauuuucagaacu

SEQ ID NO: 1895848 - RNA, 19 nt, Artificial Sequence
  Description of Artificial Sequence: Synthetic oligonucleotide
agaacuaauaagguuuucc

SEQ ID NO: 1895849 - RNA, 19 nt, Artificial Sequence
  Description of Artificial Sequence: Synthetic oligonucleotide
auaagguuuuccuaagcac

SEQ ID NO: 1895850 - RNA, 19 nt, Artificial Sequence
  Description of Artificial Sequence: Synthetic oligonucleotide
aaugccauguucagaagcc

SEQ ID NO: 1895851 - RNA, 19 nt, Artificial Sequence
  Description of Artificial Sequence: Synthetic oligonucleotide
auacuuuugcuucaacuac

SEQ ID NO: 1895852 - RNA, 19 nt, Artificial Sequence
  Description of Artificial Sequence: Synthetic oligonucleotide
ugaauuuucagaacuuaca

SEQ ID NO: 1895853 - RNA, 19 nt, Artificial Sequence
  Description of Artificial Sequence: Synthetic oligonucleotide
aaaguuaccuucacgcagc

SEQ ID NO: 1895854 - RNA, 19 nt, Artificial Sequence
  Description of Artificial Sequence: Synthetic oligonucleotide
auuguggugacgcuggccg

SEQ ID NO: 1895855 - RNA, 19 nt, Artificial Sequence
  Description of Artificial Sequence: Synthetic oligonucleotide
gaaagggccagacagauga

SEQ ID NO: 1895856 - RNA, 19 nt, Artificial Sequence
  Description of Artificial Sequence: Synthetic oligonucleotide
aaugguuuacaggagcagg

SEQ ID NO: 1895857 - RNA, 19 nt, Artificial Sequence
  Description of Artificial Sequence: Synthetic oligonucleotide
auguucagaagccuugagc

SEQ ID NO: 1895858 - RNA, 19 nt, Artificial Sequence
  Description of Artificial Sequence: Synthetic oligonucleotide
acuaauaagguuuuccuaa

SEQ ID NO: 1895859 - RNA, 19 nt, Artificial Sequence
  Description of Artificial Sequence: Synthetic oligonucleotide
augagaaacgccugcgugc

SEQ ID NO: 1895860 - RNA, 19 nt, Artificial Sequence
  Description of Artificial Sequence: Synthetic oligonucleotide
aagugugaaugccauguuc

SEQ ID NO: 1895861 - RNA, 19 nt, Artificial Sequence
  Description of Artificial Sequence: Synthetic oligonucleotide
aaccaugagaaacgccugc

SEQ ID NO: 1895862 - RNA, 19 nt, Artificial Sequence
  Description of Artificial Sequence: Synthetic oligonucleotide
uuugcuucaacuacacaca

SEQ ID NO: 1895863 - RNA, 19 nt, Artificial Sequence
  Description of Artificial Sequence: Synthetic oligonucleotide
aauguguccucucagcagu

SEQ ID NO: 1895864 - RNA, 19 nt, Artificial Sequence
  Description of Artificial Sequence: Synthetic oligonucleotide
agaccaaaccagcugauuc

SEQ ID NO: 1895865 - RNA, 19 nt, Artificial Sequence
  Description of Artificial Sequence: Synthetic oligonucleotide
accaagucguacuucaagg

SEQ ID NO: 1895866 - RNA, 19 nt, Artificial Sequence
  Description of Artificial Sequence: Synthetic oligonucleotide
uuaagcuucagcagugcgc

SEQ ID NO: 1895867 - RNA, 19 nt, Artificial Sequence
  Description of Artificial Sequence: Synthetic oligonucleotide
ucuuccgucccgcagaagc

SEQ ID NO: 1895868 - RNA, 19 nt, Artificial Sequence
  Description of Artificial Sequence: Synthetic oligonucleotide
uuacuugaaagucuaccca

SEQ ID NO: 1895869 - RNA, 19 nt, Artificial Sequence
  Description of Artificial Sequence: Synthetic oligonucleotide
cuuggugguggcuacacgg

SEQ ID NO: 1895870 - RNA, 19 nt, Artificial Sequence
  Description of Artificial Sequence: Synthetic oligonucleotide
agaacuuacaaaguauuug

SEQ ID NO: 1895871 - RNA, 19 nt, Artificial Sequence
  Description of Artificial Sequence: Synthetic oligonucleotide
aaggcccaguccuugaguc

SEQ ID NO: 1895872 - RNA, 19 nt, Artificial Sequence
  Description of Artificial Sequence: Synthetic oligonucleotide
gaaugccauguucagaagc

SEQ ID NO: 1895873 - RNA, 19 nt, Artificial Sequence
  Description of Artificial Sequence: Synthetic oligonucleotide
ugugacuccaucagggaca

SEQ ID NO: 1895874 - RNA, 19 nt, Artificial Sequence
  Description of Artificial Sequence: Synthetic oligonucleotide
ucugacaccuucuucuacc

SEQ ID NO: 1895875 - RNA, 19 nt, Artificial Sequence
  Description of Artificial Sequence: Synthetic oligonucleotide
aggugagagagaaagggcc

SEQ ID NO: 1895876 - RNA, 19 nt, Artificial Sequence
  Description of Artificial Sequence: Synthetic oligonucleotide
aacccucuccucuacaaug

SEQ ID NO: 1895877 - RNA, 19 nt, Artificial Sequence
  Description of Artificial Sequence: Synthetic oligonucleotide
acaaaguauuugugcaugg

SEQ ID NO: 1895878 - RNA, 19 nt, Artificial Sequence
  Description of Artificial Sequence: Synthetic oligonucleotide
uaauaagguuuuccuaagc

SEQ ID NO: 1895879 - RNA, 19 nt, Artificial Sequence
  Description of Artificial Sequence: Synthetic oligonucleotide
cucuaggagaacuaauaag

SEQ ID NO: 1895880 - RNA, 19 nt, Artificial Sequence
  Description of Artificial Sequence: Synthetic oligonucleotide
aaggcauacaugauccuuc

SEQ ID NO: 1895881 - RNA, 19 nt, Artificial Sequence
  Description of Artificial Sequence: Synthetic oligonucleotide
agaagcccuggccugaugg

SEQ ID NO: 1895882 - RNA, 19 nt, Artificial Sequence
  Description of Artificial Sequence: Synthetic oligonucleotide
aacuaauaagguuuuccua

SEQ ID NO: 1895883 - RNA, 19 nt, Artificial Sequence
  Description of Artificial Sequence: Synthetic oligonucleotide
uaagcuucagcagugcgcc

SEQ ID NO: 1895884 - RNA, 19 nt, Artificial Sequence
  Description of Artificial Sequence: Synthetic oligonucleotide
gucuacccagaauaaaagg

SEQ ID NO: 1895885 - RNA, 19 nt, Artificial Sequence
  Description of Artificial Sequence: Synthetic oligonucleotide
cauuacuugaaagucuacc

SEQ ID NO: 1895886 - RNA, 19 nt, Artificial Sequence
  Description of Artificial Sequence: Synthetic oligonucleotide
aaacuggcucuuccguccc

SEQ ID NO: 1895887 - RNA, 19 nt, Artificial Sequence
  Description of Artificial Sequence: Synthetic oligonucleotide
augaauuuucagaacuuac

SEQ ID NO: 1895888 - RNA, 19 nt, Artificial Sequence
  Description of Artificial Sequence: Synthetic oligonucleotide
cuaauaagguuuuccuaag

SEQ ID NO: 1895889 - RNA, 19 nt, Artificial Sequence
  Description of Artificial Sequence: Synthetic oligonucleotide
agggcugauucuuccaggc

SEQ ID NO: 1895890 - RNA, 19 nt, Artificial Sequence
  Description of Artificial Sequence: Synthetic oligonucleotide
aaaaugguuuacaggagca

SEQ ID NO: 1895891 - RNA, 19 nt, Artificial Sequence
  Description of Artificial Sequence: Synthetic oligonucleotide
uacuuuugcuucaacuaca

SEQ ID NO: 1895892 - RNA, 19 nt, Artificial Sequence
  Description of Artificial Sequence: Synthetic oligonucleotide
uuucccaggagaacagaag

SEQ ID NO: 1895893 - RNA, 19 nt, Artificial Sequence
  Description of Artificial Sequence: Synthetic oligonucleotide
cauggcugcggcaacaccc

SEQ ID NO: 1895894 - RNA, 19 nt, Artificial Sequence
  Description of Artificial Sequence: Synthetic oligonucleotide
agaggcuaaggcccagucc

SEQ ID NO: 1895895 - RNA, 19 nt, Artificial Sequence
  Description of Artificial Sequence: Synthetic oligonucleotide
ucuaagggcugauucuucc

SEQ ID NO: 1895896 - RNA, 19 nt, Artificial Sequence
  Description of Artificial Sequence: Synthetic oligonucleotide
caagcagagggcuaaguug

SEQ ID NO: 1895897 - RNA, 19 nt, Artificial Sequence
  Description of Artificial Sequence: Synthetic oligonucleotide
accuucacgcagcaguccc

SEQ ID NO: 1895898 - RNA, 19 nt, Artificial Sequence
  Description of Artificial Sequence: Synthetic oligonucleotide
cuugcauuacuugaaaguc

SEQ ID NO: 1895899 - RNA, 19 nt, Artificial Sequence
  Description of Artificial Sequence: Synthetic oligonucleotide
cugauuguggugacgcugg

SEQ ID NO: 1895900 - RNA, 19 nt, Artificial Sequence
  Description of Artificial Sequence: Synthetic oligonucleotide
uacccagaauaaaaggaca

SEQ ID NO: 1895901 - RNA, 19 nt, Artificial Sequence
  Description of Artificial Sequence: Synthetic oligonucleotide
ugcauuacuugaaagucua

SEQ ID NO: 1895902 - RNA, 19 nt, Artificial Sequence
  Description of Artificial Sequence: Synthetic oligonucleotide
gcauacaugauccuucucc

SEQ ID NO: 1895903 - RNA, 19 nt, Artificial Sequence
  Description of Artificial Sequence: Synthetic oligonucleotide
uugcauuacuugaaagucu

SEQ ID NO: 1895904 - RNA, 19 nt, Artificial Sequence
  Description of Artificial Sequence: Synthetic oligonucleotide
aaucuugcauuacuugaaa

SEQ ID NO: 1895905 - RNA, 19 nt, Artificial Sequence
  Description of Artificial Sequence: Synthetic oligonucleotide
cagugcgccaagcagaggg

SEQ ID NO: 1895906 - RNA, 19 nt, Artificial Sequence
  Description of Artificial Sequence: Synthetic oligonucleotide
auagacugugacuccauca

SEQ ID NO: 1895907 - RNA, 19 nt, Artificial Sequence
  Description of Artificial Sequence: Synthetic oligonucleotide
uccccaaauagacugugac

SEQ ID NO: 1895908 - RNA, 19 nt, Artificial Sequence
  Description of Artificial Sequence: Synthetic oligonucleotide
augccuaucucaaugaugu

SEQ ID NO: 1895909 - RNA, 19 nt, Artificial Sequence
  Description of Artificial Sequence: Synthetic oligonucleotide
cuuaagcuucagcagugcg

SEQ ID NO: 1895910 - RNA, 19 nt, Artificial Sequence
  Description of Artificial Sequence: Synthetic oligonucleotide
aaccagcugauuccaucac

SEQ ID NO: 1895911 - RNA, 19 nt, Artificial Sequence
  Description of Artificial Sequence: Synthetic oligonucleotide
ucuuccuaggcgccaggcg

SEQ ID NO: 1895912 - RNA, 19 nt, Artificial Sequence
  Description of Artificial Sequence: Synthetic oligonucleotide
aucacagaaaaugguuuac

SEQ ID NO: 1895913 - RNA, 19 nt, Artificial Sequence
  Description of Artificial Sequence: Synthetic oligonucleotide
agagggcuaaguugaagag

SEQ ID NO: 1895914 - RNA, 19 nt, Artificial Sequence
  Description of Artificial Sequence: Synthetic oligonucleotide
uggaccaagucguacuuca

SEQ ID NO: 1895915 - RNA, 19 nt, Artificial Sequence
  Description of Artificial Sequence: Synthetic oligonucleotide
ggaggugagagagaaaggg

SEQ ID NO: 1895916 - RNA, 19 nt, Artificial Sequence
  Description of Artificial Sequence: Synthetic oligonucleotide
uccucuaggagaacuaaua

SEQ ID NO: 1895917 - RNA, 19 nt, Artificial Sequence
  Description of Artificial Sequence: Synthetic oligonucleotide
ugcggcaacacccaagcau

SEQ ID NO: 1895918 - RNA, 19 nt, Artificial Sequence
  Description of Artificial Sequence: Synthetic oligonucleotide
gaacuaauaagguuuuccu

SEQ ID NO: 1895919 - RNA, 19 nt, Artificial Sequence
  Description of Artificial Sequence: Synthetic oligonucleotide
uuuacaggagcaggaagug

SEQ ID NO: 1895920 - RNA, 19 nt, Artificial Sequence
  Description of Artificial Sequence: Synthetic oligonucleotide
aacuuacaaaguauuugug

SEQ ID NO: 1895921 - RNA, 19 nt, Artificial Sequence
  Description of Artificial Sequence: Synthetic oligonucleotide
ugggcuuucugcuccauac

SEQ ID NO: 1895922 - RNA, 19 nt, Artificial Sequence
  Description of Artificial Sequence: Synthetic oligonucleotide
aaggacugguacccagccg

SEQ ID NO: 1895923 - RNA, 19 nt, Artificial Sequence
  Description of Artificial Sequence: Synthetic oligonucleotide
uuucuugggccucggcccg

SEQ ID NO: 1895924 - RNA, 19 nt, Artificial Sequence
  Description of Artificial Sequence: Synthetic oligonucleotide
aaucagguucggcggauca

SEQ ID NO: 1895925 - RNA, 19 nt, Artificial Sequence
  Description of Artificial Sequence: Synthetic oligonucleotide
cauacuuuugcuucaacua

SEQ ID NO: 1895926 - RNA, 19 nt, Artificial Sequence
  Description of Artificial Sequence: Synthetic oligonucleotide
gaaggacugguacccagcc

SEQ ID NO: 1895927 - RNA, 19 nt, Artificial Sequence
  Description of Artificial Sequence: Synthetic oligonucleotide
aggagaacuaauaagguuu

SEQ ID NO: 1895928 - RNA, 19 nt, Artificial Sequence
  Description of Artificial Sequence: Synthetic oligonucleotide
uucagaagccuugagcaga

SEQ ID NO: 1895929 - RNA, 19 nt, Artificial Sequence
  Description of Artificial Sequence: Synthetic oligonucleotide
auggcaaucuugcauuacu

SEQ ID NO: 1895930 - RNA, 19 nt, Artificial Sequence
  Description of Artificial Sequence: Synthetic oligonucleotide
caugagaaacgccugcgug

SEQ ID NO: 1895931 - RNA, 19 nt, Artificial Sequence
  Description of Artificial Sequence: Synthetic oligonucleotide
agcacgucaaccaugagaa

SEQ ID NO: 1895932 - RNA, 19 nt, Artificial Sequence
  Description of Artificial Sequence: Synthetic oligonucleotide
guuaccuucacgcagcagu

SEQ ID NO: 1895933 - RNA, 19 nt, Artificial Sequence
  Description of Artificial Sequence: Synthetic oligonucleotide
acccagaauaaaaggacac

SEQ ID NO: 1895934 - RNA, 19 nt, Artificial Sequence
  Description of Artificial Sequence: Synthetic oligonucleotide
aacuacacacagaaauuca

SEQ ID NO: 1895935 - RNA, 19 nt, Artificial Sequence
  Description of Artificial Sequence: Synthetic oligonucleotide
cacgucaaccaugagaaac

SEQ ID NO: 1895936 - RNA, 19 nt, Artificial Sequence
  Description of Artificial Sequence: Synthetic oligonucleotide
uguugcagcagcugauaca

SEQ ID NO: 1895937 - RNA, 19 nt, Artificial Sequence
  Description of Artificial Sequence: Synthetic oligonucleotide
acucagagaccaaaccagc

SEQ ID NO: 1895938 - RNA, 19 nt, Artificial Sequence
  Description of Artificial Sequence: Synthetic oligonucleotide
uugcaaagaggaguguugc

SEQ ID NO: 1895939 - RNA, 19 nt, Artificial Sequence
  Description of Artificial Sequence: Synthetic oligonucleotide
gaugccuaucucaaugaug

SEQ ID NO: 1895940 - RNA, 19 nt, Artificial Sequence
  Description of Artificial Sequence: Synthetic oligonucleotide
uaggagaacuaauaagguu

SEQ ID NO: 1895941 - RNA, 19 nt, Artificial Sequence
  Description of Artificial Sequence: Synthetic oligonucleotide
acgucaaccaugagaaacg

SEQ ID NO: 1895942 - RNA, 19 nt, Artificial Sequence
  Description of Artificial Sequence: Synthetic oligonucleotide
ugagaaacgccugcgugcc

SEQ ID NO: 1895943 - RNA, 19 nt, Artificial Sequence
  Description of Artificial Sequence: Synthetic oligonucleotide
agggcuaaguugaagagca

SEQ ID NO: 1895944 - RNA, 19 nt, Artificial Sequence
  Description of Artificial Sequence: Synthetic oligonucleotide
uugaaagucuacccagaau

SEQ ID NO: 1895945 - RNA, 19 nt, Artificial Sequence
  Description of Artificial Sequence: Synthetic oligonucleotide
cuggccguguguuggaugc

SEQ ID NO: 1895946 - RNA, 19 nt, Artificial Sequence
  Description of Artificial Sequence: Synthetic oligonucleotide
gcagcugauacacacggag

SEQ ID NO: 1895947 - RNA, 19 nt, Artificial Sequence
  Description of Artificial Sequence: Synthetic oligonucleotide
agggccagacagaugacgc

SEQ ID NO: 1895948 - RNA, 19 nt, Artificial Sequence
  Description of Artificial Sequence: Synthetic oligonucleotide
gaauaaaaggacacccaga

SEQ ID NO: 1895949 - RNA, 19 nt, Artificial Sequence
  Description of Artificial Sequence: Synthetic oligonucleotide
agggcagaugccuaucuca

SEQ ID NO: 1895950 - RNA, 19 nt, Artificial Sequence
  Description of Artificial Sequence: Synthetic oligonucleotide
cacuuuucaggcugaggcc

SEQ ID NO: 1895951 - RNA, 19 nt, Artificial Sequence
  Description of Artificial Sequence: Synthetic oligonucleotide
gaggcuaaggcccaguccu

SEQ ID NO: 1895952 - RNA, 19 nt, Artificial Sequence
  Description of Artificial Sequence: Synthetic oligonucleotide
caaaguauuugugcauggc

SEQ ID NO: 1895953 - RNA, 19 nt, Artificial Sequence
  Description of Artificial Sequence: Synthetic oligonucleotide
uuaccuucacgcagcaguc

SEQ ID NO: 1895954 - RNA, 19 nt, Artificial Sequence
  Description of Artificial Sequence: Synthetic oligonucleotide
cagcaguccccaaauagac

SEQ ID NO: 1895955 - RNA, 19 nt, Artificial Sequence
  Description of Artificial Sequence: Synthetic oligonucleotide
ugauacacacggaguucag

SEQ ID NO: 1895956 - RNA, 19 nt, Artificial Sequence
  Description of Artificial Sequence: Synthetic oligonucleotide
ugaggaugcacacgacuuc

SEQ ID NO: 1895957 - RNA, 19 nt, Artificial Sequence
  Description of Artificial Sequence: Synthetic oligonucleotide
gccaaaucagguucggcgg

SEQ ID NO: 1895958 - RNA, 19 nt, Artificial Sequence
  Description of Artificial Sequence: Synthetic oligonucleotide
agcucuguggucaacccuc

SEQ ID NO: 1895959 - RNA, 19 nt, Artificial Sequence
  Description of Artificial Sequence: Synthetic oligonucleotide
cuacaauguguccucucag

SEQ ID NO: 1895960 - RNA, 19 nt, Artificial Sequence
  Description of Artificial Sequence: Synthetic oligonucleotide
gcaugacuggaccaagucg

SEQ ID NO: 1895961 - RNA, 19 nt, Artificial Sequence
  Description of Artificial Sequence: Synthetic oligonucleotide
acagaugacgcagcagggg

SEQ ID NO: 1895962 - RNA, 19 nt, Artificial Sequence
  Description of Artificial Sequence: Synthetic oligonucleotide
uuggaugccaaaucagguu

SEQ ID NO: 1895963 - RNA, 19 nt, Artificial Sequence
  Description of Artificial Sequence: Synthetic oligonucleotide
aagucguacuucaaggcau

SEQ ID NO: 1895964 - RNA, 19 nt, Artificial Sequence
  Description of Artificial Sequence: Synthetic oligonucleotide
uuccgguacaugaucccug

SEQ ID NO: 1895965 - RNA, 19 nt, Artificial Sequence
  Description of Artificial Sequence: Synthetic oligonucleotide
ucccgcagaagcaaaguua

SEQ ID NO: 1895966 - RNA, 19 nt, Artificial Sequence
  Description of Artificial Sequence: Synthetic oligonucleotide
gaugccaaaucagguucgg

SEQ ID NO: 1895967 - RNA, 19 nt, Artificial Sequence
  Description of Artificial Sequence: Synthetic oligonucleotide
agggcuguggugagaagcc

SEQ ID NO: 1895968 - RNA, 19 nt, Artificial Sequence
  Description of Artificial Sequence: Synthetic oligonucleotide
ucgggaugggaagaccugg

SEQ ID NO: 1895969 - RNA, 19 nt, Artificial Sequence
  Description of Artificial Sequence: Synthetic oligonucleotide
gcagaugccuaucucaaug

SEQ ID NO: 1895970 - RNA, 19 nt, Artificial Sequence
  Description of Artificial Sequence: Synthetic oligonucleotide
gacuuccgguacaugaucc

SEQ ID NO: 1895971 - RNA, 19 nt, Artificial Sequence
  Description of Artificial Sequence: Synthetic oligonucleotide
ugugaaugccauguucaga

SEQ ID NO: 1895972 - RNA, 19 nt, Artificial Sequence
  Description of Artificial Sequence: Synthetic oligonucleotide
accaugagaaacgccugcg

SEQ ID NO: 1895973 - RNA, 19 nt, Artificial Sequence
  Description of Artificial Sequence: Synthetic oligonucleotide
ucccgagucaccacagacu

SEQ ID NO: 1895974 - RNA, 19 nt, Artificial Sequence
  Description of Artificial Sequence: Synthetic oligonucleotide
cuggcagguccuaugcugc

SEQ ID NO: 1895975 - RNA, 19 nt, Artificial Sequence
  Description of Artificial Sequence: Synthetic oligonucleotide
ugugcauggcaaucuugca

SEQ ID NO: 1895976 - RNA, 19 nt, Artificial Sequence
  Description of Artificial Sequence: Synthetic oligonucleotide
ucuccucuacaaugugucc

SEQ ID NO: 1895977 - RNA, 19 nt, Artificial Sequence
  Description of Artificial Sequence: Synthetic oligonucleotide
gacgcuggccguguguugg

SEQ ID NO: 1895978 - RNA, 19 nt, Artificial Sequence
  Description of Artificial Sequence: Synthetic oligonucleotide
uuggugguggcuacacgga

SEQ ID NO: 1895979 - RNA, 19 nt, Artificial Sequence
  Description of Artificial Sequence: Synthetic oligonucleotide
uuccggaagguguucuggc

SEQ ID NO: 1895980 - RNA, 19 nt, Artificial Sequence
  Description of Artificial Sequence: Synthetic oligonucleotide
aagaggaguguugcagcag

SEQ ID NO: 1895981 - RNA, 19 nt, Artificial Sequence
  Description of Artificial Sequence: Synthetic oligonucleotide
ugccggcugacucugcagc

SEQ ID NO: 1895982 - RNA, 19 nt, Artificial Sequence
  Description of Artificial Sequence: Synthetic oligonucleotide
cacgacuuccgguacauga

SEQ ID NO: 1895983 - RNA, 19 nt, Artificial Sequence
  Description of Artificial Sequence: Synthetic oligonucleotide
ggcuaaguugaagagcagg

SEQ ID NO: 1895984 - RNA, 19 nt, Artificial Sequence
  Description of Artificial Sequence: Synthetic oligonucleotide
cagacugacucagagacca

SEQ ID NO: 1895985 - RNA, 19 nt, Artificial Sequence
  Description of Artificial Sequence: Synthetic oligonucleotide
uccucuacaauguguccuc

SEQ ID NO: 1895986 - RNA, 19 nt, Artificial Sequence
  Description of Artificial Sequence: Synthetic oligonucleotide
gaugacgcagcagggguug

SEQ ID NO: 1895987 - RNA, 19 nt, Artificial Sequence
  Description of Artificial Sequence: Synthetic oligonucleotide
cccaaauagacugugacuc

SEQ ID NO: 1895988 - RNA, 19 nt, Artificial Sequence
  Description of Artificial Sequence: Synthetic oligonucleotide
caagucguacuucaaggca

SEQ ID NO: 1895989 - RNA, 19 nt, Artificial Sequence
  Description of Artificial Sequence: Synthetic oligonucleotide
agguucggcggaucauggc

SEQ ID NO: 1895990 - RNA, 19 nt, Artificial Sequence
  Description of Artificial Sequence: Synthetic oligonucleotide
aggcucaaggaggugagag

SEQ ID NO: 1895991 - RNA, 19 nt, Artificial Sequence
  Description of Artificial Sequence: Synthetic oligonucleotide
uaccucagcucugugguca

SEQ ID NO: 1895992 - RNA, 19 nt, Artificial Sequence
  Description of Artificial Sequence: Synthetic oligonucleotide
acagaaauucagaaugaau

SEQ ID NO: 1895993 - RNA, 19 nt, Artificial Sequence
  Description of Artificial Sequence: Synthetic oligonucleotide
aaguuaccuucacgcagca

SEQ ID NO: 1895994 - RNA, 19 nt, Artificial Sequence
  Description of Artificial Sequence: Synthetic oligonucleotide
acccgcucuguccgaagcc

SEQ ID NO: 1895995 - RNA, 19 nt, Artificial Sequence
  Description of Artificial Sequence: Synthetic oligonucleotide
cagaaggacugguacccag

SEQ ID NO: 1895996 - RNA, 19 nt, Artificial Sequence
  Description of Artificial Sequence: Synthetic oligonucleotide
caaccaugagaaacgccug

SEQ ID NO: 1895997 - RNA, 19 nt, Artificial Sequence
  Description of Artificial Sequence: Synthetic oligonucleotide
guuccggaagguguucugg

SEQ ID NO: 1895998 - RNA, 19 nt, Artificial Sequence
  Description of Artificial Sequence: Synthetic oligonucleotide
cuuuucaggcugaggccag

SEQ ID NO: 1895999 - RNA, 19 nt, Artificial Sequence
  Description of Artificial Sequence: Synthetic oligonucleotide
uggcaaucuugcauuacuu

SEQ ID NO: 1896000 - RNA, 19 nt, Artificial Sequence
  Description of Artificial Sequence: Synthetic oligonucleotide
gaaagucuacccagaauaa

SEQ ID NO: 1896001 - RNA, 19 nt, Artificial Sequence
  Description of Artificial Sequence: Synthetic oligonucleotide
uuccucuaggagaacuaau

SEQ ID NO: 1896002 - RNA, 19 nt, Artificial Sequence
  Description of Artificial Sequence: Synthetic oligonucleotide
cacggaucgggaugggaag

SEQ ID NO: 1896003 - RNA, 19 nt, Artificial Sequence
  Description of Artificial Sequence: Synthetic oligonucleotide
gagagagaaagggccagac

SEQ ID NO: 1896004 - RNA, 19 nt, Artificial Sequence
  Description of Artificial Sequence: Synthetic oligonucleotide
cagguucggcggaucaugg

SEQ ID NO: 1896005 - RNA, 19 nt, Artificial Sequence
  Description of Artificial Sequence: Synthetic oligonucleotide
guuuacaggagcaggaagu

SEQ ID NO: 1896006 - RNA, 19 nt, Artificial Sequence
  Description of Artificial Sequence: Synthetic oligonucleotide
uccauacuuuugcuucaac

SEQ ID NO: 1896007 - RNA, 19 nt, Artificial Sequence
  Description of Artificial Sequence: Synthetic oligonucleotide
cuaaggcccaguccuugag

SEQ ID NO: 1896008 - RNA, 19 nt, Artificial Sequence
  Description of Artificial Sequence: Synthetic oligonucleotide
gauuguggugacgcuggcc

SEQ ID NO: 1896009 - RNA, 19 nt, Artificial Sequence
  Description of Artificial Sequence: Synthetic oligonucleotide
cuaugcugccggcugacuc

SEQ ID NO: 1896010 - RNA, 19 nt, Artificial Sequence
  Description of Artificial Sequence: Synthetic oligonucleotide
ccaagucguacuucaaggc

SEQ ID NO: 1896011 - RNA, 19 nt, Artificial Sequence
  Description of Artificial Sequence: Synthetic oligonucleotide
caaugaugucuaagggcug

SEQ ID NO: 1896012 - RNA, 19 nt, Artificial Sequence
  Description of Artificial Sequence: Synthetic oligonucleotide
aucauggcugcggcaacac

SEQ ID NO: 1896013 - RNA, 19 nt, Artificial Sequence
  Description of Artificial Sequence: Synthetic oligonucleotide
agaugccuaucucaaugau

SEQ ID NO: 1896014 - RNA, 19 nt, Artificial Sequence
  Description of Artificial Sequence: Synthetic oligonucleotide
gguggcuacacggaucggg

SEQ ID NO: 1896015 - RNA, 19 nt, Artificial Sequence
  Description of Artificial Sequence: Synthetic oligonucleotide
augcacacgacuuccggua

SEQ ID NO: 1896016 - RNA, 19 nt, Artificial Sequence
  Description of Artificial Sequence: Synthetic oligonucleotide
guguguuggaugccaaauc

SEQ ID NO: 1896017 - RNA, 19 nt, Artificial Sequence
  Description of Artificial Sequence: Synthetic oligonucleotide
uuuucaggcugaggccagg

SEQ ID NO: 1896018 - RNA, 19 nt, Artificial Sequence
  Description of Artificial Sequence: Synthetic oligonucleotide
cagcacgucaaccaugaga

SEQ ID NO: 1896019 - RNA, 19 nt, Artificial Sequence
  Description of Artificial Sequence: Synthetic oligonucleotide
ugcacacgacuuccgguac

SEQ ID NO: 1896020 - RNA, 19 nt, Artificial Sequence
  Description of Artificial Sequence: Synthetic oligonucleotide
gcuacacggaucgggaugg

SEQ ID NO: 1896021 - RNA, 19 nt, Artificial Sequence
  Description of Artificial Sequence: Synthetic oligonucleotide
ucguacuucaaggcauaca

SEQ ID NO: 1896022 - RNA, 19 nt, Artificial Sequence
  Description of Artificial Sequence: Synthetic oligonucleotide
agugcgccaagcagagggc

SEQ ID NO: 1896023 - RNA, 19 nt, Artificial Sequence
  Description of Artificial Sequence: Synthetic oligonucleotide
cuugaaagucuacccagaa

SEQ ID NO: 1896024 - RNA, 19 nt, Artificial Sequence
  Description of Artificial Sequence: Synthetic oligonucleotide
uuacaggagcaggaagugu

SEQ ID NO: 1896025 - RNA, 19 nt, Artificial Sequence
  Description of Artificial Sequence: Synthetic oligonucleotide
uuccuaggcgccaggcgga

SEQ ID NO: 1896026 - RNA, 19 nt, Artificial Sequence
  Description of Artificial Sequence: Synthetic oligonucleotide
ucacgcagcaguccccaaa

SEQ ID NO: 1896027 - RNA, 19 nt, Artificial Sequence
  Description of Artificial Sequence: Synthetic oligonucleotide
agaaacgccugcgugccca

SEQ ID NO: 1896028 - RNA, 19 nt, Artificial Sequence
  Description of Artificial Sequence: Synthetic oligonucleotide
aggaagugugaaugccaug

SEQ ID NO: 1896029 - RNA, 19 nt, Artificial Sequence
  Description of Artificial Sequence: Synthetic oligonucleotide
cccgcagaagcaaaguuac

SEQ ID NO: 1896030 - RNA, 19 nt, Artificial Sequence
  Description of Artificial Sequence: Synthetic oligonucleotide
gcugcggcaacacccaagc

SEQ ID NO: 1896031 - RNA, 19 nt, Artificial Sequence
  Description of Artificial Sequence: Synthetic oligonucleotide
gucccgagucaccacagac

SEQ ID NO: 1896032 - RNA, 19 nt, Artificial Sequence
  Description of Artificial Sequence: Synthetic oligonucleotide
cagaugccuaucucaauga

SEQ ID NO: 1896033 - RNA, 19 nt, Artificial Sequence
  Description of Artificial Sequence: Synthetic oligonucleotide
uccuugagucccgagucac

SEQ ID NO: 1896034 - RNA, 19 nt, Artificial Sequence
  Description of Artificial Sequence: Synthetic oligonucleotide
acuugaaagucuacccaga

SEQ ID NO: 1896035 - RNA, 19 nt, Artificial Sequence
  Description of Artificial Sequence: Synthetic oligonucleotide
accaaaccagcugauucca

SEQ ID NO: 1896036 - RNA, 19 nt, Artificial Sequence
  Description of Artificial Sequence: Synthetic oligonucleotide
gaugcacacgacuuccggu

SEQ ID NO: 1896037 - RNA, 19 nt, Artificial Sequence
  Description of Artificial Sequence: Synthetic oligonucleotide
ccgggagaggcuaaggccc

SEQ ID NO: 1896038 - RNA, 19 nt, Artificial Sequence
  Description of Artificial Sequence: Synthetic oligonucleotide
aggaggugagagagaaagg

SEQ ID NO: 1896039 - RNA, 19 nt, Artificial Sequence
  Description of Artificial Sequence: Synthetic oligonucleotide
ugguuuacaggagcaggaa

SEQ ID NO: 1896040 - RNA, 19 nt, Artificial Sequence
  Description of Artificial Sequence: Synthetic oligonucleotide
aacgccugcgugcccaguu

SEQ ID NO: 1896041 - RNA, 19 nt, Artificial Sequence
  Description of Artificial Sequence: Synthetic oligonucleotide
aagcaugacuggaccaagu

SEQ ID NO: 1896042 - RNA, 19 nt, Artificial Sequence
  Description of Artificial Sequence: Synthetic oligonucleotide
caagcaugacuggaccaag

SEQ ID NO: 1896043 - RNA, 19 nt, Artificial Sequence
  Description of Artificial Sequence: Synthetic oligonucleotide
ugauuccaucacagaaaau

SEQ ID NO: 1896044 - RNA, 19 nt, Artificial Sequence
  Description of Artificial Sequence: Synthetic oligonucleotide
aguccccaaauagacugug

SEQ ID NO: 1896045 - RNA, 19 nt, Artificial Sequence
  Description of Artificial Sequence: Synthetic oligonucleotide
cuaagggcugauucuucca

SEQ ID NO: 1896046 - RNA, 19 nt, Artificial Sequence
  Description of Artificial Sequence: Synthetic oligonucleotide
uacccagccgaggcgauga

SEQ ID NO: 1896047 - RNA, 19 nt, Artificial Sequence
  Description of Artificial Sequence: Synthetic oligonucleotide
ggaugccaaaucagguucg

SEQ ID NO: 1896048 - RNA, 19 nt, Artificial Sequence
  Description of Artificial Sequence: Synthetic oligonucleotide
ccagccgaggcgaugagac

SEQ ID NO: 1896049 - RNA, 19 nt, Artificial Sequence
  Description of Artificial Sequence: Synthetic oligonucleotide
ggccugauggccgaggcag

SEQ ID NO: 1896050 - RNA, 19 nt, Artificial Sequence
  Description of Artificial Sequence: Synthetic oligonucleotide
ggcuacacggaucgggaug

SEQ ID NO: 1896051 - RNA, 19 nt, Artificial Sequence
  Description of Artificial Sequence: Synthetic oligonucleotide
ggaagugugaaugccaugu

SEQ ID NO: 1896052 - RNA, 19 nt, Artificial Sequence
  Description of Artificial Sequence: Synthetic oligonucleotide
uggugguggcuacacggau

SEQ ID NO: 1896053 - RNA, 19 nt, Artificial Sequence
  Description of Artificial Sequence: Synthetic oligonucleotide
acacccaagcaugacugga

SEQ ID NO: 1896054 - RNA, 19 nt, Artificial Sequence
  Description of Artificial Sequence: Synthetic oligonucleotide
gucaaccaugagaaacgcc

SEQ ID NO: 1896055 - RNA, 19 nt, Artificial Sequence
  Description of Artificial Sequence: Synthetic oligonucleotide
gguccuaugcugccggcug

SEQ ID NO: 1896056 - RNA, 19 nt, Artificial Sequence
  Description of Artificial Sequence: Synthetic oligonucleotide
cuggccugauggccgaggc

SEQ ID NO: 1896057 - RNA, 19 nt, Artificial Sequence
  Description of Artificial Sequence: Synthetic oligonucleotide
uggucaacccucuccucua

SEQ ID NO: 1896058 - RNA, 19 nt, Artificial Sequence
  Description of Artificial Sequence: Synthetic oligonucleotide
cccgagucaccacagacug

SEQ ID NO: 1896059 - RNA, 19 nt, Artificial Sequence
  Description of Artificial Sequence: Synthetic oligonucleotide
gcugccucuuuucuugggc

SEQ ID NO: 1896060 - RNA, 19 nt, Artificial Sequence
  Description of Artificial Sequence: Synthetic oligonucleotide
cccguugcaaagaggagug

SEQ ID NO: 1896061 - RNA, 19 nt, Artificial Sequence
  Description of Artificial Sequence: Synthetic oligonucleotide
guucggcggaucauggcug

SEQ ID NO: 1896062 - RNA, 19 nt, Artificial Sequence
  Description of Artificial Sequence: Synthetic oligonucleotide
gguuggcaucuccuuaagc

SEQ ID NO: 1896063 - RNA, 19 nt, Artificial Sequence
  Description of Artificial Sequence: Synthetic oligonucleotide
uguggucaacccucuccuc

SEQ ID NO: 1896064 - RNA, 19 nt, Artificial Sequence
  Description of Artificial Sequence: Synthetic oligonucleotide
cucggcccguugcaaagag

SEQ ID NO: 1896065 - RNA, 19 nt, Artificial Sequence
  Description of Artificial Sequence: Synthetic oligonucleotide
acaugauccuucuccccuu

SEQ ID NO: 1896066 - RNA, 19 nt, Artificial Sequence
  Description of Artificial Sequence: Synthetic oligonucleotide
gaagggcagaugccuaucu

SEQ ID NO: 1896067 - RNA, 19 nt, Artificial Sequence
  Description of Artificial Sequence: Synthetic oligonucleotide
cauggcaaucuugcauuac

SEQ ID NO: 1896068 - RNA, 19 nt, Artificial Sequence
  Description of Artificial Sequence: Synthetic oligonucleotide
gaucgggaugggaagaccu

SEQ ID NO: 1896069 - RNA, 19 nt, Artificial Sequence
  Description of Artificial Sequence: Synthetic oligonucleotide
acacggaucgggaugggaa

SEQ ID NO: 1896070 - RNA, 19 nt, Artificial Sequence
  Description of Artificial Sequence: Synthetic oligonucleotide
aggaugcacacgacuuccg

SEQ ID NO: 1896071 - RNA, 19 nt, Artificial Sequence
  Description of Artificial Sequence: Synthetic oligonucleotide
uacacggaucgggauggga

SEQ ID NO: 1896072 - RNA, 19 nt, Artificial Sequence
  Description of Artificial Sequence: Synthetic oligonucleotide
gagaaagggccagacagau

SEQ ID NO: 1896073 - RNA, 19 nt, Artificial Sequence
  Description of Artificial Sequence: Synthetic oligonucleotide
cacccgcucuguccgaagc

SEQ ID NO: 1896074 - RNA, 19 nt, Artificial Sequence
  Description of Artificial Sequence: Synthetic oligonucleotide
cuuccgucccgcagaagca

SEQ ID NO: 1896075 - RNA, 19 nt, Artificial Sequence
  Description of Artificial Sequence: Synthetic oligonucleotide
gcggcaacacccaagcaug

SEQ ID NO: 1896076 - RNA, 19 nt, Artificial Sequence
  Description of Artificial Sequence: Synthetic oligonucleotide
ugcgugcccaguucagcuc

SEQ ID NO: 1896077 - RNA, 19 nt, Artificial Sequence
  Description of Artificial Sequence: Synthetic oligonucleotide
caccaaggacagcacccgc

SEQ ID NO: 1896078 - RNA, 19 nt, Artificial Sequence
  Description of Artificial Sequence: Synthetic oligonucleotide
aagcuucagcagugcgcca

SEQ ID NO: 1896079 - RNA, 19 nt, Artificial Sequence
  Description of Artificial Sequence: Synthetic oligonucleotide
guggucaacccucuccucu

SEQ ID NO: 1896080 - RNA, 19 nt, Artificial Sequence
  Description of Artificial Sequence: Synthetic oligonucleotide
aguuaccuucacgcagcag

SEQ ID NO: 1896081 - RNA, 19 nt, Artificial Sequence
  Description of Artificial Sequence: Synthetic oligonucleotide
gagaaacgccugcgugccc

SEQ ID NO: 1896082 - RNA, 19 nt, Artificial Sequence
  Description of Artificial Sequence: Synthetic oligonucleotide
cgcagcaguccccaaauag

SEQ ID NO: 1896083 - RNA, 19 nt, Artificial Sequence
  Description of Artificial Sequence: Synthetic oligonucleotide
agcuucagcagugcgccaa

SEQ ID NO: 1896084 - RNA, 19 nt, Artificial Sequence
  Description of Artificial Sequence: Synthetic oligonucleotide
ggugagagagaaagggcca

SEQ ID NO: 1896085 - RNA, 19 nt, Artificial Sequence
  Description of Artificial Sequence: Synthetic oligonucleotide
aucgggaugggaagaccug

SEQ ID NO: 1896086 - RNA, 19 nt, Artificial Sequence
  Description of Artificial Sequence: Synthetic oligonucleotide
agucccgagucaccacaga

SEQ ID NO: 1896087 - RNA, 19 nt, Artificial Sequence
  Description of Artificial Sequence: Synthetic oligonucleotide
ggaguucaguuucccagga

SEQ ID NO: 1896088 - RNA, 19 nt, Artificial Sequence
  Description of Artificial Sequence: Synthetic oligonucleotide
guggcuacacggaucggga

SEQ ID NO: 1896089 - RNA, 19 nt, Artificial Sequence
  Description of Artificial Sequence: Synthetic oligonucleotide
ugccuaucucaaugauguc

SEQ ID NO: 1896090 - RNA, 19 nt, Artificial Sequence
  Description of Artificial Sequence: Synthetic oligonucleotide
gugcauggcaaucuugcau

SEQ ID NO: 1896091 - RNA, 19 nt, Artificial Sequence
  Description of Artificial Sequence: Synthetic oligonucleotide
acgacuuccgguacaugau

SEQ ID NO: 1896092 - RNA, 19 nt, Artificial Sequence
  Description of Artificial Sequence: Synthetic oligonucleotide
gacgcagcagggguuggca

SEQ ID NO: 1896093 - RNA, 19 nt, Artificial Sequence
  Description of Artificial Sequence: Synthetic oligonucleotide
cggaguucaguuucccagg

SEQ ID NO: 1896094 - RNA, 19 nt, Artificial Sequence
  Description of Artificial Sequence: Synthetic oligonucleotide
cugccggcugacucugcag

SEQ ID NO: 1896095 - RNA, 19 nt, Artificial Sequence
  Description of Artificial Sequence: Synthetic oligonucleotide
uccuaugcugccggcugac

SEQ ID NO: 1896096 - RNA, 19 nt, Artificial Sequence
  Description of Artificial Sequence: Synthetic oligonucleotide
ugacgcagcagggguuggc

SEQ ID NO: 1896097 - RNA, 19 nt, Artificial Sequence
  Description of Artificial Sequence: Synthetic oligonucleotide
uggcuacacggaucgggau

SEQ ID NO: 1896098 - RNA, 19 nt, Artificial Sequence
  Description of Artificial Sequence: Synthetic oligonucleotide
cagaugacgcagcaggggu

SEQ ID NO: 1896099 - RNA, 19 nt, Artificial Sequence
  Description of Artificial Sequence: Synthetic oligonucleotide
caucagggacagaauggaa

SEQ ID NO: 1896100 - RNA, 19 nt, Artificial Sequence
  Description of Artificial Sequence: Synthetic oligonucleotide
guccuugagucccgaguca

SEQ ID NO: 1896101 - RNA, 19 nt, Artificial Sequence
  Description of Artificial Sequence: Synthetic oligonucleotide
ggcccaguccuugaguccc

SEQ ID NO: 1896102 - RNA, 19 nt, Artificial Sequence
  Description of Artificial Sequence: Synthetic oligonucleotide
ggcggaucauggcugcggc

SEQ ID NO: 1896103 - RNA, 19 nt, Artificial Sequence
  Description of Artificial Sequence: Synthetic oligonucleotide
gguucggcggaucauggcu

SEQ ID NO: 1896104 - RNA, 19 nt, Artificial Sequence
  Description of Artificial Sequence: Synthetic oligonucleotide
acggaucgggaugggaaga

SEQ ID NO: 1896105 - RNA, 19 nt, Artificial Sequence
  Description of Artificial Sequence: Synthetic oligonucleotide
cuaucucaaugaugucuaa

SEQ ID NO: 1896106 - RNA, 19 nt, Artificial Sequence
  Description of Artificial Sequence: Synthetic oligonucleotide
gcgugcccaguucagcucc

SEQ ID NO: 1896107 - RNA, 19 nt, Artificial Sequence
  Description of Artificial Sequence: Synthetic oligonucleotide
cagaaacuggcucuuccgu

SEQ ID NO: 1896108 - RNA, 19 nt, Artificial Sequence
  Description of Artificial Sequence: Synthetic oligonucleotide
cuggaggcuuugggaaggg

SEQ ID NO: 1896109 - RNA, 19 nt, Artificial Sequence
  Description of Artificial Sequence: Synthetic oligonucleotide
guugaagagcagggcugug

SEQ ID NO: 1896110 - RNA, 19 nt, Artificial Sequence
  Description of Artificial Sequence: Synthetic oligonucleotide
cugauucuuccaggcuggc

SEQ ID NO: 1896111 - RNA, 19 nt, Artificial Sequence
  Description of Artificial Sequence: Synthetic oligonucleotide
auggcugcggcaacaccca

SEQ ID NO: 1896112 - RNA, 19 nt, Artificial Sequence
  Description of Artificial Sequence: Synthetic oligonucleotide
ggcucaaggaggugagaga

SEQ ID NO: 1896113 - RNA, 19 nt, Artificial Sequence
  Description of Artificial Sequence: Synthetic oligonucleotide
cagguccuaugcugccggc

SEQ ID NO: 1896114 - RNA, 19 nt, Artificial Sequence
  Description of Artificial Sequence: Synthetic oligonucleotide
caggaagugugaaugccau

SEQ ID NO: 1896115 - RNA, 19 nt, Artificial Sequence
  Description of Artificial Sequence: Synthetic oligonucleotide
agagaccaaaccagcugau

SEQ ID NO: 1896116 - RNA, 19 nt, Artificial Sequence
  Description of Artificial Sequence: Synthetic oligonucleotide
cuggaccaagucguacuuc

SEQ ID NO: 1896117 - RNA, 19 nt, Artificial Sequence
  Description of Artificial Sequence: Synthetic oligonucleotide
gggguuggcaucuccuuaa

SEQ ID NO: 1896118 - RNA, 19 nt, Artificial Sequence
  Description of Artificial Sequence: Synthetic oligonucleotide
ggguuggcaucuccuuaag

SEQ ID NO: 1896119 - RNA, 19 nt, Artificial Sequence
  Description of Artificial Sequence: Synthetic oligonucleotide
gacugauuguggugacgcu

SEQ ID NO: 1896120 - RNA, 19 nt, Artificial Sequence
  Description of Artificial Sequence: Synthetic oligonucleotide
agguccuaugcugccggcu

SEQ ID NO: 1896121 - RNA, 19 nt, Artificial Sequence
  Description of Artificial Sequence: Synthetic oligonucleotide
cuaggcgccaggcggaacu

SEQ ID NO: 1896122 - RNA, 19 nt, Artificial Sequence
  Description of Artificial Sequence: Synthetic oligonucleotide
gccuaucucaaugaugucu

SEQ ID NO: 1896123 - RNA, 19 nt, Artificial Sequence
  Description of Artificial Sequence: Synthetic oligonucleotide
ccucuaggagaacuaauaa

SEQ ID NO: 1896124 - RNA, 19 nt, Artificial Sequence
  Description of Artificial Sequence: Synthetic oligonucleotide
augacgcagcagggguugg

SEQ ID NO: 1896125 - RNA, 19 nt, Artificial Sequence
  Description of Artificial Sequence: Synthetic oligonucleotide
agucguacuucaaggcaua

SEQ ID NO: 1896126 - RNA, 19 nt, Artificial Sequence
  Description of Artificial Sequence: Synthetic oligonucleotide
ccuugagucccgagucacc

SEQ ID NO: 1896127 - RNA, 19 nt, Artificial Sequence
  Description of Artificial Sequence: Synthetic oligonucleotide
augaugucuaagggcugau

SEQ ID NO: 1896128 - RNA, 19 nt, Artificial Sequence
  Description of Artificial Sequence: Synthetic oligonucleotide
cugacaccuucuucuaccu

SEQ ID NO: 1896129 - RNA, 19 nt, Artificial Sequence
  Description of Artificial Sequence: Synthetic oligonucleotide
cagcugauacacacggagu

SEQ ID NO: 1896130 - RNA, 19 nt, Artificial Sequence
  Description of Artificial Sequence: Synthetic oligonucleotide
ugagaagcccuggccugau

SEQ ID NO: 1896131 - RNA, 19 nt, Artificial Sequence
  Description of Artificial Sequence: Synthetic oligonucleotide
ugguggcuacacggaucgg

SEQ ID NO: 1896132 - RNA, 19 nt, Artificial Sequence
  Description of Artificial Sequence: Synthetic oligonucleotide
gccucggcccguugcaaag

SEQ ID NO: 1896133 - RNA, 19 nt, Artificial Sequence
  Description of Artificial Sequence: Synthetic oligonucleotide
ccuucacgcagcagucccc

SEQ ID NO: 1896134 - RNA, 19 nt, Artificial Sequence
  Description of Artificial Sequence: Synthetic oligonucleotide
ggaucgggaugggaagacc

SEQ ID NO: 1896135 - RNA, 19 nt, Artificial Sequence
  Description of Artificial Sequence: Synthetic oligonucleotide
uucacgcagcaguccccaa

SEQ ID NO: 1896136 - RNA, 19 nt, Artificial Sequence
  Description of Artificial Sequence: Synthetic oligonucleotide
cuacacggaucgggauggg

SEQ ID NO: 1896137 - RNA, 19 nt, Artificial Sequence
  Description of Artificial Sequence: Synthetic oligonucleotide
ggucaacccucuccucuac

SEQ ID NO: 1896138 - RNA, 19 nt, Artificial Sequence
  Description of Artificial Sequence: Synthetic oligonucleotide
agaugacgcagcagggguu

SEQ ID NO: 1896139 - RNA, 19 nt, Artificial Sequence
  Description of Artificial Sequence: Synthetic oligonucleotide
ggugguggcuacacggauc

SEQ ID NO: 1896140 - RNA, 19 nt, Artificial Sequence
  Description of Artificial Sequence: Synthetic oligonucleotide
cucuguggucaacccucuc

SEQ ID NO: 1896141 - RNA, 19 nt, Artificial Sequence
  Description of Artificial Sequence: Synthetic oligonucleotide
acccagccgaggcgaugag

SEQ ID NO: 1896142 - RNA, 19 nt, Artificial Sequence
  Description of Artificial Sequence: Synthetic oligonucleotide
uggccguguguuggaugcc

SEQ ID NO: 1896143 - RNA, 19 nt, Artificial Sequence
  Description of Artificial Sequence: Synthetic oligonucleotide
ggcaacacccaagcaugac

SEQ ID NO: 1896144 - RNA, 19 nt, Artificial Sequence
  Description of Artificial Sequence: Synthetic oligonucleotide
caggcggaacucuuccucu

SEQ ID NO: 1896145 - RNA, 19 nt, Artificial Sequence
  Description of Artificial Sequence: Synthetic oligonucleotide
cgggaugggaagaccuggg

SEQ ID NO: 1896146 - RNA, 19 nt, Artificial Sequence
  Description of Artificial Sequence: Synthetic oligonucleotide
uggcugcggcaacacccaa

SEQ ID NO: 1896147 - RNA, 19 nt, Artificial Sequence
  Description of Artificial Sequence: Synthetic oligonucleotide
ccaaaucagguucggcgga

SEQ ID NO: 1896148 - RNA, 19 nt, Artificial Sequence
  Description of Artificial Sequence: Synthetic oligonucleotide
acacgacuuccgguacaug

SEQ ID NO: 1896149 - RNA, 19 nt, Artificial Sequence
  Description of Artificial Sequence: Synthetic oligonucleotide
gggccagacagaugacgca

SEQ ID NO: 1896150 - RNA, 19 nt, Artificial Sequence
  Description of Artificial Sequence: Synthetic oligonucleotide
ggcugcggcaacacccaag

SEQ ID NO: 1896151 - RNA, 19 nt, Artificial Sequence
  Description of Artificial Sequence: Synthetic oligonucleotide
guacccagccgaggcgaug

SEQ ID NO: 1896152 - RNA, 19 nt, Artificial Sequence
  Description of Artificial Sequence: Synthetic oligonucleotide
cgucaaccaugagaaacgc

SEQ ID NO: 1896153 - RNA, 19 nt, Artificial Sequence
  Description of Artificial Sequence: Synthetic oligonucleotide
ccgcagaagcaaaguuacc

SEQ ID NO: 1896154 - RNA, 19 nt, Artificial Sequence
  Description of Artificial Sequence: Synthetic oligonucleotide
ggacugguacccagccgag

SEQ ID NO: 1896155 - RNA, 19 nt, Artificial Sequence
  Description of Artificial Sequence: Synthetic oligonucleotide
acgcuggccguguguugga

SEQ ID NO: 1896156 - RNA, 19 nt, Artificial Sequence
  Description of Artificial Sequence: Synthetic oligonucleotide
ccacagacugacucagaga

SEQ ID NO: 1896157 - RNA, 19 nt, Artificial Sequence
  Description of Artificial Sequence: Synthetic oligonucleotide
caggccgggagaggcuaag

SEQ ID NO: 1896158 - RNA, 19 nt, Artificial Sequence
  Description of Artificial Sequence: Synthetic oligonucleotide
cggcccguugcaaagagga

SEQ ID NO: 1896159 - RNA, 19 nt, Artificial Sequence
  Description of Artificial Sequence: Synthetic oligonucleotide
cacgcagcaguccccaaau

SEQ ID NO: 1896160 - RNA, 19 nt, Artificial Sequence
  Description of Artificial Sequence: Synthetic oligonucleotide
acgcagcaguccccaaaua

SEQ ID NO: 1896161 - RNA, 19 nt, Artificial Sequence
  Description of Artificial Sequence: Synthetic oligonucleotide
uaggcgccaggcggaacuc

SEQ ID NO: 1896162 - RNA, 19 nt, Artificial Sequence
  Description of Artificial Sequence: Synthetic oligonucleotide
uccuaggcgccaggcggaa

SEQ ID NO: 1896163 - RNA, 19 nt, Artificial Sequence
  Description of Artificial Sequence: Synthetic oligonucleotide
ggagaacuaauaagguuuu

SEQ ID NO: 1896164 - RNA, 19 nt, Artificial Sequence
  Description of Artificial Sequence: Synthetic oligonucleotide
gucccgcagaagcaaaguu

SEQ ID NO: 1896165 - RNA, 19 nt, Artificial Sequence
  Description of Artificial Sequence: Synthetic oligonucleotide
gggcagaugccuaucucaa

SEQ ID NO: 1896166 - RNA, 19 nt, Artificial Sequence
  Description of Artificial Sequence: Synthetic oligonucleotide
gccgaggcagagcugccuc

SEQ ID NO: 1896167 - RNA, 19 nt, Artificial Sequence
  Description of Artificial Sequence: Synthetic oligonucleotide
ccgucccgcagaagcaaag

SEQ ID NO: 1896168 - RNA, 19 nt, Artificial Sequence
  Description of Artificial Sequence: Synthetic oligonucleotide
uucuugggccucggcccgu

SEQ ID NO: 1896169 - RNA, 19 nt, Artificial Sequence
  Description of Artificial Sequence: Synthetic oligonucleotide
ggacagaauggaagcugga

SEQ ID NO: 1896170 - RNA, 19 nt, Artificial Sequence
  Description of Artificial Sequence: Synthetic oligonucleotide
gcugccggcugacucugca

SEQ ID NO: 1896171 - RNA, 19 nt, Artificial Sequence
  Description of Artificial Sequence: Synthetic oligonucleotide
ccgcucuguccgaagcccc

SEQ ID NO: 1896172 - RNA, 19 nt, Artificial Sequence
  Description of Artificial Sequence: Synthetic oligonucleotide
gcacacgacuuccgguaca

SEQ ID NO: 1896173 - RNA, 19 nt, Artificial Sequence
  Description of Artificial Sequence: Synthetic oligonucleotide
ggcccguugcaaagaggag

SEQ ID NO: 1896174 - RNA, 19 nt, Artificial Sequence
  Description of Artificial Sequence: Synthetic oligonucleotide
cuugggccucggcccguug

SEQ ID NO: 1896175 - RNA, 19 nt, Artificial Sequence
  Description of Artificial Sequence: Synthetic oligonucleotide
ccaagcaugacuggaccaa

SEQ ID NO: 1896176 - RNA, 19 nt, Artificial Sequence
  Description of Artificial Sequence: Synthetic oligonucleotide
cuggcucuuccgucccgca

SEQ ID NO: 1896177 - RNA, 19 nt, Artificial Sequence
  Description of Artificial Sequence: Synthetic oligonucleotide
cgacuuccgguacaugauc

SEQ ID NO: 1896178 - RNA, 19 nt, Artificial Sequence
  Description of Artificial Sequence: Synthetic oligonucleotide
gcccguugcaaagaggagu

SEQ ID NO: 1896179 - RNA, 19 nt, Artificial Sequence
  Description of Artificial Sequence: Synthetic oligonucleotide
gcagcacgucaaccaugag

SEQ ID NO: 1896180 - RNA, 19 nt, Artificial Sequence
  Description of Artificial Sequence: Synthetic oligonucleotide
cccucuccucuacaaugug

SEQ ID NO: 1896181 - RNA, 19 nt, Artificial Sequence
  Description of Artificial Sequence: Synthetic oligonucleotide
cugcggcaacacccaagca

SEQ ID NO: 1896182 - RNA, 19 nt, Artificial Sequence
  Description of Artificial Sequence: Synthetic oligonucleotide
caacccucuccucuacaau

SEQ ID NO: 1896183 - RNA, 19 nt, Artificial Sequence
  Description of Artificial Sequence: Synthetic oligonucleotide
gcugacucugcagcacguc

SEQ ID NO: 1896184 - RNA, 19 nt, Artificial Sequence
  Description of Artificial Sequence: Synthetic oligonucleotide
aggcgccaggcggaacucu

SEQ ID NO: 1896185 - RNA, 19 nt, Artificial Sequence
  Description of Artificial Sequence: Synthetic oligonucleotide
gcacccgcucuguccgaag

SEQ ID NO: 1896186 - RNA, 19 nt, Artificial Sequence
  Description of Artificial Sequence: Synthetic oligonucleotide
ucuugggccucggcccguu

SEQ ID NO: 1896187 - RNA, 19 nt, Artificial Sequence
  Description of Artificial Sequence: Synthetic oligonucleotide
ggugacgcuggccgugugu

SEQ ID NO: 1896188 - RNA, 19 nt, Artificial Sequence
  Description of Artificial Sequence: Synthetic oligonucleotide
gggaagggcagaugccuau

SEQ ID NO: 1896189 - RNA, 19 nt, Artificial Sequence
  Description of Artificial Sequence: Synthetic oligonucleotide
gcggaucauggcugcggca

SEQ ID NO: 1896190 - RNA, 19 nt, Artificial Sequence
  Description of Artificial Sequence: Synthetic oligonucleotide
gcaguuccggaagguguuc

SEQ ID NO: 1896191 - RNA, 19 nt, Artificial Sequence
  Description of Artificial Sequence: Synthetic oligonucleotide
cacacgacuuccgguacau

SEQ ID NO: 1896192 - RNA, 19 nt, Artificial Sequence
  Description of Artificial Sequence: Synthetic oligonucleotide
ggcgaugagacaggcugcu

SEQ ID NO: 1896193 - RNA, 19 nt, Artificial Sequence
  Description of Artificial Sequence: Synthetic oligonucleotide
caguuccggaagguguucu

SEQ ID NO: 1896194 - RNA, 19 nt, Artificial Sequence
  Description of Artificial Sequence: Synthetic oligonucleotide
gcgaugagacaggcugcug

SEQ ID NO: 1896195 - RNA, 19 nt, Artificial Sequence
  Description of Artificial Sequence: Synthetic oligonucleotide
ccuaagcacuuuucaggcu

SEQ ID NO: 1896196 - RNA, 19 nt, Artificial Sequence
  Description of Artificial Sequence: Synthetic oligonucleotide
aggcuaaggcccaguccuu

SEQ ID NO: 1896197 - RNA, 19 nt, Artificial Sequence
  Description of Artificial Sequence: Synthetic oligonucleotide
ggaccaagucguacuucaa

SEQ ID NO: 1896198 - RNA, 19 nt, Artificial Sequence
  Description of Artificial Sequence: Synthetic oligonucleotide
ggcagaugccuaucucaau

SEQ ID NO: 1896199 - RNA, 19 nt, Artificial Sequence
  Description of Artificial Sequence: Synthetic oligonucleotide
ccaugagaaacgccugcgu

SEQ ID NO: 1896200 - RNA, 19 nt, Artificial Sequence
  Description of Artificial Sequence: Synthetic oligonucleotide
ccggcugacucugcagcac

SEQ ID NO: 1896201 - RNA, 19 nt, Artificial Sequence
  Description of Artificial Sequence: Synthetic oligonucleotide
gcacgucaaccaugagaaa

SEQ ID NO: 1896202 - RNA, 19 nt, Artificial Sequence
  Description of Artificial Sequence: Synthetic oligonucleotide
cggaucgggaugggaagac

SEQ ID NO: 1896203 - RNA, 19 nt, Artificial Sequence
  Description of Artificial Sequence: Synthetic oligonucleotide
ccgagucaccacagacuga

SEQ ID NO: 1896204 - RNA, 19 nt, Artificial Sequence
  Description of Artificial Sequence: Synthetic oligonucleotide
ccguguguuggaugccaaa

SEQ ID NO: 1896205 - RNA, 19 nt, Artificial Sequence
  Description of Artificial Sequence: Synthetic oligonucleotide
gggaagaccugggcuuucu

SEQ ID NO: 1896206 - RNA, 19 nt, Artificial Sequence
  Description of Artificial Sequence: Synthetic oligonucleotide
cagaagccuugagcagaaa

SEQ ID NO: 1896207 - RNA, 19 nt, Artificial Sequence
  Description of Artificial Sequence: Synthetic oligonucleotide
gcccuggccugauggccga

SEQ ID NO: 1896208 - RNA, 19 nt, Artificial Sequence
  Description of Artificial Sequence: Synthetic oligonucleotide
ccgguacaugaucccugca

SEQ ID NO: 1896209 - RNA, 19 nt, Artificial Sequence
  Description of Artificial Sequence: Synthetic oligonucleotide
gccguguguuggaugccaa

SEQ ID NO: 1896210 - RNA, 19 nt, Artificial Sequence
  Description of Artificial Sequence: Synthetic oligonucleotide
gccugauggccgaggcaga

SEQ ID NO: 1896211 - RNA, 19 nt, Artificial Sequence
  Description of Artificial Sequence: Synthetic oligonucleotide
cggcaacacccaagcauga

SEQ ID NO: 1896212 - RNA, 19 nt, Artificial Sequence
  Description of Artificial Sequence: Synthetic oligonucleotide
gcgccaggcggaacucuuc

SEQ ID NO: 1896213 - RNA, 19 nt, Artificial Sequence
  Description of Artificial Sequence: Synthetic oligonucleotide
gcucuguggucaacccucu

SEQ ID NO: 1896214 - RNA, 19 nt, Artificial Sequence
  Description of Artificial Sequence: Synthetic oligonucleotide
ccuaggcgccaggcggaac

SEQ ID NO: 1896215 - RNA, 19 nt, Artificial Sequence
  Description of Artificial Sequence: Synthetic oligonucleotide
cccagccgaggcgaugaga

SEQ ID NO: 1896216 - RNA, 19 nt, Artificial Sequence
  Description of Artificial Sequence: Synthetic oligonucleotide
ccucggcccguugcaaaga

SEQ ID NO: 1896217 - RNA, 19 nt, Artificial Sequence
  Description of Artificial Sequence: Synthetic oligonucleotide
cgccugcgugcccaguuca

SEQ ID NO: 1896218 - RNA, 19 nt, Artificial Sequence
  Description of Artificial Sequence: Synthetic oligonucleotide
cgccaagcagagggcuaag

SEQ ID NO: 1896219 - RNA, 19 nt, Artificial Sequence
  Description of Artificial Sequence: Synthetic oligonucleotide
ccaggccgggagaggcuaa

SEQ ID NO: 1896220 - RNA, 19 nt, Artificial Sequence
  Description of Artificial Sequence: Synthetic oligonucleotide
cccaguccuugagucccga

SEQ ID NO: 1896221 - RNA, 19 nt, Artificial Sequence
  Description of Artificial Sequence: Synthetic oligonucleotide
ggcgccaggcggaacucuu

SEQ ID NO: 1896222 - RNA, 19 nt, Artificial Sequence
  Description of Artificial Sequence: Synthetic oligonucleotide
cgaggcgaugagacaggcu

SEQ ID NO: 1896223 - RNA, 19 nt, Artificial Sequence
  Description of Artificial Sequence: Synthetic oligonucleotide
ccuaugcugccggcugacu

SEQ ID NO: 1896224 - RNA, 19 nt, Artificial Sequence
  Description of Artificial Sequence: Synthetic oligonucleotide
cgcuggccguguguuggau

SEQ ID NO: 1896225 - RNA, 19 nt, Artificial Sequence
  Description of Artificial Sequence: Synthetic oligonucleotide
aaagcacgcacauaacugc

SEQ ID NO: 1896226 - RNA, 19 nt, Artificial Sequence
  Description of Artificial Sequence: Synthetic oligonucleotide
uuuacucggucucugaugg

SEQ ID NO: 1896227 - RNA, 19 nt, Artificial Sequence
  Description of Artificial Sequence: Synthetic oligonucleotide
aaaguacaaacguugucac

SEQ ID NO: 1896228 - RNA, 19 nt, Artificial Sequence
  Description of Artificial Sequence: Synthetic oligonucleotide
uauucaagcaaacuaacac

SEQ ID NO: 1896229 - RNA, 19 nt, Artificial Sequence
  Description of Artificial Sequence: Synthetic oligonucleotide
aauauuuguauucaagcaa

SEQ ID NO: 1896230 - RNA, 19 nt, Artificial Sequence
  Description of Artificial Sequence: Synthetic oligonucleotide
aaaccgugcauacacgagc

SEQ ID NO: 1896231 - RNA, 19 nt, Artificial Sequence
  Description of Artificial Sequence: Synthetic oligonucleotide
aaaaguacaaacguuguca

SEQ ID NO: 1896232 - RNA, 19 nt, Artificial Sequence
  Description of Artificial Sequence: Synthetic oligonucleotide
ugcacuaaaagaaagcacu

SEQ ID NO: 1896233 - RNA, 19 nt, Artificial Sequence
  Description of Artificial Sequence: Synthetic oligonucleotide
uggaaaugcacuaaaagaa

SEQ ID NO: 1896234 - RNA, 19 nt, Artificial Sequence
  Description of Artificial Sequence: Synthetic oligonucleotide
agacuuaucaaauauuugu

SEQ ID NO: 1896235 - RNA, 19 nt, Artificial Sequence
  Description of Artificial Sequence: Synthetic oligonucleotide
aaacaggucaauuucgugu

SEQ ID NO: 1896236 - RNA, 19 nt, Artificial Sequence
  Description of Artificial Sequence: Synthetic oligonucleotide
uuacuauugaucaaaguuc

SEQ ID NO: 1896237 - RNA, 19 nt, Artificial Sequence
  Description of Artificial Sequence: Synthetic oligonucleotide
aaagcacuuaaccccauuc

SEQ ID NO: 1896238 - RNA, 19 nt, Artificial Sequence
  Description of Artificial Sequence: Synthetic oligonucleotide
aguacaaacguugucacgg

SEQ ID NO: 1896239 - RNA, 19 nt, Artificial Sequence
  Description of Artificial Sequence: Synthetic oligonucleotide
aacaggucaauuucguguc

SEQ ID NO: 1896240 - RNA, 19 nt, Artificial Sequence
  Description of Artificial Sequence: Synthetic oligonucleotide
gaagagaccggccacgucg

SEQ ID NO: 1896241 - RNA, 19 nt, Artificial Sequence
  Description of Artificial Sequence: Synthetic oligonucleotide
ucaauuucgugucacccgg

SEQ ID NO: 1896242 - RNA, 19 nt, Artificial Sequence
  Description of Artificial Sequence: Synthetic oligonucleotide
uacuauugaucaaaguucc

SEQ ID NO: 1896243 - RNA, 19 nt, Artificial Sequence
  Description of Artificial Sequence: Synthetic oligonucleotide
aacucuaacccgcaggcag

SEQ ID NO: 1896244 - RNA, 19 nt, Artificial Sequence
  Description of Artificial Sequence: Synthetic oligonucleotide
aacguugucacggauauca

SEQ ID NO: 1896245 - RNA, 19 nt, Artificial Sequence
  Description of Artificial Sequence: Synthetic oligonucleotide
aaguugaucaugccuucgg

SEQ ID NO: 1896246 - RNA, 19 nt, Artificial Sequence
  Description of Artificial Sequence: Synthetic oligonucleotide
aucaaaguuccacucuccc

SEQ ID NO: 1896247 - RNA, 19 nt, Artificial Sequence
  Description of Artificial Sequence: Synthetic oligonucleotide
ugauauacaggcuacgcuc

SEQ ID NO: 1896248 - RNA, 19 nt, Artificial Sequence
  Description of Artificial Sequence: Synthetic oligonucleotide
aaagucuggaugcuccguc

SEQ ID NO: 1896249 - RNA, 19 nt, Artificial Sequence
  Description of Artificial Sequence: Synthetic oligonucleotide
auucaagcaaacuaacaca

SEQ ID NO: 1896250 - RNA, 19 nt, Artificial Sequence
  Description of Artificial Sequence: Synthetic oligonucleotide
ucuauaaaccacagguuac

SEQ ID NO: 1896251 - RNA, 19 nt, Artificial Sequence
  Description of Artificial Sequence: Synthetic oligonucleotide
auaacugcgaucugcacca

SEQ ID NO: 1896252 - RNA, 19 nt, Artificial Sequence
  Description of Artificial Sequence: Synthetic oligonucleotide
auacacgagcuacaaauuc

SEQ ID NO: 1896253 - RNA, 19 nt, Artificial Sequence
  Description of Artificial Sequence: Synthetic oligonucleotide
uuuuguggaguaaaccgug

SEQ ID NO: 1896254 - RNA, 19 nt, Artificial Sequence
  Description of Artificial Sequence: Synthetic oligonucleotide
agcacuuaaccccauucac

SEQ ID NO: 1896255 - RNA, 19 nt, Artificial Sequence
  Description of Artificial Sequence: Synthetic oligonucleotide
ucagaaaugggucacuuuu

SEQ ID NO: 1896256 - RNA, 19 nt, Artificial Sequence
  Description of Artificial Sequence: Synthetic oligonucleotide
uguauucaagcaaacuaac

SEQ ID NO: 1896257 - RNA, 19 nt, Artificial Sequence
  Description of Artificial Sequence: Synthetic oligonucleotide
gaguaaaccgugcauacac

SEQ ID NO: 1896258 - RNA, 19 nt, Artificial Sequence
  Description of Artificial Sequence: Synthetic oligonucleotide
cauaacugcgaucugcacc

SEQ ID NO: 1896259 - RNA, 19 nt, Artificial Sequence
  Description of Artificial Sequence: Synthetic oligonucleotide
aaguacaaacguugucacg

SEQ ID NO: 1896260 - RNA, 19 nt, Artificial Sequence
  Description of Artificial Sequence: Synthetic oligonucleotide
aaaguuccacucuccccgc

SEQ ID NO: 1896261 - RNA, 19 nt, Artificial Sequence
  Description of Artificial Sequence: Synthetic oligonucleotide
cacuuaaccccauucacag

SEQ ID NO: 1896262 - RNA, 19 nt, Artificial Sequence
  Description of Artificial Sequence: Synthetic oligonucleotide
ucuauguucccauuagguc

SEQ ID NO: 1896263 - RNA, 19 nt, Artificial Sequence
  Description of Artificial Sequence: Synthetic oligonucleotide
acaucuauguucccauuag

SEQ ID NO: 1896264 - RNA, 19 nt, Artificial Sequence
  Description of Artificial Sequence: Synthetic oligonucleotide
gaaagcacgcacauaacug

SEQ ID NO: 1896265 - RNA, 19 nt, Artificial Sequence
  Description of Artificial Sequence: Synthetic oligonucleotide
uacacgagcuacaaauucu

SEQ ID NO: 1896266 - RNA, 19 nt, Artificial Sequence
  Description of Artificial Sequence: Synthetic oligonucleotide
uuucgugucacccggcuac

SEQ ID NO: 1896267 - RNA, 19 nt, Artificial Sequence
  Description of Artificial Sequence: Synthetic oligonucleotide
aauucaucacgggagcaag

SEQ ID NO: 1896268 - RNA, 19 nt, Artificial Sequence
  Description of Artificial Sequence: Synthetic oligonucleotide
gucaauuucgugucacccg

SEQ ID NO: 1896269 - RNA, 19 nt, Artificial Sequence
  Description of Artificial Sequence: Synthetic oligonucleotide
aagcacuuaaccccauuca

SEQ ID NO: 1896270 - RNA, 19 nt, Artificial Sequence
  Description of Artificial Sequence: Synthetic oligonucleotide
caucacgggagcaagcggg

SEQ ID NO: 1896271 - RNA, 19 nt, Artificial Sequence
  Description of Artificial Sequence: Synthetic oligonucleotide
ugcaccacgcgcaugauau

SEQ ID NO: 1896272 - RNA, 19 nt, Artificial Sequence
  Description of Artificial Sequence: Synthetic oligonucleotide
uucaucacgggagcaagcg

SEQ ID NO: 1896273 - RNA, 19 nt, Artificial Sequence
  Description of Artificial Sequence: Synthetic oligonucleotide
uaaaccgugcauacacgag

SEQ ID NO: 1896274 - RNA, 19 nt, Artificial Sequence
  Description of Artificial Sequence: Synthetic oligonucleotide
cuguuggccaggaagagac

SEQ ID NO: 1896275 - RNA, 19 nt, Artificial Sequence
  Description of Artificial Sequence: Synthetic oligonucleotide
ucugacuccgacagguuug

SEQ ID NO: 1896276 - RNA, 19 nt, Artificial Sequence
  Description of Artificial Sequence: Synthetic oligonucleotide
aggcaaacaggccacuagg

SEQ ID NO: 1896277 - RNA, 19 nt, Artificial Sequence
  Description of Artificial Sequence: Synthetic oligonucleotide
accaccgacgccugggugc

SEQ ID NO: 1896278 - RNA, 19 nt, Artificial Sequence
  Description of Artificial Sequence: Synthetic oligonucleotide
cagauguccccaaugcugg

SEQ ID NO: 1896279 - RNA, 19 nt, Artificial Sequence
  Description of Artificial Sequence: Synthetic oligonucleotide
cuauugaucaaaguuccac

SEQ ID NO: 1896280 - RNA, 19 nt, Artificial Sequence
  Description of Artificial Sequence: Synthetic oligonucleotide
aaccucuuuagacggccuc

SEQ ID NO: 1896281 - RNA, 19 nt, Artificial Sequence
  Description of Artificial Sequence: Synthetic oligonucleotide
agcacugaauucaucacgg

SEQ ID NO: 1896282 - RNA, 19 nt, Artificial Sequence
  Description of Artificial Sequence: Synthetic oligonucleotide
cuggauauccuccccaccc

SEQ ID NO: 1896283 - RNA, 19 nt, Artificial Sequence
  Description of Artificial Sequence: Synthetic oligonucleotide
agcuacaaauucuacucug

SEQ ID NO: 1896284 - RNA, 19 nt, Artificial Sequence
  Description of Artificial Sequence: Synthetic oligonucleotide
aauuucgugucacccggcu

SEQ ID NO: 1896285 - RNA, 19 nt, Artificial Sequence
  Description of Artificial Sequence: Synthetic oligonucleotide
cacagguuacuauugauca

SEQ ID NO: 1896286 - RNA, 19 nt, Artificial Sequence
  Description of Artificial Sequence: Synthetic oligonucleotide
auguccccaaugcugggcc

SEQ ID NO: 1896287 - RNA, 19 nt, Artificial Sequence
  Description of Artificial Sequence: Synthetic oligonucleotide
gaaacaggucaauuucgug

SEQ ID NO: 1896288 - RNA, 19 nt, Artificial Sequence
  Description of Artificial Sequence: Synthetic oligonucleotide
uuuguggaguaaaccgugc

SEQ ID NO: 1896289 - RNA, 19 nt, Artificial Sequence
  Description of Artificial Sequence: Synthetic oligonucleotide
uggugagaggugcaucacg

SEQ ID NO: 1896290 - RNA, 19 nt, Artificial Sequence
  Description of Artificial Sequence: Synthetic oligonucleotide
ucuuuagacggccuccggu

SEQ ID NO: 1896291 - RNA, 19 nt, Artificial Sequence
  Description of Artificial Sequence: Synthetic oligonucleotide
uacaaauucuacucuggau

SEQ ID NO: 1896292 - RNA, 19 nt, Artificial Sequence
  Description of Artificial Sequence: Synthetic oligonucleotide
acuaacacagaucucuaua

SEQ ID NO: 1896293 - RNA, 19 nt, Artificial Sequence
  Description of Artificial Sequence: Synthetic oligonucleotide
caugauauacaggcuacgc

SEQ ID NO: 1896294 - RNA, 19 nt, Artificial Sequence
  Description of Artificial Sequence: Synthetic oligonucleotide
ucgcaaaacccacacacau

SEQ ID NO: 1896295 - RNA, 19 nt, Artificial Sequence
  Description of Artificial Sequence: Synthetic oligonucleotide
aggucaauuucgugucacc

SEQ ID NO: 1896296 - RNA, 19 nt, Artificial Sequence
  Description of Artificial Sequence: Synthetic oligonucleotide
uuuagacggccuccggucc

SEQ ID NO: 1896297 - RNA, 19 nt, Artificial Sequence
  Description of Artificial Sequence: Synthetic oligonucleotide
acgagcuacaaauucuacu

SEQ ID NO: 1896298 - RNA, 19 nt, Artificial Sequence
  Description of Artificial Sequence: Synthetic oligonucleotide
uggaguaaaccgugcauac

SEQ ID NO: 1896299 - RNA, 19 nt, Artificial Sequence
  Description of Artificial Sequence: Synthetic oligonucleotide
ucaucacgggagcaagcgg

SEQ ID NO: 1896300 - RNA, 19 nt, Artificial Sequence
  Description of Artificial Sequence: Synthetic oligonucleotide
acucccgccuuucucggcc

SEQ ID NO: 1896301 - RNA, 19 nt, Artificial Sequence
  Description of Artificial Sequence: Synthetic oligonucleotide
uggaguacuggagaggcca

SEQ ID NO: 1896302 - RNA, 19 nt, Artificial Sequence
  Description of Artificial Sequence: Synthetic oligonucleotide
ggucgcaaaacccacacac

SEQ ID NO: 1896303 - RNA, 19 nt, Artificial Sequence
  Description of Artificial Sequence: Synthetic oligonucleotide
caucuauguucccauuagg

SEQ ID NO: 1896304 - RNA, 19 nt, Artificial Sequence
  Description of Artificial Sequence: Synthetic oligonucleotide
cacggugagcgaaagcacg

SEQ ID NO: 1896305 - RNA, 19 nt, Artificial Sequence
  Description of Artificial Sequence: Synthetic oligonucleotide
cucggcgaagccaucgucg

SEQ ID NO: 1896306 - RNA, 19 nt, Artificial Sequence
  Description of Artificial Sequence: Synthetic oligonucleotide
aacugcgaucugcaccacg

SEQ ID NO: 1896307 - RNA, 19 nt, Artificial Sequence
  Description of Artificial Sequence: Synthetic oligonucleotide
cuuuacucggucucugaug

SEQ ID NO: 1896308 - RNA, 19 nt, Artificial Sequence
  Description of Artificial Sequence: Synthetic oligonucleotide
ucucaguagggucccacga

SEQ ID NO: 1896309 - RNA, 19 nt, Artificial Sequence
  Description of Artificial Sequence: Synthetic oligonucleotide
acgcacauaacugcgaucu

SEQ ID NO: 1896310 - RNA, 19 nt, Artificial Sequence
  Description of Artificial Sequence: Synthetic oligonucleotide
uguggaguaaaccgugcau

SEQ ID NO: 1896311 - RNA, 19 nt, Artificial Sequence
  Description of Artificial Sequence: Synthetic oligonucleotide
uuguggaguaaaccgugca

SEQ ID NO: 1896312 - RNA, 19 nt, Artificial Sequence
  Description of Artificial Sequence: Synthetic oligonucleotide
uugaucaugccuucggauu

SEQ ID NO: 1896313 - RNA, 19 nt, Artificial Sequence
  Description of Artificial Sequence: Synthetic oligonucleotide
acauaacugcgaucugcac

SEQ ID NO: 1896314 - RNA, 19 nt, Artificial Sequence
  Description of Artificial Sequence: Synthetic oligonucleotide
ucaaccucuuuagacggcc

SEQ ID NO: 1896315 - RNA, 19 nt, Artificial Sequence
  Description of Artificial Sequence: Synthetic oligonucleotide
auaaaccacagguuacuau

SEQ ID NO: 1896316 - RNA, 19 nt, Artificial Sequence
  Description of Artificial Sequence: Synthetic oligonucleotide
cuaacacagaucucuauaa

SEQ ID NO: 1896317 - RNA, 19 nt, Artificial Sequence
  Description of Artificial Sequence: Synthetic oligonucleotide
ugaucaugccuucggauuu

SEQ ID NO: 1896318 - RNA, 19 nt, Artificial Sequence
  Description of Artificial Sequence: Synthetic oligonucleotide
cuuuagacggccuccgguc

SEQ ID NO: 1896319 - RNA, 19 nt, Artificial Sequence
  Description of Artificial Sequence: Synthetic oligonucleotide
cuauguucccauuaggucu

SEQ ID NO: 1896320 - RNA, 19 nt, Artificial Sequence
  Description of Artificial Sequence: Synthetic oligonucleotide
gggcuuaaaagacuuauca

SEQ ID NO: 1896321 - RNA, 19 nt, Artificial Sequence
  Description of Artificial Sequence: Synthetic oligonucleotide
cucuauaaaccacagguua

SEQ ID NO: 1896322 - RNA, 19 nt, Artificial Sequence
  Description of Artificial Sequence: Synthetic oligonucleotide
cacagaucucuauaaacca

SEQ ID NO: 1896323 - RNA, 19 nt, Artificial Sequence
  Description of Artificial Sequence: Synthetic oligonucleotide
aucuauguucccauuaggu

SEQ ID NO: 1896324 - RNA, 19 nt, Artificial Sequence
  Description of Artificial Sequence: Synthetic oligonucleotide
guaaaccgugcauacacga

SEQ ID NO: 1896325 - RNA, 19 nt, Artificial Sequence
  Description of Artificial Sequence: Synthetic oligonucleotide
agcgaucagaaauggguca

SEQ ID NO: 1896326 - RNA, 19 nt, Artificial Sequence
  Description of Artificial Sequence: Synthetic oligonucleotide
gccucaaccucuuuagacg

SEQ ID NO: 1896327 - RNA, 19 nt, Artificial Sequence
  Description of Artificial Sequence: Synthetic oligonucleotide
ucucugauggugagaggug

SEQ ID NO: 1896328 - RNA, 19 nt, Artificial Sequence
  Description of Artificial Sequence: Synthetic oligonucleotide
ucggcgaagccaucgucgg

SEQ ID NO: 1896329 - RNA, 19 nt, Artificial Sequence
  Description of Artificial Sequence: Synthetic oligonucleotide
aauucuacucuggaucuuu

SEQ ID NO: 1896330 - RNA, 19 nt, Artificial Sequence
  Description of Artificial Sequence: Synthetic oligonucleotide
uggauauccuccccacccc

SEQ ID NO: 1896331 - RNA, 19 nt, Artificial Sequence
  Description of Artificial Sequence: Synthetic oligonucleotide
acgaccacugccucaaccu

SEQ ID NO: 1896332 - RNA, 19 nt, Artificial Sequence
  Description of Artificial Sequence: Synthetic oligonucleotide
cacuuuuguggaguaaacc

SEQ ID NO: 1896333 - RNA, 19 nt, Artificial Sequence
  Description of Artificial Sequence: Synthetic oligonucleotide
aguugaucaugccuucgga

SEQ ID NO: 1896334 - RNA, 19 nt, Artificial Sequence
  Description of Artificial Sequence: Synthetic oligonucleotide
aguagggucccacgaccac

SEQ ID NO: 1896335 - RNA, 19 nt, Artificial Sequence
  Description of Artificial Sequence: Synthetic oligonucleotide
uccagauguccccaaugcu

SEQ ID NO: 1896336 - RNA, 19 nt, Artificial Sequence
  Description of Artificial Sequence: Synthetic oligonucleotide
aguaaaccgugcauacacg

SEQ ID NO: 1896337 - RNA, 19 nt, Artificial Sequence
  Description of Artificial Sequence: Synthetic oligonucleotide
cagaucucuauaaaccaca

SEQ ID NO: 1896338 - RNA, 19 nt, Artificial Sequence
  Description of Artificial Sequence: Synthetic oligonucleotide
aacucccgccuuucucggc

SEQ ID NO: 1896339 - RNA, 19 nt, Artificial Sequence
  Description of Artificial Sequence: Synthetic oligonucleotide
ucuggaucuuugucccggg

SEQ ID NO: 1896340 - RNA, 19 nt, Artificial Sequence
  Description of Artificial Sequence: Synthetic oligonucleotide
agucucaggcuacccuccc

SEQ ID NO: 1896341 - RNA, 19 nt, Artificial Sequence
  Description of Artificial Sequence: Synthetic oligonucleotide
guuugcuuuacucggucuc

SEQ ID NO: 1896342 - RNA, 19 nt, Artificial Sequence
  Description of Artificial Sequence: Synthetic oligonucleotide
ugucacccggcuacuagug

SEQ ID NO: 1896343 - RNA, 19 nt, Artificial Sequence
  Description of Artificial Sequence: Synthetic oligonucleotide
uacuagugccucuggauau

SEQ ID NO: 1896344 - RNA, 19 nt, Artificial Sequence
  Description of Artificial Sequence: Synthetic oligonucleotide
ggugagaggugcaucacgg

SEQ ID NO: 1896345 - RNA, 19 nt, Artificial Sequence
  Description of Artificial Sequence: Synthetic oligonucleotide
uuugcuuuacucggucucu

SEQ ID NO: 1896346 - RNA, 19 nt, Artificial Sequence
  Description of Artificial Sequence: Synthetic oligonucleotide
acaggcuacgcucgucggg

SEQ ID NO: 1896347 - RNA, 19 nt, Artificial Sequence
  Description of Artificial Sequence: Synthetic oligonucleotide
cagccucccaaagagaccc

SEQ ID NO: 1896348 - RNA, 19 nt, Artificial Sequence
  Description of Artificial Sequence: Synthetic oligonucleotide
uaggucugcagugugcugu

SEQ ID NO: 1896349 - RNA, 19 nt, Artificial Sequence
  Description of Artificial Sequence: Synthetic oligonucleotide
cacggcgcgcuccagagcc

SEQ ID NO: 1896350 - RNA, 19 nt, Artificial Sequence
  Description of Artificial Sequence: Synthetic oligonucleotide
uacaggcuacgcucgucgg

SEQ ID NO: 1896351 - RNA, 19 nt, Artificial Sequence
  Description of Artificial Sequence: Synthetic oligonucleotide
ucacggauaucaagagcac

SEQ ID NO: 1896352 - RNA, 19 nt, Artificial Sequence
  Description of Artificial Sequence: Synthetic oligonucleotide
uuagcuggagcgccagccu

SEQ ID NO: 1896353 - RNA, 19 nt, Artificial Sequence
  Description of Artificial Sequence: Synthetic oligonucleotide
agaucucuauaaaccacag

SEQ ID NO: 1896354 - RNA, 19 nt, Artificial Sequence
  Description of Artificial Sequence: Synthetic oligonucleotide
aagagaccggccacgucgg

SEQ ID NO: 1896355 - RNA, 19 nt, Artificial Sequence
  Description of Artificial Sequence: Synthetic oligonucleotide
agaaacaggucaauuucgu

SEQ ID NO: 1896356 - RNA, 19 nt, Artificial Sequence
  Description of Artificial Sequence: Synthetic oligonucleotide
uucugacuccgacagguuu

SEQ ID NO: 1896357 - RNA, 19 nt, Artificial Sequence
  Description of Artificial Sequence: Synthetic oligonucleotide
aggaaguugaucaugccuu

SEQ ID NO: 1896358 - RNA, 19 nt, Artificial Sequence
  Description of Artificial Sequence: Synthetic oligonucleotide
caggcaaacaggccacuag

SEQ ID NO: 1896359 - RNA, 19 nt, Artificial Sequence
  Description of Artificial Sequence: Synthetic oligonucleotide
ugcaucacggcugguggag

SEQ ID NO: 1896360 - RNA, 19 nt, Artificial Sequence
  Description of Artificial Sequence: Synthetic oligonucleotide
cuacaaauucuacucugga

SEQ ID NO: 1896361 - RNA, 19 nt, Artificial Sequence
  Description of Artificial Sequence: Synthetic oligonucleotide
acggugagcgaaagcacgc

SEQ ID NO: 1896362 - RNA, 19 nt, Artificial Sequence
  Description of Artificial Sequence: Synthetic oligonucleotide
ccucaaccucuuuagacgg

SEQ ID NO: 1896363 - RNA, 19 nt, Artificial Sequence
  Description of Artificial Sequence: Synthetic oligonucleotide
ccaacucccgccuuucucg

SEQ ID NO: 1896364 - RNA, 19 nt, Artificial Sequence
  Description of Artificial Sequence: Synthetic oligonucleotide
agaccggccacgucggucu

SEQ ID NO: 1896365 - RNA, 19 nt, Artificial Sequence
  Description of Artificial Sequence: Synthetic oligonucleotide
agcacuuuuguggaguaaa

SEQ ID NO: 1896366 - RNA, 19 nt, Artificial Sequence
  Description of Artificial Sequence: Synthetic oligonucleotide
cgagcuacaaauucuacuc

SEQ ID NO: 1896367 - RNA, 19 nt, Artificial Sequence
  Description of Artificial Sequence: Synthetic oligonucleotide
cuucggauuugaugagcag

SEQ ID NO: 1896368 - RNA, 19 nt, Artificial Sequence
  Description of Artificial Sequence: Synthetic oligonucleotide
uacaaacguugucacggau

SEQ ID NO: 1896369 - RNA, 19 nt, Artificial Sequence
  Description of Artificial Sequence: Synthetic oligonucleotide
ugguggaguacuggagagg

SEQ ID NO: 1896370 - RNA, 19 nt, Artificial Sequence
  Description of Artificial Sequence: Synthetic oligonucleotide
agggcuuaaaagacuuauc

SEQ ID NO: 1896371 - RNA, 19 nt, Artificial Sequence
  Description of Artificial Sequence: Synthetic oligonucleotide
cuuuuguggaguaaaccgu

SEQ ID NO: 1896372 - RNA, 19 nt, Artificial Sequence
  Description of Artificial Sequence: Synthetic oligonucleotide
cucaguagggucccacgac

SEQ ID NO: 1896373 - RNA, 19 nt, Artificial Sequence
  Description of Artificial Sequence: Synthetic oligonucleotide
ggucaauuucgugucaccc

SEQ ID NO: 1896374 - RNA, 19 nt, Artificial Sequence
  Description of Artificial Sequence: Synthetic oligonucleotide
uuagacggccuccgguccu

SEQ ID NO: 1896375 - RNA, 19 nt, Artificial Sequence
  Description of Artificial Sequence: Synthetic oligonucleotide
gcauacacgagcuacaaau

SEQ ID NO: 1896376 - RNA, 19 nt, Artificial Sequence
  Description of Artificial Sequence: Synthetic oligonucleotide
ggaugcuccgucugaaggc

SEQ ID NO: 1896377 - RNA, 19 nt, Artificial Sequence
  Description of Artificial Sequence: Synthetic oligonucleotide
ugcuuuacucggucucuga

SEQ ID NO: 1896378 - RNA, 19 nt, Artificial Sequence
  Description of Artificial Sequence: Synthetic oligonucleotide
gagcgaucagaaauggguc

SEQ ID NO: 1896379 - RNA, 19 nt, Artificial Sequence
  Description of Artificial Sequence: Synthetic oligonucleotide
accacagguuacuauugau

SEQ ID NO: 1896380 - RNA, 19 nt, Artificial Sequence
  Description of Artificial Sequence: Synthetic oligonucleotide
caggcuacgcucgucgggg

SEQ ID NO: 1896381 - RNA, 19 nt, Artificial Sequence
  Description of Artificial Sequence: Synthetic oligonucleotide
agguuacuauugaucaaag

SEQ ID NO: 1896382 - RNA, 19 nt, Artificial Sequence
  Description of Artificial Sequence: Synthetic oligonucleotide
acuagugccucuggauauc

SEQ ID NO: 1896383 - RNA, 19 nt, Artificial Sequence
  Description of Artificial Sequence: Synthetic oligonucleotide
aaacucuaacccgcaggca

SEQ ID NO: 1896384 - RNA, 19 nt, Artificial Sequence
  Description of Artificial Sequence: Synthetic oligonucleotide
caccccuucucccaagaug

SEQ ID NO: 1896385 - RNA, 19 nt, Artificial Sequence
  Description of Artificial Sequence: Synthetic oligonucleotide
gaauucaucacgggagcaa

SEQ ID NO: 1896386 - RNA, 19 nt, Artificial Sequence
  Description of Artificial Sequence: Synthetic oligonucleotide
cacgcgcaugauauacagg

SEQ ID NO: 1896387 - RNA, 19 nt, Artificial Sequence
  Description of Artificial Sequence: Synthetic oligonucleotide
acucuaacccgcaggcagg

SEQ ID NO: 1896388 - RNA, 19 nt, Artificial Sequence
  Description of Artificial Sequence: Synthetic oligonucleotide
auauacaggcuacgcucgu

SEQ ID NO: 1896389 - RNA, 19 nt, Artificial Sequence
  Description of Artificial Sequence: Synthetic oligonucleotide
cucaaccucuuuagacggc

SEQ ID NO: 1896390 - RNA, 19 nt, Artificial Sequence
  Description of Artificial Sequence: Synthetic oligonucleotide
cagucucaggcuacccucc

SEQ ID NO: 1896391 - RNA, 19 nt, Artificial Sequence
  Description of Artificial Sequence: Synthetic oligonucleotide
aaacguugucacggauauc

SEQ ID NO: 1896392 - RNA, 19 nt, Artificial Sequence
  Description of Artificial Sequence: Synthetic oligonucleotide
ggagagcgaucagaaaugg

SEQ ID NO: 1896393 - RNA, 19 nt, Artificial Sequence
  Description of Artificial Sequence: Synthetic oligonucleotide
cacgagcuacaaauucuac

SEQ ID NO: 1896394 - RNA, 19 nt, Artificial Sequence
  Description of Artificial Sequence: Synthetic oligonucleotide
acggauaucaagagcacuu

SEQ ID NO: 1896395 - RNA, 19 nt, Artificial Sequence
  Description of Artificial Sequence: Synthetic oligonucleotide
caauuucgugucacccggc

SEQ ID NO: 1896396 - RNA, 19 nt, Artificial Sequence
  Description of Artificial Sequence: Synthetic oligonucleotide
cuagugccucuggauaucc

SEQ ID NO: 1896397 - RNA, 19 nt, Artificial Sequence
  Description of Artificial Sequence: Synthetic oligonucleotide
acggccuccgguccuucac

SEQ ID NO: 1896398 - RNA, 19 nt, Artificial Sequence
  Description of Artificial Sequence: Synthetic oligonucleotide
ggcaaacaggccacuaggg

SEQ ID NO: 1896399 - RNA, 19 nt, Artificial Sequence
  Description of Artificial Sequence: Synthetic oligonucleotide
caacucccgccuuucucgg

SEQ ID NO: 1896400 - RNA, 19 nt, Artificial Sequence
  Description of Artificial Sequence: Synthetic oligonucleotide
gucaccaccgacgccuggg

SEQ ID NO: 1896401 - RNA, 19 nt, Artificial Sequence
  Description of Artificial Sequence: Synthetic oligonucleotide
cucuuuagacggccuccgg

SEQ ID NO: 1896402 - RNA, 19 nt, Artificial Sequence
  Description of Artificial Sequence: Synthetic oligonucleotide
gaucaugccuucggauuug

SEQ ID NO: 1896403 - RNA, 19 nt, Artificial Sequence
  Description of Artificial Sequence: Synthetic oligonucleotide
cuacuagugccucuggaua

SEQ ID NO: 1896404 - RNA, 19 nt, Artificial Sequence
  Description of Artificial Sequence: Synthetic oligonucleotide
uccgucugaaggcuugcuu

SEQ ID NO: 1896405 - RNA, 19 nt, Artificial Sequence
  Description of Artificial Sequence: Synthetic oligonucleotide
caccacgcgcaugauauac

SEQ ID NO: 1896406 - RNA, 19 nt, Artificial Sequence
  Description of Artificial Sequence: Synthetic oligonucleotide
aaguuccacucuccccgca

SEQ ID NO: 1896407 - RNA, 19 nt, Artificial Sequence
  Description of Artificial Sequence: Synthetic oligonucleotide
uaacccgcaggcaggcaaa

SEQ ID NO: 1896408 - RNA, 19 nt, Artificial Sequence
  Description of Artificial Sequence: Synthetic oligonucleotide
aaauucuacucuggaucuu

SEQ ID NO: 1896409 - RNA, 19 nt, Artificial Sequence
  Description of Artificial Sequence: Synthetic oligonucleotide
acgucggucugguugccca

SEQ ID NO: 1896410 - RNA, 19 nt, Artificial Sequence
  Description of Artificial Sequence: Synthetic oligonucleotide
ucggucugguugcccagca

SEQ ID NO: 1896411 - RNA, 19 nt, Artificial Sequence
  Description of Artificial Sequence: Synthetic oligonucleotide
guacaaacguugucacgga

SEQ ID NO: 1896412 - RNA, 19 nt, Artificial Sequence
  Description of Artificial Sequence: Synthetic oligonucleotide
ccaaggaagaagaugccga

SEQ ID NO: 1896413 - RNA, 19 nt, Artificial Sequence
  Description of Artificial Sequence: Synthetic oligonucleotide
gagcuacaaauucuacucu

SEQ ID NO: 1896414 - RNA, 19 nt, Artificial Sequence
  Description of Artificial Sequence: Synthetic oligonucleotide
acaaacguugucacggaua

SEQ ID NO: 1896415 - RNA, 19 nt, Artificial Sequence
  Description of Artificial Sequence: Synthetic oligonucleotide
caggucaauuucgugucac

SEQ ID NO: 1896416 - RNA, 19 nt, Artificial Sequence
  Description of Artificial Sequence: Synthetic oligonucleotide
caaacguugucacggauau

SEQ ID NO: 1896417 - RNA, 19 nt, Artificial Sequence
  Description of Artificial Sequence: Synthetic oligonucleotide
aggugcaucacggcuggug

SEQ ID NO: 1896418 - RNA, 19 nt, Artificial Sequence
  Description of Artificial Sequence: Synthetic oligonucleotide
aggcuacgcucgucggggc

SEQ ID NO: 1896419 - RNA, 19 nt, Artificial Sequence
  Description of Artificial Sequence: Synthetic oligonucleotide
gaagaccacggugagcgaa

SEQ ID NO: 1896420 - RNA, 19 nt, Artificial Sequence
  Description of Artificial Sequence: Synthetic oligonucleotide
cugacuccgacagguuugc

SEQ ID NO: 1896421 - RNA, 19 nt, Artificial Sequence
  Description of Artificial Sequence: Synthetic oligonucleotide
acuauugaucaaaguucca

SEQ ID NO: 1896422 - RNA, 19 nt, Artificial Sequence
  Description of Artificial Sequence: Synthetic oligonucleotide
agcgggagccaggaaggcg

SEQ ID NO: 1896423 - RNA, 19 nt, Artificial Sequence
  Description of Artificial Sequence: Synthetic oligonucleotide
ccgucugaaggcuugcuug

SEQ ID NO: 1896424 - RNA, 19 nt, Artificial Sequence
  Description of Artificial Sequence: Synthetic oligonucleotide
cacaucuauguucccauua

SEQ ID NO: 1896425 - RNA, 19 nt, Artificial Sequence
  Description of Artificial Sequence: Synthetic oligonucleotide
gccuuuaggagagcgauca

SEQ ID NO: 1896426 - RNA, 19 nt, Artificial Sequence
  Description of Artificial Sequence: Synthetic oligonucleotide
gcaugauauacaggcuacg

SEQ ID NO: 1896427 - RNA, 19 nt, Artificial Sequence
  Description of Artificial Sequence: Synthetic oligonucleotide
auucuacucuggaucuuug

SEQ ID NO: 1896428 - RNA, 19 nt, Artificial Sequence
  Description of Artificial Sequence: Synthetic oligonucleotide
ucaccaccgacgccugggu

SEQ ID NO: 1896429 - RNA, 19 nt, Artificial Sequence
  Description of Artificial Sequence: Synthetic oligonucleotide
guugaucaugccuucggau

SEQ ID NO: 1896430 - RNA, 19 nt, Artificial Sequence
  Description of Artificial Sequence: Synthetic oligonucleotide
aagaccacggugagcgaaa

SEQ ID NO: 1896431 - RNA, 19 nt, Artificial Sequence
  Description of Artificial Sequence: Synthetic oligonucleotide
auuucgugucacccggcua

SEQ ID NO: 1896432 - RNA, 19 nt, Artificial Sequence
  Description of Artificial Sequence: Synthetic oligonucleotide
guggaguaaaccgugcaua

SEQ ID NO: 1896433 - RNA, 19 nt, Artificial Sequence
  Description of Artificial Sequence: Synthetic oligonucleotide
ccacucuccccgcaggucg

SEQ ID NO: 1896434 - RNA, 19 nt, Artificial Sequence
  Description of Artificial Sequence: Synthetic oligonucleotide
gcgccagccucccaaagag

SEQ ID NO: 1896435 - RNA, 19 nt, Artificial Sequence
  Description of Artificial Sequence: Synthetic oligonucleotide
cucuaacccgcaggcaggc

SEQ ID NO: 1896436 - RNA, 19 nt, Artificial Sequence
  Description of Artificial Sequence: Synthetic oligonucleotide
gaccacggugagcgaaagc

SEQ ID NO: 1896437 - RNA, 19 nt, Artificial Sequence
  Description of Artificial Sequence: Synthetic oligonucleotide
uagugccucuggauauccu

SEQ ID NO: 1896438 - RNA, 19 nt, Artificial Sequence
  Description of Artificial Sequence: Synthetic oligonucleotide
agggucccacgaccacugc

SEQ ID NO: 1896439 - RNA, 19 nt, Artificial Sequence
  Description of Artificial Sequence: Synthetic oligonucleotide
ccacgcgcaugauauacag

SEQ ID NO: 1896440 - RNA, 19 nt, Artificial Sequence
  Description of Artificial Sequence: Synthetic oligonucleotide
gugagcgaaagcacgcaca

SEQ ID NO: 1896441 - RNA, 19 nt, Artificial Sequence
  Description of Artificial Sequence: Synthetic oligonucleotide
uccgacagguuugcuuuac

SEQ ID NO: 1896442 - RNA, 19 nt, Artificial Sequence
  Description of Artificial Sequence: Synthetic oligonucleotide
cacgcacauaacugcgauc

SEQ ID NO: 1896443 - RNA, 19 nt, Artificial Sequence
  Description of Artificial Sequence: Synthetic oligonucleotide
ggugagcgaaagcacgcac

SEQ ID NO: 1896444 - RNA, 19 nt, Artificial Sequence
  Description of Artificial Sequence: Synthetic oligonucleotide
aggucgcaaaacccacaca

SEQ ID NO: 1896445 - RNA, 19 nt, Artificial Sequence
  Description of Artificial Sequence: Synthetic oligonucleotide
acacgagcuacaaauucua

SEQ ID NO: 1896446 - RNA, 19 nt, Artificial Sequence
  Description of Artificial Sequence: Synthetic oligonucleotide
cacuaaaagaaagcacuua

SEQ ID NO: 1896447 - RNA, 19 nt, Artificial Sequence
  Description of Artificial Sequence: Synthetic oligonucleotide
gaugcuccgucugaaggcu

SEQ ID NO: 1896448 - RNA, 19 nt, Artificial Sequence
  Description of Artificial Sequence: Synthetic oligonucleotide
uuacucggucucugauggu

SEQ ID NO: 1896449 - RNA, 19 nt, Artificial Sequence
  Description of Artificial Sequence: Synthetic oligonucleotide
ucaugccuucggauuugau

SEQ ID NO: 1896450 - RNA, 19 nt, Artificial Sequence
  Description of Artificial Sequence: Synthetic oligonucleotide
cccgcaggucgcaaaaccc

SEQ ID NO: 1896451 - RNA, 19 nt, Artificial Sequence
  Description of Artificial Sequence: Synthetic oligonucleotide
agaccacggugagcgaaag

SEQ ID NO: 1896452 - RNA, 19 nt, Artificial Sequence
  Description of Artificial Sequence: Synthetic oligonucleotide
cacucuccccgcaggucgc

SEQ ID NO: 1896453 - RNA, 19 nt, Artificial Sequence
  Description of Artificial Sequence: Synthetic oligonucleotide
cccgggcuuagcuggagcg

SEQ ID NO: 1896454 - RNA, 19 nt, Artificial Sequence
  Description of Artificial Sequence: Synthetic oligonucleotide
gguuacuauugaucaaagu

SEQ ID NO: 1896455 - RNA, 19 nt, Artificial Sequence
  Description of Artificial Sequence: Synthetic oligonucleotide
cgcaugauauacaggcuac

SEQ ID NO: 1896456 - RNA, 19 nt, Artificial Sequence
  Description of Artificial Sequence: Synthetic oligonucleotide
gcacuuaaccccauucaca

SEQ ID NO: 1896457 - RNA, 19 nt, Artificial Sequence
  Description of Artificial Sequence: Synthetic oligonucleotide
ccuucggauuugaugagca

SEQ ID NO: 1896458 - RNA, 19 nt, Artificial Sequence
  Description of Artificial Sequence: Synthetic oligonucleotide
cuuugucccgggcuuagcu

SEQ ID NO: 1896459 - RNA, 19 nt, Artificial Sequence
  Description of Artificial Sequence: Synthetic oligonucleotide
gacuccgacagguuugcuu

SEQ ID NO: 1896460 - RNA, 19 nt, Artificial Sequence
  Description of Artificial Sequence: Synthetic oligonucleotide
ggucucugauggugagagg

SEQ ID NO: 1896461 - RNA, 19 nt, Artificial Sequence
  Description of Artificial Sequence: Synthetic oligonucleotide
gcgcaugauauacaggcua

SEQ ID NO: 1896462 - RNA, 19 nt, Artificial Sequence
  Description of Artificial Sequence: Synthetic oligonucleotide
uguucccauuaggucugca

SEQ ID NO: 1896463 - RNA, 19 nt, Artificial Sequence
  Description of Artificial Sequence: Synthetic oligonucleotide
cauacacgagcuacaaauu

SEQ ID NO: 1896464 - RNA, 19 nt, Artificial Sequence
  Description of Artificial Sequence: Synthetic oligonucleotide
ucuaacccgcaggcaggca

SEQ ID NO: 1896465 - RNA, 19 nt, Artificial Sequence
  Description of Artificial Sequence: Synthetic oligonucleotide
ucuccccgcaggucgcaaa

SEQ ID NO: 1896466 - RNA, 19 nt, Artificial Sequence
  Description of Artificial Sequence: Synthetic oligonucleotide
uucgugucacccggcuacu

SEQ ID NO: 1896467 - RNA, 19 nt, Artificial Sequence
  Description of Artificial Sequence: Synthetic oligonucleotide
gggucccacgaccacugcc

SEQ ID NO: 1896468 - RNA, 19 nt, Artificial Sequence
  Description of Artificial Sequence: Synthetic oligonucleotide
gagaccggccacgucgguc

SEQ ID NO: 1896469 - RNA, 19 nt, Artificial Sequence
  Description of Artificial Sequence: Synthetic oligonucleotide
aucaugccuucggauuuga

SEQ ID NO: 1896470 - RNA, 19 nt, Artificial Sequence
  Description of Artificial Sequence: Synthetic oligonucleotide
ccgugcauacacgagcuac

SEQ ID NO: 1896471 - RNA, 19 nt, Artificial Sequence
  Description of Artificial Sequence: Synthetic oligonucleotide
cagcuggaaaugcacuaaa

SEQ ID NO: 1896472 - RNA, 19 nt, Artificial Sequence
  Description of Artificial Sequence: Synthetic oligonucleotide
gaaagcacuuaaccccauu

SEQ ID NO: 1896473 - RNA, 19 nt, Artificial Sequence
  Description of Artificial Sequence: Synthetic oligonucleotide
gcgaucagaaaugggucac

SEQ ID NO: 1896474 - RNA, 19 nt, Artificial Sequence
  Description of Artificial Sequence: Synthetic oligonucleotide
cuagggcuuaaaagacuua

SEQ ID NO: 1896475 - RNA, 19 nt, Artificial Sequence
  Description of Artificial Sequence: Synthetic oligonucleotide
gugcaucacggcuggugga

SEQ ID NO: 1896476 - RNA, 19 nt, Artificial Sequence
  Description of Artificial Sequence: Synthetic oligonucleotide
accacgcgcaugauauaca

SEQ ID NO: 1896477 - RNA, 19 nt, Artificial Sequence
  Description of Artificial Sequence: Synthetic oligonucleotide
ggcuacuagugccucugga

SEQ ID NO: 1896478 - RNA, 19 nt, Artificial Sequence
  Description of Artificial Sequence: Synthetic oligonucleotide
gugcauacacgagcuacaa

SEQ ID NO: 1896479 - RNA, 19 nt, Artificial Sequence
  Description of Artificial Sequence: Synthetic oligonucleotide
gcuacuagugccucuggau

SEQ ID NO: 1896480 - RNA, 19 nt, Artificial Sequence
  Description of Artificial Sequence: Synthetic oligonucleotide
ggaguaaaccgugcauaca

SEQ ID NO: 1896481 - RNA, 19 nt, Artificial Sequence
  Description of Artificial Sequence: Synthetic oligonucleotide
gcacuuuuguggaguaaac

SEQ ID NO: 1896482 - RNA, 19 nt, Artificial Sequence
  Description of Artificial Sequence: Synthetic oligonucleotide
cgacagguuugcuuuacuc

SEQ ID NO: 1896483 - RNA, 19 nt, Artificial Sequence
  Description of Artificial Sequence: Synthetic oligonucleotide
gugucacccggcuacuagu

SEQ ID NO: 1896484 - RNA, 19 nt, Artificial Sequence
  Description of Artificial Sequence: Synthetic oligonucleotide
gucggucugguugcccagc

SEQ ID NO: 1896485 - RNA, 19 nt, Artificial Sequence
  Description of Artificial Sequence: Synthetic oligonucleotide
cacagucucaggcuacccu

SEQ ID NO: 1896486 - RNA, 19 nt, Artificial Sequence
  Description of Artificial Sequence: Synthetic oligonucleotide
ccccgcaggucgcaaaacc

SEQ ID NO: 1896487 - RNA, 19 nt, Artificial Sequence
  Description of Artificial Sequence: Synthetic oligonucleotide
ccacggugagcgaaagcac

SEQ ID NO: 1896488 - RNA, 19 nt, Artificial Sequence
  Description of Artificial Sequence: Synthetic oligonucleotide
aaggcuugcuuggggccuu

SEQ ID NO: 1896489 - RNA, 19 nt, Artificial Sequence
  Description of Artificial Sequence: Synthetic oligonucleotide
caccaccgacgccugggug

SEQ ID NO: 1896490 - RNA, 19 nt, Artificial Sequence
  Description of Artificial Sequence: Synthetic oligonucleotide
acccggcuacuagugccuc

SEQ ID NO: 1896491 - RNA, 19 nt, Artificial Sequence
  Description of Artificial Sequence: Synthetic oligonucleotide
agaaagcacuuaaccccau

SEQ ID NO: 1896492 - RNA, 19 nt, Artificial Sequence
  Description of Artificial Sequence: Synthetic oligonucleotide
gccucuggauauccucccc

SEQ ID NO: 1896493 - RNA, 19 nt, Artificial Sequence
  Description of Artificial Sequence: Synthetic oligonucleotide
caucacggcugguggagua

SEQ ID NO: 1896494 - RNA, 19 nt, Artificial Sequence
  Description of Artificial Sequence: Synthetic oligonucleotide
gcaaacuaacacagaucuc

SEQ ID NO: 1896495 - RNA, 19 nt, Artificial Sequence
  Description of Artificial Sequence: Synthetic oligonucleotide
cgugucacccggcuacuag

SEQ ID NO: 1896496 - RNA, 19 nt, Artificial Sequence
  Description of Artificial Sequence: Synthetic oligonucleotide
agagaccggccacgucggu

SEQ ID NO: 1896497 - RNA, 19 nt, Artificial Sequence
  Description of Artificial Sequence: Synthetic oligonucleotide
cucggccucuccagauguc

SEQ ID NO: 1896498 - RNA, 19 nt, Artificial Sequence
  Description of Artificial Sequence: Synthetic oligonucleotide
cgcaaaacccacacacauc

SEQ ID NO: 1896499 - RNA, 19 nt, Artificial Sequence
  Description of Artificial Sequence: Synthetic oligonucleotide
ccuuuaggagagcgaucag

SEQ ID NO: 1896500 - RNA, 19 nt, Artificial Sequence
  Description of Artificial Sequence: Synthetic oligonucleotide
cacgucggucugguugccc

SEQ ID NO: 1896501 - RNA, 19 nt, Artificial Sequence
  Description of Artificial Sequence: Synthetic oligonucleotide
gagcacuuuuguggaguaa

SEQ ID NO: 1896502 - RNA, 19 nt, Artificial Sequence
  Description of Artificial Sequence: Synthetic oligonucleotide
uccccgcaggucgcaaaac

SEQ ID NO: 1896503 - RNA, 19 nt, Artificial Sequence
  Description of Artificial Sequence: Synthetic oligonucleotide
agcaagcgggagccaggaa

SEQ ID NO: 1896504 - RNA, 19 nt, Artificial Sequence
  Description of Artificial Sequence: Synthetic oligonucleotide
guagggucccacgaccacu

SEQ ID NO: 1896505 - RNA, 19 nt, Artificial Sequence
  Description of Artificial Sequence: Synthetic oligonucleotide
ggaucuuugucccgggcuu

SEQ ID NO: 1896506 - RNA, 19 nt, Artificial Sequence
  Description of Artificial Sequence: Synthetic oligonucleotide
gacggccuccgguccuuca

SEQ ID NO: 1896507 - RNA, 19 nt, Artificial Sequence
  Description of Artificial Sequence: Synthetic oligonucleotide
cacggauaucaagagcacu

SEQ ID NO: 1896508 - RNA, 19 nt, Artificial Sequence
  Description of Artificial Sequence: Synthetic oligonucleotide
uaacugcgaucugcaccac

SEQ ID NO: 1896509 - RNA, 19 nt, Artificial Sequence
  Description of Artificial Sequence: Synthetic oligonucleotide
cgucggucaccaccgacgc

SEQ ID NO: 1896510 - RNA, 19 nt, Artificial Sequence
  Description of Artificial Sequence: Synthetic oligonucleotide
cccaacucccgccuuucuc

SEQ ID NO: 1896511 - RNA, 19 nt, Artificial Sequence
  Description of Artificial Sequence: Synthetic oligonucleotide
accggccacgucggucugg

SEQ ID NO: 1896512 - RNA, 19 nt, Artificial Sequence
  Description of Artificial Sequence: Synthetic oligonucleotide
acguugucacggauaucaa

SEQ ID NO: 1896513 - RNA, 19 nt, Artificial Sequence
  Description of Artificial Sequence: Synthetic oligonucleotide
cgugcauacacgagcuaca

SEQ ID NO: 1896514 - RNA, 19 nt, Artificial Sequence
  Description of Artificial Sequence: Synthetic oligonucleotide
gcuuuacucggucucugau

SEQ ID NO: 1896515 - RNA, 19 nt, Artificial Sequence
  Description of Artificial Sequence: Synthetic oligonucleotide
gggugcagcagcgcacggc

SEQ ID NO: 1896516 - RNA, 19 nt, Artificial Sequence
  Description of Artificial Sequence: Synthetic oligonucleotide
ucccgccuuucucggccuc

SEQ ID NO: 1896517 - RNA, 19 nt, Artificial Sequence
  Description of Artificial Sequence: Synthetic oligonucleotide
cgaaagcacgcacauaacu

SEQ ID NO: 1896518 - RNA, 19 nt, Artificial Sequence
  Description of Artificial Sequence: Synthetic oligonucleotide
cuccccgcaggucgcaaaa

SEQ ID NO: 1896519 - RNA, 19 nt, Artificial Sequence
  Description of Artificial Sequence: Synthetic oligonucleotide
gguugcagccaaggaagaa

SEQ ID NO: 1896520 - RNA, 19 nt, Artificial Sequence
  Description of Artificial Sequence: Synthetic oligonucleotide
agacggccuccgguccuuc

SEQ ID NO: 1896521 - RNA, 19 nt, Artificial Sequence
  Description of Artificial Sequence: Synthetic oligonucleotide
gcgaaagcacgcacauaac

SEQ ID NO: 1896522 - RNA, 19 nt, Artificial Sequence
  Description of Artificial Sequence: Synthetic oligonucleotide
uuggggccuuuaggagagc

SEQ ID NO: 1896523 - RNA, 19 nt, Artificial Sequence
  Description of Artificial Sequence: Synthetic oligonucleotide
cuacgcucgucggggccac

SEQ ID NO: 1896524 - RNA, 19 nt, Artificial Sequence
  Description of Artificial Sequence: Synthetic oligonucleotide
ccggcuacuagugccucug

SEQ ID NO: 1896525 - RNA, 19 nt, Artificial Sequence
  Description of Artificial Sequence: Synthetic oligonucleotide
uagacggccuccgguccuu

SEQ ID NO: 1896526 - RNA, 19 nt, Artificial Sequence
  Description of Artificial Sequence: Synthetic oligonucleotide
gagcgaaagcacgcacaua

SEQ ID NO: 1896527 - RNA, 19 nt, Artificial Sequence
  Description of Artificial Sequence: Synthetic oligonucleotide
gucccgggcuuagcuggag

SEQ ID NO: 1896528 - RNA, 19 nt, Artificial Sequence
  Description of Artificial Sequence: Synthetic oligonucleotide
cgggcuuagcuggagcgcc

SEQ ID NO: 1896529 - RNA, 19 nt, Artificial Sequence
  Description of Artificial Sequence: Synthetic oligonucleotide
cugcaccacgcgcaugaua

SEQ ID NO: 1896530 - RNA, 19 nt, Artificial Sequence
  Description of Artificial Sequence: Synthetic oligonucleotide
cacccggcuacuagugccu

SEQ ID NO: 1896531 - RNA, 19 nt, Artificial Sequence
  Description of Artificial Sequence: Synthetic oligonucleotide
gccgaagaccacggugagc

SEQ ID NO: 1896532 - RNA, 19 nt, Artificial Sequence
  Description of Artificial Sequence: Synthetic oligonucleotide
gcacuaaaagaaagcacuu

SEQ ID NO: 1896533 - RNA, 19 nt, Artificial Sequence
  Description of Artificial Sequence: Synthetic oligonucleotide
acucuccccgcaggucgca

SEQ ID NO: 1896534 - RNA, 19 nt, Artificial Sequence
  Description of Artificial Sequence: Synthetic oligonucleotide
gccacccucggcgaagcca

SEQ ID NO: 1896535 - RNA, 19 nt, Artificial Sequence
  Description of Artificial Sequence: Synthetic oligonucleotide
cuccgacagguuugcuuua

SEQ ID NO: 1896536 - RNA, 19 nt, Artificial Sequence
  Description of Artificial Sequence: Synthetic oligonucleotide
ggccuuuaggagagcgauc

SEQ ID NO: 1896537 - RNA, 19 nt, Artificial Sequence
  Description of Artificial Sequence: Synthetic oligonucleotide
caucgucggucaccaccga

SEQ ID NO: 1896538 - RNA, 19 nt, Artificial Sequence
  Description of Artificial Sequence: Synthetic oligonucleotide
ccgggcuuagcuggagcgc

SEQ ID NO: 1896539 - RNA, 19 nt, Artificial Sequence
  Description of Artificial Sequence: Synthetic oligonucleotide
cgaccacugccucaaccuc

SEQ ID NO: 1896540 - RNA, 19 nt, Artificial Sequence
  Description of Artificial Sequence: Synthetic oligonucleotide
cgucggucugguugcccag

SEQ ID NO: 1896541 - RNA, 19 nt, Artificial Sequence
  Description of Artificial Sequence: Synthetic oligonucleotide
gggccacccucggcgaagc

SEQ ID NO: 1896542 - RNA, 19 nt, Artificial Sequence
  Description of Artificial Sequence: Synthetic oligonucleotide
gcaggcaaacaggccacua

SEQ ID NO: 1896543 - RNA, 19 nt, Artificial Sequence
  Description of Artificial Sequence: Synthetic oligonucleotide
cggccuccgguccuucacc

SEQ ID NO: 1896544 - RNA, 19 nt, Artificial Sequence
  Description of Artificial Sequence: Synthetic oligonucleotide
acaggccacuagggcuuaa

SEQ ID NO: 1896545 - RNA, 19 nt, Artificial Sequence
  Description of Artificial Sequence: Synthetic oligonucleotide
ggccacccucggcgaagcc

SEQ ID NO: 1896546 - RNA, 19 nt, Artificial Sequence
  Description of Artificial Sequence: Synthetic oligonucleotide
gggcuuagcuggagcgcca

SEQ ID NO: 1896547 - RNA, 19 nt, Artificial Sequence
  Description of Artificial Sequence: Synthetic oligonucleotide
acggcgcgcuccagagccu

SEQ ID NO: 1896548 - RNA, 19 nt, Artificial Sequence
  Description of Artificial Sequence: Synthetic oligonucleotide
gcaccacgcgcaugauaua

SEQ ID NO: 1896549 - RNA, 19 nt, Artificial Sequence
  Description of Artificial Sequence: Synthetic oligonucleotide
ccaccgacgccugggugca

SEQ ID NO: 1896550 - RNA, 19 nt, Artificial Sequence
  Description of Artificial Sequence: Synthetic oligonucleotide
ccacgucggucugguugcc

SEQ ID NO: 1896551 - RNA, 19 nt, Artificial Sequence
  Description of Artificial Sequence: Synthetic oligonucleotide
cgcgcaugauauacaggcu

SEQ ID NO: 1896552 - RNA, 19 nt, Artificial Sequence
  Description of Artificial Sequence: Synthetic oligonucleotide
gaggugcaucacggcuggu

SEQ ID NO: 1896553 - RNA, 19 nt, Artificial Sequence
  Description of Artificial Sequence: Synthetic oligonucleotide
cgaagaccacggugagcga

SEQ ID NO: 1896554 - RNA, 19 nt, Artificial Sequence
  Description of Artificial Sequence: Synthetic oligonucleotide
cggugagcgaaagcacgca

SEQ ID NO: 1896555 - RNA, 19 nt, Artificial Sequence
  Description of Artificial Sequence: Synthetic oligonucleotide
cggauaucaagagcacuuu

SEQ ID NO: 1896556 - RNA, 19 nt, Artificial Sequence
  Description of Artificial Sequence: Synthetic oligonucleotide
cccggcuacuagugccucu

SEQ ID NO: 1896557 - RNA, 19 nt, Artificial Sequence
  Description of Artificial Sequence: Synthetic oligonucleotide
ccaccccuucucccaagau

SEQ ID NO: 1896558 - RNA, 19 nt, Artificial Sequence
  Description of Artificial Sequence: Synthetic oligonucleotide
ccggccacgucggucuggu

SEQ ID NO: 1896559 - RNA, 19 nt, Artificial Sequence
  Description of Artificial Sequence: Synthetic oligonucleotide
ccaccccaacucccgccuu

SEQ ID NO: 1896560 - RNA, 19 nt, Artificial Sequence
  Description of Artificial Sequence: Synthetic oligonucleotide
cggccacgucggucugguu

SEQ ID NO: 1896561 - RNA, 19 nt, Artificial Sequence
  Description of Artificial Sequence: Synthetic oligonucleotide
aauaguauagagugcaggc

SEQ ID NO: 1896562 - RNA, 19 nt, Artificial Sequence
  Description of Artificial Sequence: Synthetic oligonucleotide
ucaaugauaacguuguugg

SEQ ID NO: 1896563 - RNA, 19 nt, Artificial Sequence
  Description of Artificial Sequence: Synthetic oligonucleotide
aauggaaccagucacucac

SEQ ID NO: 1896564 - RNA, 19 nt, Artificial Sequence
  Description of Artificial Sequence: Synthetic oligonucleotide
aauucaaaugucuccgcgc

SEQ ID NO: 1896565 - RNA, 19 nt, Artificial Sequence
  Description of Artificial Sequence: Synthetic oligonucleotide
ugacaugugaguucgaugg

SEQ ID NO: 1896566 - RNA, 19 nt, Artificial Sequence
  Description of Artificial Sequence: Synthetic oligonucleotide
ugguugacaacuuucaugg

SEQ ID NO: 1896567 - RNA, 19 nt, Artificial Sequence
  Description of Artificial Sequence: Synthetic oligonucleotide
aauacuugguuccaccugg

SEQ ID NO: 1896568 - RNA, 19 nt, Artificial Sequence
  Description of Artificial Sequence: Synthetic oligonucleotide
acaacuuucauggagaggg

SEQ ID NO: 1896569 - RNA, 19 nt, Artificial Sequence
  Description of Artificial Sequence: Synthetic oligonucleotide
aaaaccaaacacauuuucc

SEQ ID NO: 1896570 - RNA, 19 nt, Artificial Sequence
  Description of Artificial Sequence: Synthetic oligonucleotide
aauauucuauggcuccucc

SEQ ID NO: 1896571 - RNA, 19 nt, Artificial Sequence
  Description of Artificial Sequence: Synthetic oligonucleotide
aggaauuuaagcaaagacc

SEQ ID NO: 1896572 - RNA, 19 nt, Artificial Sequence
  Description of Artificial Sequence: Synthetic oligonucleotide
uuaagcaaagaccugaaau

SEQ ID NO: 1896573 - RNA, 19 nt, Artificial Sequence
  Description of Artificial Sequence: Synthetic oligonucleotide
aaauaguauagagugcagg

SEQ ID NO: 1896574 - RNA, 19 nt, Artificial Sequence
  Description of Artificial Sequence: Synthetic oligonucleotide
uaauucaaaugucuccgcg

SEQ ID NO: 1896575 - RNA, 19 nt, Artificial Sequence
  Description of Artificial Sequence: Synthetic oligonucleotide
agaauaaugacccuggcuu

SEQ ID NO: 1896576 - RNA, 19 nt, Artificial Sequence
  Description of Artificial Sequence: Synthetic oligonucleotide
aaugauaacguuguuggga

SEQ ID NO: 1896577 - RNA, 19 nt, Artificial Sequence
  Description of Artificial Sequence: Synthetic oligonucleotide
gauaacguuguugggaucg

SEQ ID NO: 1896578 - RNA, 19 nt, Artificial Sequence
  Description of Artificial Sequence: Synthetic oligonucleotide
aagcaaagaccugaaaugg

SEQ ID NO: 1896579 - RNA, 19 nt, Artificial Sequence
  Description of Artificial Sequence: Synthetic oligonucleotide
uguaauccuggaaggagcg

SEQ ID NO: 1896580 - RNA, 19 nt, Artificial Sequence
  Description of Artificial Sequence: Synthetic oligonucleotide
ucugcuaaagcuaauucaa

SEQ ID NO: 1896581 - RNA, 19 nt, Artificial Sequence
  Description of Artificial Sequence: Synthetic oligonucleotide
ugaugauagacagaaagca

SEQ ID NO: 1896582 - RNA, 19 nt, Artificial Sequence
  Description of Artificial Sequence: Synthetic oligonucleotide
ucauccuuaauauucuaug

SEQ ID NO: 1896583 - RNA, 19 nt, Artificial Sequence
  Description of Artificial Sequence: Synthetic oligonucleotide
agaaagcagaauaaugacc

SEQ ID NO: 1896584 - RNA, 19 nt, Artificial Sequence
  Description of Artificial Sequence: Synthetic oligonucleotide
uucuugcucaaugauaacg

SEQ ID NO: 1896585 - RNA, 19 nt, Artificial Sequence
  Description of Artificial Sequence: Synthetic oligonucleotide
agaacgccuaaccugcucc

SEQ ID NO: 1896586 - RNA, 19 nt, Artificial Sequence
  Description of Artificial Sequence: Synthetic oligonucleotide
ucaagggugaucuucugcc

SEQ ID NO: 1896587 - RNA, 19 nt, Artificial Sequence
  Description of Artificial Sequence: Synthetic oligonucleotide
cauccuuaauauucuaugg

SEQ ID NO: 1896588 - RNA, 19 nt, Artificial Sequence
  Description of Artificial Sequence: Synthetic oligonucleotide
ugggauuuugauaaaggcu

SEQ ID NO: 1896589 - RNA, 19 nt, Artificial Sequence
  Description of Artificial Sequence: Synthetic oligonucleotide
caucuacuaucucagaagg

SEQ ID NO: 1896590 - RNA, 19 nt, Artificial Sequence
  Description of Artificial Sequence: Synthetic oligonucleotide
uccuuaauauucuauggcu

SEQ ID NO: 1896591 - RNA, 19 nt, Artificial Sequence
  Description of Artificial Sequence: Synthetic oligonucleotide
cacauuuuccauuuaugcc

SEQ ID NO: 1896592 - RNA, 19 nt, Artificial Sequence
  Description of Artificial Sequence: Synthetic oligonucleotide
acaucuacuaucucagaag

SEQ ID NO: 1896593 - RNA, 19 nt, Artificial Sequence
  Description of Artificial Sequence: Synthetic oligonucleotide
guugacaacuuucauggag

SEQ ID NO: 1896594 - RNA, 19 nt, Artificial Sequence
  Description of Artificial Sequence: Synthetic oligonucleotide
uugacaacuuucauggaga

SEQ ID NO: 1896595 - RNA, 19 nt, Artificial Sequence
  Description of Artificial Sequence: Synthetic oligonucleotide
ugcucaaugauaacguugu

SEQ ID NO: 1896596 - RNA, 19 nt, Artificial Sequence
  Description of Artificial Sequence: Synthetic oligonucleotide
aacaucuacuaucucagaa

SEQ ID NO: 1896597 - RNA, 19 nt, Artificial Sequence
  Description of Artificial Sequence: Synthetic oligonucleotide
augaugauagacagaaagc

SEQ ID NO: 1896598 - RNA, 19 nt, Artificial Sequence
  Description of Artificial Sequence: Synthetic oligonucleotide
ucuugcucaaugauaacgu

SEQ ID NO: 1896599 - RNA, 19 nt, Artificial Sequence
  Description of Artificial Sequence: Synthetic oligonucleotide
uugcaaagggaugagaagc

SEQ ID NO: 1896600 - RNA, 19 nt, Artificial Sequence
  Description of Artificial Sequence: Synthetic oligonucleotide
aauccuugcuuccgacagc

SEQ ID NO: 1896601 - RNA, 19 nt, Artificial Sequence
  Description of Artificial Sequence: Synthetic oligonucleotide
ucuagcugcuugcugaaug

SEQ ID NO: 1896602 - RNA, 19 nt, Artificial Sequence
  Description of Artificial Sequence: Synthetic oligonucleotide
cugggauuuugauaaaggc

SEQ ID NO: 1896603 - RNA, 19 nt, Artificial Sequence
  Description of Artificial Sequence: Synthetic oligonucleotide
ucaucucucggccaauaag

SEQ ID NO: 1896604 - RNA, 19 nt, Artificial Sequence
  Description of Artificial Sequence: Synthetic oligonucleotide
aguucgauggaccaauccu

SEQ ID NO: 1896605 - RNA, 19 nt, Artificial Sequence
  Description of Artificial Sequence: Synthetic oligonucleotide
uaguauagagugcaggcaa

SEQ ID NO: 1896606 - RNA, 19 nt, Artificial Sequence
  Description of Artificial Sequence: Synthetic oligonucleotide
ugaaauggaaccagucacu

SEQ ID NO: 1896607 - RNA, 19 nt, Artificial Sequence
  Description of Artificial Sequence: Synthetic oligonucleotide
aauggagaagccaucugag

SEQ ID NO: 1896608 - RNA, 19 nt, Artificial Sequence
  Description of Artificial Sequence: Synthetic oligonucleotide
uuugaugcaugccuugccu

SEQ ID NO: 1896609 - RNA, 19 nt, Artificial Sequence
  Description of Artificial Sequence: Synthetic oligonucleotide
uauucuauggcuccuccau

SEQ ID NO: 1896610 - RNA, 19 nt, Artificial Sequence
  Description of Artificial Sequence: Synthetic oligonucleotide
gucacucacaugaugauag

SEQ ID NO: 1896611 - RNA, 19 nt, Artificial Sequence
  Description of Artificial Sequence: Synthetic oligonucleotide
ugacccuggcuucagaucu

SEQ ID NO: 1896612 - RNA, 19 nt, Artificial Sequence
  Description of Artificial Sequence: Synthetic oligonucleotide
gcccauaucacucucagag

SEQ ID NO: 1896613 - RNA, 19 nt, Artificial Sequence
  Description of Artificial Sequence: Synthetic oligonucleotide
uucaucgccaagaacgccu

SEQ ID NO: 1896614 - RNA, 19 nt, Artificial Sequence
  Description of Artificial Sequence: Synthetic oligonucleotide
uuccauuuaugccaggaau

SEQ ID NO: 1896615 - RNA, 19 nt, Artificial Sequence
  Description of Artificial Sequence: Synthetic oligonucleotide
ugaaacagucuuuugcaaa

SEQ ID NO: 1896616 - RNA, 19 nt, Artificial Sequence
  Description of Artificial Sequence: Synthetic oligonucleotide
agggaugagaagcaauaag

SEQ ID NO: 1896617 - RNA, 19 nt, Artificial Sequence
  Description of Artificial Sequence: Synthetic oligonucleotide
gagaauacuugguuccacc

SEQ ID NO: 1896618 - RNA, 19 nt, Artificial Sequence
  Description of Artificial Sequence: Synthetic oligonucleotide
aaacauuuugggagcugcc

SEQ ID NO: 1896619 - RNA, 19 nt, Artificial Sequence
  Description of Artificial Sequence: Synthetic oligonucleotide
gggaugagaagcaauaagg

SEQ ID NO: 1896620 - RNA, 19 nt, Artificial Sequence
  Description of Artificial Sequence: Synthetic oligonucleotide
gaugagaagcaauaaggaa

SEQ ID NO: 1896621 - RNA, 19 nt, Artificial Sequence
  Description of Artificial Sequence: Synthetic oligonucleotide
aggaugacaugugaguucg

SEQ ID NO: 1896622 - RNA, 19 nt, Artificial Sequence
  Description of Artificial Sequence: Synthetic oligonucleotide
aaguuuuccauggucucag

SEQ ID NO: 1896623 - RNA, 19 nt, Artificial Sequence
  Description of Artificial Sequence: Synthetic oligonucleotide
ucagaugacuucuugucuc

SEQ ID NO: 1896624 - RNA, 19 nt, Artificial Sequence
  Description of Artificial Sequence: Synthetic oligonucleotide
caugaaacagucuuuugca

SEQ ID NO: 1896625 - RNA, 19 nt, Artificial Sequence
  Description of Artificial Sequence: Synthetic oligonucleotide
gcuaauucaaaugucuccg

SEQ ID NO: 1896626 - RNA, 19 nt, Artificial Sequence
  Description of Artificial Sequence: Synthetic oligonucleotide
aucacucucagagucagag

SEQ ID NO: 1896627 - RNA, 19 nt, Artificial Sequence
  Description of Artificial Sequence: Synthetic oligonucleotide
ucagaucucugguucagca

SEQ ID NO: 1896628 - RNA, 19 nt, Artificial Sequence
  Description of Artificial Sequence: Synthetic oligonucleotide
cuugcaaagggaugagaag

SEQ ID NO: 1896629 - RNA, 19 nt, Artificial Sequence
  Description of Artificial Sequence: Synthetic oligonucleotide
auagucugucaccauagca

SEQ ID NO: 1896630 - RNA, 19 nt, Artificial Sequence
  Description of Artificial Sequence: Synthetic oligonucleotide
cuagcugcuugcugaaugg

SEQ ID NO: 1896631 - RNA, 19 nt, Artificial Sequence
  Description of Artificial Sequence: Synthetic oligonucleotide
aaugacccuggcuucagau

SEQ ID NO: 1896632 - RNA, 19 nt, Artificial Sequence
  Description of Artificial Sequence: Synthetic oligonucleotide
aaccaaacacauuuuccau

SEQ ID NO: 1896633 - RNA, 19 nt, Artificial Sequence
  Description of Artificial Sequence: Synthetic oligonucleotide
uuugcaaaguggccuuugc

SEQ ID NO: 1896634 - RNA, 19 nt, Artificial Sequence
  Description of Artificial Sequence: Synthetic oligonucleotide
aagaacgccuaaccugcuc

SEQ ID NO: 1896635 - RNA, 19 nt, Artificial Sequence
  Description of Artificial Sequence: Synthetic oligonucleotide
augucuccgcgccagcucc

SEQ ID NO: 1896636 - RNA, 19 nt, Artificial Sequence
  Description of Artificial Sequence: Synthetic oligonucleotide
aguguaauccuggaaggag

SEQ ID NO: 1896637 - RNA, 19 nt, Artificial Sequence
  Description of Artificial Sequence: Synthetic oligonucleotide
uagagugcaggcaaguuuu

SEQ ID NO: 1896638 - RNA, 19 nt, Artificial Sequence
  Description of Artificial Sequence: Synthetic oligonucleotide
caauccuugcuuccgacag

SEQ ID NO: 1896639 - RNA, 19 nt, Artificial Sequence
  Description of Artificial Sequence: Synthetic oligonucleotide
caugugaguucgauggacc

SEQ ID NO: 1896640 - RNA, 19 nt, Artificial Sequence
  Description of Artificial Sequence: Synthetic oligonucleotide
ugacaacuuucauggagag

SEQ ID NO: 1896641 - RNA, 19 nt, Artificial Sequence
  Description of Artificial Sequence: Synthetic oligonucleotide
aaauggaaccagucacuca

SEQ ID NO: 1896642 - RNA, 19 nt, Artificial Sequence
  Description of Artificial Sequence: Synthetic oligonucleotide
cuaauucaaaugucuccgc

SEQ ID NO: 1896643 - RNA, 19 nt, Artificial Sequence
  Description of Artificial Sequence: Synthetic oligonucleotide
uucgauggaccaauccuug

SEQ ID NO: 1896644 - RNA, 19 nt, Artificial Sequence
  Description of Artificial Sequence: Synthetic oligonucleotide
uucauccuuaauauucuau

SEQ ID NO: 1896645 - RNA, 19 nt, Artificial Sequence
  Description of Artificial Sequence: Synthetic oligonucleotide
augauaacguuguugggau

SEQ ID NO: 1896646 - RNA, 19 nt, Artificial Sequence
  Description of Artificial Sequence: Synthetic oligonucleotide
agaauacuugguuccaccu

SEQ ID NO: 1896647 - RNA, 19 nt, Artificial Sequence
  Description of Artificial Sequence: Synthetic oligonucleotide
augauagacagaaagcaga

SEQ ID NO: 1896648 - RNA, 19 nt, Artificial Sequence
  Description of Artificial Sequence: Synthetic oligonucleotide
agcagaauaaugacccugg

SEQ ID NO: 1896649 - RNA, 19 nt, Artificial Sequence
  Description of Artificial Sequence: Synthetic oligonucleotide
gcaugaaacagucuuuugc

SEQ ID NO: 1896650 - RNA, 19 nt, Artificial Sequence
  Description of Artificial Sequence: Synthetic oligonucleotide
ugagagcagagggacauag

SEQ ID NO: 1896651 - RNA, 19 nt, Artificial Sequence
  Description of Artificial Sequence: Synthetic oligonucleotide
uucacccacacuuugucuc

SEQ ID NO: 1896652 - RNA, 19 nt, Artificial Sequence
  Description of Artificial Sequence: Synthetic oligonucleotide
uuguccacacggcaggaug

SEQ ID NO: 1896653 - RNA, 19 nt, Artificial Sequence
  Description of Artificial Sequence: Synthetic oligonucleotide
ggaagaauucuuugugggg

SEQ ID NO: 1896654 - RNA, 19 nt, Artificial Sequence
  Description of Artificial Sequence: Synthetic oligonucleotide
auuccuuaugcuucuugug

SEQ ID NO: 1896655 - RNA, 19 nt, Artificial Sequence
  Description of Artificial Sequence: Synthetic oligonucleotide
uuuaagcaaagaccugaaa

SEQ ID NO: 1896656 - RNA, 19 nt, Artificial Sequence
  Description of Artificial Sequence: Synthetic oligonucleotide
ucgccaagaacgccuaacc

SEQ ID NO: 1896657 - RNA, 19 nt, Artificial Sequence
  Description of Artificial Sequence: Synthetic oligonucleotide
ugaauggagaagccaucug

SEQ ID NO: 1896658 - RNA, 19 nt, Artificial Sequence
  Description of Artificial Sequence: Synthetic oligonucleotide
acaugugaguucgauggac

SEQ ID NO: 1896659 - RNA, 19 nt, Artificial Sequence
  Description of Artificial Sequence: Synthetic oligonucleotide
cuugcugaauggagaagcc

SEQ ID NO: 1896660 - RNA, 19 nt, Artificial Sequence
  Description of Artificial Sequence: Synthetic oligonucleotide
cuucuuuguagccuugcug

SEQ ID NO: 1896661 - RNA, 19 nt, Artificial Sequence
  Description of Artificial Sequence: Synthetic oligonucleotide
agcaaccucuccuugaaaa

SEQ ID NO: 1896662 - RNA, 19 nt, Artificial Sequence
  Description of Artificial Sequence: Synthetic oligonucleotide
aaagggaugagaagcaaua

SEQ ID NO: 1896663 - RNA, 19 nt, Artificial Sequence
  Description of Artificial Sequence: Synthetic oligonucleotide
caaagaccugaaauggaac

SEQ ID NO: 1896664 - RNA, 19 nt, Artificial Sequence
  Description of Artificial Sequence: Synthetic oligonucleotide
gggauuuugauaaaggcuc

SEQ ID NO: 1896665 - RNA, 19 nt, Artificial Sequence
  Description of Artificial Sequence: Synthetic oligonucleotide
aggcaaguuuuccaugguc

SEQ ID NO: 1896666 - RNA, 19 nt, Artificial Sequence
  Description of Artificial Sequence: Synthetic oligonucleotide
auggaccaauccuugcuuc

SEQ ID NO: 1896667 - RNA, 19 nt, Artificial Sequence
  Description of Artificial Sequence: Synthetic oligonucleotide
caaugauaacguuguuggg

SEQ ID NO: 1896668 - RNA, 19 nt, Artificial Sequence
  Description of Artificial Sequence: Synthetic oligonucleotide
cagguaguguucaggacag

SEQ ID NO: 1896669 - RNA, 19 nt, Artificial Sequence
  Description of Artificial Sequence: Synthetic oligonucleotide
aggccauauucucacacug

SEQ ID NO: 1896670 - RNA, 19 nt, Artificial Sequence
  Description of Artificial Sequence: Synthetic oligonucleotide
acacuuugucuccaacauc

SEQ ID NO: 1896671 - RNA, 19 nt, Artificial Sequence
  Description of Artificial Sequence: Synthetic oligonucleotide
ggaauuuaagcaaagaccu

SEQ ID NO: 1896672 - RNA, 19 nt, Artificial Sequence
  Description of Artificial Sequence: Synthetic oligonucleotide
acauuuugggagcugcccu

SEQ ID NO: 1896673 - RNA, 19 nt, Artificial Sequence
  Description of Artificial Sequence: Synthetic oligonucleotide
augacaugugaguucgaug

SEQ ID NO: 1896674 - RNA, 19 nt, Artificial Sequence
  Description of Artificial Sequence: Synthetic oligonucleotide
uuugggagcugcccucuag

SEQ ID NO: 1896675 - RNA, 19 nt, Artificial Sequence
  Description of Artificial Sequence: Synthetic oligonucleotide
acguuguugggaucgaggu

SEQ ID NO: 1896676 - RNA, 19 nt, Artificial Sequence
  Description of Artificial Sequence: Synthetic oligonucleotide
aauaagcuucacccacacu

SEQ ID NO: 1896677 - RNA, 19 nt, Artificial Sequence
  Description of Artificial Sequence: Synthetic oligonucleotide
uggagagggacacuuuuau

SEQ ID NO: 1896678 - RNA, 19 nt, Artificial Sequence
  Description of Artificial Sequence: Synthetic oligonucleotide
uugcaaaguggccuuugca

SEQ ID NO: 1896679 - RNA, 19 nt, Artificial Sequence
  Description of Artificial Sequence: Synthetic oligonucleotide
aagcuucacccacacuuug

SEQ ID NO: 1896680 - RNA, 19 nt, Artificial Sequence
  Description of Artificial Sequence: Synthetic oligonucleotide
uugggaucgaggucuuucc

SEQ ID NO: 1896681 - RNA, 19 nt, Artificial Sequence
  Description of Artificial Sequence: Synthetic oligonucleotide
cuggcugcaugaaacaguc

SEQ ID NO: 1896682 - RNA, 19 nt, Artificial Sequence
  Description of Artificial Sequence: Synthetic oligonucleotide
gaguucgauggaccaaucc

SEQ ID NO: 1896683 - RNA, 19 nt, Artificial Sequence
  Description of Artificial Sequence: Synthetic oligonucleotide
agagaauacuugguuccac

SEQ ID NO: 1896684 - RNA, 19 nt, Artificial Sequence
  Description of Artificial Sequence: Synthetic oligonucleotide
uguccacacggcaggauga

SEQ ID NO: 1896685 - RNA, 19 nt, Artificial Sequence
  Description of Artificial Sequence: Synthetic oligonucleotide
cuugcagguaguguucagg

SEQ ID NO: 1896686 - RNA, 19 nt, Artificial Sequence
  Description of Artificial Sequence: Synthetic oligonucleotide
uauggcuccuccauuucuc

SEQ ID NO: 1896687 - RNA, 19 nt, Artificial Sequence
  Description of Artificial Sequence: Synthetic oligonucleotide
auauucucacacugagucu

SEQ ID NO: 1896688 - RNA, 19 nt, Artificial Sequence
  Description of Artificial Sequence: Synthetic oligonucleotide
aucuacuaucucagaaggc

SEQ ID NO: 1896689 - RNA, 19 nt, Artificial Sequence
  Description of Artificial Sequence: Synthetic oligonucleotide
accaauccuugcuuccgac

SEQ ID NO: 1896690 - RNA, 19 nt, Artificial Sequence
  Description of Artificial Sequence: Synthetic oligonucleotide
auaguauagagugcaggca

SEQ ID NO: 1896691 - RNA, 19 nt, Artificial Sequence
  Description of Artificial Sequence: Synthetic oligonucleotide
ucucaggccuuccugaauu

SEQ ID NO: 1896692 - RNA, 19 nt, Artificial Sequence
  Description of Artificial Sequence: Synthetic oligonucleotide
ccaagaacgccuaaccugc

SEQ ID NO: 1896693 - RNA, 19 nt, Artificial Sequence
  Description of Artificial Sequence: Synthetic oligonucleotide
gaacgccuaaccugcuccg

SEQ ID NO: 1896694 - RNA, 19 nt, Artificial Sequence
  Description of Artificial Sequence: Synthetic oligonucleotide
gaagccaucugagagcaga

SEQ ID NO: 1896695 - RNA, 19 nt, Artificial Sequence
  Description of Artificial Sequence: Synthetic oligonucleotide
ugaauucauccuuaauauu

SEQ ID NO: 1896696 - RNA, 19 nt, Artificial Sequence
  Description of Artificial Sequence: Synthetic oligonucleotide
cucaagggugaucuucugc

SEQ ID NO: 1896697 - RNA, 19 nt, Artificial Sequence
  Description of Artificial Sequence: Synthetic oligonucleotide
ucaccauagcaaccucucc

SEQ ID NO: 1896698 - RNA, 19 nt, Artificial Sequence
  Description of Artificial Sequence: Synthetic oligonucleotide
gaagaauucuuuguggggu

SEQ ID NO: 1896699 - RNA, 19 nt, Artificial Sequence
  Description of Artificial Sequence: Synthetic oligonucleotide
uggaccaauccuugcuucc

SEQ ID NO: 1896700 - RNA, 19 nt, Artificial Sequence
  Description of Artificial Sequence: Synthetic oligonucleotide
ucggggaucagagaauacu

SEQ ID NO: 1896701 - RNA, 19 nt, Artificial Sequence
  Description of Artificial Sequence: Synthetic oligonucleotide
cuuuguagccuugcugucc

SEQ ID NO: 1896702 - RNA, 19 nt, Artificial Sequence
  Description of Artificial Sequence: Synthetic oligonucleotide
gacaacuuucauggagagg

SEQ ID NO: 1896703 - RNA, 19 nt, Artificial Sequence
  Description of Artificial Sequence: Synthetic oligonucleotide
gucacuugcaaagggauga

SEQ ID NO: 1896704 - RNA, 19 nt, Artificial Sequence
  Description of Artificial Sequence: Synthetic oligonucleotide
caauaagcuucacccacac

SEQ ID NO: 1896705 - RNA, 19 nt, Artificial Sequence
  Description of Artificial Sequence: Synthetic oligonucleotide
caucugagagcagagggac

SEQ ID NO: 1896706 - RNA, 19 nt, Artificial Sequence
  Description of Artificial Sequence: Synthetic oligonucleotide
caggaggccauauucucac

SEQ ID NO: 1896707 - RNA, 19 nt, Artificial Sequence
  Description of Artificial Sequence: Synthetic oligonucleotide
aucgccaagaacgccuaac

SEQ ID NO: 1896708 - RNA, 19 nt, Artificial Sequence
  Description of Artificial Sequence: Synthetic oligonucleotide
auauucuauggcuccucca

SEQ ID NO: 1896709 - RNA, 19 nt, Artificial Sequence
  Description of Artificial Sequence: Synthetic oligonucleotide
ucacccacacuuugucucc

SEQ ID NO: 1896710 - RNA, 19 nt, Artificial Sequence
  Description of Artificial Sequence: Synthetic oligonucleotide
gauaaaggcuccauagucu

SEQ ID NO: 1896711 - RNA, 19 nt, Artificial Sequence
  Description of Artificial Sequence: Synthetic oligonucleotide
augaaacagucuuuugcaa

SEQ ID NO: 1896712 - RNA, 19 nt, Artificial Sequence
  Description of Artificial Sequence: Synthetic oligonucleotide
guguaauccuggaaggagc

SEQ ID NO: 1896713 - RNA, 19 nt, Artificial Sequence
  Description of Artificial Sequence: Synthetic oligonucleotide
ucucugguucagcagucac

SEQ ID NO: 1896714 - RNA, 19 nt, Artificial Sequence
  Description of Artificial Sequence: Synthetic oligonucleotide
gccaagaacgccuaaccug

SEQ ID NO: 1896715 - RNA, 19 nt, Artificial Sequence
  Description of Artificial Sequence: Synthetic oligonucleotide
augugaguucgauggacca

SEQ ID NO: 1896716 - RNA, 19 nt, Artificial Sequence
  Description of Artificial Sequence: Synthetic oligonucleotide
uucaaaugucuccgcgcca

SEQ ID NO: 1896717 - RNA, 19 nt, Artificial Sequence
  Description of Artificial Sequence: Synthetic oligonucleotide
ugaugcaugccuugccuuc

SEQ ID NO: 1896718 - RNA, 19 nt, Artificial Sequence
  Description of Artificial Sequence: Synthetic oligonucleotide
ugggaucgaggucuuuccc

SEQ ID NO: 1896719 - RNA, 19 nt, Artificial Sequence
  Description of Artificial Sequence: Synthetic oligonucleotide
agggacauagucagugggg

SEQ ID NO: 1896720 - RNA, 19 nt, Artificial Sequence
  Description of Artificial Sequence: Synthetic oligonucleotide
aggcuccauagucugucac

SEQ ID NO: 1896721 - RNA, 19 nt, Artificial Sequence
  Description of Artificial Sequence: Synthetic oligonucleotide
ugcaggcaaguuuuccaug

SEQ ID NO: 1896722 - RNA, 19 nt, Artificial Sequence
  Description of Artificial Sequence: Synthetic oligonucleotide
caagggugaucuucugccc

SEQ ID NO: 1896723 - RNA, 19 nt, Artificial Sequence
  Description of Artificial Sequence: Synthetic oligonucleotide
accugaaauggaaccaguc

SEQ ID NO: 1896724 - RNA, 19 nt, Artificial Sequence
  Description of Artificial Sequence: Synthetic oligonucleotide
aaaugucuccgcgccagcu

SEQ ID NO: 1896725 - RNA, 19 nt, Artificial Sequence
  Description of Artificial Sequence: Synthetic oligonucleotide
cuuuguggggucaggcuuc

SEQ ID NO: 1896726 - RNA, 19 nt, Artificial Sequence
  Description of Artificial Sequence: Synthetic oligonucleotide
aguauagagugcaggcaag

SEQ ID NO: 1896727 - RNA, 19 nt, Artificial Sequence
  Description of Artificial Sequence: Synthetic oligonucleotide
gguaguguucaggacagcc

SEQ ID NO: 1896728 - RNA, 19 nt, Artificial Sequence
  Description of Artificial Sequence: Synthetic oligonucleotide
ucacucucagagucagagc

SEQ ID NO: 1896729 - RNA, 19 nt, Artificial Sequence
  Description of Artificial Sequence: Synthetic oligonucleotide
ccuuaauauucuauggcuc

SEQ ID NO: 1896730 - RNA, 19 nt, Artificial Sequence
  Description of Artificial Sequence: Synthetic oligonucleotide
agccucaagggugaucuuc

SEQ ID NO: 1896731 - RNA, 19 nt, Artificial Sequence
  Description of Artificial Sequence: Synthetic oligonucleotide
ucgauggaccaauccuugc

SEQ ID NO: 1896732 - RNA, 19 nt, Artificial Sequence
  Description of Artificial Sequence: Synthetic oligonucleotide
agcagucacuggcugcggg

SEQ ID NO: 1896733 - RNA, 19 nt, Artificial Sequence
  Description of Artificial Sequence: Synthetic oligonucleotide
cagaucucugguucagcag

SEQ ID NO: 1896734 - RNA, 19 nt, Artificial Sequence
  Description of Artificial Sequence: Synthetic oligonucleotide
cggccaauaagcuucaccc

SEQ ID NO: 1896735 - RNA, 19 nt, Artificial Sequence
  Description of Artificial Sequence: Synthetic oligonucleotide
gaauucuuuguggggucag

SEQ ID NO: 1896736 - RNA, 19 nt, Artificial Sequence
  Description of Artificial Sequence: Synthetic oligonucleotide
ucuauggcuccuccauuuc

SEQ ID NO: 1896737 - RNA, 19 nt, Artificial Sequence
  Description of Artificial Sequence: Synthetic oligonucleotide
agggugaucuucugcccag

SEQ ID NO: 1896738 - RNA, 19 nt, Artificial Sequence
  Description of Artificial Sequence: Synthetic oligonucleotide
uaauauucuauggcuccuc

SEQ ID NO: 1896739 - RNA, 19 nt, Artificial Sequence
  Description of Artificial Sequence: Synthetic oligonucleotide
ggaucgaggucuuucccag

SEQ ID NO: 1896740 - RNA, 19 nt, Artificial Sequence
  Description of Artificial Sequence: Synthetic oligonucleotide
cauaucacucucagaguca

SEQ ID NO: 1896741 - RNA, 19 nt, Artificial Sequence
  Description of Artificial Sequence: Synthetic oligonucleotide
auuuugauaaaggcuccau

SEQ ID NO: 1896742 - RNA, 19 nt, Artificial Sequence
  Description of Artificial Sequence: Synthetic oligonucleotide
gccaauaagcuucacccac

SEQ ID NO: 1896743 - RNA, 19 nt, Artificial Sequence
  Description of Artificial Sequence: Synthetic oligonucleotide
ccauaucacucucagaguc

SEQ ID NO: 1896744 - RNA, 19 nt, Artificial Sequence
  Description of Artificial Sequence: Synthetic oligonucleotide
ucuuuguagccuugcuguc

SEQ ID NO: 1896745 - RNA, 19 nt, Artificial Sequence
  Description of Artificial Sequence: Synthetic oligonucleotide
acuuucauggagagggaca

SEQ ID NO: 1896746 - RNA, 19 nt, Artificial Sequence
  Description of Artificial Sequence: Synthetic oligonucleotide
ccugaauucauccuuaaua

SEQ ID NO: 1896747 - RNA, 19 nt, Artificial Sequence
  Description of Artificial Sequence: Synthetic oligonucleotide
accauagcaaccucuccuu

SEQ ID NO: 1896748 - RNA, 19 nt, Artificial Sequence
  Description of Artificial Sequence: Synthetic oligonucleotide
auacuugguuccaccuggc

SEQ ID NO: 1896749 - RNA, 19 nt, Artificial Sequence
  Description of Artificial Sequence: Synthetic oligonucleotide
cacucucagagucagagcu

SEQ ID NO: 1896750 - RNA, 19 nt, Artificial Sequence
  Description of Artificial Sequence: Synthetic oligonucleotide
ucacucacaugaugauaga

SEQ ID NO: 1896751 - RNA, 19 nt, Artificial Sequence
  Description of Artificial Sequence: Synthetic oligonucleotide
cacucacaugaugauagac

SEQ ID NO: 1896752 - RNA, 19 nt, Artificial Sequence
  Description of Artificial Sequence: Synthetic oligonucleotide
aaaguggccuuugcagcca

SEQ ID NO: 1896753 - RNA, 19 nt, Artificial Sequence
  Description of Artificial Sequence: Synthetic oligonucleotide
ggaugagaagcaauaagga

SEQ ID NO: 1896754 - RNA, 19 nt, Artificial Sequence
  Description of Artificial Sequence: Synthetic oligonucleotide
ucacuugcaaagggaugag

SEQ ID NO: 1896755 - RNA, 19 nt, Artificial Sequence
  Description of Artificial Sequence: Synthetic oligonucleotide
acggcaggaugacauguga

SEQ ID NO: 1896756 - RNA, 19 nt, Artificial Sequence
  Description of Artificial Sequence: Synthetic oligonucleotide
uaaugacccuggcuucaga

SEQ ID NO: 1896757 - RNA, 19 nt, Artificial Sequence
  Description of Artificial Sequence: Synthetic oligonucleotide
uccaccuggcugcaugaaa

SEQ ID NO: 1896758 - RNA, 19 nt, Artificial Sequence
  Description of Artificial Sequence: Synthetic oligonucleotide
auaaugacccuggcuucag

SEQ ID NO: 1896759 - RNA, 19 nt, Artificial Sequence
  Description of Artificial Sequence: Synthetic oligonucleotide
cuucagaucucugguucag

SEQ ID NO: 1896760 - RNA, 19 nt, Artificial Sequence
  Description of Artificial Sequence: Synthetic oligonucleotide
uccuggaaggagcgccucc

SEQ ID NO: 1896761 - RNA, 19 nt, Artificial Sequence
  Description of Artificial Sequence: Synthetic oligonucleotide
auucauccuuaauauucua

SEQ ID NO: 1896762 - RNA, 19 nt, Artificial Sequence
  Description of Artificial Sequence: Synthetic oligonucleotide
uauagagugcaggcaaguu

SEQ ID NO: 1896763 - RNA, 19 nt, Artificial Sequence
  Description of Artificial Sequence: Synthetic oligonucleotide
uaacguuguugggaucgag

SEQ ID NO: 1896764 - RNA, 19 nt, Artificial Sequence
  Description of Artificial Sequence: Synthetic oligonucleotide
ggucaggcuucucaauucc

SEQ ID NO: 1896765 - RNA, 19 nt, Artificial Sequence
  Description of Artificial Sequence: Synthetic oligonucleotide
agaauucuuugugggguca

SEQ ID NO: 1896766 - RNA, 19 nt, Artificial Sequence
  Description of Artificial Sequence: Synthetic oligonucleotide
ugugaguucgauggaccaa

SEQ ID NO: 1896767 - RNA, 19 nt, Artificial Sequence
  Description of Artificial Sequence: Synthetic oligonucleotide
gacaugugaguucgaugga

SEQ ID NO: 1896768 - RNA, 19 nt, Artificial Sequence
  Description of Artificial Sequence: Synthetic oligonucleotide
guugggaucgaggucuuuc

SEQ ID NO: 1896769 - RNA, 19 nt, Artificial Sequence
  Description of Artificial Sequence: Synthetic oligonucleotide
ggauuuugauaaaggcucc

SEQ ID NO: 1896770 - RNA, 19 nt, Artificial Sequence
  Description of Artificial Sequence: Synthetic oligonucleotide
ggucuuucccaguuccuug

SEQ ID NO: 1896771 - RNA, 19 nt, Artificial Sequence
  Description of Artificial Sequence: Synthetic oligonucleotide
ugcuugcugaauggagaag

SEQ ID NO: 1896772 - RNA, 19 nt, Artificial Sequence
  Description of Artificial Sequence: Synthetic oligonucleotide
agcaaagaccugaaaugga

SEQ ID NO: 1896773 - RNA, 19 nt, Artificial Sequence
  Description of Artificial Sequence: Synthetic oligonucleotide
ggaggccauauucucacac

SEQ ID NO: 1896774 - RNA, 19 nt, Artificial Sequence
  Description of Artificial Sequence: Synthetic oligonucleotide
ugaguucgauggaccaauc

SEQ ID NO: 1896775 - RNA, 19 nt, Artificial Sequence
  Description of Artificial Sequence: Synthetic oligonucleotide
gaaggagcgccuccgccuc

SEQ ID NO: 1896776 - RNA, 19 nt, Artificial Sequence
  Description of Artificial Sequence: Synthetic oligonucleotide
ugauaacguuguugggauc

SEQ ID NO: 1896777 - RNA, 19 nt, Artificial Sequence
  Description of Artificial Sequence: Synthetic oligonucleotide
acuaucucagaaggcuugu

SEQ ID NO: 1896778 - RNA, 19 nt, Artificial Sequence
  Description of Artificial Sequence: Synthetic oligonucleotide
gucuuuccaggagccaggg

SEQ ID NO: 1896779 - RNA, 19 nt, Artificial Sequence
  Description of Artificial Sequence: Synthetic oligonucleotide
gucuuuugcaaaguggccu

SEQ ID NO: 1896780 - RNA, 19 nt, Artificial Sequence
  Description of Artificial Sequence: Synthetic oligonucleotide
gguuccaccuggcugcaug

SEQ ID NO: 1896781 - RNA, 19 nt, Artificial Sequence
  Description of Artificial Sequence: Synthetic oligonucleotide
uaucacucucagagucaga

SEQ ID NO: 1896782 - RNA, 19 nt, Artificial Sequence
  Description of Artificial Sequence: Synthetic oligonucleotide
ugcccaguguaauccugga

SEQ ID NO: 1896783 - RNA, 19 nt, Artificial Sequence
  Description of Artificial Sequence: Synthetic oligonucleotide
cuucaucgccaagaacgcc

SEQ ID NO: 1896784 - RNA, 19 nt, Artificial Sequence
  Description of Artificial Sequence: Synthetic oligonucleotide
cccucauuccuuaugcuuc

SEQ ID NO: 1896785 - RNA, 19 nt, Artificial Sequence
  Description of Artificial Sequence: Synthetic oligonucleotide
cuguccuuugaugcaugcc

SEQ ID NO: 1896786 - RNA, 19 nt, Artificial Sequence
  Description of Artificial Sequence: Synthetic oligonucleotide
ggggcaggaggccauauuc

SEQ ID NO: 1896787 - RNA, 19 nt, Artificial Sequence
  Description of Artificial Sequence: Synthetic oligonucleotide
gaccaauccuugcuuccga

SEQ ID NO: 1896788 - RNA, 19 nt, Artificial Sequence
  Description of Artificial Sequence: Synthetic oligonucleotide
cacggcaggaugacaugug

SEQ ID NO: 1896789 - RNA, 19 nt, Artificial Sequence
  Description of Artificial Sequence: Synthetic oligonucleotide
auuuugggagcugcccucu

SEQ ID NO: 1896790 - RNA, 19 nt, Artificial Sequence
  Description of Artificial Sequence: Synthetic oligonucleotide
ccugaaauggaaccaguca

SEQ ID NO: 1896791 - RNA, 19 nt, Artificial Sequence
  Description of Artificial Sequence: Synthetic oligonucleotide
ccaccuggcugcaugaaac

SEQ ID NO: 1896792 - RNA, 19 nt, Artificial Sequence
  Description of Artificial Sequence: Synthetic oligonucleotide
ucauggagagggacacuuu

SEQ ID NO: 1896793 - RNA, 19 nt, Artificial Sequence
  Description of Artificial Sequence: Synthetic oligonucleotide
acacggcaggaugacaugu

SEQ ID NO: 1896794 - RNA, 19 nt, Artificial Sequence
  Description of Artificial Sequence: Synthetic oligonucleotide
uccucggggaucagagaau

SEQ ID NO: 1896795 - RNA, 19 nt, Artificial Sequence
  Description of Artificial Sequence: Synthetic oligonucleotide
ugcccauaucacucucaga

SEQ ID NO: 1896796 - RNA, 19 nt, Artificial Sequence
  Description of Artificial Sequence: Synthetic oligonucleotide
acgccuaaccugcuccgcu

SEQ ID NO: 1896797 - RNA, 19 nt, Artificial Sequence
  Description of Artificial Sequence: Synthetic oligonucleotide
gaucucugguucagcaguc

SEQ ID NO: 1896798 - RNA, 19 nt, Artificial Sequence
  Description of Artificial Sequence: Synthetic oligonucleotide
caaaugucuccgcgccagc

SEQ ID NO: 1896799 - RNA, 19 nt, Artificial Sequence
  Description of Artificial Sequence: Synthetic oligonucleotide
caaguuuuccauggucuca

SEQ ID NO: 1896800 - RNA, 19 nt, Artificial Sequence
  Description of Artificial Sequence: Synthetic oligonucleotide
gaggccauauucucacacu

SEQ ID NO: 1896801 - RNA, 19 nt, Artificial Sequence
  Description of Artificial Sequence: Synthetic oligonucleotide
aggcuuguccacacggcag

SEQ ID NO: 1896802 - RNA, 19 nt, Artificial Sequence
  Description of Artificial Sequence: Synthetic oligonucleotide
gauggaccaauccuugcuu

SEQ ID NO: 1896803 - RNA, 19 nt, Artificial Sequence
  Description of Artificial Sequence: Synthetic oligonucleotide
gcagaauaaugacccuggc

SEQ ID NO: 1896804 - RNA, 19 nt, Artificial Sequence
  Description of Artificial Sequence: Synthetic oligonucleotide
gaugacaugugaguucgau

SEQ ID NO: 1896805 - RNA, 19 nt, Artificial Sequence
  Description of Artificial Sequence: Synthetic oligonucleotide
guaauccuggaaggagcgc

SEQ ID NO: 1896806 - RNA, 19 nt, Artificial Sequence
  Description of Artificial Sequence: Synthetic oligonucleotide
cacacggcaggaugacaug

SEQ ID NO: 1896807 - RNA, 19 nt, Artificial Sequence
  Description of Artificial Sequence: Synthetic oligonucleotide
agucacucacaugaugaua

SEQ ID NO: 1896808 - RNA, 19 nt, Artificial Sequence
  Description of Artificial Sequence: Synthetic oligonucleotide
cugcuugcugaauggagaa

SEQ ID NO: 1896809 - RNA, 19 nt, Artificial Sequence
  Description of Artificial Sequence: Synthetic oligonucleotide
gagggacacuuuuauucua

SEQ ID NO: 1896810 - RNA, 19 nt, Artificial Sequence
  Description of Artificial Sequence: Synthetic oligonucleotide
aggacagccucaaggguga

SEQ ID NO: 1896811 - RNA, 19 nt, Artificial Sequence
  Description of Artificial Sequence: Synthetic oligonucleotide
agggacacuuuuauucuau

SEQ ID NO: 1896812 - RNA, 19 nt, Artificial Sequence
  Description of Artificial Sequence: Synthetic oligonucleotide
uuucauggagagggacacu

SEQ ID NO: 1896813 - RNA, 19 nt, Artificial Sequence
  Description of Artificial Sequence: Synthetic oligonucleotide
ggggaucagagaauacuug

SEQ ID NO: 1896814 - RNA, 19 nt, Artificial Sequence
  Description of Artificial Sequence: Synthetic oligonucleotide
cacacuuugucuccaacau

SEQ ID NO: 1896815 - RNA, 19 nt, Artificial Sequence
  Description of Artificial Sequence: Synthetic oligonucleotide
gcaaagaccugaaauggaa

SEQ ID NO: 1896816 - RNA, 19 nt, Artificial Sequence
  Description of Artificial Sequence: Synthetic oligonucleotide
ggugaucuucugcccagug

SEQ ID NO: 1896817 - RNA, 19 nt, Artificial Sequence
  Description of Artificial Sequence: Synthetic oligonucleotide
guuccaccuggcugcauga

SEQ ID NO: 1896818 - RNA, 19 nt, Artificial Sequence
  Description of Artificial Sequence: Synthetic oligonucleotide
auaacguuguugggaucga

SEQ ID NO: 1896819 - RNA, 19 nt, Artificial Sequence
  Description of Artificial Sequence: Synthetic oligonucleotide
cucaggccuuccugaauuc

SEQ ID NO: 1896820 - RNA, 19 nt, Artificial Sequence
  Description of Artificial Sequence: Synthetic oligonucleotide
cucggggaucagagaauac

SEQ ID NO: 1896821 - RNA, 19 nt, Artificial Sequence
  Description of Artificial Sequence: Synthetic oligonucleotide
gggaucgaggucuuuccca

SEQ ID NO: 1896822 - RNA, 19 nt, Artificial Sequence
  Description of Artificial Sequence: Synthetic oligonucleotide
cuggaaggagcgccuccgc

SEQ ID NO: 1896823 - RNA, 19 nt, Artificial Sequence
  Description of Artificial Sequence: Synthetic oligonucleotide
ggcaggaggccauauucuc

SEQ ID NO: 1896824 - RNA, 19 nt, Artificial Sequence
  Description of Artificial Sequence: Synthetic oligonucleotide
uuuguggggucaggcuucu

SEQ ID NO: 1896825 - RNA, 19 nt, Artificial Sequence
  Description of Artificial Sequence: Synthetic oligonucleotide
aguguucaggacagccuca

SEQ ID NO: 1896826 - RNA, 19 nt, Artificial Sequence
  Description of Artificial Sequence: Synthetic oligonucleotide
gccuaaccugcuccgcucg

SEQ ID NO: 1896827 - RNA, 19 nt, Artificial Sequence
  Description of Artificial Sequence: Synthetic oligonucleotide
caacaucuacuaucucaga

SEQ ID NO: 1896828 - RNA, 19 nt, Artificial Sequence
  Description of Artificial Sequence: Synthetic oligonucleotide
caaagggaugagaagcaau

SEQ ID NO: 1896829 - RNA, 19 nt, Artificial Sequence
  Description of Artificial Sequence: Synthetic oligonucleotide
gcuguccuuugaugcaugc

SEQ ID NO: 1896830 - RNA, 19 nt, Artificial Sequence
  Description of Artificial Sequence: Synthetic oligonucleotide
cuaucucagaaggcuuguc

SEQ ID NO: 1896831 - RNA, 19 nt, Artificial Sequence
  Description of Artificial Sequence: Synthetic oligonucleotide
uuuugggagcugcccucua

SEQ ID NO: 1896832 - RNA, 19 nt, Artificial Sequence
  Description of Artificial Sequence: Synthetic oligonucleotide
cagucagaugacuucuugu

SEQ ID NO: 1896833 - RNA, 19 nt, Artificial Sequence
  Description of Artificial Sequence: Synthetic oligonucleotide
ggcaaguuuuccauggucu

SEQ ID NO: 1896834 - RNA, 19 nt, Artificial Sequence
  Description of Artificial Sequence: Synthetic oligonucleotide
agcuucacccacacuuugu

SEQ ID NO: 1896835 - RNA, 19 nt, Artificial Sequence
  Description of Artificial Sequence: Synthetic oligonucleotide
ggucacuugcaaagggaug

SEQ ID NO: 1896836 - RNA, 19 nt, Artificial Sequence
  Description of Artificial Sequence: Synthetic oligonucleotide
uccacacggcaggaugaca

SEQ ID NO: 1896837 - RNA, 19 nt, Artificial Sequence
  Description of Artificial Sequence: Synthetic oligonucleotide
ggcugcaugaaacagucuu

SEQ ID NO: 1896838 - RNA, 19 nt, Artificial Sequence
  Description of Artificial Sequence: Synthetic oligonucleotide
caacuuucauggagaggga

SEQ ID NO: 1896839 - RNA, 19 nt, Artificial Sequence
  Description of Artificial Sequence: Synthetic oligonucleotide
guaguguucaggacagccu

SEQ ID NO: 1896840 - RNA, 19 nt, Artificial Sequence
  Description of Artificial Sequence: Synthetic oligonucleotide
gccugggauuuugauaaag

SEQ ID NO: 1896841 - RNA, 19 nt, Artificial Sequence
  Description of Artificial Sequence: Synthetic oligonucleotide
aggaggccauauucucaca

SEQ ID NO: 1896842 - RNA, 19 nt, Artificial Sequence
  Description of Artificial Sequence: Synthetic oligonucleotide
caguguaauccuggaagga

SEQ ID NO: 1896843 - RNA, 19 nt, Artificial Sequence
  Description of Artificial Sequence: Synthetic oligonucleotide
gccaggaauuuaagcaaag

SEQ ID NO: 1896844 - RNA, 19 nt, Artificial Sequence
  Description of Artificial Sequence: Synthetic oligonucleotide
ugccacggcccaucccacc

SEQ ID NO: 1896845 - RNA, 19 nt, Artificial Sequence
  Description of Artificial Sequence: Synthetic oligonucleotide
ccuuugaugcaugccuugc

SEQ ID NO: 1896846 - RNA, 19 nt, Artificial Sequence
  Description of Artificial Sequence: Synthetic oligonucleotide
cagagaauacuugguucca

SEQ ID NO: 1896847 - RNA, 19 nt, Artificial Sequence
  Description of Artificial Sequence: Synthetic oligonucleotide
uccauggucucaggccuuc

SEQ ID NO: 1896848 - RNA, 19 nt, Artificial Sequence
  Description of Artificial Sequence: Synthetic oligonucleotide
ggacauagucaguggggca

SEQ ID NO: 1896849 - RNA, 19 nt, Artificial Sequence
  Description of Artificial Sequence: Synthetic oligonucleotide
gacagccugggauuuugau

SEQ ID NO: 1896850 - RNA, 19 nt, Artificial Sequence
  Description of Artificial Sequence: Synthetic oligonucleotide
uccuagccuggcagccucu

SEQ ID NO: 1896851 - RNA, 19 nt, Artificial Sequence
  Description of Artificial Sequence: Synthetic oligonucleotide
aucccacccucauuccuua

SEQ ID NO: 1896852 - RNA, 19 nt, Artificial Sequence
  Description of Artificial Sequence: Synthetic oligonucleotide
ugucuccgcgccagcuccu

SEQ ID NO: 1896853 - RNA, 19 nt, Artificial Sequence
  Description of Artificial Sequence: Synthetic oligonucleotide
ccaauaagcuucacccaca

SEQ ID NO: 1896854 - RNA, 19 nt, Artificial Sequence
  Description of Artificial Sequence: Synthetic oligonucleotide
ccuggaaggagcgccuccg

SEQ ID NO: 1896855 - RNA, 19 nt, Artificial Sequence
  Description of Artificial Sequence: Synthetic oligonucleotide
gaugcaugccuugccuucu

SEQ ID NO: 1896856 - RNA, 19 nt, Artificial Sequence
  Description of Artificial Sequence: Synthetic oligonucleotide
cagaugacuucuugucucu

SEQ ID NO: 1896857 - RNA, 19 nt, Artificial Sequence
  Description of Artificial Sequence: Synthetic oligonucleotide
guucgauggaccaauccuu

SEQ ID NO: 1896858 - RNA, 19 nt, Artificial Sequence
  Description of Artificial Sequence: Synthetic oligonucleotide
cuauggcuccuccauuucu

SEQ ID NO: 1896859 - RNA, 19 nt, Artificial Sequence
  Description of Artificial Sequence: Synthetic oligonucleotide
ccaucugagagcagaggga

SEQ ID NO: 1896860 - RNA, 19 nt, Artificial Sequence
  Description of Artificial Sequence: Synthetic oligonucleotide
gugaguucgauggaccaau

SEQ ID NO: 1896861 - RNA, 19 nt, Artificial Sequence
  Description of Artificial Sequence: Synthetic oligonucleotide
uugguuccaccuggcugca

SEQ ID NO: 1896862 - RNA, 19 nt, Artificial Sequence
  Description of Artificial Sequence: Synthetic oligonucleotide
gccuccgccucucuucuug

SEQ ID NO: 1896863 - RNA, 19 nt, Artificial Sequence
  Description of Artificial Sequence: Synthetic oligonucleotide
cacacuucuugcagguagu

SEQ ID NO: 1896864 - RNA, 19 nt, Artificial Sequence
  Description of Artificial Sequence: Synthetic oligonucleotide
gguugacaacuuucaugga

SEQ ID NO: 1896865 - RNA, 19 nt, Artificial Sequence
  Description of Artificial Sequence: Synthetic oligonucleotide
ggaucagagaauacuuggu

SEQ ID NO: 1896866 - RNA, 19 nt, Artificial Sequence
  Description of Artificial Sequence: Synthetic oligonucleotide
ccucuagcuccucuagcug

SEQ ID NO: 1896867 - RNA, 19 nt, Artificial Sequence
  Description of Artificial Sequence: Synthetic oligonucleotide
aggagcgccuccgccucuc

SEQ ID NO: 1896868 - RNA, 19 nt, Artificial Sequence
  Description of Artificial Sequence: Synthetic oligonucleotide
cuuccgacagccugggauu

SEQ ID NO: 1896869 - RNA, 19 nt, Artificial Sequence
  Description of Artificial Sequence: Synthetic oligonucleotide
gcugaauggagaagccauc

SEQ ID NO: 1896870 - RNA, 19 nt, Artificial Sequence
  Description of Artificial Sequence: Synthetic oligonucleotide
cacuugcaaagggaugaga

SEQ ID NO: 1896871 - RNA, 19 nt, Artificial Sequence
  Description of Artificial Sequence: Synthetic oligonucleotide
ggggucacuugcaaaggga

SEQ ID NO: 1896872 - RNA, 19 nt, Artificial Sequence
  Description of Artificial Sequence: Synthetic oligonucleotide
gaucgaggucuuucccagu

SEQ ID NO: 1896873 - RNA, 19 nt, Artificial Sequence
  Description of Artificial Sequence: Synthetic oligonucleotide
uuccgacagccugggauuu

SEQ ID NO: 1896874 - RNA, 19 nt, Artificial Sequence
  Description of Artificial Sequence: Synthetic oligonucleotide
guccacacggcaggaugac

SEQ ID NO: 1896875 - RNA, 19 nt, Artificial Sequence
  Description of Artificial Sequence: Synthetic oligonucleotide
agccugggauuuugauaaa

SEQ ID NO: 1896876 - RNA, 19 nt, Artificial Sequence
  Description of Artificial Sequence: Synthetic oligonucleotide
ccaggaauuuaagcaaaga

SEQ ID NO: 1896877 - RNA, 19 nt, Artificial Sequence
  Description of Artificial Sequence: Synthetic oligonucleotide
gcaggaggccauauucuca

SEQ ID NO: 1896878 - RNA, 19 nt, Artificial Sequence
  Description of Artificial Sequence: Synthetic oligonucleotide
augcaugccuugccuucuu

SEQ ID NO: 1896879 - RNA, 19 nt, Artificial Sequence
  Description of Artificial Sequence: Synthetic oligonucleotide
cccacccucauuccuuaug

SEQ ID NO: 1896880 - RNA, 19 nt, Artificial Sequence
  Description of Artificial Sequence: Synthetic oligonucleotide
ccaauccuugcuuccgaca

SEQ ID NO: 1896881 - RNA, 19 nt, Artificial Sequence
  Description of Artificial Sequence: Synthetic oligonucleotide
cggcaggaugacaugugag

SEQ ID NO: 1896882 - RNA, 19 nt, Artificial Sequence
  Description of Artificial Sequence: Synthetic oligonucleotide
cugcaugaaacagucuuuu

SEQ ID NO: 1896883 - RNA, 19 nt, Artificial Sequence
  Description of Artificial Sequence: Synthetic oligonucleotide
cccacacuuugucuccaac

SEQ ID NO: 1896884 - RNA, 19 nt, Artificial Sequence
  Description of Artificial Sequence: Synthetic oligonucleotide
ccaguuccuugguugacaa

SEQ ID NO: 1896885 - RNA, 19 nt, Artificial Sequence
  Description of Artificial Sequence: Synthetic oligonucleotide
ucccacccucauuccuuau

SEQ ID NO: 1896886 - RNA, 19 nt, Artificial Sequence
  Description of Artificial Sequence: Synthetic oligonucleotide
caucccacccucauuccuu

SEQ ID NO: 1896887 - RNA, 19 nt, Artificial Sequence
  Description of Artificial Sequence: Synthetic oligonucleotide
ccucaagggugaucuucug

SEQ ID NO: 1896888 - RNA, 19 nt, Artificial Sequence
  Description of Artificial Sequence: Synthetic oligonucleotide
cguuguugggaucgagguc

SEQ ID NO: 1896889 - RNA, 19 nt, Artificial Sequence
  Description of Artificial Sequence: Synthetic oligonucleotide
gucaggcuucucaauuccu

SEQ ID NO: 1896890 - RNA, 19 nt, Artificial Sequence
  Description of Artificial Sequence: Synthetic oligonucleotide
caagaacgccuaaccugcu

SEQ ID NO: 1896891 - RNA, 19 nt, Artificial Sequence
  Description of Artificial Sequence: Synthetic oligonucleotide
ggggucaggcuucucaauu

SEQ ID NO: 1896892 - RNA, 19 nt, Artificial Sequence
  Description of Artificial Sequence: Synthetic oligonucleotide
gcaggaugacaugugaguu

SEQ ID NO: 1896893 - RNA, 19 nt, Artificial Sequence
  Description of Artificial Sequence: Synthetic oligonucleotide
uccgacagccugggauuuu

SEQ ID NO: 1896894 - RNA, 19 nt, Artificial Sequence
  Description of Artificial Sequence: Synthetic oligonucleotide
cugucacagucagaugacu

SEQ ID NO: 1896895 - RNA, 19 nt, Artificial Sequence
  Description of Artificial Sequence: Synthetic oligonucleotide
guuccuugguugacaacuu

SEQ ID NO: 1896896 - RNA, 19 nt, Artificial Sequence
  Description of Artificial Sequence: Synthetic oligonucleotide
cucggccaauaagcuucac

SEQ ID NO: 1896897 - RNA, 19 nt, Artificial Sequence
  Description of Artificial Sequence: Synthetic oligonucleotide
cacccacacuuugucucca

SEQ ID NO: 1896898 - RNA, 19 nt, Artificial Sequence
  Description of Artificial Sequence: Synthetic oligonucleotide
caucgccaagaacgccuaa

SEQ ID NO: 1896899 - RNA, 19 nt, Artificial Sequence
  Description of Artificial Sequence: Synthetic oligonucleotide
cucuucugcuaaagcuaau

SEQ ID NO: 1896900 - RNA, 19 nt, Artificial Sequence
  Description of Artificial Sequence: Synthetic oligonucleotide
cccauaucacucucagagu

SEQ ID NO: 1896901 - RNA, 19 nt, Artificial Sequence
  Description of Artificial Sequence: Synthetic oligonucleotide
ccauuuaugccaggaauuu

SEQ ID NO: 1896902 - RNA, 19 nt, Artificial Sequence
  Description of Artificial Sequence: Synthetic oligonucleotide
gcugcaugaaacagucuuu

SEQ ID NO: 1896903 - RNA, 19 nt, Artificial Sequence
  Description of Artificial Sequence: Synthetic oligonucleotide
uuguggggucaggcuucuc

SEQ ID NO: 1896904 - RNA, 19 nt, Artificial Sequence
  Description of Artificial Sequence: Synthetic oligonucleotide
cgauggaccaauccuugcu

SEQ ID NO: 1896905 - RNA, 19 nt, Artificial Sequence
  Description of Artificial Sequence: Synthetic oligonucleotide
cgccuaaccugcuccgcuc

SEQ ID NO: 1896906 - RNA, 19 nt, Artificial Sequence
  Description of Artificial Sequence: Synthetic oligonucleotide
ugguuccaccuggcugcau

SEQ ID NO: 1896907 - RNA, 19 nt, Artificial Sequence
  Description of Artificial Sequence: Synthetic oligonucleotide
ccauggucucaggccuucc

SEQ ID NO: 1896908 - RNA, 19 nt, Artificial Sequence
  Description of Artificial Sequence: Synthetic oligonucleotide
cugagagcagagggacaua

SEQ ID NO: 1896909 - RNA, 19 nt, Artificial Sequence
  Description of Artificial Sequence: Synthetic oligonucleotide
cuuguccacacggcaggau

SEQ ID NO: 1896910 - RNA, 19 nt, Artificial Sequence
  Description of Artificial Sequence: Synthetic oligonucleotide
ccucggggaucagagaaua

SEQ ID NO: 1896911 - RNA, 19 nt, Artificial Sequence
  Description of Artificial Sequence: Synthetic oligonucleotide
ggaugacaugugaguucga

SEQ ID NO: 1896912 - RNA, 19 nt, Artificial Sequence
  Description of Artificial Sequence: Synthetic oligonucleotide
ccuccucggggaucagaga

SEQ ID NO: 1896913 - RNA, 19 nt, Artificial Sequence
  Description of Artificial Sequence: Synthetic oligonucleotide
gucuccgcgccagcuccua

SEQ ID NO: 1896914 - RNA, 19 nt, Artificial Sequence
  Description of Artificial Sequence: Synthetic oligonucleotide
cgccaagaacgccuaaccu

SEQ ID NO: 1896915 - RNA, 19 nt, Artificial Sequence
  Description of Artificial Sequence: Synthetic oligonucleotide
cgacagccugggauuuuga

SEQ ID NO: 1896916 - RNA, 19 nt, Artificial Sequence
  Description of Artificial Sequence: Synthetic oligonucleotide
ccuaaccugcuccgcucgu

SEQ ID NO: 1896917 - RNA, 19 nt, Artificial Sequence
  Description of Artificial Sequence: Synthetic oligonucleotide
ccuagccuggcagccucuu

SEQ ID NO: 1896918 - RNA, 19 nt, Artificial Sequence
  Description of Artificial Sequence: Synthetic oligonucleotide
ccgcgccagcuccuagccu

SEQ ID NO: 1896919 - RNA, 19 nt, Artificial Sequence
  Description of Artificial Sequence: Synthetic oligonucleotide
aguguaauuaaguacacac

SEQ ID NO: 1896920 - RNA, 19 nt, Artificial Sequence
  Description of Artificial Sequence: Synthetic oligonucleotide
acaagaaaagguuaaacac

SEQ ID NO: 1896921 - RNA, 19 nt, Artificial Sequence
  Description of Artificial Sequence: Synthetic oligonucleotide
uuaguugucacgcugagcc

SEQ ID NO: 1896922 - RNA, 19 nt, Artificial Sequence
  Description of Artificial Sequence: Synthetic oligonucleotide
aaagguuaaacacauccuc

SEQ ID NO: 1896923 - RNA, 19 nt, Artificial Sequence
  Description of Artificial Sequence: Synthetic oligonucleotide
auuaaguacacacucuagc

SEQ ID NO: 1896924 - RNA, 19 nt, Artificial Sequence
  Description of Artificial Sequence: Synthetic oligonucleotide
gauaacaaacucaauaccg

SEQ ID NO: 1896925 - RNA, 19 nt, Artificial Sequence
  Description of Artificial Sequence: Synthetic oligonucleotide
aaucagguguaauuagugc

SEQ ID NO: 1896926 - RNA, 19 nt, Artificial Sequence
  Description of Artificial Sequence: Synthetic oligonucleotide
uuuaggaagaaauacuacc

SEQ ID NO: 1896927 - RNA, 19 nt, Artificial Sequence
  Description of Artificial Sequence: Synthetic oligonucleotide
uuaaccuauaaucaggugu

SEQ ID NO: 1896928 - RNA, 19 nt, Artificial Sequence
  Description of Artificial Sequence: Synthetic oligonucleotide
uguaauuaaguacacacuc

SEQ ID NO: 1896929 - RNA, 19 nt, Artificial Sequence
  Description of Artificial Sequence: Synthetic oligonucleotide
auuuugacaaaauaaauau

SEQ ID NO: 1896930 - RNA, 19 nt, Artificial Sequence
  Description of Artificial Sequence: Synthetic oligonucleotide
aauacagacaaaugaguug

SEQ ID NO: 1896931 - RNA, 19 nt, Artificial Sequence
  Description of Artificial Sequence: Synthetic oligonucleotide
ugaagugcaaacuuuagga

SEQ ID NO: 1896932 - RNA, 19 nt, Artificial Sequence
  Description of Artificial Sequence: Synthetic oligonucleotide
uuaggaagaaauacuaccc

SEQ ID NO: 1896933 - RNA, 19 nt, Artificial Sequence
  Description of Artificial Sequence: Synthetic oligonucleotide
aggaccuccaaguagagac

SEQ ID NO: 1896934 - RNA, 19 nt, Artificial Sequence
  Description of Artificial Sequence: Synthetic oligonucleotide
aauuagugcuuaugagucc

SEQ ID NO: 1896935 - RNA, 19 nt, Artificial Sequence
  Description of Artificial Sequence: Synthetic oligonucleotide
ugacuuguaagacaacagg

SEQ ID NO: 1896936 - RNA, 19 nt, Artificial Sequence
  Description of Artificial Sequence: Synthetic oligonucleotide
ugauuucuaacacuuguag

SEQ ID NO: 1896937 - RNA, 19 nt, Artificial Sequence
  Description of Artificial Sequence: Synthetic oligonucleotide
aauacuaccccugcucucc

SEQ ID NO: 1896938 - RNA, 19 nt, Artificial Sequence
  Description of Artificial Sequence: Synthetic oligonucleotide
uuagacaguauuuggaagc

SEQ ID NO: 1896939 - RNA, 19 nt, Artificial Sequence
  Description of Artificial Sequence: Synthetic oligonucleotide
ucaacuauuuauuguggcg

SEQ ID NO: 1896940 - RNA, 19 nt, Artificial Sequence
  Description of Artificial Sequence: Synthetic oligonucleotide
uaauuuaguguaauuaagu

SEQ ID NO: 1896941 - RNA, 19 nt, Artificial Sequence
  Description of Artificial Sequence: Synthetic oligonucleotide
aaagucuuggguuggagca

SEQ ID NO: 1896942 - RNA, 19 nt, Artificial Sequence
  Description of Artificial Sequence: Synthetic oligonucleotide
uaauuagugcuuaugaguc

SEQ ID NO: 1896943 - RNA, 19 nt, Artificial Sequence
  Description of Artificial Sequence: Synthetic oligonucleotide
uguaauuagugcuuaugag

SEQ ID NO: 1896944 - RNA, 19 nt, Artificial Sequence
  Description of Artificial Sequence: Synthetic oligonucleotide
ugcaagaacacaaauuaga

SEQ ID NO: 1896945 - RNA, 19 nt, Artificial Sequence
  Description of Artificial Sequence: Synthetic oligonucleotide
uguggauugaccaggcagg

SEQ ID NO: 1896946 - RNA, 19 nt, Artificial Sequence
  Description of Artificial Sequence: Synthetic oligonucleotide
uugacaguuguucuugggg

SEQ ID NO: 1896947 - RNA, 19 nt, Artificial Sequence
  Description of Artificial Sequence: Synthetic oligonucleotide
ugagccacccuccagaacc

SEQ ID NO: 1896948 - RNA, 19 nt, Artificial Sequence
  Description of Artificial Sequence: Synthetic oligonucleotide
gacauauucccuuacuggc

SEQ ID NO: 1896949 - RNA, 19 nt, Artificial Sequence
  Description of Artificial Sequence: Synthetic oligonucleotide
caaguagagacauauuccc

SEQ ID NO: 1896950 - RNA, 19 nt, Artificial Sequence
  Description of Artificial Sequence: Synthetic oligonucleotide
uuuuaaccuauaaucaggu

SEQ ID NO: 1896951 - RNA, 19 nt, Artificial Sequence
  Description of Artificial Sequence: Synthetic oligonucleotide
uguggcguacuuuacaugc

SEQ ID NO: 1896952 - RNA, 19 nt, Artificial Sequence
  Description of Artificial Sequence: Synthetic oligonucleotide
uuaaguacacacucuagcu

SEQ ID NO: 1896953 - RNA, 19 nt, Artificial Sequence
  Description of Artificial Sequence: Synthetic oligonucleotide
agcaaaggaacuccagugc

SEQ ID NO: 1896954 - RNA, 19 nt, Artificial Sequence
  Description of Artificial Sequence: Synthetic oligonucleotide
aaagggaggaccuccaagu

SEQ ID NO: 1896955 - RNA, 19 nt, Artificial Sequence
  Description of Artificial Sequence: Synthetic oligonucleotide
agacaaaugaguuggucag

SEQ ID NO: 1896956 - RNA, 19 nt, Artificial Sequence
  Description of Artificial Sequence: Synthetic oligonucleotide
cagucacucacacagaggg

SEQ ID NO: 1896957 - RNA, 19 nt, Artificial Sequence
  Description of Artificial Sequence: Synthetic oligonucleotide
ucuggaaaccccauguccc

SEQ ID NO: 1896958 - RNA, 19 nt, Artificial Sequence
  Description of Artificial Sequence: Synthetic oligonucleotide
uaaucagguguaauuagug

SEQ ID NO: 1896959 - RNA, 19 nt, Artificial Sequence
  Description of Artificial Sequence: Synthetic oligonucleotide
agugacaagagucugacuu

SEQ ID NO: 1896960 - RNA, 19 nt, Artificial Sequence
  Description of Artificial Sequence: Synthetic oligonucleotide
uuuauuguggcguacuuua

SEQ ID NO: 1896961 - RNA, 19 nt, Artificial Sequence
  Description of Artificial Sequence: Synthetic oligonucleotide
aacaagaagggcuggagau

SEQ ID NO: 1896962 - RNA, 19 nt, Artificial Sequence
  Description of Artificial Sequence: Synthetic oligonucleotide
aauaccgucuuuccagcag

SEQ ID NO: 1896963 - RNA, 19 nt, Artificial Sequence
  Description of Artificial Sequence: Synthetic oligonucleotide
cuaaguggguaccacaggg

SEQ ID NO: 1896964 - RNA, 19 nt, Artificial Sequence
  Description of Artificial Sequence: Synthetic oligonucleotide
cucaauaccgucuuuccag

SEQ ID NO: 1896965 - RNA, 19 nt, Artificial Sequence
  Description of Artificial Sequence: Synthetic oligonucleotide
gacacauuaguugucacgc

SEQ ID NO: 1896966 - RNA, 19 nt, Artificial Sequence
  Description of Artificial Sequence: Synthetic oligonucleotide
acaaauuagacaguauuug

SEQ ID NO: 1896967 - RNA, 19 nt, Artificial Sequence
  Description of Artificial Sequence: Synthetic oligonucleotide
aaauuagacaguauuugga

SEQ ID NO: 1896968 - RNA, 19 nt, Artificial Sequence
  Description of Artificial Sequence: Synthetic oligonucleotide
cagaacacaggguugacag

SEQ ID NO: 1896969 - RNA, 19 nt, Artificial Sequence
  Description of Artificial Sequence: Synthetic oligonucleotide
acaaugaacaagaaaaggu

SEQ ID NO: 1896970 - RNA, 19 nt, Artificial Sequence
  Description of Artificial Sequence: Synthetic oligonucleotide
agugcuaugggugacagca

SEQ ID NO: 1896971 - RNA, 19 nt, Artificial Sequence
  Description of Artificial Sequence: Synthetic oligonucleotide
ggcacagucacucacacag

SEQ ID NO: 1896972 - RNA, 19 nt, Artificial Sequence
  Description of Artificial Sequence: Synthetic oligonucleotide
auccccacaaaugaagugc

SEQ ID NO: 1896973 - RNA, 19 nt, Artificial Sequence
  Description of Artificial Sequence: Synthetic oligonucleotide
ugugaguauggcaggauca

SEQ ID NO: 1896974 - RNA, 19 nt, Artificial Sequence
  Description of Artificial Sequence: Synthetic oligonucleotide
auaauuuaguguaauuaag

SEQ ID NO: 1896975 - RNA, 19 nt, Artificial Sequence
  Description of Artificial Sequence: Synthetic oligonucleotide
aacacggacagugacaaga

SEQ ID NO: 1896976 - RNA, 19 nt, Artificial Sequence
  Description of Artificial Sequence: Synthetic oligonucleotide
aaauacuaccccugcucuc

SEQ ID NO: 1896977 - RNA, 19 nt, Artificial Sequence
  Description of Artificial Sequence: Synthetic oligonucleotide
cacacuucagcacacaaug

SEQ ID NO: 1896978 - RNA, 19 nt, Artificial Sequence
  Description of Artificial Sequence: Synthetic oligonucleotide
aaaugaguuggucagucuu

SEQ ID NO: 1896979 - RNA, 19 nt, Artificial Sequence
  Description of Artificial Sequence: Synthetic oligonucleotide
gagacauauucccuuacug

SEQ ID NO: 1896980 - RNA, 19 nt, Artificial Sequence
  Description of Artificial Sequence: Synthetic oligonucleotide
uaaccuauaaucaggugua

SEQ ID NO: 1896981 - RNA, 19 nt, Artificial Sequence
  Description of Artificial Sequence: Synthetic oligonucleotide
ggcaggaucaaucagaaca

SEQ ID NO: 1896982 - RNA, 19 nt, Artificial Sequence
  Description of Artificial Sequence: Synthetic oligonucleotide
auaccgucuuuccagcagc

SEQ ID NO: 1896983 - RNA, 19 nt, Artificial Sequence
  Description of Artificial Sequence: Synthetic oligonucleotide
ucuacccugagccaucuga

SEQ ID NO: 1896984 - RNA, 19 nt, Artificial Sequence
  Description of Artificial Sequence: Synthetic oligonucleotide
aacaggauaacaaacucaa

SEQ ID NO: 1896985 - RNA, 19 nt, Artificial Sequence
  Description of Artificial Sequence: Synthetic oligonucleotide
ucugacuuguaagacaaca

SEQ ID NO: 1896986 - RNA, 19 nt, Artificial Sequence
  Description of Artificial Sequence: Synthetic oligonucleotide
gaaagucuuggguuggagc

SEQ ID NO: 1896987 - RNA, 19 nt, Artificial Sequence
  Description of Artificial Sequence: Synthetic oligonucleotide
acacaaauuagacaguauu

SEQ ID NO: 1896988 - RNA, 19 nt, Artificial Sequence
  Description of Artificial Sequence: Synthetic oligonucleotide
aaugaagugcaaacuuuag

SEQ ID NO: 1896989 - RNA, 19 nt, Artificial Sequence
  Description of Artificial Sequence: Synthetic oligonucleotide
aguauggcaggaucaauca

SEQ ID NO: 1896990 - RNA, 19 nt, Artificial Sequence
  Description of Artificial Sequence: Synthetic oligonucleotide
ucaucacaacagcagacca

SEQ ID NO: 1896991 - RNA, 19 nt, Artificial Sequence
  Description of Artificial Sequence: Synthetic oligonucleotide
guacuuuacaugcaagaac

SEQ ID NO: 1896992 - RNA, 19 nt, Artificial Sequence
  Description of Artificial Sequence: Synthetic oligonucleotide
aagaaauacuaccccugcu

SEQ ID NO: 1896993 - RNA, 19 nt, Artificial Sequence
  Description of Artificial Sequence: Synthetic oligonucleotide
aaucagaacacaggguuga

SEQ ID NO: 1896994 - RNA, 19 nt, Artificial Sequence
  Description of Artificial Sequence: Synthetic oligonucleotide
gaaagccuagccuagaccu

SEQ ID NO: 1896995 - RNA, 19 nt, Artificial Sequence
  Description of Artificial Sequence: Synthetic oligonucleotide
acaaaugaguuggucaguc

SEQ ID NO: 1896996 - RNA, 19 nt, Artificial Sequence
  Description of Artificial Sequence: Synthetic oligonucleotide
ugggcacuuggcuaagugg

SEQ ID NO: 1896997 - RNA, 19 nt, Artificial Sequence
  Description of Artificial Sequence: Synthetic oligonucleotide
guaauuagugcuuaugagu

SEQ ID NO: 1896998 - RNA, 19 nt, Artificial Sequence
  Description of Artificial Sequence: Synthetic oligonucleotide
acauauucccuuacuggcc

SEQ ID NO: 1896999 - RNA, 19 nt, Artificial Sequence
  Description of Artificial Sequence: Synthetic oligonucleotide
uuuaaccuauaaucaggug

SEQ ID NO: 1897000 - RNA, 19 nt, Artificial Sequence
  Description of Artificial Sequence: Synthetic oligonucleotide
acagugacaagagucugac

SEQ ID NO: 1897001 - RNA, 19 nt, Artificial Sequence
  Description of Artificial Sequence: Synthetic oligonucleotide
cugacuuguaagacaacag

SEQ ID NO: 1897002 - RNA, 19 nt, Artificial Sequence
  Description of Artificial Sequence: Synthetic oligonucleotide
guguaauuagugcuuauga

SEQ ID NO: 1897003 - RNA, 19 nt, Artificial Sequence
  Description of Artificial Sequence: Synthetic oligonucleotide
cuguggauugaccaggcag

SEQ ID NO: 1897004 - RNA, 19 nt, Artificial Sequence
  Description of Artificial Sequence: Synthetic oligonucleotide
ugaccucgccccaagagug

SEQ ID NO: 1897005 - RNA, 19 nt, Artificial Sequence
  Description of Artificial Sequence: Synthetic oligonucleotide
acggacagugacaagaguc

SEQ ID NO: 1897006 - RNA, 19 nt, Artificial Sequence
  Description of Artificial Sequence: Synthetic oligonucleotide
caagaagggcuggagaugg

SEQ ID NO: 1897007 - RNA, 19 nt, Artificial Sequence
  Description of Artificial Sequence: Synthetic oligonucleotide
ucaauaccgucuuuccagc

SEQ ID NO: 1897008 - RNA, 19 nt, Artificial Sequence
  Description of Artificial Sequence: Synthetic oligonucleotide
aguagagacauauucccuu

SEQ ID NO: 1897009 - RNA, 19 nt, Artificial Sequence
  Description of Artificial Sequence: Synthetic oligonucleotide
ucccaaauacagacaaaug

SEQ ID NO: 1897010 - RNA, 19 nt, Artificial Sequence
  Description of Artificial Sequence: Synthetic oligonucleotide
aaugaguuggucagucuug

SEQ ID NO: 1897011 - RNA, 19 nt, Artificial Sequence
  Description of Artificial Sequence: Synthetic oligonucleotide
ugguucaacuauuuauugu

SEQ ID NO: 1897012 - RNA, 19 nt, Artificial Sequence
  Description of Artificial Sequence: Synthetic oligonucleotide
agagucugacuuguaagac

SEQ ID NO: 1897013 - RNA, 19 nt, Artificial Sequence
  Description of Artificial Sequence: Synthetic oligonucleotide
ggauaacaaacucaauacc

SEQ ID NO: 1897014 - RNA, 19 nt, Artificial Sequence
  Description of Artificial Sequence: Synthetic oligonucleotide
ucuaacacuuguagaggcu

SEQ ID NO: 1897015 - RNA, 19 nt, Artificial Sequence
  Description of Artificial Sequence: Synthetic oligonucleotide
gacuuguaagacaacagga

SEQ ID NO: 1897016 - RNA, 19 nt, Artificial Sequence
  Description of Artificial Sequence: Synthetic oligonucleotide
cuagccuagaccuccauga

SEQ ID NO: 1897017 - RNA, 19 nt, Artificial Sequence
  Description of Artificial Sequence: Synthetic oligonucleotide
aguugucacgcugagccac

SEQ ID NO: 1897018 - RNA, 19 nt, Artificial Sequence
  Description of Artificial Sequence: Synthetic oligonucleotide
uguaagacaacaggauaac

SEQ ID NO: 1897019 - RNA, 19 nt, Artificial Sequence
  Description of Artificial Sequence: Synthetic oligonucleotide
ucuuggcccaacuccagcc

SEQ ID NO: 1897020 - RNA, 19 nt, Artificial Sequence
  Description of Artificial Sequence: Synthetic oligonucleotide
auuguggcguacuuuacau

SEQ ID NO: 1897021 - RNA, 19 nt, Artificial Sequence
  Description of Artificial Sequence: Synthetic oligonucleotide
ccaaguagagacauauucc

SEQ ID NO: 1897022 - RNA, 19 nt, Artificial Sequence
  Description of Artificial Sequence: Synthetic oligonucleotide
uaugggugacagcaugggc

SEQ ID NO: 1897023 - RNA, 19 nt, Artificial Sequence
  Description of Artificial Sequence: Synthetic oligonucleotide
auuaguugucacgcugagc

SEQ ID NO: 1897024 - RNA, 19 nt, Artificial Sequence
  Description of Artificial Sequence: Synthetic oligonucleotide
acuauuuauuguggcguac

SEQ ID NO: 1897025 - RNA, 19 nt, Artificial Sequence
  Description of Artificial Sequence: Synthetic oligonucleotide
agccuagaccuccaugaac

SEQ ID NO: 1897026 - RNA, 19 nt, Artificial Sequence
  Description of Artificial Sequence: Synthetic oligonucleotide
caggauaacaaacucaaua

SEQ ID NO: 1897027 - RNA, 19 nt, Artificial Sequence
  Description of Artificial Sequence: Synthetic oligonucleotide
aacuauuuauuguggcgua

SEQ ID NO: 1897028 - RNA, 19 nt, Artificial Sequence
  Description of Artificial Sequence: Synthetic oligonucleotide
guugacaguuguucuuggg

SEQ ID NO: 1897029 - RNA, 19 nt, Artificial Sequence
  Description of Artificial Sequence: Synthetic oligonucleotide
gacuagggaaagccuagcc

SEQ ID NO: 1897030 - RNA, 19 nt, Artificial Sequence
  Description of Artificial Sequence: Synthetic oligonucleotide
aaaggaacuccagugcuau

SEQ ID NO: 1897031 - RNA, 19 nt, Artificial Sequence
  Description of Artificial Sequence: Synthetic oligonucleotide
agucaucacaacagcagac

SEQ ID NO: 1897032 - RNA, 19 nt, Artificial Sequence
  Description of Artificial Sequence: Synthetic oligonucleotide
ggaucaaucagaacacagg

SEQ ID NO: 1897033 - RNA, 19 nt, Artificial Sequence
  Description of Artificial Sequence: Synthetic oligonucleotide
agugcaaacuuuaggaaga

SEQ ID NO: 1897034 - RNA, 19 nt, Artificial Sequence
  Description of Artificial Sequence: Synthetic oligonucleotide
aagcagucuucacacuuca

SEQ ID NO: 1897035 - RNA, 19 nt, Artificial Sequence
  Description of Artificial Sequence: Synthetic oligonucleotide
uuacuggccuccugugugg

SEQ ID NO: 1897036 - RNA, 19 nt, Artificial Sequence
  Description of Artificial Sequence: Synthetic oligonucleotide
uggagcaaaggaacuccag

SEQ ID NO: 1897037 - RNA, 19 nt, Artificial Sequence
  Description of Artificial Sequence: Synthetic oligonucleotide
gauccccacaaaugaagug

SEQ ID NO: 1897038 - RNA, 19 nt, Artificial Sequence
  Description of Artificial Sequence: Synthetic oligonucleotide
uccuguguggcugagcaca

SEQ ID NO: 1897039 - RNA, 19 nt, Artificial Sequence
  Description of Artificial Sequence: Synthetic oligonucleotide
ggacacauuaguugucacg

SEQ ID NO: 1897040 - RNA, 19 nt, Artificial Sequence
  Description of Artificial Sequence: Synthetic oligonucleotide
ucuuggguuggagcaaagg

SEQ ID NO: 1897041 - RNA, 19 nt, Artificial Sequence
  Description of Artificial Sequence: Synthetic oligonucleotide
guaccacagggccacaaag

SEQ ID NO: 1897042 - RNA, 19 nt, Artificial Sequence
  Description of Artificial Sequence: Synthetic oligonucleotide
gaggcuguggauugaccag

SEQ ID NO: 1897043 - RNA, 19 nt, Artificial Sequence
  Description of Artificial Sequence: Synthetic oligonucleotide
gaggguugcagguaggaaa

SEQ ID NO: 1897044 - RNA, 19 nt, Artificial Sequence
  Description of Artificial Sequence: Synthetic oligonucleotide
gaaacacggacagugacaa

SEQ ID NO: 1897045 - RNA, 19 nt, Artificial Sequence
  Description of Artificial Sequence: Synthetic oligonucleotide
caaucagaacacaggguug

SEQ ID NO: 1897046 - RNA, 19 nt, Artificial Sequence
  Description of Artificial Sequence: Synthetic oligonucleotide
uucacacuucagcacacaa

SEQ ID NO: 1897047 - RNA, 19 nt, Artificial Sequence
  Description of Artificial Sequence: Synthetic oligonucleotide
agggaggaccuccaaguag

SEQ ID NO: 1897048 - RNA, 19 nt, Artificial Sequence
  Description of Artificial Sequence: Synthetic oligonucleotide
auaaucagguguaauuagu

SEQ ID NO: 1897049 - RNA, 19 nt, Artificial Sequence
  Description of Artificial Sequence: Synthetic oligonucleotide
uauuuauuguggcguacuu

SEQ ID NO: 1897050 - RNA, 19 nt, Artificial Sequence
  Description of Artificial Sequence: Synthetic oligonucleotide
uccccacaaaugaagugca

SEQ ID NO: 1897051 - RNA, 19 nt, Artificial Sequence
  Description of Artificial Sequence: Synthetic oligonucleotide
aggaucaaucagaacacag

SEQ ID NO: 1897052 - RNA, 19 nt, Artificial Sequence
  Description of Artificial Sequence: Synthetic oligonucleotide
uagacaguauuuggaagca

SEQ ID NO: 1897053 - RNA, 19 nt, Artificial Sequence
  Description of Artificial Sequence: Synthetic oligonucleotide
gacaguuguucuuggggac

SEQ ID NO: 1897054 - RNA, 19 nt, Artificial Sequence
  Description of Artificial Sequence: Synthetic oligonucleotide
agucccggcaauaauuuag

SEQ ID NO: 1897055 - RNA, 19 nt, Artificial Sequence
  Description of Artificial Sequence: Synthetic oligonucleotide
caacaggauaacaaacuca

SEQ ID NO: 1897056 - RNA, 19 nt, Artificial Sequence
  Description of Artificial Sequence: Synthetic oligonucleotide
gaaauacuaccccugcucu

SEQ ID NO: 1897057 - RNA, 19 nt, Artificial Sequence
  Description of Artificial Sequence: Synthetic oligonucleotide
gagucugacuuguaagaca

SEQ ID NO: 1897058 - RNA, 19 nt, Artificial Sequence
  Description of Artificial Sequence: Synthetic oligonucleotide
uuauuguggcguacuuuac

SEQ ID NO: 1897059 - RNA, 19 nt, Artificial Sequence
  Description of Artificial Sequence: Synthetic oligonucleotide
caaagggaggaccuccaag

SEQ ID NO: 1897060 - RNA, 19 nt, Artificial Sequence
  Description of Artificial Sequence: Synthetic oligonucleotide
uucuuggggacuagggaaa

SEQ ID NO: 1897061 - RNA, 19 nt, Artificial Sequence
  Description of Artificial Sequence: Synthetic oligonucleotide
cuagggcugaccucgcccc

SEQ ID NO: 1897062 - RNA, 19 nt, Artificial Sequence
  Description of Artificial Sequence: Synthetic oligonucleotide
ugagucccggcaauaauuu

SEQ ID NO: 1897063 - RNA, 19 nt, Artificial Sequence
  Description of Artificial Sequence: Synthetic oligonucleotide
caucacaacagcagaccac

SEQ ID NO: 1897064 - RNA, 19 nt, Artificial Sequence
  Description of Artificial Sequence: Synthetic oligonucleotide
cagaaacacggacagugac

SEQ ID NO: 1897065 - RNA, 19 nt, Artificial Sequence
  Description of Artificial Sequence: Synthetic oligonucleotide
acuuggcuaaguggguacc

SEQ ID NO: 1897066 - RNA, 19 nt, Artificial Sequence
  Description of Artificial Sequence: Synthetic oligonucleotide
aaguagagacauauucccu

SEQ ID NO: 1897067 - RNA, 19 nt, Artificial Sequence
  Description of Artificial Sequence: Synthetic oligonucleotide
aacacauccucaagaaaau

SEQ ID NO: 1897068 - RNA, 19 nt, Artificial Sequence
  Description of Artificial Sequence: Synthetic oligonucleotide
ugcagguaggaaagucuug

SEQ ID NO: 1897069 - RNA, 19 nt, Artificial Sequence
  Description of Artificial Sequence: Synthetic oligonucleotide
uagagacauauucccuuac

SEQ ID NO: 1897070 - RNA, 19 nt, Artificial Sequence
  Description of Artificial Sequence: Synthetic oligonucleotide
uaugagucccggcaauaau

SEQ ID NO: 1897071 - RNA, 19 nt, Artificial Sequence
  Description of Artificial Sequence: Synthetic oligonucleotide
auacuaccccugcucuccc

SEQ ID NO: 1897072 - RNA, 19 nt, Artificial Sequence
  Description of Artificial Sequence: Synthetic oligonucleotide
uugcagguaggaaagucuu

SEQ ID NO: 1897073 - RNA, 19 nt, Artificial Sequence
  Description of Artificial Sequence: Synthetic oligonucleotide
augaacaagaaaagguuaa

SEQ ID NO: 1897074 - RNA, 19 nt, Artificial Sequence
  Description of Artificial Sequence: Synthetic oligonucleotide
ugacaagagucugacuugu

SEQ ID NO: 1897075 - RNA, 19 nt, Artificial Sequence
  Description of Artificial Sequence: Synthetic oligonucleotide
cauuaguugucacgcugag

SEQ ID NO: 1897076 - RNA, 19 nt, Artificial Sequence
  Description of Artificial Sequence: Synthetic oligonucleotide
gcucuaaggacuuugccca

SEQ ID NO: 1897077 - RNA, 19 nt, Artificial Sequence
  Description of Artificial Sequence: Synthetic oligonucleotide
ugcuuaugagucccggcaa

SEQ ID NO: 1897078 - RNA, 19 nt, Artificial Sequence
  Description of Artificial Sequence: Synthetic oligonucleotide
aauggcucucaugcugcuc

SEQ ID NO: 1897079 - RNA, 19 nt, Artificial Sequence
  Description of Artificial Sequence: Synthetic oligonucleotide
cuaugggugacagcauggg

SEQ ID NO: 1897080 - RNA, 19 nt, Artificial Sequence
  Description of Artificial Sequence: Synthetic oligonucleotide
guauuuggaagcagaacca

SEQ ID NO: 1897081 - RNA, 19 nt, Artificial Sequence
  Description of Artificial Sequence: Synthetic oligonucleotide
cagccugccuucuugguac

SEQ ID NO: 1897082 - RNA, 19 nt, Artificial Sequence
  Description of Artificial Sequence: Synthetic oligonucleotide
gacaacaggauaacaaacu

SEQ ID NO: 1897083 - RNA, 19 nt, Artificial Sequence
  Description of Artificial Sequence: Synthetic oligonucleotide
cucggauccccacaaauga

SEQ ID NO: 1897084 - RNA, 19 nt, Artificial Sequence
  Description of Artificial Sequence: Synthetic oligonucleotide
uaccccugcucucccagag

SEQ ID NO: 1897085 - RNA, 19 nt, Artificial Sequence
  Description of Artificial Sequence: Synthetic oligonucleotide
ccacaaaugaagugcaaac

SEQ ID NO: 1897086 - RNA, 19 nt, Artificial Sequence
  Description of Artificial Sequence: Synthetic oligonucleotide
gagaugggcacuuggcuaa

SEQ ID NO: 1897087 - RNA, 19 nt, Artificial Sequence
  Description of Artificial Sequence: Synthetic oligonucleotide
acuaccccugcucucccag

SEQ ID NO: 1897088 - RNA, 19 nt, Artificial Sequence
  Description of Artificial Sequence: Synthetic oligonucleotide
uggcguacuuuacaugcaa

SEQ ID NO: 1897089 - RNA, 19 nt, Artificial Sequence
  Description of Artificial Sequence: Synthetic oligonucleotide
uccucggauccccacaaau

SEQ ID NO: 1897090 - RNA, 19 nt, Artificial Sequence
  Description of Artificial Sequence: Synthetic oligonucleotide
augggcacuuggcuaagug

SEQ ID NO: 1897091 - RNA, 19 nt, Artificial Sequence
  Description of Artificial Sequence: Synthetic oligonucleotide
ggaagaaauacuaccccug

SEQ ID NO: 1897092 - RNA, 19 nt, Artificial Sequence
  Description of Artificial Sequence: Synthetic oligonucleotide
uuguggcguacuuuacaug

SEQ ID NO: 1897093 - RNA, 19 nt, Artificial Sequence
  Description of Artificial Sequence: Synthetic oligonucleotide
uuaugagucccggcaauaa

SEQ ID NO: 1897094 - RNA, 19 nt, Artificial Sequence
  Description of Artificial Sequence: Synthetic oligonucleotide
cuuuggcucuggaaacccc

SEQ ID NO: 1897095 - RNA, 19 nt, Artificial Sequence
  Description of Artificial Sequence: Synthetic oligonucleotide
ugcucucccagagagccug

SEQ ID NO: 1897096 - RNA, 19 nt, Artificial Sequence
  Description of Artificial Sequence: Synthetic oligonucleotide
uauucccuuacuggccucc

SEQ ID NO: 1897097 - RNA, 19 nt, Artificial Sequence
  Description of Artificial Sequence: Synthetic oligonucleotide
ucacgcugagccacccucc

SEQ ID NO: 1897098 - RNA, 19 nt, Artificial Sequence
  Description of Artificial Sequence: Synthetic oligonucleotide
acauuaguugucacgcuga

SEQ ID NO: 1897099 - RNA, 19 nt, Artificial Sequence
  Description of Artificial Sequence: Synthetic oligonucleotide
uguggucuacccugagcca

SEQ ID NO: 1897100 - RNA, 19 nt, Artificial Sequence
  Description of Artificial Sequence: Synthetic oligonucleotide
gguguaauuagugcuuaug

SEQ ID NO: 1897101 - RNA, 19 nt, Artificial Sequence
  Description of Artificial Sequence: Synthetic oligonucleotide
ggagugugaguauggcagg

SEQ ID NO: 1897102 - RNA, 19 nt, Artificial Sequence
  Description of Artificial Sequence: Synthetic oligonucleotide
gcaggggucacucuauggc

SEQ ID NO: 1897103 - RNA, 19 nt, Artificial Sequence
  Description of Artificial Sequence: Synthetic oligonucleotide
gaaagcagucuucacacuu

SEQ ID NO: 1897104 - RNA, 19 nt, Artificial Sequence
  Description of Artificial Sequence: Synthetic oligonucleotide
auauucccuuacuggccuc

SEQ ID NO: 1897105 - RNA, 19 nt, Artificial Sequence
  Description of Artificial Sequence: Synthetic oligonucleotide
ucacucacacagaggggcu

SEQ ID NO: 1897106 - RNA, 19 nt, Artificial Sequence
  Description of Artificial Sequence: Synthetic oligonucleotide
acaagaagggcuggagaug

SEQ ID NO: 1897107 - RNA, 19 nt, Artificial Sequence
  Description of Artificial Sequence: Synthetic oligonucleotide
uaccgucuuuccagcagcc

SEQ ID NO: 1897108 - RNA, 19 nt, Artificial Sequence
  Description of Artificial Sequence: Synthetic oligonucleotide
cuuugcccacagaugguug

SEQ ID NO: 1897109 - RNA, 19 nt, Artificial Sequence
  Description of Artificial Sequence: Synthetic oligonucleotide
ucuuggggacuagggaaag

SEQ ID NO: 1897110 - RNA, 19 nt, Artificial Sequence
  Description of Artificial Sequence: Synthetic oligonucleotide
uggggacuagggaaagccu

SEQ ID NO: 1897111 - RNA, 19 nt, Artificial Sequence
  Description of Artificial Sequence: Synthetic oligonucleotide
ccccaugucccaaauacag

SEQ ID NO: 1897112 - RNA, 19 nt, Artificial Sequence
  Description of Artificial Sequence: Synthetic oligonucleotide
ucuaaggacuuugcccaca

SEQ ID NO: 1897113 - RNA, 19 nt, Artificial Sequence
  Description of Artificial Sequence: Synthetic oligonucleotide
aagggaggaccuccaagua

SEQ ID NO: 1897114 - RNA, 19 nt, Artificial Sequence
  Description of Artificial Sequence: Synthetic oligonucleotide
aucaaucagaacacagggu

SEQ ID NO: 1897115 - RNA, 19 nt, Artificial Sequence
  Description of Artificial Sequence: Synthetic oligonucleotide
cacuuggcuaaguggguac

SEQ ID NO: 1897116 - RNA, 19 nt, Artificial Sequence
  Description of Artificial Sequence: Synthetic oligonucleotide
gauugaccaggcaggaaca

SEQ ID NO: 1897117 - RNA, 19 nt, Artificial Sequence
  Description of Artificial Sequence: Synthetic oligonucleotide
cuagaccuccaugaacaag

SEQ ID NO: 1897118 - RNA, 19 nt, Artificial Sequence
  Description of Artificial Sequence: Synthetic oligonucleotide
acacauuaguugucacgcu

SEQ ID NO: 1897119 - RNA, 19 nt, Artificial Sequence
  Description of Artificial Sequence: Synthetic oligonucleotide
agaacacaggguugacagu

SEQ ID NO: 1897120 - RNA, 19 nt, Artificial Sequence
  Description of Artificial Sequence: Synthetic oligonucleotide
gugugaguauggcaggauc

SEQ ID NO: 1897121 - RNA, 19 nt, Artificial Sequence
  Description of Artificial Sequence: Synthetic oligonucleotide
ucccggcaauaauuuagug

SEQ ID NO: 1897122 - RNA, 19 nt, Artificial Sequence
  Description of Artificial Sequence: Synthetic oligonucleotide
caaggauccucggaucccc

SEQ ID NO: 1897123 - RNA, 19 nt, Artificial Sequence
  Description of Artificial Sequence: Synthetic oligonucleotide
guaauuaaguacacacucu

SEQ ID NO: 1897124 - RNA, 19 nt, Artificial Sequence
  Description of Artificial Sequence: Synthetic oligonucleotide
acacucuagcugugauuuc

SEQ ID NO: 1897125 - RNA, 19 nt, Artificial Sequence
  Description of Artificial Sequence: Synthetic oligonucleotide
accuagggcugaccucgcc

SEQ ID NO: 1897126 - RNA, 19 nt, Artificial Sequence
  Description of Artificial Sequence: Synthetic oligonucleotide
ggaggcuguggauugacca

SEQ ID NO: 1897127 - RNA, 19 nt, Artificial Sequence
  Description of Artificial Sequence: Synthetic oligonucleotide
gcuaaguggguaccacagg

SEQ ID NO: 1897128 - RNA, 19 nt, Artificial Sequence
  Description of Artificial Sequence: Synthetic oligonucleotide
cacaaauuagacaguauuu

SEQ ID NO: 1897129 - RNA, 19 nt, Artificial Sequence
  Description of Artificial Sequence: Synthetic oligonucleotide
guaagacaacaggauaaca

SEQ ID NO: 1897130 - RNA, 19 nt, Artificial Sequence
  Description of Artificial Sequence: Synthetic oligonucleotide
ggcuaaguggguaccacag

SEQ ID NO: 1897131 - RNA, 19 nt, Artificial Sequence
  Description of Artificial Sequence: Synthetic oligonucleotide
guagagacauauucccuua

SEQ ID NO: 1897132 - RNA, 19 nt, Artificial Sequence
  Description of Artificial Sequence: Synthetic oligonucleotide
uaguugucacgcugagcca

SEQ ID NO: 1897133 - RNA, 19 nt, Artificial Sequence
  Description of Artificial Sequence: Synthetic oligonucleotide
agccaccuagggcugaccu

SEQ ID NO: 1897134 - RNA, 19 nt, Artificial Sequence
  Description of Artificial Sequence: Synthetic oligonucleotide
ccggcaauaauuuagugua

SEQ ID NO: 1897135 - RNA, 19 nt, Artificial Sequence
  Description of Artificial Sequence: Synthetic oligonucleotide
agacaguauuuggaagcag

SEQ ID NO: 1897136 - RNA, 19 nt, Artificial Sequence
  Description of Artificial Sequence: Synthetic oligonucleotide
gacaagggcagugauccaa

SEQ ID NO: 1897137 - RNA, 19 nt, Artificial Sequence
  Description of Artificial Sequence: Synthetic oligonucleotide
acaagggcagugauccaag

SEQ ID NO: 1897138 - RNA, 19 nt, Artificial Sequence
  Description of Artificial Sequence: Synthetic oligonucleotide
accgucuuuccagcagccc

SEQ ID NO: 1897139 - RNA, 19 nt, Artificial Sequence
  Description of Artificial Sequence: Synthetic oligonucleotide
gauccucggauccccacaa

SEQ ID NO: 1897140 - RNA, 19 nt, Artificial Sequence
  Description of Artificial Sequence: Synthetic oligonucleotide
uagccuagaccuccaugaa

SEQ ID NO: 1897141 - RNA, 19 nt, Artificial Sequence
  Description of Artificial Sequence: Synthetic oligonucleotide
agggccacaaagggaggac

SEQ ID NO: 1897142 - RNA, 19 nt, Artificial Sequence
  Description of Artificial Sequence: Synthetic oligonucleotide
acacggacagugacaagag

SEQ ID NO: 1897143 - RNA, 19 nt, Artificial Sequence
  Description of Artificial Sequence: Synthetic oligonucleotide
uuggcuaaguggguaccac

SEQ ID NO: 1897144 - RNA, 19 nt, Artificial Sequence
  Description of Artificial Sequence: Synthetic oligonucleotide
caacuauuuauuguggcgu

SEQ ID NO: 1897145 - RNA, 19 nt, Artificial Sequence
  Description of Artificial Sequence: Synthetic oligonucleotide
gucacgcugagccacccuc

SEQ ID NO: 1897146 - RNA, 19 nt, Artificial Sequence
  Description of Artificial Sequence: Synthetic oligonucleotide
guaaggaagaaagcagucu

SEQ ID NO: 1897147 - RNA, 19 nt, Artificial Sequence
  Description of Artificial Sequence: Synthetic oligonucleotide
accucgccccaagagugcc

SEQ ID NO: 1897148 - RNA, 19 nt, Artificial Sequence
  Description of Artificial Sequence: Synthetic oligonucleotide
agucacucacacagagggg

SEQ ID NO: 1897149 - RNA, 19 nt, Artificial Sequence
  Description of Artificial Sequence: Synthetic oligonucleotide
gccaucugagaccaucagc

SEQ ID NO: 1897150 - RNA, 19 nt, Artificial Sequence
  Description of Artificial Sequence: Synthetic oligonucleotide
agagugccuguggucuacc

SEQ ID NO: 1897151 - RNA, 19 nt, Artificial Sequence
  Description of Artificial Sequence: Synthetic oligonucleotide
gguaggaaagucuuggguu

SEQ ID NO: 1897152 - RNA, 19 nt, Artificial Sequence
  Description of Artificial Sequence: Synthetic oligonucleotide
gcguacuuuacaugcaaga

SEQ ID NO: 1897153 - RNA, 19 nt, Artificial Sequence
  Description of Artificial Sequence: Synthetic oligonucleotide
aaccuauaaucagguguaa

SEQ ID NO: 1897154 - RNA, 19 nt, Artificial Sequence
  Description of Artificial Sequence: Synthetic oligonucleotide
augagucccggcaauaauu

SEQ ID NO: 1897155 - RNA, 19 nt, Artificial Sequence
  Description of Artificial Sequence: Synthetic oligonucleotide
gcugaccucgccccaagag

SEQ ID NO: 1897156 - RNA, 19 nt, Artificial Sequence
  Description of Artificial Sequence: Synthetic oligonucleotide
aagucuuggguuggagcaa

SEQ ID NO: 1897157 - RNA, 19 nt, Artificial Sequence
  Description of Artificial Sequence: Synthetic oligonucleotide
gucagucuuggcccaacuc

SEQ ID NO: 1897158 - RNA, 19 nt, Artificial Sequence
  Description of Artificial Sequence: Synthetic oligonucleotide
cucuaaggacuuugcccac

SEQ ID NO: 1897159 - RNA, 19 nt, Artificial Sequence
  Description of Artificial Sequence: Synthetic oligonucleotide
gccuagaccuccaugaaca

SEQ ID NO: 1897160 - RNA, 19 nt, Artificial Sequence
  Description of Artificial Sequence: Synthetic oligonucleotide
ccaccuagggcugaccucg

SEQ ID NO: 1897161 - RNA, 19 nt, Artificial Sequence
  Description of Artificial Sequence: Synthetic oligonucleotide
guguaauuaaguacacacu

SEQ ID NO: 1897162 - RNA, 19 nt, Artificial Sequence
  Description of Artificial Sequence: Synthetic oligonucleotide
accuauaaucagguguaau

SEQ ID NO: 1897163 - RNA, 19 nt, Artificial Sequence
  Description of Artificial Sequence: Synthetic oligonucleotide
auggcaggaucaaucagaa

SEQ ID NO: 1897164 - RNA, 19 nt, Artificial Sequence
  Description of Artificial Sequence: Synthetic oligonucleotide
cauauucccuuacuggccu

SEQ ID NO: 1897165 - RNA, 19 nt, Artificial Sequence
  Description of Artificial Sequence: Synthetic oligonucleotide
acacacucuagcugugauu

SEQ ID NO: 1897166 - RNA, 19 nt, Artificial Sequence
  Description of Artificial Sequence: Synthetic oligonucleotide
acaaagggaggaccuccaa

SEQ ID NO: 1897167 - RNA, 19 nt, Artificial Sequence
  Description of Artificial Sequence: Synthetic oligonucleotide
guuggucagucuuggccca

SEQ ID NO: 1897168 - RNA, 19 nt, Artificial Sequence
  Description of Artificial Sequence: Synthetic oligonucleotide
agcaugggccaggugagga

SEQ ID NO: 1897169 - RNA, 19 nt, Artificial Sequence
  Description of Artificial Sequence: Synthetic oligonucleotide
cuggaaaccccauguccca

SEQ ID NO: 1897170 - RNA, 19 nt, Artificial Sequence
  Description of Artificial Sequence: Synthetic oligonucleotide
agguguaauuagugcuuau

SEQ ID NO: 1897171 - RNA, 19 nt, Artificial Sequence
  Description of Artificial Sequence: Synthetic oligonucleotide
ugcuggcuugagagggccc

SEQ ID NO: 1897172 - RNA, 19 nt, Artificial Sequence
  Description of Artificial Sequence: Synthetic oligonucleotide
aguacacacucuagcugug

SEQ ID NO: 1897173 - RNA, 19 nt, Artificial Sequence
  Description of Artificial Sequence: Synthetic oligonucleotide
agccccaaggauccucgga

SEQ ID NO: 1897174 - RNA, 19 nt, Artificial Sequence
  Description of Artificial Sequence: Synthetic oligonucleotide
cccaaggauccucggaucc

SEQ ID NO: 1897175 - RNA, 19 nt, Artificial Sequence
  Description of Artificial Sequence: Synthetic oligonucleotide
caaaggaacuccagugcua

SEQ ID NO: 1897176 - RNA, 19 nt, Artificial Sequence
  Description of Artificial Sequence: Synthetic oligonucleotide
gaacaauggcucucaugcu

SEQ ID NO: 1897177 - RNA, 19 nt, Artificial Sequence
  Description of Artificial Sequence: Synthetic oligonucleotide
ggaaagucuuggguuggag

SEQ ID NO: 1897178 - RNA, 19 nt, Artificial Sequence
  Description of Artificial Sequence: Synthetic oligonucleotide
uccagccugccuucuuggu

SEQ ID NO: 1897179 - RNA, 19 nt, Artificial Sequence
  Description of Artificial Sequence: Synthetic oligonucleotide
ccucggauccccacaaaug

SEQ ID NO: 1897180 - RNA, 19 nt, Artificial Sequence
  Description of Artificial Sequence: Synthetic oligonucleotide
ggagaugggcacuuggcua

SEQ ID NO: 1897181 - RNA, 19 nt, Artificial Sequence
  Description of Artificial Sequence: Synthetic oligonucleotide
ggagcaaaggaacuccagu

SEQ ID NO: 1897182 - RNA, 19 nt, Artificial Sequence
  Description of Artificial Sequence: Synthetic oligonucleotide
guguggcugagcacacagg

SEQ ID NO: 1897183 - RNA, 19 nt, Artificial Sequence
  Description of Artificial Sequence: Synthetic oligonucleotide
guugucacgcugagccacc

SEQ ID NO: 1897184 - RNA, 19 nt, Artificial Sequence
  Description of Artificial Sequence: Synthetic oligonucleotide
caacagcagaccacaggga

SEQ ID NO: 1897185 - RNA, 19 nt, Artificial Sequence
  Description of Artificial Sequence: Synthetic oligonucleotide
caauaccgucuuuccagca

SEQ ID NO: 1897186 - RNA, 19 nt, Artificial Sequence
  Description of Artificial Sequence: Synthetic oligonucleotide
cuauuuauuguggcguacu

SEQ ID NO: 1897187 - RNA, 19 nt, Artificial Sequence
  Description of Artificial Sequence: Synthetic oligonucleotide
gggaggaccuccaaguaga

SEQ ID NO: 1897188 - RNA, 19 nt, Artificial Sequence
  Description of Artificial Sequence: Synthetic oligonucleotide
cugcuggcuugagagggcc

SEQ ID NO: 1897189 - RNA, 19 nt, Artificial Sequence
  Description of Artificial Sequence: Synthetic oligonucleotide
gguuggagcaaaggaacuc

SEQ ID NO: 1897190 - RNA, 19 nt, Artificial Sequence
  Description of Artificial Sequence: Synthetic oligonucleotide
ccuagggcugaccucgccc

SEQ ID NO: 1897191 - RNA, 19 nt, Artificial Sequence
  Description of Artificial Sequence: Synthetic oligonucleotide
gcaaaggaacuccagugcu

SEQ ID NO: 1897192 - RNA, 19 nt, Artificial Sequence
  Description of Artificial Sequence: Synthetic oligonucleotide
gguugcagguaggaaaguc

SEQ ID NO: 1897193 - RNA, 19 nt, Artificial Sequence
  Description of Artificial Sequence: Synthetic oligonucleotide
agucuuggcccaacuccag

SEQ ID NO: 1897194 - RNA, 19 nt, Artificial Sequence
  Description of Artificial Sequence: Synthetic oligonucleotide
cccugagccaucugagacc

SEQ ID NO: 1897195 - RNA, 19 nt, Artificial Sequence
  Description of Artificial Sequence: Synthetic oligonucleotide
agucuuggguuggagcaaa

SEQ ID NO: 1897196 - RNA, 19 nt, Artificial Sequence
  Description of Artificial Sequence: Synthetic oligonucleotide
uugucacgcugagccaccc

SEQ ID NO: 1897197 - RNA, 19 nt, Artificial Sequence
  Description of Artificial Sequence: Synthetic oligonucleotide
cacacucuagcugugauuu

SEQ ID NO: 1897198 - RNA, 19 nt, Artificial Sequence
  Description of Artificial Sequence: Synthetic oligonucleotide
ggcguacuuuacaugcaag

SEQ ID NO: 1897199 - RNA, 19 nt, Artificial Sequence
  Description of Artificial Sequence: Synthetic oligonucleotide
cagugcuaugggugacagc

SEQ ID NO: 1897200 - RNA, 19 nt, Artificial Sequence
  Description of Artificial Sequence: Synthetic oligonucleotide
cuuggcuaaguggguacca

SEQ ID NO: 1897201 - RNA, 19 nt, Artificial Sequence
  Description of Artificial Sequence: Synthetic oligonucleotide
agcagucuucacacuucag

SEQ ID NO: 1897202 - RNA, 19 nt, Artificial Sequence
  Description of Artificial Sequence: Synthetic oligonucleotide
cugagcacacagggagacc

SEQ ID NO: 1897203 - RNA, 19 nt, Artificial Sequence
  Description of Artificial Sequence: Synthetic oligonucleotide
acgcugagccacccuccag

SEQ ID NO: 1897204 - RNA, 19 nt, Artificial Sequence
  Description of Artificial Sequence: Synthetic oligonucleotide
cccacagaugguugggaac

SEQ ID NO: 1897205 - RNA, 19 nt, Artificial Sequence
  Description of Artificial Sequence: Synthetic oligonucleotide
cucgccccaagagugccug

SEQ ID NO: 1897206 - RNA, 19 nt, Artificial Sequence
  Description of Artificial Sequence: Synthetic oligonucleotide
aaggauccucggaucccca

SEQ ID NO: 1897207 - RNA, 19 nt, Artificial Sequence
  Description of Artificial Sequence: Synthetic oligonucleotide
caaaugaguuggucagucu

SEQ ID NO: 1897208 - RNA, 19 nt, Artificial Sequence
  Description of Artificial Sequence: Synthetic oligonucleotide
gacaaaugaguuggucagu

SEQ ID NO: 1897209 - RNA, 19 nt, Artificial Sequence
  Description of Artificial Sequence: Synthetic oligonucleotide
agaugggcacuuggcuaag

SEQ ID NO: 1897210 - RNA, 19 nt, Artificial Sequence
  Description of Artificial Sequence: Synthetic oligonucleotide
ccuguggucuacccugagc

SEQ ID NO: 1897211 - RNA, 19 nt, Artificial Sequence
  Description of Artificial Sequence: Synthetic oligonucleotide
gggacacauuaguugucac

SEQ ID NO: 1897212 - RNA, 19 nt, Artificial Sequence
  Description of Artificial Sequence: Synthetic oligonucleotide
gcugagcacacagggagac

SEQ ID NO: 1897213 - RNA, 19 nt, Artificial Sequence
  Description of Artificial Sequence: Synthetic oligonucleotide
gaccucgccccaagagugc

SEQ ID NO: 1897214 - RNA, 19 nt, Artificial Sequence
  Description of Artificial Sequence: Synthetic oligonucleotide
ccccugcucucccagagag

SEQ ID NO: 1897215 - RNA, 19 nt, Artificial Sequence
  Description of Artificial Sequence: Synthetic oligonucleotide
caggguugacaguuguucu

SEQ ID NO: 1897216 - RNA, 19 nt, Artificial Sequence
  Description of Artificial Sequence: Synthetic oligonucleotide
agcacacaaugaacaagaa

SEQ ID NO: 1897217 - RNA, 19 nt, Artificial Sequence
  Description of Artificial Sequence: Synthetic oligonucleotide
gagucccggcaauaauuua

SEQ ID NO: 1897218 - RNA, 19 nt, Artificial Sequence
  Description of Artificial Sequence: Synthetic oligonucleotide
cugaccucgccccaagagu

SEQ ID NO: 1897219 - RNA, 19 nt, Artificial Sequence
  Description of Artificial Sequence: Synthetic oligonucleotide
cacucuagcugugauuucu

SEQ ID NO: 1897220 - RNA, 19 nt, Artificial Sequence
  Description of Artificial Sequence: Synthetic oligonucleotide
guacacacucuagcuguga

SEQ ID NO: 1897221 - RNA, 19 nt, Artificial Sequence
  Description of Artificial Sequence: Synthetic oligonucleotide
cuuaugagucccggcaaua

SEQ ID NO: 1897222 - RNA, 19 nt, Artificial Sequence
  Description of Artificial Sequence: Synthetic oligonucleotide
ccuuuggcucuggaaaccc

SEQ ID NO: 1897223 - RNA, 19 nt, Artificial Sequence
  Description of Artificial Sequence: Synthetic oligonucleotide
gggcagugauccaaggcac

SEQ ID NO: 1897224 - RNA, 19 nt, Artificial Sequence
  Description of Artificial Sequence: Synthetic oligonucleotide
uggucagucuuggcccaac

SEQ ID NO: 1897225 - RNA, 19 nt, Artificial Sequence
  Description of Artificial Sequence: Synthetic oligonucleotide
auucccuuacuggccuccu

SEQ ID NO: 1897226 - RNA, 19 nt, Artificial Sequence
  Description of Artificial Sequence: Synthetic oligonucleotide
ccuggagugugaguauggc

SEQ ID NO: 1897227 - RNA, 19 nt, Artificial Sequence
  Description of Artificial Sequence: Synthetic oligonucleotide
guagaggcugcuggcuuga

SEQ ID NO: 1897228 - RNA, 19 nt, Artificial Sequence
  Description of Artificial Sequence: Synthetic oligonucleotide
ggacuagggaaagccuagc

SEQ ID NO: 1897229 - RNA, 19 nt, Artificial Sequence
  Description of Artificial Sequence: Synthetic oligonucleotide
cuuguagaggcugcuggcu

SEQ ID NO: 1897230 - RNA, 19 nt, Artificial Sequence
  Description of Artificial Sequence: Synthetic oligonucleotide
guggcguacuuuacaugca

SEQ ID NO: 1897231 - RNA, 19 nt, Artificial Sequence
  Description of Artificial Sequence: Synthetic oligonucleotide
gguaccacagggccacaaa

SEQ ID NO: 1897232 - RNA, 19 nt, Artificial Sequence
  Description of Artificial Sequence: Synthetic oligonucleotide
cagagagccuggaguguga

SEQ ID NO: 1897233 - RNA, 19 nt, Artificial Sequence
  Description of Artificial Sequence: Synthetic oligonucleotide
gaccuccaaguagagacau

SEQ ID NO: 1897234 - RNA, 19 nt, Artificial Sequence
  Description of Artificial Sequence: Synthetic oligonucleotide
caccuagggcugaccucgc

SEQ ID NO: 1897235 - RNA, 19 nt, Artificial Sequence
  Description of Artificial Sequence: Synthetic oligonucleotide
cagcaugggccaggugagg

SEQ ID NO: 1897236 - RNA, 19 nt, Artificial Sequence
  Description of Artificial Sequence: Synthetic oligonucleotide
ggcaggaacaauggcucuc

SEQ ID NO: 1897237 - RNA, 19 nt, Artificial Sequence
  Description of Artificial Sequence: Synthetic oligonucleotide
cagguguaauuagugcuua

SEQ ID NO: 1897238 - RNA, 19 nt, Artificial Sequence
  Description of Artificial Sequence: Synthetic oligonucleotide
cccggcaauaauuuagugu

SEQ ID NO: 1897239 - RNA, 19 nt, Artificial Sequence
  Description of Artificial Sequence: Synthetic oligonucleotide
ccaaggauccucggauccc

SEQ ID NO: 1897240 - RNA, 19 nt, Artificial Sequence
  Description of Artificial Sequence: Synthetic oligonucleotide
ccagugcuaugggugacag

SEQ ID NO: 1897241 - RNA, 19 nt, Artificial Sequence
  Description of Artificial Sequence: Synthetic oligonucleotide
cuccagugcuaugggugac

SEQ ID NO: 1897242 - RNA, 19 nt, Artificial Sequence
  Description of Artificial Sequence: Synthetic oligonucleotide
cagaccacagggaggcugu

SEQ ID NO: 1897243 - RNA, 19 nt, Artificial Sequence
  Description of Artificial Sequence: Synthetic oligonucleotide
uccagccaccuagggcuga

SEQ ID NO: 1897244 - RNA, 19 nt, Artificial Sequence
  Description of Artificial Sequence: Synthetic oligonucleotide
gacaagagucugacuugua

SEQ ID NO: 1897245 - RNA, 19 nt, Artificial Sequence
  Description of Artificial Sequence: Synthetic oligonucleotide
uuggucagucuuggcccaa

SEQ ID NO: 1897246 - RNA, 19 nt, Artificial Sequence
  Description of Artificial Sequence: Synthetic oligonucleotide
cuuggcccaacuccagccu

SEQ ID NO: 1897247 - RNA, 19 nt, Artificial Sequence
  Description of Artificial Sequence: Synthetic oligonucleotide
gucuacccugagccaucug

SEQ ID NO: 1897248 - RNA, 19 nt, Artificial Sequence
  Description of Artificial Sequence: Synthetic oligonucleotide
gucccggcaauaauuuagu

SEQ ID NO: 1897249 - RNA, 19 nt, Artificial Sequence
  Description of Artificial Sequence: Synthetic oligonucleotide
auccucggauccccacaaa

SEQ ID NO: 1897250 - RNA, 19 nt, Artificial Sequence
  Description of Artificial Sequence: Synthetic oligonucleotide
cagggccacaaagggagga

SEQ ID NO: 1897251 - RNA, 19 nt, Artificial Sequence
  Description of Artificial Sequence: Synthetic oligonucleotide
ggggacuagggaaagccua

SEQ ID NO: 1897252 - RNA, 19 nt, Artificial Sequence
  Description of Artificial Sequence: Synthetic oligonucleotide
ccuguguggcugagcacac

SEQ ID NO: 1897253 - RNA, 19 nt, Artificial Sequence
  Description of Artificial Sequence: Synthetic oligonucleotide
cagccagaggguugcaggu

SEQ ID NO: 1897254 - RNA, 19 nt, Artificial Sequence
  Description of Artificial Sequence: Synthetic oligonucleotide
guggucuacccugagccau

SEQ ID NO: 1897255 - RNA, 19 nt, Artificial Sequence
  Description of Artificial Sequence: Synthetic oligonucleotide
cuaccccugcucucccaga

SEQ ID NO: 1897256 - RNA, 19 nt, Artificial Sequence
  Description of Artificial Sequence: Synthetic oligonucleotide
ggaccuccaaguagagaca

SEQ ID NO: 1897257 - RNA, 19 nt, Artificial Sequence
  Description of Artificial Sequence: Synthetic oligonucleotide
gggcaggggucacucuaug

SEQ ID NO: 1897258 - RNA, 19 nt, Artificial Sequence
  Description of Artificial Sequence: Synthetic oligonucleotide
ccaagagugccuguggucu

SEQ ID NO: 1897259 - RNA, 19 nt, Artificial Sequence
  Description of Artificial Sequence: Synthetic oligonucleotide
gagccuggagugugaguau

SEQ ID NO: 1897260 - RNA, 19 nt, Artificial Sequence
  Description of Artificial Sequence: Synthetic oligonucleotide
ccuccaaguagagacauau

SEQ ID NO: 1897261 - RNA, 19 nt, Artificial Sequence
  Description of Artificial Sequence: Synthetic oligonucleotide
ccccaaggauccucggauc

SEQ ID NO: 1897262 - RNA, 19 nt, Artificial Sequence
  Description of Artificial Sequence: Synthetic oligonucleotide
gggcugaccucgccccaag

SEQ ID NO: 1897263 - RNA, 19 nt, Artificial Sequence
  Description of Artificial Sequence: Synthetic oligonucleotide
guaccugggcaggggucac

SEQ ID NO: 1897264 - RNA, 19 nt, Artificial Sequence
  Description of Artificial Sequence: Synthetic oligonucleotide
cagccaccuagggcugacc

SEQ ID NO: 1897265 - RNA, 19 nt, Artificial Sequence
  Description of Artificial Sequence: Synthetic oligonucleotide
gaugggcacuuggcuaagu

SEQ ID NO: 1897266 - RNA, 19 nt, Artificial Sequence
  Description of Artificial Sequence: Synthetic oligonucleotide
ggacaagggcagugaucca

SEQ ID NO: 1897267 - RNA, 19 nt, Artificial Sequence
  Description of Artificial Sequence: Synthetic oligonucleotide
accuccaaguagagacaua

SEQ ID NO: 1897268 - RNA, 19 nt, Artificial Sequence
  Description of Artificial Sequence: Synthetic oligonucleotide
ccuagaccuccaugaacaa

SEQ ID NO: 1897269 - RNA, 19 nt, Artificial Sequence
  Description of Artificial Sequence: Synthetic oligonucleotide
ggucagucuuggcccaacu

SEQ ID NO: 1897270 - RNA, 19 nt, Artificial Sequence
  Description of Artificial Sequence: Synthetic oligonucleotide
cucucccagagagccugga

SEQ ID NO: 1897271 - RNA, 19 nt, Artificial Sequence
  Description of Artificial Sequence: Synthetic oligonucleotide
ccagccugccuucuuggua

SEQ ID NO: 1897272 - RNA, 19 nt, Artificial Sequence
  Description of Artificial Sequence: Synthetic oligonucleotide
cggcaauaauuuaguguaa

SEQ ID NO: 1897273 - RNA, 19 nt, Artificial Sequence
  Description of Artificial Sequence: Synthetic oligonucleotide
ccccacaaaugaagugcaa

SEQ ID NO: 1897274 - RNA, 19 nt, Artificial Sequence
  Description of Artificial Sequence: Synthetic oligonucleotide
gugcuaugggugacagcau

SEQ ID NO: 1897275 - RNA, 19 nt, Artificial Sequence
  Description of Artificial Sequence: Synthetic oligonucleotide
ccacagggaggcuguggau

SEQ ID NO: 1897276 - RNA, 19 nt, Artificial Sequence
  Description of Artificial Sequence: Synthetic oligonucleotide
ccucgccccaagagugccu

SEQ ID NO: 1897277 - RNA, 19 nt, Artificial Sequence
  Description of Artificial Sequence: Synthetic oligonucleotide
cagcagccccaaggauccu

SEQ ID NO: 1897278 - RNA, 19 nt, Artificial Sequence
  Description of Artificial Sequence: Synthetic oligonucleotide
auuuuauuaacacaggagc

SEQ ID NO: 1897279 - RNA, 19 nt, Artificial Sequence
  Description of Artificial Sequence: Synthetic oligonucleotide
ucuacaaacaaccagggcg

SEQ ID NO: 1897280 - RNA, 19 nt, Artificial Sequence
  Description of Artificial Sequence: Synthetic oligonucleotide
ucauuuaucagaaugaaug

SEQ ID NO: 1897281 - RNA, 19 nt, Artificial Sequence
  Description of Artificial Sequence: Synthetic oligonucleotide
aauaaaaugaggcaugccu

SEQ ID NO: 1897282 - RNA, 19 nt, Artificial Sequence
  Description of Artificial Sequence: Synthetic oligonucleotide
uuuaaauacaucgaagucg

SEQ ID NO: 1897283 - RNA, 19 nt, Artificial Sequence
  Description of Artificial Sequence: Synthetic oligonucleotide
cuuccuauaauucaaaucc

SEQ ID NO: 1897284 - RNA, 19 nt, Artificial Sequence
  Description of Artificial Sequence: Synthetic oligonucleotide
aaguauuccauacuugccg

SEQ ID NO: 1897285 - RNA, 19 nt, Artificial Sequence
  Description of Artificial Sequence: Synthetic oligonucleotide
auaacaagaagucagcgag

SEQ ID NO: 1897286 - RNA, 19 nt, Artificial Sequence
  Description of Artificial Sequence: Synthetic oligonucleotide
ucuuaugcuacacagaggu

SEQ ID NO: 1897287 - RNA, 19 nt, Artificial Sequence
  Description of Artificial Sequence: Synthetic oligonucleotide
ugcaaguacauacacagag

SEQ ID NO: 1897288 - RNA, 19 nt, Artificial Sequence
  Description of Artificial Sequence: Synthetic oligonucleotide
ucuacucuaacuacgggcg

SEQ ID NO: 1897289 - RNA, 19 nt, Artificial Sequence
  Description of Artificial Sequence: Synthetic oligonucleotide
aaacugaaguauuccauac

SEQ ID NO: 1897290 - RNA, 19 nt, Artificial Sequence
  Description of Artificial Sequence: Synthetic oligonucleotide
agacaagucacacuuauuc

SEQ ID NO: 1897291 - RNA, 19 nt, Artificial Sequence
  Description of Artificial Sequence: Synthetic oligonucleotide
aaauacaucgaagucgugg

SEQ ID NO: 1897292 - RNA, 19 nt, Artificial Sequence
  Description of Artificial Sequence: Synthetic oligonucleotide
gaaaaugaaucucaguagc

SEQ ID NO: 1897293 - RNA, 19 nt, Artificial Sequence
  Description of Artificial Sequence: Synthetic oligonucleotide
uggaccaucaaacugaagu

SEQ ID NO: 1897294 - RNA, 19 nt, Artificial Sequence
  Description of Artificial Sequence: Synthetic oligonucleotide
uuaaauacaucgaagucgu

SEQ ID NO: 1897295 - RNA, 19 nt, Artificial Sequence
  Description of Artificial Sequence: Synthetic oligonucleotide
ugaaguauuccauacuugc

SEQ ID NO: 1897296 - RNA, 19 nt, Artificial Sequence
  Description of Artificial Sequence: Synthetic oligonucleotide
ugaaaaugaaucucaguag

SEQ ID NO: 1897297 - RNA, 19 nt, Artificial Sequence
  Description of Artificial Sequence: Synthetic oligonucleotide
uccaauuaaagucacgaac

SEQ ID NO: 1897298 - RNA, 19 nt, Artificial Sequence
  Description of Artificial Sequence: Synthetic oligonucleotide
aacggaaugguaaacuccc

SEQ ID NO: 1897299 - RNA, 19 nt, Artificial Sequence
  Description of Artificial Sequence: Synthetic oligonucleotide
aauacaucgaagucgugga

SEQ ID NO: 1897300 - RNA, 19 nt, Artificial Sequence
  Description of Artificial Sequence: Synthetic oligonucleotide
aaaguggaccaucaaacug

SEQ ID NO: 1897301 - RNA, 19 nt, Artificial Sequence
  Description of Artificial Sequence: Synthetic oligonucleotide
uucuuuaaauacaucgaag

SEQ ID NO: 1897302 - RNA, 19 nt, Artificial Sequence
  Description of Artificial Sequence: Synthetic oligonucleotide
aauccuccgauacauguag

SEQ ID NO: 1897303 - RNA, 19 nt, Artificial Sequence
  Description of Artificial Sequence: Synthetic oligonucleotide
ugcaauaugggugaggcag

SEQ ID NO: 1897304 - RNA, 19 nt, Artificial Sequence
  Description of Artificial Sequence: Synthetic oligonucleotide
cuguagaccaaccugaagc

SEQ ID NO: 1897305 - RNA, 19 nt, Artificial Sequence
  Description of Artificial Sequence: Synthetic oligonucleotide
aaucucaguagcuaacuca

SEQ ID NO: 1897306 - RNA, 19 nt, Artificial Sequence
  Description of Artificial Sequence: Synthetic oligonucleotide
ucuacccaucuuaacaugg

SEQ ID NO: 1897307 - RNA, 19 nt, Artificial Sequence
  Description of Artificial Sequence: Synthetic oligonucleotide
uguucaacuauccaauuaa

SEQ ID NO: 1897308 - RNA, 19 nt, Artificial Sequence
  Description of Artificial Sequence: Synthetic oligonucleotide
caacuauccaauuaaaguc

SEQ ID NO: 1897309 - RNA, 19 nt, Artificial Sequence
  Description of Artificial Sequence: Synthetic oligonucleotide
uuguaguucagcauacaag

SEQ ID NO: 1897310 - RNA, 19 nt, Artificial Sequence
  Description of Artificial Sequence: Synthetic oligonucleotide
uuaugcuacacagaggugc

SEQ ID NO: 1897311 - RNA, 19 nt, Artificial Sequence
  Description of Artificial Sequence: Synthetic oligonucleotide
uauaugaucaugguaaauc

SEQ ID NO: 1897312 - RNA, 19 nt, Artificial Sequence
  Description of Artificial Sequence: Synthetic oligonucleotide
uagcacucuacaaacaacc

SEQ ID NO: 1897313 - RNA, 19 nt, Artificial Sequence
  Description of Artificial Sequence: Synthetic oligonucleotide
uaguucagcauacaaguca

SEQ ID NO: 1897314 - RNA, 19 nt, Artificial Sequence
  Description of Artificial Sequence: Synthetic oligonucleotide
aucgauggacuccugagac

SEQ ID NO: 1897315 - RNA, 19 nt, Artificial Sequence
  Description of Artificial Sequence: Synthetic oligonucleotide
aacgaugucuacucuaacu

SEQ ID NO: 1897316 - RNA, 19 nt, Artificial Sequence
  Description of Artificial Sequence: Synthetic oligonucleotide
uuuauuaacacaggagcug

SEQ ID NO: 1897317 - RNA, 19 nt, Artificial Sequence
  Description of Artificial Sequence: Synthetic oligonucleotide
uauccaauuaaagucacga

SEQ ID NO: 1897318 - RNA, 19 nt, Artificial Sequence
  Description of Artificial Sequence: Synthetic oligonucleotide
auagagacaagucacacuu

SEQ ID NO: 1897319 - RNA, 19 nt, Artificial Sequence
  Description of Artificial Sequence: Synthetic oligonucleotide
uaaagucacgaacaguuac

SEQ ID NO: 1897320 - RNA, 19 nt, Artificial Sequence
  Description of Artificial Sequence: Synthetic oligonucleotide
aaugaaucucaguagcuaa

SEQ ID NO: 1897321 - RNA, 19 nt, Artificial Sequence
  Description of Artificial Sequence: Synthetic oligonucleotide
auguucuuaugcuacacag

SEQ ID NO: 1897322 - RNA, 19 nt, Artificial Sequence
  Description of Artificial Sequence: Synthetic oligonucleotide
ugcuuucuccaccugauag

SEQ ID NO: 1897323 - RNA, 19 nt, Artificial Sequence
  Description of Artificial Sequence: Synthetic oligonucleotide
aguacuagaucugugauga

SEQ ID NO: 1897324 - RNA, 19 nt, Artificial Sequence
  Description of Artificial Sequence: Synthetic oligonucleotide
augguaaacucccauuuuc

SEQ ID NO: 1897325 - RNA, 19 nt, Artificial Sequence
  Description of Artificial Sequence: Synthetic oligonucleotide
uccuauaauucaaaucccc

SEQ ID NO: 1897326 - RNA, 19 nt, Artificial Sequence
  Description of Artificial Sequence: Synthetic oligonucleotide
aguauuccauacuugccgg

SEQ ID NO: 1897327 - RNA, 19 nt, Artificial Sequence
  Description of Artificial Sequence: Synthetic oligonucleotide
ugaagcucacacuuuaaug

SEQ ID NO: 1897328 - RNA, 19 nt, Artificial Sequence
  Description of Artificial Sequence: Synthetic oligonucleotide
cuuacauguucaacuaucc

SEQ ID NO: 1897329 - RNA, 19 nt, Artificial Sequence
  Description of Artificial Sequence: Synthetic oligonucleotide
augacaucggacuucuggg

SEQ ID NO: 1897330 - RNA, 19 nt, Artificial Sequence
  Description of Artificial Sequence: Synthetic oligonucleotide
gaugucuacucuaacuacg

SEQ ID NO: 1897331 - RNA, 19 nt, Artificial Sequence
  Description of Artificial Sequence: Synthetic oligonucleotide
ugaguucaaagccagaauu

SEQ ID NO: 1897332 - RNA, 19 nt, Artificial Sequence
  Description of Artificial Sequence: Synthetic oligonucleotide
aaagucacgaacaguuacg

SEQ ID NO: 1897333 - RNA, 19 nt, Artificial Sequence
  Description of Artificial Sequence: Synthetic oligonucleotide
acuccuuacauguucaacu

SEQ ID NO: 1897334 - RNA, 19 nt, Artificial Sequence
  Description of Artificial Sequence: Synthetic oligonucleotide
cugagcagagucaaagugg

SEQ ID NO: 1897335 - RNA, 19 nt, Artificial Sequence
  Description of Artificial Sequence: Synthetic oligonucleotide
ugugcaauaugggugaggc

SEQ ID NO: 1897336 - RNA, 19 nt, Artificial Sequence
  Description of Artificial Sequence: Synthetic oligonucleotide
cauguagcacucuacaaac

SEQ ID NO: 1897337 - RNA, 19 nt, Artificial Sequence
  Description of Artificial Sequence: Synthetic oligonucleotide
uuguauuuacugagcaaag

SEQ ID NO: 1897338 - RNA, 19 nt, Artificial Sequence
  Description of Artificial Sequence: Synthetic oligonucleotide
ugauggaacggaaugguaa

SEQ ID NO: 1897339 - RNA, 19 nt, Artificial Sequence
  Description of Artificial Sequence: Synthetic oligonucleotide
uguagcacucuacaaacaa

SEQ ID NO: 1897340 - RNA, 19 nt, Artificial Sequence
  Description of Artificial Sequence: Synthetic oligonucleotide
aaagaguugaugacaucgg

SEQ ID NO: 1897341 - RNA, 19 nt, Artificial Sequence
  Description of Artificial Sequence: Synthetic oligonucleotide
aucuuaacauggcuuuccc

SEQ ID NO: 1897342 - RNA, 19 nt, Artificial Sequence
  Description of Artificial Sequence: Synthetic oligonucleotide
cuuuaggccuuccaaagag

SEQ ID NO: 1897343 - RNA, 19 nt, Artificial Sequence
  Description of Artificial Sequence: Synthetic oligonucleotide
gauaacaagaagucagcga

SEQ ID NO: 1897344 - RNA, 19 nt, Artificial Sequence
  Description of Artificial Sequence: Synthetic oligonucleotide
gaaauggggauccccaggc

SEQ ID NO: 1897345 - RNA, 19 nt, Artificial Sequence
  Description of Artificial Sequence: Synthetic oligonucleotide
uaugaucaugguaaaucca

SEQ ID NO: 1897346 - RNA, 19 nt, Artificial Sequence
  Description of Artificial Sequence: Synthetic oligonucleotide
ugaauccuccgauacaugu

SEQ ID NO: 1897347 - RNA, 19 nt, Artificial Sequence
  Description of Artificial Sequence: Synthetic oligonucleotide
ugaauaaaaugaggcaugc

SEQ ID NO: 1897348 - RNA, 19 nt, Artificial Sequence
  Description of Artificial Sequence: Synthetic oligonucleotide
uuccuauaauucaaauccc

SEQ ID NO: 1897349 - RNA, 19 nt, Artificial Sequence
  Description of Artificial Sequence: Synthetic oligonucleotide
agaauuauccagaacgaug

SEQ ID NO: 1897350 - RNA, 19 nt, Artificial Sequence
  Description of Artificial Sequence: Synthetic oligonucleotide
gucuacucuaacuacgggc

SEQ ID NO: 1897351 - RNA, 19 nt, Artificial Sequence
  Description of Artificial Sequence: Synthetic oligonucleotide
uuauuaacacaggagcuga

SEQ ID NO: 1897352 - RNA, 19 nt, Artificial Sequence
  Description of Artificial Sequence: Synthetic oligonucleotide
uacugagcaaaguccaaag

SEQ ID NO: 1897353 - RNA, 19 nt, Artificial Sequence
  Description of Artificial Sequence: Synthetic oligonucleotide
uguagaccaaccugaagcu

SEQ ID NO: 1897354 - RNA, 19 nt, Artificial Sequence
  Description of Artificial Sequence: Synthetic oligonucleotide
aagaguugaugacaucgga

SEQ ID NO: 1897355 - RNA, 19 nt, Artificial Sequence
  Description of Artificial Sequence: Synthetic oligonucleotide
acugaaguauuccauacuu

SEQ ID NO: 1897356 - RNA, 19 nt, Artificial Sequence
  Description of Artificial Sequence: Synthetic oligonucleotide
caaagccagaauuauccag

SEQ ID NO: 1897357 - RNA, 19 nt, Artificial Sequence
  Description of Artificial Sequence: Synthetic oligonucleotide
caauuaaagucacgaacag

SEQ ID NO: 1897358 - RNA, 19 nt, Artificial Sequence
  Description of Artificial Sequence: Synthetic oligonucleotide
gauugcuacuccuuacaug

SEQ ID NO: 1897359 - RNA, 19 nt, Artificial Sequence
  Description of Artificial Sequence: Synthetic oligonucleotide
uguucuuaugcuacacaga

SEQ ID NO: 1897360 - RNA, 19 nt, Artificial Sequence
  Description of Artificial Sequence: Synthetic oligonucleotide
aaguggaccaucaaacuga

SEQ ID NO: 1897361 - RNA, 19 nt, Artificial Sequence
  Description of Artificial Sequence: Synthetic oligonucleotide
accugauagagacaaguca

SEQ ID NO: 1897362 - RNA, 19 nt, Artificial Sequence
  Description of Artificial Sequence: Synthetic oligonucleotide
uccaaagaguugaugacau

SEQ ID NO: 1897363 - RNA, 19 nt, Artificial Sequence
  Description of Artificial Sequence: Synthetic oligonucleotide
acauguagcacucuacaaa

SEQ ID NO: 1897364 - RNA, 19 nt, Artificial Sequence
  Description of Artificial Sequence: Synthetic oligonucleotide
cauacacagagcaucgaug

SEQ ID NO: 1897365 - RNA, 19 nt, Artificial Sequence
  Description of Artificial Sequence: Synthetic oligonucleotide
ucaugguaaauccauucua

SEQ ID NO: 1897366 - RNA, 19 nt, Artificial Sequence
  Description of Artificial Sequence: Synthetic oligonucleotide
aacucccauuuucugucac

SEQ ID NO: 1897367 - RNA, 19 nt, Artificial Sequence
  Description of Artificial Sequence: Synthetic oligonucleotide
aggauaacaagaagucagc

SEQ ID NO: 1897368 - RNA, 19 nt, Artificial Sequence
  Description of Artificial Sequence: Synthetic oligonucleotide
ugguaaacucccauuuucu

SEQ ID NO: 1897369 - RNA, 19 nt, Artificial Sequence
  Description of Artificial Sequence: Synthetic oligonucleotide
acaucgaagucguggauug

SEQ ID NO: 1897370 - RNA, 19 nt, Artificial Sequence
  Description of Artificial Sequence: Synthetic oligonucleotide
auuccauacuugccggugg

SEQ ID NO: 1897371 - RNA, 19 nt, Artificial Sequence
  Description of Artificial Sequence: Synthetic oligonucleotide
uaaccaggaauuccugagc

SEQ ID NO: 1897372 - RNA, 19 nt, Artificial Sequence
  Description of Artificial Sequence: Synthetic oligonucleotide
auucuacccaucuuaacau

SEQ ID NO: 1897373 - RNA, 19 nt, Artificial Sequence
  Description of Artificial Sequence: Synthetic oligonucleotide
cagaguccaaaauauauga

SEQ ID NO: 1897374 - RNA, 19 nt, Artificial Sequence
  Description of Artificial Sequence: Synthetic oligonucleotide
agaguugaugacaucggac

SEQ ID NO: 1897375 - RNA, 19 nt, Artificial Sequence
  Description of Artificial Sequence: Synthetic oligonucleotide
aaugguaaacucccauuuu

SEQ ID NO: 1897376 - RNA, 19 nt, Artificial Sequence
  Description of Artificial Sequence: Synthetic oligonucleotide
uccagaacgaugucuacuc

SEQ ID NO: 1897377 - RNA, 19 nt, Artificial Sequence
  Description of Artificial Sequence: Synthetic oligonucleotide
cccuugaauaaaaugaggc

SEQ ID NO: 1897378 - RNA, 19 nt, Artificial Sequence
  Description of Artificial Sequence: Synthetic oligonucleotide
aagagauucugugucauuu

SEQ ID NO: 1897379 - RNA, 19 nt, Artificial Sequence
  Description of Artificial Sequence: Synthetic oligonucleotide
gaaguauuccauacuugcc

SEQ ID NO: 1897380 - RNA, 19 nt, Artificial Sequence
  Description of Artificial Sequence: Synthetic oligonucleotide
aaaugaaucucaguagcua

SEQ ID NO: 1897381 - RNA, 19 nt, Artificial Sequence
  Description of Artificial Sequence: Synthetic oligonucleotide
uguauuuacugagcaaagu

SEQ ID NO: 1897382 - RNA, 19 nt, Artificial Sequence
  Description of Artificial Sequence: Synthetic oligonucleotide
gaauuauccagaacgaugu

SEQ ID NO: 1897383 - RNA, 19 nt, Artificial Sequence
  Description of Artificial Sequence: Synthetic oligonucleotide
uauuaacacaggagcugag

SEQ ID NO: 1897384 - RNA, 19 nt, Artificial Sequence
  Description of Artificial Sequence: Synthetic oligonucleotide
gguaaauccauucuaccca

SEQ ID NO: 1897385 - RNA, 19 nt, Artificial Sequence
  Description of Artificial Sequence: Synthetic oligonucleotide
aauggcuuuaggccuucca

SEQ ID NO: 1897386 - RNA, 19 nt, Artificial Sequence
  Description of Artificial Sequence: Synthetic oligonucleotide
gaacggaaugguaaacucc

SEQ ID NO: 1897387 - RNA, 19 nt, Artificial Sequence
  Description of Artificial Sequence: Synthetic oligonucleotide
aaaguccaaagagauucug

SEQ ID NO: 1897388 - RNA, 19 nt, Artificial Sequence
  Description of Artificial Sequence: Synthetic oligonucleotide
guacauacacagagcaucg

SEQ ID NO: 1897389 - RNA, 19 nt, Artificial Sequence
  Description of Artificial Sequence: Synthetic oligonucleotide
ucagcgaguacuagaucug

SEQ ID NO: 1897390 - RNA, 19 nt, Artificial Sequence
  Description of Artificial Sequence: Synthetic oligonucleotide
acaucggacuucugggaac

SEQ ID NO: 1897391 - RNA, 19 nt, Artificial Sequence
  Description of Artificial Sequence: Synthetic oligonucleotide
ucugauugcuacuccuuac

SEQ ID NO: 1897392 - RNA, 19 nt, Artificial Sequence
  Description of Artificial Sequence: Synthetic oligonucleotide
gaagucagcgaguacuaga

SEQ ID NO: 1897393 - RNA, 19 nt, Artificial Sequence
  Description of Artificial Sequence: Synthetic oligonucleotide
caucaacuuccuauaauuc

SEQ ID NO: 1897394 - RNA, 19 nt, Artificial Sequence
  Description of Artificial Sequence: Synthetic oligonucleotide
acuacgggcgguuuugcug

SEQ ID NO: 1897395 - RNA, 19 nt, Artificial Sequence
  Description of Artificial Sequence: Synthetic oligonucleotide
cuacaaacaaccagggcga

SEQ ID NO: 1897396 - RNA, 19 nt, Artificial Sequence
  Description of Artificial Sequence: Synthetic oligonucleotide
cacaggagcugagaaaugg

SEQ ID NO: 1897397 - RNA, 19 nt, Artificial Sequence
  Description of Artificial Sequence: Synthetic oligonucleotide
acgaacaguuacgucagac

SEQ ID NO: 1897398 - RNA, 19 nt, Artificial Sequence
  Description of Artificial Sequence: Synthetic oligonucleotide
acuagauccaugcacuguu

SEQ ID NO: 1897399 - RNA, 19 nt, Artificial Sequence
  Description of Artificial Sequence: Synthetic oligonucleotide
gaugacggcuucaugaauc

SEQ ID NO: 1897400 - RNA, 19 nt, Artificial Sequence
  Description of Artificial Sequence: Synthetic oligonucleotide
acuucugauugcuacuccu

SEQ ID NO: 1897401 - RNA, 19 nt, Artificial Sequence
  Description of Artificial Sequence: Synthetic oligonucleotide
acgaugucuacucuaacua

SEQ ID NO: 1897402 - RNA, 19 nt, Artificial Sequence
  Description of Artificial Sequence: Synthetic oligonucleotide
uccgauacauguagcacuc

SEQ ID NO: 1897403 - RNA, 19 nt, Artificial Sequence
  Description of Artificial Sequence: Synthetic oligonucleotide
ugucauuuaucagaaugaa

SEQ ID NO: 1897404 - RNA, 19 nt, Artificial Sequence
  Description of Artificial Sequence: Synthetic oligonucleotide
cauugugcaauauggguga

SEQ ID NO: 1897405 - RNA, 19 nt, Artificial Sequence
  Description of Artificial Sequence: Synthetic oligonucleotide
cugaaguauuccauacuug

SEQ ID NO: 1897406 - RNA, 19 nt, Artificial Sequence
  Description of Artificial Sequence: Synthetic oligonucleotide
cuacgggcgguuuugcugc

SEQ ID NO: 1897407 - RNA, 19 nt, Artificial Sequence
  Description of Artificial Sequence: Synthetic oligonucleotide
uuaaagucacgaacaguua

SEQ ID NO: 1897408 - RNA, 19 nt, Artificial Sequence
  Description of Artificial Sequence: Synthetic oligonucleotide
uuaacauggcuuucccagu

SEQ ID NO: 1897409 - RNA, 19 nt, Artificial Sequence
  Description of Artificial Sequence: Synthetic oligonucleotide
aacaagaagucagcgagua

SEQ ID NO: 1897410 - RNA, 19 nt, Artificial Sequence
  Description of Artificial Sequence: Synthetic oligonucleotide
auacaagucaggggcgacc

SEQ ID NO: 1897411 - RNA, 19 nt, Artificial Sequence
  Description of Artificial Sequence: Synthetic oligonucleotide
augccuuuuguaguucagc

SEQ ID NO: 1897412 - RNA, 19 nt, Artificial Sequence
  Description of Artificial Sequence: Synthetic oligonucleotide
gaguugaugacaucggacu

SEQ ID NO: 1897413 - RNA, 19 nt, Artificial Sequence
  Description of Artificial Sequence: Synthetic oligonucleotide
gagguuaaccaggaauucc

SEQ ID NO: 1897414 - RNA, 19 nt, Artificial Sequence
  Description of Artificial Sequence: Synthetic oligonucleotide
aagucguggauugguggac

SEQ ID NO: 1897415 - RNA, 19 nt, Artificial Sequence
  Description of Artificial Sequence: Synthetic oligonucleotide
acaagaagucagcgaguac

SEQ ID NO: 1897416 - RNA, 19 nt, Artificial Sequence
  Description of Artificial Sequence: Synthetic oligonucleotide
ugcugcaaguacauacaca

SEQ ID NO: 1897417 - RNA, 19 nt, Artificial Sequence
  Description of Artificial Sequence: Synthetic oligonucleotide
uccuccgauacauguagca

SEQ ID NO: 1897418 - RNA, 19 nt, Artificial Sequence
  Description of Artificial Sequence: Synthetic oligonucleotide
aagucacgaacaguuacgu

SEQ ID NO: 1897419 - RNA, 19 nt, Artificial Sequence
  Description of Artificial Sequence: Synthetic oligonucleotide
uggggcauugugcaauaug

SEQ ID NO: 1897420 - RNA, 19 nt, Artificial Sequence
  Description of Artificial Sequence: Synthetic oligonucleotide
uccauucuacccaucuuaa

SEQ ID NO: 1897421 - RNA, 19 nt, Artificial Sequence
  Description of Artificial Sequence: Synthetic oligonucleotide
ucgccaagguuucuggcug

SEQ ID NO: 1897422 - RNA, 19 nt, Artificial Sequence
  Description of Artificial Sequence: Synthetic oligonucleotide
ccaauuaaagucacgaaca

SEQ ID NO: 1897423 - RNA, 19 nt, Artificial Sequence
  Description of Artificial Sequence: Synthetic oligonucleotide
gaauaaaaugaggcaugcc

SEQ ID NO: 1897424 - RNA, 19 nt, Artificial Sequence
  Description of Artificial Sequence: Synthetic oligonucleotide
aagcucacacuuuaauguu

SEQ ID NO: 1897425 - RNA, 19 nt, Artificial Sequence
  Description of Artificial Sequence: Synthetic oligonucleotide
augaaucucaguagcuaac

SEQ ID NO: 1897426 - RNA, 19 nt, Artificial Sequence
  Description of Artificial Sequence: Synthetic oligonucleotide
caucuuaacauggcuuucc

SEQ ID NO: 1897427 - RNA, 19 nt, Artificial Sequence
  Description of Artificial Sequence: Synthetic oligonucleotide
gaagucguggauuggugga

SEQ ID NO: 1897428 - RNA, 19 nt, Artificial Sequence
  Description of Artificial Sequence: Synthetic oligonucleotide
gggaucagaagccaugagc

SEQ ID NO: 1897429 - RNA, 19 nt, Artificial Sequence
  Description of Artificial Sequence: Synthetic oligonucleotide
uaacauggcuuucccaguc

SEQ ID NO: 1897430 - RNA, 19 nt, Artificial Sequence
  Description of Artificial Sequence: Synthetic oligonucleotide
gauggaacggaaugguaaa

SEQ ID NO: 1897431 - RNA, 19 nt, Artificial Sequence
  Description of Artificial Sequence: Synthetic oligonucleotide
ugauugcuacuccuuacau

SEQ ID NO: 1897432 - RNA, 19 nt, Artificial Sequence
  Description of Artificial Sequence: Synthetic oligonucleotide
acauacacagagcaucgau

SEQ ID NO: 1897433 - RNA, 19 nt, Artificial Sequence
  Description of Artificial Sequence: Synthetic oligonucleotide
augucuacucuaacuacgg

SEQ ID NO: 1897434 - RNA, 19 nt, Artificial Sequence
  Description of Artificial Sequence: Synthetic oligonucleotide
acucuacaaacaaccaggg

SEQ ID NO: 1897435 - RNA, 19 nt, Artificial Sequence
  Description of Artificial Sequence: Synthetic oligonucleotide
uucuacccaucuuaacaug

SEQ ID NO: 1897436 - RNA, 19 nt, Artificial Sequence
  Description of Artificial Sequence: Synthetic oligonucleotide
cuacccaucuuaacauggc

SEQ ID NO: 1897437 - RNA, 19 nt, Artificial Sequence
  Description of Artificial Sequence: Synthetic oligonucleotide
uacccaucuuaacauggcu

SEQ ID NO: 1897438 - RNA, 19 nt, Artificial Sequence
  Description of Artificial Sequence: Synthetic oligonucleotide
ucgaagucguggauuggug

SEQ ID NO: 1897439 - RNA, 19 nt, Artificial Sequence
  Description of Artificial Sequence: Synthetic oligonucleotide
acggcuucaugaauccucc

SEQ ID NO: 1897440 - RNA, 19 nt, Artificial Sequence
  Description of Artificial Sequence: Synthetic oligonucleotide
ucaggggcgaccuggggca

SEQ ID NO: 1897441 - RNA, 19 nt, Artificial Sequence
  Description of Artificial Sequence: Synthetic oligonucleotide
aagucagcgaguacuagau

SEQ ID NO: 1897442 - RNA, 19 nt, Artificial Sequence
  Description of Artificial Sequence: Synthetic oligonucleotide
gucaaaguggaccaucaaa

SEQ ID NO: 1897443 - RNA, 19 nt, Artificial Sequence
  Description of Artificial Sequence: Synthetic oligonucleotide
uggaacggaaugguaaacu

SEQ ID NO: 1897444 - RNA, 19 nt, Artificial Sequence
  Description of Artificial Sequence: Synthetic oligonucleotide
ggauaacaagaagucagcg

SEQ ID NO: 1897445 - RNA, 19 nt, Artificial Sequence
  Description of Artificial Sequence: Synthetic oligonucleotide
uucugauugcuacuccuua

SEQ ID NO: 1897446 - RNA, 19 nt, Artificial Sequence
  Description of Artificial Sequence: Synthetic oligonucleotide
agucacgaacaguuacguc

SEQ ID NO: 1897447 - RNA, 19 nt, Artificial Sequence
  Description of Artificial Sequence: Synthetic oligonucleotide
uggauugguggacucugga

SEQ ID NO: 1897448 - RNA, 19 nt, Artificial Sequence
  Description of Artificial Sequence: Synthetic oligonucleotide
acauggcuuucccagucag

SEQ ID NO: 1897449 - RNA, 19 nt, Artificial Sequence
  Description of Artificial Sequence: Synthetic oligonucleotide
ugacaucggacuucuggga

SEQ ID NO: 1897450 - RNA, 19 nt, Artificial Sequence
  Description of Artificial Sequence: Synthetic oligonucleotide
gucagcgaguacuagaucu

SEQ ID NO: 1897451 - RNA, 19 nt, Artificial Sequence
  Description of Artificial Sequence: Synthetic oligonucleotide
aguucaaagccagaauuau

SEQ ID NO: 1897452 - RNA, 19 nt, Artificial Sequence
  Description of Artificial Sequence: Synthetic oligonucleotide
uaggccuuccaaagaguug

SEQ ID NO: 1897453 - RNA, 19 nt, Artificial Sequence
  Description of Artificial Sequence: Synthetic oligonucleotide
agccagaauuauccagaac

SEQ ID NO: 1897454 - RNA, 19 nt, Artificial Sequence
  Description of Artificial Sequence: Synthetic oligonucleotide
auuaacacaggagcugaga

SEQ ID NO: 1897455 - RNA, 19 nt, Artificial Sequence
  Description of Artificial Sequence: Synthetic oligonucleotide
uaucagaaugaauggcuuu

SEQ ID NO: 1897456 - RNA, 19 nt, Artificial Sequence
  Description of Artificial Sequence: Synthetic oligonucleotide
auggcuuuaggccuuccaa

SEQ ID NO: 1897457 - RNA, 19 nt, Artificial Sequence
  Description of Artificial Sequence: Synthetic oligonucleotide
aaauggggauccccaggcu

SEQ ID NO: 1897458 - RNA, 19 nt, Artificial Sequence
  Description of Artificial Sequence: Synthetic oligonucleotide
auguucaacuauccaauua

SEQ ID NO: 1897459 - RNA, 19 nt, Artificial Sequence
  Description of Artificial Sequence: Synthetic oligonucleotide
uggaugacggcuucaugaa

SEQ ID NO: 1897460 - RNA, 19 nt, Artificial Sequence
  Description of Artificial Sequence: Synthetic oligonucleotide
gguaaacucccauuuucug

SEQ ID NO: 1897461 - RNA, 19 nt, Artificial Sequence
  Description of Artificial Sequence: Synthetic oligonucleotide
cauacuugccgguggucag

SEQ ID NO: 1897462 - RNA, 19 nt, Artificial Sequence
  Description of Artificial Sequence: Synthetic oligonucleotide
aggacuagauccaugcacu

SEQ ID NO: 1897463 - RNA, 19 nt, Artificial Sequence
  Description of Artificial Sequence: Synthetic oligonucleotide
gcugcuuucuuguauuuac

SEQ ID NO: 1897464 - RNA, 19 nt, Artificial Sequence
  Description of Artificial Sequence: Synthetic oligonucleotide
agauucugugucauuuauc

SEQ ID NO: 1897465 - RNA, 19 nt, Artificial Sequence
  Description of Artificial Sequence: Synthetic oligonucleotide
uagcuaacucagaggauaa

SEQ ID NO: 1897466 - RNA, 19 nt, Artificial Sequence
  Description of Artificial Sequence: Synthetic oligonucleotide
agguuaaccaggaauuccu

SEQ ID NO: 1897467 - RNA, 19 nt, Artificial Sequence
  Description of Artificial Sequence: Synthetic oligonucleotide
uggcuuuaggccuuccaaa

SEQ ID NO: 1897468 - RNA, 19 nt, Artificial Sequence
  Description of Artificial Sequence: Synthetic oligonucleotide
auccaauuaaagucacgaa

SEQ ID NO: 1897469 - RNA, 19 nt, Artificial Sequence
  Description of Artificial Sequence: Synthetic oligonucleotide
ucuaacuacgggcgguuuu

SEQ ID NO: 1897470 - RNA, 19 nt, Artificial Sequence
  Description of Artificial Sequence: Synthetic oligonucleotide
auggaacggaaugguaaac

SEQ ID NO: 1897471 - RNA, 19 nt, Artificial Sequence
  Description of Artificial Sequence: Synthetic oligonucleotide
gaaugguaaacucccauuu

SEQ ID NO: 1897472 - RNA, 19 nt, Artificial Sequence
  Description of Artificial Sequence: Synthetic oligonucleotide
acgucagacacaaaccaug

SEQ ID NO: 1897473 - RNA, 19 nt, Artificial Sequence
  Description of Artificial Sequence: Synthetic oligonucleotide
cuaacuacgggcgguuuug

SEQ ID NO: 1897474 - RNA, 19 nt, Artificial Sequence
  Description of Artificial Sequence: Synthetic oligonucleotide
caaacugaaguauuccaua

SEQ ID NO: 1897475 - RNA, 19 nt, Artificial Sequence
  Description of Artificial Sequence: Synthetic oligonucleotide
uugugcaauaugggugagg

SEQ ID NO: 1897476 - RNA, 19 nt, Artificial Sequence
  Description of Artificial Sequence: Synthetic oligonucleotide
agucagcgaguacuagauc

SEQ ID NO: 1897477 - RNA, 19 nt, Artificial Sequence
  Description of Artificial Sequence: Synthetic oligonucleotide
uaaauacaucgaagucgug

SEQ ID NO: 1897478 - RNA, 19 nt, Artificial Sequence
  Description of Artificial Sequence: Synthetic oligonucleotide
cuacucuaacuacgggcgg

SEQ ID NO: 1897479 - RNA, 19 nt, Artificial Sequence
  Description of Artificial Sequence: Synthetic oligonucleotide
uuuuguaguucagcauaca

SEQ ID NO: 1897480 - RNA, 19 nt, Artificial Sequence
  Description of Artificial Sequence: Synthetic oligonucleotide
guagcuaacucagaggaua

SEQ ID NO: 1897481 - RNA, 19 nt, Artificial Sequence
  Description of Artificial Sequence: Synthetic oligonucleotide
gcacucuacaaacaaccag

SEQ ID NO: 1897482 - RNA, 19 nt, Artificial Sequence
  Description of Artificial Sequence: Synthetic oligonucleotide
uccuuacauguucaacuau

SEQ ID NO: 1897483 - RNA, 19 nt, Artificial Sequence
  Description of Artificial Sequence: Synthetic oligonucleotide
gcugagaggagguuaacca

SEQ ID NO: 1897484 - RNA, 19 nt, Artificial Sequence
  Description of Artificial Sequence: Synthetic oligonucleotide
aacuacgggcgguuuugcu

SEQ ID NO: 1897485 - RNA, 19 nt, Artificial Sequence
  Description of Artificial Sequence: Synthetic oligonucleotide
gcauugugcaauaugggug

SEQ ID NO: 1897486 - RNA, 19 nt, Artificial Sequence
  Description of Artificial Sequence: Synthetic oligonucleotide
agcucacacuuuaauguuc

SEQ ID NO: 1897487 - RNA, 19 nt, Artificial Sequence
  Description of Artificial Sequence: Synthetic oligonucleotide
uuccauacuugccgguggu

SEQ ID NO: 1897488 - RNA, 19 nt, Artificial Sequence
  Description of Artificial Sequence: Synthetic oligonucleotide
gucaggggcgaccuggggc

SEQ ID NO: 1897489 - RNA, 19 nt, Artificial Sequence
  Description of Artificial Sequence: Synthetic oligonucleotide
gccaggacuagauccaugc

SEQ ID NO: 1897490 - RNA, 19 nt, Artificial Sequence
  Description of Artificial Sequence: Synthetic oligonucleotide
cuuaugcuacacagaggug

SEQ ID NO: 1897491 - RNA, 19 nt, Artificial Sequence
  Description of Artificial Sequence: Synthetic oligonucleotide
ucucaguagcuaacucaga

SEQ ID NO: 1897492 - RNA, 19 nt, Artificial Sequence
  Description of Artificial Sequence: Synthetic oligonucleotide
gacggcuucaugaauccuc

SEQ ID NO: 1897493 - RNA, 19 nt, Artificial Sequence
  Description of Artificial Sequence: Synthetic oligonucleotide
caccugauagagacaaguc

SEQ ID NO: 1897494 - RNA, 19 nt, Artificial Sequence
  Description of Artificial Sequence: Synthetic oligonucleotide
ccuuacauguucaacuauc

SEQ ID NO: 1897495 - RNA, 19 nt, Artificial Sequence
  Description of Artificial Sequence: Synthetic oligonucleotide
agcauacaagucaggggcg

SEQ ID NO: 1897496 - RNA, 19 nt, Artificial Sequence
  Description of Artificial Sequence: Synthetic oligonucleotide
cugauagagacaagucaca

SEQ ID NO: 1897497 - RNA, 19 nt, Artificial Sequence
  Description of Artificial Sequence: Synthetic oligonucleotide
gaagccaggacuagaucca

SEQ ID NO: 1897498 - RNA, 19 nt, Artificial Sequence
  Description of Artificial Sequence: Synthetic oligonucleotide
uagauccaugcacuguuuu

SEQ ID NO: 1897499 - RNA, 19 nt, Artificial Sequence
  Description of Artificial Sequence: Synthetic oligonucleotide
uacuccuuacauguucaac

SEQ ID NO: 1897500 - RNA, 19 nt, Artificial Sequence
  Description of Artificial Sequence: Synthetic oligonucleotide
ggaacggaaugguaaacuc

SEQ ID NO: 1897501 - RNA, 19 nt, Artificial Sequence
  Description of Artificial Sequence: Synthetic oligonucleotide
aaaaugaggcaugccuuuu

SEQ ID NO: 1897502 - RNA, 19 nt, Artificial Sequence
  Description of Artificial Sequence: Synthetic oligonucleotide
ugguggacucuggaugacg

SEQ ID NO: 1897503 - RNA, 19 nt, Artificial Sequence
  Description of Artificial Sequence: Synthetic oligonucleotide
caagaagucagcgaguacu

SEQ ID NO: 1897504 - RNA, 19 nt, Artificial Sequence
  Description of Artificial Sequence: Synthetic oligonucleotide
uacaucgaagucguggauu

SEQ ID NO: 1897505 - RNA, 19 nt, Artificial Sequence
  Description of Artificial Sequence: Synthetic oligonucleotide
cauggcuuucccagucagc

SEQ ID NO: 1897506 - RNA, 19 nt, Artificial Sequence
  Description of Artificial Sequence: Synthetic oligonucleotide
agagauucugugucauuua

SEQ ID NO: 1897507 - RNA, 19 nt, Artificial Sequence
  Description of Artificial Sequence: Synthetic oligonucleotide
acucaucaacuuccuauaa

SEQ ID NO: 1897508 - RNA, 19 nt, Artificial Sequence
  Description of Artificial Sequence: Synthetic oligonucleotide
uuucuccaccugauagaga

SEQ ID NO: 1897509 - RNA, 19 nt, Artificial Sequence
  Description of Artificial Sequence: Synthetic oligonucleotide
gaacgaugucuacucuaac

SEQ ID NO: 1897510 - RNA, 19 nt, Artificial Sequence
  Description of Artificial Sequence: Synthetic oligonucleotide
aucgaagucguggauuggu

SEQ ID NO: 1897511 - RNA, 19 nt, Artificial Sequence
  Description of Artificial Sequence: Synthetic oligonucleotide
agaacgaugucuacucuaa

SEQ ID NO: 1897512 - RNA, 19 nt, Artificial Sequence
  Description of Artificial Sequence: Synthetic oligonucleotide
cugauugcuacuccuuaca

SEQ ID NO: 1897513 - RNA, 19 nt, Artificial Sequence
  Description of Artificial Sequence: Synthetic oligonucleotide
uacucuaacuacgggcggu

SEQ ID NO: 1897514 - RNA, 19 nt, Artificial Sequence
  Description of Artificial Sequence: Synthetic oligonucleotide
acucagaggauaacaagaa

SEQ ID NO: 1897515 - RNA, 19 nt, Artificial Sequence
  Description of Artificial Sequence: Synthetic oligonucleotide
guagcacucuacaaacaac

SEQ ID NO: 1897516 - RNA, 19 nt, Artificial Sequence
  Description of Artificial Sequence: Synthetic oligonucleotide
auauaugaucaugguaaau

SEQ ID NO: 1897517 - RNA, 19 nt, Artificial Sequence
  Description of Artificial Sequence: Synthetic oligonucleotide
agcuaacucagaggauaac

SEQ ID NO: 1897518 - RNA, 19 nt, Artificial Sequence
  Description of Artificial Sequence: Synthetic oligonucleotide
agacacaaaccaugggaua

SEQ ID NO: 1897519 - RNA, 19 nt, Artificial Sequence
  Description of Artificial Sequence: Synthetic oligonucleotide
cugcugcaaguacauacac

SEQ ID NO: 1897520 - RNA, 19 nt, Artificial Sequence
  Description of Artificial Sequence: Synthetic oligonucleotide
cagagggagaucugcagga

SEQ ID NO: 1897521 - RNA, 19 nt, Artificial Sequence
  Description of Artificial Sequence: Synthetic oligonucleotide
uccaccugauagagacaag

SEQ ID NO: 1897522 - RNA, 19 nt, Artificial Sequence
  Description of Artificial Sequence: Synthetic oligonucleotide
gcuaacucagaggauaaca

SEQ ID NO: 1897523 - RNA, 19 nt, Artificial Sequence
  Description of Artificial Sequence: Synthetic oligonucleotide
ucuccaccugauagagaca

SEQ ID NO: 1897524 - RNA, 19 nt, Artificial Sequence
  Description of Artificial Sequence: Synthetic oligonucleotide
uacauacacagagcaucga

SEQ ID NO: 1897525 - RNA, 19 nt, Artificial Sequence
  Description of Artificial Sequence: Synthetic oligonucleotide
ccaucaaacugaaguauuc

SEQ ID NO: 1897526 - RNA, 19 nt, Artificial Sequence
  Description of Artificial Sequence: Synthetic oligonucleotide
ccccuugaauaaaaugagg

SEQ ID NO: 1897527 - RNA, 19 nt, Artificial Sequence
  Description of Artificial Sequence: Synthetic oligonucleotide
uagagacaagucacacuua

SEQ ID NO: 1897528 - RNA, 19 nt, Artificial Sequence
  Description of Artificial Sequence: Synthetic oligonucleotide
ggaucagaagccaugagcu

SEQ ID NO: 1897529 - RNA, 19 nt, Artificial Sequence
  Description of Artificial Sequence: Synthetic oligonucleotide
ccagagggagaucugcagg

SEQ ID NO: 1897530 - RNA, 19 nt, Artificial Sequence
  Description of Artificial Sequence: Synthetic oligonucleotide
auacaucgaagucguggau

SEQ ID NO: 1897531 - RNA, 19 nt, Artificial Sequence
  Description of Artificial Sequence: Synthetic oligonucleotide
agaccaaccugaagcucac

SEQ ID NO: 1897532 - RNA, 19 nt, Artificial Sequence
  Description of Artificial Sequence: Synthetic oligonucleotide
gagauucugugucauuuau

SEQ ID NO: 1897533 - RNA, 19 nt, Artificial Sequence
  Description of Artificial Sequence: Synthetic oligonucleotide
agaguccaaaauauaugau

SEQ ID NO: 1897534 - RNA, 19 nt, Artificial Sequence
  Description of Artificial Sequence: Synthetic oligonucleotide
ucagccaguggggaucaga

SEQ ID NO: 1897535 - RNA, 19 nt, Artificial Sequence
  Description of Artificial Sequence: Synthetic oligonucleotide
agaucugcaggaguuuaaa

SEQ ID NO: 1897536 - RNA, 19 nt, Artificial Sequence
  Description of Artificial Sequence: Synthetic oligonucleotide
agagggagaucugcaggag

SEQ ID NO: 1897537 - RNA, 19 nt, Artificial Sequence
  Description of Artificial Sequence: Synthetic oligonucleotide
cuccgauacauguagcacu

SEQ ID NO: 1897538 - RNA, 19 nt, Artificial Sequence
  Description of Artificial Sequence: Synthetic oligonucleotide
auccuccgauacauguagc

SEQ ID NO: 1897539 - RNA, 19 nt, Artificial Sequence
  Description of Artificial Sequence: Synthetic oligonucleotide
gggaacugcuuucuccacc

SEQ ID NO: 1897540 - RNA, 19 nt, Artificial Sequence
  Description of Artificial Sequence: Synthetic oligonucleotide
caaaguggaccaucaaacu

SEQ ID NO: 1897541 - RNA, 19 nt, Artificial Sequence
  Description of Artificial Sequence: Synthetic oligonucleotide
caucgauggacuccugaga

SEQ ID NO: 1897542 - RNA, 19 nt, Artificial Sequence
  Description of Artificial Sequence: Synthetic oligonucleotide
guaguucagcauacaaguc

SEQ ID NO: 1897543 - RNA, 19 nt, Artificial Sequence
  Description of Artificial Sequence: Synthetic oligonucleotide
agcacucuacaaacaacca

SEQ ID NO: 1897544 - RNA, 19 nt, Artificial Sequence
  Description of Artificial Sequence: Synthetic oligonucleotide
gcgaguacuagaucuguga

SEQ ID NO: 1897545 - RNA, 19 nt, Artificial Sequence
  Description of Artificial Sequence: Synthetic oligonucleotide
ugguccucgccaagguuuc

SEQ ID NO: 1897546 - RNA, 19 nt, Artificial Sequence
  Description of Artificial Sequence: Synthetic oligonucleotide
cacucaucaacuuccuaua

SEQ ID NO: 1897547 - RNA, 19 nt, Artificial Sequence
  Description of Artificial Sequence: Synthetic oligonucleotide
guacuagaucugugaugag

SEQ ID NO: 1897548 - RNA, 19 nt, Artificial Sequence
  Description of Artificial Sequence: Synthetic oligonucleotide
uaacuacgggcgguuuugc

SEQ ID NO: 1897549 - RNA, 19 nt, Artificial Sequence
  Description of Artificial Sequence: Synthetic oligonucleotide
ggcauugugcaauaugggu

SEQ ID NO: 1897550 - RNA, 19 nt, Artificial Sequence
  Description of Artificial Sequence: Synthetic oligonucleotide
cuccuuacauguucaacua

SEQ ID NO: 1897551 - RNA, 19 nt, Artificial Sequence
  Description of Artificial Sequence: Synthetic oligonucleotide
gcgagaagaaccagcgcgg

SEQ ID NO: 1897552 - RNA, 19 nt, Artificial Sequence
  Description of Artificial Sequence: Synthetic oligonucleotide
auugugcaauaugggugag

SEQ ID NO: 1897553 - RNA, 19 nt, Artificial Sequence
  Description of Artificial Sequence: Synthetic oligonucleotide
acacaaaccaugggauagu

SEQ ID NO: 1897554 - RNA, 19 nt, Artificial Sequence
  Description of Artificial Sequence: Synthetic oligonucleotide
gcuacacagaggugcuggg

SEQ ID NO: 1897555 - RNA, 19 nt, Artificial Sequence
  Description of Artificial Sequence: Synthetic oligonucleotide
ggcuucaugaauccuccga

SEQ ID NO: 1897556 - RNA, 19 nt, Artificial Sequence
  Description of Artificial Sequence: Synthetic oligonucleotide
cgaagucguggauuggugg

SEQ ID NO: 1897557 - RNA, 19 nt, Artificial Sequence
  Description of Artificial Sequence: Synthetic oligonucleotide
caacuuccuauaauucaaa

SEQ ID NO: 1897558 - RNA, 19 nt, Artificial Sequence
  Description of Artificial Sequence: Synthetic oligonucleotide
uggucagccaguggggauc

SEQ ID NO: 1897559 - RNA, 19 nt, Artificial Sequence
  Description of Artificial Sequence: Synthetic oligonucleotide
guggauugguggacucugg

SEQ ID NO: 1897560 - RNA, 19 nt, Artificial Sequence
  Description of Artificial Sequence: Synthetic oligonucleotide
ccagaauuauccagaacga

SEQ ID NO: 1897561 - RNA, 19 nt, Artificial Sequence
  Description of Artificial Sequence: Synthetic oligonucleotide
gcuguagaccaaccugaag

SEQ ID NO: 1897562 - RNA, 19 nt, Artificial Sequence
  Description of Artificial Sequence: Synthetic oligonucleotide
guggacucuggaugacggc

SEQ ID NO: 1897563 - RNA, 19 nt, Artificial Sequence
  Description of Artificial Sequence: Synthetic oligonucleotide
cuccaccugauagagacaa

SEQ ID NO: 1897564 - RNA, 19 nt, Artificial Sequence
  Description of Artificial Sequence: Synthetic oligonucleotide
ggacuagauccaugcacug

SEQ ID NO: 1897565 - RNA, 19 nt, Artificial Sequence
  Description of Artificial Sequence: Synthetic oligonucleotide
cauacaagucaggggcgac

SEQ ID NO: 1897566 - RNA, 19 nt, Artificial Sequence
  Description of Artificial Sequence: Synthetic oligonucleotide
uggcuuucccagucagcac

SEQ ID NO: 1897567 - RNA, 19 nt, Artificial Sequence
  Description of Artificial Sequence: Synthetic oligonucleotide
acaaacaaccagggcgaga

SEQ ID NO: 1897568 - RNA, 19 nt, Artificial Sequence
  Description of Artificial Sequence: Synthetic oligonucleotide
gaauccuccgauacaugua

SEQ ID NO: 1897569 - RNA, 19 nt, Artificial Sequence
  Description of Artificial Sequence: Synthetic oligonucleotide
caucgaagucguggauugg

SEQ ID NO: 1897570 - RNA, 19 nt, Artificial Sequence
  Description of Artificial Sequence: Synthetic oligonucleotide
agcgaguacuagaucugug

SEQ ID NO: 1897571 - RNA, 19 nt, Artificial Sequence
  Description of Artificial Sequence: Synthetic oligonucleotide
agucguggauugguggacu

SEQ ID NO: 1897572 - RNA, 19 nt, Artificial Sequence
  Description of Artificial Sequence: Synthetic oligonucleotide
gcugcugagaagccaggac

SEQ ID NO: 1897573 - RNA, 19 nt, Artificial Sequence
  Description of Artificial Sequence: Synthetic oligonucleotide
ggcugagaggagguuaacc

SEQ ID NO: 1897574 - RNA, 19 nt, Artificial Sequence
  Description of Artificial Sequence: Synthetic oligonucleotide
auguagcacucuacaaaca

SEQ ID NO: 1897575 - RNA, 19 nt, Artificial Sequence
  Description of Artificial Sequence: Synthetic oligonucleotide
gaggcugagaggagguuaa

SEQ ID NO: 1897576 - RNA, 19 nt, Artificial Sequence
  Description of Artificial Sequence: Synthetic oligonucleotide
acccaucuuaacauggcuu

SEQ ID NO: 1897577 - RNA, 19 nt, Artificial Sequence
  Description of Artificial Sequence: Synthetic oligonucleotide
guagaccaaccugaagcuc

SEQ ID NO: 1897578 - RNA, 19 nt, Artificial Sequence
  Description of Artificial Sequence: Synthetic oligonucleotide
aguagcuaacucagaggau

SEQ ID NO: 1897579 - RNA, 19 nt, Artificial Sequence
  Description of Artificial Sequence: Synthetic oligonucleotide
cacagagcaucgauggacu

SEQ ID NO: 1897580 - RNA, 19 nt, Artificial Sequence
  Description of Artificial Sequence: Synthetic oligonucleotide
gagggagaucugcaggagu

SEQ ID NO: 1897581 - RNA, 19 nt, Artificial Sequence
  Description of Artificial Sequence: Synthetic oligonucleotide
ccggcuguagaccaaccug

SEQ ID NO: 1897582 - RNA, 19 nt, Artificial Sequence
  Description of Artificial Sequence: Synthetic oligonucleotide
aguggaccaucaaacugaa

SEQ ID NO: 1897583 - RNA, 19 nt, Artificial Sequence
  Description of Artificial Sequence: Synthetic oligonucleotide
gagaucugcaggaguuuaa

SEQ ID NO: 1897584 - RNA, 19 nt, Artificial Sequence
  Description of Artificial Sequence: Synthetic oligonucleotide
accuggggcauugugcaau

SEQ ID NO: 1897585 - RNA, 19 nt, Artificial Sequence
  Description of Artificial Sequence: Synthetic oligonucleotide
ggugaggcagaguccaaaa

SEQ ID NO: 1897586 - RNA, 19 nt, Artificial Sequence
  Description of Artificial Sequence: Synthetic oligonucleotide
gucguggauugguggacuc

SEQ ID NO: 1897587 - RNA, 19 nt, Artificial Sequence
  Description of Artificial Sequence: Synthetic oligonucleotide
cugauggaacggaauggua

SEQ ID NO: 1897588 - RNA, 19 nt, Artificial Sequence
  Description of Artificial Sequence: Synthetic oligonucleotide
cucgccaagguuucuggcu

SEQ ID NO: 1897589 - RNA, 19 nt, Artificial Sequence
  Description of Artificial Sequence: Synthetic oligonucleotide
ggggaucagaagccaugag

SEQ ID NO: 1897590 - RNA, 19 nt, Artificial Sequence
  Description of Artificial Sequence: Synthetic oligonucleotide
aggcugagaggagguuaac

SEQ ID NO: 1897591 - RNA, 19 nt, Artificial Sequence
  Description of Artificial Sequence: Synthetic oligonucleotide
agcaaaguccaaagagauu

SEQ ID NO: 1897592 - RNA, 19 nt, Artificial Sequence
  Description of Artificial Sequence: Synthetic oligonucleotide
ugacggcuucaugaauccu

SEQ ID NO: 1897593 - RNA, 19 nt, Artificial Sequence
  Description of Artificial Sequence: Synthetic oligonucleotide
cccagagggagaucugcag

SEQ ID NO: 1897594 - RNA, 19 nt, Artificial Sequence
  Description of Artificial Sequence: Synthetic oligonucleotide
uccauacuugccggugguc

SEQ ID NO: 1897595 - RNA, 19 nt, Artificial Sequence
  Description of Artificial Sequence: Synthetic oligonucleotide
gugcaauaugggugaggca

SEQ ID NO: 1897596 - RNA, 19 nt, Artificial Sequence
  Description of Artificial Sequence: Synthetic oligonucleotide
gcugcugcaaguacauaca

SEQ ID NO: 1897597 - RNA, 19 nt, Artificial Sequence
  Description of Artificial Sequence: Synthetic oligonucleotide
cugaagcucacacuuuaau

SEQ ID NO: 1897598 - RNA, 19 nt, Artificial Sequence
  Description of Artificial Sequence: Synthetic oligonucleotide
gaauggcuuuaggccuucc

SEQ ID NO: 1897599 - RNA, 19 nt, Artificial Sequence
  Description of Artificial Sequence: Synthetic oligonucleotide
gcaugccuuuuguaguuca

SEQ ID NO: 1897600 - RNA, 19 nt, Artificial Sequence
  Description of Artificial Sequence: Synthetic oligonucleotide
gcgaccuggggcauugugc

SEQ ID NO: 1897601 - RNA, 19 nt, Artificial Sequence
  Description of Artificial Sequence: Synthetic oligonucleotide
guauuccauacuugccggu

SEQ ID NO: 1897602 - RNA, 19 nt, Artificial Sequence
  Description of Artificial Sequence: Synthetic oligonucleotide
acucuaacuacgggcgguu

SEQ ID NO: 1897603 - RNA, 19 nt, Artificial Sequence
  Description of Artificial Sequence: Synthetic oligonucleotide
cuacuccuuacauguucaa

SEQ ID NO: 1897604 - RNA, 19 nt, Artificial Sequence
  Description of Artificial Sequence: Synthetic oligonucleotide
cugguccucgccaagguuu

SEQ ID NO: 1897605 - RNA, 19 nt, Artificial Sequence
  Description of Artificial Sequence: Synthetic oligonucleotide
ugggugaggcagaguccaa

SEQ ID NO: 1897606 - RNA, 19 nt, Artificial Sequence
  Description of Artificial Sequence: Synthetic oligonucleotide
ccuccgauacauguagcac

SEQ ID NO: 1897607 - RNA, 19 nt, Artificial Sequence
  Description of Artificial Sequence: Synthetic oligonucleotide
acggaaugguaaacuccca

SEQ ID NO: 1897608 - RNA, 19 nt, Artificial Sequence
  Description of Artificial Sequence: Synthetic oligonucleotide
gggauccccaggcugcuga

SEQ ID NO: 1897609 - RNA, 19 nt, Artificial Sequence
  Description of Artificial Sequence: Synthetic oligonucleotide
caaagagauucugugucau

SEQ ID NO: 1897610 - RNA, 19 nt, Artificial Sequence
  Description of Artificial Sequence: Synthetic oligonucleotide
ggcgaccuggggcauugug

SEQ ID NO: 1897611 - RNA, 19 nt, Artificial Sequence
  Description of Artificial Sequence: Synthetic oligonucleotide
cauguucaacuauccaauu

SEQ ID NO: 1897612 - RNA, 19 nt, Artificial Sequence
  Description of Artificial Sequence: Synthetic oligonucleotide
cugccccggcuguagacca

SEQ ID NO: 1897613 - RNA, 19 nt, Artificial Sequence
  Description of Artificial Sequence: Synthetic oligonucleotide
agccaggacuagauccaug

SEQ ID NO: 1897614 - RNA, 19 nt, Artificial Sequence
  Description of Artificial Sequence: Synthetic oligonucleotide
guggaccaucaaacugaag

SEQ ID NO: 1897615 - RNA, 19 nt, Artificial Sequence
  Description of Artificial Sequence: Synthetic oligonucleotide
cagaauuauccagaacgau

SEQ ID NO: 1897616 - RNA, 19 nt, Artificial Sequence
  Description of Artificial Sequence: Synthetic oligonucleotide
gggcgagaagaaccagcgc

SEQ ID NO: 1897617 - RNA, 19 nt, Artificial Sequence
  Description of Artificial Sequence: Synthetic oligonucleotide
ccauacuugccggugguca

SEQ ID NO: 1897618 - RNA, 19 nt, Artificial Sequence
  Description of Artificial Sequence: Synthetic oligonucleotide
gcauacaagucaggggcga

SEQ ID NO: 1897619 - RNA, 19 nt, Artificial Sequence
  Description of Artificial Sequence: Synthetic oligonucleotide
ggauugguggacucuggau

SEQ ID NO: 1897620 - RNA, 19 nt, Artificial Sequence
  Description of Artificial Sequence: Synthetic oligonucleotide
aucggacuucugggaacug

SEQ ID NO: 1897621 - RNA, 19 nt, Artificial Sequence
  Description of Artificial Sequence: Synthetic oligonucleotide
caucggacuucugggaacu

SEQ ID NO: 1897622 - RNA, 19 nt, Artificial Sequence
  Description of Artificial Sequence: Synthetic oligonucleotide
ccaucuuaacauggcuuuc

SEQ ID NO: 1897623 - RNA, 19 nt, Artificial Sequence
  Description of Artificial Sequence: Synthetic oligonucleotide
cggcuguagaccaaccuga

SEQ ID NO: 1897624 - RNA, 19 nt, Artificial Sequence
  Description of Artificial Sequence: Synthetic oligonucleotide
agccugccccggcuguaga

SEQ ID NO: 1897625 - RNA, 19 nt, Artificial Sequence
  Description of Artificial Sequence: Synthetic oligonucleotide
gagacaagucacacuuauu

SEQ ID NO: 1897626 - RNA, 19 nt, Artificial Sequence
  Description of Artificial Sequence: Synthetic oligonucleotide
ugccccggcuguagaccaa

SEQ ID NO: 1897627 - RNA, 19 nt, Artificial Sequence
  Description of Artificial Sequence: Synthetic oligonucleotide
gcuggguggaagccacaca

SEQ ID NO: 1897628 - RNA, 19 nt, Artificial Sequence
  Description of Artificial Sequence: Synthetic oligonucleotide
ccugccccggcuguagacc

SEQ ID NO: 1897629 - RNA, 19 nt, Artificial Sequence
  Description of Artificial Sequence: Synthetic oligonucleotide
cacgaacaguuacgucaga

SEQ ID NO: 1897630 - RNA, 19 nt, Artificial Sequence
  Description of Artificial Sequence: Synthetic oligonucleotide
gaccaaccugaagcucaca

SEQ ID NO: 1897631 - RNA, 19 nt, Artificial Sequence
  Description of Artificial Sequence: Synthetic oligonucleotide
cccaucuuaacauggcuuu

SEQ ID NO: 1897632 - RNA, 19 nt, Artificial Sequence
  Description of Artificial Sequence: Synthetic oligonucleotide
gccaagguuucuggcuggc

SEQ ID NO: 1897633 - RNA, 19 nt, Artificial Sequence
  Description of Artificial Sequence: Synthetic oligonucleotide
ccaaccugaagcucacacu

SEQ ID NO: 1897634 - RNA, 19 nt, Artificial Sequence
  Description of Artificial Sequence: Synthetic oligonucleotide
ccaccugauagagacaagu

SEQ ID NO: 1897635 - RNA, 19 nt, Artificial Sequence
  Description of Artificial Sequence: Synthetic oligonucleotide
ccugaagcucacacuuuaa

SEQ ID NO: 1897636 - RNA, 19 nt, Artificial Sequence
  Description of Artificial Sequence: Synthetic oligonucleotide
ggcaugccuuuuguaguuc

SEQ ID NO: 1897637 - RNA, 19 nt, Artificial Sequence
  Description of Artificial Sequence: Synthetic oligonucleotide
cgccaagguuucuggcugg

SEQ ID NO: 1897638 - RNA, 19 nt, Artificial Sequence
  Description of Artificial Sequence: Synthetic oligonucleotide
ggggcgaccuggggcauug

SEQ ID NO: 1897639 - RNA, 19 nt, Artificial Sequence
  Description of Artificial Sequence: Synthetic oligonucleotide
cgauacauguagcacucua

SEQ ID NO: 1897640 - RNA, 19 nt, Artificial Sequence
  Description of Artificial Sequence: Synthetic oligonucleotide
ccaggacuagauccaugca

SEQ ID NO: 1897641 - RNA, 19 nt, Artificial Sequence
  Description of Artificial Sequence: Synthetic oligonucleotide
cagcgaguacuagaucugu

SEQ ID NO: 1897642 - RNA, 19 nt, Artificial Sequence
  Description of Artificial Sequence: Synthetic oligonucleotide
cacaaaccaugggauaguu

SEQ ID NO: 1897643 - RNA, 19 nt, Artificial Sequence
  Description of Artificial Sequence: Synthetic oligonucleotide
gccugccccggcuguagac

SEQ ID NO: 1897644 - RNA, 19 nt, Artificial Sequence
  Description of Artificial Sequence: Synthetic oligonucleotide
gggcgguuuugcugcuuuc

SEQ ID NO: 1897645 - RNA, 19 nt, Artificial Sequence
  Description of Artificial Sequence: Synthetic oligonucleotide
ccccagagggagaucugca

SEQ ID NO: 1897646 - RNA, 19 nt, Artificial Sequence
  Description of Artificial Sequence: Synthetic oligonucleotide
cucacacuuuaauguucuu

SEQ ID NO: 1897647 - RNA, 19 nt, Artificial Sequence
  Description of Artificial Sequence: Synthetic oligonucleotide
gucagccaguggggaucag

SEQ ID NO: 1897648 - RNA, 19 nt, Artificial Sequence
  Description of Artificial Sequence: Synthetic oligonucleotide
ccccggcuguagaccaacc

SEQ ID NO: 1897649 - RNA, 19 nt, Artificial Sequence
  Description of Artificial Sequence: Synthetic oligonucleotide
cgaguacuagaucugugau

SEQ ID NO: 1897650 - RNA, 19 nt, Artificial Sequence
  Description of Artificial Sequence: Synthetic oligonucleotide
gcgguuuugcugcuuucuu

SEQ ID NO: 1897651 - RNA, 19 nt, Artificial Sequence
  Description of Artificial Sequence: Synthetic oligonucleotide
gugcuggguggaagccaca

SEQ ID NO: 1897652 - RNA, 19 nt, Artificial Sequence
  Description of Artificial Sequence: Synthetic oligonucleotide
cggaaugguaaacucccau

SEQ ID NO: 1897653 - RNA, 19 nt, Artificial Sequence
  Description of Artificial Sequence: Synthetic oligonucleotide
cucuaacuacgggcgguuu

SEQ ID NO: 1897654 - RNA, 19 nt, Artificial Sequence
  Description of Artificial Sequence: Synthetic oligonucleotide
cagcaccacagguggccau

SEQ ID NO: 1897655 - RNA, 19 nt, Artificial Sequence
  Description of Artificial Sequence: Synthetic oligonucleotide
aggggcgaccuggggcauu

SEQ ID NO: 1897656 - RNA, 19 nt, Artificial Sequence
  Description of Artificial Sequence: Synthetic oligonucleotide
cccggcuguagaccaaccu

SEQ ID NO: 1897657 - RNA, 19 nt, Artificial Sequence
  Description of Artificial Sequence: Synthetic oligonucleotide
gggccugauggaacggaau

SEQ ID NO: 1897658 - RNA, 19 nt, Artificial Sequence
  Description of Artificial Sequence: Synthetic oligonucleotide
cuggggcauugugcaauau

SEQ ID NO: 1897659 - RNA, 19 nt, Artificial Sequence
  Description of Artificial Sequence: Synthetic oligonucleotide
gguccucgccaagguuucu

SEQ ID NO: 1897660 - RNA, 19 nt, Artificial Sequence
  Description of Artificial Sequence: Synthetic oligonucleotide
ccgauacauguagcacucu

SEQ ID NO: 1897661 - RNA, 19 nt, Artificial Sequence
  Description of Artificial Sequence: Synthetic oligonucleotide
caggggcgaccuggggcau

SEQ ID NO: 1897662 - RNA, 19 nt, Artificial Sequence
  Description of Artificial Sequence: Synthetic oligonucleotide
aaugaguuuucucagccgc

SEQ ID NO: 1897663 - RNA, 19 nt, Artificial Sequence
  Description of Artificial Sequence: Synthetic oligonucleotide
ucuuaaugaagcuuaacgg

SEQ ID NO: 1897664 - RNA, 19 nt, Artificial Sequence
  Description of Artificial Sequence: Synthetic oligonucleotide
auaacuuggacucaauuuc

SEQ ID NO: 1897665 - RNA, 19 nt, Artificial Sequence
  Description of Artificial Sequence: Synthetic oligonucleotide
ugugcagaagacuacagcg

SEQ ID NO: 1897666 - RNA, 19 nt, Artificial Sequence
  Description of Artificial Sequence: Synthetic oligonucleotide
agaacagauaaguaggcac

SEQ ID NO: 1897667 - RNA, 19 nt, Artificial Sequence
  Description of Artificial Sequence: Synthetic oligonucleotide
ugccuuaucugaaugagcg

SEQ ID NO: 1897668 - RNA, 19 nt, Artificial Sequence
  Description of Artificial Sequence: Synthetic oligonucleotide
gauaaguaggcacacuagg

SEQ ID NO: 1897669 - RNA, 19 nt, Artificial Sequence
  Description of Artificial Sequence: Synthetic oligonucleotide
aauaacuuggacucaauuu

SEQ ID NO: 1897670 - RNA, 19 nt, Artificial Sequence
  Description of Artificial Sequence: Synthetic oligonucleotide
cuuuaggaugaucagacgg

SEQ ID NO: 1897671 - RNA, 19 nt, Artificial Sequence
  Description of Artificial Sequence: Synthetic oligonucleotide
uuuuaaugaguuuucucag

SEQ ID NO: 1897672 - RNA, 19 nt, Artificial Sequence
  Description of Artificial Sequence: Synthetic oligonucleotide
aaccuuaucaaccuccuga

SEQ ID NO: 1897673 - RNA, 19 nt, Artificial Sequence
  Description of Artificial Sequence: Synthetic oligonucleotide
uguagcgaggcccaggccg

SEQ ID NO: 1897674 - RNA, 19 nt, Artificial Sequence
  Description of Artificial Sequence: Synthetic oligonucleotide
uucuuuuagugucugacug

SEQ ID NO: 1897675 - RNA, 19 nt, Artificial Sequence
  Description of Artificial Sequence: Synthetic oligonucleotide
ucagauaagaccccaucag

SEQ ID NO: 1897676 - RNA, 19 nt, Artificial Sequence
  Description of Artificial Sequence: Synthetic oligonucleotide
accuagaacagauaaguag

SEQ ID NO: 1897677 - RNA, 19 nt, Artificial Sequence
  Description of Artificial Sequence: Synthetic oligonucleotide
aagacuacagcgugagacg

SEQ ID NO: 1897678 - RNA, 19 nt, Artificial Sequence
  Description of Artificial Sequence: Synthetic oligonucleotide
uuuaggaugaucagacggc

SEQ ID NO: 1897679 - RNA, 19 nt, Artificial Sequence
  Description of Artificial Sequence: Synthetic oligonucleotide
aaguuucaucugcugaggc

SEQ ID NO: 1897680 - RNA, 19 nt, Artificial Sequence
  Description of Artificial Sequence: Synthetic oligonucleotide
uaaguaggcacacuaggcc

SEQ ID NO: 1897681 - RNA, 19 nt, Artificial Sequence
  Description of Artificial Sequence: Synthetic oligonucleotide
aagcuuaacggcuguugcc

SEQ ID NO: 1897682 - RNA, 19 nt, Artificial Sequence
  Description of Artificial Sequence: Synthetic oligonucleotide
aacggaguugccuuuagga

SEQ ID NO: 1897683 - RNA, 19 nt, Artificial Sequence
  Description of Artificial Sequence: Synthetic oligonucleotide
uuuaaguugugcagaagac

SEQ ID NO: 1897684 - RNA, 19 nt, Artificial Sequence
  Description of Artificial Sequence: Synthetic oligonucleotide
ugauucaagagguaacucu

SEQ ID NO: 1897685 - RNA, 19 nt, Artificial Sequence
  Description of Artificial Sequence: Synthetic oligonucleotide
uuuaaugaguuuucucagc

SEQ ID NO: 1897686 - RNA, 19 nt, Artificial Sequence
  Description of Artificial Sequence: Synthetic oligonucleotide
uaaguugugcagaagacua

SEQ ID NO: 1897687 - RNA, 19 nt, Artificial Sequence
  Description of Artificial Sequence: Synthetic oligonucleotide
uucagauaagaccccauca

SEQ ID NO: 1897688 - RNA, 19 nt, Artificial Sequence
  Description of Artificial Sequence: Synthetic oligonucleotide
cuccaaauaacuuggacuc

SEQ ID NO: 1897689 - RNA, 19 nt, Artificial Sequence
  Description of Artificial Sequence: Synthetic oligonucleotide
ucuccuuccagcauaacuc

SEQ ID NO: 1897690 - RNA, 19 nt, Artificial Sequence
  Description of Artificial Sequence: Synthetic oligonucleotide
aagagcacgcagaaugucc

SEQ ID NO: 1897691 - RNA, 19 nt, Artificial Sequence
  Description of Artificial Sequence: Synthetic oligonucleotide
auaaguaggcacacuaggc

SEQ ID NO: 1897692 - RNA, 19 nt, Artificial Sequence
  Description of Artificial Sequence: Synthetic oligonucleotide
ugagacggcagcaucacug

SEQ ID NO: 1897693 - RNA, 19 nt, Artificial Sequence
  Description of Artificial Sequence: Synthetic oligonucleotide
aauacuggcggaauggcug

SEQ ID NO: 1897694 - RNA, 19 nt, Artificial Sequence
  Description of Artificial Sequence: Synthetic oligonucleotide
aaaguuucaucugcugagg

SEQ ID NO: 1897695 - RNA, 19 nt, Artificial Sequence
  Description of Artificial Sequence: Synthetic oligonucleotide
ccuagaacagauaaguagg

SEQ ID NO: 1897696 - RNA, 19 nt, Artificial Sequence
  Description of Artificial Sequence: Synthetic oligonucleotide
ucaaccuccugauucaaga

SEQ ID NO: 1897697 - RNA, 19 nt, Artificial Sequence
  Description of Artificial Sequence: Synthetic oligonucleotide
uuuagugucugacuguuuu

SEQ ID NO: 1897698 - RNA, 19 nt, Artificial Sequence
  Description of Artificial Sequence: Synthetic oligonucleotide
aaguaggcacacuaggcca

SEQ ID NO: 1897699 - RNA, 19 nt, Artificial Sequence
  Description of Artificial Sequence: Synthetic oligonucleotide
uaaugaguuuucucagccg

SEQ ID NO: 1897700 - RNA, 19 nt, Artificial Sequence
  Description of Artificial Sequence: Synthetic oligonucleotide
ucucguuucugaaguaucc

SEQ ID NO: 1897701 - RNA, 19 nt, Artificial Sequence
  Description of Artificial Sequence: Synthetic oligonucleotide
agagaauagagagaagcag

SEQ ID NO: 1897702 - RNA, 19 nt, Artificial Sequence
  Description of Artificial Sequence: Synthetic oligonucleotide
agaagaaccuuaucaaccu

SEQ ID NO: 1897703 - RNA, 19 nt, Artificial Sequence
  Description of Artificial Sequence: Synthetic oligonucleotide
acagcaaugccgcaugaag

SEQ ID NO: 1897704 - RNA, 19 nt, Artificial Sequence
  Description of Artificial Sequence: Synthetic oligonucleotide
acggcuguugcccagaugu

SEQ ID NO: 1897705 - RNA, 19 nt, Artificial Sequence
  Description of Artificial Sequence: Synthetic oligonucleotide
gauucaagagguaacucug

SEQ ID NO: 1897706 - RNA, 19 nt, Artificial Sequence
  Description of Artificial Sequence: Synthetic oligonucleotide
aaauaacuuggacucaauu

SEQ ID NO: 1897707 - RNA, 19 nt, Artificial Sequence
  Description of Artificial Sequence: Synthetic oligonucleotide
cuagaacagauaaguaggc

SEQ ID NO: 1897708 - RNA, 19 nt, Artificial Sequence
  Description of Artificial Sequence: Synthetic oligonucleotide
uuuucucagccgcugaaga

SEQ ID NO: 1897709 - RNA, 19 nt, Artificial Sequence
  Description of Artificial Sequence: Synthetic oligonucleotide
gaagcuuaacggcuguugc

SEQ ID NO: 1897710 - RNA, 19 nt, Artificial Sequence
  Description of Artificial Sequence: Synthetic oligonucleotide
ucuucuagcuucauacagu

SEQ ID NO: 1897711 - RNA, 19 nt, Artificial Sequence
  Description of Artificial Sequence: Synthetic oligonucleotide
cacacuucacccuccagcg

SEQ ID NO: 1897712 - RNA, 19 nt, Artificial Sequence
  Description of Artificial Sequence: Synthetic oligonucleotide
acugaucccaaucaugccu

SEQ ID NO: 1897713 - RNA, 19 nt, Artificial Sequence
  Description of Artificial Sequence: Synthetic oligonucleotide
uuaucaaccuccugauuca

SEQ ID NO: 1897714 - RNA, 19 nt, Artificial Sequence
  Description of Artificial Sequence: Synthetic oligonucleotide
uucaucuaggcccuuucca

SEQ ID NO: 1897715 - RNA, 19 nt, Artificial Sequence
  Description of Artificial Sequence: Synthetic oligonucleotide
ucaagagguaacucuggcc

SEQ ID NO: 1897716 - RNA, 19 nt, Artificial Sequence
  Description of Artificial Sequence: Synthetic oligonucleotide
uccaccauucuuuuagugu

SEQ ID NO: 1897717 - RNA, 19 nt, Artificial Sequence
  Description of Artificial Sequence: Synthetic oligonucleotide
uaagaccccaucagcagcc

SEQ ID NO: 1897718 - RNA, 19 nt, Artificial Sequence
  Description of Artificial Sequence: Synthetic oligonucleotide
agcaagugggaacuccucg

SEQ ID NO: 1897719 - RNA, 19 nt, Artificial Sequence
  Description of Artificial Sequence: Synthetic oligonucleotide
uugugcagaagacuacagc

SEQ ID NO: 1897720 - RNA, 19 nt, Artificial Sequence
  Description of Artificial Sequence: Synthetic oligonucleotide
aaugaagcuuaacggcugu

SEQ ID NO: 1897721 - RNA, 19 nt, Artificial Sequence
  Description of Artificial Sequence: Synthetic oligonucleotide
auacuggcggaauggcugc

SEQ ID NO: 1897722 - RNA, 19 nt, Artificial Sequence
  Description of Artificial Sequence: Synthetic oligonucleotide
ucccaaucaugccuuaucu

SEQ ID NO: 1897723 - RNA, 19 nt, Artificial Sequence
  Description of Artificial Sequence: Synthetic oligonucleotide
ugcucaaaaguuucaucug

SEQ ID NO: 1897724 - RNA, 19 nt, Artificial Sequence
  Description of Artificial Sequence: Synthetic oligonucleotide
caguuagugagugaaggcc

SEQ ID NO: 1897725 - RNA, 19 nt, Artificial Sequence
  Description of Artificial Sequence: Synthetic oligonucleotide
cagauaagaccccaucagc

SEQ ID NO: 1897726 - RNA, 19 nt, Artificial Sequence
  Description of Artificial Sequence: Synthetic oligonucleotide
caauuucucguuucugaag

SEQ ID NO: 1897727 - RNA, 19 nt, Artificial Sequence
  Description of Artificial Sequence: Synthetic oligonucleotide
uuccuuacuucagauaaga

SEQ ID NO: 1897728 - RNA, 19 nt, Artificial Sequence
  Description of Artificial Sequence: Synthetic oligonucleotide
uaucugaaugagcgcaggc

SEQ ID NO: 1897729 - RNA, 19 nt, Artificial Sequence
  Description of Artificial Sequence: Synthetic oligonucleotide
ucaagagcacgcagaaugu

SEQ ID NO: 1897730 - RNA, 19 nt, Artificial Sequence
  Description of Artificial Sequence: Synthetic oligonucleotide
gguaauacuggcggaaugg

SEQ ID NO: 1897731 - RNA, 19 nt, Artificial Sequence
  Description of Artificial Sequence: Synthetic oligonucleotide
uuaucugaaugagcgcagg

SEQ ID NO: 1897732 - RNA, 19 nt, Artificial Sequence
  Description of Artificial Sequence: Synthetic oligonucleotide
aaucaugccuuaucugaau

SEQ ID NO: 1897733 - RNA, 19 nt, Artificial Sequence
  Description of Artificial Sequence: Synthetic oligonucleotide
caugaaguuuaaguugugc

SEQ ID NO: 1897734 - RNA, 19 nt, Artificial Sequence
  Description of Artificial Sequence: Synthetic oligonucleotide
agaccccuuuccuugcagc

SEQ ID NO: 1897735 - RNA, 19 nt, Artificial Sequence
  Description of Artificial Sequence: Synthetic oligonucleotide
uucucaagagcacgcagaa

SEQ ID NO: 1897736 - RNA, 19 nt, Artificial Sequence
  Description of Artificial Sequence: Synthetic oligonucleotide
ugaagcuuaacggcuguug

SEQ ID NO: 1897737 - RNA, 19 nt, Artificial Sequence
  Description of Artificial Sequence: Synthetic oligonucleotide
uacagcgugagacggcagc

SEQ ID NO: 1897738 - RNA, 19 nt, Artificial Sequence
  Description of Artificial Sequence: Synthetic oligonucleotide
ugagcguguagcgaggccc

SEQ ID NO: 1897739 - RNA, 19 nt, Artificial Sequence
  Description of Artificial Sequence: Synthetic oligonucleotide
uccugauucaagagguaac

SEQ ID NO: 1897740 - RNA, 19 nt, Artificial Sequence
  Description of Artificial Sequence: Synthetic oligonucleotide
aucaugccuuaucugaaug

SEQ ID NO: 1897741 - RNA, 19 nt, Artificial Sequence
  Description of Artificial Sequence: Synthetic oligonucleotide
aaguugugcagaagacuac

SEQ ID NO: 1897742 - RNA, 19 nt, Artificial Sequence
  Description of Artificial Sequence: Synthetic oligonucleotide
gugagugaaggccacugcc

SEQ ID NO: 1897743 - RNA, 19 nt, Artificial Sequence
  Description of Artificial Sequence: Synthetic oligonucleotide
aggccaagccucucaaaac

SEQ ID NO: 1897744 - RNA, 19 nt, Artificial Sequence
  Description of Artificial Sequence: Synthetic oligonucleotide
guuucucaagagcacgcag

SEQ ID NO: 1897745 - RNA, 19 nt, Artificial Sequence
  Description of Artificial Sequence: Synthetic oligonucleotide
cacauaggcggccugggcc

SEQ ID NO: 1897746 - RNA, 19 nt, Artificial Sequence
  Description of Artificial Sequence: Synthetic oligonucleotide
aaggacccauccuugggga

SEQ ID NO: 1897747 - RNA, 19 nt, Artificial Sequence
  Description of Artificial Sequence: Synthetic oligonucleotide
cuuuccguggccugcgcgg

SEQ ID NO: 1897748 - RNA, 19 nt, Artificial Sequence
  Description of Artificial Sequence: Synthetic oligonucleotide
uuaggaugaucagacggca

SEQ ID NO: 1897749 - RNA, 19 nt, Artificial Sequence
  Description of Artificial Sequence: Synthetic oligonucleotide
uucucagccgcugaagaug

SEQ ID NO: 1897750 - RNA, 19 nt, Artificial Sequence
  Description of Artificial Sequence: Synthetic oligonucleotide
caugccuuaucugaaugag

SEQ ID NO: 1897751 - RNA, 19 nt, Artificial Sequence
  Description of Artificial Sequence: Synthetic oligonucleotide
caugcuaauaacuucaguu

SEQ ID NO: 1897752 - RNA, 19 nt, Artificial Sequence
  Description of Artificial Sequence: Synthetic oligonucleotide
ugacaucuagagcugcagu

SEQ ID NO: 1897753 - RNA, 19 nt, Artificial Sequence
  Description of Artificial Sequence: Synthetic oligonucleotide
uugccuuuaggaugaucag

SEQ ID NO: 1897754 - RNA, 19 nt, Artificial Sequence
  Description of Artificial Sequence: Synthetic oligonucleotide
cugaaugagcgcaggcagg

SEQ ID NO: 1897755 - RNA, 19 nt, Artificial Sequence
  Description of Artificial Sequence: Synthetic oligonucleotide
ucgcgccucgcccacauag

SEQ ID NO: 1897756 - RNA, 19 nt, Artificial Sequence
  Description of Artificial Sequence: Synthetic oligonucleotide
agacuacagcgugagacgg

SEQ ID NO: 1897757 - RNA, 19 nt, Artificial Sequence
  Description of Artificial Sequence: Synthetic oligonucleotide
agauaaguaggcacacuag

SEQ ID NO: 1897758 - RNA, 19 nt, Artificial Sequence
  Description of Artificial Sequence: Synthetic oligonucleotide
gugcucaaaaguuucaucu

SEQ ID NO: 1897759 - RNA, 19 nt, Artificial Sequence
  Description of Artificial Sequence: Synthetic oligonucleotide
gaacggaguugccuuuagg

SEQ ID NO: 1897760 - RNA, 19 nt, Artificial Sequence
  Description of Artificial Sequence: Synthetic oligonucleotide
gagaagcaggacuuccagc

SEQ ID NO: 1897761 - RNA, 19 nt, Artificial Sequence
  Description of Artificial Sequence: Synthetic oligonucleotide
gcucaaaaguuucaucugc

SEQ ID NO: 1897762 - RNA, 19 nt, Artificial Sequence
  Description of Artificial Sequence: Synthetic oligonucleotide
ggcaguuagugagugaagg

SEQ ID NO: 1897763 - RNA, 19 nt, Artificial Sequence
  Description of Artificial Sequence: Synthetic oligonucleotide
ucguuucugaaguauccuc

SEQ ID NO: 1897764 - RNA, 19 nt, Artificial Sequence
  Description of Artificial Sequence: Synthetic oligonucleotide
caagugggaacuccucggg

SEQ ID NO: 1897765 - RNA, 19 nt, Artificial Sequence
  Description of Artificial Sequence: Synthetic oligonucleotide
uccgccugagcguguagcg

SEQ ID NO: 1897766 - RNA, 19 nt, Artificial Sequence
  Description of Artificial Sequence: Synthetic oligonucleotide
cagagaauagagagaagca

SEQ ID NO: 1897767 - RNA, 19 nt, Artificial Sequence
  Description of Artificial Sequence: Synthetic oligonucleotide
agguaauacuggcggaaug

SEQ ID NO: 1897768 - RNA, 19 nt, Artificial Sequence
  Description of Artificial Sequence: Synthetic oligonucleotide
cuuccagcauaacucggag

SEQ ID NO: 1897769 - RNA, 19 nt, Artificial Sequence
  Description of Artificial Sequence: Synthetic oligonucleotide
aguuagugagugaaggcca

SEQ ID NO: 1897770 - RNA, 19 nt, Artificial Sequence
  Description of Artificial Sequence: Synthetic oligonucleotide
aagugggaacuccucggga

SEQ ID NO: 1897771 - RNA, 19 nt, Artificial Sequence
  Description of Artificial Sequence: Synthetic oligonucleotide
uggcggaauggcugcaggg

SEQ ID NO: 1897772 - RNA, 19 nt, Artificial Sequence
  Description of Artificial Sequence: Synthetic oligonucleotide
agcgugagacggcagcauc

SEQ ID NO: 1897773 - RNA, 19 nt, Artificial Sequence
  Description of Artificial Sequence: Synthetic oligonucleotide
caaccuccugauucaagag

SEQ ID NO: 1897774 - RNA, 19 nt, Artificial Sequence
  Description of Artificial Sequence: Synthetic oligonucleotide
ucagccucgcguucccggg

SEQ ID NO: 1897775 - RNA, 19 nt, Artificial Sequence
  Description of Artificial Sequence: Synthetic oligonucleotide
guaauacuggcggaauggc

SEQ ID NO: 1897776 - RNA, 19 nt, Artificial Sequence
  Description of Artificial Sequence: Synthetic oligonucleotide
ucuucagccuccgucgcgc

SEQ ID NO: 1897777 - RNA, 19 nt, Artificial Sequence
  Description of Artificial Sequence: Synthetic oligonucleotide
uacaguucagagucgcuuu

SEQ ID NO: 1897778 - RNA, 19 nt, Artificial Sequence
  Description of Artificial Sequence: Synthetic oligonucleotide
ucuaggcccuuuccagaag

SEQ ID NO: 1897779 - RNA, 19 nt, Artificial Sequence
  Description of Artificial Sequence: Synthetic oligonucleotide
acggcagcaucacugacau

SEQ ID NO: 1897780 - RNA, 19 nt, Artificial Sequence
  Description of Artificial Sequence: Synthetic oligonucleotide
uuucucguuucugaaguau

SEQ ID NO: 1897781 - RNA, 19 nt, Artificial Sequence
  Description of Artificial Sequence: Synthetic oligonucleotide
augucguugcuggggaucg

SEQ ID NO: 1897782 - RNA, 19 nt, Artificial Sequence
  Description of Artificial Sequence: Synthetic oligonucleotide
acauaggcggccugggcca

SEQ ID NO: 1897783 - RNA, 19 nt, Artificial Sequence
  Description of Artificial Sequence: Synthetic oligonucleotide
acggaguugccuuuaggau

SEQ ID NO: 1897784 - RNA, 19 nt, Artificial Sequence
  Description of Artificial Sequence: Synthetic oligonucleotide
caguggcuccgccugagcg

SEQ ID NO: 1897785 - RNA, 19 nt, Artificial Sequence
  Description of Artificial Sequence: Synthetic oligonucleotide
uuucucagccgcugaagau

SEQ ID NO: 1897786 - RNA, 19 nt, Artificial Sequence
  Description of Artificial Sequence: Synthetic oligonucleotide
gagguaacucuggccaggg

SEQ ID NO: 1897787 - RNA, 19 nt, Artificial Sequence
  Description of Artificial Sequence: Synthetic oligonucleotide
ucagccgcugaagauggug

SEQ ID NO: 1897788 - RNA, 19 nt, Artificial Sequence
  Description of Artificial Sequence: Synthetic oligonucleotide
cagauaaguaggcacacua

SEQ ID NO: 1897789 - RNA, 19 nt, Artificial Sequence
  Description of Artificial Sequence: Synthetic oligonucleotide
accuccugauucaagaggu

SEQ ID NO: 1897790 - RNA, 19 nt, Artificial Sequence
  Description of Artificial Sequence: Synthetic oligonucleotide
uccaaauaacuuggacuca

SEQ ID NO: 1897791 - RNA, 19 nt, Artificial Sequence
  Description of Artificial Sequence: Synthetic oligonucleotide
uggacucaauuucucguuu

SEQ ID NO: 1897792 - RNA, 19 nt, Artificial Sequence
  Description of Artificial Sequence: Synthetic oligonucleotide
caggcugcguagccgaccg

SEQ ID NO: 1897793 - RNA, 19 nt, Artificial Sequence
  Description of Artificial Sequence: Synthetic oligonucleotide
acuacagcgugagacggca

SEQ ID NO: 1897794 - RNA, 19 nt, Artificial Sequence
  Description of Artificial Sequence: Synthetic oligonucleotide
acugcccaugcuaauaacu

SEQ ID NO: 1897795 - RNA, 19 nt, Artificial Sequence
  Description of Artificial Sequence: Synthetic oligonucleotide
ggcccuuuccagaagaacc

SEQ ID NO: 1897796 - RNA, 19 nt, Artificial Sequence
  Description of Artificial Sequence: Synthetic oligonucleotide
agaccccaucagcagccgc

SEQ ID NO: 1897797 - RNA, 19 nt, Artificial Sequence
  Description of Artificial Sequence: Synthetic oligonucleotide
ugcguagccgaccgacacc

SEQ ID NO: 1897798 - RNA, 19 nt, Artificial Sequence
  Description of Artificial Sequence: Synthetic oligonucleotide
ggacagaccccuuuccuug

SEQ ID NO: 1897799 - RNA, 19 nt, Artificial Sequence
  Description of Artificial Sequence: Synthetic oligonucleotide
uucccgggcccucucacga

SEQ ID NO: 1897800 - RNA, 19 nt, Artificial Sequence
  Description of Artificial Sequence: Synthetic oligonucleotide
ucggagggcucucucuucu

SEQ ID NO: 1897801 - RNA, 19 nt, Artificial Sequence
  Description of Artificial Sequence: Synthetic oligonucleotide
cucagccucgcguucccgg

SEQ ID NO: 1897802 - RNA, 19 nt, Artificial Sequence
  Description of Artificial Sequence: Synthetic oligonucleotide
aacuccucgggaucuccaa

SEQ ID NO: 1897803 - RNA, 19 nt, Artificial Sequence
  Description of Artificial Sequence: Synthetic oligonucleotide
gacagaccccuuuccuugc

SEQ ID NO: 1897804 - RNA, 19 nt, Artificial Sequence
  Description of Artificial Sequence: Synthetic oligonucleotide
ucggucucggccucgcgca

SEQ ID NO: 1897805 - RNA, 19 nt, Artificial Sequence
  Description of Artificial Sequence: Synthetic oligonucleotide
gacccauccuuggggaacg

SEQ ID NO: 1897806 - RNA, 19 nt, Artificial Sequence
  Description of Artificial Sequence: Synthetic oligonucleotide
gcaguuagugagugaaggc

SEQ ID NO: 1897807 - RNA, 19 nt, Artificial Sequence
  Description of Artificial Sequence: Synthetic oligonucleotide
agggucuuaaugaagcuua

SEQ ID NO: 1897808 - RNA, 19 nt, Artificial Sequence
  Description of Artificial Sequence: Synthetic oligonucleotide
acacuucacccuccagcgg

SEQ ID NO: 1897809 - RNA, 19 nt, Artificial Sequence
  Description of Artificial Sequence: Synthetic oligonucleotide
ccagaagaaccuuaucaac

SEQ ID NO: 1897810 - RNA, 19 nt, Artificial Sequence
  Description of Artificial Sequence: Synthetic oligonucleotide
aucuaggcccuuuccagaa

SEQ ID NO: 1897811 - RNA, 19 nt, Artificial Sequence
  Description of Artificial Sequence: Synthetic oligonucleotide
cucucacgaagccgcaacc

SEQ ID NO: 1897812 - RNA, 19 nt, Artificial Sequence
  Description of Artificial Sequence: Synthetic oligonucleotide
uguugcccagaugucguug

SEQ ID NO: 1897813 - RNA, 19 nt, Artificial Sequence
  Description of Artificial Sequence: Synthetic oligonucleotide
ccagcggucaaucuccugc

SEQ ID NO: 1897814 - RNA, 19 nt, Artificial Sequence
  Description of Artificial Sequence: Synthetic oligonucleotide
ccaccauucuuuuaguguc

SEQ ID NO: 1897815 - RNA, 19 nt, Artificial Sequence
  Description of Artificial Sequence: Synthetic oligonucleotide
guccaccauucuuuuagug

SEQ ID NO: 1897816 - RNA, 19 nt, Artificial Sequence
  Description of Artificial Sequence: Synthetic oligonucleotide
aaccggcggcgccggaccc

SEQ ID NO: 1897817 - RNA, 19 nt, Artificial Sequence
  Description of Artificial Sequence: Synthetic oligonucleotide
cagguacugaucccaauca

SEQ ID NO: 1897818 - RNA, 19 nt, Artificial Sequence
  Description of Artificial Sequence: Synthetic oligonucleotide
auacaguucagagucgcuu

SEQ ID NO: 1897819 - RNA, 19 nt, Artificial Sequence
  Description of Artificial Sequence: Synthetic oligonucleotide
aggugagcaagugggaacu

SEQ ID NO: 1897820 - RNA, 19 nt, Artificial Sequence
  Description of Artificial Sequence: Synthetic oligonucleotide
gagacggcagcaucacuga

SEQ ID NO: 1897821 - RNA, 19 nt, Artificial Sequence
  Description of Artificial Sequence: Synthetic oligonucleotide
cucgcaguggcuccgccug

SEQ ID NO: 1897822 - RNA, 19 nt, Artificial Sequence
  Description of Artificial Sequence: Synthetic oligonucleotide
aguuucucaagagcacgca

SEQ ID NO: 1897823 - RNA, 19 nt, Artificial Sequence
  Description of Artificial Sequence: Synthetic oligonucleotide
agaaccuuaucaaccuccu

SEQ ID NO: 1897824 - RNA, 19 nt, Artificial Sequence
  Description of Artificial Sequence: Synthetic oligonucleotide
aggcccuuuccagaagaac

SEQ ID NO: 1897825 - RNA, 19 nt, Artificial Sequence
  Description of Artificial Sequence: Synthetic oligonucleotide
uuuuagugucugacuguuu

SEQ ID NO: 1897826 - RNA, 19 nt, Artificial Sequence
  Description of Artificial Sequence: Synthetic oligonucleotide
uucuagcuucauacaguuc

SEQ ID NO: 1897827 - RNA, 19 nt, Artificial Sequence
  Description of Artificial Sequence: Synthetic oligonucleotide
gcuacagcaaugccgcaug

SEQ ID NO: 1897828 - RNA, 19 nt, Artificial Sequence
  Description of Artificial Sequence: Synthetic oligonucleotide
cuggaccacacuccuggag

SEQ ID NO: 1897829 - RNA, 19 nt, Artificial Sequence
  Description of Artificial Sequence: Synthetic oligonucleotide
aacggcuguugcccagaug

SEQ ID NO: 1897830 - RNA, 19 nt, Artificial Sequence
  Description of Artificial Sequence: Synthetic oligonucleotide
caaucaugccuuaucugaa

SEQ ID NO: 1897831 - RNA, 19 nt, Artificial Sequence
  Description of Artificial Sequence: Synthetic oligonucleotide
ccgcaugaaguuuaaguug

SEQ ID NO: 1897832 - RNA, 19 nt, Artificial Sequence
  Description of Artificial Sequence: Synthetic oligonucleotide
cugauucaagagguaacuc

SEQ ID NO: 1897833 - RNA, 19 nt, Artificial Sequence
  Description of Artificial Sequence: Synthetic oligonucleotide
agagcacgcagaaugucca

SEQ ID NO: 1897834 - RNA, 19 nt, Artificial Sequence
  Description of Artificial Sequence: Synthetic oligonucleotide
gacucaauuucucguuucu

SEQ ID NO: 1897835 - RNA, 19 nt, Artificial Sequence
  Description of Artificial Sequence: Synthetic oligonucleotide
ccuccagcggucaaucucc

SEQ ID NO: 1897836 - RNA, 19 nt, Artificial Sequence
  Description of Artificial Sequence: Synthetic oligonucleotide
aggacagaccccuuuccuu

SEQ ID NO: 1897837 - RNA, 19 nt, Artificial Sequence
  Description of Artificial Sequence: Synthetic oligonucleotide
guuagugagugaaggccac

SEQ ID NO: 1897838 - RNA, 19 nt, Artificial Sequence
  Description of Artificial Sequence: Synthetic oligonucleotide
gugagcaagugggaacucc

SEQ ID NO: 1897839 - RNA, 19 nt, Artificial Sequence
  Description of Artificial Sequence: Synthetic oligonucleotide
gcucggcuagcucugcucg

SEQ ID NO: 1897840 - RNA, 19 nt, Artificial Sequence
  Description of Artificial Sequence: Synthetic oligonucleotide
cuggcggaauggcugcagg

SEQ ID NO: 1897841 - RNA, 19 nt, Artificial Sequence
  Description of Artificial Sequence: Synthetic oligonucleotide
ccauccuuggggaacggag

SEQ ID NO: 1897842 - RNA, 19 nt, Artificial Sequence
  Description of Artificial Sequence: Synthetic oligonucleotide
ggcuguugcccagaugucg

SEQ ID NO: 1897843 - RNA, 19 nt, Artificial Sequence
  Description of Artificial Sequence: Synthetic oligonucleotide
cuaggcccuuuccagaaga

SEQ ID NO: 1897844 - RNA, 19 nt, Artificial Sequence
  Description of Artificial Sequence: Synthetic oligonucleotide
cucaaaaguuucaucugcu

SEQ ID NO: 1897845 - RNA, 19 nt, Artificial Sequence
  Description of Artificial Sequence: Synthetic oligonucleotide
gucggucucggccucgcgc

SEQ ID NO: 1897846 - RNA, 19 nt, Artificial Sequence
  Description of Artificial Sequence: Synthetic oligonucleotide
gacggcagcaucacugaca

SEQ ID NO: 1897847 - RNA, 19 nt, Artificial Sequence
  Description of Artificial Sequence: Synthetic oligonucleotide
cugcguagccgaccgacac

SEQ ID NO: 1897848 - RNA, 19 nt, Artificial Sequence
  Description of Artificial Sequence: Synthetic oligonucleotide
cucagccuggagguaauac

SEQ ID NO: 1897849 - RNA, 19 nt, Artificial Sequence
  Description of Artificial Sequence: Synthetic oligonucleotide
ugagcgcaggcagggagug

SEQ ID NO: 1897850 - RNA, 19 nt, Artificial Sequence
  Description of Artificial Sequence: Synthetic oligonucleotide
gucguugcuggggaucggg

SEQ ID NO: 1897851 - RNA, 19 nt, Artificial Sequence
  Description of Artificial Sequence: Synthetic oligonucleotide
auuucucguuucugaagua

SEQ ID NO: 1897852 - RNA, 19 nt, Artificial Sequence
  Description of Artificial Sequence: Synthetic oligonucleotide
aguugccuuuaggaugauc

SEQ ID NO: 1897853 - RNA, 19 nt, Artificial Sequence
  Description of Artificial Sequence: Synthetic oligonucleotide
ggaguugccuuuaggauga

SEQ ID NO: 1897854 - RNA, 19 nt, Artificial Sequence
  Description of Artificial Sequence: Synthetic oligonucleotide
uuagugagugaaggccacu

SEQ ID NO: 1897855 - RNA, 19 nt, Artificial Sequence
  Description of Artificial Sequence: Synthetic oligonucleotide
cucgcgcagggacuggccc

SEQ ID NO: 1897856 - RNA, 19 nt, Artificial Sequence
  Description of Artificial Sequence: Synthetic oligonucleotide
auccuuggggaacggaguu

SEQ ID NO: 1897857 - RNA, 19 nt, Artificial Sequence
  Description of Artificial Sequence: Synthetic oligonucleotide
acaguucagagucgcuuuu

SEQ ID NO: 1897858 - RNA, 19 nt, Artificial Sequence
  Description of Artificial Sequence: Synthetic oligonucleotide
uccucgggaucuccaaaua

SEQ ID NO: 1897859 - RNA, 19 nt, Artificial Sequence
  Description of Artificial Sequence: Synthetic oligonucleotide
agaagacuacagcgugaga

SEQ ID NO: 1897860 - RNA, 19 nt, Artificial Sequence
  Description of Artificial Sequence: Synthetic oligonucleotide
gacggcaccagguacugau

SEQ ID NO: 1897861 - RNA, 19 nt, Artificial Sequence
  Description of Artificial Sequence: Synthetic oligonucleotide
gacuacagcgugagacggc

SEQ ID NO: 1897862 - RNA, 19 nt, Artificial Sequence
  Description of Artificial Sequence: Synthetic oligonucleotide
uacagcaaugccgcaugaa

SEQ ID NO: 1897863 - RNA, 19 nt, Artificial Sequence
  Description of Artificial Sequence: Synthetic oligonucleotide
acgcagaauguccaccauu

SEQ ID NO: 1897864 - RNA, 19 nt, Artificial Sequence
  Description of Artificial Sequence: Synthetic oligonucleotide
agccgcaaccggcggcgcc

SEQ ID NO: 1897865 - RNA, 19 nt, Artificial Sequence
  Description of Artificial Sequence: Synthetic oligonucleotide
agauggugcucaaaaguuu

SEQ ID NO: 1897866 - RNA, 19 nt, Artificial Sequence
  Description of Artificial Sequence: Synthetic oligonucleotide
cuuggggaacggaguugcc

SEQ ID NO: 1897867 - RNA, 19 nt, Artificial Sequence
  Description of Artificial Sequence: Synthetic oligonucleotide
aaugccgcaugaaguuuaa

SEQ ID NO: 1897868 - RNA, 19 nt, Artificial Sequence
  Description of Artificial Sequence: Synthetic oligonucleotide
uaucaaccuccugauucaa

SEQ ID NO: 1897869 - RNA, 19 nt, Artificial Sequence
  Description of Artificial Sequence: Synthetic oligonucleotide
acugacaucuagagcugca

SEQ ID NO: 1897870 - RNA, 19 nt, Artificial Sequence
  Description of Artificial Sequence: Synthetic oligonucleotide
cacugacaucuagagcugc

SEQ ID NO: 1897871 - RNA, 19 nt, Artificial Sequence
  Description of Artificial Sequence: Synthetic oligonucleotide
uuuccguggccugcgcggc

SEQ ID NO: 1897872 - RNA, 19 nt, Artificial Sequence
  Description of Artificial Sequence: Synthetic oligonucleotide
cuagagcugcagugcuggc

SEQ ID NO: 1897873 - RNA, 19 nt, Artificial Sequence
  Description of Artificial Sequence: Synthetic oligonucleotide
acucggagggcucucucuu

SEQ ID NO: 1897874 - RNA, 19 nt, Artificial Sequence
  Description of Artificial Sequence: Synthetic oligonucleotide
caagagcacgcagaauguc

SEQ ID NO: 1897875 - RNA, 19 nt, Artificial Sequence
  Description of Artificial Sequence: Synthetic oligonucleotide
cacugcccaugcuaauaac

SEQ ID NO: 1897876 - RNA, 19 nt, Artificial Sequence
  Description of Artificial Sequence: Synthetic oligonucleotide
cugagcguguagcgaggcc

SEQ ID NO: 1897877 - RNA, 19 nt, Artificial Sequence
  Description of Artificial Sequence: Synthetic oligonucleotide
caaugccgcaugaaguuua

SEQ ID NO: 1897878 - RNA, 19 nt, Artificial Sequence
  Description of Artificial Sequence: Synthetic oligonucleotide
cgcagaauguccaccauuc

SEQ ID NO: 1897879 - RNA, 19 nt, Artificial Sequence
  Description of Artificial Sequence: Synthetic oligonucleotide
gagcacgcagaauguccac

SEQ ID NO: 1897880 - RNA, 19 nt, Artificial Sequence
  Description of Artificial Sequence: Synthetic oligonucleotide
gugggaacuccucgggauc

SEQ ID NO: 1897881 - RNA, 19 nt, Artificial Sequence
  Description of Artificial Sequence: Synthetic oligonucleotide
cucggcuagcucugcucgc

SEQ ID NO: 1897882 - RNA, 19 nt, Artificial Sequence
  Description of Artificial Sequence: Synthetic oligonucleotide
ggaacggaguugccuuuag

SEQ ID NO: 1897883 - RNA, 19 nt, Artificial Sequence
  Description of Artificial Sequence: Synthetic oligonucleotide
caaaacagaggcaguuagu

SEQ ID NO: 1897884 - RNA, 19 nt, Artificial Sequence
  Description of Artificial Sequence: Synthetic oligonucleotide
caaccggcggcgccggacc

SEQ ID NO: 1897885 - RNA, 19 nt, Artificial Sequence
  Description of Artificial Sequence: Synthetic oligonucleotide
cagaccccuuuccuugcag

SEQ ID NO: 1897886 - RNA, 19 nt, Artificial Sequence
  Description of Artificial Sequence: Synthetic oligonucleotide
guagcgaggcccaggccgc

SEQ ID NO: 1897887 - RNA, 19 nt, Artificial Sequence
  Description of Artificial Sequence: Synthetic oligonucleotide
acuccucgggaucuccaaa

SEQ ID NO: 1897888 - RNA, 19 nt, Artificial Sequence
  Description of Artificial Sequence: Synthetic oligonucleotide
cuccugauucaagagguaa

SEQ ID NO: 1897889 - RNA, 19 nt, Artificial Sequence
  Description of Artificial Sequence: Synthetic oligonucleotide
gaagcaggacuuccagcua

SEQ ID NO: 1897890 - RNA, 19 nt, Artificial Sequence
  Description of Artificial Sequence: Synthetic oligonucleotide
cagcaaugccgcaugaagu

SEQ ID NO: 1897891 - RNA, 19 nt, Artificial Sequence
  Description of Artificial Sequence: Synthetic oligonucleotide
aguaggcacacuaggccaa

SEQ ID NO: 1897892 - RNA, 19 nt, Artificial Sequence
  Description of Artificial Sequence: Synthetic oligonucleotide
acagaccccuuuccuugca

SEQ ID NO: 1897893 - RNA, 19 nt, Artificial Sequence
  Description of Artificial Sequence: Synthetic oligonucleotide
gaccuagaacagauaagua

SEQ ID NO: 1897894 - RNA, 19 nt, Artificial Sequence
  Description of Artificial Sequence: Synthetic oligonucleotide
cuccgccugagcguguagc

SEQ ID NO: 1897895 - RNA, 19 nt, Artificial Sequence
  Description of Artificial Sequence: Synthetic oligonucleotide
cugaaguauccucucuucu

SEQ ID NO: 1897896 - RNA, 19 nt, Artificial Sequence
  Description of Artificial Sequence: Synthetic oligonucleotide
cuacagcgugagacggcag

SEQ ID NO: 1897897 - RNA, 19 nt, Artificial Sequence
  Description of Artificial Sequence: Synthetic oligonucleotide
gccuuaucugaaugagcgc

SEQ ID NO: 1897898 - RNA, 19 nt, Artificial Sequence
  Description of Artificial Sequence: Synthetic oligonucleotide
acuucacccuccagcgguc

SEQ ID NO: 1897899 - RNA, 19 nt, Artificial Sequence
  Description of Artificial Sequence: Synthetic oligonucleotide
ugucguugcuggggaucgg

SEQ ID NO: 1897900 - RNA, 19 nt, Artificial Sequence
  Description of Artificial Sequence: Synthetic oligonucleotide
ggcccucucacgaagccgc

SEQ ID NO: 1897901 - RNA, 19 nt, Artificial Sequence
  Description of Artificial Sequence: Synthetic oligonucleotide
cccaugcuaauaacuucag

SEQ ID NO: 1897902 - RNA, 19 nt, Artificial Sequence
  Description of Artificial Sequence: Synthetic oligonucleotide
gagcaagugggaacuccuc

SEQ ID NO: 1897903 - RNA, 19 nt, Artificial Sequence
  Description of Artificial Sequence: Synthetic oligonucleotide
ggucuuaaugaagcuuaac

SEQ ID NO: 1897904 - RNA, 19 nt, Artificial Sequence
  Description of Artificial Sequence: Synthetic oligonucleotide
cacuucacccuccagcggu

SEQ ID NO: 1897905 - RNA, 19 nt, Artificial Sequence
  Description of Artificial Sequence: Synthetic oligonucleotide
cucccuuuccguggccugc

SEQ ID NO: 1897906 - RNA, 19 nt, Artificial Sequence
  Description of Artificial Sequence: Synthetic oligonucleotide
gcacacuaggccaagccuc

SEQ ID NO: 1897907 - RNA, 19 nt, Artificial Sequence
  Description of Artificial Sequence: Synthetic oligonucleotide
gcacgcagaauguccacca

SEQ ID NO: 1897908 - RNA, 19 nt, Artificial Sequence
  Description of Artificial Sequence: Synthetic oligonucleotide
cacuaggccaagccucuca

SEQ ID NO: 1897909 - RNA, 19 nt, Artificial Sequence
  Description of Artificial Sequence: Synthetic oligonucleotide
cucggagggcucucucuuc

SEQ ID NO: 1897910 - RNA, 19 nt, Artificial Sequence
  Description of Artificial Sequence: Synthetic oligonucleotide
uuccguggccugcgcggcc

SEQ ID NO: 1897911 - RNA, 19 nt, Artificial Sequence
  Description of Artificial Sequence: Synthetic oligonucleotide
ggaugaucagacggcacca

SEQ ID NO: 1897912 - RNA, 19 nt, Artificial Sequence
  Description of Artificial Sequence: Synthetic oligonucleotide
gaacuccucgggaucucca

SEQ ID NO: 1897913 - RNA, 19 nt, Artificial Sequence
  Description of Artificial Sequence: Synthetic oligonucleotide
cguguagcgaggcccaggc

SEQ ID NO: 1897914 - RNA, 19 nt, Artificial Sequence
  Description of Artificial Sequence: Synthetic oligonucleotide
cauccuuggggaacggagu

SEQ ID NO: 1897915 - RNA, 19 nt, Artificial Sequence
  Description of Artificial Sequence: Synthetic oligonucleotide
gccgcaugaaguuuaaguu

SEQ ID NO: 1897916 - RNA, 19 nt, Artificial Sequence
  Description of Artificial Sequence: Synthetic oligonucleotide
cagacggcaccagguacug

SEQ ID NO: 1897917 - RNA, 19 nt, Artificial Sequence
  Description of Artificial Sequence: Synthetic oligonucleotide
acggcaccagguacugauc

SEQ ID NO: 1897918 - RNA, 19 nt, Artificial Sequence
  Description of Artificial Sequence: Synthetic oligonucleotide
guguagcgaggcccaggcc

SEQ ID NO: 1897919 - RNA, 19 nt, Artificial Sequence
  Description of Artificial Sequence: Synthetic oligonucleotide
ucgcaguggcuccgccuga

SEQ ID NO: 1897920 - RNA, 19 nt, Artificial Sequence
  Description of Artificial Sequence: Synthetic oligonucleotide
ccucucacgaagccgcaac

SEQ ID NO: 1897921 - RNA, 19 nt, Artificial Sequence
  Description of Artificial Sequence: Synthetic oligonucleotide
auaggcggccugggccagc

SEQ ID NO: 1897922 - RNA, 19 nt, Artificial Sequence
  Description of Artificial Sequence: Synthetic oligonucleotide
ucacccuccagcggucaau

SEQ ID NO: 1897923 - RNA, 19 nt, Artificial Sequence
  Description of Artificial Sequence: Synthetic oligonucleotide
uccgucgcgccucgcccac

SEQ ID NO: 1897924 - RNA, 19 nt, Artificial Sequence
  Description of Artificial Sequence: Synthetic oligonucleotide
cauacaguucagagucgcu

SEQ ID NO: 1897925 - RNA, 19 nt, Artificial Sequence
  Description of Artificial Sequence: Synthetic oligonucleotide
cucgcccacauaggcggcc

SEQ ID NO: 1897926 - RNA, 19 nt, Artificial Sequence
  Description of Artificial Sequence: Synthetic oligonucleotide
ccuuuccguggccugcgcg

SEQ ID NO: 1897927 - RNA, 19 nt, Artificial Sequence
  Description of Artificial Sequence: Synthetic oligonucleotide
caaauaacuuggacucaau

SEQ ID NO: 1897928 - RNA, 19 nt, Artificial Sequence
  Description of Artificial Sequence: Synthetic oligonucleotide
uccgucggucucggccucg

SEQ ID NO: 1897929 - RNA, 19 nt, Artificial Sequence
  Description of Artificial Sequence: Synthetic oligonucleotide
gagguaauacuggcggaau

SEQ ID NO: 1897930 - RNA, 19 nt, Artificial Sequence
  Description of Artificial Sequence: Synthetic oligonucleotide
ggcacacuaggccaagccu

SEQ ID NO: 1897931 - RNA, 19 nt, Artificial Sequence
  Description of Artificial Sequence: Synthetic oligonucleotide
augccgcaugaaguuuaag

SEQ ID NO: 1897932 - RNA, 19 nt, Artificial Sequence
  Description of Artificial Sequence: Synthetic oligonucleotide
ccaaauaacuuggacucaa

SEQ ID NO: 1897933 - RNA, 19 nt, Artificial Sequence
  Description of Artificial Sequence: Synthetic oligonucleotide
cgccggacccucuucagcc

SEQ ID NO: 1897934 - RNA, 19 nt, Artificial Sequence
  Description of Artificial Sequence: Synthetic oligonucleotide
aggccgcuccgucggucuc

SEQ ID NO: 1897935 - RNA, 19 nt, Artificial Sequence
  Description of Artificial Sequence: Synthetic oligonucleotide
cagccucgcguucccgggc

SEQ ID NO: 1897936 - RNA, 19 nt, Artificial Sequence
  Description of Artificial Sequence: Synthetic oligonucleotide
cuaggccaagccucucaaa

SEQ ID NO: 1897937 - RNA, 19 nt, Artificial Sequence
  Description of Artificial Sequence: Synthetic oligonucleotide
gcuuaacggcuguugccca

SEQ ID NO: 1897938 - RNA, 19 nt, Artificial Sequence
  Description of Artificial Sequence: Synthetic oligonucleotide
gcgccucgcccacauaggc

SEQ ID NO: 1897939 - RNA, 19 nt, Artificial Sequence
  Description of Artificial Sequence: Synthetic oligonucleotide
ggcugcguagccgaccgac

SEQ ID NO: 1897940 - RNA, 19 nt, Artificial Sequence
  Description of Artificial Sequence: Synthetic oligonucleotide
ucgcccacauaggcggccu

SEQ ID NO: 1897941 - RNA, 19 nt, Artificial Sequence
  Description of Artificial Sequence: Synthetic oligonucleotide
cucguuucugaaguauccu

SEQ ID NO: 1897942 - RNA, 19 nt, Artificial Sequence
  Description of Artificial Sequence: Synthetic oligonucleotide
cccuccagcggucaaucuc

SEQ ID NO: 1897943 - RNA, 19 nt, Artificial Sequence
  Description of Artificial Sequence: Synthetic oligonucleotide
gcaugaaguuuaaguugug

SEQ ID NO: 1897944 - RNA, 19 nt, Artificial Sequence
  Description of Artificial Sequence: Synthetic oligonucleotide
cgcaugaaguuuaaguugu

SEQ ID NO: 1897945 - RNA, 19 nt, Artificial Sequence
  Description of Artificial Sequence: Synthetic oligonucleotide
cgccugagcguguagcgag

SEQ ID NO: 1897946 - RNA, 19 nt, Artificial Sequence
  Description of Artificial Sequence: Synthetic oligonucleotide
aggccacugcccaugcuaa

SEQ ID NO: 1897947 - RNA, 19 nt, Artificial Sequence
  Description of Artificial Sequence: Synthetic oligonucleotide
gggcccucucacgaagccg

SEQ ID NO: 1897948 - RNA, 19 nt, Artificial Sequence
  Description of Artificial Sequence: Synthetic oligonucleotide
cauaggcggccugggccag

SEQ ID NO: 1897949 - RNA, 19 nt, Artificial Sequence
  Description of Artificial Sequence: Synthetic oligonucleotide
ggagggucuuaaugaagcu

SEQ ID NO: 1897950 - RNA, 19 nt, Artificial Sequence
  Description of Artificial Sequence: Synthetic oligonucleotide
cgcuccgucggucucggcc

SEQ ID NO: 1897951 - RNA, 19 nt, Artificial Sequence
  Description of Artificial Sequence: Synthetic oligonucleotide
agcguguagcgaggcccag

SEQ ID NO: 1897952 - RNA, 19 nt, Artificial Sequence
  Description of Artificial Sequence: Synthetic oligonucleotide
gcuaauaacuucaguucau

SEQ ID NO: 1897953 - RNA, 19 nt, Artificial Sequence
  Description of Artificial Sequence: Synthetic oligonucleotide
ccagcauaacucggagggc

SEQ ID NO: 1897954 - RNA, 19 nt, Artificial Sequence
  Description of Artificial Sequence: Synthetic oligonucleotide
acccauccuuggggaacgg

SEQ ID NO: 1897955 - RNA, 19 nt, Artificial Sequence
  Description of Artificial Sequence: Synthetic oligonucleotide
ccacauaggcggccugggc

SEQ ID NO: 1897956 - RNA, 19 nt, Artificial Sequence
  Description of Artificial Sequence: Synthetic oligonucleotide
gccgcaaccggcggcgccg

SEQ ID NO: 1897957 - RNA, 19 nt, Artificial Sequence
  Description of Artificial Sequence: Synthetic oligonucleotide
ccuccgucgcgccucgccc

SEQ ID NO: 1897958 - RNA, 19 nt, Artificial Sequence
  Description of Artificial Sequence: Synthetic oligonucleotide
cacuccuggagggucuuaa

SEQ ID NO: 1897959 - RNA, 19 nt, Artificial Sequence
  Description of Artificial Sequence: Synthetic oligonucleotide
ucccgggcccucucacgaa

SEQ ID NO: 1897960 - RNA, 19 nt, Artificial Sequence
  Description of Artificial Sequence: Synthetic oligonucleotide
cagccuccgucgcgccucg

SEQ ID NO: 1897961 - RNA, 19 nt, Artificial Sequence
  Description of Artificial Sequence: Synthetic oligonucleotide
cccacauaggcggccuggg

SEQ ID NO: 1897962 - RNA, 19 nt, Artificial Sequence
  Description of Artificial Sequence: Synthetic oligonucleotide
ccugagcguguagcgaggc

SEQ ID NO: 1897963 - RNA, 19 nt, Artificial Sequence
  Description of Artificial Sequence: Synthetic oligonucleotide
cagcggucaaucuccugcu

SEQ ID NO: 1897964 - RNA, 19 nt, Artificial Sequence
  Description of Artificial Sequence: Synthetic oligonucleotide
ggucucggccucgcgcagg

SEQ ID NO: 1897965 - RNA, 19 nt, Artificial Sequence
  Description of Artificial Sequence: Synthetic oligonucleotide
gcgugagacggcagcauca

SEQ ID NO: 1897966 - RNA, 19 nt, Artificial Sequence
  Description of Artificial Sequence: Synthetic oligonucleotide
cuccgucgcgccucgccca

SEQ ID NO: 1897967 - RNA, 19 nt, Artificial Sequence
  Description of Artificial Sequence: Synthetic oligonucleotide
gccugagcguguagcgagg

SEQ ID NO: 1897968 - RNA, 19 nt, Artificial Sequence
  Description of Artificial Sequence: Synthetic oligonucleotide
gcguguagcgaggcccagg

SEQ ID NO: 1897969 - RNA, 19 nt, Artificial Sequence
  Description of Artificial Sequence: Synthetic oligonucleotide
gaaggccacugcccaugcu

SEQ ID NO: 1897970 - RNA, 19 nt, Artificial Sequence
  Description of Artificial Sequence: Synthetic oligonucleotide
gcgccggacccucuucagc

SEQ ID NO: 1897971 - RNA, 19 nt, Artificial Sequence
  Description of Artificial Sequence: Synthetic oligonucleotide
gcucugcucgcaguggcuc

SEQ ID NO: 1897972 - RNA, 19 nt, Artificial Sequence
  Description of Artificial Sequence: Synthetic oligonucleotide
gcgaggcccaggccgcucc

SEQ ID NO: 1897973 - RNA, 19 nt, Artificial Sequence
  Description of Artificial Sequence: Synthetic oligonucleotide
cuucacccuccagcgguca

SEQ ID NO: 1897974 - RNA, 19 nt, Artificial Sequence
  Description of Artificial Sequence: Synthetic oligonucleotide
gcagaauguccaccauucu

SEQ ID NO: 1897975 - RNA, 19 nt, Artificial Sequence
  Description of Artificial Sequence: Synthetic oligonucleotide
ccacugcccaugcuaauaa

SEQ ID NO: 1897976 - RNA, 19 nt, Artificial Sequence
  Description of Artificial Sequence: Synthetic oligonucleotide
gugagacggcagcaucacu

SEQ ID NO: 1897977 - RNA, 19 nt, Artificial Sequence
  Description of Artificial Sequence: Synthetic oligonucleotide
agacggcaccagguacuga

SEQ ID NO: 1897978 - RNA, 19 nt, Artificial Sequence
  Description of Artificial Sequence: Synthetic oligonucleotide
ccucgcgcagggacuggcc

SEQ ID NO: 1897979 - RNA, 19 nt, Artificial Sequence
  Description of Artificial Sequence: Synthetic oligonucleotide
gggucuuaaugaagcuuaa

SEQ ID NO: 1897980 - RNA, 19 nt, Artificial Sequence
  Description of Artificial Sequence: Synthetic oligonucleotide
gcuccgucggucucggccu

SEQ ID NO: 1897981 - RNA, 19 nt, Artificial Sequence
  Description of Artificial Sequence: Synthetic oligonucleotide
ggugagcaagugggaacuc

SEQ ID NO: 1897982 - RNA, 19 nt, Artificial Sequence
  Description of Artificial Sequence: Synthetic oligonucleotide
ggccgcuccgucggucucg

SEQ ID NO: 1897983 - RNA, 19 nt, Artificial Sequence
  Description of Artificial Sequence: Synthetic oligonucleotide
ccgcugaagauggugcuca

SEQ ID NO: 1897984 - RNA, 19 nt, Artificial Sequence
  Description of Artificial Sequence: Synthetic oligonucleotide
cuccgucggucucggccuc

SEQ ID NO: 1897985 - RNA, 19 nt, Artificial Sequence
  Description of Artificial Sequence: Synthetic oligonucleotide
cccgggcccucucacgaag

SEQ ID NO: 1897986 - RNA, 19 nt, Artificial Sequence
  Description of Artificial Sequence: Synthetic oligonucleotide
cgugagacggcagcaucac

SEQ ID NO: 1897987 - RNA, 19 nt, Artificial Sequence
  Description of Artificial Sequence: Synthetic oligonucleotide
ccgggcccucucacgaagc

SEQ ID NO: 1897988 - RNA, 19 nt, Artificial Sequence
  Description of Artificial Sequence: Synthetic oligonucleotide
uagcgaggcccaggccgcu

SEQ ID NO: 1897989 - RNA, 19 nt, Artificial Sequence
  Description of Artificial Sequence: Synthetic oligonucleotide
cgcgccucgcccacauagg

SEQ ID NO: 1897990 - RNA, 19 nt, Artificial Sequence
  Description of Artificial Sequence: Synthetic oligonucleotide
cucgcguucccgggcccuc

SEQ ID NO: 1897991 - RNA, 19 nt, Artificial Sequence
  Description of Artificial Sequence: Synthetic oligonucleotide
ccucgcccacauaggcggc

SEQ ID NO: 1897992 - RNA, 19 nt, Artificial Sequence
  Description of Artificial Sequence: Synthetic oligonucleotide
ccaugcuaauaacuucagu

SEQ ID NO: 1897993 - RNA, 19 nt, Artificial Sequence
  Description of Artificial Sequence: Synthetic oligonucleotide
gcaaccggcggcgccggac

SEQ ID NO: 1897994 - RNA, 19 nt, Artificial Sequence
  Description of Artificial Sequence: Synthetic oligonucleotide
gcugcguagccgaccgaca

SEQ ID NO: 1897995 - RNA, 19 nt, Artificial Sequence
  Description of Artificial Sequence: Synthetic oligonucleotide
gcuccgccugagcguguag

SEQ ID NO: 1897996 - RNA, 19 nt, Artificial Sequence
  Description of Artificial Sequence: Synthetic oligonucleotide
gccgcuccgucggucucgg

SEQ ID NO: 1897997 - RNA, 19 nt, Artificial Sequence
  Description of Artificial Sequence: Synthetic oligonucleotide
agccuccgucgcgccucgc

SEQ ID NO: 1897998 - RNA, 19 nt, Artificial Sequence
  Description of Artificial Sequence: Synthetic oligonucleotide
ccggacccucuucagccuc

SEQ ID NO: 1897999 - RNA, 19 nt, Artificial Sequence
  Description of Artificial Sequence: Synthetic oligonucleotide
cacgcagaauguccaccau

SEQ ID NO: 1898000 - RNA, 19 nt, Artificial Sequence
  Description of Artificial Sequence: Synthetic oligonucleotide
cuccagcggucaaucuccu

SEQ ID NO: 1898001 - RNA, 19 nt, Artificial Sequence
  Description of Artificial Sequence: Synthetic oligonucleotide
cguucccgggcccucucac

SEQ ID NO: 1898002 - RNA, 19 nt, Artificial Sequence
  Description of Artificial Sequence: Synthetic oligonucleotide
accggcggcgccggacccu

SEQ ID NO: 1898003 - RNA, 19 nt, Artificial Sequence
  Description of Artificial Sequence: Synthetic oligonucleotide
gccucgcgcagggacuggc

SEQ ID NO: 1898004 - RNA, 19 nt, Artificial Sequence
  Description of Artificial Sequence: Synthetic oligonucleotide
gggaacuccucgggaucuc

SEQ ID NO: 1898005 - RNA, 19 nt, Artificial Sequence
  Description of Artificial Sequence: Synthetic oligonucleotide
cccuuuccguggccugcgc

SEQ ID NO: 1898006 - RNA, 19 nt, Artificial Sequence
  Description of Artificial Sequence: Synthetic oligonucleotide
ccuccugauucaagaggua

SEQ ID NO: 1898007 - RNA, 19 nt, Artificial Sequence
  Description of Artificial Sequence: Synthetic oligonucleotide
cuguugcccagaugucguu

SEQ ID NO: 1898008 - RNA, 19 nt, Artificial Sequence
  Description of Artificial Sequence: Synthetic oligonucleotide
gcaaugccgcaugaaguuu

SEQ ID NO: 1898009 - RNA, 19 nt, Artificial Sequence
  Description of Artificial Sequence: Synthetic oligonucleotide
ggccucgcgcagggacugg

SEQ ID NO: 1898010 - RNA, 19 nt, Artificial Sequence
  Description of Artificial Sequence: Synthetic oligonucleotide
caguucaucuaggcccuuu

SEQ ID NO: 1898011 - RNA, 19 nt, Artificial Sequence
  Description of Artificial Sequence: Synthetic oligonucleotide
gcguucccgggcccucuca

SEQ ID NO: 1898012 - RNA, 19 nt, Artificial Sequence
  Description of Artificial Sequence: Synthetic oligonucleotide
cucagccgcugaagauggu

SEQ ID NO: 1898013 - RNA, 19 nt, Artificial Sequence
  Description of Artificial Sequence: Synthetic oligonucleotide
cggcuguugcccagauguc

SEQ ID NO: 1898014 - RNA, 19 nt, Artificial Sequence
  Description of Artificial Sequence: Synthetic oligonucleotide
cgucggucucggccucgcg

SEQ ID NO: 1898015 - RNA, 19 nt, Artificial Sequence
  Description of Artificial Sequence: Synthetic oligonucleotide
gccggacccucuucagccu

SEQ ID NO: 1898016 - RNA, 19 nt, Artificial Sequence
  Description of Artificial Sequence: Synthetic oligonucleotide
ccgucggucucggccucgc

SEQ ID NO: 1898017 - RNA, 19 nt, Artificial Sequence
  Description of Artificial Sequence: Synthetic oligonucleotide
ccuuaucaaccuccugauu

SEQ ID NO: 1898018 - RNA, 19 nt, Artificial Sequence
  Description of Artificial Sequence: Synthetic oligonucleotide
gaguugccuuuaggaugau

SEQ ID NO: 1898019 - RNA, 19 nt, Artificial Sequence
  Description of Artificial Sequence: Synthetic oligonucleotide
gcccucucacgaagccgca

SEQ ID NO: 1898020 - RNA, 19 nt, Artificial Sequence
  Description of Artificial Sequence: Synthetic oligonucleotide
gcucagccuggagguaaua

SEQ ID NO: 1898021 - RNA, 19 nt, Artificial Sequence
  Description of Artificial Sequence: Synthetic oligonucleotide
cccucucacgaagccgcaa

SEQ ID NO: 1898022 - RNA, 19 nt, Artificial Sequence
  Description of Artificial Sequence: Synthetic oligonucleotide
ggcggcgccggacccucuu

SEQ ID NO: 1898023 - RNA, 19 nt, Artificial Sequence
  Description of Artificial Sequence: Synthetic oligonucleotide
ccgcuccgucggucucggc

SEQ ID NO: 1898024 - RNA, 19 nt, Artificial Sequence
  Description of Artificial Sequence: Synthetic oligonucleotide
cgucgcgccucgcccacau

SEQ ID NO: 1898025 - RNA, 19 nt, Artificial Sequence
  Description of Artificial Sequence: Synthetic oligonucleotide
ccgucgcgccucgcccaca

SEQ ID NO: 1898026 - RNA, 19 nt, Artificial Sequence
  Description of Artificial Sequence: Synthetic oligonucleotide
aauacugagagccauuuuc

SEQ ID NO: 1898027 - RNA, 19 nt, Artificial Sequence
  Description of Artificial Sequence: Synthetic oligonucleotide
acauacaacacacacacac

SEQ ID NO: 1898028 - RNA, 19 nt, Artificial Sequence
  Description of Artificial Sequence: Synthetic oligonucleotide
auugucacaauacugagag

SEQ ID NO: 1898029 - RNA, 19 nt, Artificial Sequence
  Description of Artificial Sequence: Synthetic oligonucleotide
aacacacacacacacacac

SEQ ID NO: 1898030 - RNA, 19 nt, Artificial Sequence
  Description of Artificial Sequence: Synthetic oligonucleotide
uguuauacacauuuuauug

SEQ ID NO: 1898031 - RNA, 19 nt, Artificial Sequence
  Description of Artificial Sequence: Synthetic oligonucleotide
cauaagugcaaauauaccc

SEQ ID NO: 1898032 - RNA, 19 nt, Artificial Sequence
  Description of Artificial Sequence: Synthetic oligonucleotide
ugugaguauacgaagauca

SEQ ID NO: 1898033 - RNA, 19 nt, Artificial Sequence
  Description of Artificial Sequence: Synthetic oligonucleotide
uccuuuuaaaauacaagcg

SEQ ID NO: 1898034 - RNA, 19 nt, Artificial Sequence
  Description of Artificial Sequence: Synthetic oligonucleotide
uguauugucacaauacuga

SEQ ID NO: 1898035 - RNA, 19 nt, Artificial Sequence
  Description of Artificial Sequence: Synthetic oligonucleotide
uguucauucacauaacaca

SEQ ID NO: 1898036 - RNA, 19 nt, Artificial Sequence
  Description of Artificial Sequence: Synthetic oligonucleotide
uuuuccuuaaacuaggcuc

SEQ ID NO: 1898037 - RNA, 19 nt, Artificial Sequence
  Description of Artificial Sequence: Synthetic oligonucleotide
uuaauauccuggcacaugc

SEQ ID NO: 1898038 - RNA, 19 nt, Artificial Sequence
  Description of Artificial Sequence: Synthetic oligonucleotide
uacauaagugcaaauauac

SEQ ID NO: 1898039 - RNA, 19 nt, Artificial Sequence
  Description of Artificial Sequence: Synthetic oligonucleotide
uuacaucaaaauauuuugg

SEQ ID NO: 1898040 - RNA, 19 nt, Artificial Sequence
  Description of Artificial Sequence: Synthetic oligonucleotide
aaauacugugcuuuuagca

SEQ ID NO: 1898041 - RNA, 19 nt, Artificial Sequence
  Description of Artificial Sequence: Synthetic oligonucleotide
auucacauaacacagggcu

SEQ ID NO: 1898042 - RNA, 19 nt, Artificial Sequence
  Description of Artificial Sequence: Synthetic oligonucleotide
acaacacacacacacacac

SEQ ID NO: 1898043 - RNA, 19 nt, Artificial Sequence
  Description of Artificial Sequence: Synthetic oligonucleotide
uauacauaagugcaaauau

SEQ ID NO: 1898044 - RNA, 19 nt, Artificial Sequence
  Description of Artificial Sequence: Synthetic oligonucleotide
aauaagagccgcuagcgga

SEQ ID NO: 1898045 - RNA, 19 nt, Artificial Sequence
  Description of Artificial Sequence: Synthetic oligonucleotide
auacaacacacacacacac

SEQ ID NO: 1898046 - RNA, 19 nt, Artificial Sequence
  Description of Artificial Sequence: Synthetic oligonucleotide
aauacaagcgaagugugag

SEQ ID NO: 1898047 - RNA, 19 nt, Artificial Sequence
  Description of Artificial Sequence: Synthetic oligonucleotide
uacaucaaaauauuuuggc

SEQ ID NO: 1898048 - RNA, 19 nt, Artificial Sequence
  Description of Artificial Sequence: Synthetic oligonucleotide
aguaugugaguccugucgc

SEQ ID NO: 1898049 - RNA, 19 nt, Artificial Sequence
  Description of Artificial Sequence: Synthetic oligonucleotide
uguuguauugucacaauac

SEQ ID NO: 1898050 - RNA, 19 nt, Artificial Sequence
  Description of Artificial Sequence: Synthetic oligonucleotide
gauaauaagagccgcuagc

SEQ ID NO: 1898051 - RNA, 19 nt, Artificial Sequence
  Description of Artificial Sequence: Synthetic oligonucleotide
uuuagcacugccuauuuga

SEQ ID NO: 1898052 - RNA, 19 nt, Artificial Sequence
  Description of Artificial Sequence: Synthetic oligonucleotide
uuaaacuaggcucaucggu

SEQ ID NO: 1898053 - RNA, 19 nt, Artificial Sequence
  Description of Artificial Sequence: Synthetic oligonucleotide
aaauauacccuccuuuuaa

SEQ ID NO: 1898054 - RNA, 19 nt, Artificial Sequence
  Description of Artificial Sequence: Synthetic oligonucleotide
uuuccuuaaacuaggcuca

SEQ ID NO: 1898055 - RNA, 19 nt, Artificial Sequence
  Description of Artificial Sequence: Synthetic oligonucleotide
ucuuacaucaaaauauuuu

SEQ ID NO: 1898056 - RNA, 19 nt, Artificial Sequence
  Description of Artificial Sequence: Synthetic oligonucleotide
aauauuuuggcaaacuuua

SEQ ID NO: 1898057 - RNA, 19 nt, Artificial Sequence
  Description of Artificial Sequence: Synthetic oligonucleotide
gaaagaagaaaugccauug

SEQ ID NO: 1898058 - RNA, 19 nt, Artificial Sequence
  Description of Artificial Sequence: Synthetic oligonucleotide
auaauaagagccgcuagcg

SEQ ID NO: 1898059 - RNA, 19 nt, Artificial Sequence
  Description of Artificial Sequence: Synthetic oligonucleotide
acacacacacaccacacac

SEQ ID NO: 1898060 - RNA, 19 nt, Artificial Sequence
  Description of Artificial Sequence: Synthetic oligonucleotide
uggagugaugcugauaacg

SEQ ID NO: 1898061 - RNA, 19 nt, Artificial Sequence
  Description of Artificial Sequence: Synthetic oligonucleotide
ugauaauaagagccgcuag

SEQ ID NO: 1898062 - RNA, 19 nt, Artificial Sequence
  Description of Artificial Sequence: Synthetic oligonucleotide
uaauaagagccgcuagcgg

SEQ ID NO: 1898063 - RNA, 19 nt, Artificial Sequence
  Description of Artificial Sequence: Synthetic oligonucleotide
cugauaacgaggcaguccc

SEQ ID NO: 1898064 - RNA, 19 nt, Artificial Sequence
  Description of Artificial Sequence: Synthetic oligonucleotide
aguggagugaugcugauaa

SEQ ID NO: 1898065 - RNA, 19 nt, Artificial Sequence
  Description of Artificial Sequence: Synthetic oligonucleotide
aaugcaaugaccaccuaga

SEQ ID NO: 1898066 - RNA, 19 nt, Artificial Sequence
  Description of Artificial Sequence: Synthetic oligonucleotide
agcgaguaggacgacaugc

SEQ ID NO: 1898067 - RNA, 19 nt, Artificial Sequence
  Description of Artificial Sequence: Synthetic oligonucleotide
ugacauucgauugcgcucg

SEQ ID NO: 1898068 - RNA, 19 nt, Artificial Sequence
  Description of Artificial Sequence: Synthetic oligonucleotide
gugauggugauaauaagag

SEQ ID NO: 1898069 - RNA, 19 nt, Artificial Sequence
  Description of Artificial Sequence: Synthetic oligonucleotide
ugaucagugaaugcaauga

SEQ ID NO: 1898070 - RNA, 19 nt, Artificial Sequence
  Description of Artificial Sequence: Synthetic oligonucleotide
gaaauacugugcuuuuagc

SEQ ID NO: 1898071 - RNA, 19 nt, Artificial Sequence
  Description of Artificial Sequence: Synthetic oligonucleotide
uauagggcgagugacauuc

SEQ ID NO: 1898072 - RNA, 19 nt, Artificial Sequence
  Description of Artificial Sequence: Synthetic oligonucleotide
acauaagugcaaauauacc

SEQ ID NO: 1898073 - RNA, 19 nt, Artificial Sequence
  Description of Artificial Sequence: Synthetic oligonucleotide
caguaugugaguccugucg

SEQ ID NO: 1898074 - RNA, 19 nt, Artificial Sequence
  Description of Artificial Sequence: Synthetic oligonucleotide
ugaaauugaggacgaaauc

SEQ ID NO: 1898075 - RNA, 19 nt, Artificial Sequence
  Description of Artificial Sequence: Synthetic oligonucleotide
uccaaugugccgcagggcu

SEQ ID NO: 1898076 - RNA, 19 nt, Artificial Sequence
  Description of Artificial Sequence: Synthetic oligonucleotide
aauauacccuccuuuuaaa

SEQ ID NO: 1898077 - RNA, 19 nt, Artificial Sequence
  Description of Artificial Sequence: Synthetic oligonucleotide
agcacugccuauuugaaaa

SEQ ID NO: 1898078 - RNA, 19 nt, Artificial Sequence
  Description of Artificial Sequence: Synthetic oligonucleotide
cuuaaacuaggcucaucgg

SEQ ID NO: 1898079 - RNA, 19 nt, Artificial Sequence
  Description of Artificial Sequence: Synthetic oligonucleotide
uauugucacaauacugaga

SEQ ID NO: 1898080 - RNA, 19 nt, Artificial Sequence
  Description of Artificial Sequence: Synthetic oligonucleotide
agugacauucgauugcgcu

SEQ ID NO: 1898081 - RNA, 19 nt, Artificial Sequence
  Description of Artificial Sequence: Synthetic oligonucleotide
ccuuaaacuaggcucaucg

SEQ ID NO: 1898082 - RNA, 19 nt, Artificial Sequence
  Description of Artificial Sequence: Synthetic oligonucleotide
gacgaaaucuuuucuguca

SEQ ID NO: 1898083 - RNA, 19 nt, Artificial Sequence
  Description of Artificial Sequence: Synthetic oligonucleotide
cuugagguaaggugaggcg

SEQ ID NO: 1898084 - RNA, 19 nt, Artificial Sequence
  Description of Artificial Sequence: Synthetic oligonucleotide
gaguauacgaagaucauaa

SEQ ID NO: 1898085 - RNA, 19 nt, Artificial Sequence
  Description of Artificial Sequence: Synthetic oligonucleotide
gaggacgaaaucuuuucug

SEQ ID NO: 1898086 - RNA, 19 nt, Artificial Sequence
  Description of Artificial Sequence: Synthetic oligonucleotide
gaaaagcgcacacaugcac

SEQ ID NO: 1898087 - RNA, 19 nt, Artificial Sequence
  Description of Artificial Sequence: Synthetic oligonucleotide
agaaucuccuacuggacca

SEQ ID NO: 1898088 - RNA, 19 nt, Artificial Sequence
  Description of Artificial Sequence: Synthetic oligonucleotide
uaaacuaggcucaucgguu

SEQ ID NO: 1898089 - RNA, 19 nt, Artificial Sequence
  Description of Artificial Sequence: Synthetic oligonucleotide
uauacccuccuuuuaaaau

SEQ ID NO: 1898090 - RNA, 19 nt, Artificial Sequence
  Description of Artificial Sequence: Synthetic oligonucleotide
gaaauugaggacgaaaucu

SEQ ID NO: 1898091 - RNA, 19 nt, Artificial Sequence
  Description of Artificial Sequence: Synthetic oligonucleotide
accaccuagaacugugcac

SEQ ID NO: 1898092 - RNA, 19 nt, Artificial Sequence
  Description of Artificial Sequence: Synthetic oligonucleotide
gaguaggacgacaugcugg

SEQ ID NO: 1898093 - RNA, 19 nt, Artificial Sequence
  Description of Artificial Sequence: Synthetic oligonucleotide
ugcaucauagccugcgggc

SEQ ID NO: 1898094 - RNA, 19 nt, Artificial Sequence
  Description of Artificial Sequence: Synthetic oligonucleotide
ugcugcuugagguaaggug

SEQ ID NO: 1898095 - RNA, 19 nt, Artificial Sequence
  Description of Artificial Sequence: Synthetic oligonucleotide
ugcaaugaccaccuagaac

SEQ ID NO: 1898096 - RNA, 19 nt, Artificial Sequence
  Description of Artificial Sequence: Synthetic oligonucleotide
cacacacacacacacacac

SEQ ID NO: 1898097 - RNA, 19 nt, Artificial Sequence
  Description of Artificial Sequence: Synthetic oligonucleotide
uggaccaggcaacuaagca

SEQ ID NO: 1898098 - RNA, 19 nt, Artificial Sequence
  Description of Artificial Sequence: Synthetic oligonucleotide
ugagguaaggugaggcgcc

SEQ ID NO: 1898099 - RNA, 19 nt, Artificial Sequence
  Description of Artificial Sequence: Synthetic oligonucleotide
auaaguggagcccggguug

SEQ ID NO: 1898100 - RNA, 19 nt, Artificial Sequence
  Description of Artificial Sequence: Synthetic oligonucleotide
cuaagcaaggcuuucuuga

SEQ ID NO: 1898101 - RNA, 19 nt, Artificial Sequence
  Description of Artificial Sequence: Synthetic oligonucleotide
guauacgaagaucauaaaa

SEQ ID NO: 1898102 - RNA, 19 nt, Artificial Sequence
  Description of Artificial Sequence: Synthetic oligonucleotide
caggcgaacuccaaugugc

SEQ ID NO: 1898103 - RNA, 19 nt, Artificial Sequence
  Description of Artificial Sequence: Synthetic oligonucleotide
ucaucgguucuucauuucu

SEQ ID NO: 1898104 - RNA, 19 nt, Artificial Sequence
  Description of Artificial Sequence: Synthetic oligonucleotide
acacacacaccacacaccu

SEQ ID NO: 1898105 - RNA, 19 nt, Artificial Sequence
  Description of Artificial Sequence: Synthetic oligonucleotide
gaccaggcaacuaagcaag

SEQ ID NO: 1898106 - RNA, 19 nt, Artificial Sequence
  Description of Artificial Sequence: Synthetic oligonucleotide
uauaaguggagcccggguu

SEQ ID NO: 1898107 - RNA, 19 nt, Artificial Sequence
  Description of Artificial Sequence: Synthetic oligonucleotide
aggacgaaaucuuuucugu

SEQ ID NO: 1898108 - RNA, 19 nt, Artificial Sequence
  Description of Artificial Sequence: Synthetic oligonucleotide
cugccuauuugaaaagcgc

SEQ ID NO: 1898109 - RNA, 19 nt, Artificial Sequence
  Description of Artificial Sequence: Synthetic oligonucleotide
aggguuacugcuuggcguc

SEQ ID NO: 1898110 - RNA, 19 nt, Artificial Sequence
  Description of Artificial Sequence: Synthetic oligonucleotide
uugagguaaggugaggcgc

SEQ ID NO: 1898111 - RNA, 19 nt, Artificial Sequence
  Description of Artificial Sequence: Synthetic oligonucleotide
gaucagugaaugcaaugac

SEQ ID NO: 1898112 - RNA, 19 nt, Artificial Sequence
  Description of Artificial Sequence: Synthetic oligonucleotide
ugaggacgaaaucuuuucu

SEQ ID NO: 1898113 - RNA, 19 nt, Artificial Sequence
  Description of Artificial Sequence: Synthetic oligonucleotide
uggccauauaaguggagcc

SEQ ID NO: 1898114 - RNA, 19 nt, Artificial Sequence
  Description of Artificial Sequence: Synthetic oligonucleotide
aaggugaggcgccaggcga

SEQ ID NO: 1898115 - RNA, 19 nt, Artificial Sequence
  Description of Artificial Sequence: Synthetic oligonucleotide
acuaagcaaggcuuucuug

SEQ ID NO: 1898116 - RNA, 19 nt, Artificial Sequence
  Description of Artificial Sequence: Synthetic oligonucleotide
acugccuauuugaaaagcg

SEQ ID NO: 1898117 - RNA, 19 nt, Artificial Sequence
  Description of Artificial Sequence: Synthetic oligonucleotide
uuuggcaccuguauucgaa

SEQ ID NO: 1898118 - RNA, 19 nt, Artificial Sequence
  Description of Artificial Sequence: Synthetic oligonucleotide
uuuuagcacugccuauuug

SEQ ID NO: 1898119 - RNA, 19 nt, Artificial Sequence
  Description of Artificial Sequence: Synthetic oligonucleotide
aaagcgcacacaugcacau

SEQ ID NO: 1898120 - RNA, 19 nt, Artificial Sequence
  Description of Artificial Sequence: Synthetic oligonucleotide
cagaaucuccuacuggacc

SEQ ID NO: 1898121 - RNA, 19 nt, Artificial Sequence
  Description of Artificial Sequence: Synthetic oligonucleotide
aaaguauacauaagugcaa

SEQ ID NO: 1898122 - RNA, 19 nt, Artificial Sequence
  Description of Artificial Sequence: Synthetic oligonucleotide
uauuugaaaagcgcacaca

SEQ ID NO: 1898123 - RNA, 19 nt, Artificial Sequence
  Description of Artificial Sequence: Synthetic oligonucleotide
uacaacacacacacacaca

SEQ ID NO: 1898124 - RNA, 19 nt, Artificial Sequence
  Description of Artificial Sequence: Synthetic oligonucleotide
cuaguauagggcgagugac

SEQ ID NO: 1898125 - RNA, 19 nt, Artificial Sequence
  Description of Artificial Sequence: Synthetic oligonucleotide
uagccugcgggcaucaugu

SEQ ID NO: 1898126 - RNA, 19 nt, Artificial Sequence
  Description of Artificial Sequence: Synthetic oligonucleotide
uggaguggagugaugcuga

SEQ ID NO: 1898127 - RNA, 19 nt, Artificial Sequence
  Description of Artificial Sequence: Synthetic oligonucleotide
cacacaccuuuccagaccc

SEQ ID NO: 1898128 - RNA, 19 nt, Artificial Sequence
  Description of Artificial Sequence: Synthetic oligonucleotide
uacuggaccaggcaacuaa

SEQ ID NO: 1898129 - RNA, 19 nt, Artificial Sequence
  Description of Artificial Sequence: Synthetic oligonucleotide
cucgcgggcauucuggugc

SEQ ID NO: 1898130 - RNA, 19 nt, Artificial Sequence
  Description of Artificial Sequence: Synthetic oligonucleotide
auacccuccuuuuaaaaua

SEQ ID NO: 1898131 - RNA, 19 nt, Artificial Sequence
  Description of Artificial Sequence: Synthetic oligonucleotide
aacuaagcaaggcuuucuu

SEQ ID NO: 1898132 - RNA, 19 nt, Artificial Sequence
  Description of Artificial Sequence: Synthetic oligonucleotide
auugcgcucgccauggccg

SEQ ID NO: 1898133 - RNA, 19 nt, Artificial Sequence
  Description of Artificial Sequence: Synthetic oligonucleotide
guuggggcgacaugugggg

SEQ ID NO: 1898134 - RNA, 19 nt, Artificial Sequence
  Description of Artificial Sequence: Synthetic oligonucleotide
uggcaaacuuuaaaaguau

SEQ ID NO: 1898135 - RNA, 19 nt, Artificial Sequence
  Description of Artificial Sequence: Synthetic oligonucleotide
acacacaccacacaccuuu

SEQ ID NO: 1898136 - RNA, 19 nt, Artificial Sequence
  Description of Artificial Sequence: Synthetic oligonucleotide
uggcaccuguauucgaagg

SEQ ID NO: 1898137 - RNA, 19 nt, Artificial Sequence
  Description of Artificial Sequence: Synthetic oligonucleotide
uuggcgucagggcaggcug

SEQ ID NO: 1898138 - RNA, 19 nt, Artificial Sequence
  Description of Artificial Sequence: Synthetic oligonucleotide
ucccacugagagauccucg

SEQ ID NO: 1898139 - RNA, 19 nt, Artificial Sequence
  Description of Artificial Sequence: Synthetic oligonucleotide
uaguauagggcgagugaca

SEQ ID NO: 1898140 - RNA, 19 nt, Artificial Sequence
  Description of Artificial Sequence: Synthetic oligonucleotide
agugugaguauacgaagau

SEQ ID NO: 1898141 - RNA, 19 nt, Artificial Sequence
  Description of Artificial Sequence: Synthetic oligonucleotide
ugcacaguaugugaguccu

SEQ ID NO: 1898142 - RNA, 19 nt, Artificial Sequence
  Description of Artificial Sequence: Synthetic oligonucleotide
ucgauugcgcucgccaugg

SEQ ID NO: 1898143 - RNA, 19 nt, Artificial Sequence
  Description of Artificial Sequence: Synthetic oligonucleotide
uaugugaguccugucgcag

SEQ ID NO: 1898144 - RNA, 19 nt, Artificial Sequence
  Description of Artificial Sequence: Synthetic oligonucleotide
ugccgcagggcuaguauag

SEQ ID NO: 1898145 - RNA, 19 nt, Artificial Sequence
  Description of Artificial Sequence: Synthetic oligonucleotide
ucuccuacuggaccaggca

SEQ ID NO: 1898146 - RNA, 19 nt, Artificial Sequence
  Description of Artificial Sequence: Synthetic oligonucleotide
aaauacaagcgaaguguga

SEQ ID NO: 1898147 - RNA, 19 nt, Artificial Sequence
  Description of Artificial Sequence: Synthetic oligonucleotide
cugaucagugaaugcaaug

SEQ ID NO: 1898148 - RNA, 19 nt, Artificial Sequence
  Description of Artificial Sequence: Synthetic oligonucleotide
auauaaguggagcccgggu

SEQ ID NO: 1898149 - RNA, 19 nt, Artificial Sequence
  Description of Artificial Sequence: Synthetic oligonucleotide
gauugcgcucgccauggcc

SEQ ID NO: 1898150 - RNA, 19 nt, Artificial Sequence
  Description of Artificial Sequence: Synthetic oligonucleotide
uucgauugcgcucgccaug

SEQ ID NO: 1898151 - RNA, 19 nt, Artificial Sequence
  Description of Artificial Sequence: Synthetic oligonucleotide
cacacacacacacacacca

SEQ ID NO: 1898152 - RNA, 19 nt, Artificial Sequence
  Description of Artificial Sequence: Synthetic oligonucleotide
aagcgaagugugaguauac

SEQ ID NO: 1898153 - RNA, 19 nt, Artificial Sequence
  Description of Artificial Sequence: Synthetic oligonucleotide
cagggcuuaauauccuggc

SEQ ID NO: 1898154 - RNA, 19 nt, Artificial Sequence
  Description of Artificial Sequence: Synthetic oligonucleotide
guguggaugcgcauggccg

SEQ ID NO: 1898155 - RNA, 19 nt, Artificial Sequence
  Description of Artificial Sequence: Synthetic oligonucleotide
cuggccauauaaguggagc

SEQ ID NO: 1898156 - RNA, 19 nt, Artificial Sequence
  Description of Artificial Sequence: Synthetic oligonucleotide
ugagagauccucgcgggca

SEQ ID NO: 1898157 - RNA, 19 nt, Artificial Sequence
  Description of Artificial Sequence: Synthetic oligonucleotide
auauacccuccuuuuaaaa

SEQ ID NO: 1898158 - RNA, 19 nt, Artificial Sequence
  Description of Artificial Sequence: Synthetic oligonucleotide
gauaacgaggcagucccac

SEQ ID NO: 1898159 - RNA, 19 nt, Artificial Sequence
  Description of Artificial Sequence: Synthetic oligonucleotide
uuggcaccuguauucgaag

SEQ ID NO: 1898160 - RNA, 19 nt, Artificial Sequence
  Description of Artificial Sequence: Synthetic oligonucleotide
ccuuuuaaaauacaagcga

SEQ ID NO: 1898161 - RNA, 19 nt, Artificial Sequence
  Description of Artificial Sequence: Synthetic oligonucleotide
cuuaauauccuggcacaug

SEQ ID NO: 1898162 - RNA, 19 nt, Artificial Sequence
  Description of Artificial Sequence: Synthetic oligonucleotide
ugaguauacgaagaucaua

SEQ ID NO: 1898163 - RNA, 19 nt, Artificial Sequence
  Description of Artificial Sequence: Synthetic oligonucleotide
cacacacacaccacacacc

SEQ ID NO: 1898164 - RNA, 19 nt, Artificial Sequence
  Description of Artificial Sequence: Synthetic oligonucleotide
guuguauugucacaauacu

SEQ ID NO: 1898165 - RNA, 19 nt, Artificial Sequence
  Description of Artificial Sequence: Synthetic oligonucleotide
gcagggcuaguauagggcg

SEQ ID NO: 1898166 - RNA, 19 nt, Artificial Sequence
  Description of Artificial Sequence: Synthetic oligonucleotide
cugcaucauagccugcggg

SEQ ID NO: 1898167 - RNA, 19 nt, Artificial Sequence
  Description of Artificial Sequence: Synthetic oligonucleotide
caccuguauucgaagguag

SEQ ID NO: 1898168 - RNA, 19 nt, Artificial Sequence
  Description of Artificial Sequence: Synthetic oligonucleotide
cauaacacagggcuuaaua

SEQ ID NO: 1898169 - RNA, 19 nt, Artificial Sequence
  Description of Artificial Sequence: Synthetic oligonucleotide
acagggcuuaauauccugg

SEQ ID NO: 1898170 - RNA, 19 nt, Artificial Sequence
  Description of Artificial Sequence: Synthetic oligonucleotide
auacaagcgaagugugagu

SEQ ID NO: 1898171 - RNA, 19 nt, Artificial Sequence
  Description of Artificial Sequence: Synthetic oligonucleotide
acaguaugugaguccuguc

SEQ ID NO: 1898172 - RNA, 19 nt, Artificial Sequence
  Description of Artificial Sequence: Synthetic oligonucleotide
ugugcacaguaugugaguc

SEQ ID NO: 1898173 - RNA, 19 nt, Artificial Sequence
  Description of Artificial Sequence: Synthetic oligonucleotide
acacacacacacaccacac

SEQ ID NO: 1898174 - RNA, 19 nt, Artificial Sequence
  Description of Artificial Sequence: Synthetic oligonucleotide
cauacaacacacacacaca

SEQ ID NO: 1898175 - RNA, 19 nt, Artificial Sequence
  Description of Artificial Sequence: Synthetic oligonucleotide
cacuggaguggagugaugc

SEQ ID NO: 1898176 - RNA, 19 nt, Artificial Sequence
  Description of Artificial Sequence: Synthetic oligonucleotide
cauauaaguggagcccggg

SEQ ID NO: 1898177 - RNA, 19 nt, Artificial Sequence
  Description of Artificial Sequence: Synthetic oligonucleotide
uacaagcgaagugugagua

SEQ ID NO: 1898178 - RNA, 19 nt, Artificial Sequence
  Description of Artificial Sequence: Synthetic oligonucleotide
auagccugcgggcaucaug

SEQ ID NO: 1898179 - RNA, 19 nt, Artificial Sequence
  Description of Artificial Sequence: Synthetic oligonucleotide
auguuguauugucacaaua

SEQ ID NO: 1898180 - RNA, 19 nt, Artificial Sequence
  Description of Artificial Sequence: Synthetic oligonucleotide
ugaccaccuagaacugugc

SEQ ID NO: 1898181 - RNA, 19 nt, Artificial Sequence
  Description of Artificial Sequence: Synthetic oligonucleotide
auaagagccgcuagcggag

SEQ ID NO: 1898182 - RNA, 19 nt, Artificial Sequence
  Description of Artificial Sequence: Synthetic oligonucleotide
agcgaagugugaguauacg

SEQ ID NO: 1898183 - RNA, 19 nt, Artificial Sequence
  Description of Artificial Sequence: Synthetic oligonucleotide
uacugcuuggcgucagggc

SEQ ID NO: 1898184 - RNA, 19 nt, Artificial Sequence
  Description of Artificial Sequence: Synthetic oligonucleotide
cuuuccagacccugaucag

SEQ ID NO: 1898185 - RNA, 19 nt, Artificial Sequence
  Description of Artificial Sequence: Synthetic oligonucleotide
gugacauucgauugcgcuc

SEQ ID NO: 1898186 - RNA, 19 nt, Artificial Sequence
  Description of Artificial Sequence: Synthetic oligonucleotide
gggcuuaauauccuggcac

SEQ ID NO: 1898187 - RNA, 19 nt, Artificial Sequence
  Description of Artificial Sequence: Synthetic oligonucleotide
cuucauuucuucacaaugu

SEQ ID NO: 1898188 - RNA, 19 nt, Artificial Sequence
  Description of Artificial Sequence: Synthetic oligonucleotide
aguauagggcgagugacau

SEQ ID NO: 1898189 - RNA, 19 nt, Artificial Sequence
  Description of Artificial Sequence: Synthetic oligonucleotide
ugucacacacuggagugga

SEQ ID NO: 1898190 - RNA, 19 nt, Artificial Sequence
  Description of Artificial Sequence: Synthetic oligonucleotide
aguagcucugcuccagcga

SEQ ID NO: 1898191 - RNA, 19 nt, Artificial Sequence
  Description of Artificial Sequence: Synthetic oligonucleotide
aguauacgaagaucauaaa

SEQ ID NO: 1898192 - RNA, 19 nt, Artificial Sequence
  Description of Artificial Sequence: Synthetic oligonucleotide
acacacacacacacacacc

SEQ ID NO: 1898193 - RNA, 19 nt, Artificial Sequence
  Description of Artificial Sequence: Synthetic oligonucleotide
agacccugaucagugaaug

SEQ ID NO: 1898194 - RNA, 19 nt, Artificial Sequence
  Description of Artificial Sequence: Synthetic oligonucleotide
aauugaggacgaaaucuuu

SEQ ID NO: 1898195 - RNA, 19 nt, Artificial Sequence
  Description of Artificial Sequence: Synthetic oligonucleotide
agcaccggcgccugcauca

SEQ ID NO: 1898196 - RNA, 19 nt, Artificial Sequence
  Description of Artificial Sequence: Synthetic oligonucleotide
gacccugaucagugaaugc

SEQ ID NO: 1898197 - RNA, 19 nt, Artificial Sequence
  Description of Artificial Sequence: Synthetic oligonucleotide
gcgggcaucaugucgaggc

SEQ ID NO: 1898198 - RNA, 19 nt, Artificial Sequence
  Description of Artificial Sequence: Synthetic oligonucleotide
auacauaagugcaaauaua

SEQ ID NO: 1898199 - RNA, 19 nt, Artificial Sequence
  Description of Artificial Sequence: Synthetic oligonucleotide
ugugccgcagggcuaguau

SEQ ID NO: 1898200 - RNA, 19 nt, Artificial Sequence
  Description of Artificial Sequence: Synthetic oligonucleotide
gguaaggugaggcgccagg

SEQ ID NO: 1898201 - RNA, 19 nt, Artificial Sequence
  Description of Artificial Sequence: Synthetic oligonucleotide
ugaugcugauaacgaggca

SEQ ID NO: 1898202 - RNA, 19 nt, Artificial Sequence
  Description of Artificial Sequence: Synthetic oligonucleotide
cauucgauugcgcucgcca

SEQ ID NO: 1898203 - RNA, 19 nt, Artificial Sequence
  Description of Artificial Sequence: Synthetic oligonucleotide
cucuguucauucacauaac

SEQ ID NO: 1898204 - RNA, 19 nt, Artificial Sequence
  Description of Artificial Sequence: Synthetic oligonucleotide
gccauauaaguggagcccg

SEQ ID NO: 1898205 - RNA, 19 nt, Artificial Sequence
  Description of Artificial Sequence: Synthetic oligonucleotide
ggggagcaggccuucaagg

SEQ ID NO: 1898206 - RNA, 19 nt, Artificial Sequence
  Description of Artificial Sequence: Synthetic oligonucleotide
uugucacaauacugagagc

SEQ ID NO: 1898207 - RNA, 19 nt, Artificial Sequence
  Description of Artificial Sequence: Synthetic oligonucleotide
uagggcgagugacauucga

SEQ ID NO: 1898208 - RNA, 19 nt, Artificial Sequence
  Description of Artificial Sequence: Synthetic oligonucleotide
cacugccuauuugaaaagc

SEQ ID NO: 1898209 - RNA, 19 nt, Artificial Sequence
  Description of Artificial Sequence: Synthetic oligonucleotide
cuguccggcccauagucac

SEQ ID NO: 1898210 - RNA, 19 nt, Artificial Sequence
  Description of Artificial Sequence: Synthetic oligonucleotide
ggcgagugacauucgauug

SEQ ID NO: 1898211 - RNA, 19 nt, Artificial Sequence
  Description of Artificial Sequence: Synthetic oligonucleotide
uggugcaaguagcucugcu

SEQ ID NO: 1898212 - RNA, 19 nt, Artificial Sequence
  Description of Artificial Sequence: Synthetic oligonucleotide
auucgauugcgcucgccau

SEQ ID NO: 1898213 - RNA, 19 nt, Artificial Sequence
  Description of Artificial Sequence: Synthetic oligonucleotide
cacacacacacacaccaca

SEQ ID NO: 1898214 - RNA, 19 nt, Artificial Sequence
  Description of Artificial Sequence: Synthetic oligonucleotide
ggagcaggccuucaaggcc

SEQ ID NO: 1898215 - RNA, 19 nt, Artificial Sequence
  Description of Artificial Sequence: Synthetic oligonucleotide
ugauaacgaggcaguccca

SEQ ID NO: 1898216 - RNA, 19 nt, Artificial Sequence
  Description of Artificial Sequence: Synthetic oligonucleotide
gugcacaguaugugagucc

SEQ ID NO: 1898217 - RNA, 19 nt, Artificial Sequence
  Description of Artificial Sequence: Synthetic oligonucleotide
guaaggugaggcgccaggc

SEQ ID NO: 1898218 - RNA, 19 nt, Artificial Sequence
  Description of Artificial Sequence: Synthetic oligonucleotide
agggcuaguauagggcgag

SEQ ID NO: 1898219 - RNA, 19 nt, Artificial Sequence
  Description of Artificial Sequence: Synthetic oligonucleotide
gaccaccuagaacugugca

SEQ ID NO: 1898220 - RNA, 19 nt, Artificial Sequence
  Description of Artificial Sequence: Synthetic oligonucleotide
gcugcuugagguaagguga

SEQ ID NO: 1898221 - RNA, 19 nt, Artificial Sequence
  Description of Artificial Sequence: Synthetic oligonucleotide
gaaaugccauugaaauuga

SEQ ID NO: 1898222 - RNA, 19 nt, Artificial Sequence
  Description of Artificial Sequence: Synthetic oligonucleotide
caaugugccgcagggcuag

SEQ ID NO: 1898223 - RNA, 19 nt, Artificial Sequence
  Description of Artificial Sequence: Synthetic oligonucleotide
auugaggacgaaaucuuuu

SEQ ID NO: 1898224 - RNA, 19 nt, Artificial Sequence
  Description of Artificial Sequence: Synthetic oligonucleotide
gguguggaugcgcauggcc

SEQ ID NO: 1898225 - RNA, 19 nt, Artificial Sequence
  Description of Artificial Sequence: Synthetic oligonucleotide
cugucacacacuggagugg

SEQ ID NO: 1898226 - RNA, 19 nt, Artificial Sequence
  Description of Artificial Sequence: Synthetic oligonucleotide
uugaaauacugugcuuuua

SEQ ID NO: 1898227 - RNA, 19 nt, Artificial Sequence
  Description of Artificial Sequence: Synthetic oligonucleotide
gcgggcaccggacagcugg

SEQ ID NO: 1898228 - RNA, 19 nt, Artificial Sequence
  Description of Artificial Sequence: Synthetic oligonucleotide
uccugucgcagucccuagc

SEQ ID NO: 1898229 - RNA, 19 nt, Artificial Sequence
  Description of Artificial Sequence: Synthetic oligonucleotide
gugcuuuuagcacugccua

SEQ ID NO: 1898230 - RNA, 19 nt, Artificial Sequence
  Description of Artificial Sequence: Synthetic oligonucleotide
ugcuugagguaaggugagg

SEQ ID NO: 1898231 - RNA, 19 nt, Artificial Sequence
  Description of Artificial Sequence: Synthetic oligonucleotide
gguuggggcgacauguggg

SEQ ID NO: 1898232 - RNA, 19 nt, Artificial Sequence
  Description of Artificial Sequence: Synthetic oligonucleotide
acacacacacacacaccac

SEQ ID NO: 1898233 - RNA, 19 nt, Artificial Sequence
  Description of Artificial Sequence: Synthetic oligonucleotide
acaagcgaagugugaguau

SEQ ID NO: 1898234 - RNA, 19 nt, Artificial Sequence
  Description of Artificial Sequence: Synthetic oligonucleotide
ggcuuaauauccuggcaca

SEQ ID NO: 1898235 - RNA, 19 nt, Artificial Sequence
  Description of Artificial Sequence: Synthetic oligonucleotide
aggguggaaagaagaaaug

SEQ ID NO: 1898236 - RNA, 19 nt, Artificial Sequence
  Description of Artificial Sequence: Synthetic oligonucleotide
acauucgauugcgcucgcc

SEQ ID NO: 1898237 - RNA, 19 nt, Artificial Sequence
  Description of Artificial Sequence: Synthetic oligonucleotide
uugcgcucgccauggccgg

SEQ ID NO: 1898238 - RNA, 19 nt, Artificial Sequence
  Description of Artificial Sequence: Synthetic oligonucleotide
augcaaugaccaccuagaa

SEQ ID NO: 1898239 - RNA, 19 nt, Artificial Sequence
  Description of Artificial Sequence: Synthetic oligonucleotide
gaugcgcauggccgggagc

SEQ ID NO: 1898240 - RNA, 19 nt, Artificial Sequence
  Description of Artificial Sequence: Synthetic oligonucleotide
guaugugaguccugucgca

SEQ ID NO: 1898241 - RNA, 19 nt, Artificial Sequence
  Description of Artificial Sequence: Synthetic oligonucleotide
aucauagccugcgggcauc

SEQ ID NO: 1898242 - RNA, 19 nt, Artificial Sequence
  Description of Artificial Sequence: Synthetic oligonucleotide
gcgaacuccaaugugccgc

SEQ ID NO: 1898243 - RNA, 19 nt, Artificial Sequence
  Description of Artificial Sequence: Synthetic oligonucleotide
gggagcaggccuucaaggc

SEQ ID NO: 1898244 - RNA, 19 nt, Artificial Sequence
  Description of Artificial Sequence: Synthetic oligonucleotide
gcgagugacauucgauugc

SEQ ID NO: 1898245 - RNA, 19 nt, Artificial Sequence
  Description of Artificial Sequence: Synthetic oligonucleotide
gcugauaacgaggcagucc

SEQ ID NO: 1898246 - RNA, 19 nt, Artificial Sequence
  Description of Artificial Sequence: Synthetic oligonucleotide
uccagacccugaucaguga

SEQ ID NO: 1898247 - RNA, 19 nt, Artificial Sequence
  Description of Artificial Sequence: Synthetic oligonucleotide
auccucgcgggcauucugg

SEQ ID NO: 1898248 - RNA, 19 nt, Artificial Sequence
  Description of Artificial Sequence: Synthetic oligonucleotide
ggccauauaaguggagccc

SEQ ID NO: 1898249 - RNA, 19 nt, Artificial Sequence
  Description of Artificial Sequence: Synthetic oligonucleotide
gcuaguauagggcgaguga

SEQ ID NO: 1898250 - RNA, 19 nt, Artificial Sequence
  Description of Artificial Sequence: Synthetic oligonucleotide
gcuagcggaggguggaaag

SEQ ID NO: 1898251 - RNA, 19 nt, Artificial Sequence
  Description of Artificial Sequence: Synthetic oligonucleotide
cucaucgguucuucauuuc

SEQ ID NO: 1898252 - RNA, 19 nt, Artificial Sequence
  Description of Artificial Sequence: Synthetic oligonucleotide
accggcgccugcaucauag

SEQ ID NO: 1898253 - RNA, 19 nt, Artificial Sequence
  Description of Artificial Sequence: Synthetic oligonucleotide
aggcucaucgguucuucau

SEQ ID NO: 1898254 - RNA, 19 nt, Artificial Sequence
  Description of Artificial Sequence: Synthetic oligonucleotide
augcugauaacgaggcagu

SEQ ID NO: 1898255 - RNA, 19 nt, Artificial Sequence
  Description of Artificial Sequence: Synthetic oligonucleotide
ggacgaaaucuuuucuguc

SEQ ID NO: 1898256 - RNA, 19 nt, Artificial Sequence
  Description of Artificial Sequence: Synthetic oligonucleotide
aucuuacaucaaaauauuu

SEQ ID NO: 1898257 - RNA, 19 nt, Artificial Sequence
  Description of Artificial Sequence: Synthetic oligonucleotide
cucgccauggccggggaug

SEQ ID NO: 1898258 - RNA, 19 nt, Artificial Sequence
  Description of Artificial Sequence: Synthetic oligonucleotide
gcgaagugugaguauacga

SEQ ID NO: 1898259 - RNA, 19 nt, Artificial Sequence
  Description of Artificial Sequence: Synthetic oligonucleotide
uccagcgaguaggacgaca

SEQ ID NO: 1898260 - RNA, 19 nt, Artificial Sequence
  Description of Artificial Sequence: Synthetic oligonucleotide
accugcgggcaccggacag

SEQ ID NO: 1898261 - RNA, 19 nt, Artificial Sequence
  Description of Artificial Sequence: Synthetic oligonucleotide
ccauauaaguggagcccgg

SEQ ID NO: 1898262 - RNA, 19 nt, Artificial Sequence
  Description of Artificial Sequence: Synthetic oligonucleotide
caggcaacuaagcaaggcu

SEQ ID NO: 1898263 - RNA, 19 nt, Artificial Sequence
  Description of Artificial Sequence: Synthetic oligonucleotide
caacacacacacacacaca

SEQ ID NO: 1898264 - RNA, 19 nt, Artificial Sequence
  Description of Artificial Sequence: Synthetic oligonucleotide
cccacugagagauccucgc

SEQ ID NO: 1898265 - RNA, 19 nt, Artificial Sequence
  Description of Artificial Sequence: Synthetic oligonucleotide
gccuauuugaaaagcgcac

SEQ ID NO: 1898266 - RNA, 19 nt, Artificial Sequence
  Description of Artificial Sequence: Synthetic oligonucleotide
ccuguauucgaagguagug

SEQ ID NO: 1898267 - RNA, 19 nt, Artificial Sequence
  Description of Artificial Sequence: Synthetic oligonucleotide
uggcgucagggcaggcugc

SEQ ID NO: 1898268 - RNA, 19 nt, Artificial Sequence
  Description of Artificial Sequence: Synthetic oligonucleotide
ggcgaacuccaaugugccg

SEQ ID NO: 1898269 - RNA, 19 nt, Artificial Sequence
  Description of Artificial Sequence: Synthetic oligonucleotide
gcacugccuauuugaaaag

SEQ ID NO: 1898270 - RNA, 19 nt, Artificial Sequence
  Description of Artificial Sequence: Synthetic oligonucleotide
gccugcaucauagccugcg

SEQ ID NO: 1898271 - RNA, 19 nt, Artificial Sequence
  Description of Artificial Sequence: Synthetic oligonucleotide
ugaaugcaaugaccaccua

SEQ ID NO: 1898272 - RNA, 19 nt, Artificial Sequence
  Description of Artificial Sequence: Synthetic oligonucleotide
gagugacauucgauugcgc

SEQ ID NO: 1898273 - RNA, 19 nt, Artificial Sequence
  Description of Artificial Sequence: Synthetic oligonucleotide
gacauucgauugcgcucgc

SEQ ID NO: 1898274 - RNA, 19 nt, Artificial Sequence
  Description of Artificial Sequence: Synthetic oligonucleotide
caagcgaagugugaguaua

SEQ ID NO: 1898275 - RNA, 19 nt, Artificial Sequence
  Description of Artificial Sequence: Synthetic oligonucleotide
cuccuacuggaccaggcaa

SEQ ID NO: 1898276 - RNA, 19 nt, Artificial Sequence
  Description of Artificial Sequence: Synthetic oligonucleotide
cacacacacacaccacaca

SEQ ID NO: 1898277 - RNA, 19 nt, Artificial Sequence
  Description of Artificial Sequence: Synthetic oligonucleotide
accuguauucgaagguagu

SEQ ID NO: 1898278 - RNA, 19 nt, Artificial Sequence
  Description of Artificial Sequence: Synthetic oligonucleotide
aguccugucgcagucccua

SEQ ID NO: 1898279 - RNA, 19 nt, Artificial Sequence
  Description of Artificial Sequence: Synthetic oligonucleotide
ggcuaguauagggcgagug

SEQ ID NO: 1898280 - RNA, 19 nt, Artificial Sequence
  Description of Artificial Sequence: Synthetic oligonucleotide
cucucggaggggagaggag

SEQ ID NO: 1898281 - RNA, 19 nt, Artificial Sequence
  Description of Artificial Sequence: Synthetic oligonucleotide
cuguauucgaagguagugu

SEQ ID NO: 1898282 - RNA, 19 nt, Artificial Sequence
  Description of Artificial Sequence: Synthetic oligonucleotide
caggguuacugcuuggcgu

SEQ ID NO: 1898283 - RNA, 19 nt, Artificial Sequence
  Description of Artificial Sequence: Synthetic oligonucleotide
ugcgggcaucaugucgagg

SEQ ID NO: 1898284 - RNA, 19 nt, Artificial Sequence
  Description of Artificial Sequence: Synthetic oligonucleotide
cucggaggggagaggagga

SEQ ID NO: 1898285 - RNA, 19 nt, Artificial Sequence
  Description of Artificial Sequence: Synthetic oligonucleotide
gcaaguagcucugcuccag

SEQ ID NO: 1898286 - RNA, 19 nt, Artificial Sequence
  Description of Artificial Sequence: Synthetic oligonucleotide
gccuucaaggccucuguuc

SEQ ID NO: 1898287 - RNA, 19 nt, Artificial Sequence
  Description of Artificial Sequence: Synthetic oligonucleotide
auagggcgagugacauucg

SEQ ID NO: 1898288 - RNA, 19 nt, Artificial Sequence
  Description of Artificial Sequence: Synthetic oligonucleotide
acacacacacacacacaca

SEQ ID NO: 1898289 - RNA, 19 nt, Artificial Sequence
  Description of Artificial Sequence: Synthetic oligonucleotide
guaggacgacaugcugggg

SEQ ID NO: 1898290 - RNA, 19 nt, Artificial Sequence
  Description of Artificial Sequence: Synthetic oligonucleotide
cgagugacauucgauugcg

SEQ ID NO: 1898291 - RNA, 19 nt, Artificial Sequence
  Description of Artificial Sequence: Synthetic oligonucleotide
cugucgcagucccuagcug

SEQ ID NO: 1898292 - RNA, 19 nt, Artificial Sequence
  Description of Artificial Sequence: Synthetic oligonucleotide
gagauccucgcgggcauuc

SEQ ID NO: 1898293 - RNA, 19 nt, Artificial Sequence
  Description of Artificial Sequence: Synthetic oligonucleotide
gacgacaugcuggggugca

SEQ ID NO: 1898294 - RNA, 19 nt, Artificial Sequence
  Description of Artificial Sequence: Synthetic oligonucleotide
cauggccggggaugagggc

SEQ ID NO: 1898295 - RNA, 19 nt, Artificial Sequence
  Description of Artificial Sequence: Synthetic oligonucleotide
guggaugcgcauggccggg

SEQ ID NO: 1898296 - RNA, 19 nt, Artificial Sequence
  Description of Artificial Sequence: Synthetic oligonucleotide
ccgcagggcuaguauaggg

SEQ ID NO: 1898297 - RNA, 19 nt, Artificial Sequence
  Description of Artificial Sequence: Synthetic oligonucleotide
ccauugaaauugaggacga

SEQ ID NO: 1898298 - RNA, 19 nt, Artificial Sequence
  Description of Artificial Sequence: Synthetic oligonucleotide
ccacugagagauccucgcg

SEQ ID NO: 1898299 - RNA, 19 nt, Artificial Sequence
  Description of Artificial Sequence: Synthetic oligonucleotide
guccugucgcagucccuag

SEQ ID NO: 1898300 - RNA, 19 nt, Artificial Sequence
  Description of Artificial Sequence: Synthetic oligonucleotide
ccaccuagaacugugcaca

SEQ ID NO: 1898301 - RNA, 19 nt, Artificial Sequence
  Description of Artificial Sequence: Synthetic oligonucleotide
ucgcgggcauucuggugca

SEQ ID NO: 1898302 - RNA, 19 nt, Artificial Sequence
  Description of Artificial Sequence: Synthetic oligonucleotide
acacagggcuuaauauccu

SEQ ID NO: 1898303 - RNA, 19 nt, Artificial Sequence
  Description of Artificial Sequence: Synthetic oligonucleotide
gaacuccaaugugccgcag

SEQ ID NO: 1898304 - RNA, 19 nt, Artificial Sequence
  Description of Artificial Sequence: Synthetic oligonucleotide
ccaggcaacuaagcaaggc

SEQ ID NO: 1898305 - RNA, 19 nt, Artificial Sequence
  Description of Artificial Sequence: Synthetic oligonucleotide
agccugcgggcaucauguc

SEQ ID NO: 1898306 - RNA, 19 nt, Artificial Sequence
  Description of Artificial Sequence: Synthetic oligonucleotide
agguaaggugaggcgccag

SEQ ID NO: 1898307 - RNA, 19 nt, Artificial Sequence
  Description of Artificial Sequence: Synthetic oligonucleotide
gagcaggccuucaaggccu

SEQ ID NO: 1898308 - RNA, 19 nt, Artificial Sequence
  Description of Artificial Sequence: Synthetic oligonucleotide
agagccgcuagcggagggu

SEQ ID NO: 1898309 - RNA, 19 nt, Artificial Sequence
  Description of Artificial Sequence: Synthetic oligonucleotide
cagcgaguaggacgacaug

SEQ ID NO: 1898310 - RNA, 19 nt, Artificial Sequence
  Description of Artificial Sequence: Synthetic oligonucleotide
acauaacacagggcuuaau

SEQ ID NO: 1898311 - RNA, 19 nt, Artificial Sequence
  Description of Artificial Sequence: Synthetic oligonucleotide
gcagaaucuccuacuggac

SEQ ID NO: 1898312 - RNA, 19 nt, Artificial Sequence
  Description of Artificial Sequence: Synthetic oligonucleotide
ggaugcgcauggccgggag

SEQ ID NO: 1898313 - RNA, 19 nt, Artificial Sequence
  Description of Artificial Sequence: Synthetic oligonucleotide
agggcgagugacauucgau

SEQ ID NO: 1898314 - RNA, 19 nt, Artificial Sequence
  Description of Artificial Sequence: Synthetic oligonucleotide
cugcgggcaucaugucgag

SEQ ID NO: 1898315 - RNA, 19 nt, Artificial Sequence
  Description of Artificial Sequence: Synthetic oligonucleotide
gagguaaggugaggcgcca

SEQ ID NO: 1898316 - RNA, 19 nt, Artificial Sequence
  Description of Artificial Sequence: Synthetic oligonucleotide
gcaacuaagcaaggcuuuc

SEQ ID NO: 1898317 - RNA, 19 nt, Artificial Sequence
  Description of Artificial Sequence: Synthetic oligonucleotide
caccgacgcccgcagcacc

SEQ ID NO: 1898318 - RNA, 19 nt, Artificial Sequence
  Description of Artificial Sequence: Synthetic oligonucleotide
ccaggcgaacuccaaugug

SEQ ID NO: 1898319 - RNA, 19 nt, Artificial Sequence
  Description of Artificial Sequence: Synthetic oligonucleotide
ggcaaacuuuaaaaguaua

SEQ ID NO: 1898320 - RNA, 19 nt, Artificial Sequence
  Description of Artificial Sequence: Synthetic oligonucleotide
gucacacacuggaguggag

SEQ ID NO: 1898321 - RNA, 19 nt, Artificial Sequence
  Description of Artificial Sequence: Synthetic oligonucleotide
cuagaacugugcacaguau

SEQ ID NO: 1898322 - RNA, 19 nt, Artificial Sequence
  Description of Artificial Sequence: Synthetic oligonucleotide
gcggaggguggaaagaaga

SEQ ID NO: 1898323 - RNA, 19 nt, Artificial Sequence
  Description of Artificial Sequence: Synthetic oligonucleotide
ggcaccuguauucgaaggu

SEQ ID NO: 1898324 - RNA, 19 nt, Artificial Sequence
  Description of Artificial Sequence: Synthetic oligonucleotide
acuaggcucaucgguucuu

SEQ ID NO: 1898325 - RNA, 19 nt, Artificial Sequence
  Description of Artificial Sequence: Synthetic oligonucleotide
uggaugcgcauggccggga

SEQ ID NO: 1898326 - RNA, 19 nt, Artificial Sequence
  Description of Artificial Sequence: Synthetic oligonucleotide
agauccucgcgggcauucu

SEQ ID NO: 1898327 - RNA, 19 nt, Artificial Sequence
  Description of Artificial Sequence: Synthetic oligonucleotide
agccgcuagcggagggugg

SEQ ID NO: 1898328 - RNA, 19 nt, Artificial Sequence
  Description of Artificial Sequence: Synthetic oligonucleotide
aggugguguggaugcgcau

SEQ ID NO: 1898329 - RNA, 19 nt, Artificial Sequence
  Description of Artificial Sequence: Synthetic oligonucleotide
aaugugccgcagggcuagu

SEQ ID NO: 1898330 - RNA, 19 nt, Artificial Sequence
  Description of Artificial Sequence: Synthetic oligonucleotide
caacuaagcaaggcuuucu

SEQ ID NO: 1898331 - RNA, 19 nt, Artificial Sequence
  Description of Artificial Sequence: Synthetic oligonucleotide
gugccgcagggcuaguaua

SEQ ID NO: 1898332 - RNA, 19 nt, Artificial Sequence
  Description of Artificial Sequence: Synthetic oligonucleotide
gugaguauacgaagaucau

SEQ ID NO: 1898333 - RNA, 19 nt, Artificial Sequence
  Description of Artificial Sequence: Synthetic oligonucleotide
gcuggccauauaaguggag

SEQ ID NO: 1898334 - RNA, 19 nt, Artificial Sequence
  Description of Artificial Sequence: Synthetic oligonucleotide
ugcgggcaccggacagcug

SEQ ID NO: 1898335 - RNA, 19 nt, Artificial Sequence
  Description of Artificial Sequence: Synthetic oligonucleotide
cgccaggcgaacuccaaug

SEQ ID NO: 1898336 - RNA, 19 nt, Artificial Sequence
  Description of Artificial Sequence: Synthetic oligonucleotide
cacaauacugagagccauu

SEQ ID NO: 1898337 - RNA, 19 nt, Artificial Sequence
  Description of Artificial Sequence: Synthetic oligonucleotide
cccuagcugccccucucgg

SEQ ID NO: 1898338 - RNA, 19 nt, Artificial Sequence
  Description of Artificial Sequence: Synthetic oligonucleotide
gcgggcauucuggugcaag

SEQ ID NO: 1898339 - RNA, 19 nt, Artificial Sequence
  Description of Artificial Sequence: Synthetic oligonucleotide
cccugaucagugaaugcaa

SEQ ID NO: 1898340 - RNA, 19 nt, Artificial Sequence
  Description of Artificial Sequence: Synthetic oligonucleotide
cggacagcuggccauauaa

SEQ ID NO: 1898341 - RNA, 19 nt, Artificial Sequence
  Description of Artificial Sequence: Synthetic oligonucleotide
gcaccuguauucgaaggua

SEQ ID NO: 1898342 - RNA, 19 nt, Artificial Sequence
  Description of Artificial Sequence: Synthetic oligonucleotide
gggcgagugacauucgauu

SEQ ID NO: 1898343 - RNA, 19 nt, Artificial Sequence
  Description of Artificial Sequence: Synthetic oligonucleotide
aggugaggcgccaggcgaa

SEQ ID NO: 1898344 - RNA, 19 nt, Artificial Sequence
  Description of Artificial Sequence: Synthetic oligonucleotide
cagacccugaucagugaau

SEQ ID NO: 1898345 - RNA, 19 nt, Artificial Sequence
  Description of Artificial Sequence: Synthetic oligonucleotide
cuuggcgucagggcaggcu

SEQ ID NO: 1898346 - RNA, 19 nt, Artificial Sequence
  Description of Artificial Sequence: Synthetic oligonucleotide
ggcucaucgguucuucauu

SEQ ID NO: 1898347 - RNA, 19 nt, Artificial Sequence
  Description of Artificial Sequence: Synthetic oligonucleotide
ggacgugguggugguggag

SEQ ID NO: 1898348 - RNA, 19 nt, Artificial Sequence
  Description of Artificial Sequence: Synthetic oligonucleotide
gcucaucgguucuucauuu

SEQ ID NO: 1898349 - RNA, 19 nt, Artificial Sequence
  Description of Artificial Sequence: Synthetic oligonucleotide
gcuuuuagcacugccuauu

SEQ ID NO: 1898350 - RNA, 19 nt, Artificial Sequence
  Description of Artificial Sequence: Synthetic oligonucleotide
gccaggcgaacuccaaugu

SEQ ID NO: 1898351 - RNA, 19 nt, Artificial Sequence
  Description of Artificial Sequence: Synthetic oligonucleotide
guauagggcgagugacauu

SEQ ID NO: 1898352 - RNA, 19 nt, Artificial Sequence
  Description of Artificial Sequence: Synthetic oligonucleotide
gcaccugcgggcaccggac

SEQ ID NO: 1898353 - RNA, 19 nt, Artificial Sequence
  Description of Artificial Sequence: Synthetic oligonucleotide
ccugcgggcaccggacagc

SEQ ID NO: 1898354 - RNA, 19 nt, Artificial Sequence
  Description of Artificial Sequence: Synthetic oligonucleotide
ggugaggcgccaggcgaac

SEQ ID NO: 1898355 - RNA, 19 nt, Artificial Sequence
  Description of Artificial Sequence: Synthetic oligonucleotide
cgcagucccuagcugcccc

SEQ ID NO: 1898356 - RNA, 19 nt, Artificial Sequence
  Description of Artificial Sequence: Synthetic oligonucleotide
cgggcaucaugucgaggcc

SEQ ID NO: 1898357 - RNA, 19 nt, Artificial Sequence
  Description of Artificial Sequence: Synthetic oligonucleotide
cugccccucucggagggga

SEQ ID NO: 1898358 - RNA, 19 nt, Artificial Sequence
  Description of Artificial Sequence: Synthetic oligonucleotide
gcuuaauauccuggcacau

SEQ ID NO: 1898359 - RNA, 19 nt, Artificial Sequence
  Description of Artificial Sequence: Synthetic oligonucleotide
ccagcgaguaggacgacau

SEQ ID NO: 1898360 - RNA, 19 nt, Artificial Sequence
  Description of Artificial Sequence: Synthetic oligonucleotide
accggacagcuggccauau

SEQ ID NO: 1898361 - RNA, 19 nt, Artificial Sequence
  Description of Artificial Sequence: Synthetic oligonucleotide
gcgcauggccgggagcacc

SEQ ID NO: 1898362 - RNA, 19 nt, Artificial Sequence
  Description of Artificial Sequence: Synthetic oligonucleotide
cgaacuccaaugugccgca

SEQ ID NO: 1898363 - RNA, 19 nt, Artificial Sequence
  Description of Artificial Sequence: Synthetic oligonucleotide
ccucgcgggcauucuggug

SEQ ID NO: 1898364 - RNA, 19 nt, Artificial Sequence
  Description of Artificial Sequence: Synthetic oligonucleotide
ccugucgcagucccuagcu

SEQ ID NO: 1898365 - RNA, 19 nt, Artificial Sequence
  Description of Artificial Sequence: Synthetic oligonucleotide
cuacuggaccaggcaacua

SEQ ID NO: 1898366 - RNA, 19 nt, Artificial Sequence
  Description of Artificial Sequence: Synthetic oligonucleotide
caccugcgggcaccggaca

SEQ ID NO: 1898367 - RNA, 19 nt, Artificial Sequence
  Description of Artificial Sequence: Synthetic oligonucleotide
gccgcuagcggagggugga

SEQ ID NO: 1898368 - RNA, 19 nt, Artificial Sequence
  Description of Artificial Sequence: Synthetic oligonucleotide
ccaaugugccgcagggcua

SEQ ID NO: 1898369 - RNA, 19 nt, Artificial Sequence
  Description of Artificial Sequence: Synthetic oligonucleotide
ccccucucggaggggagag

SEQ ID NO: 1898370 - RNA, 19 nt, Artificial Sequence
  Description of Artificial Sequence: Synthetic oligonucleotide
ggguuacugcuuggcguca

SEQ ID NO: 1898371 - RNA, 19 nt, Artificial Sequence
  Description of Artificial Sequence: Synthetic oligonucleotide
cuccagcgaguaggacgac

SEQ ID NO: 1898372 - RNA, 19 nt, Artificial Sequence
  Description of Artificial Sequence: Synthetic oligonucleotide
ccggcgccugcaucauagc

SEQ ID NO: 1898373 - RNA, 19 nt, Artificial Sequence
  Description of Artificial Sequence: Synthetic oligonucleotide
gcaccgacgcccgcagcac

SEQ ID NO: 1898374 - RNA, 19 nt, Artificial Sequence
  Description of Artificial Sequence: Synthetic oligonucleotide
cgcugcuacccgcucccgc

SEQ ID NO: 1898375 - RNA, 19 nt, Artificial Sequence
  Description of Artificial Sequence: Synthetic oligonucleotide
gcaccggacagcuggccau

SEQ ID NO: 1898376 - RNA, 19 nt, Artificial Sequence
  Description of Artificial Sequence: Synthetic oligonucleotide
ggaguggagugaugcugau

SEQ ID NO: 1898377 - RNA, 19 nt, Artificial Sequence
  Description of Artificial Sequence: Synthetic oligonucleotide
cggguuggggcgacaugug

SEQ ID NO: 1898378 - RNA, 19 nt, Artificial Sequence
  Description of Artificial Sequence: Synthetic oligonucleotide
cacacacaccacacaccuu

SEQ ID NO: 1898379 - RNA, 19 nt, Artificial Sequence
  Description of Artificial Sequence: Synthetic oligonucleotide
ccggguuggggcgacaugu

SEQ ID NO: 1898380 - RNA, 19 nt, Artificial Sequence
  Description of Artificial Sequence: Synthetic oligonucleotide
cuacccgcucccgcaccga

SEQ ID NO: 1898381 - RNA, 19 nt, Artificial Sequence
  Description of Artificial Sequence: Synthetic oligonucleotide
cugcgggcaccggacagcu

SEQ ID NO: 1898382 - RNA, 19 nt, Artificial Sequence
  Description of Artificial Sequence: Synthetic oligonucleotide
ccuacuggaccaggcaacu

SEQ ID NO: 1898383 - RNA, 19 nt, Artificial Sequence
  Description of Artificial Sequence: Synthetic oligonucleotide
cccucucggaggggagagg

SEQ ID NO: 1898384 - RNA, 19 nt, Artificial Sequence
  Description of Artificial Sequence: Synthetic oligonucleotide
cccggguuggggcgacaug

SEQ ID NO: 1898385 - RNA, 19 nt, Artificial Sequence
  Description of Artificial Sequence: Synthetic oligonucleotide
gccggggaugagggcacug

SEQ ID NO: 1898386 - RNA, 19 nt, Artificial Sequence
  Description of Artificial Sequence: Synthetic oligonucleotide
ggagcccggguuggggcga

SEQ ID NO: 1898387 - RNA, 19 nt, Artificial Sequence
  Description of Artificial Sequence: Synthetic oligonucleotide
caccggacagcuggccaua

SEQ ID NO: 1898388 - RNA, 19 nt, Artificial Sequence
  Description of Artificial Sequence: Synthetic oligonucleotide
cgcccgcagcaccugcggg

SEQ ID NO: 1898389 - RNA, 19 nt, Artificial Sequence
  Description of Artificial Sequence: Synthetic oligonucleotide
gugaggcgccaggcgaacu

SEQ ID NO: 1898390 - RNA, 19 nt, Artificial Sequence
  Description of Artificial Sequence: Synthetic oligonucleotide
cgacgcccgcagcaccugc

SEQ ID NO: 1898391 - RNA, 19 nt, Artificial Sequence
  Description of Artificial Sequence: Synthetic oligonucleotide
cgauugcgcucgccauggc

SEQ ID NO: 1898392 - RNA, 19 nt, Artificial Sequence
  Description of Artificial Sequence: Synthetic oligonucleotide
gcgucagggcaggcugcug

SEQ ID NO: 1898393 - RNA, 19 nt, Artificial Sequence
  Description of Artificial Sequence: Synthetic oligonucleotide
ggcgucagggcaggcugcu

SEQ ID NO: 1898394 - RNA, 19 nt, Artificial Sequence
  Description of Artificial Sequence: Synthetic oligonucleotide
agcccggguuggggcgaca

SEQ ID NO: 1898395 - RNA, 19 nt, Artificial Sequence
  Description of Artificial Sequence: Synthetic oligonucleotide
cgccugcaucauagccugc

SEQ ID NO: 1898396 - RNA, 19 nt, Artificial Sequence
  Description of Artificial Sequence: Synthetic oligonucleotide
ccgcugcuacccgcucccg

SEQ ID NO: 1898397 - RNA, 19 nt, Artificial Sequence
  Description of Artificial Sequence: Synthetic oligonucleotide
caccggcgccugcaucaua

SEQ ID NO: 1898398 - RNA, 19 nt, Artificial Sequence
  Description of Artificial Sequence: Synthetic oligonucleotide
ccgcaccgacgcccgcagc

SEQ ID NO: 1898399 - RNA, 19 nt, Artificial Sequence
  Description of Artificial Sequence: Synthetic oligonucleotide
gggcuaguauagggcgagu

SEQ ID NO: 1898400 - RNA, 19 nt, Artificial Sequence
  Description of Artificial Sequence: Synthetic oligonucleotide
ccggacagcuggccauaua

SEQ ID NO: 1898401 - RNA, 19 nt, Artificial Sequence
  Description of Artificial Sequence: Synthetic oligonucleotide
cgcuagcggaggguggaaa

SEQ ID NO: 1898402 - RNA, 19 nt, Artificial Sequence
  Description of Artificial Sequence: Synthetic oligonucleotide
gcccggguuggggcgacau

SEQ ID NO: 1898403 - RNA, 19 nt, Artificial Sequence
  Description of Artificial Sequence: Synthetic oligonucleotide
gcaccggcgccugcaucau

SEQ ID NO: 1898404 - RNA, 19 nt, Artificial Sequence
  Description of Artificial Sequence: Synthetic oligonucleotide
ccgcuagcggaggguggaa

SEQ ID NO: 1898405 - RNA, 19 nt, Artificial Sequence
  Description of Artificial Sequence: Synthetic oligonucleotide
ggccggggaugagggcacu

SEQ ID NO: 1898406 - RNA, 19 nt, Artificial Sequence
  Description of Artificial Sequence: Synthetic oligonucleotide
cauguugacaacuaguggg

SEQ ID NO: 1898407 - RNA, 19 nt, Artificial Sequence
  Description of Artificial Sequence: Synthetic oligonucleotide
auugauuggaccuuucgac

SEQ ID NO: 1898408 - RNA, 19 nt, Artificial Sequence
  Description of Artificial Sequence: Synthetic oligonucleotide
gaaaucaugguccacuucc

SEQ ID NO: 1898409 - RNA, 19 nt, Artificial Sequence
  Description of Artificial Sequence: Synthetic oligonucleotide
ucucuccuaaguaaaagcg

SEQ ID NO: 1898410 - RNA, 19 nt, Artificial Sequence
  Description of Artificial Sequence: Synthetic oligonucleotide
cuagagucuuaaaagaugg

SEQ ID NO: 1898411 - RNA, 19 nt, Artificial Sequence
  Description of Artificial Sequence: Synthetic oligonucleotide
uagaguaagacucccauug

SEQ ID NO: 1898412 - RNA, 19 nt, Artificial Sequence
  Description of Artificial Sequence: Synthetic oligonucleotide
ucuccauuugucuagauga

SEQ ID NO: 1898413 - RNA, 19 nt, Artificial Sequence
  Description of Artificial Sequence: Synthetic oligonucleotide
uguuguagucauaauagcc

SEQ ID NO: 1898414 - RNA, 19 nt, Artificial Sequence
  Description of Artificial Sequence: Synthetic oligonucleotide
ucgaaaauagacaccauug

SEQ ID NO: 1898415 - RNA, 19 nt, Artificial Sequence
  Description of Artificial Sequence: Synthetic oligonucleotide
acucuuguaacuucucucc

SEQ ID NO: 1898416 - RNA, 19 nt, Artificial Sequence
  Description of Artificial Sequence: Synthetic oligonucleotide
aaaauagacaccauugaug

SEQ ID NO: 1898417 - RNA, 19 nt, Artificial Sequence
  Description of Artificial Sequence: Synthetic oligonucleotide
uauuguucaucccaugucc

SEQ ID NO: 1898418 - RNA, 19 nt, Artificial Sequence
  Description of Artificial Sequence: Synthetic oligonucleotide
aagugcacauaccuuuucc

SEQ ID NO: 1898419 - RNA, 19 nt, Artificial Sequence
  Description of Artificial Sequence: Synthetic oligonucleotide
auaucagacagacuuuugg

SEQ ID NO: 1898420 - RNA, 19 nt, Artificial Sequence
  Description of Artificial Sequence: Synthetic oligonucleotide
aguaaaagcgguugaagag

SEQ ID NO: 1898421 - RNA, 19 nt, Artificial Sequence
  Description of Artificial Sequence: Synthetic oligonucleotide
uacauguugacaacuagug

SEQ ID NO: 1898422 - RNA, 19 nt, Artificial Sequence
  Description of Artificial Sequence: Synthetic oligonucleotide
acuguuuuggaugaugggc

SEQ ID NO: 1898423 - RNA, 19 nt, Artificial Sequence
  Description of Artificial Sequence: Synthetic oligonucleotide
ucuauguuuauccaaggaa

SEQ ID NO: 1898424 - RNA, 19 nt, Artificial Sequence
  Description of Artificial Sequence: Synthetic oligonucleotide
aguccaugaccacugaagc

SEQ ID NO: 1898425 - RNA, 19 nt, Artificial Sequence
  Description of Artificial Sequence: Synthetic oligonucleotide
uuuuaccuggacuucgugg

SEQ ID NO: 1898426 - RNA, 19 nt, Artificial Sequence
  Description of Artificial Sequence: Synthetic oligonucleotide
aaaccaaccuucauccucc

SEQ ID NO: 1898427 - RNA, 19 nt, Artificial Sequence
  Description of Artificial Sequence: Synthetic oligonucleotide
cuagaugaagugaugaaac

SEQ ID NO: 1898428 - RNA, 19 nt, Artificial Sequence
  Description of Artificial Sequence: Synthetic oligonucleotide
agugaugaaacgugucacc

SEQ ID NO: 1898429 - RNA, 19 nt, Artificial Sequence
  Description of Artificial Sequence: Synthetic oligonucleotide
aagacuaccuguuccccac

SEQ ID NO: 1898430 - RNA, 19 nt, Artificial Sequence
  Description of Artificial Sequence: Synthetic oligonucleotide
uccuccaucccauaagacg

SEQ ID NO: 1898431 - RNA, 19 nt, Artificial Sequence
  Description of Artificial Sequence: Synthetic oligonucleotide
uuuccauuggccuggaucu

SEQ ID NO: 1898432 - RNA, 19 nt, Artificial Sequence
  Description of Artificial Sequence: Synthetic oligonucleotide
uugauuggaccuuucgacg

SEQ ID NO: 1898433 - RNA, 19 nt, Artificial Sequence
  Description of Artificial Sequence: Synthetic oligonucleotide
uguaacuucucuccuaagu

SEQ ID NO: 1898434 - RNA, 19 nt, Artificial Sequence
  Description of Artificial Sequence: Synthetic oligonucleotide
guaagacucccauugauug

SEQ ID NO: 1898435 - RNA, 19 nt, Artificial Sequence
  Description of Artificial Sequence: Synthetic oligonucleotide
uggaugaugggcuacaauc

SEQ ID NO: 1898436 - RNA, 19 nt, Artificial Sequence
  Description of Artificial Sequence: Synthetic oligonucleotide
ucgacgaagacccuggaac

SEQ ID NO: 1898437 - RNA, 19 nt, Artificial Sequence
  Description of Artificial Sequence: Synthetic oligonucleotide
uagaugaagugaugaaacg

SEQ ID NO: 1898438 - RNA, 19 nt, Artificial Sequence
  Description of Artificial Sequence: Synthetic oligonucleotide
aaggaggccaguccugggc

SEQ ID NO: 1898439 - RNA, 19 nt, Artificial Sequence
  Description of Artificial Sequence: Synthetic oligonucleotide
uuuaccuggacuucgugga

SEQ ID NO: 1898440 - RNA, 19 nt, Artificial Sequence
  Description of Artificial Sequence: Synthetic oligonucleotide
aacuguuuuggaugauggg

SEQ ID NO: 1898441 - RNA, 19 nt, Artificial Sequence
  Description of Artificial Sequence: Synthetic oligonucleotide
ucuccuaaguaaaagcggu

SEQ ID NO: 1898442 - RNA, 19 nt, Artificial Sequence
  Description of Artificial Sequence: Synthetic oligonucleotide
aaagcgguugaagaggaag

SEQ ID NO: 1898443 - RNA, 19 nt, Artificial Sequence
  Description of Artificial Sequence: Synthetic oligonucleotide
gaccuuucgacgaagaccc

SEQ ID NO: 1898444 - RNA, 19 nt, Artificial Sequence
  Description of Artificial Sequence: Synthetic oligonucleotide
gaugaagugaugaaacgug

SEQ ID NO: 1898445 - RNA, 19 nt, Artificial Sequence
  Description of Artificial Sequence: Synthetic oligonucleotide
uaauagccagcccaguugc

SEQ ID NO: 1898446 - RNA, 19 nt, Artificial Sequence
  Description of Artificial Sequence: Synthetic oligonucleotide
auagacaccauugaugucu

SEQ ID NO: 1898447 - RNA, 19 nt, Artificial Sequence
  Description of Artificial Sequence: Synthetic oligonucleotide
guaaaagcgguugaagagg

SEQ ID NO: 1898448 - RNA, 19 nt, Artificial Sequence
  Description of Artificial Sequence: Synthetic oligonucleotide
uucucuccuaaguaaaagc

SEQ ID NO: 1898449 - RNA, 19 nt, Artificial Sequence
  Description of Artificial Sequence: Synthetic oligonucleotide
auaauagccagcccaguug

SEQ ID NO: 1898450 - RNA, 19 nt, Artificial Sequence
  Description of Artificial Sequence: Synthetic oligonucleotide
ucaucccauguccagagcc

SEQ ID NO: 1898451 - RNA, 19 nt, Artificial Sequence
  Description of Artificial Sequence: Synthetic oligonucleotide
aaacgugucaccucucccu

SEQ ID NO: 1898452 - RNA, 19 nt, Artificial Sequence
  Description of Artificial Sequence: Synthetic oligonucleotide
aucacuacagcacacucca

SEQ ID NO: 1898453 - RNA, 19 nt, Artificial Sequence
  Description of Artificial Sequence: Synthetic oligonucleotide
acauguugacaacuagugg

SEQ ID NO: 1898454 - RNA, 19 nt, Artificial Sequence
  Description of Artificial Sequence: Synthetic oligonucleotide
cacucucuggaccaaaugg

SEQ ID NO: 1898455 - RNA, 19 nt, Artificial Sequence
  Description of Artificial Sequence: Synthetic oligonucleotide
gacauaguccuggagagag

SEQ ID NO: 1898456 - RNA, 19 nt, Artificial Sequence
  Description of Artificial Sequence: Synthetic oligonucleotide
cuucccgucgaaaauagac

SEQ ID NO: 1898457 - RNA, 19 nt, Artificial Sequence
  Description of Artificial Sequence: Synthetic oligonucleotide
uaaaagcgguugaagagga

SEQ ID NO: 1898458 - RNA, 19 nt, Artificial Sequence
  Description of Artificial Sequence: Synthetic oligonucleotide
uuaucacuuuccauuggcc

SEQ ID NO: 1898459 - RNA, 19 nt, Artificial Sequence
  Description of Artificial Sequence: Synthetic oligonucleotide
aguacauguugacaacuag

SEQ ID NO: 1898460 - RNA, 19 nt, Artificial Sequence
  Description of Artificial Sequence: Synthetic oligonucleotide
uucuauguuuauccaagga

SEQ ID NO: 1898461 - RNA, 19 nt, Artificial Sequence
  Description of Artificial Sequence: Synthetic oligonucleotide
uuuauccaaggaaacuugu

SEQ ID NO: 1898462 - RNA, 19 nt, Artificial Sequence
  Description of Artificial Sequence: Synthetic oligonucleotide
cucuccuaaguaaaagcgg

SEQ ID NO: 1898463 - RNA, 19 nt, Artificial Sequence
  Description of Artificial Sequence: Synthetic oligonucleotide
uuaaaagauggcacucucu

SEQ ID NO: 1898464 - RNA, 19 nt, Artificial Sequence
  Description of Artificial Sequence: Synthetic oligonucleotide
guugacaacuagugggugg

SEQ ID NO: 1898465 - RNA, 19 nt, Artificial Sequence
  Description of Artificial Sequence: Synthetic oligonucleotide
gaagugaugaaacguguca

SEQ ID NO: 1898466 - RNA, 19 nt, Artificial Sequence
  Description of Artificial Sequence: Synthetic oligonucleotide
uaagacucccauugauugg

SEQ ID NO: 1898467 - RNA, 19 nt, Artificial Sequence
  Description of Artificial Sequence: Synthetic oligonucleotide
guagucauaauagccagcc

SEQ ID NO: 1898468 - RNA, 19 nt, Artificial Sequence
  Description of Artificial Sequence: Synthetic oligonucleotide
ugaacuggcccucuaguac

SEQ ID NO: 1898469 - RNA, 19 nt, Artificial Sequence
  Description of Artificial Sequence: Synthetic oligonucleotide
aaguccaugaccacugaag

SEQ ID NO: 1898470 - RNA, 19 nt, Artificial Sequence
  Description of Artificial Sequence: Synthetic oligonucleotide
ugccuaauccuucccgucg

SEQ ID NO: 1898471 - RNA, 19 nt, Artificial Sequence
  Description of Artificial Sequence: Synthetic oligonucleotide
uaucacuuuccauuggccu

SEQ ID NO: 1898472 - RNA, 19 nt, Artificial Sequence
  Description of Artificial Sequence: Synthetic oligonucleotide
uugacaacuaguggguggg

SEQ ID NO: 1898473 - RNA, 19 nt, Artificial Sequence
  Description of Artificial Sequence: Synthetic oligonucleotide
ugaugggcuacaaucaguc

SEQ ID NO: 1898474 - RNA, 19 nt, Artificial Sequence
  Description of Artificial Sequence: Synthetic oligonucleotide
guucuggaagaaaucaugg

SEQ ID NO: 1898475 - RNA, 19 nt, Artificial Sequence
  Description of Artificial Sequence: Synthetic oligonucleotide
aauaccagccagcucugca

SEQ ID NO: 1898476 - RNA, 19 nt, Artificial Sequence
  Description of Artificial Sequence: Synthetic oligonucleotide
agauggcacucucuggacc

SEQ ID NO: 1898477 - RNA, 19 nt, Artificial Sequence
  Description of Artificial Sequence: Synthetic oligonucleotide
aaucaugguccacuuccag

SEQ ID NO: 1898478 - RNA, 19 nt, Artificial Sequence
  Description of Artificial Sequence: Synthetic oligonucleotide
gaggauggugaagaaaggg

SEQ ID NO: 1898479 - RNA, 19 nt, Artificial Sequence
  Description of Artificial Sequence: Synthetic oligonucleotide
cuuucgacgaagacccugg

SEQ ID NO: 1898480 - RNA, 19 nt, Artificial Sequence
  Description of Artificial Sequence: Synthetic oligonucleotide
aaagggaugcagccccgac

SEQ ID NO: 1898481 - RNA, 19 nt, Artificial Sequence
  Description of Artificial Sequence: Synthetic oligonucleotide
ucguggauccuucucaaga

SEQ ID NO: 1898482 - RNA, 19 nt, Artificial Sequence
  Description of Artificial Sequence: Synthetic oligonucleotide
ucauccuccaucccauaag

SEQ ID NO: 1898483 - RNA, 19 nt, Artificial Sequence
  Description of Artificial Sequence: Synthetic oligonucleotide
ugaaacgugucaccucucc

SEQ ID NO: 1898484 - RNA, 19 nt, Artificial Sequence
  Description of Artificial Sequence: Synthetic oligonucleotide
ugcucaggagauaucagac

SEQ ID NO: 1898485 - RNA, 19 nt, Artificial Sequence
  Description of Artificial Sequence: Synthetic oligonucleotide
auauuguacucuuguaacu

SEQ ID NO: 1898486 - RNA, 19 nt, Artificial Sequence
  Description of Artificial Sequence: Synthetic oligonucleotide
cuauguuuauccaaggaaa

SEQ ID NO: 1898487 - RNA, 19 nt, Artificial Sequence
  Description of Artificial Sequence: Synthetic oligonucleotide
accuggacuucguggaucc

SEQ ID NO: 1898488 - RNA, 19 nt, Artificial Sequence
  Description of Artificial Sequence: Synthetic oligonucleotide
ucagacagacuuuuggcuc

SEQ ID NO: 1898489 - RNA, 19 nt, Artificial Sequence
  Description of Artificial Sequence: Synthetic oligonucleotide
caucaaaccaaccuucauc

SEQ ID NO: 1898490 - RNA, 19 nt, Artificial Sequence
  Description of Artificial Sequence: Synthetic oligonucleotide
aucagacagacuuuuggcu

SEQ ID NO: 1898491 - RNA, 19 nt, Artificial Sequence
  Description of Artificial Sequence: Synthetic oligonucleotide
ugauuggaccuuucgacga

SEQ ID NO: 1898492 - RNA, 19 nt, Artificial Sequence
  Description of Artificial Sequence: Synthetic oligonucleotide
uggucaaaaguguuguagu

SEQ ID NO: 1898493 - RNA, 19 nt, Artificial Sequence
  Description of Artificial Sequence: Synthetic oligonucleotide
uccuaaguaaaagcgguug

SEQ ID NO: 1898494 - RNA, 19 nt, Artificial Sequence
  Description of Artificial Sequence: Synthetic oligonucleotide
cauuugucuagaugaagug

SEQ ID NO: 1898495 - RNA, 19 nt, Artificial Sequence
  Description of Artificial Sequence: Synthetic oligonucleotide
uguuuauccaaggaaacuu

SEQ ID NO: 1898496 - RNA, 19 nt, Artificial Sequence
  Description of Artificial Sequence: Synthetic oligonucleotide
ugcggcauugaucacuaca

SEQ ID NO: 1898497 - RNA, 19 nt, Artificial Sequence
  Description of Artificial Sequence: Synthetic oligonucleotide
gaacuggcccucuaguacc

SEQ ID NO: 1898498 - RNA, 19 nt, Artificial Sequence
  Description of Artificial Sequence: Synthetic oligonucleotide
acuacagcacacuccacug

SEQ ID NO: 1898499 - RNA, 19 nt, Artificial Sequence
  Description of Artificial Sequence: Synthetic oligonucleotide
uguagucauaauagccagc

SEQ ID NO: 1898500 - RNA, 19 nt, Artificial Sequence
  Description of Artificial Sequence: Synthetic oligonucleotide
uucccgucgaaaauagaca

SEQ ID NO: 1898501 - RNA, 19 nt, Artificial Sequence
  Description of Artificial Sequence: Synthetic oligonucleotide
accuguuccccacuugugg

SEQ ID NO: 1898502 - RNA, 19 nt, Artificial Sequence
  Description of Artificial Sequence: Synthetic oligonucleotide
uaauccuucccgucgaaaa

SEQ ID NO: 1898503 - RNA, 19 nt, Artificial Sequence
  Description of Artificial Sequence: Synthetic oligonucleotide
cucucuggaccaaaugggg

SEQ ID NO: 1898504 - RNA, 19 nt, Artificial Sequence
  Description of Artificial Sequence: Synthetic oligonucleotide
ucccgucgaaaauagacac

SEQ ID NO: 1898505 - RNA, 19 nt, Artificial Sequence
  Description of Artificial Sequence: Synthetic oligonucleotide
aguaccauuucugccacag

SEQ ID NO: 1898506 - RNA, 19 nt, Artificial Sequence
  Description of Artificial Sequence: Synthetic oligonucleotide
cagacuuuuggcuccuucc

SEQ ID NO: 1898507 - RNA, 19 nt, Artificial Sequence
  Description of Artificial Sequence: Synthetic oligonucleotide
ucccauaagacgccagagc

SEQ ID NO: 1898508 - RNA, 19 nt, Artificial Sequence
  Description of Artificial Sequence: Synthetic oligonucleotide
agaugaagugaugaaacgu

SEQ ID NO: 1898509 - RNA, 19 nt, Artificial Sequence
  Description of Artificial Sequence: Synthetic oligonucleotide
acaaucagucccagggucc

SEQ ID NO: 1898510 - RNA, 19 nt, Artificial Sequence
  Description of Artificial Sequence: Synthetic oligonucleotide
gaugaaacgugucaccucu

SEQ ID NO: 1898511 - RNA, 19 nt, Artificial Sequence
  Description of Artificial Sequence: Synthetic oligonucleotide
aucucugugccuauuguuc

SEQ ID NO: 1898512 - RNA, 19 nt, Artificial Sequence
  Description of Artificial Sequence: Synthetic oligonucleotide
uaggacgccagcagaacug

SEQ ID NO: 1898513 - RNA, 19 nt, Artificial Sequence
  Description of Artificial Sequence: Synthetic oligonucleotide
aaugccaggugcaugcuga

SEQ ID NO: 1898514 - RNA, 19 nt, Artificial Sequence
  Description of Artificial Sequence: Synthetic oligonucleotide
ggagauaucagacagacuu

SEQ ID NO: 1898515 - RNA, 19 nt, Artificial Sequence
  Description of Artificial Sequence: Synthetic oligonucleotide
gaugucugcaaccaguggu

SEQ ID NO: 1898516 - RNA, 19 nt, Artificial Sequence
  Description of Artificial Sequence: Synthetic oligonucleotide
agugcacauaccuuuuccu

SEQ ID NO: 1898517 - RNA, 19 nt, Artificial Sequence
  Description of Artificial Sequence: Synthetic oligonucleotide
ucccuucccaauaccagcc

SEQ ID NO: 1898518 - RNA, 19 nt, Artificial Sequence
  Description of Artificial Sequence: Synthetic oligonucleotide
auuugucuagaugaaguga

SEQ ID NO: 1898519 - RNA, 19 nt, Artificial Sequence
  Description of Artificial Sequence: Synthetic oligonucleotide
gaaaauagacaccauugau

SEQ ID NO: 1898520 - RNA, 19 nt, Artificial Sequence
  Description of Artificial Sequence: Synthetic oligonucleotide
gaucacuacagcacacucc

SEQ ID NO: 1898521 - RNA, 19 nt, Artificial Sequence
  Description of Artificial Sequence: Synthetic oligonucleotide
ugaucacuacagcacacuc

SEQ ID NO: 1898522 - RNA, 19 nt, Artificial Sequence
  Description of Artificial Sequence: Synthetic oligonucleotide
uccuucccgucgaaaauag

SEQ ID NO: 1898523 - RNA, 19 nt, Artificial Sequence
  Description of Artificial Sequence: Synthetic oligonucleotide
cauaagacgccagagccac

SEQ ID NO: 1898524 - RNA, 19 nt, Artificial Sequence
  Description of Artificial Sequence: Synthetic oligonucleotide
uuggccuggaucucugugc

SEQ ID NO: 1898525 - RNA, 19 nt, Artificial Sequence
  Description of Artificial Sequence: Synthetic oligonucleotide
caggagauaucagacagac

SEQ ID NO: 1898526 - RNA, 19 nt, Artificial Sequence
  Description of Artificial Sequence: Synthetic oligonucleotide
gaaacgugucaccucuccc

SEQ ID NO: 1898527 - RNA, 19 nt, Artificial Sequence
  Description of Artificial Sequence: Synthetic oligonucleotide
ucugcaaccaguggugucu

SEQ ID NO: 1898528 - RNA, 19 nt, Artificial Sequence
  Description of Artificial Sequence: Synthetic oligonucleotide
cuauuguucaucccauguc

SEQ ID NO: 1898529 - RNA, 19 nt, Artificial Sequence
  Description of Artificial Sequence: Synthetic oligonucleotide
guguuguagucauaauagc

SEQ ID NO: 1898530 - RNA, 19 nt, Artificial Sequence
  Description of Artificial Sequence: Synthetic oligonucleotide
uccauuugucuagaugaag

SEQ ID NO: 1898531 - RNA, 19 nt, Artificial Sequence
  Description of Artificial Sequence: Synthetic oligonucleotide
cagacagacuuuuggcucc

SEQ ID NO: 1898532 - RNA, 19 nt, Artificial Sequence
  Description of Artificial Sequence: Synthetic oligonucleotide
caccuagguaguuacugcc

SEQ ID NO: 1898533 - RNA, 19 nt, Artificial Sequence
  Description of Artificial Sequence: Synthetic oligonucleotide
acacuccacuggcugauac

SEQ ID NO: 1898534 - RNA, 19 nt, Artificial Sequence
  Description of Artificial Sequence: Synthetic oligonucleotide
auugaugucugcaaccagu

SEQ ID NO: 1898535 - RNA, 19 nt, Artificial Sequence
  Description of Artificial Sequence: Synthetic oligonucleotide
uugucuagaugaagugaug

SEQ ID NO: 1898536 - RNA, 19 nt, Artificial Sequence
  Description of Artificial Sequence: Synthetic oligonucleotide
ucgaccaaugccaggugca

SEQ ID NO: 1898537 - RNA, 19 nt, Artificial Sequence
  Description of Artificial Sequence: Synthetic oligonucleotide
ugcaacuugcccagaccag

SEQ ID NO: 1898538 - RNA, 19 nt, Artificial Sequence
  Description of Artificial Sequence: Synthetic oligonucleotide
uucugccacagcucgacca

SEQ ID NO: 1898539 - RNA, 19 nt, Artificial Sequence
  Description of Artificial Sequence: Synthetic oligonucleotide
accaaauggggccacacuu

SEQ ID NO: 1898540 - RNA, 19 nt, Artificial Sequence
  Description of Artificial Sequence: Synthetic oligonucleotide
ugccauaagugcacauacc

SEQ ID NO: 1898541 - RNA, 19 nt, Artificial Sequence
  Description of Artificial Sequence: Synthetic oligonucleotide
accacugaagcccguagca

SEQ ID NO: 1898542 - RNA, 19 nt, Artificial Sequence
  Description of Artificial Sequence: Synthetic oligonucleotide
agacuuuuggcuccuuccu

SEQ ID NO: 1898543 - RNA, 19 nt, Artificial Sequence
  Description of Artificial Sequence: Synthetic oligonucleotide
gugccauaagugcacauac

SEQ ID NO: 1898544 - RNA, 19 nt, Artificial Sequence
  Description of Artificial Sequence: Synthetic oligonucleotide
ccuccaucccauaagacgc

SEQ ID NO: 1898545 - RNA, 19 nt, Artificial Sequence
  Description of Artificial Sequence: Synthetic oligonucleotide
guggucuccauuugucuag

SEQ ID NO: 1898546 - RNA, 19 nt, Artificial Sequence
  Description of Artificial Sequence: Synthetic oligonucleotide
cacagcucgaccaaugcca

SEQ ID NO: 1898547 - RNA, 19 nt, Artificial Sequence
  Description of Artificial Sequence: Synthetic oligonucleotide
cccauaagacgccagagcc

SEQ ID NO: 1898548 - RNA, 19 nt, Artificial Sequence
  Description of Artificial Sequence: Synthetic oligonucleotide
uagucauaauagccagccc

SEQ ID NO: 1898549 - RNA, 19 nt, Artificial Sequence
  Description of Artificial Sequence: Synthetic oligonucleotide
cuucucuccuaaguaaaag

SEQ ID NO: 1898550 - RNA, 19 nt, Artificial Sequence
  Description of Artificial Sequence: Synthetic oligonucleotide
uucauccuccaucccauaa

SEQ ID NO: 1898551 - RNA, 19 nt, Artificial Sequence
  Description of Artificial Sequence: Synthetic oligonucleotide
uuuuggaugaugggcuaca

SEQ ID NO: 1898552 - RNA, 19 nt, Artificial Sequence
  Description of Artificial Sequence: Synthetic oligonucleotide
cauugauuggaccuuucga

SEQ ID NO: 1898553 - RNA, 19 nt, Artificial Sequence
  Description of Artificial Sequence: Synthetic oligonucleotide
ugugccuauuguucauccc

SEQ ID NO: 1898554 - RNA, 19 nt, Artificial Sequence
  Description of Artificial Sequence: Synthetic oligonucleotide
agaguaagacucccauuga

SEQ ID NO: 1898555 - RNA, 19 nt, Artificial Sequence
  Description of Artificial Sequence: Synthetic oligonucleotide
gauaucagacagacuuuug

SEQ ID NO: 1898556 - RNA, 19 nt, Artificial Sequence
  Description of Artificial Sequence: Synthetic oligonucleotide
auguuuauccaaggaaacu

SEQ ID NO: 1898557 - RNA, 19 nt, Artificial Sequence
  Description of Artificial Sequence: Synthetic oligonucleotide
agcaaaguacauguugaca

SEQ ID NO: 1898558 - RNA, 19 nt, Artificial Sequence
  Description of Artificial Sequence: Synthetic oligonucleotide
caaauggggccacacuuug

SEQ ID NO: 1898559 - RNA, 19 nt, Artificial Sequence
  Description of Artificial Sequence: Synthetic oligonucleotide
uuguucuguagcugcucag

SEQ ID NO: 1898560 - RNA, 19 nt, Artificial Sequence
  Description of Artificial Sequence: Synthetic oligonucleotide
uguucaucccauguccaga

SEQ ID NO: 1898561 - RNA, 19 nt, Artificial Sequence
  Description of Artificial Sequence: Synthetic oligonucleotide
gugccuauuguucauccca

SEQ ID NO: 1898562 - RNA, 19 nt, Artificial Sequence
  Description of Artificial Sequence: Synthetic oligonucleotide
ucccugguagaguaagacu

SEQ ID NO: 1898563 - RNA, 19 nt, Artificial Sequence
  Description of Artificial Sequence: Synthetic oligonucleotide
cucgaccaaugccaggugc

SEQ ID NO: 1898564 - RNA, 19 nt, Artificial Sequence
  Description of Artificial Sequence: Synthetic oligonucleotide
gcuccugcggcauugauca

SEQ ID NO: 1898565 - RNA, 19 nt, Artificial Sequence
  Description of Artificial Sequence: Synthetic oligonucleotide
uggacuucguggauccuuc

SEQ ID NO: 1898566 - RNA, 19 nt, Artificial Sequence
  Description of Artificial Sequence: Synthetic oligonucleotide
aaaucaugguccacuucca

SEQ ID NO: 1898567 - RNA, 19 nt, Artificial Sequence
  Description of Artificial Sequence: Synthetic oligonucleotide
cucacaggauauuguacuc

SEQ ID NO: 1898568 - RNA, 19 nt, Artificial Sequence
  Description of Artificial Sequence: Synthetic oligonucleotide
gacucccauugauuggacc

SEQ ID NO: 1898569 - RNA, 19 nt, Artificial Sequence
  Description of Artificial Sequence: Synthetic oligonucleotide
caacuugcccagaccaggc

SEQ ID NO: 1898570 - RNA, 19 nt, Artificial Sequence
  Description of Artificial Sequence: Synthetic oligonucleotide
uguugacaacuagugggug

SEQ ID NO: 1898571 - RNA, 19 nt, Artificial Sequence
  Description of Artificial Sequence: Synthetic oligonucleotide
cagggucccauuuuaucac

SEQ ID NO: 1898572 - RNA, 19 nt, Artificial Sequence
  Description of Artificial Sequence: Synthetic oligonucleotide
gaaaaguggccuggcuuag

SEQ ID NO: 1898573 - RNA, 19 nt, Artificial Sequence
  Description of Artificial Sequence: Synthetic oligonucleotide
uaagacgccagagccacuc

SEQ ID NO: 1898574 - RNA, 19 nt, Artificial Sequence
  Description of Artificial Sequence: Synthetic oligonucleotide
ggagagaguuuucacacuc

SEQ ID NO: 1898575 - RNA, 19 nt, Artificial Sequence
  Description of Artificial Sequence: Synthetic oligonucleotide
uuggaccuuucgacgaaga

SEQ ID NO: 1898576 - RNA, 19 nt, Artificial Sequence
  Description of Artificial Sequence: Synthetic oligonucleotide
ggaccuuucgacgaagacc

SEQ ID NO: 1898577 - RNA, 19 nt, Artificial Sequence
  Description of Artificial Sequence: Synthetic oligonucleotide
gaagcccguagcaaaguac

SEQ ID NO: 1898578 - RNA, 19 nt, Artificial Sequence
  Description of Artificial Sequence: Synthetic oligonucleotide
cauaagugcacauaccuuu

SEQ ID NO: 1898579 - RNA, 19 nt, Artificial Sequence
  Description of Artificial Sequence: Synthetic oligonucleotide
ggggcagugccauaagugc

SEQ ID NO: 1898580 - RNA, 19 nt, Artificial Sequence
  Description of Artificial Sequence: Synthetic oligonucleotide
ugccuauuguucaucccau

SEQ ID NO: 1898581 - RNA, 19 nt, Artificial Sequence
  Description of Artificial Sequence: Synthetic oligonucleotide
cacuuccagauuuguuggg

SEQ ID NO: 1898582 - RNA, 19 nt, Artificial Sequence
  Description of Artificial Sequence: Synthetic oligonucleotide
cccugguagaguaagacuc

SEQ ID NO: 1898583 - RNA, 19 nt, Artificial Sequence
  Description of Artificial Sequence: Synthetic oligonucleotide
agauaucagacagacuuuu

SEQ ID NO: 1898584 - RNA, 19 nt, Artificial Sequence
  Description of Artificial Sequence: Synthetic oligonucleotide
augcagccccgacauaguc

SEQ ID NO: 1898585 - RNA, 19 nt, Artificial Sequence
  Description of Artificial Sequence: Synthetic oligonucleotide
cauugaugucugcaaccag

SEQ ID NO: 1898586 - RNA, 19 nt, Artificial Sequence
  Description of Artificial Sequence: Synthetic oligonucleotide
auaccagccagcucugcaa

SEQ ID NO: 1898587 - RNA, 19 nt, Artificial Sequence
  Description of Artificial Sequence: Synthetic oligonucleotide
augaagugaugaaacgugu

SEQ ID NO: 1898588 - RNA, 19 nt, Artificial Sequence
  Description of Artificial Sequence: Synthetic oligonucleotide
uucgacgaagacccuggaa

SEQ ID NO: 1898589 - RNA, 19 nt, Artificial Sequence
  Description of Artificial Sequence: Synthetic oligonucleotide
uaccuguuccccacuugug

SEQ ID NO: 1898590 - RNA, 19 nt, Artificial Sequence
  Description of Artificial Sequence: Synthetic oligonucleotide
agcucgaccaaugccaggu

SEQ ID NO: 1898591 - RNA, 19 nt, Artificial Sequence
  Description of Artificial Sequence: Synthetic oligonucleotide
aucccauaagacgccagag

SEQ ID NO: 1898592 - RNA, 19 nt, Artificial Sequence
  Description of Artificial Sequence: Synthetic oligonucleotide
uggagagaguuuucacacu

SEQ ID NO: 1898593 - RNA, 19 nt, Artificial Sequence
  Description of Artificial Sequence: Synthetic oligonucleotide
acuaccuguuccccacuug

SEQ ID NO: 1898594 - RNA, 19 nt, Artificial Sequence
  Description of Artificial Sequence: Synthetic oligonucleotide
ggaugcagccccgacauag

SEQ ID NO: 1898595 - RNA, 19 nt, Artificial Sequence
  Description of Artificial Sequence: Synthetic oligonucleotide
ugguccacuuccagauuug

SEQ ID NO: 1898596 - RNA, 19 nt, Artificial Sequence
  Description of Artificial Sequence: Synthetic oligonucleotide
cugcaacuugcccagacca

SEQ ID NO: 1898597 - RNA, 19 nt, Artificial Sequence
  Description of Artificial Sequence: Synthetic oligonucleotide
auggggccacacuuuguuc

SEQ ID NO: 1898598 - RNA, 19 nt, Artificial Sequence
  Description of Artificial Sequence: Synthetic oligonucleotide
aggauauuguacucuugua

SEQ ID NO: 1898599 - RNA, 19 nt, Artificial Sequence
  Description of Artificial Sequence: Synthetic oligonucleotide
auguugacaacuagugggu

SEQ ID NO: 1898600 - RNA, 19 nt, Artificial Sequence
  Description of Artificial Sequence: Synthetic oligonucleotide
ugccuaggacgccagcaga

SEQ ID NO: 1898601 - RNA, 19 nt, Artificial Sequence
  Description of Artificial Sequence: Synthetic oligonucleotide
cguagcaaaguacauguug

SEQ ID NO: 1898602 - RNA, 19 nt, Artificial Sequence
  Description of Artificial Sequence: Synthetic oligonucleotide
aguaagacucccauugauu

SEQ ID NO: 1898603 - RNA, 19 nt, Artificial Sequence
  Description of Artificial Sequence: Synthetic oligonucleotide
gcauugaucacuacagcac

SEQ ID NO: 1898604 - RNA, 19 nt, Artificial Sequence
  Description of Artificial Sequence: Synthetic oligonucleotide
cugcucaggagauaucaga

SEQ ID NO: 1898605 - RNA, 19 nt, Artificial Sequence
  Description of Artificial Sequence: Synthetic oligonucleotide
ccuggaacagagaccaggc

SEQ ID NO: 1898606 - RNA, 19 nt, Artificial Sequence
  Description of Artificial Sequence: Synthetic oligonucleotide
gauacuccaggcuauuguu

SEQ ID NO: 1898607 - RNA, 19 nt, Artificial Sequence
  Description of Artificial Sequence: Synthetic oligonucleotide
gcggcauugaucacuacag

SEQ ID NO: 1898608 - RNA, 19 nt, Artificial Sequence
  Description of Artificial Sequence: Synthetic oligonucleotide
agauuuguugggucugguu

SEQ ID NO: 1898609 - RNA, 19 nt, Artificial Sequence
  Description of Artificial Sequence: Synthetic oligonucleotide
uggcuuagaggauggugaa

SEQ ID NO: 1898610 - RNA, 19 nt, Artificial Sequence
  Description of Artificial Sequence: Synthetic oligonucleotide
uuucgacgaagacccugga

SEQ ID NO: 1898611 - RNA, 19 nt, Artificial Sequence
  Description of Artificial Sequence: Synthetic oligonucleotide
ucucccugguagaguaaga

SEQ ID NO: 1898612 - RNA, 19 nt, Artificial Sequence
  Description of Artificial Sequence: Synthetic oligonucleotide
cauccuccaucccauaaga

SEQ ID NO: 1898613 - RNA, 19 nt, Artificial Sequence
  Description of Artificial Sequence: Synthetic oligonucleotide
ucuguaccuagagucuuaa

SEQ ID NO: 1898614 - RNA, 19 nt, Artificial Sequence
  Description of Artificial Sequence: Synthetic oligonucleotide
accuagagucuuaaaagau

SEQ ID NO: 1898615 - RNA, 19 nt, Artificial Sequence
  Description of Artificial Sequence: Synthetic oligonucleotide
acgccagagccacuccuuc

SEQ ID NO: 1898616 - RNA, 19 nt, Artificial Sequence
  Description of Artificial Sequence: Synthetic oligonucleotide
gcuuagaggauggugaaga

SEQ ID NO: 1898617 - RNA, 19 nt, Artificial Sequence
  Description of Artificial Sequence: Synthetic oligonucleotide
ccgacauaguccuggagag

SEQ ID NO: 1898618 - RNA, 19 nt, Artificial Sequence
  Description of Artificial Sequence: Synthetic oligonucleotide
ccaaccuucauccuccauc

SEQ ID NO: 1898619 - RNA, 19 nt, Artificial Sequence
  Description of Artificial Sequence: Synthetic oligonucleotide
auuggaccuuucgacgaag

SEQ ID NO: 1898620 - RNA, 19 nt, Artificial Sequence
  Description of Artificial Sequence: Synthetic oligonucleotide
uggcccucuaguaccauuu

SEQ ID NO: 1898621 - RNA, 19 nt, Artificial Sequence
  Description of Artificial Sequence: Synthetic oligonucleotide
uccaggcuauuguucauuu

SEQ ID NO: 1898622 - RNA, 19 nt, Artificial Sequence
  Description of Artificial Sequence: Synthetic oligonucleotide
cuaaguaaaagcgguugaa

SEQ ID NO: 1898623 - RNA, 19 nt, Artificial Sequence
  Description of Artificial Sequence: Synthetic oligonucleotide
cucccugguagaguaagac

SEQ ID NO: 1898624 - RNA, 19 nt, Artificial Sequence
  Description of Artificial Sequence: Synthetic oligonucleotide
gacuucguggauccuucuc

SEQ ID NO: 1898625 - RNA, 19 nt, Artificial Sequence
  Description of Artificial Sequence: Synthetic oligonucleotide
ccauugauuggaccuuucg

SEQ ID NO: 1898626 - RNA, 19 nt, Artificial Sequence
  Description of Artificial Sequence: Synthetic oligonucleotide
cagccaccuagguaguuac

SEQ ID NO: 1898627 - RNA, 19 nt, Artificial Sequence
  Description of Artificial Sequence: Synthetic oligonucleotide
gcaacuugcccagaccagg

SEQ ID NO: 1898628 - RNA, 19 nt, Artificial Sequence
  Description of Artificial Sequence: Synthetic oligonucleotide
uccugcggcauugaucacu

SEQ ID NO: 1898629 - RNA, 19 nt, Artificial Sequence
  Description of Artificial Sequence: Synthetic oligonucleotide
gaaguccaugaccacugaa

SEQ ID NO: 1898630 - RNA, 19 nt, Artificial Sequence
  Description of Artificial Sequence: Synthetic oligonucleotide
accucucccugguagagua

SEQ ID NO: 1898631 - RNA, 19 nt, Artificial Sequence
  Description of Artificial Sequence: Synthetic oligonucleotide
ugacaacuagugggugggg

SEQ ID NO: 1898632 - RNA, 19 nt, Artificial Sequence
  Description of Artificial Sequence: Synthetic oligonucleotide
agugccauaagugcacaua

SEQ ID NO: 1898633 - RNA, 19 nt, Artificial Sequence
  Description of Artificial Sequence: Synthetic oligonucleotide
cuccacuggcugauacucc

SEQ ID NO: 1898634 - RNA, 19 nt, Artificial Sequence
  Description of Artificial Sequence: Synthetic oligonucleotide
gcagaacuguuuuggauga

SEQ ID NO: 1898635 - RNA, 19 nt, Artificial Sequence
  Description of Artificial Sequence: Synthetic oligonucleotide
uuaccuggacuucguggau

SEQ ID NO: 1898636 - RNA, 19 nt, Artificial Sequence
  Description of Artificial Sequence: Synthetic oligonucleotide
agggucccauuuuaucacu

SEQ ID NO: 1898637 - RNA, 19 nt, Artificial Sequence
  Description of Artificial Sequence: Synthetic oligonucleotide
acgugucaccucucccugg

SEQ ID NO: 1898638 - RNA, 19 nt, Artificial Sequence
  Description of Artificial Sequence: Synthetic oligonucleotide
gauuggaccuuucgacgaa

SEQ ID NO: 1898639 - RNA, 19 nt, Artificial Sequence
  Description of Artificial Sequence: Synthetic oligonucleotide
agacgccagagccacuccu

SEQ ID NO: 1898640 - RNA, 19 nt, Artificial Sequence
  Description of Artificial Sequence: Synthetic oligonucleotide
auccuccaucccauaagac

SEQ ID NO: 1898641 - RNA, 19 nt, Artificial Sequence
  Description of Artificial Sequence: Synthetic oligonucleotide
gucgaaaauagacaccauu

SEQ ID NO: 1898642 - RNA, 19 nt, Artificial Sequence
  Description of Artificial Sequence: Synthetic oligonucleotide
ggaaggaggccaguccugg

SEQ ID NO: 1898643 - RNA, 19 nt, Artificial Sequence
  Description of Artificial Sequence: Synthetic oligonucleotide
uuuggaugaugggcuacaa

SEQ ID NO: 1898644 - RNA, 19 nt, Artificial Sequence
  Description of Artificial Sequence: Synthetic oligonucleotide
aggugcaugcugaagucca

SEQ ID NO: 1898645 - RNA, 19 nt, Artificial Sequence
  Description of Artificial Sequence: Synthetic oligonucleotide
aaccaaccuucauccucca

SEQ ID NO: 1898646 - RNA, 19 nt, Artificial Sequence
  Description of Artificial Sequence: Synthetic oligonucleotide
aaauggggccacacuuugu

SEQ ID NO: 1898647 - RNA, 19 nt, Artificial Sequence
  Description of Artificial Sequence: Synthetic oligonucleotide
ggaugaugggcuacaauca

SEQ ID NO: 1898648 - RNA, 19 nt, Artificial Sequence
  Description of Artificial Sequence: Synthetic oligonucleotide
guacauguugacaacuagu

SEQ ID NO: 1898649 - RNA, 19 nt, Artificial Sequence
  Description of Artificial Sequence: Synthetic oligonucleotide
caucccauaagacgccaga

SEQ ID NO: 1898650 - RNA, 19 nt, Artificial Sequence
  Description of Artificial Sequence: Synthetic oligonucleotide
gccauaagugcacauaccu

SEQ ID NO: 1898651 - RNA, 19 nt, Artificial Sequence
  Description of Artificial Sequence: Synthetic oligonucleotide
guaccauuucugccacagc

SEQ ID NO: 1898652 - RNA, 19 nt, Artificial Sequence
  Description of Artificial Sequence: Synthetic oligonucleotide
ggaacagagaccaggcauc

SEQ ID NO: 1898653 - RNA, 19 nt, Artificial Sequence
  Description of Artificial Sequence: Synthetic oligonucleotide
ugucugcaaccaguggugu

SEQ ID NO: 1898654 - RNA, 19 nt, Artificial Sequence
  Description of Artificial Sequence: Synthetic oligonucleotide
gaccaggcaucaaaccaac

SEQ ID NO: 1898655 - RNA, 19 nt, Artificial Sequence
  Description of Artificial Sequence: Synthetic oligonucleotide
augaugggcuacaaucagu

SEQ ID NO: 1898656 - RNA, 19 nt, Artificial Sequence
  Description of Artificial Sequence: Synthetic oligonucleotide
caucccauguccagagcca

SEQ ID NO: 1898657 - RNA, 19 nt, Artificial Sequence
  Description of Artificial Sequence: Synthetic oligonucleotide
acaggauauuguacucuug

SEQ ID NO: 1898658 - RNA, 19 nt, Artificial Sequence
  Description of Artificial Sequence: Synthetic oligonucleotide
uccaucccauaagacgcca

SEQ ID NO: 1898659 - RNA, 19 nt, Artificial Sequence
  Description of Artificial Sequence: Synthetic oligonucleotide
cuuagaggauggugaagaa

SEQ ID NO: 1898660 - RNA, 19 nt, Artificial Sequence
  Description of Artificial Sequence: Synthetic oligonucleotide
cagagccacuccuucuaug

SEQ ID NO: 1898661 - RNA, 19 nt, Artificial Sequence
  Description of Artificial Sequence: Synthetic oligonucleotide
cacauaccuuuuccuuggc

SEQ ID NO: 1898662 - RNA, 19 nt, Artificial Sequence
  Description of Artificial Sequence: Synthetic oligonucleotide
auaagugcacauaccuuuu

SEQ ID NO: 1898663 - RNA, 19 nt, Artificial Sequence
  Description of Artificial Sequence: Synthetic oligonucleotide
agguagcuuggugcccugc

SEQ ID NO: 1898664 - RNA, 19 nt, Artificial Sequence
  Description of Artificial Sequence: Synthetic oligonucleotide
ccagggucccauuuuauca

SEQ ID NO: 1898665 - RNA, 19 nt, Artificial Sequence
  Description of Artificial Sequence: Synthetic oligonucleotide
caugccuaggacgccagca

SEQ ID NO: 1898666 - RNA, 19 nt, Artificial Sequence
  Description of Artificial Sequence: Synthetic oligonucleotide
gccaccuagguaguuacug

SEQ ID NO: 1898667 - RNA, 19 nt, Artificial Sequence
  Description of Artificial Sequence: Synthetic oligonucleotide
uucacacucacaggauauu

SEQ ID NO: 1898668 - RNA, 19 nt, Artificial Sequence
  Description of Artificial Sequence: Synthetic oligonucleotide
uaccuggacuucguggauc

SEQ ID NO: 1898669 - RNA, 19 nt, Artificial Sequence
  Description of Artificial Sequence: Synthetic oligonucleotide
caguccugggccccaugcc

SEQ ID NO: 1898670 - RNA, 19 nt, Artificial Sequence
  Description of Artificial Sequence: Synthetic oligonucleotide
gcgguugaagaggaagggg

SEQ ID NO: 1898671 - RNA, 19 nt, Artificial Sequence
  Description of Artificial Sequence: Synthetic oligonucleotide
agacucccauugauuggac

SEQ ID NO: 1898672 - RNA, 19 nt, Artificial Sequence
  Description of Artificial Sequence: Synthetic oligonucleotide
uggucuccauuugucuaga

SEQ ID NO: 1898673 - RNA, 19 nt, Artificial Sequence
  Description of Artificial Sequence: Synthetic oligonucleotide
agucccagggucccauuuu

SEQ ID NO: 1898674 - RNA, 19 nt, Artificial Sequence
  Description of Artificial Sequence: Synthetic oligonucleotide
augaaacgugucaccucuc

SEQ ID NO: 1898675 - RNA, 19 nt, Artificial Sequence
  Description of Artificial Sequence: Synthetic oligonucleotide
ccuaaguaaaagcgguuga

SEQ ID NO: 1898676 - RNA, 19 nt, Artificial Sequence
  Description of Artificial Sequence: Synthetic oligonucleotide
ccauuugucuagaugaagu

SEQ ID NO: 1898677 - RNA, 19 nt, Artificial Sequence
  Description of Artificial Sequence: Synthetic oligonucleotide
ucccagggucccauuuuau

SEQ ID NO: 1898678 - RNA, 19 nt, Artificial Sequence
  Description of Artificial Sequence: Synthetic oligonucleotide
aaaagcgguugaagaggaa

SEQ ID NO: 1898679 - RNA, 19 nt, Artificial Sequence
  Description of Artificial Sequence: Synthetic oligonucleotide
cuaccuguuccccacuugu

SEQ ID NO: 1898680 - RNA, 19 nt, Artificial Sequence
  Description of Artificial Sequence: Synthetic oligonucleotide
uaguaccauuucugccaca

SEQ ID NO: 1898681 - RNA, 19 nt, Artificial Sequence
  Description of Artificial Sequence: Synthetic oligonucleotide
ugggccccaugccuaggac

SEQ ID NO: 1898682 - RNA, 19 nt, Artificial Sequence
  Description of Artificial Sequence: Synthetic oligonucleotide
agacuaccuguuccccacu

SEQ ID NO: 1898683 - RNA, 19 nt, Artificial Sequence
  Description of Artificial Sequence: Synthetic oligonucleotide
cauaauagccagcccaguu

SEQ ID NO: 1898684 - RNA, 19 nt, Artificial Sequence
  Description of Artificial Sequence: Synthetic oligonucleotide
gucugcaaccagugguguc

SEQ ID NO: 1898685 - RNA, 19 nt, Artificial Sequence
  Description of Artificial Sequence: Synthetic oligonucleotide
cguggauccuucucaagac

SEQ ID NO: 1898686 - RNA, 19 nt, Artificial Sequence
  Description of Artificial Sequence: Synthetic oligonucleotide
ccgucgaaaauagacacca

SEQ ID NO: 1898687 - RNA, 19 nt, Artificial Sequence
  Description of Artificial Sequence: Synthetic oligonucleotide
aggacgccagcagaacugu

SEQ ID NO: 1898688 - RNA, 19 nt, Artificial Sequence
  Description of Artificial Sequence: Synthetic oligonucleotide
uuuguugggucugguucuu

SEQ ID NO: 1898689 - RNA, 19 nt, Artificial Sequence
  Description of Artificial Sequence: Synthetic oligonucleotide
cccgucgaaaauagacacc

SEQ ID NO: 1898690 - RNA, 19 nt, Artificial Sequence
  Description of Artificial Sequence: Synthetic oligonucleotide
cuggaacagagaccaggca

SEQ ID NO: 1898691 - RNA, 19 nt, Artificial Sequence
  Description of Artificial Sequence: Synthetic oligonucleotide
gaccaaauggggccacacu

SEQ ID NO: 1898692 - RNA, 19 nt, Artificial Sequence
  Description of Artificial Sequence: Synthetic oligonucleotide
gaaagggaugcagccccga

SEQ ID NO: 1898693 - RNA, 19 nt, Artificial Sequence
  Description of Artificial Sequence: Synthetic oligonucleotide
cagcccaguugcucuguac

SEQ ID NO: 1898694 - RNA, 19 nt, Artificial Sequence
  Description of Artificial Sequence: Synthetic oligonucleotide
uuccccacuuguggucucc

SEQ ID NO: 1898695 - RNA, 19 nt, Artificial Sequence
  Description of Artificial Sequence: Synthetic oligonucleotide
ccuucccaauaccagccag

SEQ ID NO: 1898696 - RNA, 19 nt, Artificial Sequence
  Description of Artificial Sequence: Synthetic oligonucleotide
gguagcuuggugcccugca

SEQ ID NO: 1898697 - RNA, 19 nt, Artificial Sequence
  Description of Artificial Sequence: Synthetic oligonucleotide
caauaccagccagcucugc

SEQ ID NO: 1898698 - RNA, 19 nt, Artificial Sequence
  Description of Artificial Sequence: Synthetic oligonucleotide
guggauccuucucaagacu

SEQ ID NO: 1898699 - RNA, 19 nt, Artificial Sequence
  Description of Artificial Sequence: Synthetic oligonucleotide
ggauccuucucaagacuac

SEQ ID NO: 1898700 - RNA, 19 nt, Artificial Sequence
  Description of Artificial Sequence: Synthetic oligonucleotide
cuaggacgccagcagaacu

SEQ ID NO: 1898701 - RNA, 19 nt, Artificial Sequence
  Description of Artificial Sequence: Synthetic oligonucleotide
ucccauugauuggaccuuu

SEQ ID NO: 1898702 - RNA, 19 nt, Artificial Sequence
  Description of Artificial Sequence: Synthetic oligonucleotide
uggaccaaauggggccaca

SEQ ID NO: 1898703 - RNA, 19 nt, Artificial Sequence
  Description of Artificial Sequence: Synthetic oligonucleotide
ccagauuuguugggucugg

SEQ ID NO: 1898704 - RNA, 19 nt, Artificial Sequence
  Description of Artificial Sequence: Synthetic oligonucleotide
aggagauaucagacagacu

SEQ ID NO: 1898705 - RNA, 19 nt, Artificial Sequence
  Description of Artificial Sequence: Synthetic oligonucleotide
ggaagaaaucaugguccac

SEQ ID NO: 1898706 - RNA, 19 nt, Artificial Sequence
  Description of Artificial Sequence: Synthetic oligonucleotide
gccuauuguucaucccaug

SEQ ID NO: 1898707 - RNA, 19 nt, Artificial Sequence
  Description of Artificial Sequence: Synthetic oligonucleotide
ccuggcuuagaggauggug

SEQ ID NO: 1898708 - RNA, 19 nt, Artificial Sequence
  Description of Artificial Sequence: Synthetic oligonucleotide
caaaaguguuguagucaua

SEQ ID NO: 1898709 - RNA, 19 nt, Artificial Sequence
  Description of Artificial Sequence: Synthetic oligonucleotide
gagauaucagacagacuuu

SEQ ID NO: 1898710 - RNA, 19 nt, Artificial Sequence
  Description of Artificial Sequence: Synthetic oligonucleotide
acauaguccuggagagagu

SEQ ID NO: 1898711 - RNA, 19 nt, Artificial Sequence
  Description of Artificial Sequence: Synthetic oligonucleotide
ggggccacacuuuguucug

SEQ ID NO: 1898712 - RNA, 19 nt, Artificial Sequence
  Description of Artificial Sequence: Synthetic oligonucleotide
ccauaagacgccagagcca

SEQ ID NO: 1898713 - RNA, 19 nt, Artificial Sequence
  Description of Artificial Sequence: Synthetic oligonucleotide
ccuauuguucaucccaugu

SEQ ID NO: 1898714 - RNA, 19 nt, Artificial Sequence
  Description of Artificial Sequence: Synthetic oligonucleotide
cucuguaccuagagucuua

SEQ ID NO: 1898715 - RNA, 19 nt, Artificial Sequence
  Description of Artificial Sequence: Synthetic oligonucleotide
cuaauccuucccgucgaaa

SEQ ID NO: 1898716 - RNA, 19 nt, Artificial Sequence
  Description of Artificial Sequence: Synthetic oligonucleotide
cacgccauucuggucaaaa

SEQ ID NO: 1898717 - RNA, 19 nt, Artificial Sequence
  Description of Artificial Sequence: Synthetic oligonucleotide
gucccagggucccauuuua

SEQ ID NO: 1898718 - RNA, 19 nt, Artificial Sequence
  Description of Artificial Sequence: Synthetic oligonucleotide
accacgccauucuggucaa

SEQ ID NO: 1898719 - RNA, 19 nt, Artificial Sequence
  Description of Artificial Sequence: Synthetic oligonucleotide
cccagggucccauuuuauc

SEQ ID NO: 1898720 - RNA, 19 nt, Artificial Sequence
  Description of Artificial Sequence: Synthetic oligonucleotide
ccuuucgacgaagacccug

SEQ ID NO: 1898721 - RNA, 19 nt, Artificial Sequence
  Description of Artificial Sequence: Synthetic oligonucleotide
cagcagaacuguuuuggau

SEQ ID NO: 1898722 - RNA, 19 nt, Artificial Sequence
  Description of Artificial Sequence: Synthetic oligonucleotide
augaccacugaagcccgua

SEQ ID NO: 1898723 - RNA, 19 nt, Artificial Sequence
  Description of Artificial Sequence: Synthetic oligonucleotide
gccuaauccuucccgucga

SEQ ID NO: 1898724 - RNA, 19 nt, Artificial Sequence
  Description of Artificial Sequence: Synthetic oligonucleotide
ggccuggcuuagaggaugg

SEQ ID NO: 1898725 - RNA, 19 nt, Artificial Sequence
  Description of Artificial Sequence: Synthetic oligonucleotide
gcaaccaguggugucucca

SEQ ID NO: 1898726 - RNA, 19 nt, Artificial Sequence
  Description of Artificial Sequence: Synthetic oligonucleotide
ccaucccauaagacgccag

SEQ ID NO: 1898727 - RNA, 19 nt, Artificial Sequence
  Description of Artificial Sequence: Synthetic oligonucleotide
gacgccagcagaacuguuu

SEQ ID NO: 1898728 - RNA, 19 nt, Artificial Sequence
  Description of Artificial Sequence: Synthetic oligonucleotide
cuguaccuagagucuuaaa

SEQ ID NO: 1898729 - RNA, 19 nt, Artificial Sequence
  Description of Artificial Sequence: Synthetic oligonucleotide
cuggaccaaauggggccac

SEQ ID NO: 1898730 - RNA, 19 nt, Artificial Sequence
  Description of Artificial Sequence: Synthetic oligonucleotide
ucagucccagggucccauu

SEQ ID NO: 1898731 - RNA, 19 nt, Artificial Sequence
  Description of Artificial Sequence: Synthetic oligonucleotide
gaugcagccccgacauagu

SEQ ID NO: 1898732 - RNA, 19 nt, Artificial Sequence
  Description of Artificial Sequence: Synthetic oligonucleotide
ggccacacuuuguucugga

SEQ ID NO: 1898733 - RNA, 19 nt, Artificial Sequence
  Description of Artificial Sequence: Synthetic oligonucleotide
gcccaccacgccauucugg

SEQ ID NO: 1898734 - RNA, 19 nt, Artificial Sequence
  Description of Artificial Sequence: Synthetic oligonucleotide
gacuaccuguuccccacuu

SEQ ID NO: 1898735 - RNA, 19 nt, Artificial Sequence
  Description of Artificial Sequence: Synthetic oligonucleotide
gcucgaccaaugccaggug

SEQ ID NO: 1898736 - RNA, 19 nt, Artificial Sequence
  Description of Artificial Sequence: Synthetic oligonucleotide
cgacgaagacccuggaaca

SEQ ID NO: 1898737 - RNA, 19 nt, Artificial Sequence
  Description of Artificial Sequence: Synthetic oligonucleotide
auaagacgccagagccacu

SEQ ID NO: 1898738 - RNA, 19 nt, Artificial Sequence
  Description of Artificial Sequence: Synthetic oligonucleotide
cacuccacuggcugauacu

SEQ ID NO: 1898739 - RNA, 19 nt, Artificial Sequence
  Description of Artificial Sequence: Synthetic oligonucleotide
ccuaggacgccagcagaac

SEQ ID NO: 1898740 - RNA, 19 nt, Artificial Sequence
  Description of Artificial Sequence: Synthetic oligonucleotide
cagagccacuggggaaaag

SEQ ID NO: 1898741 - RNA, 19 nt, Artificial Sequence
  Description of Artificial Sequence: Synthetic oligonucleotide
gucuugaacuggcccucua

SEQ ID NO: 1898742 - RNA, 19 nt, Artificial Sequence
  Description of Artificial Sequence: Synthetic oligonucleotide
ggcccucuaguaccauuuc

SEQ ID NO: 1898743 - RNA, 19 nt, Artificial Sequence
  Description of Artificial Sequence: Synthetic oligonucleotide
cccauugauuggaccuuuc

SEQ ID NO: 1898744 - RNA, 19 nt, Artificial Sequence
  Description of Artificial Sequence: Synthetic oligonucleotide
agccaccuagguaguuacu

SEQ ID NO: 1898745 - RNA, 19 nt, Artificial Sequence
  Description of Artificial Sequence: Synthetic oligonucleotide
cugcggcauugaucacuac

SEQ ID NO: 1898746 - RNA, 19 nt, Artificial Sequence
  Description of Artificial Sequence: Synthetic oligonucleotide
ugcagccaccuagguaguu

SEQ ID NO: 1898747 - RNA, 19 nt, Artificial Sequence
  Description of Artificial Sequence: Synthetic oligonucleotide
cuccugcggcauugaucac

SEQ ID NO: 1898748 - RNA, 19 nt, Artificial Sequence
  Description of Artificial Sequence: Synthetic oligonucleotide
ccauuuuaucacuuuccau

SEQ ID NO: 1898749 - RNA, 19 nt, Artificial Sequence
  Description of Artificial Sequence: Synthetic oligonucleotide
cccaugccuaggacgccag

SEQ ID NO: 1898750 - RNA, 19 nt, Artificial Sequence
  Description of Artificial Sequence: Synthetic oligonucleotide
cucugugccuauuguucau

SEQ ID NO: 1898751 - RNA, 19 nt, Artificial Sequence
  Description of Artificial Sequence: Synthetic oligonucleotide
ccugcggcauugaucacua

SEQ ID NO: 1898752 - RNA, 19 nt, Artificial Sequence
  Description of Artificial Sequence: Synthetic oligonucleotide
gccacacuuuguucuggaa

SEQ ID NO: 1898753 - RNA, 19 nt, Artificial Sequence
  Description of Artificial Sequence: Synthetic oligonucleotide
gccuggaucucugugccua

SEQ ID NO: 1898754 - RNA, 19 nt, Artificial Sequence
  Description of Artificial Sequence: Synthetic oligonucleotide
ggucccauuuuaucacuuu

SEQ ID NO: 1898755 - RNA, 19 nt, Artificial Sequence
  Description of Artificial Sequence: Synthetic oligonucleotide
ccuguuccccacuuguggu

SEQ ID NO: 1898756 - RNA, 19 nt, Artificial Sequence
  Description of Artificial Sequence: Synthetic oligonucleotide
cugaagcccguagcaaagu

SEQ ID NO: 1898757 - RNA, 19 nt, Artificial Sequence
  Description of Artificial Sequence: Synthetic oligonucleotide
gccuaggacgccagcagaa

SEQ ID NO: 1898758 - RNA, 19 nt, Artificial Sequence
  Description of Artificial Sequence: Synthetic oligonucleotide
ccaugccuaggacgccagc

SEQ ID NO: 1898759 - RNA, 19 nt, Artificial Sequence
  Description of Artificial Sequence: Synthetic oligonucleotide
gacgccagagccacuccuu

SEQ ID NO: 1898760 - RNA, 19 nt, Artificial Sequence
  Description of Artificial Sequence: Synthetic oligonucleotide
acuggcccucuaguaccau

SEQ ID NO: 1898761 - RNA, 19 nt, Artificial Sequence
  Description of Artificial Sequence: Synthetic oligonucleotide
gcagccaccuagguaguua

SEQ ID NO: 1898762 - RNA, 19 nt, Artificial Sequence
  Description of Artificial Sequence: Synthetic oligonucleotide
ccauaagugcacauaccuu

SEQ ID NO: 1898763 - RNA, 19 nt, Artificial Sequence
  Description of Artificial Sequence: Synthetic oligonucleotide
accuuucgacgaagacccu

SEQ ID NO: 1898764 - RNA, 19 nt, Artificial Sequence
  Description of Artificial Sequence: Synthetic oligonucleotide
cagauuuguugggucuggu

SEQ ID NO: 1898765 - RNA, 19 nt, Artificial Sequence
  Description of Artificial Sequence: Synthetic oligonucleotide
ccccgacauaguccuggag

SEQ ID NO: 1898766 - RNA, 19 nt, Artificial Sequence
  Description of Artificial Sequence: Synthetic oligonucleotide
caugaccacugaagcccgu

SEQ ID NO: 1898767 - RNA, 19 nt, Artificial Sequence
  Description of Artificial Sequence: Synthetic oligonucleotide
gugucaccucucccuggua

SEQ ID NO: 1898768 - RNA, 19 nt, Artificial Sequence
  Description of Artificial Sequence: Synthetic oligonucleotide
gcagggugccaggcagucc

SEQ ID NO: 1898769 - RNA, 19 nt, Artificial Sequence
  Description of Artificial Sequence: Synthetic oligonucleotide
ccaaauggggccacacuuu

SEQ ID NO: 1898770 - RNA, 19 nt, Artificial Sequence
  Description of Artificial Sequence: Synthetic oligonucleotide
cagugccauaagugcacau

SEQ ID NO: 1898771 - RNA, 19 nt, Artificial Sequence
  Description of Artificial Sequence: Synthetic oligonucleotide
agggugccaggcagucccu

SEQ ID NO: 1898772 - RNA, 19 nt, Artificial Sequence
  Description of Artificial Sequence: Synthetic oligonucleotide
ccuucccgucgaaaauaga

SEQ ID NO: 1898773 - RNA, 19 nt, Artificial Sequence
  Description of Artificial Sequence: Synthetic oligonucleotide
cucccauugauuggaccuu

SEQ ID NO: 1898774 - RNA, 19 nt, Artificial Sequence
  Description of Artificial Sequence: Synthetic oligonucleotide
cuggcccucuaguaccauu

SEQ ID NO: 1898775 - RNA, 19 nt, Artificial Sequence
  Description of Artificial Sequence: Synthetic oligonucleotide
cuccaggcuauuguucauu

SEQ ID NO: 1898776 - RNA, 19 nt, Artificial Sequence
  Description of Artificial Sequence: Synthetic oligonucleotide
ggaaggggcucaugucaau

SEQ ID NO: 1898777 - RNA, 19 nt, Artificial Sequence
  Description of Artificial Sequence: Synthetic oligonucleotide
ggcugauacuccaggcuau

SEQ ID NO: 1898778 - RNA, 19 nt, Artificial Sequence
  Description of Artificial Sequence: Synthetic oligonucleotide
ccuaauccuucccgucgaa

SEQ ID NO: 1898779 - RNA, 19 nt, Artificial Sequence
  Description of Artificial Sequence: Synthetic oligonucleotide
ggcacucucuggaccaaau

SEQ ID NO: 1898780 - RNA, 19 nt, Artificial Sequence
  Description of Artificial Sequence: Synthetic oligonucleotide
cacacuccacuggcugaua

SEQ ID NO: 1898781 - RNA, 19 nt, Artificial Sequence
  Description of Artificial Sequence: Synthetic oligonucleotide
caccucucccugguagagu

SEQ ID NO: 1898782 - RNA, 19 nt, Artificial Sequence
  Description of Artificial Sequence: Synthetic oligonucleotide
ggugcaugcugaaguccau

SEQ ID NO: 1898783 - RNA, 19 nt, Artificial Sequence
  Description of Artificial Sequence: Synthetic oligonucleotide
cccacuuguggucuccauu

SEQ ID NO: 1898784 - RNA, 19 nt, Artificial Sequence
  Description of Artificial Sequence: Synthetic oligonucleotide
cgugucaccucucccuggu

SEQ ID NO: 1898785 - RNA, 19 nt, Artificial Sequence
  Description of Artificial Sequence: Synthetic oligonucleotide
gggucccauuuuaucacuu

SEQ ID NO: 1898786 - RNA, 19 nt, Artificial Sequence
  Description of Artificial Sequence: Synthetic oligonucleotide
ggugcccugcagggugcca

SEQ ID NO: 1898787 - RNA, 19 nt, Artificial Sequence
  Description of Artificial Sequence: Synthetic oligonucleotide
ccaggcuauuguucauuuu

SEQ ID NO: 1898788 - RNA, 19 nt, Artificial Sequence
  Description of Artificial Sequence: Synthetic oligonucleotide
ccagagccacuccuucuau

SEQ ID NO: 1898789 - RNA, 19 nt, Artificial Sequence
  Description of Artificial Sequence: Synthetic oligonucleotide
ccguagcaaaguacauguu

SEQ ID NO: 1898790 - RNA, 19 nt, Artificial Sequence
  Description of Artificial Sequence: Synthetic oligonucleotide
cgucgaaaauagacaccau

SEQ ID NO: 1898791 - RNA, 19 nt, Artificial Sequence
  Description of Artificial Sequence: Synthetic oligonucleotide
ggacgccagcagaacuguu

SEQ ID NO: 1898792 - RNA, 19 nt, Artificial Sequence
  Description of Artificial Sequence: Synthetic oligonucleotide
ccccacuuguggucuccau

SEQ ID NO: 1898793 - RNA, 19 nt, Artificial Sequence
  Description of Artificial Sequence: Synthetic oligonucleotide
ccuggacuucguggauccu

SEQ ID NO: 1898794 - RNA, 19 nt, Artificial Sequence
  Description of Artificial Sequence: Synthetic oligonucleotide
ccacgccauucuggucaaa

SEQ ID NO: 1898795 - RNA, 19 nt, Artificial Sequence
  Description of Artificial Sequence: Synthetic oligonucleotide
uguauuuguaucaucauca

SEQ ID NO: 1898796 - RNA, 19 nt, Artificial Sequence
  Description of Artificial Sequence: Synthetic oligonucleotide
uguaucaucaucacguccc

SEQ ID NO: 1898797 - RNA, 19 nt, Artificial Sequence
  Description of Artificial Sequence: Synthetic oligonucleotide
uauaaauguauuuguauca

SEQ ID NO: 1898798 - RNA, 19 nt, Artificial Sequence
  Description of Artificial Sequence: Synthetic oligonucleotide
aagaggagccgcaagagcc

SEQ ID NO: 1898799 - RNA, 19 nt, Artificial Sequence
  Description of Artificial Sequence: Synthetic oligonucleotide
gucauuagcaccuccacgg

SEQ ID NO: 1898800 - RNA, 19 nt, Artificial Sequence
  Description of Artificial Sequence: Synthetic oligonucleotide
aaauguauuuguaucauca

SEQ ID NO: 1898801 - RNA, 19 nt, Artificial Sequence
  Description of Artificial Sequence: Synthetic oligonucleotide
aagugcuaagagcacacac

SEQ ID NO: 1898802 - RNA, 19 nt, Artificial Sequence
  Description of Artificial Sequence: Synthetic oligonucleotide
acgagugugacccaggguc

SEQ ID NO: 1898803 - RNA, 19 nt, Artificial Sequence
  Description of Artificial Sequence: Synthetic oligonucleotide
uauuuguaucaucaucacg

SEQ ID NO: 1898804 - RNA, 19 nt, Artificial Sequence
  Description of Artificial Sequence: Synthetic oligonucleotide
auuuguaucaucaucacgu

SEQ ID NO: 1898805 - RNA, 19 nt, Artificial Sequence
  Description of Artificial Sequence: Synthetic oligonucleotide
agucgaagagaugauaugc

SEQ ID NO: 1898806 - RNA, 19 nt, Artificial Sequence
  Description of Artificial Sequence: Synthetic oligonucleotide
aucgugaaagcacagcacg

SEQ ID NO: 1898807 - RNA, 19 nt, Artificial Sequence
  Description of Artificial Sequence: Synthetic oligonucleotide
uagaggucaagccugcgcg

SEQ ID NO: 1898808 - RNA, 19 nt, Artificial Sequence
  Description of Artificial Sequence: Synthetic oligonucleotide
agguucaaaggucauuagc

SEQ ID NO: 1898809 - RNA, 19 nt, Artificial Sequence
  Description of Artificial Sequence: Synthetic oligonucleotide
ugaguaaggaacaggacuc

SEQ ID NO: 1898810 - RNA, 19 nt, Artificial Sequence
  Description of Artificial Sequence: Synthetic oligonucleotide
ucaggugcaagucugagua

SEQ ID NO: 1898811 - RNA, 19 nt, Artificial Sequence
  Description of Artificial Sequence: Synthetic oligonucleotide
uucaaaggucauuagcacc

SEQ ID NO: 1898812 - RNA, 19 nt, Artificial Sequence
  Description of Artificial Sequence: Synthetic oligonucleotide
uucaugagcucauggagag

SEQ ID NO: 1898813 - RNA, 19 nt, Artificial Sequence
  Description of Artificial Sequence: Synthetic oligonucleotide
uggagagucgaagagauga

SEQ ID NO: 1898814 - RNA, 19 nt, Artificial Sequence
  Description of Artificial Sequence: Synthetic oligonucleotide
aauguauuuguaucaucau

SEQ ID NO: 1898815 - RNA, 19 nt, Artificial Sequence
  Description of Artificial Sequence: Synthetic oligonucleotide
uuuaggagacagcuggcug

SEQ ID NO: 1898816 - RNA, 19 nt, Artificial Sequence
  Description of Artificial Sequence: Synthetic oligonucleotide
cucugaucaggaaggaugg

SEQ ID NO: 1898817 - RNA, 19 nt, Artificial Sequence
  Description of Artificial Sequence: Synthetic oligonucleotide
ugaucaggaaggauggcgu

SEQ ID NO: 1898818 - RNA, 19 nt, Artificial Sequence
  Description of Artificial Sequence: Synthetic oligonucleotide
ucgugaaagcacagcacgg

SEQ ID NO: 1898819 - RNA, 19 nt, Artificial Sequence
  Description of Artificial Sequence: Synthetic oligonucleotide
acagcgcaagaucagcugg

SEQ ID NO: 1898820 - RNA, 19 nt, Artificial Sequence
  Description of Artificial Sequence: Synthetic oligonucleotide
uuguaucaucaucacgucc

SEQ ID NO: 1898821 - RNA, 19 nt, Artificial Sequence
  Description of Artificial Sequence: Synthetic oligonucleotide
ucgaagagaugauaugcca

SEQ ID NO: 1898822 - RNA, 19 nt, Artificial Sequence
  Description of Artificial Sequence: Synthetic oligonucleotide
uggaaugcuugacagcgca

SEQ ID NO: 1898823 - RNA, 19 nt, Artificial Sequence
  Description of Artificial Sequence: Synthetic oligonucleotide
ugugguucggacgagugug

SEQ ID NO: 1898824 - RNA, 19 nt, Artificial Sequence
  Description of Artificial Sequence: Synthetic oligonucleotide
gcuaagagcacacacagga

SEQ ID NO: 1898825 - RNA, 19 nt, Artificial Sequence
  Description of Artificial Sequence: Synthetic oligonucleotide
guucggacgagugugaccc

SEQ ID NO: 1898826 - RNA, 19 nt, Artificial Sequence
  Description of Artificial Sequence: Synthetic oligonucleotide
guaucgugaaagcacagca

SEQ ID NO: 1898827 - RNA, 19 nt, Artificial Sequence
  Description of Artificial Sequence: Synthetic oligonucleotide
ugucccuagaggucaagcc

SEQ ID NO: 1898828 - RNA, 19 nt, Artificial Sequence
  Description of Artificial Sequence: Synthetic oligonucleotide
aaugcuugacagcgcaaga

SEQ ID NO: 1898829 - RNA, 19 nt, Artificial Sequence
  Description of Artificial Sequence: Synthetic oligonucleotide
uaaugggacagcucuugcc

SEQ ID NO: 1898830 - RNA, 19 nt, Artificial Sequence
  Description of Artificial Sequence: Synthetic oligonucleotide
accgauaucugauucuccu

SEQ ID NO: 1898831 - RNA, 19 nt, Artificial Sequence
  Description of Artificial Sequence: Synthetic oligonucleotide
aggacucugaucaggaagg

SEQ ID NO: 1898832 - RNA, 19 nt, Artificial Sequence
  Description of Artificial Sequence: Synthetic oligonucleotide
cacagcacgguaaugggac

SEQ ID NO: 1898833 - RNA, 19 nt, Artificial Sequence
  Description of Artificial Sequence: Synthetic oligonucleotide
gaaugcuugacagcgcaag

SEQ ID NO: 1898834 - RNA, 19 nt, Artificial Sequence
  Description of Artificial Sequence: Synthetic oligonucleotide
gcuccaauacuucucaucc

SEQ ID NO: 1898835 - RNA, 19 nt, Artificial Sequence
  Description of Artificial Sequence: Synthetic oligonucleotide
uaucgugaaagcacagcac

SEQ ID NO: 1898836 - RNA, 19 nt, Artificial Sequence
  Description of Artificial Sequence: Synthetic oligonucleotide
aucgccggacaccugcucc

SEQ ID NO: 1898837 - RNA, 19 nt, Artificial Sequence
  Description of Artificial Sequence: Synthetic oligonucleotide
ucugauucuccuugagucu

SEQ ID NO: 1898838 - RNA, 19 nt, Artificial Sequence
  Description of Artificial Sequence: Synthetic oligonucleotide
ucccuagaggucaagccug

SEQ ID NO: 1898839 - RNA, 19 nt, Artificial Sequence
  Description of Artificial Sequence: Synthetic oligonucleotide
uucaugauuggcugaggcu

SEQ ID NO: 1898840 - RNA, 19 nt, Artificial Sequence
  Description of Artificial Sequence: Synthetic oligonucleotide
gcuucauuguucuuguacc

SEQ ID NO: 1898841 - RNA, 19 nt, Artificial Sequence
  Description of Artificial Sequence: Synthetic oligonucleotide
uuccccgaagugcuaagag

SEQ ID NO: 1898842 - RNA, 19 nt, Artificial Sequence
  Description of Artificial Sequence: Synthetic oligonucleotide
acacccacgagggaggugg

SEQ ID NO: 1898843 - RNA, 19 nt, Artificial Sequence
  Description of Artificial Sequence: Synthetic oligonucleotide
cucauggagagucgaagag

SEQ ID NO: 1898844 - RNA, 19 nt, Artificial Sequence
  Description of Artificial Sequence: Synthetic oligonucleotide
ucaugauuggcugaggcuu

SEQ ID NO: 1898845 - RNA, 19 nt, Artificial Sequence
  Description of Artificial Sequence: Synthetic oligonucleotide
ggcacuuggacuuuccuug

SEQ ID NO: 1898846 - RNA, 19 nt, Artificial Sequence
  Description of Artificial Sequence: Synthetic oligonucleotide
uuuguaucaucaucacguc

SEQ ID NO: 1898847 - RNA, 19 nt, Artificial Sequence
  Description of Artificial Sequence: Synthetic oligonucleotide
gaagcggugucuccgagga

SEQ ID NO: 1898848 - RNA, 19 nt, Artificial Sequence
  Description of Artificial Sequence: Synthetic oligonucleotide
cauuguucuuguaccuccg

SEQ ID NO: 1898849 - RNA, 19 nt, Artificial Sequence
  Description of Artificial Sequence: Synthetic oligonucleotide
gagucgaagagaugauaug

SEQ ID NO: 1898850 - RNA, 19 nt, Artificial Sequence
  Description of Artificial Sequence: Synthetic oligonucleotide
uguaccuccggcuccaaua

SEQ ID NO: 1898851 - RNA, 19 nt, Artificial Sequence
  Description of Artificial Sequence: Synthetic oligonucleotide
caugagcucauggagaguc

SEQ ID NO: 1898852 - RNA, 19 nt, Artificial Sequence
  Description of Artificial Sequence: Synthetic oligonucleotide
cugggugugucccuagagg

SEQ ID NO: 1898853 - RNA, 19 nt, Artificial Sequence
  Description of Artificial Sequence: Synthetic oligonucleotide
cuagaggucaagccugcgc

SEQ ID NO: 1898854 - RNA, 19 nt, Artificial Sequence
  Description of Artificial Sequence: Synthetic oligonucleotide
auggcgugcccucacagug

SEQ ID NO: 1898855 - RNA, 19 nt, Artificial Sequence
  Description of Artificial Sequence: Synthetic oligonucleotide
cucgagaccucuuggcugc

SEQ ID NO: 1898856 - RNA, 19 nt, Artificial Sequence
  Description of Artificial Sequence: Synthetic oligonucleotide
gguucaaaggucauuagca

SEQ ID NO: 1898857 - RNA, 19 nt, Artificial Sequence
  Description of Artificial Sequence: Synthetic oligonucleotide
uggauagguuccccgaagu

SEQ ID NO: 1898858 - RNA, 19 nt, Artificial Sequence
  Description of Artificial Sequence: Synthetic oligonucleotide
aagucugaguaaggaacag

SEQ ID NO: 1898859 - RNA, 19 nt, Artificial Sequence
  Description of Artificial Sequence: Synthetic oligonucleotide
agaccgaggaaggagaaga

SEQ ID NO: 1898860 - RNA, 19 nt, Artificial Sequence
  Description of Artificial Sequence: Synthetic oligonucleotide
agcggugucuccgaggauc

SEQ ID NO: 1898861 - RNA, 19 nt, Artificial Sequence
  Description of Artificial Sequence: Synthetic oligonucleotide
ugacagcgcaagaucagcu

SEQ ID NO: 1898862 - RNA, 19 nt, Artificial Sequence
  Description of Artificial Sequence: Synthetic oligonucleotide
uagaaggccccgcagccca

SEQ ID NO: 1898863 - RNA, 19 nt, Artificial Sequence
  Description of Artificial Sequence: Synthetic oligonucleotide
uccccgaagugcuaagagc

SEQ ID NO: 1898864 - RNA, 19 nt, Artificial Sequence
  Description of Artificial Sequence: Synthetic oligonucleotide
caucucgagaccucuuggc

SEQ ID NO: 1898865 - RNA, 19 nt, Artificial Sequence
  Description of Artificial Sequence: Synthetic oligonucleotide
agaagcggugucuccgagg

SEQ ID NO: 1898866 - RNA, 19 nt, Artificial Sequence
  Description of Artificial Sequence: Synthetic oligonucleotide
gacagcgcaagaucagcug

SEQ ID NO: 1898867 - RNA, 19 nt, Artificial Sequence
  Description of Artificial Sequence: Synthetic oligonucleotide
agucugaguaaggaacagg

SEQ ID NO: 1898868 - RNA, 19 nt, Artificial Sequence
  Description of Artificial Sequence: Synthetic oligonucleotide
uggcucuuugggcuugccg

SEQ ID NO: 1898869 - RNA, 19 nt, Artificial Sequence
  Description of Artificial Sequence: Synthetic oligonucleotide
cuaagagcacacacaggac

SEQ ID NO: 1898870 - RNA, 19 nt, Artificial Sequence
  Description of Artificial Sequence: Synthetic oligonucleotide
ggucauuagcaccuccacg

SEQ ID NO: 1898871 - RNA, 19 nt, Artificial Sequence
  Description of Artificial Sequence: Synthetic oligonucleotide
agugcuaagagcacacaca

SEQ ID NO: 1898872 - RNA, 19 nt, Artificial Sequence
  Description of Artificial Sequence: Synthetic oligonucleotide
acugggugugucccuagag

SEQ ID NO: 1898873 - RNA, 19 nt, Artificial Sequence
  Description of Artificial Sequence: Synthetic oligonucleotide
gaucaggaaggauggcgug

SEQ ID NO: 1898874 - RNA, 19 nt, Artificial Sequence
  Description of Artificial Sequence: Synthetic oligonucleotide
aaggucauuagcaccucca

SEQ ID NO: 1898875 - RNA, 19 nt, Artificial Sequence
  Description of Artificial Sequence: Synthetic oligonucleotide
ucuuugggcuugccggucc

SEQ ID NO: 1898876 - RNA, 19 nt, Artificial Sequence
  Description of Artificial Sequence: Synthetic oligonucleotide
agaggucaagccugcgcgg

SEQ ID NO: 1898877 - RNA, 19 nt, Artificial Sequence
  Description of Artificial Sequence: Synthetic oligonucleotide
gucgaagagaugauaugcc

SEQ ID NO: 1898878 - RNA, 19 nt, Artificial Sequence
  Description of Artificial Sequence: Synthetic oligonucleotide
aucucgagaccucuuggcu

SEQ ID NO: 1898879 - RNA, 19 nt, Artificial Sequence
  Description of Artificial Sequence: Synthetic oligonucleotide
aggugcaagucugaguaag

SEQ ID NO: 1898880 - RNA, 19 nt, Artificial Sequence
  Description of Artificial Sequence: Synthetic oligonucleotide
ugguaucgugaaagcacag

SEQ ID NO: 1898881 - RNA, 19 nt, Artificial Sequence
  Description of Artificial Sequence: Synthetic oligonucleotide
agagucgaagagaugauau

SEQ ID NO: 1898882 - RNA, 19 nt, Artificial Sequence
  Description of Artificial Sequence: Synthetic oligonucleotide
aagccugcgcgguggccgc

SEQ ID NO: 1898883 - RNA, 19 nt, Artificial Sequence
  Description of Artificial Sequence: Synthetic oligonucleotide
caagucugaguaaggaaca

SEQ ID NO: 1898884 - RNA, 19 nt, Artificial Sequence
  Description of Artificial Sequence: Synthetic oligonucleotide
uugacagcgcaagaucagc

SEQ ID NO: 1898885 - RNA, 19 nt, Artificial Sequence
  Description of Artificial Sequence: Synthetic oligonucleotide
cuucuugcaucucgagacc

SEQ ID NO: 1898886 - RNA, 19 nt, Artificial Sequence
  Description of Artificial Sequence: Synthetic oligonucleotide
cacuccugugguucggacg

SEQ ID NO: 1898887 - RNA, 19 nt, Artificial Sequence
  Description of Artificial Sequence: Synthetic oligonucleotide
gcaagucugaguaaggaac

SEQ ID NO: 1898888 - RNA, 19 nt, Artificial Sequence
  Description of Artificial Sequence: Synthetic oligonucleotide
cuggccagaccgaggaagg

SEQ ID NO: 1898889 - RNA, 19 nt, Artificial Sequence
  Description of Artificial Sequence: Synthetic oligonucleotide
aaggccccgcagcccaagc

SEQ ID NO: 1898890 - RNA, 19 nt, Artificial Sequence
  Description of Artificial Sequence: Synthetic oligonucleotide
guaaugggacagcucuugc

SEQ ID NO: 1898891 - RNA, 19 nt, Artificial Sequence
  Description of Artificial Sequence: Synthetic oligonucleotide
agcucauggagagucgaag

SEQ ID NO: 1898892 - RNA, 19 nt, Artificial Sequence
  Description of Artificial Sequence: Synthetic oligonucleotide
ugucuccgaggaucaaaag

SEQ ID NO: 1898893 - RNA, 19 nt, Artificial Sequence
  Description of Artificial Sequence: Synthetic oligonucleotide
agaguagcccgcgcggggc

SEQ ID NO: 1898894 - RNA, 19 nt, Artificial Sequence
  Description of Artificial Sequence: Synthetic oligonucleotide
guggauagguuccccgaag

SEQ ID NO: 1898895 - RNA, 19 nt, Artificial Sequence
  Description of Artificial Sequence: Synthetic oligonucleotide
cugguaucgugaaagcaca

SEQ ID NO: 1898896 - RNA, 19 nt, Artificial Sequence
  Description of Artificial Sequence: Synthetic oligonucleotide
caauagggcguucuccuuc

SEQ ID NO: 1898897 - RNA, 19 nt, Artificial Sequence
  Description of Artificial Sequence: Synthetic oligonucleotide
caucaucacgucccugggg

SEQ ID NO: 1898898 - RNA, 19 nt, Artificial Sequence
  Description of Artificial Sequence: Synthetic oligonucleotide
aaaggcugcccgcaccgau

SEQ ID NO: 1898899 - RNA, 19 nt, Artificial Sequence
  Description of Artificial Sequence: Synthetic oligonucleotide
ugagaagcggugucuccga

SEQ ID NO: 1898900 - RNA, 19 nt, Artificial Sequence
  Description of Artificial Sequence: Synthetic oligonucleotide
ccgaggaaggagaagagug

SEQ ID NO: 1898901 - RNA, 19 nt, Artificial Sequence
  Description of Artificial Sequence: Synthetic oligonucleotide
aaagcacagcacgguaaug

SEQ ID NO: 1898902 - RNA, 19 nt, Artificial Sequence
  Description of Artificial Sequence: Synthetic oligonucleotide
agcacgguaaugggacagc

SEQ ID NO: 1898903 - RNA, 19 nt, Artificial Sequence
  Description of Artificial Sequence: Synthetic oligonucleotide
ugucaggugcaagucugag

SEQ ID NO: 1898904 - RNA, 19 nt, Artificial Sequence
  Description of Artificial Sequence: Synthetic oligonucleotide
auaugccagucaccugcac

SEQ ID NO: 1898905 - RNA, 19 nt, Artificial Sequence
  Description of Artificial Sequence: Synthetic oligonucleotide
uccugucgcucagaggccg

SEQ ID NO: 1898906 - RNA, 19 nt, Artificial Sequence
  Description of Artificial Sequence: Synthetic oligonucleotide
acaggacccuccccacacc

SEQ ID NO: 1898907 - RNA, 19 nt, Artificial Sequence
  Description of Artificial Sequence: Synthetic oligonucleotide
cuccugccgcaauagggcg

SEQ ID NO: 1898908 - RNA, 19 nt, Artificial Sequence
  Description of Artificial Sequence: Synthetic oligonucleotide
ugagcucauggagagucga

SEQ ID NO: 1898909 - RNA, 19 nt, Artificial Sequence
  Description of Artificial Sequence: Synthetic oligonucleotide
uccucgggcacuuggacuu

SEQ ID NO: 1898910 - RNA, 19 nt, Artificial Sequence
  Description of Artificial Sequence: Synthetic oligonucleotide
acacuccugugguucggac

SEQ ID NO: 1898911 - RNA, 19 nt, Artificial Sequence
  Description of Artificial Sequence: Synthetic oligonucleotide
aguaaggaacaggacucug

SEQ ID NO: 1898912 - RNA, 19 nt, Artificial Sequence
  Description of Artificial Sequence: Synthetic oligonucleotide
cacagugucccgugcuggg

SEQ ID NO: 1898913 - RNA, 19 nt, Artificial Sequence
  Description of Artificial Sequence: Synthetic oligonucleotide
ggugucuggguccacagga

SEQ ID NO: 1898914 - RNA, 19 nt, Artificial Sequence
  Description of Artificial Sequence: Synthetic oligonucleotide
ucaccugcacacuccugug

SEQ ID NO: 1898915 - RNA, 19 nt, Artificial Sequence
  Description of Artificial Sequence: Synthetic oligonucleotide
cagguucaaaggucauuag

SEQ ID NO: 1898916 - RNA, 19 nt, Artificial Sequence
  Description of Artificial Sequence: Synthetic oligonucleotide
uuccucgggcacuuggacu

SEQ ID NO: 1898917 - RNA, 19 nt, Artificial Sequence
  Description of Artificial Sequence: Synthetic oligonucleotide
guaccuccggcuccaauac

SEQ ID NO: 1898918 - RNA, 19 nt, Artificial Sequence
  Description of Artificial Sequence: Synthetic oligonucleotide
auggccuggaaugcuugac

SEQ ID NO: 1898919 - RNA, 19 nt, Artificial Sequence
  Description of Artificial Sequence: Synthetic oligonucleotide
ucagaggccgcgccaucgc

SEQ ID NO: 1898920 - RNA, 19 nt, Artificial Sequence
  Description of Artificial Sequence: Synthetic oligonucleotide
guaaggaacaggacucuga

SEQ ID NO: 1898921 - RNA, 19 nt, Artificial Sequence
  Description of Artificial Sequence: Synthetic oligonucleotide
ugggagaaggcuagcuuuu

SEQ ID NO: 1898922 - RNA, 19 nt, Artificial Sequence
  Description of Artificial Sequence: Synthetic oligonucleotide
cagaaaggcugcccgcacc

SEQ ID NO: 1898923 - RNA, 19 nt, Artificial Sequence
  Description of Artificial Sequence: Synthetic oligonucleotide
gguaaugggacagcucuug

SEQ ID NO: 1898924 - RNA, 19 nt, Artificial Sequence
  Description of Artificial Sequence: Synthetic oligonucleotide
gaggccgcgccaucgccgg

SEQ ID NO: 1898925 - RNA, 19 nt, Artificial Sequence
  Description of Artificial Sequence: Synthetic oligonucleotide
caccgauaucugauucucc

SEQ ID NO: 1898926 - RNA, 19 nt, Artificial Sequence
  Description of Artificial Sequence: Synthetic oligonucleotide
gagaccucuuggcugcuuc

SEQ ID NO: 1898927 - RNA, 19 nt, Artificial Sequence
  Description of Artificial Sequence: Synthetic oligonucleotide
gacccaccgccaccaagcg

SEQ ID NO: 1898928 - RNA, 19 nt, Artificial Sequence
  Description of Artificial Sequence: Synthetic oligonucleotide
ugauucuccuugagucuuc

SEQ ID NO: 1898929 - RNA, 19 nt, Artificial Sequence
  Description of Artificial Sequence: Synthetic oligonucleotide
cucacagugucccgugcug

SEQ ID NO: 1898930 - RNA, 19 nt, Artificial Sequence
  Description of Artificial Sequence: Synthetic oligonucleotide
gucuccgaggaucaaaagu

SEQ ID NO: 1898931 - RNA, 19 nt, Artificial Sequence
  Description of Artificial Sequence: Synthetic oligonucleotide
cgcaagaucagcuggauca

SEQ ID NO: 1898932 - RNA, 19 nt, Artificial Sequence
  Description of Artificial Sequence: Synthetic oligonucleotide
ucgccuuccgcuccuuuuc

SEQ ID NO: 1898933 - RNA, 19 nt, Artificial Sequence
  Description of Artificial Sequence: Synthetic oligonucleotide
gagaagagugucaggugca

SEQ ID NO: 1898934 - RNA, 19 nt, Artificial Sequence
  Description of Artificial Sequence: Synthetic oligonucleotide
ggacgagugugacccaggg

SEQ ID NO: 1898935 - RNA, 19 nt, Artificial Sequence
  Description of Artificial Sequence: Synthetic oligonucleotide
gguaucgugaaagcacagc

SEQ ID NO: 1898936 - RNA, 19 nt, Artificial Sequence
  Description of Artificial Sequence: Synthetic oligonucleotide
gaaagcacagcacgguaau

SEQ ID NO: 1898937 - RNA, 19 nt, Artificial Sequence
  Description of Artificial Sequence: Synthetic oligonucleotide
ucugaucaggaaggauggc

SEQ ID NO: 1898938 - RNA, 19 nt, Artificial Sequence
  Description of Artificial Sequence: Synthetic oligonucleotide
cagugucccgugcugggcc

SEQ ID NO: 1898939 - RNA, 19 nt, Artificial Sequence
  Description of Artificial Sequence: Synthetic oligonucleotide
gagugugacccagggucgg

SEQ ID NO: 1898940 - RNA, 19 nt, Artificial Sequence
  Description of Artificial Sequence: Synthetic oligonucleotide
uuuccaggcccggucccgg

SEQ ID NO: 1898941 - RNA, 19 nt, Artificial Sequence
  Description of Artificial Sequence: Synthetic oligonucleotide
aucacgucccuggggcacc

SEQ ID NO: 1898942 - RNA, 19 nt, Artificial Sequence
  Description of Artificial Sequence: Synthetic oligonucleotide
gaccgaggaaggagaagag

SEQ ID NO: 1898943 - RNA, 19 nt, Artificial Sequence
  Description of Artificial Sequence: Synthetic oligonucleotide
ucggacgagugugacccag

SEQ ID NO: 1898944 - RNA, 19 nt, Artificial Sequence
  Description of Artificial Sequence: Synthetic oligonucleotide
gccgguccccuguagaagg

SEQ ID NO: 1898945 - RNA, 19 nt, Artificial Sequence
  Description of Artificial Sequence: Synthetic oligonucleotide
ggauagguuccccgaagug

SEQ ID NO: 1898946 - RNA, 19 nt, Artificial Sequence
  Description of Artificial Sequence: Synthetic oligonucleotide
uugccgguccccuguagaa

SEQ ID NO: 1898947 - RNA, 19 nt, Artificial Sequence
  Description of Artificial Sequence: Synthetic oligonucleotide
cagaguagcccgcgcgggg

SEQ ID NO: 1898948 - RNA, 19 nt, Artificial Sequence
  Description of Artificial Sequence: Synthetic oligonucleotide
gaggagccgcaagagccgg

SEQ ID NO: 1898949 - RNA, 19 nt, Artificial Sequence
  Description of Artificial Sequence: Synthetic oligonucleotide
uccccuguagaaggccccg

SEQ ID NO: 1898950 - RNA, 19 nt, Artificial Sequence
  Description of Artificial Sequence: Synthetic oligonucleotide
ucgccggacaccugcuccc

SEQ ID NO: 1898951 - RNA, 19 nt, Artificial Sequence
  Description of Artificial Sequence: Synthetic oligonucleotide
gguuggguggauagguucc

SEQ ID NO: 1898952 - RNA, 19 nt, Artificial Sequence
  Description of Artificial Sequence: Synthetic oligonucleotide
ggaucagguucaaagguca

SEQ ID NO: 1898953 - RNA, 19 nt, Artificial Sequence
  Description of Artificial Sequence: Synthetic oligonucleotide
gcaagagccggcccgggag

SEQ ID NO: 1898954 - RNA, 19 nt, Artificial Sequence
  Description of Artificial Sequence: Synthetic oligonucleotide
augcuugacagcgcaagau

SEQ ID NO: 1898955 - RNA, 19 nt, Artificial Sequence
  Description of Artificial Sequence: Synthetic oligonucleotide
gagucuucuugcaucucga

SEQ ID NO: 1898956 - RNA, 19 nt, Artificial Sequence
  Description of Artificial Sequence: Synthetic oligonucleotide
uccugccgcaauagggcgu

SEQ ID NO: 1898957 - RNA, 19 nt, Artificial Sequence
  Description of Artificial Sequence: Synthetic oligonucleotide
acagcacgguaaugggaca

SEQ ID NO: 1898958 - RNA, 19 nt, Artificial Sequence
  Description of Artificial Sequence: Synthetic oligonucleotide
cuuugggcuugccgguccc

SEQ ID NO: 1898959 - RNA, 19 nt, Artificial Sequence
  Description of Artificial Sequence: Synthetic oligonucleotide
augagcucauggagagucg

SEQ ID NO: 1898960 - RNA, 19 nt, Artificial Sequence
  Description of Artificial Sequence: Synthetic oligonucleotide
uuagcaccuccacgguguc

SEQ ID NO: 1898961 - RNA, 19 nt, Artificial Sequence
  Description of Artificial Sequence: Synthetic oligonucleotide
cacgguaaugggacagcuc

SEQ ID NO: 1898962 - RNA, 19 nt, Artificial Sequence
  Description of Artificial Sequence: Synthetic oligonucleotide
ggcuccaauacuucucauc

SEQ ID NO: 1898963 - RNA, 19 nt, Artificial Sequence
  Description of Artificial Sequence: Synthetic oligonucleotide
cagagucgccuuccgcucc

SEQ ID NO: 1898964 - RNA, 19 nt, Artificial Sequence
  Description of Artificial Sequence: Synthetic oligonucleotide
gucccuagaggucaagccu

SEQ ID NO: 1898965 - RNA, 19 nt, Artificial Sequence
  Description of Artificial Sequence: Synthetic oligonucleotide
ugagggcagagucgccuuc

SEQ ID NO: 1898966 - RNA, 19 nt, Artificial Sequence
  Description of Artificial Sequence: Synthetic oligonucleotide
ggugugucccuagagguca

SEQ ID NO: 1898967 - RNA, 19 nt, Artificial Sequence
  Description of Artificial Sequence: Synthetic oligonucleotide
ccgggaugggagcugaggg

SEQ ID NO: 1898968 - RNA, 19 nt, Artificial Sequence
  Description of Artificial Sequence: Synthetic oligonucleotide
cagcacgguaaugggacag

SEQ ID NO: 1898969 - RNA, 19 nt, Artificial Sequence
  Description of Artificial Sequence: Synthetic oligonucleotide
agugugacccagggucggg

SEQ ID NO: 1898970 - RNA, 19 nt, Artificial Sequence
  Description of Artificial Sequence: Synthetic oligonucleotide
uuggguggauagguucccc

SEQ ID NO: 1898971 - RNA, 19 nt, Artificial Sequence
  Description of Artificial Sequence: Synthetic oligonucleotide
gugaaagcacagcacggua

SEQ ID NO: 1898972 - RNA, 19 nt, Artificial Sequence
  Description of Artificial Sequence: Synthetic oligonucleotide
ugccgguccccuguagaag

SEQ ID NO: 1898973 - RNA, 19 nt, Artificial Sequence
  Description of Artificial Sequence: Synthetic oligonucleotide
gucgcucagaggccgcgcc

SEQ ID NO: 1898974 - RNA, 19 nt, Artificial Sequence
  Description of Artificial Sequence: Synthetic oligonucleotide
acccagggucgggagagcg

SEQ ID NO: 1898975 - RNA, 19 nt, Artificial Sequence
  Description of Artificial Sequence: Synthetic oligonucleotide
gcucauggagagucgaaga

SEQ ID NO: 1898976 - RNA, 19 nt, Artificial Sequence
  Description of Artificial Sequence: Synthetic oligonucleotide
ccccgaagugcuaagagca

SEQ ID NO: 1898977 - RNA, 19 nt, Artificial Sequence
  Description of Artificial Sequence: Synthetic oligonucleotide
ggacccaccgccaccaagc

SEQ ID NO: 1898978 - RNA, 19 nt, Artificial Sequence
  Description of Artificial Sequence: Synthetic oligonucleotide
gguucggacgagugugacc

SEQ ID NO: 1898979 - RNA, 19 nt, Artificial Sequence
  Description of Artificial Sequence: Synthetic oligonucleotide
gagggcgcgggcgugcgag

SEQ ID NO: 1898980 - RNA, 19 nt, Artificial Sequence
  Description of Artificial Sequence: Synthetic oligonucleotide
ugccccggcgaggagcggg

SEQ ID NO: 1898981 - RNA, 19 nt, Artificial Sequence
  Description of Artificial Sequence: Synthetic oligonucleotide
auagggcguucuccuucuc

SEQ ID NO: 1898982 - RNA, 19 nt, Artificial Sequence
  Description of Artificial Sequence: Synthetic oligonucleotide
gccaucgccggacaccugc

SEQ ID NO: 1898983 - RNA, 19 nt, Artificial Sequence
  Description of Artificial Sequence: Synthetic oligonucleotide
ugugucccuagaggucaag

SEQ ID NO: 1898984 - RNA, 19 nt, Artificial Sequence
  Description of Artificial Sequence: Synthetic oligonucleotide
gagagucgaagagaugaua

SEQ ID NO: 1898985 - RNA, 19 nt, Artificial Sequence
  Description of Artificial Sequence: Synthetic oligonucleotide
agugucccgugcugggccu

SEQ ID NO: 1898986 - RNA, 19 nt, Artificial Sequence
  Description of Artificial Sequence: Synthetic oligonucleotide
gggccagccguuuccaggc

SEQ ID NO: 1898987 - RNA, 19 nt, Artificial Sequence
  Description of Artificial Sequence: Synthetic oligonucleotide
guuccuccucugagaagcg

SEQ ID NO: 1898988 - RNA, 19 nt, Artificial Sequence
  Description of Artificial Sequence: Synthetic oligonucleotide
ucgcucagaggccgcgcca

SEQ ID NO: 1898989 - RNA, 19 nt, Artificial Sequence
  Description of Artificial Sequence: Synthetic oligonucleotide
agagucgccuuccgcuccu

SEQ ID NO: 1898990 - RNA, 19 nt, Artificial Sequence
  Description of Artificial Sequence: Synthetic oligonucleotide
ccagucaccugcacacucc

SEQ ID NO: 1898991 - RNA, 19 nt, Artificial Sequence
  Description of Artificial Sequence: Synthetic oligonucleotide
ggucaagccugcgcggugg

SEQ ID NO: 1898992 - RNA, 19 nt, Artificial Sequence
  Description of Artificial Sequence: Synthetic oligonucleotide
ccuccccacacccacgagg

SEQ ID NO: 1898993 - RNA, 19 nt, Artificial Sequence
  Description of Artificial Sequence: Synthetic oligonucleotide
ggagacagcuggcuggcuc

SEQ ID NO: 1898994 - RNA, 19 nt, Artificial Sequence
  Description of Artificial Sequence: Synthetic oligonucleotide
aggucaagccugcgcggug

SEQ ID NO: 1898995 - RNA, 19 nt, Artificial Sequence
  Description of Artificial Sequence: Synthetic oligonucleotide
cuugccgguccccuguaga

SEQ ID NO: 1898996 - RNA, 19 nt, Artificial Sequence
  Description of Artificial Sequence: Synthetic oligonucleotide
caucacgucccuggggcac

SEQ ID NO: 1898997 - RNA, 19 nt, Artificial Sequence
  Description of Artificial Sequence: Synthetic oligonucleotide
uaccuccggcuccaauacu

SEQ ID NO: 1898998 - RNA, 19 nt, Artificial Sequence
  Description of Artificial Sequence: Synthetic oligonucleotide
ccuuuaggagacagcuggc

SEQ ID NO: 1898999 - RNA, 19 nt, Artificial Sequence
  Description of Artificial Sequence: Synthetic oligonucleotide
gugggagaaggcuagcuuu

SEQ ID NO: 1899000 - RNA, 19 nt, Artificial Sequence
  Description of Artificial Sequence: Synthetic oligonucleotide
uuugggcuugccggucccc

SEQ ID NO: 1899001 - RNA, 19 nt, Artificial Sequence
  Description of Artificial Sequence: Synthetic oligonucleotide
gugucuccgaggaucaaaa

SEQ ID NO: 1899002 - RNA, 19 nt, Artificial Sequence
  Description of Artificial Sequence: Synthetic oligonucleotide
ugccgcaauagggcguucu

SEQ ID NO: 1899003 - RNA, 19 nt, Artificial Sequence
  Description of Artificial Sequence: Synthetic oligonucleotide
ugguucggacgagugugac

SEQ ID NO: 1899004 - RNA, 19 nt, Artificial Sequence
  Description of Artificial Sequence: Synthetic oligonucleotide
gauggcgugcccucacagu

SEQ ID NO: 1899005 - RNA, 19 nt, Artificial Sequence
  Description of Artificial Sequence: Synthetic oligonucleotide
ugcccucacagugucccgu

SEQ ID NO: 1899006 - RNA, 19 nt, Artificial Sequence
  Description of Artificial Sequence: Synthetic oligonucleotide
gucgggagagcgcggugug

SEQ ID NO: 1899007 - RNA, 19 nt, Artificial Sequence
  Description of Artificial Sequence: Synthetic oligonucleotide
gcacuuggacuuuccuugc

SEQ ID NO: 1899008 - RNA, 19 nt, Artificial Sequence
  Description of Artificial Sequence: Synthetic oligonucleotide
ugucccgugcugggccugg

SEQ ID NO: 1899009 - RNA, 19 nt, Artificial Sequence
  Description of Artificial Sequence: Synthetic oligonucleotide
cagaggccgcgccaucgcc

SEQ ID NO: 1899010 - RNA, 19 nt, Artificial Sequence
  Description of Artificial Sequence: Synthetic oligonucleotide
ucggggcaucggcugggcc

SEQ ID NO: 1899011 - RNA, 19 nt, Artificial Sequence
  Description of Artificial Sequence: Synthetic oligonucleotide
aggcugcccgcaccgauau

SEQ ID NO: 1899012 - RNA, 19 nt, Artificial Sequence
  Description of Artificial Sequence: Synthetic oligonucleotide
ccgaggaucaaaagucuca

SEQ ID NO: 1899013 - RNA, 19 nt, Artificial Sequence
  Description of Artificial Sequence: Synthetic oligonucleotide
guaucaucaucacgucccu

SEQ ID NO: 1899014 - RNA, 19 nt, Artificial Sequence
  Description of Artificial Sequence: Synthetic oligonucleotide
ucaagccugcgcgguggcc

SEQ ID NO: 1899015 - RNA, 19 nt, Artificial Sequence
  Description of Artificial Sequence: Synthetic oligonucleotide
ggcagagucgccuuccgcu

SEQ ID NO: 1899016 - RNA, 19 nt, Artificial Sequence
  Description of Artificial Sequence: Synthetic oligonucleotide
uugcaucucgagaccucuu

SEQ ID NO: 1899017 - RNA, 19 nt, Artificial Sequence
  Description of Artificial Sequence: Synthetic oligonucleotide
ccagggucgggagagcgcg

SEQ ID NO: 1899018 - RNA, 19 nt, Artificial Sequence
  Description of Artificial Sequence: Synthetic oligonucleotide
cgagugugacccagggucg

SEQ ID NO: 1899019 - RNA, 19 nt, Artificial Sequence
  Description of Artificial Sequence: Synthetic oligonucleotide
gguuccccgaagugcuaag

SEQ ID NO: 1899020 - RNA, 19 nt, Artificial Sequence
  Description of Artificial Sequence: Synthetic oligonucleotide
ggccagaccgaggaaggag

SEQ ID NO: 1899021 - RNA, 19 nt, Artificial Sequence
  Description of Artificial Sequence: Synthetic oligonucleotide
gaguaaggaacaggacucu

SEQ ID NO: 1899022 - RNA, 19 nt, Artificial Sequence
  Description of Artificial Sequence: Synthetic oligonucleotide
ccugugguucggacgagug

SEQ ID NO: 1899023 - RNA, 19 nt, Artificial Sequence
  Description of Artificial Sequence: Synthetic oligonucleotide
cuuuaggagacagcuggcu

SEQ ID NO: 1899024 - RNA, 19 nt, Artificial Sequence
  Description of Artificial Sequence: Synthetic oligonucleotide
gugcccucacagugucccg

SEQ ID NO: 1899025 - RNA, 19 nt, Artificial Sequence
  Description of Artificial Sequence: Synthetic oligonucleotide
gucaggugcaagucugagu

SEQ ID NO: 1899026 - RNA, 19 nt, Artificial Sequence
  Description of Artificial Sequence: Synthetic oligonucleotide
gugcgagcuggagaagcgc

SEQ ID NO: 1899027 - RNA, 19 nt, Artificial Sequence
  Description of Artificial Sequence: Synthetic oligonucleotide
cugcucccagguucaugag

SEQ ID NO: 1899028 - RNA, 19 nt, Artificial Sequence
  Description of Artificial Sequence: Synthetic oligonucleotide
gccuggaaugcuugacagc

SEQ ID NO: 1899029 - RNA, 19 nt, Artificial Sequence
  Description of Artificial Sequence: Synthetic oligonucleotide
cugucgcucagaggccgcg

SEQ ID NO: 1899030 - RNA, 19 nt, Artificial Sequence
  Description of Artificial Sequence: Synthetic oligonucleotide
gucaagccugcgcgguggc

SEQ ID NO: 1899031 - RNA, 19 nt, Artificial Sequence
  Description of Artificial Sequence: Synthetic oligonucleotide
uucggacgagugugaccca

SEQ ID NO: 1899032 - RNA, 19 nt, Artificial Sequence
  Description of Artificial Sequence: Synthetic oligonucleotide
gaaggccccgcagcccaag

SEQ ID NO: 1899033 - RNA, 19 nt, Artificial Sequence
  Description of Artificial Sequence: Synthetic oligonucleotide
gcaccgauaucugauucuc

SEQ ID NO: 1899034 - RNA, 19 nt, Artificial Sequence
  Description of Artificial Sequence: Synthetic oligonucleotide
gguggauagguuccccgaa

SEQ ID NO: 1899035 - RNA, 19 nt, Artificial Sequence
  Description of Artificial Sequence: Synthetic oligonucleotide
ggguggauagguuccccga

SEQ ID NO: 1899036 - RNA, 19 nt, Artificial Sequence
  Description of Artificial Sequence: Synthetic oligonucleotide
auggagagucgaagagaug

SEQ ID NO: 1899037 - RNA, 19 nt, Artificial Sequence
  Description of Artificial Sequence: Synthetic oligonucleotide
cucuugccgcacagccacc

SEQ ID NO: 1899038 - RNA, 19 nt, Artificial Sequence
  Description of Artificial Sequence: Synthetic oligonucleotide
guccccuguagaaggcccc

SEQ ID NO: 1899039 - RNA, 19 nt, Artificial Sequence
  Description of Artificial Sequence: Synthetic oligonucleotide
uggccagaccgaggaagga

SEQ ID NO: 1899040 - RNA, 19 nt, Artificial Sequence
  Description of Artificial Sequence: Synthetic oligonucleotide
aaggcugcccgcaccgaua

SEQ ID NO: 1899041 - RNA, 19 nt, Artificial Sequence
  Description of Artificial Sequence: Synthetic oligonucleotide
ggguccugucgcucagagg

SEQ ID NO: 1899042 - RNA, 19 nt, Artificial Sequence
  Description of Artificial Sequence: Synthetic oligonucleotide
gggcgugcgagcuggagaa

SEQ ID NO: 1899043 - RNA, 19 nt, Artificial Sequence
  Description of Artificial Sequence: Synthetic oligonucleotide
agcgcaagaucagcuggau

SEQ ID NO: 1899044 - RNA, 19 nt, Artificial Sequence
  Description of Artificial Sequence: Synthetic oligonucleotide
cgugcgagcuggagaagcg

SEQ ID NO: 1899045 - RNA, 19 nt, Artificial Sequence
  Description of Artificial Sequence: Synthetic oligonucleotide
gacgagugugacccagggu

SEQ ID NO: 1899046 - RNA, 19 nt, Artificial Sequence
  Description of Artificial Sequence: Synthetic oligonucleotide
aagcggugucuccgaggau

SEQ ID NO: 1899047 - RNA, 19 nt, Artificial Sequence
  Description of Artificial Sequence: Synthetic oligonucleotide
guuccccgaagugcuaaga

SEQ ID NO: 1899048 - RNA, 19 nt, Artificial Sequence
  Description of Artificial Sequence: Synthetic oligonucleotide
gugacccagggucgggaga

SEQ ID NO: 1899049 - RNA, 19 nt, Artificial Sequence
  Description of Artificial Sequence: Synthetic oligonucleotide
cuugcaucucgagaccucu

SEQ ID NO: 1899050 - RNA, 19 nt, Artificial Sequence
  Description of Artificial Sequence: Synthetic oligonucleotide
uccccacacccacgaggga

SEQ ID NO: 1899051 - RNA, 19 nt, Artificial Sequence
  Description of Artificial Sequence: Synthetic oligonucleotide
cagggucgggagagcgcgg

SEQ ID NO: 1899052 - RNA, 19 nt, Artificial Sequence
  Description of Artificial Sequence: Synthetic oligonucleotide
agguuccccgaagugcuaa

SEQ ID NO: 1899053 - RNA, 19 nt, Artificial Sequence
  Description of Artificial Sequence: Synthetic oligonucleotide
gggacccaccgccaccaag

SEQ ID NO: 1899054 - RNA, 19 nt, Artificial Sequence
  Description of Artificial Sequence: Synthetic oligonucleotide
gccaccaagcgccccaguc

SEQ ID NO: 1899055 - RNA, 19 nt, Artificial Sequence
  Description of Artificial Sequence: Synthetic oligonucleotide
ccggacaccugcucccagg

SEQ ID NO: 1899056 - RNA, 19 nt, Artificial Sequence
  Description of Artificial Sequence: Synthetic oligonucleotide
cgugcccucacaguguccc

SEQ ID NO: 1899057 - RNA, 19 nt, Artificial Sequence
  Description of Artificial Sequence: Synthetic oligonucleotide
cccuagaggucaagccugc

SEQ ID NO: 1899058 - RNA, 19 nt, Artificial Sequence
  Description of Artificial Sequence: Synthetic oligonucleotide
cccgcggggacccaccgcc

SEQ ID NO: 1899059 - RNA, 19 nt, Artificial Sequence
  Description of Artificial Sequence: Synthetic oligonucleotide
acgagggaggugggagaag

SEQ ID NO: 1899060 - RNA, 19 nt, Artificial Sequence
  Description of Artificial Sequence: Synthetic oligonucleotide
gaaaggcugcccgcaccga

SEQ ID NO: 1899061 - RNA, 19 nt, Artificial Sequence
  Description of Artificial Sequence: Synthetic oligonucleotide
caucgccggacaccugcuc

SEQ ID NO: 1899062 - RNA, 19 nt, Artificial Sequence
  Description of Artificial Sequence: Synthetic oligonucleotide
guccugucgcucagaggcc

SEQ ID NO: 1899063 - RNA, 19 nt, Artificial Sequence
  Description of Artificial Sequence: Synthetic oligonucleotide
ccaagcgccccagucgggg

SEQ ID NO: 1899064 - RNA, 19 nt, Artificial Sequence
  Description of Artificial Sequence: Synthetic oligonucleotide
gcgugcgagcuggagaagc

SEQ ID NO: 1899065 - RNA, 19 nt, Artificial Sequence
  Description of Artificial Sequence: Synthetic oligonucleotide
ccguuuccaggcccggucc

SEQ ID NO: 1899066 - RNA, 19 nt, Artificial Sequence
  Description of Artificial Sequence: Synthetic oligonucleotide
agggucgggagagcgcggu

SEQ ID NO: 1899067 - RNA, 19 nt, Artificial Sequence
  Description of Artificial Sequence: Synthetic oligonucleotide
ccgcaauagggcguucucc

SEQ ID NO: 1899068 - RNA, 19 nt, Artificial Sequence
  Description of Artificial Sequence: Synthetic oligonucleotide
gccagccguuuccaggccc

SEQ ID NO: 1899069 - RNA, 19 nt, Artificial Sequence
  Description of Artificial Sequence: Synthetic oligonucleotide
cccgaagugcuaagagcac

SEQ ID NO: 1899070 - RNA, 19 nt, Artificial Sequence
  Description of Artificial Sequence: Synthetic oligonucleotide
aggacugggugugucccua

SEQ ID NO: 1899071 - RNA, 19 nt, Artificial Sequence
  Description of Artificial Sequence: Synthetic oligonucleotide
ccagaguagcccgcgcggg

SEQ ID NO: 1899072 - RNA, 19 nt, Artificial Sequence
  Description of Artificial Sequence: Synthetic oligonucleotide
gaggucaagccugcgcggu

SEQ ID NO: 1899073 - RNA, 19 nt, Artificial Sequence
  Description of Artificial Sequence: Synthetic oligonucleotide
gcucccagaguagcccgcg

SEQ ID NO: 1899074 - RNA, 19 nt, Artificial Sequence
  Description of Artificial Sequence: Synthetic oligonucleotide
ggggcaucggcugggccag

SEQ ID NO: 1899075 - RNA, 19 nt, Artificial Sequence
  Description of Artificial Sequence: Synthetic oligonucleotide
ggugucuccgaggaucaaa

SEQ ID NO: 1899076 - RNA, 19 nt, Artificial Sequence
  Description of Artificial Sequence: Synthetic oligonucleotide
gacucugaucaggaaggau

SEQ ID NO: 1899077 - RNA, 19 nt, Artificial Sequence
  Description of Artificial Sequence: Synthetic oligonucleotide
gccugguaucgugaaagca

SEQ ID NO: 1899078 - RNA, 19 nt, Artificial Sequence
  Description of Artificial Sequence: Synthetic oligonucleotide
cgguuggguggauagguuc

SEQ ID NO: 1899079 - RNA, 19 nt, Artificial Sequence
  Description of Artificial Sequence: Synthetic oligonucleotide
gggcagagucgccuuccgc

SEQ ID NO: 1899080 - RNA, 19 nt, Artificial Sequence
  Description of Artificial Sequence: Synthetic oligonucleotide
caggugcaagucugaguaa

SEQ ID NO: 1899081 - RNA, 19 nt, Artificial Sequence
  Description of Artificial Sequence: Synthetic oligonucleotide
ccagaaaggcugcccgcac

SEQ ID NO: 1899082 - RNA, 19 nt, Artificial Sequence
  Description of Artificial Sequence: Synthetic oligonucleotide
ucccgugcugggccuggua

SEQ ID NO: 1899083 - RNA, 19 nt, Artificial Sequence
  Description of Artificial Sequence: Synthetic oligonucleotide
cccggucccgggaugggag

SEQ ID NO: 1899084 - RNA, 19 nt, Artificial Sequence
  Description of Artificial Sequence: Synthetic oligonucleotide
cgugccccggcgaggagcg

SEQ ID NO: 1899085 - RNA, 19 nt, Artificial Sequence
  Description of Artificial Sequence: Synthetic oligonucleotide
agucgccuuccgcuccuuu

SEQ ID NO: 1899086 - RNA, 19 nt, Artificial Sequence
  Description of Artificial Sequence: Synthetic oligonucleotide
cugugguucggacgagugu

SEQ ID NO: 1899087 - RNA, 19 nt, Artificial Sequence
  Description of Artificial Sequence: Synthetic oligonucleotide
gccgccggcucccagagua

SEQ ID NO: 1899088 - RNA, 19 nt, Artificial Sequence
  Description of Artificial Sequence: Synthetic oligonucleotide
cacggugucuggguccaca

SEQ ID NO: 1899089 - RNA, 19 nt, Artificial Sequence
  Description of Artificial Sequence: Synthetic oligonucleotide
gccgcaauagggcguucuc

SEQ ID NO: 1899090 - RNA, 19 nt, Artificial Sequence
  Description of Artificial Sequence: Synthetic oligonucleotide
gcuugccgguccccuguag

SEQ ID NO: 1899091 - RNA, 19 nt, Artificial Sequence
  Description of Artificial Sequence: Synthetic oligonucleotide
ccgcaccgauaucugauuc

SEQ ID NO: 1899092 - RNA, 19 nt, Artificial Sequence
  Description of Artificial Sequence: Synthetic oligonucleotide
cucauggccuggaaugcuu

SEQ ID NO: 1899093 - RNA, 19 nt, Artificial Sequence
  Description of Artificial Sequence: Synthetic oligonucleotide
ccuagaggucaagccugcg

SEQ ID NO: 1899094 - RNA, 19 nt, Artificial Sequence
  Description of Artificial Sequence: Synthetic oligonucleotide
gccgcaagagccggcccgg

SEQ ID NO: 1899095 - RNA, 19 nt, Artificial Sequence
  Description of Artificial Sequence: Synthetic oligonucleotide
cccgggaugggagcugagg

SEQ ID NO: 1899096 - RNA, 19 nt, Artificial Sequence
  Description of Artificial Sequence: Synthetic oligonucleotide
gcccucacagugucccgug

SEQ ID NO: 1899097 - RNA, 19 nt, Artificial Sequence
  Description of Artificial Sequence: Synthetic oligonucleotide
gcacacuccugugguucgg

SEQ ID NO: 1899098 - RNA, 19 nt, Artificial Sequence
  Description of Artificial Sequence: Synthetic oligonucleotide
gcgcaagaucagcuggauc

SEQ ID NO: 1899099 - RNA, 19 nt, Artificial Sequence
  Description of Artificial Sequence: Synthetic oligonucleotide
gacccagggucgggagagc

SEQ ID NO: 1899100 - RNA, 19 nt, Artificial Sequence
  Description of Artificial Sequence: Synthetic oligonucleotide
ggcaccuagcuggccagac

SEQ ID NO: 1899101 - RNA, 19 nt, Artificial Sequence
  Description of Artificial Sequence: Synthetic oligonucleotide
aguagcccgcgcggggcgu

SEQ ID NO: 1899102 - RNA, 19 nt, Artificial Sequence
  Description of Artificial Sequence: Synthetic oligonucleotide
ucgagaccucuuggcugcu

SEQ ID NO: 1899103 - RNA, 19 nt, Artificial Sequence
  Description of Artificial Sequence: Synthetic oligonucleotide
cacacuccugugguucgga

SEQ ID NO: 1899104 - RNA, 19 nt, Artificial Sequence
  Description of Artificial Sequence: Synthetic oligonucleotide
cucgggcacuuggacuuuc

SEQ ID NO: 1899105 - RNA, 19 nt, Artificial Sequence
  Description of Artificial Sequence: Synthetic oligonucleotide
cagucaccugcacacuccu

SEQ ID NO: 1899106 - RNA, 19 nt, Artificial Sequence
  Description of Artificial Sequence: Synthetic oligonucleotide
gagcgcggugugcaagccu

SEQ ID NO: 1899107 - RNA, 19 nt, Artificial Sequence
  Description of Artificial Sequence: Synthetic oligonucleotide
ucggcugggccagccguuu

SEQ ID NO: 1899108 - RNA, 19 nt, Artificial Sequence
  Description of Artificial Sequence: Synthetic oligonucleotide
ggacucugaucaggaagga

SEQ ID NO: 1899109 - RNA, 19 nt, Artificial Sequence
  Description of Artificial Sequence: Synthetic oligonucleotide
ccaccuccugccgcaauag

SEQ ID NO: 1899110 - RNA, 19 nt, Artificial Sequence
  Description of Artificial Sequence: Synthetic oligonucleotide
ccugucgcucagaggccgc

SEQ ID NO: 1899111 - RNA, 19 nt, Artificial Sequence
  Description of Artificial Sequence: Synthetic oligonucleotide
ccgaagugcuaagagcaca

SEQ ID NO: 1899112 - RNA, 19 nt, Artificial Sequence
  Description of Artificial Sequence: Synthetic oligonucleotide
cacuuggacuuuccuugcu

SEQ ID NO: 1899113 - RNA, 19 nt, Artificial Sequence
  Description of Artificial Sequence: Synthetic oligonucleotide
cggacgagugugacccagg

SEQ ID NO: 1899114 - RNA, 19 nt, Artificial Sequence
  Description of Artificial Sequence: Synthetic oligonucleotide
ggcaucggcugggccagcc

SEQ ID NO: 1899115 - RNA, 19 nt, Artificial Sequence
  Description of Artificial Sequence: Synthetic oligonucleotide
gucgccuuccgcuccuuuu

SEQ ID NO: 1899116 - RNA, 19 nt, Artificial Sequence
  Description of Artificial Sequence: Synthetic oligonucleotide
gaccucuuggcugcuucau

SEQ ID NO: 1899117 - RNA, 19 nt, Artificial Sequence
  Description of Artificial Sequence: Synthetic oligonucleotide
ccgguccccuguagaaggc

SEQ ID NO: 1899118 - RNA, 19 nt, Artificial Sequence
  Description of Artificial Sequence: Synthetic oligonucleotide
gcgcgggcgugcgagcugg

SEQ ID NO: 1899119 - RNA, 19 nt, Artificial Sequence
  Description of Artificial Sequence: Synthetic oligonucleotide
ggaaugcuugacagcgcaa

SEQ ID NO: 1899120 - RNA, 19 nt, Artificial Sequence
  Description of Artificial Sequence: Synthetic oligonucleotide
agcccgcgcggggcgugcc

SEQ ID NO: 1899121 - RNA, 19 nt, Artificial Sequence
  Description of Artificial Sequence: Synthetic oligonucleotide
ggacagcucuugccgcaca

SEQ ID NO: 1899122 - RNA, 19 nt, Artificial Sequence
  Description of Artificial Sequence: Synthetic oligonucleotide
cugcgcgguggccgccgcc

SEQ ID NO: 1899123 - RNA, 19 nt, Artificial Sequence
  Description of Artificial Sequence: Synthetic oligonucleotide
ccgugcugggccugguauc

SEQ ID NO: 1899124 - RNA, 19 nt, Artificial Sequence
  Description of Artificial Sequence: Synthetic oligonucleotide
guagcccgcgcggggcgug

SEQ ID NO: 1899125 - RNA, 19 nt, Artificial Sequence
  Description of Artificial Sequence: Synthetic oligonucleotide
gccggacaccugcucccag

SEQ ID NO: 1899126 - RNA, 19 nt, Artificial Sequence
  Description of Artificial Sequence: Synthetic oligonucleotide
ccggucccgggaugggagc

SEQ ID NO: 1899127 - RNA, 19 nt, Artificial Sequence
  Description of Artificial Sequence: Synthetic oligonucleotide
gggucgggagagcgcggug

SEQ ID NO: 1899128 - RNA, 19 nt, Artificial Sequence
  Description of Artificial Sequence: Synthetic oligonucleotide
ccacgagggaggugggaga

SEQ ID NO: 1899129 - RNA, 19 nt, Artificial Sequence
  Description of Artificial Sequence: Synthetic oligonucleotide
gugucccgugcugggccug

SEQ ID NO: 1899130 - RNA, 19 nt, Artificial Sequence
  Description of Artificial Sequence: Synthetic oligonucleotide
aucggcugggccagccguu

SEQ ID NO: 1899131 - RNA, 19 nt, Artificial Sequence
  Description of Artificial Sequence: Synthetic oligonucleotide
ggucccgggaugggagcug

SEQ ID NO: 1899132 - RNA, 19 nt, Artificial Sequence
  Description of Artificial Sequence: Synthetic oligonucleotide
ggagagucgaagagaugau

SEQ ID NO: 1899133 - RNA, 19 nt, Artificial Sequence
  Description of Artificial Sequence: Synthetic oligonucleotide
gccccagucggggcaucgg

SEQ ID NO: 1899134 - RNA, 19 nt, Artificial Sequence
  Description of Artificial Sequence: Synthetic oligonucleotide
ggggcgugccccggcgagg

SEQ ID NO: 1899135 - RNA, 19 nt, Artificial Sequence
  Description of Artificial Sequence: Synthetic oligonucleotide
agcgccccagucggggcau

SEQ ID NO: 1899136 - RNA, 19 nt, Artificial Sequence
  Description of Artificial Sequence: Synthetic oligonucleotide
gcacgguaaugggacagcu

SEQ ID NO: 1899137 - RNA, 19 nt, Artificial Sequence
  Description of Artificial Sequence: Synthetic oligonucleotide
ggcgugcgagcuggagaag

SEQ ID NO: 1899138 - RNA, 19 nt, Artificial Sequence
  Description of Artificial Sequence: Synthetic oligonucleotide
ggcgcgggcgugcgagcug

SEQ ID NO: 1899139 - RNA, 19 nt, Artificial Sequence
  Description of Artificial Sequence: Synthetic oligonucleotide
cgcgccaucgccggacacc

SEQ ID NO: 1899140 - RNA, 19 nt, Artificial Sequence
  Description of Artificial Sequence: Synthetic oligonucleotide
agaaggccccgcagcccaa

SEQ ID NO: 1899141 - RNA, 19 nt, Artificial Sequence
  Description of Artificial Sequence: Synthetic oligonucleotide
gcaauagggcguucuccuu

SEQ ID NO: 1899142 - RNA, 19 nt, Artificial Sequence
  Description of Artificial Sequence: Synthetic oligonucleotide
gccccggcgaggagcgggg

SEQ ID NO: 1899143 - RNA, 19 nt, Artificial Sequence
  Description of Artificial Sequence: Synthetic oligonucleotide
ggccgcgccaucgccggac

SEQ ID NO: 1899144 - RNA, 19 nt, Artificial Sequence
  Description of Artificial Sequence: Synthetic oligonucleotide
ccgccgccggcucccagag

SEQ ID NO: 1899145 - RNA, 19 nt, Artificial Sequence
  Description of Artificial Sequence: Synthetic oligonucleotide
gccugcgcgguggccgccg

SEQ ID NO: 1899146 - RNA, 19 nt, Artificial Sequence
  Description of Artificial Sequence: Synthetic oligonucleotide
ccgccggcucccagaguag

SEQ ID NO: 1899147 - RNA, 19 nt, Artificial Sequence
  Description of Artificial Sequence: Synthetic oligonucleotide
ccgggguccugucgcucag

SEQ ID NO: 1899148 - RNA, 19 nt, Artificial Sequence
  Description of Artificial Sequence: Synthetic oligonucleotide
gcgggcgugcgagcuggag

SEQ ID NO: 1899149 - RNA, 19 nt, Artificial Sequence
  Description of Artificial Sequence: Synthetic oligonucleotide
gggcgugccccggcgagga

SEQ ID NO: 1899150 - RNA, 19 nt, Artificial Sequence
  Description of Artificial Sequence: Synthetic oligonucleotide
cgcaccgauaucugauucu

SEQ ID NO: 1899151 - RNA, 19 nt, Artificial Sequence
  Description of Artificial Sequence: Synthetic oligonucleotide
ccgauaucugauucuccuu

SEQ ID NO: 1899152 - RNA, 19 nt, Artificial Sequence
  Description of Artificial Sequence: Synthetic oligonucleotide
gcgcggugugcaagccucc

SEQ ID NO: 1899153 - RNA, 19 nt, Artificial Sequence
  Description of Artificial Sequence: Synthetic oligonucleotide
cgggcgugcgagcuggaga

SEQ ID NO: 1899154 - RNA, 19 nt, Artificial Sequence
  Description of Artificial Sequence: Synthetic oligonucleotide
gcgccaucgccggacaccu

SEQ ID NO: 1899155 - RNA, 19 nt, Artificial Sequence
  Description of Artificial Sequence: Synthetic oligonucleotide
gugccccggcgaggagcgg

SEQ ID NO: 1899156 - RNA, 19 nt, Artificial Sequence
  Description of Artificial Sequence: Synthetic oligonucleotide
cugccgcaauagggcguuc

SEQ ID NO: 1899157 - RNA, 19 nt, Artificial Sequence
  Description of Artificial Sequence: Synthetic oligonucleotide
ggcccgggagggcgcgggc

SEQ ID NO: 1899158 - RNA, 19 nt, Artificial Sequence
  Description of Artificial Sequence: Synthetic oligonucleotide
cgaggaucaaaagucucau

SEQ ID NO: 1899159 - RNA, 19 nt, Artificial Sequence
  Description of Artificial Sequence: Synthetic oligonucleotide
gcccgcaccgauaucugau

SEQ ID NO: 1899160 - RNA, 19 nt, Artificial Sequence
  Description of Artificial Sequence: Synthetic oligonucleotide
cggggcgugccccggcgag

SEQ ID NO: 1899161 - RNA, 19 nt, Artificial Sequence
  Description of Artificial Sequence: Synthetic oligonucleotide
gcgugcccucacagugucc

SEQ ID NO: 1899162 - RNA, 19 nt, Artificial Sequence
  Description of Artificial Sequence: Synthetic oligonucleotide
ggcuugccgguccccugua

SEQ ID NO: 1899163 - RNA, 19 nt, Artificial Sequence
  Description of Artificial Sequence: Synthetic oligonucleotide
ccgcaagagccggcccggg

SEQ ID NO: 1899164 - RNA, 19 nt, Artificial Sequence
  Description of Artificial Sequence: Synthetic oligonucleotide
gccggcccgggagggcgcg

SEQ ID NO: 1899165 - RNA, 19 nt, Artificial Sequence
  Description of Artificial Sequence: Synthetic oligonucleotide
ggagggcgcgggcgugcga

SEQ ID NO: 1899166 - RNA, 19 nt, Artificial Sequence
  Description of Artificial Sequence: Synthetic oligonucleotide
gcccgcgcggggcgugccc

SEQ ID NO: 1899167 - RNA, 19 nt, Artificial Sequence
  Description of Artificial Sequence: Synthetic oligonucleotide
ggucccggccgggccuccc

SEQ ID NO: 1899168 - RNA, 19 nt, Artificial Sequence
  Description of Artificial Sequence: Synthetic oligonucleotide
gcccggucccgggauggga

SEQ ID NO: 1899169 - RNA, 19 nt, Artificial Sequence
  Description of Artificial Sequence: Synthetic oligonucleotide
cgccccagucggggcaucg

SEQ ID NO: 1899170 - RNA, 19 nt, Artificial Sequence
  Description of Artificial Sequence: Synthetic oligonucleotide
ccaucgccggacaccugcu

SEQ ID NO: 1899171 - RNA, 19 nt, Artificial Sequence
  Description of Artificial Sequence: Synthetic oligonucleotide
ccgcgccaucgccggacac

SEQ ID NO: 1899172 - RNA, 19 nt, Artificial Sequence
  Description of Artificial Sequence: Synthetic oligonucleotide
ggggucccggccgggccuc

SEQ ID NO: 1899173 - RNA, 19 nt, Artificial Sequence
  Description of Artificial Sequence: Synthetic oligonucleotide
cggggacccaccgccacca

SEQ ID NO: 1899174 - RNA, 19 nt, Artificial Sequence
  Description of Artificial Sequence: Synthetic oligonucleotide
cccgcaccgauaucugauu

SEQ ID NO: 1899175 - RNA, 19 nt, Artificial Sequence
  Description of Artificial Sequence: Synthetic oligonucleotide
ccugcacacuccugugguu

SEQ ID NO: 1899176 - RNA, 19 nt, Artificial Sequence
  Description of Artificial Sequence: Synthetic oligonucleotide
ggcccgggguccugucgcu

SEQ ID NO: 1899177 - RNA, 19 nt, Artificial Sequence
  Description of Artificial Sequence: Synthetic oligonucleotide
cgggagggcgcgggcgugc

SEQ ID NO: 1899178 - RNA, 19 nt, Artificial Sequence
  Description of Artificial Sequence: Synthetic oligonucleotide
ccugccgcaauagggcguu

SEQ ID NO: 1899179 - RNA, 19 nt, Artificial Sequence
  Description of Artificial Sequence: Synthetic oligonucleotide
gggcaucggcugggccagc

SEQ ID NO: 1899180 - RNA, 19 nt, Artificial Sequence
  Description of Artificial Sequence: Synthetic oligonucleotide
ccgggagggcgcgggcgug

SEQ ID NO: 1899181 - RNA, 19 nt, Artificial Sequence
  Description of Artificial Sequence: Synthetic oligonucleotide
gagucgccuuccgcuccuu

SEQ ID NO: 1899182 - RNA, 19 nt, Artificial Sequence
  Description of Artificial Sequence: Synthetic oligonucleotide
cgcggugugcaagccucca

SEQ ID NO: 1899183 - RNA, 19 nt, Artificial Sequence
  Description of Artificial Sequence: Synthetic oligonucleotide
gggcgcgggcgugcgagcu

SEQ ID NO: 1899184 - RNA, 19 nt, Artificial Sequence
  Description of Artificial Sequence: Synthetic oligonucleotide
cgccaucgccggacaccug

SEQ ID NO: 1899185 - RNA, 19 nt, Artificial Sequence
  Description of Artificial Sequence: Synthetic oligonucleotide
cgguaaugggacagcucuu

SEQ ID NO: 1899186 - RNA, 19 nt, Artificial Sequence
  Description of Artificial Sequence: Synthetic oligonucleotide
ccaggcccggucccgggau

SEQ ID NO: 1899187 - RNA, 19 nt, Artificial Sequence
  Description of Artificial Sequence: Synthetic oligonucleotide
cacgucccuggggcaccua

SEQ ID NO: 1899188 - RNA, 19 nt, Artificial Sequence
  Description of Artificial Sequence: Synthetic oligonucleotide
caccugcucccagguucau

SEQ ID NO: 1899189 - RNA, 19 nt, Artificial Sequence
  Description of Artificial Sequence: Synthetic oligonucleotide
cgccggacaccugcuccca

SEQ ID NO: 1899190 - RNA, 19 nt, Artificial Sequence
  Description of Artificial Sequence: Synthetic oligonucleotide
gcgccccagucggggcauc

SEQ ID NO: 1899191 - RNA, 19 nt, Artificial Sequence
  Description of Artificial Sequence: Synthetic oligonucleotide
cggucccgggaugggagcu

SEQ ID NO: 1899192 - RNA, 19 nt, Artificial Sequence
  Description of Artificial Sequence: Synthetic oligonucleotide
cggugucuccgaggaucaa

SEQ ID NO: 1899193 - RNA, 19 nt, Artificial Sequence
  Description of Artificial Sequence: Synthetic oligonucleotide
ccucgggcacuuggacuuu

SEQ ID NO: 1899194 - RNA, 19 nt, Artificial Sequence
  Description of Artificial Sequence: Synthetic oligonucleotide
cgccgccggcucccagagu

SEQ ID NO: 1899195 - RNA, 19 nt, Artificial Sequence
  Description of Artificial Sequence: Synthetic oligonucleotide
ugugagaucaucaucagag

SEQ ID NO: 1899196 - RNA, 19 nt, Artificial Sequence
  Description of Artificial Sequence: Synthetic oligonucleotide
aacaguuuaucacacuucg

SEQ ID NO: 1899197 - RNA, 19 nt, Artificial Sequence
  Description of Artificial Sequence: Synthetic oligonucleotide
cauaaagugaacauggagc

SEQ ID NO: 1899198 - RNA, 19 nt, Artificial Sequence
  Description of Artificial Sequence: Synthetic oligonucleotide
aacacuuccacuuccuuuc

SEQ ID NO: 1899199 - RNA, 19 nt, Artificial Sequence
  Description of Artificial Sequence: Synthetic oligonucleotide
uuagauaagccuuuguaca

SEQ ID NO: 1899200 - RNA, 19 nt, Artificial Sequence
  Description of Artificial Sequence: Synthetic oligonucleotide
uaggccaacuucaugaagg

SEQ ID NO: 1899201 - RNA, 19 nt, Artificial Sequence
  Description of Artificial Sequence: Synthetic oligonucleotide
acaguaaucacauuugaga

SEQ ID NO: 1899202 - RNA, 19 nt, Artificial Sequence
  Description of Artificial Sequence: Synthetic oligonucleotide
uguauuuuaaggugugucc

SEQ ID NO: 1899203 - RNA, 19 nt, Artificial Sequence
  Description of Artificial Sequence: Synthetic oligonucleotide
acauuguuugaauuggagg

SEQ ID NO: 1899204 - RNA, 19 nt, Artificial Sequence
  Description of Artificial Sequence: Synthetic oligonucleotide
uggaaggagagauaaaagc

SEQ ID NO: 1899205 - RNA, 19 nt, Artificial Sequence
  Description of Artificial Sequence: Synthetic oligonucleotide
auaaagugaacauggagcu

SEQ ID NO: 1899206 - RNA, 19 nt, Artificial Sequence
  Description of Artificial Sequence: Synthetic oligonucleotide
acaaaguacaccuauaauu

SEQ ID NO: 1899207 - RNA, 19 nt, Artificial Sequence
  Description of Artificial Sequence: Synthetic oligonucleotide
caaaguacaccuauaauuc

SEQ ID NO: 1899208 - RNA, 19 nt, Artificial Sequence
  Description of Artificial Sequence: Synthetic oligonucleotide
aagggagacagauucuagg

SEQ ID NO: 1899209 - RNA, 19 nt, Artificial Sequence
  Description of Artificial Sequence: Synthetic oligonucleotide
uccauuugcaaggugaagg

SEQ ID NO: 1899210 - RNA, 19 nt, Artificial Sequence
  Description of Artificial Sequence: Synthetic oligonucleotide
aaagugaacauggagcuug

SEQ ID NO: 1899211 - RNA, 19 nt, Artificial Sequence
  Description of Artificial Sequence: Synthetic oligonucleotide
uuuaagguguguccguagg

SEQ ID NO: 1899212 - RNA, 19 nt, Artificial Sequence
  Description of Artificial Sequence: Synthetic oligonucleotide
aguuuaucacacuucggac

SEQ ID NO: 1899213 - RNA, 19 nt, Artificial Sequence
  Description of Artificial Sequence: Synthetic oligonucleotide
ugucacacaaaguacaccu

SEQ ID NO: 1899214 - RNA, 19 nt, Artificial Sequence
  Description of Artificial Sequence: Synthetic oligonucleotide
uuugagauucuucucgccc

SEQ ID NO: 1899215 - RNA, 19 nt, Artificial Sequence
  Description of Artificial Sequence: Synthetic oligonucleotide
uucuagggaggcaagauug

SEQ ID NO: 1899216 - RNA, 19 nt, Artificial Sequence
  Description of Artificial Sequence: Synthetic oligonucleotide
uaaacagcacugcucaucc

SEQ ID NO: 1899217 - RNA, 19 nt, Artificial Sequence
  Description of Artificial Sequence: Synthetic oligonucleotide
ugguuuguucucaagaaca

SEQ ID NO: 1899218 - RNA, 19 nt, Artificial Sequence
  Description of Artificial Sequence: Synthetic oligonucleotide
ucacauuugagauucuucu

SEQ ID NO: 1899219 - RNA, 19 nt, Artificial Sequence
  Description of Artificial Sequence: Synthetic oligonucleotide
acgcuuacagaguuggugc

SEQ ID NO: 1899220 - RNA, 19 nt, Artificial Sequence
  Description of Artificial Sequence: Synthetic oligonucleotide
caugaagggagacagauuc

SEQ ID NO: 1899221 - RNA, 19 nt, Artificial Sequence
  Description of Artificial Sequence: Synthetic oligonucleotide
accuauaauucuucugacc

SEQ ID NO: 1899222 - RNA, 19 nt, Artificial Sequence
  Description of Artificial Sequence: Synthetic oligonucleotide
guuagauaagccuuuguac

SEQ ID NO: 1899223 - RNA, 19 nt, Artificial Sequence
  Description of Artificial Sequence: Synthetic oligonucleotide
ucacuaaaagccuugcuac

SEQ ID NO: 1899224 - RNA, 19 nt, Artificial Sequence
  Description of Artificial Sequence: Synthetic oligonucleotide
aggucuuccauuugcaagg

SEQ ID NO: 1899225 - RNA, 19 nt, Artificial Sequence
  Description of Artificial Sequence: Synthetic oligonucleotide
acaccuauaauucuucuga

SEQ ID NO: 1899226 - RNA, 19 nt, Artificial Sequence
  Description of Artificial Sequence: Synthetic oligonucleotide
ugaaagacuugucacacaa

SEQ ID NO: 1899227 - RNA, 19 nt, Artificial Sequence
  Description of Artificial Sequence: Synthetic oligonucleotide
gauguggcugguuagauga

SEQ ID NO: 1899228 - RNA, 19 nt, Artificial Sequence
  Description of Artificial Sequence: Synthetic oligonucleotide
uuuguucucaagaacaguu

SEQ ID NO: 1899229 - RNA, 19 nt, Artificial Sequence
  Description of Artificial Sequence: Synthetic oligonucleotide
ugauggaagagacagccac

SEQ ID NO: 1899230 - RNA, 19 nt, Artificial Sequence
  Description of Artificial Sequence: Synthetic oligonucleotide
ugagaugguacuugguuag

SEQ ID NO: 1899231 - RNA, 19 nt, Artificial Sequence
  Description of Artificial Sequence: Synthetic oligonucleotide
gagagugccacgcuuacag

SEQ ID NO: 1899232 - RNA, 19 nt, Artificial Sequence
  Description of Artificial Sequence: Synthetic oligonucleotide
ugcgugauggaagagacag

SEQ ID NO: 1899233 - RNA, 19 nt, Artificial Sequence
  Description of Artificial Sequence: Synthetic oligonucleotide
cucaagaacaguuuaucac

SEQ ID NO: 1899234 - RNA, 19 nt, Artificial Sequence
  Description of Artificial Sequence: Synthetic oligonucleotide
ugcuacaaaagucacacuu

SEQ ID NO: 1899235 - RNA, 19 nt, Artificial Sequence
  Description of Artificial Sequence: Synthetic oligonucleotide
aagugguuuguucucaaga

SEQ ID NO: 1899236 - RNA, 19 nt, Artificial Sequence
  Description of Artificial Sequence: Synthetic oligonucleotide
auuugcaaggugaaggugg

SEQ ID NO: 1899237 - RNA, 19 nt, Artificial Sequence
  Description of Artificial Sequence: Synthetic oligonucleotide
aacucugaauaggaauugc

SEQ ID NO: 1899238 - RNA, 19 nt, Artificial Sequence
  Description of Artificial Sequence: Synthetic oligonucleotide
uggagagagacucauccgc

SEQ ID NO: 1899239 - RNA, 19 nt, Artificial Sequence
  Description of Artificial Sequence: Synthetic oligonucleotide
guauuuuaagguguguccg

SEQ ID NO: 1899240 - RNA, 19 nt, Artificial Sequence
  Description of Artificial Sequence: Synthetic oligonucleotide
acaucuacaugaccugccc

SEQ ID NO: 1899241 - RNA, 19 nt, Artificial Sequence
  Description of Artificial Sequence: Synthetic oligonucleotide
uaagaugcuucuucaagug

SEQ ID NO: 1899242 - RNA, 19 nt, Artificial Sequence
  Description of Artificial Sequence: Synthetic oligonucleotide
cugaauaggaauugcacuc

SEQ ID NO: 1899243 - RNA, 19 nt, Artificial Sequence
  Description of Artificial Sequence: Synthetic oligonucleotide
ugaacucugaauaggaauu

SEQ ID NO: 1899244 - RNA, 19 nt, Artificial Sequence
  Description of Artificial Sequence: Synthetic oligonucleotide
agagcacugucagacaucc

SEQ ID NO: 1899245 - RNA, 19 nt, Artificial Sequence
  Description of Artificial Sequence: Synthetic oligonucleotide
aagccaagcugucugagga

SEQ ID NO: 1899246 - RNA, 19 nt, Artificial Sequence
  Description of Artificial Sequence: Synthetic oligonucleotide
uuugaauuggaggucuucc

SEQ ID NO: 1899247 - RNA, 19 nt, Artificial Sequence
  Description of Artificial Sequence: Synthetic oligonucleotide
guauggaugaccaugugug

SEQ ID NO: 1899248 - RNA, 19 nt, Artificial Sequence
  Description of Artificial Sequence: Synthetic oligonucleotide
aacagcuugucacaguaau

SEQ ID NO: 1899249 - RNA, 19 nt, Artificial Sequence
  Description of Artificial Sequence: Synthetic oligonucleotide
uauaauucuucugaccugu

SEQ ID NO: 1899250 - RNA, 19 nt, Artificial Sequence
  Description of Artificial Sequence: Synthetic oligonucleotide
gcuuggaucacuaaaagcc

SEQ ID NO: 1899251 - RNA, 19 nt, Artificial Sequence
  Description of Artificial Sequence: Synthetic oligonucleotide
ucauccgcugaguaaacag

SEQ ID NO: 1899252 - RNA, 19 nt, Artificial Sequence
  Description of Artificial Sequence: Synthetic oligonucleotide
gagagauaaaagccugggg

SEQ ID NO: 1899253 - RNA, 19 nt, Artificial Sequence
  Description of Artificial Sequence: Synthetic oligonucleotide
acccauaaagugaacaugg

SEQ ID NO: 1899254 - RNA, 19 nt, Artificial Sequence
  Description of Artificial Sequence: Synthetic oligonucleotide
guuagaugagcuuugaacu

SEQ ID NO: 1899255 - RNA, 19 nt, Artificial Sequence
  Description of Artificial Sequence: Synthetic oligonucleotide
agacauaaucucguuuucc

SEQ ID NO: 1899256 - RNA, 19 nt, Artificial Sequence
  Description of Artificial Sequence: Synthetic oligonucleotide
gaauuaagaugcuucuuca

SEQ ID NO: 1899257 - RNA, 19 nt, Artificial Sequence
  Description of Artificial Sequence: Synthetic oligonucleotide
aauuaagaugcuucuucaa

SEQ ID NO: 1899258 - RNA, 19 nt, Artificial Sequence
  Description of Artificial Sequence: Synthetic oligonucleotide
aauccacagagaguguuuc

SEQ ID NO: 1899259 - RNA, 19 nt, Artificial Sequence
  Description of Artificial Sequence: Synthetic oligonucleotide
uacuugguuagauaagccu

SEQ ID NO: 1899260 - RNA, 19 nt, Artificial Sequence
  Description of Artificial Sequence: Synthetic oligonucleotide
aucacuaaaagccuugcua

SEQ ID NO: 1899261 - RNA, 19 nt, Artificial Sequence
  Description of Artificial Sequence: Synthetic oligonucleotide
cauaugacccauaaaguga

SEQ ID NO: 1899262 - RNA, 19 nt, Artificial Sequence
  Description of Artificial Sequence: Synthetic oligonucleotide
agaacaguuuaucacacuu

SEQ ID NO: 1899263 - RNA, 19 nt, Artificial Sequence
  Description of Artificial Sequence: Synthetic oligonucleotide
aucucguuuuccuucauga

SEQ ID NO: 1899264 - RNA, 19 nt, Artificial Sequence
  Description of Artificial Sequence: Synthetic oligonucleotide
ugaacagcuugucacagua

SEQ ID NO: 1899265 - RNA, 19 nt, Artificial Sequence
  Description of Artificial Sequence: Synthetic oligonucleotide
uuugcaauguggucugucu

SEQ ID NO: 1899266 - RNA, 19 nt, Artificial Sequence
  Description of Artificial Sequence: Synthetic oligonucleotide
aagguguguccguagguug

SEQ ID NO: 1899267 - RNA, 19 nt, Artificial Sequence
  Description of Artificial Sequence: Synthetic oligonucleotide
cacauguuguuugaggucc

SEQ ID NO: 1899268 - RNA, 19 nt, Artificial Sequence
  Description of Artificial Sequence: Synthetic oligonucleotide
ugcuuggaucacuaaaagc

SEQ ID NO: 1899269 - RNA, 19 nt, Artificial Sequence
  Description of Artificial Sequence: Synthetic oligonucleotide
uuuguguguggagagagac

SEQ ID NO: 1899270 - RNA, 19 nt, Artificial Sequence
  Description of Artificial Sequence: Synthetic oligonucleotide
cauuugagauucuucucgc

SEQ ID NO: 1899271 - RNA, 19 nt, Artificial Sequence
  Description of Artificial Sequence: Synthetic oligonucleotide
ugucagacaucccauugac

SEQ ID NO: 1899272 - RNA, 19 nt, Artificial Sequence
  Description of Artificial Sequence: Synthetic oligonucleotide
uguucucaagaacaguuua

SEQ ID NO: 1899273 - RNA, 19 nt, Artificial Sequence
  Description of Artificial Sequence: Synthetic oligonucleotide
uuuuaagguguguccguag

SEQ ID NO: 1899274 - RNA, 19 nt, Artificial Sequence
  Description of Artificial Sequence: Synthetic oligonucleotide
uuagaugagcuuugaacuc

SEQ ID NO: 1899275 - RNA, 19 nt, Artificial Sequence
  Description of Artificial Sequence: Synthetic oligonucleotide
auuguuugaauuggagguc

SEQ ID NO: 1899276 - RNA, 19 nt, Artificial Sequence
  Description of Artificial Sequence: Synthetic oligonucleotide
uauggauguggcugguuag

SEQ ID NO: 1899277 - RNA, 19 nt, Artificial Sequence
  Description of Artificial Sequence: Synthetic oligonucleotide
auucccaugaauggggauc

SEQ ID NO: 1899278 - RNA, 19 nt, Artificial Sequence
  Description of Artificial Sequence: Synthetic oligonucleotide
uggaucacuaaaagccuug

SEQ ID NO: 1899279 - RNA, 19 nt, Artificial Sequence
  Description of Artificial Sequence: Synthetic oligonucleotide
ugagccuucugggugaaag

SEQ ID NO: 1899280 - RNA, 19 nt, Artificial Sequence
  Description of Artificial Sequence: Synthetic oligonucleotide
agacagauucuagggaggc

SEQ ID NO: 1899281 - RNA, 19 nt, Artificial Sequence
  Description of Artificial Sequence: Synthetic oligonucleotide
cauuguuugaauuggaggu

SEQ ID NO: 1899282 - RNA, 19 nt, Artificial Sequence
  Description of Artificial Sequence: Synthetic oligonucleotide
uuguuugagguccugucuc

SEQ ID NO: 1899283 - RNA, 19 nt, Artificial Sequence
  Description of Artificial Sequence: Synthetic oligonucleotide
uuaggccaacuucaugaag

SEQ ID NO: 1899284 - RNA, 19 nt, Artificial Sequence
  Description of Artificial Sequence: Synthetic oligonucleotide
agugguuuguucucaagaa

SEQ ID NO: 1899285 - RNA, 19 nt, Artificial Sequence
  Description of Artificial Sequence: Synthetic oligonucleotide
uccugucuccgcaugaaca

SEQ ID NO: 1899286 - RNA, 19 nt, Artificial Sequence
  Description of Artificial Sequence: Synthetic oligonucleotide
uucaugaagggagacagau

SEQ ID NO: 1899287 - RNA, 19 nt, Artificial Sequence
  Description of Artificial Sequence: Synthetic oligonucleotide
aggagacaucuacaugacc

SEQ ID NO: 1899288 - RNA, 19 nt, Artificial Sequence
  Description of Artificial Sequence: Synthetic oligonucleotide
ugaauuggaggucuuccau

SEQ ID NO: 1899289 - RNA, 19 nt, Artificial Sequence
  Description of Artificial Sequence: Synthetic oligonucleotide
aacagcacugcucauccua

SEQ ID NO: 1899290 - RNA, 19 nt, Artificial Sequence
  Description of Artificial Sequence: Synthetic oligonucleotide
uugaauuggaggucuucca

SEQ ID NO: 1899291 - RNA, 19 nt, Artificial Sequence
  Description of Artificial Sequence: Synthetic oligonucleotide
agacaucuacaugaccugc

SEQ ID NO: 1899292 - RNA, 19 nt, Artificial Sequence
  Description of Artificial Sequence: Synthetic oligonucleotide
agugagaugguacuugguu

SEQ ID NO: 1899293 - RNA, 19 nt, Artificial Sequence
  Description of Artificial Sequence: Synthetic oligonucleotide
auaaucucguuuuccuuca

SEQ ID NO: 1899294 - RNA, 19 nt, Artificial Sequence
  Description of Artificial Sequence: Synthetic oligonucleotide
caguuuaucacacuucgga

SEQ ID NO: 1899295 - RNA, 19 nt, Artificial Sequence
  Description of Artificial Sequence: Synthetic oligonucleotide
cuuugaacucugaauagga

SEQ ID NO: 1899296 - RNA, 19 nt, Artificial Sequence
  Description of Artificial Sequence: Synthetic oligonucleotide
ugcaaggugaaggugguac

SEQ ID NO: 1899297 - RNA, 19 nt, Artificial Sequence
  Description of Artificial Sequence: Synthetic oligonucleotide
ugagagcacugucagacau

SEQ ID NO: 1899298 - RNA, 19 nt, Artificial Sequence
  Description of Artificial Sequence: Synthetic oligonucleotide
aagaacaguuuaucacacu

SEQ ID NO: 1899299 - RNA, 19 nt, Artificial Sequence
  Description of Artificial Sequence: Synthetic oligonucleotide
cuauaauucuucugaccug

SEQ ID NO: 1899300 - RNA, 19 nt, Artificial Sequence
  Description of Artificial Sequence: Synthetic oligonucleotide
aucacauuugagauucuuc

SEQ ID NO: 1899301 - RNA, 19 nt, Artificial Sequence
  Description of Artificial Sequence: Synthetic oligonucleotide
cuuguguguggauaagcac

SEQ ID NO: 1899302 - RNA, 19 nt, Artificial Sequence
  Description of Artificial Sequence: Synthetic oligonucleotide
ucucguuuuccuucaugag

SEQ ID NO: 1899303 - RNA, 19 nt, Artificial Sequence
  Description of Artificial Sequence: Synthetic oligonucleotide
ugacccauaaagugaacau

SEQ ID NO: 1899304 - RNA, 19 nt, Artificial Sequence
  Description of Artificial Sequence: Synthetic oligonucleotide
uuugcaaggugaagguggu

SEQ ID NO: 1899305 - RNA, 19 nt, Artificial Sequence
  Description of Artificial Sequence: Synthetic oligonucleotide
gaucuggcguucuugugug

SEQ ID NO: 1899306 - RNA, 19 nt, Artificial Sequence
  Description of Artificial Sequence: Synthetic oligonucleotide
ucauccuacagucgucugu

SEQ ID NO: 1899307 - RNA, 19 nt, Artificial Sequence
  Description of Artificial Sequence: Synthetic oligonucleotide
acacuucggacacuugauc

SEQ ID NO: 1899308 - RNA, 19 nt, Artificial Sequence
  Description of Artificial Sequence: Synthetic oligonucleotide
uagauaagccuuuguacau

SEQ ID NO: 1899309 - RNA, 19 nt, Artificial Sequence
  Description of Artificial Sequence: Synthetic oligonucleotide
caugaauggggaucacacc

SEQ ID NO: 1899310 - RNA, 19 nt, Artificial Sequence
  Description of Artificial Sequence: Synthetic oligonucleotide
agccuuuguacauuucuca

SEQ ID NO: 1899311 - RNA, 19 nt, Artificial Sequence
  Description of Artificial Sequence: Synthetic oligonucleotide
cauccgcugaguaaacagc

SEQ ID NO: 1899312 - RNA, 19 nt, Artificial Sequence
  Description of Artificial Sequence: Synthetic oligonucleotide
auaagcacauguuguuuga

SEQ ID NO: 1899313 - RNA, 19 nt, Artificial Sequence
  Description of Artificial Sequence: Synthetic oligonucleotide
ugucuccgcaugaacagcu

SEQ ID NO: 1899314 - RNA, 19 nt, Artificial Sequence
  Description of Artificial Sequence: Synthetic oligonucleotide
ugaauaggaauugcacucu

SEQ ID NO: 1899315 - RNA, 19 nt, Artificial Sequence
  Description of Artificial Sequence: Synthetic oligonucleotide
uagggaggcaagauugugu

SEQ ID NO: 1899316 - RNA, 19 nt, Artificial Sequence
  Description of Artificial Sequence: Synthetic oligonucleotide
aguaaucacauuugagauu

SEQ ID NO: 1899317 - RNA, 19 nt, Artificial Sequence
  Description of Artificial Sequence: Synthetic oligonucleotide
aggcucuaggcuuaggcca

SEQ ID NO: 1899318 - RNA, 19 nt, Artificial Sequence
  Description of Artificial Sequence: Synthetic oligonucleotide
uccaugaccacaggaagcu

SEQ ID NO: 1899319 - RNA, 19 nt, Artificial Sequence
  Description of Artificial Sequence: Synthetic oligonucleotide
gcuuaggccaacuucauga

SEQ ID NO: 1899320 - RNA, 19 nt, Artificial Sequence
  Description of Artificial Sequence: Synthetic oligonucleotide
accauucccaugaaugggg

SEQ ID NO: 1899321 - RNA, 19 nt, Artificial Sequence
  Description of Artificial Sequence: Synthetic oligonucleotide
uggaugaccaugugugacu

SEQ ID NO: 1899322 - RNA, 19 nt, Artificial Sequence
  Description of Artificial Sequence: Synthetic oligonucleotide
gacauaaucucguuuuccu

SEQ ID NO: 1899323 - RNA, 19 nt, Artificial Sequence
  Description of Artificial Sequence: Synthetic oligonucleotide
aucccauugacccgauuug

SEQ ID NO: 1899324 - RNA, 19 nt, Artificial Sequence
  Description of Artificial Sequence: Synthetic oligonucleotide
ucggacacuugaucuggcg

SEQ ID NO: 1899325 - RNA, 19 nt, Artificial Sequence
  Description of Artificial Sequence: Synthetic oligonucleotide
gcaagauugugugagguag

SEQ ID NO: 1899326 - RNA, 19 nt, Artificial Sequence
  Description of Artificial Sequence: Synthetic oligonucleotide
ugugagguagagagugcca

SEQ ID NO: 1899327 - RNA, 19 nt, Artificial Sequence
  Description of Artificial Sequence: Synthetic oligonucleotide
uguugcucacagaauccac

SEQ ID NO: 1899328 - RNA, 19 nt, Artificial Sequence
  Description of Artificial Sequence: Synthetic oligonucleotide
uucuuguguguggauaagc

SEQ ID NO: 1899329 - RNA, 19 nt, Artificial Sequence
  Description of Artificial Sequence: Synthetic oligonucleotide
ugugugagguagagagugc

SEQ ID NO: 1899330 - RNA, 19 nt, Artificial Sequence
  Description of Artificial Sequence: Synthetic oligonucleotide
ucuccgcaugaacagcuug

SEQ ID NO: 1899331 - RNA, 19 nt, Artificial Sequence
  Description of Artificial Sequence: Synthetic oligonucleotide
ucuagggaggcaagauugu

SEQ ID NO: 1899332 - RNA, 19 nt, Artificial Sequence
  Description of Artificial Sequence: Synthetic oligonucleotide
caggcucuaggcuuaggcc

SEQ ID NO: 1899333 - RNA, 19 nt, Artificial Sequence
  Description of Artificial Sequence: Synthetic oligonucleotide
cauggcaaccuccugcgug

SEQ ID NO: 1899334 - RNA, 19 nt, Artificial Sequence
  Description of Artificial Sequence: Synthetic oligonucleotide
gacuugucacacaaaguac

SEQ ID NO: 1899335 - RNA, 19 nt, Artificial Sequence
  Description of Artificial Sequence: Synthetic oligonucleotide
guauguauuuuaaggugug

SEQ ID NO: 1899336 - RNA, 19 nt, Artificial Sequence
  Description of Artificial Sequence: Synthetic oligonucleotide
ggugguacaaaagccaagc

SEQ ID NO: 1899337 - RNA, 19 nt, Artificial Sequence
  Description of Artificial Sequence: Synthetic oligonucleotide
auugcacucuuuuccacau

SEQ ID NO: 1899338 - RNA, 19 nt, Artificial Sequence
  Description of Artificial Sequence: Synthetic oligonucleotide
gaucacaccaccauguccu

SEQ ID NO: 1899339 - RNA, 19 nt, Artificial Sequence
  Description of Artificial Sequence: Synthetic oligonucleotide
gagagacucauccgcugag

SEQ ID NO: 1899340 - RNA, 19 nt, Artificial Sequence
  Description of Artificial Sequence: Synthetic oligonucleotide
agaugcuucuucaaguggu

SEQ ID NO: 1899341 - RNA, 19 nt, Artificial Sequence
  Description of Artificial Sequence: Synthetic oligonucleotide
uuugagguccugucuccgc

SEQ ID NO: 1899342 - RNA, 19 nt, Artificial Sequence
  Description of Artificial Sequence: Synthetic oligonucleotide
gacaucuacaugaccugcc

SEQ ID NO: 1899343 - RNA, 19 nt, Artificial Sequence
  Description of Artificial Sequence: Synthetic oligonucleotide
ggagagauaaaagccuggg

SEQ ID NO: 1899344 - RNA, 19 nt, Artificial Sequence
  Description of Artificial Sequence: Synthetic oligonucleotide
agagagacucauccgcuga

SEQ ID NO: 1899345 - RNA, 19 nt, Artificial Sequence
  Description of Artificial Sequence: Synthetic oligonucleotide
uccuacagucgucuguccu

SEQ ID NO: 1899346 - RNA, 19 nt, Artificial Sequence
  Description of Artificial Sequence: Synthetic oligonucleotide
uuguucucaagaacaguuu

SEQ ID NO: 1899347 - RNA, 19 nt, Artificial Sequence
  Description of Artificial Sequence: Synthetic oligonucleotide
augacccauaaagugaaca

SEQ ID NO: 1899348 - RNA, 19 nt, Artificial Sequence
  Description of Artificial Sequence: Synthetic oligonucleotide
acagauucuagggaggcaa

SEQ ID NO: 1899349 - RNA, 19 nt, Artificial Sequence
  Description of Artificial Sequence: Synthetic oligonucleotide
gaagggagacagauucuag

SEQ ID NO: 1899350 - RNA, 19 nt, Artificial Sequence
  Description of Artificial Sequence: Synthetic oligonucleotide
gagagagacucauccgcug

SEQ ID NO: 1899351 - RNA, 19 nt, Artificial Sequence
  Description of Artificial Sequence: Synthetic oligonucleotide
ucgcccguauggaugacca

SEQ ID NO: 1899352 - RNA, 19 nt, Artificial Sequence
  Description of Artificial Sequence: Synthetic oligonucleotide
gcuucaugcccauaugacc

SEQ ID NO: 1899353 - RNA, 19 nt, Artificial Sequence
  Description of Artificial Sequence: Synthetic oligonucleotide
aaguacaccuauaauucuu

SEQ ID NO: 1899354 - RNA, 19 nt, Artificial Sequence
  Description of Artificial Sequence: Synthetic oligonucleotide
gugguuuguucucaagaac

SEQ ID NO: 1899355 - RNA, 19 nt, Artificial Sequence
  Description of Artificial Sequence: Synthetic oligonucleotide
ugaagggagacagauucua

SEQ ID NO: 1899356 - RNA, 19 nt, Artificial Sequence
  Description of Artificial Sequence: Synthetic oligonucleotide
ggaagcuccaaaccauucc

SEQ ID NO: 1899357 - RNA, 19 nt, Artificial Sequence
  Description of Artificial Sequence: Synthetic oligonucleotide
guguccguagguugcuugg

SEQ ID NO: 1899358 - RNA, 19 nt, Artificial Sequence
  Description of Artificial Sequence: Synthetic oligonucleotide
accguguggauggagucac

SEQ ID NO: 1899359 - RNA, 19 nt, Artificial Sequence
  Description of Artificial Sequence: Synthetic oligonucleotide
ugcuguaaggcuguugcuc

SEQ ID NO: 1899360 - RNA, 19 nt, Artificial Sequence
  Description of Artificial Sequence: Synthetic oligonucleotide
aggugaaggugguacaaaa

SEQ ID NO: 1899361 - RNA, 19 nt, Artificial Sequence
  Description of Artificial Sequence: Synthetic oligonucleotide
aagugaacauggagcuugg

SEQ ID NO: 1899362 - RNA, 19 nt, Artificial Sequence
  Description of Artificial Sequence: Synthetic oligonucleotide
caccuauaauucuucugac

SEQ ID NO: 1899363 - RNA, 19 nt, Artificial Sequence
  Description of Artificial Sequence: Synthetic oligonucleotide
guugcuuggaucacuaaaa

SEQ ID NO: 1899364 - RNA, 19 nt, Artificial Sequence
  Description of Artificial Sequence: Synthetic oligonucleotide
caugugugacuccagguga

SEQ ID NO: 1899365 - RNA, 19 nt, Artificial Sequence
  Description of Artificial Sequence: Synthetic oligonucleotide
cacgcuuacagaguuggug

SEQ ID NO: 1899366 - RNA, 19 nt, Artificial Sequence
  Description of Artificial Sequence: Synthetic oligonucleotide
auaugacccauaaagugaa

SEQ ID NO: 1899367 - RNA, 19 nt, Artificial Sequence
  Description of Artificial Sequence: Synthetic oligonucleotide
ccaugaauggggaucacac

SEQ ID NO: 1899368 - RNA, 19 nt, Artificial Sequence
  Description of Artificial Sequence: Synthetic oligonucleotide
gguacaaaagccaagcugu

SEQ ID NO: 1899369 - RNA, 19 nt, Artificial Sequence
  Description of Artificial Sequence: Synthetic oligonucleotide
ugguuagauaagccuuugu

SEQ ID NO: 1899370 - RNA, 19 nt, Artificial Sequence
  Description of Artificial Sequence: Synthetic oligonucleotide
agguguguccguagguugc

SEQ ID NO: 1899371 - RNA, 19 nt, Artificial Sequence
  Description of Artificial Sequence: Synthetic oligonucleotide
auccuacagucgucugucc

SEQ ID NO: 1899372 - RNA, 19 nt, Artificial Sequence
  Description of Artificial Sequence: Synthetic oligonucleotide
agcuuggaaggagagauaa

SEQ ID NO: 1899373 - RNA, 19 nt, Artificial Sequence
  Description of Artificial Sequence: Synthetic oligonucleotide
gaugguacuugguuagaua

SEQ ID NO: 1899374 - RNA, 19 nt, Artificial Sequence
  Description of Artificial Sequence: Synthetic oligonucleotide
caccauguccuacaguguc

SEQ ID NO: 1899375 - RNA, 19 nt, Artificial Sequence
  Description of Artificial Sequence: Synthetic oligonucleotide
gugaacauggagcuuggaa

SEQ ID NO: 1899376 - RNA, 19 nt, Artificial Sequence
  Description of Artificial Sequence: Synthetic oligonucleotide
acuugguuagauaagccuu

SEQ ID NO: 1899377 - RNA, 19 nt, Artificial Sequence
  Description of Artificial Sequence: Synthetic oligonucleotide
auucuagggaggcaagauu

SEQ ID NO: 1899378 - RNA, 19 nt, Artificial Sequence
  Description of Artificial Sequence: Synthetic oligonucleotide
guaaacagcacugcucauc

SEQ ID NO: 1899379 - RNA, 19 nt, Artificial Sequence
  Description of Artificial Sequence: Synthetic oligonucleotide
gggcacauggaacacuucc

SEQ ID NO: 1899380 - RNA, 19 nt, Artificial Sequence
  Description of Artificial Sequence: Synthetic oligonucleotide
ucuggcguucuugugugug

SEQ ID NO: 1899381 - RNA, 19 nt, Artificial Sequence
  Description of Artificial Sequence: Synthetic oligonucleotide
gacucauccgcugaguaaa

SEQ ID NO: 1899382 - RNA, 19 nt, Artificial Sequence
  Description of Artificial Sequence: Synthetic oligonucleotide
acaguuuaucacacuucgg

SEQ ID NO: 1899383 - RNA, 19 nt, Artificial Sequence
  Description of Artificial Sequence: Synthetic oligonucleotide
uugaucuggcguucuugug

SEQ ID NO: 1899384 - RNA, 19 nt, Artificial Sequence
  Description of Artificial Sequence: Synthetic oligonucleotide
guacuugguuagauaagcc

SEQ ID NO: 1899385 - RNA, 19 nt, Artificial Sequence
  Description of Artificial Sequence: Synthetic oligonucleotide
aggagagauaaaagccugg

SEQ ID NO: 1899386 - RNA, 19 nt, Artificial Sequence
  Description of Artificial Sequence: Synthetic oligonucleotide
ucccauugacccgauuugc

SEQ ID NO: 1899387 - RNA, 19 nt, Artificial Sequence
  Description of Artificial Sequence: Synthetic oligonucleotide
gagaguguuucaugacuuc

SEQ ID NO: 1899388 - RNA, 19 nt, Artificial Sequence
  Description of Artificial Sequence: Synthetic oligonucleotide
uguguggagagagacucau

SEQ ID NO: 1899389 - RNA, 19 nt, Artificial Sequence
  Description of Artificial Sequence: Synthetic oligonucleotide
cuggcguucuugugugugg

SEQ ID NO: 1899390 - RNA, 19 nt, Artificial Sequence
  Description of Artificial Sequence: Synthetic oligonucleotide
aagcugucugaggagacau

SEQ ID NO: 1899391 - RNA, 19 nt, Artificial Sequence
  Description of Artificial Sequence: Synthetic oligonucleotide
aauggggaucacaccacca

SEQ ID NO: 1899392 - RNA, 19 nt, Artificial Sequence
  Description of Artificial Sequence: Synthetic oligonucleotide
uugguuagauaagccuuug

SEQ ID NO: 1899393 - RNA, 19 nt, Artificial Sequence
  Description of Artificial Sequence: Synthetic oligonucleotide
uagguugcuuggaucacua

SEQ ID NO: 1899394 - RNA, 19 nt, Artificial Sequence
  Description of Artificial Sequence: Synthetic oligonucleotide
uuccauuugcaaggugaag

SEQ ID NO: 1899395 - RNA, 19 nt, Artificial Sequence
  Description of Artificial Sequence: Synthetic oligonucleotide
ugacccgauuugcaaugug

SEQ ID NO: 1899396 - RNA, 19 nt, Artificial Sequence
  Description of Artificial Sequence: Synthetic oligonucleotide
guggcuuggcccaugguug

SEQ ID NO: 1899397 - RNA, 19 nt, Artificial Sequence
  Description of Artificial Sequence: Synthetic oligonucleotide
caguaaucacauuugagau

SEQ ID NO: 1899398 - RNA, 19 nt, Artificial Sequence
  Description of Artificial Sequence: Synthetic oligonucleotide
gugagaugguacuugguua

SEQ ID NO: 1899399 - RNA, 19 nt, Artificial Sequence
  Description of Artificial Sequence: Synthetic oligonucleotide
uaugacccauaaagugaac

SEQ ID NO: 1899400 - RNA, 19 nt, Artificial Sequence
  Description of Artificial Sequence: Synthetic oligonucleotide
gugugagguagagagugcc

SEQ ID NO: 1899401 - RNA, 19 nt, Artificial Sequence
  Description of Artificial Sequence: Synthetic oligonucleotide
aauaggaauugcacucuuu

SEQ ID NO: 1899402 - RNA, 19 nt, Artificial Sequence
  Description of Artificial Sequence: Synthetic oligonucleotide
ggaucacaccaccaugucc

SEQ ID NO: 1899403 - RNA, 19 nt, Artificial Sequence
  Description of Artificial Sequence: Synthetic oligonucleotide
uccguagguugcuuggauc

SEQ ID NO: 1899404 - RNA, 19 nt, Artificial Sequence
  Description of Artificial Sequence: Synthetic oligonucleotide
uccgcugaguaaacagcac

SEQ ID NO: 1899405 - RNA, 19 nt, Artificial Sequence
  Description of Artificial Sequence: Synthetic oligonucleotide
auguccuacagugucugcu

SEQ ID NO: 1899406 - RNA, 19 nt, Artificial Sequence
  Description of Artificial Sequence: Synthetic oligonucleotide
gucacugagagcacuguca

SEQ ID NO: 1899407 - RNA, 19 nt, Artificial Sequence
  Description of Artificial Sequence: Synthetic oligonucleotide
cauccuacagucgucuguc

SEQ ID NO: 1899408 - RNA, 19 nt, Artificial Sequence
  Description of Artificial Sequence: Synthetic oligonucleotide
cuuggcccaugguugcugc

SEQ ID NO: 1899409 - RNA, 19 nt, Artificial Sequence
  Description of Artificial Sequence: Synthetic oligonucleotide
agcuccaaaccauucccau

SEQ ID NO: 1899410 - RNA, 19 nt, Artificial Sequence
  Description of Artificial Sequence: Synthetic oligonucleotide
aaacagcacugcucauccu

SEQ ID NO: 1899411 - RNA, 19 nt, Artificial Sequence
  Description of Artificial Sequence: Synthetic oligonucleotide
uaucacacuucggacacuu

SEQ ID NO: 1899412 - RNA, 19 nt, Artificial Sequence
  Description of Artificial Sequence: Synthetic oligonucleotide
acagucgucuguccucaug

SEQ ID NO: 1899413 - RNA, 19 nt, Artificial Sequence
  Description of Artificial Sequence: Synthetic oligonucleotide
ucuaggcuuaggccaacuu

SEQ ID NO: 1899414 - RNA, 19 nt, Artificial Sequence
  Description of Artificial Sequence: Synthetic oligonucleotide
aggaagcuccaaaccauuc

SEQ ID NO: 1899415 - RNA, 19 nt, Artificial Sequence
  Description of Artificial Sequence: Synthetic oligonucleotide
agacucauccgcugaguaa

SEQ ID NO: 1899416 - RNA, 19 nt, Artificial Sequence
  Description of Artificial Sequence: Synthetic oligonucleotide
uucagguggcgagugagau

SEQ ID NO: 1899417 - RNA, 19 nt, Artificial Sequence
  Description of Artificial Sequence: Synthetic oligonucleotide
agauucuucucgcccguau

SEQ ID NO: 1899418 - RNA, 19 nt, Artificial Sequence
  Description of Artificial Sequence: Synthetic oligonucleotide
cuuggaucacuaaaagccu

SEQ ID NO: 1899419 - RNA, 19 nt, Artificial Sequence
  Description of Artificial Sequence: Synthetic oligonucleotide
cucacagacauaaucucgu

SEQ ID NO: 1899420 - RNA, 19 nt, Artificial Sequence
  Description of Artificial Sequence: Synthetic oligonucleotide
uacagaguuggugcucaug

SEQ ID NO: 1899421 - RNA, 19 nt, Artificial Sequence
  Description of Artificial Sequence: Synthetic oligonucleotide
ccuauaauucuucugaccu

SEQ ID NO: 1899422 - RNA, 19 nt, Artificial Sequence
  Description of Artificial Sequence: Synthetic oligonucleotide
agaauccacagagaguguu

SEQ ID NO: 1899423 - RNA, 19 nt, Artificial Sequence
  Description of Artificial Sequence: Synthetic oligonucleotide
cauuugcaaggugaaggug

SEQ ID NO: 1899424 - RNA, 19 nt, Artificial Sequence
  Description of Artificial Sequence: Synthetic oligonucleotide
cauggagcuuggaaggaga

SEQ ID NO: 1899425 - RNA, 19 nt, Artificial Sequence
  Description of Artificial Sequence: Synthetic oligonucleotide
aaggugaaggugguacaaa

SEQ ID NO: 1899426 - RNA, 19 nt, Artificial Sequence
  Description of Artificial Sequence: Synthetic oligonucleotide
agccaagcugucugaggag

SEQ ID NO: 1899427 - RNA, 19 nt, Artificial Sequence
  Description of Artificial Sequence: Synthetic oligonucleotide
cuggaggugggcccuuugc

SEQ ID NO: 1899428 - RNA, 19 nt, Artificial Sequence
  Description of Artificial Sequence: Synthetic oligonucleotide
cacuaaaagccuugcuaca

SEQ ID NO: 1899429 - RNA, 19 nt, Artificial Sequence
  Description of Artificial Sequence: Synthetic oligonucleotide
auccgcugaguaaacagca

SEQ ID NO: 1899430 - RNA, 19 nt, Artificial Sequence
  Description of Artificial Sequence: Synthetic oligonucleotide
aagcuccaaaccauuccca

SEQ ID NO: 1899431 - RNA, 19 nt, Artificial Sequence
  Description of Artificial Sequence: Synthetic oligonucleotide
auuuuaagguguguccgua

SEQ ID NO: 1899432 - RNA, 19 nt, Artificial Sequence
  Description of Artificial Sequence: Synthetic oligonucleotide
gccacgcuuacagaguugg

SEQ ID NO: 1899433 - RNA, 19 nt, Artificial Sequence
  Description of Artificial Sequence: Synthetic oligonucleotide
ugugugacuccaggugagc

SEQ ID NO: 1899434 - RNA, 19 nt, Artificial Sequence
  Description of Artificial Sequence: Synthetic oligonucleotide
uguuugaauuggaggucuu

SEQ ID NO: 1899435 - RNA, 19 nt, Artificial Sequence
  Description of Artificial Sequence: Synthetic oligonucleotide
cuagggaggcaagauugug

SEQ ID NO: 1899436 - RNA, 19 nt, Artificial Sequence
  Description of Artificial Sequence: Synthetic oligonucleotide
auaagccuuuguacauuuc

SEQ ID NO: 1899437 - RNA, 19 nt, Artificial Sequence
  Description of Artificial Sequence: Synthetic oligonucleotide
uaaggcuguugcucacaga

SEQ ID NO: 1899438 - RNA, 19 nt, Artificial Sequence
  Description of Artificial Sequence: Synthetic oligonucleotide
gaucacuaaaagccuugcu

SEQ ID NO: 1899439 - RNA, 19 nt, Artificial Sequence
  Description of Artificial Sequence: Synthetic oligonucleotide
cugugcugaggaacuggag

SEQ ID NO: 1899440 - RNA, 19 nt, Artificial Sequence
  Description of Artificial Sequence: Synthetic oligonucleotide
uggagucacugagagcacu

SEQ ID NO: 1899441 - RNA, 19 nt, Artificial Sequence
  Description of Artificial Sequence: Synthetic oligonucleotide
caagauugugugagguaga

SEQ ID NO: 1899442 - RNA, 19 nt, Artificial Sequence
  Description of Artificial Sequence: Synthetic oligonucleotide
gcacauggaacacuuccac

SEQ ID NO: 1899443 - RNA, 19 nt, Artificial Sequence
  Description of Artificial Sequence: Synthetic oligonucleotide
agaugguacuugguuagau

SEQ ID NO: 1899444 - RNA, 19 nt, Artificial Sequence
  Description of Artificial Sequence: Synthetic oligonucleotide
augugugacuccaggugag

SEQ ID NO: 1899445 - RNA, 19 nt, Artificial Sequence
  Description of Artificial Sequence: Synthetic oligonucleotide
gaacacuuccacuuccuuu

SEQ ID NO: 1899446 - RNA, 19 nt, Artificial Sequence
  Description of Artificial Sequence: Synthetic oligonucleotide
cacuucggacacuugaucu

SEQ ID NO: 1899447 - RNA, 19 nt, Artificial Sequence
  Description of Artificial Sequence: Synthetic oligonucleotide
acccgauuugcaauguggu

SEQ ID NO: 1899448 - RNA, 19 nt, Artificial Sequence
  Description of Artificial Sequence: Synthetic oligonucleotide
guggcgagugagaugguac

SEQ ID NO: 1899449 - RNA, 19 nt, Artificial Sequence
  Description of Artificial Sequence: Synthetic oligonucleotide
uggagcuuggaaggagaga

SEQ ID NO: 1899450 - RNA, 19 nt, Artificial Sequence
  Description of Artificial Sequence: Synthetic oligonucleotide
gucagacaucccauugacc

SEQ ID NO: 1899451 - RNA, 19 nt, Artificial Sequence
  Description of Artificial Sequence: Synthetic oligonucleotide
auguuguuugagguccugu

SEQ ID NO: 1899452 - RNA, 19 nt, Artificial Sequence
  Description of Artificial Sequence: Synthetic oligonucleotide
ggauguggcugguuagaug

SEQ ID NO: 1899453 - RNA, 19 nt, Artificial Sequence
  Description of Artificial Sequence: Synthetic oligonucleotide
agauaagccuuuguacauu

SEQ ID NO: 1899454 - RNA, 19 nt, Artificial Sequence
  Description of Artificial Sequence: Synthetic oligonucleotide
caacuucaugaagggagac

SEQ ID NO: 1899455 - RNA, 19 nt, Artificial Sequence
  Description of Artificial Sequence: Synthetic oligonucleotide
cucauccuacagucgucug

SEQ ID NO: 1899456 - RNA, 19 nt, Artificial Sequence
  Description of Artificial Sequence: Synthetic oligonucleotide
uguccguagguugcuugga

SEQ ID NO: 1899457 - RNA, 19 nt, Artificial Sequence
  Description of Artificial Sequence: Synthetic oligonucleotide
cuguaaggcuguugcucac

SEQ ID NO: 1899458 - RNA, 19 nt, Artificial Sequence
  Description of Artificial Sequence: Synthetic oligonucleotide
uaaucucguuuuccuucau

SEQ ID NO: 1899459 - RNA, 19 nt, Artificial Sequence
  Description of Artificial Sequence: Synthetic oligonucleotide
agguagagagugccacgcu

SEQ ID NO: 1899460 - RNA, 19 nt, Artificial Sequence
  Description of Artificial Sequence: Synthetic oligonucleotide
agauugugugagguagaga

SEQ ID NO: 1899461 - RNA, 19 nt, Artificial Sequence
  Description of Artificial Sequence: Synthetic oligonucleotide
acucauccgcugaguaaac

SEQ ID NO: 1899462 - RNA, 19 nt, Artificial Sequence
  Description of Artificial Sequence: Synthetic oligonucleotide
uccgcaugaacagcuuguc

SEQ ID NO: 1899463 - RNA, 19 nt, Artificial Sequence
  Description of Artificial Sequence: Synthetic oligonucleotide
ggaucacuaaaagccuugc

SEQ ID NO: 1899464 - RNA, 19 nt, Artificial Sequence
  Description of Artificial Sequence: Synthetic oligonucleotide
uggcguucuugugugugga

SEQ ID NO: 1899465 - RNA, 19 nt, Artificial Sequence
  Description of Artificial Sequence: Synthetic oligonucleotide
gcuguugcucacagaaucc

SEQ ID NO: 1899466 - RNA, 19 nt, Artificial Sequence
  Description of Artificial Sequence: Synthetic oligonucleotide
gggagacagauucuaggga

SEQ ID NO: 1899467 - RNA, 19 nt, Artificial Sequence
  Description of Artificial Sequence: Synthetic oligonucleotide
ggugcucauggccaccgug

SEQ ID NO: 1899468 - RNA, 19 nt, Artificial Sequence
  Description of Artificial Sequence: Synthetic oligonucleotide
agagacucauccgcugagu

SEQ ID NO: 1899469 - RNA, 19 nt, Artificial Sequence
  Description of Artificial Sequence: Synthetic oligonucleotide
gaaagacuugucacacaaa

SEQ ID NO: 1899470 - RNA, 19 nt, Artificial Sequence
  Description of Artificial Sequence: Synthetic oligonucleotide
cugucuccgcaugaacagc

SEQ ID NO: 1899471 - RNA, 19 nt, Artificial Sequence
  Description of Artificial Sequence: Synthetic oligonucleotide
cacacaaaguacaccuaua

SEQ ID NO: 1899472 - RNA, 19 nt, Artificial Sequence
  Description of Artificial Sequence: Synthetic oligonucleotide
acuggaggugggcccuuug

SEQ ID NO: 1899473 - RNA, 19 nt, Artificial Sequence
  Description of Artificial Sequence: Synthetic oligonucleotide
ggcuucaugcccauaugac

SEQ ID NO: 1899474 - RNA, 19 nt, Artificial Sequence
  Description of Artificial Sequence: Synthetic oligonucleotide
cuguugcucacagaaucca

SEQ ID NO: 1899475 - RNA, 19 nt, Artificial Sequence
  Description of Artificial Sequence: Synthetic oligonucleotide
gagagcacugucagacauc

SEQ ID NO: 1899476 - RNA, 19 nt, Artificial Sequence
  Description of Artificial Sequence: Synthetic oligonucleotide
cuugguuagauaagccuuu

SEQ ID NO: 1899477 - RNA, 19 nt, Artificial Sequence
  Description of Artificial Sequence: Synthetic oligonucleotide
ggagcuuggaaggagagau

SEQ ID NO: 1899478 - RNA, 19 nt, Artificial Sequence
  Description of Artificial Sequence: Synthetic oligonucleotide
ccuacagucgucuguccuc

SEQ ID NO: 1899479 - RNA, 19 nt, Artificial Sequence
  Description of Artificial Sequence: Synthetic oligonucleotide
gcucauggccaccgugugg

SEQ ID NO: 1899480 - RNA, 19 nt, Artificial Sequence
  Description of Artificial Sequence: Synthetic oligonucleotide
guagagagugccacgcuua

SEQ ID NO: 1899481 - RNA, 19 nt, Artificial Sequence
  Description of Artificial Sequence: Synthetic oligonucleotide
caucccauugacccgauuu

SEQ ID NO: 1899482 - RNA, 19 nt, Artificial Sequence
  Description of Artificial Sequence: Synthetic oligonucleotide
ggauggagucacugagagc

SEQ ID NO: 1899483 - RNA, 19 nt, Artificial Sequence
  Description of Artificial Sequence: Synthetic oligonucleotide
cuacagucgucuguccuca

SEQ ID NO: 1899484 - RNA, 19 nt, Artificial Sequence
  Description of Artificial Sequence: Synthetic oligonucleotide
gcugguuagaugagcuuug

SEQ ID NO: 1899485 - RNA, 19 nt, Artificial Sequence
  Description of Artificial Sequence: Synthetic oligonucleotide
ucacaccaccauguccuac

SEQ ID NO: 1899486 - RNA, 19 nt, Artificial Sequence
  Description of Artificial Sequence: Synthetic oligonucleotide
guccugucuccgcaugaac

SEQ ID NO: 1899487 - RNA, 19 nt, Artificial Sequence
  Description of Artificial Sequence: Synthetic oligonucleotide
cauugacccgauuugcaau

SEQ ID NO: 1899488 - RNA, 19 nt, Artificial Sequence
  Description of Artificial Sequence: Synthetic oligonucleotide
gcccguauggaugaccaug

SEQ ID NO: 1899489 - RNA, 19 nt, Artificial Sequence
  Description of Artificial Sequence: Synthetic oligonucleotide
gagaugguacuugguuaga

SEQ ID NO: 1899490 - RNA, 19 nt, Artificial Sequence
  Description of Artificial Sequence: Synthetic oligonucleotide
uuacagaguuggugcucau

SEQ ID NO: 1899491 - RNA, 19 nt, Artificial Sequence
  Description of Artificial Sequence: Synthetic oligonucleotide
ggcuuaggccaacuucaug

SEQ ID NO: 1899492 - RNA, 19 nt, Artificial Sequence
  Description of Artificial Sequence: Synthetic oligonucleotide
cgauuugcaauguggucug

SEQ ID NO: 1899493 - RNA, 19 nt, Artificial Sequence
  Description of Artificial Sequence: Synthetic oligonucleotide
ccguagguugcuuggauca

SEQ ID NO: 1899494 - RNA, 19 nt, Artificial Sequence
  Description of Artificial Sequence: Synthetic oligonucleotide
cucgcccguauggaugacc

SEQ ID NO: 1899495 - RNA, 19 nt, Artificial Sequence
  Description of Artificial Sequence: Synthetic oligonucleotide
gcaaggugaaggugguaca

SEQ ID NO: 1899496 - RNA, 19 nt, Artificial Sequence
  Description of Artificial Sequence: Synthetic oligonucleotide
caaggugaaggugguacaa

SEQ ID NO: 1899497 - RNA, 19 nt, Artificial Sequence
  Description of Artificial Sequence: Synthetic oligonucleotide
uugcacucuuuuccacauu

SEQ ID NO: 1899498 - RNA, 19 nt, Artificial Sequence
  Description of Artificial Sequence: Synthetic oligonucleotide
ggcacauggaacacuucca

SEQ ID NO: 1899499 - RNA, 19 nt, Artificial Sequence
  Description of Artificial Sequence: Synthetic oligonucleotide
agguugcuuggaucacuaa

SEQ ID NO: 1899500 - RNA, 19 nt, Artificial Sequence
  Description of Artificial Sequence: Synthetic oligonucleotide
agugaacauggagcuugga

SEQ ID NO: 1899501 - RNA, 19 nt, Artificial Sequence
  Description of Artificial Sequence: Synthetic oligonucleotide
gugauggaagagacagcca

SEQ ID NO: 1899502 - RNA, 19 nt, Artificial Sequence
  Description of Artificial Sequence: Synthetic oligonucleotide
cuccgcaugaacagcuugu

SEQ ID NO: 1899503 - RNA, 19 nt, Artificial Sequence
  Description of Artificial Sequence: Synthetic oligonucleotide
caagcugucugaggagaca

SEQ ID NO: 1899504 - RNA, 19 nt, Artificial Sequence
  Description of Artificial Sequence: Synthetic oligonucleotide
auguggcugguuagaugag

SEQ ID NO: 1899505 - RNA, 19 nt, Artificial Sequence
  Description of Artificial Sequence: Synthetic oligonucleotide
cccgauuugcaaugugguc

SEQ ID NO: 1899506 - RNA, 19 nt, Artificial Sequence
  Description of Artificial Sequence: Synthetic oligonucleotide
ccaagcugucugaggagac

SEQ ID NO: 1899507 - RNA, 19 nt, Artificial Sequence
  Description of Artificial Sequence: Synthetic oligonucleotide
cacacuucggacacuugau

SEQ ID NO: 1899508 - RNA, 19 nt, Artificial Sequence
  Description of Artificial Sequence: Synthetic oligonucleotide
aucuggcguucuugugugu

SEQ ID NO: 1899509 - RNA, 19 nt, Artificial Sequence
  Description of Artificial Sequence: Synthetic oligonucleotide
uggugcucauggccaccgu

SEQ ID NO: 1899510 - RNA, 19 nt, Artificial Sequence
  Description of Artificial Sequence: Synthetic oligonucleotide
aucacaccaccauguccua

SEQ ID NO: 1899511 - RNA, 19 nt, Artificial Sequence
  Description of Artificial Sequence: Synthetic oligonucleotide
gggaucacaccaccauguc

SEQ ID NO: 1899512 - RNA, 19 nt, Artificial Sequence
  Description of Artificial Sequence: Synthetic oligonucleotide
cugguuagaugagcuuuga

SEQ ID NO: 1899513 - RNA, 19 nt, Artificial Sequence
  Description of Artificial Sequence: Synthetic oligonucleotide
ggcaagauugugugaggua

SEQ ID NO: 1899514 - RNA, 19 nt, Artificial Sequence
  Description of Artificial Sequence: Synthetic oligonucleotide
cucauccgcugaguaaaca

SEQ ID NO: 1899515 - RNA, 19 nt, Artificial Sequence
  Description of Artificial Sequence: Synthetic oligonucleotide
guagguugcuuggaucacu

SEQ ID NO: 1899516 - RNA, 19 nt, Artificial Sequence
  Description of Artificial Sequence: Synthetic oligonucleotide
ccgauuugcaauguggucu

SEQ ID NO: 1899517 - RNA, 19 nt, Artificial Sequence
  Description of Artificial Sequence: Synthetic oligonucleotide
cugcgugauggaagagaca

SEQ ID NO: 1899518 - RNA, 19 nt, Artificial Sequence
  Description of Artificial Sequence: Synthetic oligonucleotide
gucacacaaaguacaccua

SEQ ID NO: 1899519 - RNA, 19 nt, Artificial Sequence
  Description of Artificial Sequence: Synthetic oligonucleotide
cccauaaagugaacaugga

SEQ ID NO: 1899520 - RNA, 19 nt, Artificial Sequence
  Description of Artificial Sequence: Synthetic oligonucleotide
gccaagcugucugaggaga

SEQ ID NO: 1899521 - RNA, 19 nt, Artificial Sequence
  Description of Artificial Sequence: Synthetic oligonucleotide
cagugucugcuguaaggcu

SEQ ID NO: 1899522 - RNA, 19 nt, Artificial Sequence
  Description of Artificial Sequence: Synthetic oligonucleotide
ggacacuugaucuggcguu

SEQ ID NO: 1899523 - RNA, 19 nt, Artificial Sequence
  Description of Artificial Sequence: Synthetic oligonucleotide
cacaggcucuaggcuuagg

SEQ ID NO: 1899524 - RNA, 19 nt, Artificial Sequence
  Description of Artificial Sequence: Synthetic oligonucleotide
gagcacugucagacauccc

SEQ ID NO: 1899525 - RNA, 19 nt, Artificial Sequence
  Description of Artificial Sequence: Synthetic oligonucleotide
gguagagagugccacgcuu

SEQ ID NO: 1899526 - RNA, 19 nt, Artificial Sequence
  Description of Artificial Sequence: Synthetic oligonucleotide
uacagucgucuguccucau

SEQ ID NO: 1899527 - RNA, 19 nt, Artificial Sequence
  Description of Artificial Sequence: Synthetic oligonucleotide
ccacauuguuugaauugga

SEQ ID NO: 1899528 - RNA, 19 nt, Artificial Sequence
  Description of Artificial Sequence: Synthetic oligonucleotide
gcuuacagaguuggugcuc

SEQ ID NO: 1899529 - RNA, 19 nt, Artificial Sequence
  Description of Artificial Sequence: Synthetic oligonucleotide
guccuacagugucugcugu

SEQ ID NO: 1899530 - RNA, 19 nt, Artificial Sequence
  Description of Artificial Sequence: Synthetic oligonucleotide
ccauuugcaaggugaaggu

SEQ ID NO: 1899531 - RNA, 19 nt, Artificial Sequence
  Description of Artificial Sequence: Synthetic oligonucleotide
caccguguggauggaguca

SEQ ID NO: 1899532 - RNA, 19 nt, Artificial Sequence
  Description of Artificial Sequence: Synthetic oligonucleotide
ccuccugcgugauggaaga

SEQ ID NO: 1899533 - RNA, 19 nt, Artificial Sequence
  Description of Artificial Sequence: Synthetic oligonucleotide
guguggauaagcacauguu

SEQ ID NO: 1899534 - RNA, 19 nt, Artificial Sequence
  Description of Artificial Sequence: Synthetic oligonucleotide
aacuggaggugggcccuuu

SEQ ID NO: 1899535 - RNA, 19 nt, Artificial Sequence
  Description of Artificial Sequence: Synthetic oligonucleotide
aggcuuaggccaacuucau

SEQ ID NO: 1899536 - RNA, 19 nt, Artificial Sequence
  Description of Artificial Sequence: Synthetic oligonucleotide
ccauucccaugaaugggga

SEQ ID NO: 1899537 - RNA, 19 nt, Artificial Sequence
  Description of Artificial Sequence: Synthetic oligonucleotide
acaucccauugacccgauu

SEQ ID NO: 1899538 - RNA, 19 nt, Artificial Sequence
  Description of Artificial Sequence: Synthetic oligonucleotide
cguguggauggagucacug

SEQ ID NO: 1899539 - RNA, 19 nt, Artificial Sequence
  Description of Artificial Sequence: Synthetic oligonucleotide
caugcccauaugacccaua

SEQ ID NO: 1899540 - RNA, 19 nt, Artificial Sequence
  Description of Artificial Sequence: Synthetic oligonucleotide
caaccuccugcgugaugga

SEQ ID NO: 1899541 - RNA, 19 nt, Artificial Sequence
  Description of Artificial Sequence: Synthetic oligonucleotide
cauucccaugaauggggau

SEQ ID NO: 1899542 - RNA, 19 nt, Artificial Sequence
  Description of Artificial Sequence: Synthetic oligonucleotide
guccguagguugcuuggau

SEQ ID NO: 1899543 - RNA, 19 nt, Artificial Sequence
  Description of Artificial Sequence: Synthetic oligonucleotide
ggcugguuagaugagcuuu

SEQ ID NO: 1899544 - RNA, 19 nt, Artificial Sequence
  Description of Artificial Sequence: Synthetic oligonucleotide
gcgugauggaagagacagc

SEQ ID NO: 1899545 - RNA, 19 nt, Artificial Sequence
  Description of Artificial Sequence: Synthetic oligonucleotide
cguauggaugaccaugugu

SEQ ID NO: 1899546 - RNA, 19 nt, Artificial Sequence
  Description of Artificial Sequence: Synthetic oligonucleotide
gugacuccaggugagccuu

SEQ ID NO: 1899547 - RNA, 19 nt, Artificial Sequence
  Description of Artificial Sequence: Synthetic oligonucleotide
ggcucuaggcuuaggccaa

SEQ ID NO: 1899548 - RNA, 19 nt, Artificial Sequence
  Description of Artificial Sequence: Synthetic oligonucleotide
gcguucuuguguguggaua

SEQ ID NO: 1899549 - RNA, 19 nt, Artificial Sequence
  Description of Artificial Sequence: Synthetic oligonucleotide
uggcaaccuccugcgugau

SEQ ID NO: 1899550 - RNA, 19 nt, Artificial Sequence
  Description of Artificial Sequence: Synthetic oligonucleotide
gguggcgagugagauggua

SEQ ID NO: 1899551 - RNA, 19 nt, Artificial Sequence
  Description of Artificial Sequence: Synthetic oligonucleotide
gguccugucuccgcaugaa

SEQ ID NO: 1899552 - RNA, 19 nt, Artificial Sequence
  Description of Artificial Sequence: Synthetic oligonucleotide
ugucugcuguaaggcuguu

SEQ ID NO: 1899553 - RNA, 19 nt, Artificial Sequence
  Description of Artificial Sequence: Synthetic oligonucleotide
ccgcaugaacagcuuguca

SEQ ID NO: 1899554 - RNA, 19 nt, Artificial Sequence
  Description of Artificial Sequence: Synthetic oligonucleotide
ccgcugaguaaacagcacu

SEQ ID NO: 1899555 - RNA, 19 nt, Artificial Sequence
  Description of Artificial Sequence: Synthetic oligonucleotide
uggccaccguguggaugga

SEQ ID NO: 1899556 - RNA, 19 nt, Artificial Sequence
  Description of Artificial Sequence: Synthetic oligonucleotide
ggccaccguguggauggag

SEQ ID NO: 1899557 - RNA, 19 nt, Artificial Sequence
  Description of Artificial Sequence: Synthetic oligonucleotide
gccaccguguggauggagu

SEQ ID NO: 1899558 - RNA, 19 nt, Artificial Sequence
  Description of Artificial Sequence: Synthetic oligonucleotide
cucuaggcuuaggccaacu

SEQ ID NO: 1899559 - RNA, 19 nt, Artificial Sequence
  Description of Artificial Sequence: Synthetic oligonucleotide
caccaccauguccuacagu

SEQ ID NO: 1899560 - RNA, 19 nt, Artificial Sequence
  Description of Artificial Sequence: Synthetic oligonucleotide
gcacucuuuuccacauugu

SEQ ID NO: 1899561 - RNA, 19 nt, Artificial Sequence
  Description of Artificial Sequence: Synthetic oligonucleotide
gcacugucagacaucccau

SEQ ID NO: 1899562 - RNA, 19 nt, Artificial Sequence
  Description of Artificial Sequence: Synthetic oligonucleotide
gcucuaggcuuaggccaac

SEQ ID NO: 1899563 - RNA, 19 nt, Artificial Sequence
  Description of Artificial Sequence: Synthetic oligonucleotide
gucuguccucauggagucu

SEQ ID NO: 1899564 - RNA, 19 nt, Artificial Sequence
  Description of Artificial Sequence: Synthetic oligonucleotide
ggcguucuuguguguggau

SEQ ID NO: 1899565 - RNA, 19 nt, Artificial Sequence
  Description of Artificial Sequence: Synthetic oligonucleotide
gucuccgcaugaacagcuu

SEQ ID NO: 1899566 - RNA, 19 nt, Artificial Sequence
  Description of Artificial Sequence: Synthetic oligonucleotide
gugagccuucugggugaaa

SEQ ID NO: 1899567 - RNA, 19 nt, Artificial Sequence
  Description of Artificial Sequence: Synthetic oligonucleotide
gaacuggaggugggcccuu

SEQ ID NO: 1899568 - RNA, 19 nt, Artificial Sequence
  Description of Artificial Sequence: Synthetic oligonucleotide
ggcuauggauguggcuggu

SEQ ID NO: 1899569 - RNA, 19 nt, Artificial Sequence
  Description of Artificial Sequence: Synthetic oligonucleotide
guguguccguagguugcuu

SEQ ID NO: 1899570 - RNA, 19 nt, Artificial Sequence
  Description of Artificial Sequence: Synthetic oligonucleotide
gcuauggauguggcugguu

SEQ ID NO: 1899571 - RNA, 19 nt, Artificial Sequence
  Description of Artificial Sequence: Synthetic oligonucleotide
ccacgcuuacagaguuggu

SEQ ID NO: 1899572 - RNA, 19 nt, Artificial Sequence
  Description of Artificial Sequence: Synthetic oligonucleotide
ccauggcaaccuccugcgu

SEQ ID NO: 1899573 - RNA, 19 nt, Artificial Sequence
  Description of Artificial Sequence: Synthetic oligonucleotide
ccguguggauggagucacu

SEQ ID NO: 1899574 - RNA, 19 nt, Artificial Sequence
  Description of Artificial Sequence: Synthetic oligonucleotide
uuuaauaaaauacuguucc

SEQ ID NO: 1899575 - RNA, 19 nt, Artificial Sequence
  Description of Artificial Sequence: Synthetic oligonucleotide
gauaauaucauaaauuucc

SEQ ID NO: 1899576 - RNA, 19 nt, Artificial Sequence
  Description of Artificial Sequence: Synthetic oligonucleotide
aauaucauaaauuucccga

SEQ ID NO: 1899577 - RNA, 19 nt, Artificial Sequence
  Description of Artificial Sequence: Synthetic oligonucleotide
aauuucucagaauuacugg

SEQ ID NO: 1899578 - RNA, 19 nt, Artificial Sequence
  Description of Artificial Sequence: Synthetic oligonucleotide
aaauauugauacaauauuc

SEQ ID NO: 1899579 - RNA, 19 nt, Artificial Sequence
  Description of Artificial Sequence: Synthetic oligonucleotide
auaaauuucccgaucaucc

SEQ ID NO: 1899580 - RNA, 19 nt, Artificial Sequence
  Description of Artificial Sequence: Synthetic oligonucleotide
aauaugaauuacugacacc

SEQ ID NO: 1899581 - RNA, 19 nt, Artificial Sequence
  Description of Artificial Sequence: Synthetic oligonucleotide
uuacaacugauccuaaggg

SEQ ID NO: 1899582 - RNA, 19 nt, Artificial Sequence
  Description of Artificial Sequence: Synthetic oligonucleotide
aguuagugaucucuaaacc

SEQ ID NO: 1899583 - RNA, 19 nt, Artificial Sequence
  Description of Artificial Sequence: Synthetic oligonucleotide
cuuguguagaacuaucucg

SEQ ID NO: 1899584 - RNA, 19 nt, Artificial Sequence
  Description of Artificial Sequence: Synthetic oligonucleotide
auugauacaauauucuaca

SEQ ID NO: 1899585 - RNA, 19 nt, Artificial Sequence
  Description of Artificial Sequence: Synthetic oligonucleotide
uuguguagaacuaucucgg

SEQ ID NO: 1899586 - RNA, 19 nt, Artificial Sequence
  Description of Artificial Sequence: Synthetic oligonucleotide
uauugauacaauauucuac

SEQ ID NO: 1899587 - RNA, 19 nt, Artificial Sequence
  Description of Artificial Sequence: Synthetic oligonucleotide
guuagugaucucuaaaccg

SEQ ID NO: 1899588 - RNA, 19 nt, Artificial Sequence
  Description of Artificial Sequence: Synthetic oligonucleotide
gaaaaguugcuuaagauca

SEQ ID NO: 1899589 - RNA, 19 nt, Artificial Sequence
  Description of Artificial Sequence: Synthetic oligonucleotide
uuuuaauaaaauacuguuc

SEQ ID NO: 1899590 - RNA, 19 nt, Artificial Sequence
  Description of Artificial Sequence: Synthetic oligonucleotide
uaauaucauaaauuucccg

SEQ ID NO: 1899591 - RNA, 19 nt, Artificial Sequence
  Description of Artificial Sequence: Synthetic oligonucleotide
ucaggaauaugaauuacug

SEQ ID NO: 1899592 - RNA, 19 nt, Artificial Sequence
  Description of Artificial Sequence: Synthetic oligonucleotide
gaauaugaauuacugacac

SEQ ID NO: 1899593 - RNA, 19 nt, Artificial Sequence
  Description of Artificial Sequence: Synthetic oligonucleotide
ucuucuaacgcuugugggg

SEQ ID NO: 1899594 - RNA, 19 nt, Artificial Sequence
  Description of Artificial Sequence: Synthetic oligonucleotide
ugaucucuaaaccgaaagg

SEQ ID NO: 1899595 - RNA, 19 nt, Artificial Sequence
  Description of Artificial Sequence: Synthetic oligonucleotide
aagggcacagguuccacgc

SEQ ID NO: 1899596 - RNA, 19 nt, Artificial Sequence
  Description of Artificial Sequence: Synthetic oligonucleotide
aaauuucccgaucauccuc

SEQ ID NO: 1899597 - RNA, 19 nt, Artificial Sequence
  Description of Artificial Sequence: Synthetic oligonucleotide
auagucgcuguacagggcc

SEQ ID NO: 1899598 - RNA, 19 nt, Artificial Sequence
  Description of Artificial Sequence: Synthetic oligonucleotide
uaugaagugaaaauagaau

SEQ ID NO: 1899599 - RNA, 19 nt, Artificial Sequence
  Description of Artificial Sequence: Synthetic oligonucleotide
caggaguaaauauugauac

SEQ ID NO: 1899600 - RNA, 19 nt, Artificial Sequence
  Description of Artificial Sequence: Synthetic oligonucleotide
auuacuggaacaucccaac

SEQ ID NO: 1899601 - RNA, 19 nt, Artificial Sequence
  Description of Artificial Sequence: Synthetic oligonucleotide
ugaagugaaaauagaauuc

SEQ ID NO: 1899602 - RNA, 19 nt, Artificial Sequence
  Description of Artificial Sequence: Synthetic oligonucleotide
ugaaaaguugcuuaagauc

SEQ ID NO: 1899603 - RNA, 19 nt, Artificial Sequence
  Description of Artificial Sequence: Synthetic oligonucleotide
uuagugaucucuaaaccga

SEQ ID NO: 1899604 - RNA, 19 nt, Artificial Sequence
  Description of Artificial Sequence: Synthetic oligonucleotide
uguuuaaguaugaagugaa

SEQ ID NO: 1899605 - RNA, 19 nt, Artificial Sequence
  Description of Artificial Sequence: Synthetic oligonucleotide
auaauaucauaaauuuccc

SEQ ID NO: 1899606 - RNA, 19 nt, Artificial Sequence
  Description of Artificial Sequence: Synthetic oligonucleotide
uuaauaaaauacuguuccc

SEQ ID NO: 1899607 - RNA, 19 nt, Artificial Sequence
  Description of Artificial Sequence: Synthetic oligonucleotide
augaagugaaaauagaauu

SEQ ID NO: 1899608 - RNA, 19 nt, Artificial Sequence
  Description of Artificial Sequence: Synthetic oligonucleotide
ucgguguuacaacugaucc

SEQ ID NO: 1899609 - RNA, 19 nt, Artificial Sequence
  Description of Artificial Sequence: Synthetic oligonucleotide
agauagucgcuguacaggg

SEQ ID NO: 1899610 - RNA, 19 nt, Artificial Sequence
  Description of Artificial Sequence: Synthetic oligonucleotide
aaaauuggccuugagccag

SEQ ID NO: 1899611 - RNA, 19 nt, Artificial Sequence
  Description of Artificial Sequence: Synthetic oligonucleotide
aaaauagaauucucucuga

SEQ ID NO: 1899612 - RNA, 19 nt, Artificial Sequence
  Description of Artificial Sequence: Synthetic oligonucleotide
aauucucucugagagucac

SEQ ID NO: 1899613 - RNA, 19 nt, Artificial Sequence
  Description of Artificial Sequence: Synthetic oligonucleotide
ucaacagagcuaccaacgg

SEQ ID NO: 1899614 - RNA, 19 nt, Artificial Sequence
  Description of Artificial Sequence: Synthetic oligonucleotide
uccacguuguuuaaguaug

SEQ ID NO: 1899615 - RNA, 19 nt, Artificial Sequence
  Description of Artificial Sequence: Synthetic oligonucleotide
uuuaaguaugaagugaaaa

SEQ ID NO: 1899616 - RNA, 19 nt, Artificial Sequence
  Description of Artificial Sequence: Synthetic oligonucleotide
auccuaagggcacagguuc

SEQ ID NO: 1899617 - RNA, 19 nt, Artificial Sequence
  Description of Artificial Sequence: Synthetic oligonucleotide
aauuucaguaucucucggu

SEQ ID NO: 1899618 - RNA, 19 nt, Artificial Sequence
  Description of Artificial Sequence: Synthetic oligonucleotide
gaguuagugaucucuaaac

SEQ ID NO: 1899619 - RNA, 19 nt, Artificial Sequence
  Description of Artificial Sequence: Synthetic oligonucleotide
guuguuuaaguaugaagug

SEQ ID NO: 1899620 - RNA, 19 nt, Artificial Sequence
  Description of Artificial Sequence: Synthetic oligonucleotide
uagagcguuaccaggaaca

SEQ ID NO: 1899621 - RNA, 19 nt, Artificial Sequence
  Description of Artificial Sequence: Synthetic oligonucleotide
uacaacugauccuaagggc

SEQ ID NO: 1899622 - RNA, 19 nt, Artificial Sequence
  Description of Artificial Sequence: Synthetic oligonucleotide
aggagcacccaguucacgc

SEQ ID NO: 1899623 - RNA, 19 nt, Artificial Sequence
  Description of Artificial Sequence: Synthetic oligonucleotide
uauucguagagcguuacca

SEQ ID NO: 1899624 - RNA, 19 nt, Artificial Sequence
  Description of Artificial Sequence: Synthetic oligonucleotide
guugcuuaagaucauaaaa

SEQ ID NO: 1899625 - RNA, 19 nt, Artificial Sequence
  Description of Artificial Sequence: Synthetic oligonucleotide
uggagauaauaucauaaau

SEQ ID NO: 1899626 - RNA, 19 nt, Artificial Sequence
  Description of Artificial Sequence: Synthetic oligonucleotide
aguaucucucgguaauugg

SEQ ID NO: 1899627 - RNA, 19 nt, Artificial Sequence
  Description of Artificial Sequence: Synthetic oligonucleotide
aaggcaaucuguugucaag

SEQ ID NO: 1899628 - RNA, 19 nt, Artificial Sequence
  Description of Artificial Sequence: Synthetic oligonucleotide
gauuccugcacaaacugcc

SEQ ID NO: 1899629 - RNA, 19 nt, Artificial Sequence
  Description of Artificial Sequence: Synthetic oligonucleotide
uguaaguucgguguuacaa

SEQ ID NO: 1899630 - RNA, 19 nt, Artificial Sequence
  Description of Artificial Sequence: Synthetic oligonucleotide
ucuugaacgcucuugugcu

SEQ ID NO: 1899631 - RNA, 19 nt, Artificial Sequence
  Description of Artificial Sequence: Synthetic oligonucleotide
acguuguuuaaguaugaag

SEQ ID NO: 1899632 - RNA, 19 nt, Artificial Sequence
  Description of Artificial Sequence: Synthetic oligonucleotide
uucguagagcguuaccagg

SEQ ID NO: 1899633 - RNA, 19 nt, Artificial Sequence
  Description of Artificial Sequence: Synthetic oligonucleotide
gagauaauaucauaaauuu

SEQ ID NO: 1899634 - RNA, 19 nt, Artificial Sequence
  Description of Artificial Sequence: Synthetic oligonucleotide
ucucugagagucacgacug

SEQ ID NO: 1899635 - RNA, 19 nt, Artificial Sequence
  Description of Artificial Sequence: Synthetic oligonucleotide
gugaucucuaaaccgaaag

SEQ ID NO: 1899636 - RNA, 19 nt, Artificial Sequence
  Description of Artificial Sequence: Synthetic oligonucleotide
ugagagucacgacuguaag

SEQ ID NO: 1899637 - RNA, 19 nt, Artificial Sequence
  Description of Artificial Sequence: Synthetic oligonucleotide
aacgcucuugugcugaacu

SEQ ID NO: 1899638 - RNA, 19 nt, Artificial Sequence
  Description of Artificial Sequence: Synthetic oligonucleotide
agaauuacuggaacauccc

SEQ ID NO: 1899639 - RNA, 19 nt, Artificial Sequence
  Description of Artificial Sequence: Synthetic oligonucleotide
gauagcgagaucugggaac

SEQ ID NO: 1899640 - RNA, 19 nt, Artificial Sequence
  Description of Artificial Sequence: Synthetic oligonucleotide
uacagggccucuucuaacg

SEQ ID NO: 1899641 - RNA, 19 nt, Artificial Sequence
  Description of Artificial Sequence: Synthetic oligonucleotide
uggaacaucccaaccaaac

SEQ ID NO: 1899642 - RNA, 19 nt, Artificial Sequence
  Description of Artificial Sequence: Synthetic oligonucleotide
ugauccuaagggcacaggu

SEQ ID NO: 1899643 - RNA, 19 nt, Artificial Sequence
  Description of Artificial Sequence: Synthetic oligonucleotide
aaaaccaccgcgauguaga

SEQ ID NO: 1899644 - RNA, 19 nt, Artificial Sequence
  Description of Artificial Sequence: Synthetic oligonucleotide
acuguuugaaguagcacac

SEQ ID NO: 1899645 - RNA, 19 nt, Artificial Sequence
  Description of Artificial Sequence: Synthetic oligonucleotide
aaaccgaaaggguucuuga

SEQ ID NO: 1899646 - RNA, 19 nt, Artificial Sequence
  Description of Artificial Sequence: Synthetic oligonucleotide
agauaauaucauaaauuuc

SEQ ID NO: 1899647 - RNA, 19 nt, Artificial Sequence
  Description of Artificial Sequence: Synthetic oligonucleotide
uaaaauuggccuugagcca

SEQ ID NO: 1899648 - RNA, 19 nt, Artificial Sequence
  Description of Artificial Sequence: Synthetic oligonucleotide
agagcuaccaacggauagc

SEQ ID NO: 1899649 - RNA, 19 nt, Artificial Sequence
  Description of Artificial Sequence: Synthetic oligonucleotide
uugauacaauauucuacag

SEQ ID NO: 1899650 - RNA, 19 nt, Artificial Sequence
  Description of Artificial Sequence: Synthetic oligonucleotide
aaagauuccugcacaaacu

SEQ ID NO: 1899651 - RNA, 19 nt, Artificial Sequence
  Description of Artificial Sequence: Synthetic oligonucleotide
ugcuagugaagcugaagag

SEQ ID NO: 1899652 - RNA, 19 nt, Artificial Sequence
  Description of Artificial Sequence: Synthetic oligonucleotide
uaaguucgguguuacaacu

SEQ ID NO: 1899653 - RNA, 19 nt, Artificial Sequence
  Description of Artificial Sequence: Synthetic oligonucleotide
uugcagacaugaaaaguug

SEQ ID NO: 1899654 - RNA, 19 nt, Artificial Sequence
  Description of Artificial Sequence: Synthetic oligonucleotide
acuguuugcagacaugaaa

SEQ ID NO: 1899655 - RNA, 19 nt, Artificial Sequence
  Description of Artificial Sequence: Synthetic oligonucleotide
augaaaaguugcuuaagau

SEQ ID NO: 1899656 - RNA, 19 nt, Artificial Sequence
  Description of Artificial Sequence: Synthetic oligonucleotide
uaucucucgguaauuggca

SEQ ID NO: 1899657 - RNA, 19 nt, Artificial Sequence
  Description of Artificial Sequence: Synthetic oligonucleotide
ucucagaauuacuggaaca

SEQ ID NO: 1899658 - RNA, 19 nt, Artificial Sequence
  Description of Artificial Sequence: Synthetic oligonucleotide
uguuacaacugauccuaag

SEQ ID NO: 1899659 - RNA, 19 nt, Artificial Sequence
  Description of Artificial Sequence: Synthetic oligonucleotide
ugcuuaagaucauaaaauu

SEQ ID NO: 1899660 - RNA, 19 nt, Artificial Sequence
  Description of Artificial Sequence: Synthetic oligonucleotide
cuacagggcaguuuguaag

SEQ ID NO: 1899661 - RNA, 19 nt, Artificial Sequence
  Description of Artificial Sequence: Synthetic oligonucleotide
agugcaaaagauuccugca

SEQ ID NO: 1899662 - RNA, 19 nt, Artificial Sequence
  Description of Artificial Sequence: Synthetic oligonucleotide
aaccauccuaguaccaggc

SEQ ID NO: 1899663 - RNA, 19 nt, Artificial Sequence
  Description of Artificial Sequence: Synthetic oligonucleotide
auaucauaaauuucccgau

SEQ ID NO: 1899664 - RNA, 19 nt, Artificial Sequence
  Description of Artificial Sequence: Synthetic oligonucleotide
gaacacugcggccaucagg

SEQ ID NO: 1899665 - RNA, 19 nt, Artificial Sequence
  Description of Artificial Sequence: Synthetic oligonucleotide
uuucucagaauuacuggaa

SEQ ID NO: 1899666 - RNA, 19 nt, Artificial Sequence
  Description of Artificial Sequence: Synthetic oligonucleotide
auucguagagcguuaccag

SEQ ID NO: 1899667 - RNA, 19 nt, Artificial Sequence
  Description of Artificial Sequence: Synthetic oligonucleotide
cauccuaguaccaggccgg

SEQ ID NO: 1899668 - RNA, 19 nt, Artificial Sequence
  Description of Artificial Sequence: Synthetic oligonucleotide
uaucauaaauuucccgauc

SEQ ID NO: 1899669 - RNA, 19 nt, Artificial Sequence
  Description of Artificial Sequence: Synthetic oligonucleotide
ucucuaaaccgaaaggguu

SEQ ID NO: 1899670 - RNA, 19 nt, Artificial Sequence
  Description of Artificial Sequence: Synthetic oligonucleotide
guaauuggcaauauauuuc

SEQ ID NO: 1899671 - RNA, 19 nt, Artificial Sequence
  Description of Artificial Sequence: Synthetic oligonucleotide
aacuaucucggacugugau

SEQ ID NO: 1899672 - RNA, 19 nt, Artificial Sequence
  Description of Artificial Sequence: Synthetic oligonucleotide
uguugucaaggucacgcca

SEQ ID NO: 1899673 - RNA, 19 nt, Artificial Sequence
  Description of Artificial Sequence: Synthetic oligonucleotide
gcuaccaacggauagcgag

SEQ ID NO: 1899674 - RNA, 19 nt, Artificial Sequence
  Description of Artificial Sequence: Synthetic oligonucleotide
ucuugugcugaacuggauc

SEQ ID NO: 1899675 - RNA, 19 nt, Artificial Sequence
  Description of Artificial Sequence: Synthetic oligonucleotide
cucuucuaacgcuuguggg

SEQ ID NO: 1899676 - RNA, 19 nt, Artificial Sequence
  Description of Artificial Sequence: Synthetic oligonucleotide
aacggauagcgagaucugg

SEQ ID NO: 1899677 - RNA, 19 nt, Artificial Sequence
  Description of Artificial Sequence: Synthetic oligonucleotide
ugagccaggaguaaauauu

SEQ ID NO: 1899678 - RNA, 19 nt, Artificial Sequence
  Description of Artificial Sequence: Synthetic oligonucleotide
agcguuaccaggaacacug

SEQ ID NO: 1899679 - RNA, 19 nt, Artificial Sequence
  Description of Artificial Sequence: Synthetic oligonucleotide
uaaauuucccgaucauccu

SEQ ID NO: 1899680 - RNA, 19 nt, Artificial Sequence
  Description of Artificial Sequence: Synthetic oligonucleotide
cacuguuugaaguagcaca

SEQ ID NO: 1899681 - RNA, 19 nt, Artificial Sequence
  Description of Artificial Sequence: Synthetic oligonucleotide
uuacuggaacaucccaacc

SEQ ID NO: 1899682 - RNA, 19 nt, Artificial Sequence
  Description of Artificial Sequence: Synthetic oligonucleotide
agacaugaaaaguugcuua

SEQ ID NO: 1899683 - RNA, 19 nt, Artificial Sequence
  Description of Artificial Sequence: Synthetic oligonucleotide
guggugacgaugaagcagg

SEQ ID NO: 1899684 - RNA, 19 nt, Artificial Sequence
  Description of Artificial Sequence: Synthetic oligonucleotide
uccaguaagcucugcucgg

SEQ ID NO: 1899685 - RNA, 19 nt, Artificial Sequence
  Description of Artificial Sequence: Synthetic oligonucleotide
ucguagagcguuaccagga

SEQ ID NO: 1899686 - RNA, 19 nt, Artificial Sequence
  Description of Artificial Sequence: Synthetic oligonucleotide
agucacgacuguaaguucg

SEQ ID NO: 1899687 - RNA, 19 nt, Artificial Sequence
  Description of Artificial Sequence: Synthetic oligonucleotide
guaaguucgguguuacaac

SEQ ID NO: 1899688 - RNA, 19 nt, Artificial Sequence
  Description of Artificial Sequence: Synthetic oligonucleotide
ggcgaguauucguagagcg

SEQ ID NO: 1899689 - RNA, 19 nt, Artificial Sequence
  Description of Artificial Sequence: Synthetic oligonucleotide
cucuaaaccgaaaggguuc

SEQ ID NO: 1899690 - RNA, 19 nt, Artificial Sequence
  Description of Artificial Sequence: Synthetic oligonucleotide
aacagagcuaccaacggau

SEQ ID NO: 1899691 - RNA, 19 nt, Artificial Sequence
  Description of Artificial Sequence: Synthetic oligonucleotide
gucuggcucuuucugaccg

SEQ ID NO: 1899692 - RNA, 19 nt, Artificial Sequence
  Description of Artificial Sequence: Synthetic oligonucleotide
gaauuacuggaacauccca

SEQ ID NO: 1899693 - RNA, 19 nt, Artificial Sequence
  Description of Artificial Sequence: Synthetic oligonucleotide
uguacagggccucuucuaa

SEQ ID NO: 1899694 - RNA, 19 nt, Artificial Sequence
  Description of Artificial Sequence: Synthetic oligonucleotide
acuguaaguucgguguuac

SEQ ID NO: 1899695 - RNA, 19 nt, Artificial Sequence
  Description of Artificial Sequence: Synthetic oligonucleotide
gauguagaagagcggcgag

SEQ ID NO: 1899696 - RNA, 19 nt, Artificial Sequence
  Description of Artificial Sequence: Synthetic oligonucleotide
ucaggagguuuccagcaug

SEQ ID NO: 1899697 - RNA, 19 nt, Artificial Sequence
  Description of Artificial Sequence: Synthetic oligonucleotide
auuucaguaucucucggua

SEQ ID NO: 1899698 - RNA, 19 nt, Artificial Sequence
  Description of Artificial Sequence: Synthetic oligonucleotide
acaacugauccuaagggca

SEQ ID NO: 1899699 - RNA, 19 nt, Artificial Sequence
  Description of Artificial Sequence: Synthetic oligonucleotide
aauuucccgaucauccuca

SEQ ID NO: 1899700 - RNA, 19 nt, Artificial Sequence
  Description of Artificial Sequence: Synthetic oligonucleotide
acuaucucggacugugaug

SEQ ID NO: 1899701 - RNA, 19 nt, Artificial Sequence
  Description of Artificial Sequence: Synthetic oligonucleotide
accgaaaggguucuugacu

SEQ ID NO: 1899702 - RNA, 19 nt, Artificial Sequence
  Description of Artificial Sequence: Synthetic oligonucleotide
uucgguguuacaacugauc

SEQ ID NO: 1899703 - RNA, 19 nt, Artificial Sequence
  Description of Artificial Sequence: Synthetic oligonucleotide
gacaugaaaaguugcuuaa

SEQ ID NO: 1899704 - RNA, 19 nt, Artificial Sequence
  Description of Artificial Sequence: Synthetic oligonucleotide
aaauacuguucccggugga

SEQ ID NO: 1899705 - RNA, 19 nt, Artificial Sequence
  Description of Artificial Sequence: Synthetic oligonucleotide
agauuccugcacaaacugc

SEQ ID NO: 1899706 - RNA, 19 nt, Artificial Sequence
  Description of Artificial Sequence: Synthetic oligonucleotide
cauaaauuucccgaucauc

SEQ ID NO: 1899707 - RNA, 19 nt, Artificial Sequence
  Description of Artificial Sequence: Synthetic oligonucleotide
gagcuaccaacggauagcg

SEQ ID NO: 1899708 - RNA, 19 nt, Artificial Sequence
  Description of Artificial Sequence: Synthetic oligonucleotide
agagucacgacuguaaguu

SEQ ID NO: 1899709 - RNA, 19 nt, Artificial Sequence
  Description of Artificial Sequence: Synthetic oligonucleotide
agaagcauguaagacggcu

SEQ ID NO: 1899710 - RNA, 19 nt, Artificial Sequence
  Description of Artificial Sequence: Synthetic oligonucleotide
agaggaguuagugaucucu

SEQ ID NO: 1899711 - RNA, 19 nt, Artificial Sequence
  Description of Artificial Sequence: Synthetic oligonucleotide
ugggacuacuguuugcaga

SEQ ID NO: 1899712 - RNA, 19 nt, Artificial Sequence
  Description of Artificial Sequence: Synthetic oligonucleotide
aguauucguagagcguuac

SEQ ID NO: 1899713 - RNA, 19 nt, Artificial Sequence
  Description of Artificial Sequence: Synthetic oligonucleotide
aagagcggcgaguauucgu

SEQ ID NO: 1899714 - RNA, 19 nt, Artificial Sequence
  Description of Artificial Sequence: Synthetic oligonucleotide
ucauaaauuucccgaucau

SEQ ID NO: 1899715 - RNA, 19 nt, Artificial Sequence
  Description of Artificial Sequence: Synthetic oligonucleotide
guaucucucgguaauuggc

SEQ ID NO: 1899716 - RNA, 19 nt, Artificial Sequence
  Description of Artificial Sequence: Synthetic oligonucleotide
aguaugaagugaaaauaga

SEQ ID NO: 1899717 - RNA, 19 nt, Artificial Sequence
  Description of Artificial Sequence: Synthetic oligonucleotide
aggcaaucuguugucaagg

SEQ ID NO: 1899718 - RNA, 19 nt, Artificial Sequence
  Description of Artificial Sequence: Synthetic oligonucleotide
aaacugccggcacauggga

SEQ ID NO: 1899719 - RNA, 19 nt, Artificial Sequence
  Description of Artificial Sequence: Synthetic oligonucleotide
aggaguaaauauugauaca

SEQ ID NO: 1899720 - RNA, 19 nt, Artificial Sequence
  Description of Artificial Sequence: Synthetic oligonucleotide
gaaaaccaccgcgauguag

SEQ ID NO: 1899721 - RNA, 19 nt, Artificial Sequence
  Description of Artificial Sequence: Synthetic oligonucleotide
uacagggcaguuuguaagu

SEQ ID NO: 1899722 - RNA, 19 nt, Artificial Sequence
  Description of Artificial Sequence: Synthetic oligonucleotide
uuucaguaucucucgguaa

SEQ ID NO: 1899723 - RNA, 19 nt, Artificial Sequence
  Description of Artificial Sequence: Synthetic oligonucleotide
ucccgguggagauagucgc

SEQ ID NO: 1899724 - RNA, 19 nt, Artificial Sequence
  Description of Artificial Sequence: Synthetic oligonucleotide
aaagugcaaaagauuccug

SEQ ID NO: 1899725 - RNA, 19 nt, Artificial Sequence
  Description of Artificial Sequence: Synthetic oligonucleotide
ggagguuuccagcaugucc

SEQ ID NO: 1899726 - RNA, 19 nt, Artificial Sequence
  Description of Artificial Sequence: Synthetic oligonucleotide
uguguagaacuaucucgga

SEQ ID NO: 1899727 - RNA, 19 nt, Artificial Sequence
  Description of Artificial Sequence: Synthetic oligonucleotide
uuguaagucuuaucaggaa

SEQ ID NO: 1899728 - RNA, 19 nt, Artificial Sequence
  Description of Artificial Sequence: Synthetic oligonucleotide
ucuaaaccgaaaggguucu

SEQ ID NO: 1899729 - RNA, 19 nt, Artificial Sequence
  Description of Artificial Sequence: Synthetic oligonucleotide
guguagaacuaucucggac

SEQ ID NO: 1899730 - RNA, 19 nt, Artificial Sequence
  Description of Artificial Sequence: Synthetic oligonucleotide
ggaguaaauauugauacaa

SEQ ID NO: 1899731 - RNA, 19 nt, Artificial Sequence
  Description of Artificial Sequence: Synthetic oligonucleotide
uugagccaggaguaaauau

SEQ ID NO: 1899732 - RNA, 19 nt, Artificial Sequence
  Description of Artificial Sequence: Synthetic oligonucleotide
ccuaguaccaggccggugg

SEQ ID NO: 1899733 - RNA, 19 nt, Artificial Sequence
  Description of Artificial Sequence: Synthetic oligonucleotide
gaccgcaaagugcaaaaga

SEQ ID NO: 1899734 - RNA, 19 nt, Artificial Sequence
  Description of Artificial Sequence: Synthetic oligonucleotide
ccgaucauccucaucagcc

SEQ ID NO: 1899735 - RNA, 19 nt, Artificial Sequence
  Description of Artificial Sequence: Synthetic oligonucleotide
cugcuagugaagcugaaga

SEQ ID NO: 1899736 - RNA, 19 nt, Artificial Sequence
  Description of Artificial Sequence: Synthetic oligonucleotide
agagcguuaccaggaacac

SEQ ID NO: 1899737 - RNA, 19 nt, Artificial Sequence
  Description of Artificial Sequence: Synthetic oligonucleotide
agaagagcggcgaguauuc

SEQ ID NO: 1899738 - RNA, 19 nt, Artificial Sequence
  Description of Artificial Sequence: Synthetic oligonucleotide
cagagcuaccaacggauag

SEQ ID NO: 1899739 - RNA, 19 nt, Artificial Sequence
  Description of Artificial Sequence: Synthetic oligonucleotide
uguagaagagcggcgagua

SEQ ID NO: 1899740 - RNA, 19 nt, Artificial Sequence
  Description of Artificial Sequence: Synthetic oligonucleotide
gugcaaaagauuccugcac

SEQ ID NO: 1899741 - RNA, 19 nt, Artificial Sequence
  Description of Artificial Sequence: Synthetic oligonucleotide
uccuaagggcacagguucc

SEQ ID NO: 1899742 - RNA, 19 nt, Artificial Sequence
  Description of Artificial Sequence: Synthetic oligonucleotide
agcgagaucugggaacugg

SEQ ID NO: 1899743 - RNA, 19 nt, Artificial Sequence
  Description of Artificial Sequence: Synthetic oligonucleotide
agcugaagaggaguuagug

SEQ ID NO: 1899744 - RNA, 19 nt, Artificial Sequence
  Description of Artificial Sequence: Synthetic oligonucleotide
uuguggggugcuuauccug

SEQ ID NO: 1899745 - RNA, 19 nt, Artificial Sequence
  Description of Artificial Sequence: Synthetic oligonucleotide
caacugauccuaagggcac

SEQ ID NO: 1899746 - RNA, 19 nt, Artificial Sequence
  Description of Artificial Sequence: Synthetic oligonucleotide
uagugaucucuaaaccgaa

SEQ ID NO: 1899747 - RNA, 19 nt, Artificial Sequence
  Description of Artificial Sequence: Synthetic oligonucleotide
acugggacuacuguuugca

SEQ ID NO: 1899748 - RNA, 19 nt, Artificial Sequence
  Description of Artificial Sequence: Synthetic oligonucleotide
aucucuaaaccgaaagggu

SEQ ID NO: 1899749 - RNA, 19 nt, Artificial Sequence
  Description of Artificial Sequence: Synthetic oligonucleotide
cuacuguuugcagacauga

SEQ ID NO: 1899750 - RNA, 19 nt, Artificial Sequence
  Description of Artificial Sequence: Synthetic oligonucleotide
auagcgagaucugggaacu

SEQ ID NO: 1899751 - RNA, 19 nt, Artificial Sequence
  Description of Artificial Sequence: Synthetic oligonucleotide
gaagaggaguuagugaucu

SEQ ID NO: 1899752 - RNA, 19 nt, Artificial Sequence
  Description of Artificial Sequence: Synthetic oligonucleotide
ucuaacgcuuguggggugc

SEQ ID NO: 1899753 - RNA, 19 nt, Artificial Sequence
  Description of Artificial Sequence: Synthetic oligonucleotide
guuucuugaacgcucuugu

SEQ ID NO: 1899754 - RNA, 19 nt, Artificial Sequence
  Description of Artificial Sequence: Synthetic oligonucleotide
aaguucgguguuacaacug

SEQ ID NO: 1899755 - RNA, 19 nt, Artificial Sequence
  Description of Artificial Sequence: Synthetic oligonucleotide
ccauccuaguaccaggccg

SEQ ID NO: 1899756 - RNA, 19 nt, Artificial Sequence
  Description of Artificial Sequence: Synthetic oligonucleotide
gcuuguggggugcuuaucc

SEQ ID NO: 1899757 - RNA, 19 nt, Artificial Sequence
  Description of Artificial Sequence: Synthetic oligonucleotide
cuugugcugaacuggaucu

SEQ ID NO: 1899758 - RNA, 19 nt, Artificial Sequence
  Description of Artificial Sequence: Synthetic oligonucleotide
gguaauuggcaauauauuu

SEQ ID NO: 1899759 - RNA, 19 nt, Artificial Sequence
  Description of Artificial Sequence: Synthetic oligonucleotide
accgcaaagugcaaaagau

SEQ ID NO: 1899760 - RNA, 19 nt, Artificial Sequence
  Description of Artificial Sequence: Synthetic oligonucleotide
guauucguagagcguuacc

SEQ ID NO: 1899761 - RNA, 19 nt, Artificial Sequence
  Description of Artificial Sequence: Synthetic oligonucleotide
aguaagcucugcucggcau

SEQ ID NO: 1899762 - RNA, 19 nt, Artificial Sequence
  Description of Artificial Sequence: Synthetic oligonucleotide
uucuggcacaccacgcagu

SEQ ID NO: 1899763 - RNA, 19 nt, Artificial Sequence
  Description of Artificial Sequence: Synthetic oligonucleotide
ugaccgcaaagugcaaaag

SEQ ID NO: 1899764 - RNA, 19 nt, Artificial Sequence
  Description of Artificial Sequence: Synthetic oligonucleotide
aauauucuacagggcaguu

SEQ ID NO: 1899765 - RNA, 19 nt, Artificial Sequence
  Description of Artificial Sequence: Synthetic oligonucleotide
ggugcuuauccugaagcag

SEQ ID NO: 1899766 - RNA, 19 nt, Artificial Sequence
  Description of Artificial Sequence: Synthetic oligonucleotide
ugucuggcucuuucugacc

SEQ ID NO: 1899767 - RNA, 19 nt, Artificial Sequence
  Description of Artificial Sequence: Synthetic oligonucleotide
uacuguucccgguggagau

SEQ ID NO: 1899768 - RNA, 19 nt, Artificial Sequence
  Description of Artificial Sequence: Synthetic oligonucleotide
ccucuucuaacgcuugugg

SEQ ID NO: 1899769 - RNA, 19 nt, Artificial Sequence
  Description of Artificial Sequence: Synthetic oligonucleotide
aaaccaccgcgauguagaa

SEQ ID NO: 1899770 - RNA, 19 nt, Artificial Sequence
  Description of Artificial Sequence: Synthetic oligonucleotide
cacaccacgcaguccuugc

SEQ ID NO: 1899771 - RNA, 19 nt, Artificial Sequence
  Description of Artificial Sequence: Synthetic oligonucleotide
caggugaaaaccaccgcga

SEQ ID NO: 1899772 - RNA, 19 nt, Artificial Sequence
  Description of Artificial Sequence: Synthetic oligonucleotide
ggucaacagagcuaccaac

SEQ ID NO: 1899773 - RNA, 19 nt, Artificial Sequence
  Description of Artificial Sequence: Synthetic oligonucleotide
guagagcguuaccaggaac

SEQ ID NO: 1899774 - RNA, 19 nt, Artificial Sequence
  Description of Artificial Sequence: Synthetic oligonucleotide
aucauccacguuguuuaag

SEQ ID NO: 1899775 - RNA, 19 nt, Artificial Sequence
  Description of Artificial Sequence: Synthetic oligonucleotide
ggugaaaaccaccgcgaug

SEQ ID NO: 1899776 - RNA, 19 nt, Artificial Sequence
  Description of Artificial Sequence: Synthetic oligonucleotide
ucccgaucauccucaucag

SEQ ID NO: 1899777 - RNA, 19 nt, Artificial Sequence
  Description of Artificial Sequence: Synthetic oligonucleotide
cugagagucacgacuguaa

SEQ ID NO: 1899778 - RNA, 19 nt, Artificial Sequence
  Description of Artificial Sequence: Synthetic oligonucleotide
gguguuacaacugauccua

SEQ ID NO: 1899779 - RNA, 19 nt, Artificial Sequence
  Description of Artificial Sequence: Synthetic oligonucleotide
acgaugaagcaggugaaaa

SEQ ID NO: 1899780 - RNA, 19 nt, Artificial Sequence
  Description of Artificial Sequence: Synthetic oligonucleotide
guuugaaguagcacacaca

SEQ ID NO: 1899781 - RNA, 19 nt, Artificial Sequence
  Description of Artificial Sequence: Synthetic oligonucleotide
cguuguuuaaguaugaagu

SEQ ID NO: 1899782 - RNA, 19 nt, Artificial Sequence
  Description of Artificial Sequence: Synthetic oligonucleotide
ucugaccgcaaagugcaaa

SEQ ID NO: 1899783 - RNA, 19 nt, Artificial Sequence
  Description of Artificial Sequence: Synthetic oligonucleotide
ucggcauuucugucugcug

SEQ ID NO: 1899784 - RNA, 19 nt, Artificial Sequence
  Description of Artificial Sequence: Synthetic oligonucleotide
gaagagcggcgaguauucg

SEQ ID NO: 1899785 - RNA, 19 nt, Artificial Sequence
  Description of Artificial Sequence: Synthetic oligonucleotide
cuugaacgcucuugugcug

SEQ ID NO: 1899786 - RNA, 19 nt, Artificial Sequence
  Description of Artificial Sequence: Synthetic oligonucleotide
cuaucucggacugugaugu

SEQ ID NO: 1899787 - RNA, 19 nt, Artificial Sequence
  Description of Artificial Sequence: Synthetic oligonucleotide
acugcggccaucagggucu

SEQ ID NO: 1899788 - RNA, 19 nt, Artificial Sequence
  Description of Artificial Sequence: Synthetic oligonucleotide
acgcucuugugcugaacug

SEQ ID NO: 1899789 - RNA, 19 nt, Artificial Sequence
  Description of Artificial Sequence: Synthetic oligonucleotide
auacuguucccgguggaga

SEQ ID NO: 1899790 - RNA, 19 nt, Artificial Sequence
  Description of Artificial Sequence: Synthetic oligonucleotide
guggagauagucgcuguac

SEQ ID NO: 1899791 - RNA, 19 nt, Artificial Sequence
  Description of Artificial Sequence: Synthetic oligonucleotide
aucauaaaauuggccuuga

SEQ ID NO: 1899792 - RNA, 19 nt, Artificial Sequence
  Description of Artificial Sequence: Synthetic oligonucleotide
gcugaagaggaguuaguga

SEQ ID NO: 1899793 - RNA, 19 nt, Artificial Sequence
  Description of Artificial Sequence: Synthetic oligonucleotide
aaccaccgcgauguagaag

SEQ ID NO: 1899794 - RNA, 19 nt, Artificial Sequence
  Description of Artificial Sequence: Synthetic oligonucleotide
acaugggacacuguuugaa

SEQ ID NO: 1899795 - RNA, 19 nt, Artificial Sequence
  Description of Artificial Sequence: Synthetic oligonucleotide
ucggacugugaugucuuca

SEQ ID NO: 1899796 - RNA, 19 nt, Artificial Sequence
  Description of Artificial Sequence: Synthetic oligonucleotide
cugggacuacuguuugcag

SEQ ID NO: 1899797 - RNA, 19 nt, Artificial Sequence
  Description of Artificial Sequence: Synthetic oligonucleotide
caacggauagcgagaucug

SEQ ID NO: 1899798 - RNA, 19 nt, Artificial Sequence
  Description of Artificial Sequence: Synthetic oligonucleotide
agcucugcucggcauuucu

SEQ ID NO: 1899799 - RNA, 19 nt, Artificial Sequence
  Description of Artificial Sequence: Synthetic oligonucleotide
aggugaaaaccaccgcgau

SEQ ID NO: 1899800 - RNA, 19 nt, Artificial Sequence
  Description of Artificial Sequence: Synthetic oligonucleotide
agcauguaagacggcuguc

SEQ ID NO: 1899801 - RNA, 19 nt, Artificial Sequence
  Description of Artificial Sequence: Synthetic oligonucleotide
acggcugucuucaaggcaa

SEQ ID NO: 1899802 - RNA, 19 nt, Artificial Sequence
  Description of Artificial Sequence: Synthetic oligonucleotide
auuggccuugagccaggag

SEQ ID NO: 1899803 - RNA, 19 nt, Artificial Sequence
  Description of Artificial Sequence: Synthetic oligonucleotide
uucuaacgcuuguggggug

SEQ ID NO: 1899804 - RNA, 19 nt, Artificial Sequence
  Description of Artificial Sequence: Synthetic oligonucleotide
gagcggcgaguauucguag

SEQ ID NO: 1899805 - RNA, 19 nt, Artificial Sequence
  Description of Artificial Sequence: Synthetic oligonucleotide
acuacuguuugcagacaug

SEQ ID NO: 1899806 - RNA, 19 nt, Artificial Sequence
  Description of Artificial Sequence: Synthetic oligonucleotide
gagucacgacuguaaguuc

SEQ ID NO: 1899807 - RNA, 19 nt, Artificial Sequence
  Description of Artificial Sequence: Synthetic oligonucleotide
ucugagagucacgacugua

SEQ ID NO: 1899808 - RNA, 19 nt, Artificial Sequence
  Description of Artificial Sequence: Synthetic oligonucleotide
ggaguuagugaucucuaaa

SEQ ID NO: 1899809 - RNA, 19 nt, Artificial Sequence
  Description of Artificial Sequence: Synthetic oligonucleotide
cagcauguccuugucuggc

SEQ ID NO: 1899810 - RNA, 19 nt, Artificial Sequence
  Description of Artificial Sequence: Synthetic oligonucleotide
guacagggccucuucuaac

SEQ ID NO: 1899811 - RNA, 19 nt, Artificial Sequence
  Description of Artificial Sequence: Synthetic oligonucleotide
cccaaccaaaccauccuag

SEQ ID NO: 1899812 - RNA, 19 nt, Artificial Sequence
  Description of Artificial Sequence: Synthetic oligonucleotide
cuucacucccagccaggcc

SEQ ID NO: 1899813 - RNA, 19 nt, Artificial Sequence
  Description of Artificial Sequence: Synthetic oligonucleotide
auagagccuuuggacacug

SEQ ID NO: 1899814 - RNA, 19 nt, Artificial Sequence
  Description of Artificial Sequence: Synthetic oligonucleotide
gaacuggaucucuucugaa

SEQ ID NO: 1899815 - RNA, 19 nt, Artificial Sequence
  Description of Artificial Sequence: Synthetic oligonucleotide
gagagucacgacuguaagu

SEQ ID NO: 1899816 - RNA, 19 nt, Artificial Sequence
  Description of Artificial Sequence: Synthetic oligonucleotide
aacgcuuguggggugcuua

SEQ ID NO: 1899817 - RNA, 19 nt, Artificial Sequence
  Description of Artificial Sequence: Synthetic oligonucleotide
accaacggauagcgagauc

SEQ ID NO: 1899818 - RNA, 19 nt, Artificial Sequence
  Description of Artificial Sequence: Synthetic oligonucleotide
aagcugaagaggaguuagu

SEQ ID NO: 1899819 - RNA, 19 nt, Artificial Sequence
  Description of Artificial Sequence: Synthetic oligonucleotide
aggucacgccagcugcuag

SEQ ID NO: 1899820 - RNA, 19 nt, Artificial Sequence
  Description of Artificial Sequence: Synthetic oligonucleotide
acgcaguccuugcugcucu

SEQ ID NO: 1899821 - RNA, 19 nt, Artificial Sequence
  Description of Artificial Sequence: Synthetic oligonucleotide
caaccaaaccauccuagua

SEQ ID NO: 1899822 - RNA, 19 nt, Artificial Sequence
  Description of Artificial Sequence: Synthetic oligonucleotide
cugaccgcaaagugcaaaa

SEQ ID NO: 1899823 - RNA, 19 nt, Artificial Sequence
  Description of Artificial Sequence: Synthetic oligonucleotide
ggagcacccaguucacgcc

SEQ ID NO: 1899824 - RNA, 19 nt, Artificial Sequence
  Description of Artificial Sequence: Synthetic oligonucleotide
agcggcgaguauucguaga

SEQ ID NO: 1899825 - RNA, 19 nt, Artificial Sequence
  Description of Artificial Sequence: Synthetic oligonucleotide
uuucccgaucauccucauc

SEQ ID NO: 1899826 - RNA, 19 nt, Artificial Sequence
  Description of Artificial Sequence: Synthetic oligonucleotide
gcggcgaguauucguagag

SEQ ID NO: 1899827 - RNA, 19 nt, Artificial Sequence
  Description of Artificial Sequence: Synthetic oligonucleotide
auauucuacagggcaguuu

SEQ ID NO: 1899828 - RNA, 19 nt, Artificial Sequence
  Description of Artificial Sequence: Synthetic oligonucleotide
caaggcaaucuguugucaa

SEQ ID NO: 1899829 - RNA, 19 nt, Artificial Sequence
  Description of Artificial Sequence: Synthetic oligonucleotide
guuuaaguaugaagugaaa

SEQ ID NO: 1899830 - RNA, 19 nt, Artificial Sequence
  Description of Artificial Sequence: Synthetic oligonucleotide
cacgccagcugcuagugaa

SEQ ID NO: 1899831 - RNA, 19 nt, Artificial Sequence
  Description of Artificial Sequence: Synthetic oligonucleotide
agcacccaguucacgcccc

SEQ ID NO: 1899832 - RNA, 19 nt, Artificial Sequence
  Description of Artificial Sequence: Synthetic oligonucleotide
gaguaaauauugauacaau

SEQ ID NO: 1899833 - RNA, 19 nt, Artificial Sequence
  Description of Artificial Sequence: Synthetic oligonucleotide
uaccaggccgguggugacg

SEQ ID NO: 1899834 - RNA, 19 nt, Artificial Sequence
  Description of Artificial Sequence: Synthetic oligonucleotide
uaccaacggauagcgagau

SEQ ID NO: 1899835 - RNA, 19 nt, Artificial Sequence
  Description of Artificial Sequence: Synthetic oligonucleotide
ugacaccauggagauaaua

SEQ ID NO: 1899836 - RNA, 19 nt, Artificial Sequence
  Description of Artificial Sequence: Synthetic oligonucleotide
ucaguaucucucgguaauu

SEQ ID NO: 1899837 - RNA, 19 nt, Artificial Sequence
  Description of Artificial Sequence: Synthetic oligonucleotide
uuccacgccuuguguagaa

SEQ ID NO: 1899838 - RNA, 19 nt, Artificial Sequence
  Description of Artificial Sequence: Synthetic oligonucleotide
aauuggccuugagccagga

SEQ ID NO: 1899839 - RNA, 19 nt, Artificial Sequence
  Description of Artificial Sequence: Synthetic oligonucleotide
uagaacuaucucggacugu

SEQ ID NO: 1899840 - RNA, 19 nt, Artificial Sequence
  Description of Artificial Sequence: Synthetic oligonucleotide
ccaggaguaaauauugaua

SEQ ID NO: 1899841 - RNA, 19 nt, Artificial Sequence
  Description of Artificial Sequence: Synthetic oligonucleotide
cugauccuaagggcacagg

SEQ ID NO: 1899842 - RNA, 19 nt, Artificial Sequence
  Description of Artificial Sequence: Synthetic oligonucleotide
aucuguugucaaggucacg

SEQ ID NO: 1899843 - RNA, 19 nt, Artificial Sequence
  Description of Artificial Sequence: Synthetic oligonucleotide
ggacugggacuacuguuug

SEQ ID NO: 1899844 - RNA, 19 nt, Artificial Sequence
  Description of Artificial Sequence: Synthetic oligonucleotide
ucacgccagcugcuaguga

SEQ ID NO: 1899845 - RNA, 19 nt, Artificial Sequence
  Description of Artificial Sequence: Synthetic oligonucleotide
cgaugaagcaggugaaaac

SEQ ID NO: 1899846 - RNA, 19 nt, Artificial Sequence
  Description of Artificial Sequence: Synthetic oligonucleotide
agagcggcgaguauucgua

SEQ ID NO: 1899847 - RNA, 19 nt, Artificial Sequence
  Description of Artificial Sequence: Synthetic oligonucleotide
uggugacgaugaagcaggu

SEQ ID NO: 1899848 - RNA, 19 nt, Artificial Sequence
  Description of Artificial Sequence: Synthetic oligonucleotide
agugaucucuaaaccgaaa

SEQ ID NO: 1899849 - RNA, 19 nt, Artificial Sequence
  Description of Artificial Sequence: Synthetic oligonucleotide
uugugcugaacuggaucuc

SEQ ID NO: 1899850 - RNA, 19 nt, Artificial Sequence
  Description of Artificial Sequence: Synthetic oligonucleotide
gcgauguagaagagcggcg

SEQ ID NO: 1899851 - RNA, 19 nt, Artificial Sequence
  Description of Artificial Sequence: Synthetic oligonucleotide
ucucgguaauuggcaauau

SEQ ID NO: 1899852 - RNA, 19 nt, Artificial Sequence
  Description of Artificial Sequence: Synthetic oligonucleotide
cuucuaacgcuuguggggu

SEQ ID NO: 1899853 - RNA, 19 nt, Artificial Sequence
  Description of Artificial Sequence: Synthetic oligonucleotide
cuaagggcacagguuccac

SEQ ID NO: 1899854 - RNA, 19 nt, Artificial Sequence
  Description of Artificial Sequence: Synthetic oligonucleotide
gucacgccagcugcuagug

SEQ ID NO: 1899855 - RNA, 19 nt, Artificial Sequence
  Description of Artificial Sequence: Synthetic oligonucleotide
ggacacuguuugaaguagc

SEQ ID NO: 1899856 - RNA, 19 nt, Artificial Sequence
  Description of Artificial Sequence: Synthetic oligonucleotide
cguuaccaggaacacugcg

SEQ ID NO: 1899857 - RNA, 19 nt, Artificial Sequence
  Description of Artificial Sequence: Synthetic oligonucleotide
uucugaccgcaaagugcaa

SEQ ID NO: 1899858 - RNA, 19 nt, Artificial Sequence
  Description of Artificial Sequence: Synthetic oligonucleotide
gacuguaaguucgguguua

SEQ ID NO: 1899859 - RNA, 19 nt, Artificial Sequence
  Description of Artificial Sequence: Synthetic oligonucleotide
ggauagcgagaucugggaa

SEQ ID NO: 1899860 - RNA, 19 nt, Artificial Sequence
  Description of Artificial Sequence: Synthetic oligonucleotide
aaggucacgccagcugcua

SEQ ID NO: 1899861 - RNA, 19 nt, Artificial Sequence
  Description of Artificial Sequence: Synthetic oligonucleotide
ugcuucugaagagcuucau

SEQ ID NO: 1899862 - RNA, 19 nt, Artificial Sequence
  Description of Artificial Sequence: Synthetic oligonucleotide
uccuaguaccaggccggug

SEQ ID NO: 1899863 - RNA, 19 nt, Artificial Sequence
  Description of Artificial Sequence: Synthetic oligonucleotide
ugucugcuggagagggcuu

SEQ ID NO: 1899864 - RNA, 19 nt, Artificial Sequence
  Description of Artificial Sequence: Synthetic oligonucleotide
caggagcacccaguucacg

SEQ ID NO: 1899865 - RNA, 19 nt, Artificial Sequence
  Description of Artificial Sequence: Synthetic oligonucleotide
cucgguaauuggcaauaua

SEQ ID NO: 1899866 - RNA, 19 nt, Artificial Sequence
  Description of Artificial Sequence: Synthetic oligonucleotide
cauccacguuguuuaagua

SEQ ID NO: 1899867 - RNA, 19 nt, Artificial Sequence
  Description of Artificial Sequence: Synthetic oligonucleotide
cucucgguaauuggcaaua

SEQ ID NO: 1899868 - RNA, 19 nt, Artificial Sequence
  Description of Artificial Sequence: Synthetic oligonucleotide
ccaacggauagcgagaucu

SEQ ID NO: 1899869 - RNA, 19 nt, Artificial Sequence
  Description of Artificial Sequence: Synthetic oligonucleotide
cacaugggacacuguuuga

SEQ ID NO: 1899870 - RNA, 19 nt, Artificial Sequence
  Description of Artificial Sequence: Synthetic oligonucleotide
ccuuuggacacugcacccc

SEQ ID NO: 1899871 - RNA, 19 nt, Artificial Sequence
  Description of Artificial Sequence: Synthetic oligonucleotide
acgcuuguggggugcuuau

SEQ ID NO: 1899872 - RNA, 19 nt, Artificial Sequence
  Description of Artificial Sequence: Synthetic oligonucleotide
accaggccgguggugacga

SEQ ID NO: 1899873 - RNA, 19 nt, Artificial Sequence
  Description of Artificial Sequence: Synthetic oligonucleotide
uggcucuuucugaccgcaa

SEQ ID NO: 1899874 - RNA, 19 nt, Artificial Sequence
  Description of Artificial Sequence: Synthetic oligonucleotide
cucggacugugaugucuuc

SEQ ID NO: 1899875 - RNA, 19 nt, Artificial Sequence
  Description of Artificial Sequence: Synthetic oligonucleotide
cuguaaguucgguguuaca

SEQ ID NO: 1899876 - RNA, 19 nt, Artificial Sequence
  Description of Artificial Sequence: Synthetic oligonucleotide
ggagggacugggacuacug

SEQ ID NO: 1899877 - RNA, 19 nt, Artificial Sequence
  Description of Artificial Sequence: Synthetic oligonucleotide
acgccuuguguagaacuau

SEQ ID NO: 1899878 - RNA, 19 nt, Artificial Sequence
  Description of Artificial Sequence: Synthetic oligonucleotide
gaguauucguagagcguua

SEQ ID NO: 1899879 - RNA, 19 nt, Artificial Sequence
  Description of Artificial Sequence: Synthetic oligonucleotide
cuugagccaggaguaaaua

SEQ ID NO: 1899880 - RNA, 19 nt, Artificial Sequence
  Description of Artificial Sequence: Synthetic oligonucleotide
gaacgcucuugugcugaac

SEQ ID NO: 1899881 - RNA, 19 nt, Artificial Sequence
  Description of Artificial Sequence: Synthetic oligonucleotide
cuuguggggugcuuauccu

SEQ ID NO: 1899882 - RNA, 19 nt, Artificial Sequence
  Description of Artificial Sequence: Synthetic oligonucleotide
gggucaacagagcuaccaa

SEQ ID NO: 1899883 - RNA, 19 nt, Artificial Sequence
  Description of Artificial Sequence: Synthetic oligonucleotide
cuggcacaccacgcagucc

SEQ ID NO: 1899884 - RNA, 19 nt, Artificial Sequence
  Description of Artificial Sequence: Synthetic oligonucleotide
ggugacgaugaagcaggug

SEQ ID NO: 1899885 - RNA, 19 nt, Artificial Sequence
  Description of Artificial Sequence: Synthetic oligonucleotide
cacguuguuuaaguaugaa

SEQ ID NO: 1899886 - RNA, 19 nt, Artificial Sequence
  Description of Artificial Sequence: Synthetic oligonucleotide
ggcucuuucugaccgcaaa

SEQ ID NO: 1899887 - RNA, 19 nt, Artificial Sequence
  Description of Artificial Sequence: Synthetic oligonucleotide
gccaggaguaaauauugau

SEQ ID NO: 1899888 - RNA, 19 nt, Artificial Sequence
  Description of Artificial Sequence: Synthetic oligonucleotide
caggagguuuccagcaugu

SEQ ID NO: 1899889 - RNA, 19 nt, Artificial Sequence
  Description of Artificial Sequence: Synthetic oligonucleotide
uggcuccacuucacuccca

SEQ ID NO: 1899890 - RNA, 19 nt, Artificial Sequence
  Description of Artificial Sequence: Synthetic oligonucleotide
cccgaucauccucaucagc

SEQ ID NO: 1899891 - RNA, 19 nt, Artificial Sequence
  Description of Artificial Sequence: Synthetic oligonucleotide
caucauccacguuguuuaa

SEQ ID NO: 1899892 - RNA, 19 nt, Artificial Sequence
  Description of Artificial Sequence: Synthetic oligonucleotide
uagcgagaucugggaacug

SEQ ID NO: 1899893 - RNA, 19 nt, Artificial Sequence
  Description of Artificial Sequence: Synthetic oligonucleotide
uguucccgguggagauagu

SEQ ID NO: 1899894 - RNA, 19 nt, Artificial Sequence
  Description of Artificial Sequence: Synthetic oligonucleotide
cugucugcuggagagggcu

SEQ ID NO: 1899895 - RNA, 19 nt, Artificial Sequence
  Description of Artificial Sequence: Synthetic oligonucleotide
ccguucuggcacaccacgc

SEQ ID NO: 1899896 - RNA, 19 nt, Artificial Sequence
  Description of Artificial Sequence: Synthetic oligonucleotide
acagagcuaccaacggaua

SEQ ID NO: 1899897 - RNA, 19 nt, Artificial Sequence
  Description of Artificial Sequence: Synthetic oligonucleotide
guaagcucugcucggcauu

SEQ ID NO: 1899898 - RNA, 19 nt, Artificial Sequence
  Description of Artificial Sequence: Synthetic oligonucleotide
ggcaugccggcaaggcagg

SEQ ID NO: 1899899 - RNA, 19 nt, Artificial Sequence
  Description of Artificial Sequence: Synthetic oligonucleotide
auccuaguaccaggccggu

SEQ ID NO: 1899900 - RNA, 19 nt, Artificial Sequence
  Description of Artificial Sequence: Synthetic oligonucleotide
cacaaacugccggcacaug

SEQ ID NO: 1899901 - RNA, 19 nt, Artificial Sequence
  Description of Artificial Sequence: Synthetic oligonucleotide
gcauguaagacggcugucu

SEQ ID NO: 1899902 - RNA, 19 nt, Artificial Sequence
  Description of Artificial Sequence: Synthetic oligonucleotide
aucugggaacuggaccaaa

SEQ ID NO: 1899903 - RNA, 19 nt, Artificial Sequence
  Description of Artificial Sequence: Synthetic oligonucleotide
gaagagcuucauagagccu

SEQ ID NO: 1899904 - RNA, 19 nt, Artificial Sequence
  Description of Artificial Sequence: Synthetic oligonucleotide
ccgcgauguagaagagcgg

SEQ ID NO: 1899905 - RNA, 19 nt, Artificial Sequence
  Description of Artificial Sequence: Synthetic oligonucleotide
gagcguuaccaggaacacu

SEQ ID NO: 1899906 - RNA, 19 nt, Artificial Sequence
  Description of Artificial Sequence: Synthetic oligonucleotide
agcuaccaacggauagcga

SEQ ID NO: 1899907 - RNA, 19 nt, Artificial Sequence
  Description of Artificial Sequence: Synthetic oligonucleotide
ccggcaaggcaggagcacc

SEQ ID NO: 1899908 - RNA, 19 nt, Artificial Sequence
  Description of Artificial Sequence: Synthetic oligonucleotide
ccacguuguuuaaguauga

SEQ ID NO: 1899909 - RNA, 19 nt, Artificial Sequence
  Description of Artificial Sequence: Synthetic oligonucleotide
guagaagagcggcgaguau

SEQ ID NO: 1899910 - RNA, 19 nt, Artificial Sequence
  Description of Artificial Sequence: Synthetic oligonucleotide
guguuacaacugauccuaa

SEQ ID NO: 1899911 - RNA, 19 nt, Artificial Sequence
  Description of Artificial Sequence: Synthetic oligonucleotide
cuaguaccaggccgguggu

SEQ ID NO: 1899912 - RNA, 19 nt, Artificial Sequence
  Description of Artificial Sequence: Synthetic oligonucleotide
cagggccucuucuaacgcu

SEQ ID NO: 1899913 - RNA, 19 nt, Artificial Sequence
  Description of Artificial Sequence: Synthetic oligonucleotide
ccgguggagauagucgcug

SEQ ID NO: 1899914 - RNA, 19 nt, Artificial Sequence
  Description of Artificial Sequence: Synthetic oligonucleotide
cggauagcgagaucuggga

SEQ ID NO: 1899915 - RNA, 19 nt, Artificial Sequence
  Description of Artificial Sequence: Synthetic oligonucleotide
uaacgcuuguggggugcuu

SEQ ID NO: 1899916 - RNA, 19 nt, Artificial Sequence
  Description of Artificial Sequence: Synthetic oligonucleotide
cagguuccacgccuugugu

SEQ ID NO: 1899917 - RNA, 19 nt, Artificial Sequence
  Description of Artificial Sequence: Synthetic oligonucleotide
ccgaaaggguucuugacuu

SEQ ID NO: 1899918 - RNA, 19 nt, Artificial Sequence
  Description of Artificial Sequence: Synthetic oligonucleotide
ggucacgccagcugcuagu

SEQ ID NO: 1899919 - RNA, 19 nt, Artificial Sequence
  Description of Artificial Sequence: Synthetic oligonucleotide
gccuuguguagaacuaucu

SEQ ID NO: 1899920 - RNA, 19 nt, Artificial Sequence
  Description of Artificial Sequence: Synthetic oligonucleotide
guucgguguuacaacugau

SEQ ID NO: 1899921 - RNA, 19 nt, Artificial Sequence
  Description of Artificial Sequence: Synthetic oligonucleotide
cucugagagucacgacugu

SEQ ID NO: 1899922 - RNA, 19 nt, Artificial Sequence
  Description of Artificial Sequence: Synthetic oligonucleotide
gcguuaccaggaacacugc

SEQ ID NO: 1899923 - RNA, 19 nt, Artificial Sequence
  Description of Artificial Sequence: Synthetic oligonucleotide
gggacugggacuacuguuu

SEQ ID NO: 1899924 - RNA, 19 nt, Artificial Sequence
  Description of Artificial Sequence: Synthetic oligonucleotide
cuggagggacugggacuac

SEQ ID NO: 1899925 - RNA, 19 nt, Artificial Sequence
  Description of Artificial Sequence: Synthetic oligonucleotide
caggccugccuucuccagu

SEQ ID NO: 1899926 - RNA, 19 nt, Artificial Sequence
  Description of Artificial Sequence: Synthetic oligonucleotide
gcucggcauuucugucugc

SEQ ID NO: 1899927 - RNA, 19 nt, Artificial Sequence
  Description of Artificial Sequence: Synthetic oligonucleotide
cacagguuccacgccuugu

SEQ ID NO: 1899928 - RNA, 19 nt, Artificial Sequence
  Description of Artificial Sequence: Synthetic oligonucleotide
gccuugagccaggaguaaa

SEQ ID NO: 1899929 - RNA, 19 nt, Artificial Sequence
  Description of Artificial Sequence: Synthetic oligonucleotide
ccccguucuggcacaccac

SEQ ID NO: 1899930 - RNA, 19 nt, Artificial Sequence
  Description of Artificial Sequence: Synthetic oligonucleotide
cggcgaguauucguagagc

SEQ ID NO: 1899931 - RNA, 19 nt, Artificial Sequence
  Description of Artificial Sequence: Synthetic oligonucleotide
ugcggccaucagggucucc

SEQ ID NO: 1899932 - RNA, 19 nt, Artificial Sequence
  Description of Artificial Sequence: Synthetic oligonucleotide
gcgaguauucguagagcgu

SEQ ID NO: 1899933 - RNA, 19 nt, Artificial Sequence
  Description of Artificial Sequence: Synthetic oligonucleotide
cuaacgcuuguggggugcu

SEQ ID NO: 1899934 - RNA, 19 nt, Artificial Sequence
  Description of Artificial Sequence: Synthetic oligonucleotide
gccggcaaggcaggagcac

SEQ ID NO: 1899935 - RNA, 19 nt, Artificial Sequence
  Description of Artificial Sequence: Synthetic oligonucleotide
gucgcuguacagggccucu

SEQ ID NO: 1899936 - RNA, 19 nt, Artificial Sequence
  Description of Artificial Sequence: Synthetic oligonucleotide
gcggccaucagggucuccu

SEQ ID NO: 1899937 - RNA, 19 nt, Artificial Sequence
  Description of Artificial Sequence: Synthetic oligonucleotide
ccgcaaagugcaaaagauu

SEQ ID NO: 1899938 - RNA, 19 nt, Artificial Sequence
  Description of Artificial Sequence: Synthetic oligonucleotide
cgaguauucguagagcguu

SEQ ID NO: 1899939 - RNA, 19 nt, Artificial Sequence
  Description of Artificial Sequence: Synthetic oligonucleotide
ggccuugagccaggaguaa

SEQ ID NO: 1899940 - RNA, 19 nt, Artificial Sequence
  Description of Artificial Sequence: Synthetic oligonucleotide
cugacaccauggagauaau

SEQ ID NO: 1899941 - RNA, 19 nt, Artificial Sequence
  Description of Artificial Sequence: Synthetic oligonucleotide
cccgguggagauagucgcu

SEQ ID NO: 1899942 - RNA, 19 nt, Artificial Sequence
  Description of Artificial Sequence: Synthetic oligonucleotide
gcaugccggcaaggcagga

SEQ ID NO: 1899943 - RNA, 19 nt, Artificial Sequence
  Description of Artificial Sequence: Synthetic oligonucleotide
cgcuuguggggugcuuauc

SEQ ID NO: 1899944 - RNA, 19 nt, Artificial Sequence
  Description of Artificial Sequence: Synthetic oligonucleotide
ccacgcaguccuugcugcu

SEQ ID NO: 1899945 - RNA, 19 nt, Artificial Sequence
  Description of Artificial Sequence: Synthetic oligonucleotide
cggcugucuucaaggcaau

SEQ ID NO: 1899946 - RNA, 19 nt, Artificial Sequence
  Description of Artificial Sequence: Synthetic oligonucleotide
ccaggccgguggugacgau

SEQ ID NO: 1899947 - RNA, 19 nt, Artificial Sequence
  Description of Artificial Sequence: Synthetic oligonucleotide
aagaccaugcuguuuagcg

SEQ ID NO: 1899948 - RNA, 19 nt, Artificial Sequence
  Description of Artificial Sequence: Synthetic oligonucleotide
ucuucuuuccaccaaaacc

SEQ ID NO: 1899949 - RNA, 19 nt, Artificial Sequence
  Description of Artificial Sequence: Synthetic oligonucleotide
auucacgucauucaccgcc

SEQ ID NO: 1899950 - RNA, 19 nt, Artificial Sequence
  Description of Artificial Sequence: Synthetic oligonucleotide
uguacauucgcccuuuucc

SEQ ID NO: 1899951 - RNA, 19 nt, Artificial Sequence
  Description of Artificial Sequence: Synthetic oligonucleotide
aaaauaaucugugggucgc

SEQ ID NO: 1899952 - RNA, 19 nt, Artificial Sequence
  Description of Artificial Sequence: Synthetic oligonucleotide
auuaacaccuuucuucugg

SEQ ID NO: 1899953 - RNA, 19 nt, Artificial Sequence
  Description of Artificial Sequence: Synthetic oligonucleotide
uuauagaaagaccaugcug

SEQ ID NO: 1899954 - RNA, 19 nt, Artificial Sequence
  Description of Artificial Sequence: Synthetic oligonucleotide
cuugguucuuuauagaaag

SEQ ID NO: 1899955 - RNA, 19 nt, Artificial Sequence
  Description of Artificial Sequence: Synthetic oligonucleotide
uucugguauuucuugaugg

SEQ ID NO: 1899956 - RNA, 19 nt, Artificial Sequence
  Description of Artificial Sequence: Synthetic oligonucleotide
aguuucacugacuucuggc

SEQ ID NO: 1899957 - RNA, 19 nt, Artificial Sequence
  Description of Artificial Sequence: Synthetic oligonucleotide
ucauaaauuuaauuuauua

SEQ ID NO: 1899958 - RNA, 19 nt, Artificial Sequence
  Description of Artificial Sequence: Synthetic oligonucleotide
uggauuaacaccuuucuuc

SEQ ID NO: 1899959 - RNA, 19 nt, Artificial Sequence
  Description of Artificial Sequence: Synthetic oligonucleotide
gaguguuccauuuggagcc

SEQ ID NO: 1899960 - RNA, 19 nt, Artificial Sequence
  Description of Artificial Sequence: Synthetic oligonucleotide
uccaguuuaucagagaagc

SEQ ID NO: 1899961 - RNA, 19 nt, Artificial Sequence
  Description of Artificial Sequence: Synthetic oligonucleotide
uucguuaggccucuggucc

SEQ ID NO: 1899962 - RNA, 19 nt, Artificial Sequence
  Description of Artificial Sequence: Synthetic oligonucleotide
caaaauaaucugugggucg

SEQ ID NO: 1899963 - RNA, 19 nt, Artificial Sequence
  Description of Artificial Sequence: Synthetic oligonucleotide
caucauaugugcuuucucc

SEQ ID NO: 1899964 - RNA, 19 nt, Artificial Sequence
  Description of Artificial Sequence: Synthetic oligonucleotide
ugcaaaauaaucugugggu

SEQ ID NO: 1899965 - RNA, 19 nt, Artificial Sequence
  Description of Artificial Sequence: Synthetic oligonucleotide
uucaacccacuccagaucc

SEQ ID NO: 1899966 - RNA, 19 nt, Artificial Sequence
  Description of Artificial Sequence: Synthetic oligonucleotide
cugcaaaauaaucuguggg

SEQ ID NO: 1899967 - RNA, 19 nt, Artificial Sequence
  Description of Artificial Sequence: Synthetic oligonucleotide
aauucagccaaacacuguu

SEQ ID NO: 1899968 - RNA, 19 nt, Artificial Sequence
  Description of Artificial Sequence: Synthetic oligonucleotide
aacguugaggccuggcuuc

SEQ ID NO: 1899969 - RNA, 19 nt, Artificial Sequence
  Description of Artificial Sequence: Synthetic oligonucleotide
acaucgagccuuucaaccc

SEQ ID NO: 1899970 - RNA, 19 nt, Artificial Sequence
  Description of Artificial Sequence: Synthetic oligonucleotide
aauacugcaagcacugcag

SEQ ID NO: 1899971 - RNA, 19 nt, Artificial Sequence
  Description of Artificial Sequence: Synthetic oligonucleotide
uaaucugugggucgcuugg

SEQ ID NO: 1899972 - RNA, 19 nt, Artificial Sequence
  Description of Artificial Sequence: Synthetic oligonucleotide
gaccaugcuguuuagcggg

SEQ ID NO: 1899973 - RNA, 19 nt, Artificial Sequence
  Description of Artificial Sequence: Synthetic oligonucleotide
ucacgaguguuccauuugg

SEQ ID NO: 1899974 - RNA, 19 nt, Artificial Sequence
  Description of Artificial Sequence: Synthetic oligonucleotide
ucuggauuaacaccuuucu

SEQ ID NO: 1899975 - RNA, 19 nt, Artificial Sequence
  Description of Artificial Sequence: Synthetic oligonucleotide
ucuuuauagaaagaccaug

SEQ ID NO: 1899976 - RNA, 19 nt, Artificial Sequence
  Description of Artificial Sequence: Synthetic oligonucleotide
uggacccagggucacaucg

SEQ ID NO: 1899977 - RNA, 19 nt, Artificial Sequence
  Description of Artificial Sequence: Synthetic oligonucleotide
ugccuuugcaccucguucg

SEQ ID NO: 1899978 - RNA, 19 nt, Artificial Sequence
  Description of Artificial Sequence: Synthetic oligonucleotide
cuuuccauacuuccuaagc

SEQ ID NO: 1899979 - RNA, 19 nt, Artificial Sequence
  Description of Artificial Sequence: Synthetic oligonucleotide
guucuuuauagaaagacca

SEQ ID NO: 1899980 - RNA, 19 nt, Artificial Sequence
  Description of Artificial Sequence: Synthetic oligonucleotide
aguugcuuggccuuuucag

SEQ ID NO: 1899981 - RNA, 19 nt, Artificial Sequence
  Description of Artificial Sequence: Synthetic oligonucleotide
cuugguggggacuuggagc

SEQ ID NO: 1899982 - RNA, 19 nt, Artificial Sequence
  Description of Artificial Sequence: Synthetic oligonucleotide
uuuugauccaagagugucu

SEQ ID NO: 1899983 - RNA, 19 nt, Artificial Sequence
  Description of Artificial Sequence: Synthetic oligonucleotide
gucaucauagcucucacga

SEQ ID NO: 1899984 - RNA, 19 nt, Artificial Sequence
  Description of Artificial Sequence: Synthetic oligonucleotide
agaaagaccaugcuguuua

SEQ ID NO: 1899985 - RNA, 19 nt, Artificial Sequence
  Description of Artificial Sequence: Synthetic oligonucleotide
uguuucaggccauucacgu

SEQ ID NO: 1899986 - RNA, 19 nt, Artificial Sequence
  Description of Artificial Sequence: Synthetic oligonucleotide
uuccuggucgcuuauuugc

SEQ ID NO: 1899987 - RNA, 19 nt, Artificial Sequence
  Description of Artificial Sequence: Synthetic oligonucleotide
uuuacucaucugcuggccc

SEQ ID NO: 1899988 - RNA, 19 nt, Artificial Sequence
  Description of Artificial Sequence: Synthetic oligonucleotide
ugguucuuuauagaaagac

SEQ ID NO: 1899989 - RNA, 19 nt, Artificial Sequence
  Description of Artificial Sequence: Synthetic oligonucleotide
aagcgcucgaaguugcuug

SEQ ID NO: 1899990 - RNA, 19 nt, Artificial Sequence
  Description of Artificial Sequence: Synthetic oligonucleotide
auacugcaagcacugcagc

SEQ ID NO: 1899991 - RNA, 19 nt, Artificial Sequence
  Description of Artificial Sequence: Synthetic oligonucleotide
ggaaaaugcauccugcaac

SEQ ID NO: 1899992 - RNA, 19 nt, Artificial Sequence
  Description of Artificial Sequence: Synthetic oligonucleotide
aagacgaacccgcgccggc

SEQ ID NO: 1899993 - RNA, 19 nt, Artificial Sequence
  Description of Artificial Sequence: Synthetic oligonucleotide
aaauccaguuuaucagaga

SEQ ID NO: 1899994 - RNA, 19 nt, Artificial Sequence
  Description of Artificial Sequence: Synthetic oligonucleotide
uuucgauccggacuuccgc

SEQ ID NO: 1899995 - RNA, 19 nt, Artificial Sequence
  Description of Artificial Sequence: Synthetic oligonucleotide
ugaagacgaacccgcgccg

SEQ ID NO: 1899996 - RNA, 19 nt, Artificial Sequence
  Description of Artificial Sequence: Synthetic oligonucleotide
gagaccagggacucuuccg

SEQ ID NO: 1899997 - RNA, 19 nt, Artificial Sequence
  Description of Artificial Sequence: Synthetic oligonucleotide
uccauacuuccuaagcgcu

SEQ ID NO: 1899998 - RNA, 19 nt, Artificial Sequence
  Description of Artificial Sequence: Synthetic oligonucleotide
cuucugaaggaccucaguc

SEQ ID NO: 1899999 - RNA, 19 nt, Artificial Sequence
  Description of Artificial Sequence: Synthetic oligonucleotide
acgaguguuccauuuggag

SEQ ID NO: 1900000 - RNA, 19 nt, Artificial Sequence
  Description of Artificial Sequence: Synthetic oligonucleotide
cauacuuccuaagcgcucg

SEQ ID NO: 1900001 - RNA, 19 nt, Artificial Sequence
  Description of Artificial Sequence: Synthetic oligonucleotide
uucuuuauagaaagaccau

SEQ ID NO: 1900002 - RNA, 19 nt, Artificial Sequence
  Description of Artificial Sequence: Synthetic oligonucleotide
acuuccuaagcgcucgaag

SEQ ID NO: 1900003 - RNA, 19 nt, Artificial Sequence
  Description of Artificial Sequence: Synthetic oligonucleotide
uccucgggaaaaugcaucc

SEQ ID NO: 1900004 - RNA, 19 nt, Artificial Sequence
  Description of Artificial Sequence: Synthetic oligonucleotide
cagacuuggccauuucugc

SEQ ID NO: 1900005 - RNA, 19 nt, Artificial Sequence
  Description of Artificial Sequence: Synthetic oligonucleotide
uuuagucugcagcuucugu

SEQ ID NO: 1900006 - RNA, 19 nt, Artificial Sequence
  Description of Artificial Sequence: Synthetic oligonucleotide
uccagaucccgucugaauu

SEQ ID NO: 1900007 - RNA, 19 nt, Artificial Sequence
  Description of Artificial Sequence: Synthetic oligonucleotide
uggcuuuucgauccggacu

SEQ ID NO: 1900008 - RNA, 19 nt, Artificial Sequence
  Description of Artificial Sequence: Synthetic oligonucleotide
ucuuuccauacuuccuaag

SEQ ID NO: 1900009 - RNA, 19 nt, Artificial Sequence
  Description of Artificial Sequence: Synthetic oligonucleotide
agugcucuguagucuguac

SEQ ID NO: 1900010 - RNA, 19 nt, Artificial Sequence
  Description of Artificial Sequence: Synthetic oligonucleotide
uucugucgaaucuuuugca

SEQ ID NO: 1900011 - RNA, 19 nt, Artificial Sequence
  Description of Artificial Sequence: Synthetic oligonucleotide
agccaaacacuguuucagg

SEQ ID NO: 1900012 - RNA, 19 nt, Artificial Sequence
  Description of Artificial Sequence: Synthetic oligonucleotide
aaaaugcauccugcaacuc

SEQ ID NO: 1900013 - RNA, 19 nt, Artificial Sequence
  Description of Artificial Sequence: Synthetic oligonucleotide
gaaaaugcauccugcaacu

SEQ ID NO: 1900014 - RNA, 19 nt, Artificial Sequence
  Description of Artificial Sequence: Synthetic oligonucleotide
uacugcaagcacugcagcc

SEQ ID NO: 1900015 - RNA, 19 nt, Artificial Sequence
  Description of Artificial Sequence: Synthetic oligonucleotide
uccauuuggagccuuucuu

SEQ ID NO: 1900016 - RNA, 19 nt, Artificial Sequence
  Description of Artificial Sequence: Synthetic oligonucleotide
auaaucugugggucgcuug

SEQ ID NO: 1900017 - RNA, 19 nt, Artificial Sequence
  Description of Artificial Sequence: Synthetic oligonucleotide
ucugucgaaucuuuugcau

SEQ ID NO: 1900018 - RNA, 19 nt, Artificial Sequence
  Description of Artificial Sequence: Synthetic oligonucleotide
uagcacaacguugaggccu

SEQ ID NO: 1900019 - RNA, 19 nt, Artificial Sequence
  Description of Artificial Sequence: Synthetic oligonucleotide
ucaucauaugugcuuucuc

SEQ ID NO: 1900020 - RNA, 19 nt, Artificial Sequence
  Description of Artificial Sequence: Synthetic oligonucleotide
uuugcaccucguucguuag

SEQ ID NO: 1900021 - RNA, 19 nt, Artificial Sequence
  Description of Artificial Sequence: Synthetic oligonucleotide
acucuuccgacuccgcguc

SEQ ID NO: 1900022 - RNA, 19 nt, Artificial Sequence
  Description of Artificial Sequence: Synthetic oligonucleotide
ucguucguuaggccucugg

SEQ ID NO: 1900023 - RNA, 19 nt, Artificial Sequence
  Description of Artificial Sequence: Synthetic oligonucleotide
uugguucuuuauagaaaga

SEQ ID NO: 1900024 - RNA, 19 nt, Artificial Sequence
  Description of Artificial Sequence: Synthetic oligonucleotide
gauuaacaccuuucuucug

SEQ ID NO: 1900025 - RNA, 19 nt, Artificial Sequence
  Description of Artificial Sequence: Synthetic oligonucleotide
ugcucuguagucuguacau

SEQ ID NO: 1900026 - RNA, 19 nt, Artificial Sequence
  Description of Artificial Sequence: Synthetic oligonucleotide
acaacguugaggccuggcu

SEQ ID NO: 1900027 - RNA, 19 nt, Artificial Sequence
  Description of Artificial Sequence: Synthetic oligonucleotide
gguucuuuauagaaagacc

SEQ ID NO: 1900028 - RNA, 19 nt, Artificial Sequence
  Description of Artificial Sequence: Synthetic oligonucleotide
uuccauuuggagccuuucu

SEQ ID NO: 1900029 - RNA, 19 nt, Artificial Sequence
  Description of Artificial Sequence: Synthetic oligonucleotide
caaacacuguuucaggcca

SEQ ID NO: 1900030 - RNA, 19 nt, Artificial Sequence
  Description of Artificial Sequence: Synthetic oligonucleotide
uggagccgggguaauacug

SEQ ID NO: 1900031 - RNA, 19 nt, Artificial Sequence
  Description of Artificial Sequence: Synthetic oligonucleotide
uggcccuuagcuuuugccu

SEQ ID NO: 1900032 - RNA, 19 nt, Artificial Sequence
  Description of Artificial Sequence: Synthetic oligonucleotide
gcgguagaaacucauuucc

SEQ ID NO: 1900033 - RNA, 19 nt, Artificial Sequence
  Description of Artificial Sequence: Synthetic oligonucleotide
uccuggucgcuuauuugcc

SEQ ID NO: 1900034 - RNA, 19 nt, Artificial Sequence
  Description of Artificial Sequence: Synthetic oligonucleotide
gagacgucaucauagcucu

SEQ ID NO: 1900035 - RNA, 19 nt, Artificial Sequence
  Description of Artificial Sequence: Synthetic oligonucleotide
gauggagccgggguaauac

SEQ ID NO: 1900036 - RNA, 19 nt, Artificial Sequence
  Description of Artificial Sequence: Synthetic oligonucleotide
cauggcagccuguuuaguc

SEQ ID NO: 1900037 - RNA, 19 nt, Artificial Sequence
  Description of Artificial Sequence: Synthetic oligonucleotide
cucgggaaaaugcauccug

SEQ ID NO: 1900038 - RNA, 19 nt, Artificial Sequence
  Description of Artificial Sequence: Synthetic oligonucleotide
uggcgguagaaacucauuu

SEQ ID NO: 1900039 - RNA, 19 nt, Artificial Sequence
  Description of Artificial Sequence: Synthetic oligonucleotide
uggagacgucaucauagcu

SEQ ID NO: 1900040 - RNA, 19 nt, Artificial Sequence
  Description of Artificial Sequence: Synthetic oligonucleotide
ugcccugaagacgaacccg

SEQ ID NO: 1900041 - RNA, 19 nt, Artificial Sequence
  Description of Artificial Sequence: Synthetic oligonucleotide
uguaccgucguuuggcauu

SEQ ID NO: 1900042 - RNA, 19 nt, Artificial Sequence
  Description of Artificial Sequence: Synthetic oligonucleotide
uucaucauaugugcuuucu

SEQ ID NO: 1900043 - RNA, 19 nt, Artificial Sequence
  Description of Artificial Sequence: Synthetic oligonucleotide
agcucugagugcucuguag

SEQ ID NO: 1900044 - RNA, 19 nt, Artificial Sequence
  Description of Artificial Sequence: Synthetic oligonucleotide
uccaucucgcgaucucccg

SEQ ID NO: 1900045 - RNA, 19 nt, Artificial Sequence
  Description of Artificial Sequence: Synthetic oligonucleotide
uggcauugggcccuuuacu

SEQ ID NO: 1900046 - RNA, 19 nt, Artificial Sequence
  Description of Artificial Sequence: Synthetic oligonucleotide
auagcucucacgaguguuc

SEQ ID NO: 1900047 - RNA, 19 nt, Artificial Sequence
  Description of Artificial Sequence: Synthetic oligonucleotide
uucgauccggacuuccgcu

SEQ ID NO: 1900048 - RNA, 19 nt, Artificial Sequence
  Description of Artificial Sequence: Synthetic oligonucleotide
cuggucgcuuauuugcccc

SEQ ID NO: 1900049 - RNA, 19 nt, Artificial Sequence
  Description of Artificial Sequence: Synthetic oligonucleotide
cagccaaacacuguuucag

SEQ ID NO: 1900050 - RNA, 19 nt, Artificial Sequence
  Description of Artificial Sequence: Synthetic oligonucleotide
uucacgucauucaccgccu

SEQ ID NO: 1900051 - RNA, 19 nt, Artificial Sequence
  Description of Artificial Sequence: Synthetic oligonucleotide
uuugauccaagagugucuu

SEQ ID NO: 1900052 - RNA, 19 nt, Artificial Sequence
  Description of Artificial Sequence: Synthetic oligonucleotide
uccuaagcgcucgaaguug

SEQ ID NO: 1900053 - RNA, 19 nt, Artificial Sequence
  Description of Artificial Sequence: Synthetic oligonucleotide
uugaggccuggcuucagga

SEQ ID NO: 1900054 - RNA, 19 nt, Artificial Sequence
  Description of Artificial Sequence: Synthetic oligonucleotide
ucacaucgagccuuucaac

SEQ ID NO: 1900055 - RNA, 19 nt, Artificial Sequence
  Description of Artificial Sequence: Synthetic oligonucleotide
cuuuacucaucugcuggcc

SEQ ID NO: 1900056 - RNA, 19 nt, Artificial Sequence
  Description of Artificial Sequence: Synthetic oligonucleotide
agcgcucgaaguugcuugg

SEQ ID NO: 1900057 - RNA, 19 nt, Artificial Sequence
  Description of Artificial Sequence: Synthetic oligonucleotide
guugaggccuggcuucagg

SEQ ID NO: 1900058 - RNA, 19 nt, Artificial Sequence
  Description of Artificial Sequence: Synthetic oligonucleotide
caucucgcgaucucccgcc

SEQ ID NO: 1900059 - RNA, 19 nt, Artificial Sequence
  Description of Artificial Sequence: Synthetic oligonucleotide
ucucuagcacaacguugag

SEQ ID NO: 1900060 - RNA, 19 nt, Artificial Sequence
  Description of Artificial Sequence: Synthetic oligonucleotide
cuggagacgucaucauagc

SEQ ID NO: 1900061 - RNA, 19 nt, Artificial Sequence
  Description of Artificial Sequence: Synthetic oligonucleotide
ucgcccuuuuccuugguuc

SEQ ID NO: 1900062 - RNA, 19 nt, Artificial Sequence
  Description of Artificial Sequence: Synthetic oligonucleotide
gucguuuggcauugggccc

SEQ ID NO: 1900063 - RNA, 19 nt, Artificial Sequence
  Description of Artificial Sequence: Synthetic oligonucleotide
acuccacgugcccugaaga

SEQ ID NO: 1900064 - RNA, 19 nt, Artificial Sequence
  Description of Artificial Sequence: Synthetic oligonucleotide
gucacaucgagccuuucaa

SEQ ID NO: 1900065 - RNA, 19 nt, Artificial Sequence
  Description of Artificial Sequence: Synthetic oligonucleotide
uggccauuucugcaaaaua

SEQ ID NO: 1900066 - RNA, 19 nt, Artificial Sequence
  Description of Artificial Sequence: Synthetic oligonucleotide
gaagacgaacccgcgccgg

SEQ ID NO: 1900067 - RNA, 19 nt, Artificial Sequence
  Description of Artificial Sequence: Synthetic oligonucleotide
gcaacucccggucugagac

SEQ ID NO: 1900068 - RNA, 19 nt, Artificial Sequence
  Description of Artificial Sequence: Synthetic oligonucleotide
aaauaaucugugggucgcu

SEQ ID NO: 1900069 - RNA, 19 nt, Artificial Sequence
  Description of Artificial Sequence: Synthetic oligonucleotide
accgucguuuggcauuggg

SEQ ID NO: 1900070 - RNA, 19 nt, Artificial Sequence
  Description of Artificial Sequence: Synthetic oligonucleotide
gaucccgucugaauucagc

SEQ ID NO: 1900071 - RNA, 19 nt, Artificial Sequence
  Description of Artificial Sequence: Synthetic oligonucleotide
aauaaucugugggucgcuu

SEQ ID NO: 1900072 - RNA, 19 nt, Artificial Sequence
  Description of Artificial Sequence: Synthetic oligonucleotide
cugaguuucacugacuucu

SEQ ID NO: 1900073 - RNA, 19 nt, Artificial Sequence
  Description of Artificial Sequence: Synthetic oligonucleotide
uccugcaacucccggucug

SEQ ID NO: 1900074 - RNA, 19 nt, Artificial Sequence
  Description of Artificial Sequence: Synthetic oligonucleotide
guucguuaggccucugguc

SEQ ID NO: 1900075 - RNA, 19 nt, Artificial Sequence
  Description of Artificial Sequence: Synthetic oligonucleotide
ucauagcucucacgagugu

SEQ ID NO: 1900076 - RNA, 19 nt, Artificial Sequence
  Description of Artificial Sequence: Synthetic oligonucleotide
ucccgucugaauucagcca

SEQ ID NO: 1900077 - RNA, 19 nt, Artificial Sequence
  Description of Artificial Sequence: Synthetic oligonucleotide
ucccggucugagaccaggg

SEQ ID NO: 1900078 - RNA, 19 nt, Artificial Sequence
  Description of Artificial Sequence: Synthetic oligonucleotide
cgucguuuggcauugggcc

SEQ ID NO: 1900079 - RNA, 19 nt, Artificial Sequence
  Description of Artificial Sequence: Synthetic oligonucleotide
ucucccguugccucuucug

SEQ ID NO: 1900080 - RNA, 19 nt, Artificial Sequence
  Description of Artificial Sequence: Synthetic oligonucleotide
cucugagugcucuguaguc

SEQ ID NO: 1900081 - RNA, 19 nt, Artificial Sequence
  Description of Artificial Sequence: Synthetic oligonucleotide
agggguguccaucucgcga

SEQ ID NO: 1900082 - RNA, 19 nt, Artificial Sequence
  Description of Artificial Sequence: Synthetic oligonucleotide
ucaacccacuccagauccc

SEQ ID NO: 1900083 - RNA, 19 nt, Artificial Sequence
  Description of Artificial Sequence: Synthetic oligonucleotide
uuugcaucugcuggucaga

SEQ ID NO: 1900084 - RNA, 19 nt, Artificial Sequence
  Description of Artificial Sequence: Synthetic oligonucleotide
uggaagucgucuucuggau

SEQ ID NO: 1900085 - RNA, 19 nt, Artificial Sequence
  Description of Artificial Sequence: Synthetic oligonucleotide
cuagcacaacguugaggcc

SEQ ID NO: 1900086 - RNA, 19 nt, Artificial Sequence
  Description of Artificial Sequence: Synthetic oligonucleotide
gccaaacacuguuucaggc

SEQ ID NO: 1900087 - RNA, 19 nt, Artificial Sequence
  Description of Artificial Sequence: Synthetic oligonucleotide
cuuuucgauccggacuucc

SEQ ID NO: 1900088 - RNA, 19 nt, Artificial Sequence
  Description of Artificial Sequence: Synthetic oligonucleotide
ucucacgaguguuccauuu

SEQ ID NO: 1900089 - RNA, 19 nt, Artificial Sequence
  Description of Artificial Sequence: Synthetic oligonucleotide
gcaaaauaaucuguggguc

SEQ ID NO: 1900090 - RNA, 19 nt, Artificial Sequence
  Description of Artificial Sequence: Synthetic oligonucleotide
cucacgaguguuccauuug

SEQ ID NO: 1900091 - RNA, 19 nt, Artificial Sequence
  Description of Artificial Sequence: Synthetic oligonucleotide
cgaguguuccauuuggagc

SEQ ID NO: 1900092 - RNA, 19 nt, Artificial Sequence
  Description of Artificial Sequence: Synthetic oligonucleotide
agucugagagcggaggggu

SEQ ID NO: 1900093 - RNA, 19 nt, Artificial Sequence
  Description of Artificial Sequence: Synthetic oligonucleotide
ucguuaggccucugguccc

SEQ ID NO: 1900094 - RNA, 19 nt, Artificial Sequence
  Description of Artificial Sequence: Synthetic oligonucleotide
caguuuaucagagaagccu

SEQ ID NO: 1900095 - RNA, 19 nt, Artificial Sequence
  Description of Artificial Sequence: Synthetic oligonucleotide
cuuccuaagcgcucgaagu

SEQ ID NO: 1900096 - RNA, 19 nt, Artificial Sequence
  Description of Artificial Sequence: Synthetic oligonucleotide
uccgagucugagagcggag

SEQ ID NO: 1900097 - RNA, 19 nt, Artificial Sequence
  Description of Artificial Sequence: Synthetic oligonucleotide
gucugaauucagccaaaca

SEQ ID NO: 1900098 - RNA, 19 nt, Artificial Sequence
  Description of Artificial Sequence: Synthetic oligonucleotide
ucgcuuauuugccccuuuc

SEQ ID NO: 1900099 - RNA, 19 nt, Artificial Sequence
  Description of Artificial Sequence: Synthetic oligonucleotide
ugcuuucucccguugccuc

SEQ ID NO: 1900100 - RNA, 19 nt, Artificial Sequence
  Description of Artificial Sequence: Synthetic oligonucleotide
agggacucuuccgacuccg

SEQ ID NO: 1900101 - RNA, 19 nt, Artificial Sequence
  Description of Artificial Sequence: Synthetic oligonucleotide
caacccacuccagaucccg

SEQ ID NO: 1900102 - RNA, 19 nt, Artificial Sequence
  Description of Artificial Sequence: Synthetic oligonucleotide
ggagacgucaucauagcuc

SEQ ID NO: 1900103 - RNA, 19 nt, Artificial Sequence
  Description of Artificial Sequence: Synthetic oligonucleotide
ggcauugggcccuuuacuc

SEQ ID NO: 1900104 - RNA, 19 nt, Artificial Sequence
  Description of Artificial Sequence: Synthetic oligonucleotide
caggccauucacgucauuc

SEQ ID NO: 1900105 - RNA, 19 nt, Artificial Sequence
  Description of Artificial Sequence: Synthetic oligonucleotide
guuggcugaguuucacuga

SEQ ID NO: 1900106 - RNA, 19 nt, Artificial Sequence
  Description of Artificial Sequence: Synthetic oligonucleotide
gccgggguaauacugcaag

SEQ ID NO: 1900107 - RNA, 19 nt, Artificial Sequence
  Description of Artificial Sequence: Synthetic oligonucleotide
aucucgcgaucucccgccc

SEQ ID NO: 1900108 - RNA, 19 nt, Artificial Sequence
  Description of Artificial Sequence: Synthetic oligonucleotide
cuucuucggccucucuagc

SEQ ID NO: 1900109 - RNA, 19 nt, Artificial Sequence
  Description of Artificial Sequence: Synthetic oligonucleotide
cuccacgugcccugaagac

SEQ ID NO: 1900110 - RNA, 19 nt, Artificial Sequence
  Description of Artificial Sequence: Synthetic oligonucleotide
ugcaacucccggucugaga

SEQ ID NO: 1900111 - RNA, 19 nt, Artificial Sequence
  Description of Artificial Sequence: Synthetic oligonucleotide
ugcuguuuagcggguuuug

SEQ ID NO: 1900112 - RNA, 19 nt, Artificial Sequence
  Description of Artificial Sequence: Synthetic oligonucleotide
gagggguguccaucucgcg

SEQ ID NO: 1900113 - RNA, 19 nt, Artificial Sequence
  Description of Artificial Sequence: Synthetic oligonucleotide
caucauagcucucacgagu

SEQ ID NO: 1900114 - RNA, 19 nt, Artificial Sequence
  Description of Artificial Sequence: Synthetic oligonucleotide
ugagugcucuguagucugu

SEQ ID NO: 1900115 - RNA, 19 nt, Artificial Sequence
  Description of Artificial Sequence: Synthetic oligonucleotide
gacgaacccgcgccggcag

SEQ ID NO: 1900116 - RNA, 19 nt, Artificial Sequence
  Description of Artificial Sequence: Synthetic oligonucleotide
accucguucguuaggccuc

SEQ ID NO: 1900117 - RNA, 19 nt, Artificial Sequence
  Description of Artificial Sequence: Synthetic oligonucleotide
ucucccgccccgcggggcg

SEQ ID NO: 1900118 - RNA, 19 nt, Artificial Sequence
  Description of Artificial Sequence: Synthetic oligonucleotide
gcguccgagucugagagcg

SEQ ID NO: 1900119 - RNA, 19 nt, Artificial Sequence
  Description of Artificial Sequence: Synthetic oligonucleotide
gugcccugaagacgaaccc

SEQ ID NO: 1900120 - RNA, 19 nt, Artificial Sequence
  Description of Artificial Sequence: Synthetic oligonucleotide
agcggagggguguccaucu

SEQ ID NO: 1900121 - RNA, 19 nt, Artificial Sequence
  Description of Artificial Sequence: Synthetic oligonucleotide
gacuccgcguccgagucug

SEQ ID NO: 1900122 - RNA, 19 nt, Artificial Sequence
  Description of Artificial Sequence: Synthetic oligonucleotide
cuuugcaccucguucguua

SEQ ID NO: 1900123 - RNA, 19 nt, Artificial Sequence
  Description of Artificial Sequence: Synthetic oligonucleotide
cuuucaacccacuccagau

SEQ ID NO: 1900124 - RNA, 19 nt, Artificial Sequence
  Description of Artificial Sequence: Synthetic oligonucleotide
ggcgguagaaacucauuuc

SEQ ID NO: 1900125 - RNA, 19 nt, Artificial Sequence
  Description of Artificial Sequence: Synthetic oligonucleotide
gauccaagagugucuuucu

SEQ ID NO: 1900126 - RNA, 19 nt, Artificial Sequence
  Description of Artificial Sequence: Synthetic oligonucleotide
ucguuuggcauugggcccu

SEQ ID NO: 1900127 - RNA, 19 nt, Artificial Sequence
  Description of Artificial Sequence: Synthetic oligonucleotide
acacuguuucaggccauuc

SEQ ID NO: 1900128 - RNA, 19 nt, Artificial Sequence
  Description of Artificial Sequence: Synthetic oligonucleotide
guacauucgcccuuuuccu

SEQ ID NO: 1900129 - RNA, 19 nt, Artificial Sequence
  Description of Artificial Sequence: Synthetic oligonucleotide
cacuguuucaggccauuca

SEQ ID NO: 1900130 - RNA, 19 nt, Artificial Sequence
  Description of Artificial Sequence: Synthetic oligonucleotide
uaacaccuuucuucugguc

SEQ ID NO: 1900131 - RNA, 19 nt, Artificial Sequence
  Description of Artificial Sequence: Synthetic oligonucleotide
ccauuuggagccuuucuuc

SEQ ID NO: 1900132 - RNA, 19 nt, Artificial Sequence
  Description of Artificial Sequence: Synthetic oligonucleotide
gaagccuuucugguauuuc

SEQ ID NO: 1900133 - RNA, 19 nt, Artificial Sequence
  Description of Artificial Sequence: Synthetic oligonucleotide
cauuucccucuggaagucg

SEQ ID NO: 1900134 - RNA, 19 nt, Artificial Sequence
  Description of Artificial Sequence: Synthetic oligonucleotide
ccuuuacucaucugcuggc

SEQ ID NO: 1900135 - RNA, 19 nt, Artificial Sequence
  Description of Artificial Sequence: Synthetic oligonucleotide
uucggccucucuagcacaa

SEQ ID NO: 1900136 - RNA, 19 nt, Artificial Sequence
  Description of Artificial Sequence: Synthetic oligonucleotide
ucgcuugguggggacuugg

SEQ ID NO: 1900137 - RNA, 19 nt, Artificial Sequence
  Description of Artificial Sequence: Synthetic oligonucleotide
uuuugccuuugcaccucgu

SEQ ID NO: 1900138 - RNA, 19 nt, Artificial Sequence
  Description of Artificial Sequence: Synthetic oligonucleotide
ucauuucccucuggaaguc

SEQ ID NO: 1900139 - RNA, 19 nt, Artificial Sequence
  Description of Artificial Sequence: Synthetic oligonucleotide
ucucgcgaucucccgcccc

SEQ ID NO: 1900140 - RNA, 19 nt, Artificial Sequence
  Description of Artificial Sequence: Synthetic oligonucleotide
cauucacgucauucaccgc

SEQ ID NO: 1900141 - RNA, 19 nt, Artificial Sequence
  Description of Artificial Sequence: Synthetic oligonucleotide
uccgacuccgcguccgagu

SEQ ID NO: 1900142 - RNA, 19 nt, Artificial Sequence
  Description of Artificial Sequence: Synthetic oligonucleotide
gacucuuccgacuccgcgu

SEQ ID NO: 1900143 - RNA, 19 nt, Artificial Sequence
  Description of Artificial Sequence: Synthetic oligonucleotide
cugcaccuucuuuccauac

SEQ ID NO: 1900144 - RNA, 19 nt, Artificial Sequence
  Description of Artificial Sequence: Synthetic oligonucleotide
uccgcguccgagucugaga

SEQ ID NO: 1900145 - RNA, 19 nt, Artificial Sequence
  Description of Artificial Sequence: Synthetic oligonucleotide
ccuaagcgcucgaaguugc

SEQ ID NO: 1900146 - RNA, 19 nt, Artificial Sequence
  Description of Artificial Sequence: Synthetic oligonucleotide
acgaacccgcgccggcagc

SEQ ID NO: 1900147 - RNA, 19 nt, Artificial Sequence
  Description of Artificial Sequence: Synthetic oligonucleotide
aagcucugagugcucugua

SEQ ID NO: 1900148 - RNA, 19 nt, Artificial Sequence
  Description of Artificial Sequence: Synthetic oligonucleotide
auggagccgggguaauacu

SEQ ID NO: 1900149 - RNA, 19 nt, Artificial Sequence
  Description of Artificial Sequence: Synthetic oligonucleotide
ucccguugccucuucugaa

SEQ ID NO: 1900150 - RNA, 19 nt, Artificial Sequence
  Description of Artificial Sequence: Synthetic oligonucleotide
cacuccacgugcccugaag

SEQ ID NO: 1900151 - RNA, 19 nt, Artificial Sequence
  Description of Artificial Sequence: Synthetic oligonucleotide
cgucuucuggauuaacacc

SEQ ID NO: 1900152 - RNA, 19 nt, Artificial Sequence
  Description of Artificial Sequence: Synthetic oligonucleotide
accuuggcucggaagcugg

SEQ ID NO: 1900153 - RNA, 19 nt, Artificial Sequence
  Description of Artificial Sequence: Synthetic oligonucleotide
caucgagccuuucaaccca

SEQ ID NO: 1900154 - RNA, 19 nt, Artificial Sequence
  Description of Artificial Sequence: Synthetic oligonucleotide
uuuagcggguuuugcucuu

SEQ ID NO: 1900155 - RNA, 19 nt, Artificial Sequence
  Description of Artificial Sequence: Synthetic oligonucleotide
uggucgcuuauuugccccu

SEQ ID NO: 1900156 - RNA, 19 nt, Artificial Sequence
  Description of Artificial Sequence: Synthetic oligonucleotide
aucgagccuuucaacccac

SEQ ID NO: 1900157 - RNA, 19 nt, Artificial Sequence
  Description of Artificial Sequence: Synthetic oligonucleotide
uuguaccgucguuuggcau

SEQ ID NO: 1900158 - RNA, 19 nt, Artificial Sequence
  Description of Artificial Sequence: Synthetic oligonucleotide
guaccgucguuuggcauug

SEQ ID NO: 1900159 - RNA, 19 nt, Artificial Sequence
  Description of Artificial Sequence: Synthetic oligonucleotide
caacucccggucugagacc

SEQ ID NO: 1900160 - RNA, 19 nt, Artificial Sequence
  Description of Artificial Sequence: Synthetic oligonucleotide
aacacuguuucaggccauu

SEQ ID NO: 1900161 - RNA, 19 nt, Artificial Sequence
  Description of Artificial Sequence: Synthetic oligonucleotide
agcuggagacgucaucaua

SEQ ID NO: 1900162 - RNA, 19 nt, Artificial Sequence
  Description of Artificial Sequence: Synthetic oligonucleotide
agcacaacguugaggccug

SEQ ID NO: 1900163 - RNA, 19 nt, Artificial Sequence
  Description of Artificial Sequence: Synthetic oligonucleotide
cuucaggaguccucgggaa

SEQ ID NO: 1900164 - RNA, 19 nt, Artificial Sequence
  Description of Artificial Sequence: Synthetic oligonucleotide
uucgcccuuuuccuugguu

SEQ ID NO: 1900165 - RNA, 19 nt, Artificial Sequence
  Description of Artificial Sequence: Synthetic oligonucleotide
gaucucccgccccgcgggg

SEQ ID NO: 1900166 - RNA, 19 nt, Artificial Sequence
  Description of Artificial Sequence: Synthetic oligonucleotide
ggucacaucgagccuuuca

SEQ ID NO: 1900167 - RNA, 19 nt, Artificial Sequence
  Description of Artificial Sequence: Synthetic oligonucleotide
auacuuccuaagcgcucga

SEQ ID NO: 1900168 - RNA, 19 nt, Artificial Sequence
  Description of Artificial Sequence: Synthetic oligonucleotide
ccgucguuuggcauugggc

SEQ ID NO: 1900169 - RNA, 19 nt, Artificial Sequence
  Description of Artificial Sequence: Synthetic oligonucleotide
cgugcccugaagacgaacc

SEQ ID NO: 1900170 - RNA, 19 nt, Artificial Sequence
  Description of Artificial Sequence: Synthetic oligonucleotide
cucccggucugagaccagg

SEQ ID NO: 1900171 - RNA, 19 nt, Artificial Sequence
  Description of Artificial Sequence: Synthetic oligonucleotide
ccugaagacgaacccgcgc

SEQ ID NO: 1900172 - RNA, 19 nt, Artificial Sequence
  Description of Artificial Sequence: Synthetic oligonucleotide
aaacacuguuucaggccau

SEQ ID NO: 1900173 - RNA, 19 nt, Artificial Sequence
  Description of Artificial Sequence: Synthetic oligonucleotide
cacgaguguuccauuugga

SEQ ID NO: 1900174 - RNA, 19 nt, Artificial Sequence
  Description of Artificial Sequence: Synthetic oligonucleotide
guccucgggaaaaugcauc

SEQ ID NO: 1900175 - RNA, 19 nt, Artificial Sequence
  Description of Artificial Sequence: Synthetic oligonucleotide
cacgucauucaccgccuuc

SEQ ID NO: 1900176 - RNA, 19 nt, Artificial Sequence
  Description of Artificial Sequence: Synthetic oligonucleotide
ccagaucccgucugaauuc

SEQ ID NO: 1900177 - RNA, 19 nt, Artificial Sequence
  Description of Artificial Sequence: Synthetic oligonucleotide
acgugcccugaagacgaac

SEQ ID NO: 1900178 - RNA, 19 nt, Artificial Sequence
  Description of Artificial Sequence: Synthetic oligonucleotide
ucgauccggacuuccgcuu

SEQ ID NO: 1900179 - RNA, 19 nt, Artificial Sequence
  Description of Artificial Sequence: Synthetic oligonucleotide
cgguagaaacucauuuccc

SEQ ID NO: 1900180 - RNA, 19 nt, Artificial Sequence
  Description of Artificial Sequence: Synthetic oligonucleotide
cacaacguugaggccuggc

SEQ ID NO: 1900181 - RNA, 19 nt, Artificial Sequence
  Description of Artificial Sequence: Synthetic oligonucleotide
ggagccgggguaauacugc

SEQ ID NO: 1900182 - RNA, 19 nt, Artificial Sequence
  Description of Artificial Sequence: Synthetic oligonucleotide
ugagagcggaggggugucc

SEQ ID NO: 1900183 - RNA, 19 nt, Artificial Sequence
  Description of Artificial Sequence: Synthetic oligonucleotide
gcuguuuagcggguuuugc

SEQ ID NO: 1900184 - RNA, 19 nt, Artificial Sequence
  Description of Artificial Sequence: Synthetic oligonucleotide
uacuuccuaagcgcucgaa

SEQ ID NO: 1900185 - RNA, 19 nt, Artificial Sequence
  Description of Artificial Sequence: Synthetic oligonucleotide
ugccgugggccaccuuggc

SEQ ID NO: 1900186 - RNA, 19 nt, Artificial Sequence
  Description of Artificial Sequence: Synthetic oligonucleotide
ccuggucgcuuauuugccc

SEQ ID NO: 1900187 - RNA, 19 nt, Artificial Sequence
  Description of Artificial Sequence: Synthetic oligonucleotide
cagggacucuuccgacucc

SEQ ID NO: 1900188 - RNA, 19 nt, Artificial Sequence
  Description of Artificial Sequence: Synthetic oligonucleotide
agcucucacgaguguucca

SEQ ID NO: 1900189 - RNA, 19 nt, Artificial Sequence
  Description of Artificial Sequence: Synthetic oligonucleotide
auccugcaacucccggucu

SEQ ID NO: 1900190 - RNA, 19 nt, Artificial Sequence
  Description of Artificial Sequence: Synthetic oligonucleotide
ccgcguccgagucugagag

SEQ ID NO: 1900191 - RNA, 19 nt, Artificial Sequence
  Description of Artificial Sequence: Synthetic oligonucleotide
ggagggguguccaucucgc

SEQ ID NO: 1900192 - RNA, 19 nt, Artificial Sequence
  Description of Artificial Sequence: Synthetic oligonucleotide
uugauccaagagugucuuu

SEQ ID NO: 1900193 - RNA, 19 nt, Artificial Sequence
  Description of Artificial Sequence: Synthetic oligonucleotide
aguccucgggaaaaugcau

SEQ ID NO: 1900194 - RNA, 19 nt, Artificial Sequence
  Description of Artificial Sequence: Synthetic oligonucleotide
augcauccugcaacucccg

SEQ ID NO: 1900195 - RNA, 19 nt, Artificial Sequence
  Description of Artificial Sequence: Synthetic oligonucleotide
cugcagcuucugucgaauc

SEQ ID NO: 1900196 - RNA, 19 nt, Artificial Sequence
  Description of Artificial Sequence: Synthetic oligonucleotide
auccggacuuccgcuuccg

SEQ ID NO: 1900197 - RNA, 19 nt, Artificial Sequence
  Description of Artificial Sequence: Synthetic oligonucleotide
ccguugccucuucugaagg

SEQ ID NO: 1900198 - RNA, 19 nt, Artificial Sequence
  Description of Artificial Sequence: Synthetic oligonucleotide
ccgugggccaccuuggcuc

SEQ ID NO: 1900199 - RNA, 19 nt, Artificial Sequence
  Description of Artificial Sequence: Synthetic oligonucleotide
ucgaaguugcuuggccuuu

SEQ ID NO: 1900200 - RNA, 19 nt, Artificial Sequence
  Description of Artificial Sequence: Synthetic oligonucleotide
aacccacuccagaucccgu

SEQ ID NO: 1900201 - RNA, 19 nt, Artificial Sequence
  Description of Artificial Sequence: Synthetic oligonucleotide
gcccuuuacucaucugcug

SEQ ID NO: 1900202 - RNA, 19 nt, Artificial Sequence
  Description of Artificial Sequence: Synthetic oligonucleotide
gcccugaagacgaacccgc

SEQ ID NO: 1900203 - RNA, 19 nt, Artificial Sequence
  Description of Artificial Sequence: Synthetic oligonucleotide
gccuguuuagucugcagcu

SEQ ID NO: 1900204 - RNA, 19 nt, Artificial Sequence
  Description of Artificial Sequence: Synthetic oligonucleotide
cgagucugagagcggaggg

SEQ ID NO: 1900205 - RNA, 19 nt, Artificial Sequence
  Description of Artificial Sequence: Synthetic oligonucleotide
ggcuuuucgauccggacuu

SEQ ID NO: 1900206 - RNA, 19 nt, Artificial Sequence
  Description of Artificial Sequence: Synthetic oligonucleotide
ccgggguaauacugcaagc

SEQ ID NO: 1900207 - RNA, 19 nt, Artificial Sequence
  Description of Artificial Sequence: Synthetic oligonucleotide
caccucguucguuaggccu

SEQ ID NO: 1900208 - RNA, 19 nt, Artificial Sequence
  Description of Artificial Sequence: Synthetic oligonucleotide
augcuguuuagcggguuuu

SEQ ID NO: 1900209 - RNA, 19 nt, Artificial Sequence
  Description of Artificial Sequence: Synthetic oligonucleotide
cucggaagcuggagacguc

SEQ ID NO: 1900210 - RNA, 19 nt, Artificial Sequence
  Description of Artificial Sequence: Synthetic oligonucleotide
ccaucucgcgaucucccgc

SEQ ID NO: 1900211 - RNA, 19 nt, Artificial Sequence
  Description of Artificial Sequence: Synthetic oligonucleotide
agagcggagggguguccau

SEQ ID NO: 1900212 - RNA, 19 nt, Artificial Sequence
  Description of Artificial Sequence: Synthetic oligonucleotide
ccacgugcccugaagacga

SEQ ID NO: 1900213 - RNA, 19 nt, Artificial Sequence
  Description of Artificial Sequence: Synthetic oligonucleotide
ucacgucauucaccgccuu

SEQ ID NO: 1900214 - RNA, 19 nt, Artificial Sequence
  Description of Artificial Sequence: Synthetic oligonucleotide
agaucccgucugaauucag

SEQ ID NO: 1900215 - RNA, 19 nt, Artificial Sequence
  Description of Artificial Sequence: Synthetic oligonucleotide
ccagggacucuuccgacuc

SEQ ID NO: 1900216 - RNA, 19 nt, Artificial Sequence
  Description of Artificial Sequence: Synthetic oligonucleotide
cucuuccgacuccgcgucc

SEQ ID NO: 1900217 - RNA, 19 nt, Artificial Sequence
  Description of Artificial Sequence: Synthetic oligonucleotide
ugauggagccgggguaaua

SEQ ID NO: 1900218 - RNA, 19 nt, Artificial Sequence
  Description of Artificial Sequence: Synthetic oligonucleotide
ccgagucugagagcggagg

SEQ ID NO: 1900219 - RNA, 19 nt, Artificial Sequence
  Description of Artificial Sequence: Synthetic oligonucleotide
ggcucggaagcuggagacg

SEQ ID NO: 1900220 - RNA, 19 nt, Artificial Sequence
  Description of Artificial Sequence: Synthetic oligonucleotide
acuccagaucccgucugaa

SEQ ID NO: 1900221 - RNA, 19 nt, Artificial Sequence
  Description of Artificial Sequence: Synthetic oligonucleotide
cagaucccgucugaauuca

SEQ ID NO: 1900222 - RNA, 19 nt, Artificial Sequence
  Description of Artificial Sequence: Synthetic oligonucleotide
cccugaagacgaacccgcg

SEQ ID NO: 1900223 - RNA, 19 nt, Artificial Sequence
  Description of Artificial Sequence: Synthetic oligonucleotide
uacucaucugcuggcccuu

SEQ ID NO: 1900224 - RNA, 19 nt, Artificial Sequence
  Description of Artificial Sequence: Synthetic oligonucleotide
ggccaccuuggcucggaag

SEQ ID NO: 1900225 - RNA, 19 nt, Artificial Sequence
  Description of Artificial Sequence: Synthetic oligonucleotide
cacuccagaucccgucuga

SEQ ID NO: 1900226 - RNA, 19 nt, Artificial Sequence
  Description of Artificial Sequence: Synthetic oligonucleotide
gcgaucucccgccccgcgg

SEQ ID NO: 1900227 - RNA, 19 nt, Artificial Sequence
  Description of Artificial Sequence: Synthetic oligonucleotide
cccgucugaauucagccaa

SEQ ID NO: 1900228 - RNA, 19 nt, Artificial Sequence
  Description of Artificial Sequence: Synthetic oligonucleotide
cucgaaguugcuuggccuu

SEQ ID NO: 1900229 - RNA, 19 nt, Artificial Sequence
  Description of Artificial Sequence: Synthetic oligonucleotide
cugagagcggagggguguc

SEQ ID NO: 1900230 - RNA, 19 nt, Artificial Sequence
  Description of Artificial Sequence: Synthetic oligonucleotide
gagugcucuguagucugua

SEQ ID NO: 1900231 - RNA, 19 nt, Artificial Sequence
  Description of Artificial Sequence: Synthetic oligonucleotide
caacguugaggccuggcuu

SEQ ID NO: 1900232 - RNA, 19 nt, Artificial Sequence
  Description of Artificial Sequence: Synthetic oligonucleotide
cggccucucuagcacaacg

SEQ ID NO: 1900233 - RNA, 19 nt, Artificial Sequence
  Description of Artificial Sequence: Synthetic oligonucleotide
gcaccucguucguuaggcc

SEQ ID NO: 1900234 - RNA, 19 nt, Artificial Sequence
  Description of Artificial Sequence: Synthetic oligonucleotide
gggcgcgacagccacucca

SEQ ID NO: 1900235 - RNA, 19 nt, Artificial Sequence
  Description of Artificial Sequence: Synthetic oligonucleotide
guuuaucagagaagccuuu

SEQ ID NO: 1900236 - RNA, 19 nt, Artificial Sequence
  Description of Artificial Sequence: Synthetic oligonucleotide
uaccgucguuuggcauugg

SEQ ID NO: 1900237 - RNA, 19 nt, Artificial Sequence
  Description of Artificial Sequence: Synthetic oligonucleotide
ggccuggcgguagaaacuc

SEQ ID NO: 1900238 - RNA, 19 nt, Artificial Sequence
  Description of Artificial Sequence: Synthetic oligonucleotide
cuggacccagggucacauc

SEQ ID NO: 1900239 - RNA, 19 nt, Artificial Sequence
  Description of Artificial Sequence: Synthetic oligonucleotide
ggucagacuuggccauuuc

SEQ ID NO: 1900240 - RNA, 19 nt, Artificial Sequence
  Description of Artificial Sequence: Synthetic oligonucleotide
ucaggccauucacgucauu

SEQ ID NO: 1900241 - RNA, 19 nt, Artificial Sequence
  Description of Artificial Sequence: Synthetic oligonucleotide
ucggccucucuagcacaac

SEQ ID NO: 1900242 - RNA, 19 nt, Artificial Sequence
  Description of Artificial Sequence: Synthetic oligonucleotide
caugcuguuuagcggguuu

SEQ ID NO: 1900243 - RNA, 19 nt, Artificial Sequence
  Description of Artificial Sequence: Synthetic oligonucleotide
ggcgcgacagccacuccac

SEQ ID NO: 1900244 - RNA, 19 nt, Artificial Sequence
  Description of Artificial Sequence: Synthetic oligonucleotide
gucgcuugguggggacuug

SEQ ID NO: 1900245 - RNA, 19 nt, Artificial Sequence
  Description of Artificial Sequence: Synthetic oligonucleotide
ggcauucaucauaugugcu

SEQ ID NO: 1900246 - RNA, 19 nt, Artificial Sequence
  Description of Artificial Sequence: Synthetic oligonucleotide
gggguguccaucucgcgau

SEQ ID NO: 1900247 - RNA, 19 nt, Artificial Sequence
  Description of Artificial Sequence: Synthetic oligonucleotide
cuaagcgcucgaaguugcu

SEQ ID NO: 1900248 - RNA, 19 nt, Artificial Sequence
  Description of Artificial Sequence: Synthetic oligonucleotide
cgagccuuucaacccacuc

SEQ ID NO: 1900249 - RNA, 19 nt, Artificial Sequence
  Description of Artificial Sequence: Synthetic oligonucleotide
ccgacuccgcguccgaguc

SEQ ID NO: 1900250 - RNA, 19 nt, Artificial Sequence
  Description of Artificial Sequence: Synthetic oligonucleotide
cuuccgacuccgcguccga

SEQ ID NO: 1900251 - RNA, 19 nt, Artificial Sequence
  Description of Artificial Sequence: Synthetic oligonucleotide
agccgggguaauacugcaa

SEQ ID NO: 1900252 - RNA, 19 nt, Artificial Sequence
  Description of Artificial Sequence: Synthetic oligonucleotide
gcucggaagcuggagacgu

SEQ ID NO: 1900253 - RNA, 19 nt, Artificial Sequence
  Description of Artificial Sequence: Synthetic oligonucleotide
ggaagucgucuucuggauu

SEQ ID NO: 1900254 - RNA, 19 nt, Artificial Sequence
  Description of Artificial Sequence: Synthetic oligonucleotide
cgucugaauucagccaaac

SEQ ID NO: 1900255 - RNA, 19 nt, Artificial Sequence
  Description of Artificial Sequence: Synthetic oligonucleotide
ccuggggcccuugccgugg

SEQ ID NO: 1900256 - RNA, 19 nt, Artificial Sequence
  Description of Artificial Sequence: Synthetic oligonucleotide
agggucacaucgagccuuu

SEQ ID NO: 1900257 - RNA, 19 nt, Artificial Sequence
  Description of Artificial Sequence: Synthetic oligonucleotide
gcggguuuugcucuucauu

SEQ ID NO: 1900258 - RNA, 19 nt, Artificial Sequence
  Description of Artificial Sequence: Synthetic oligonucleotide
cuggcgguagaaacucauu

SEQ ID NO: 1900259 - RNA, 19 nt, Artificial Sequence
  Description of Artificial Sequence: Synthetic oligonucleotide
gggacucuuccgacuccgc

SEQ ID NO: 1900260 - RNA, 19 nt, Artificial Sequence
  Description of Artificial Sequence: Synthetic oligonucleotide
cccgcggggcgcgacagcc

SEQ ID NO: 1900261 - RNA, 19 nt, Artificial Sequence
  Description of Artificial Sequence: Synthetic oligonucleotide
gcucucacgaguguuccau

SEQ ID NO: 1900262 - RNA, 19 nt, Artificial Sequence
  Description of Artificial Sequence: Synthetic oligonucleotide
ggguguccaucucgcgauc

SEQ ID NO: 1900263 - RNA, 19 nt, Artificial Sequence
  Description of Artificial Sequence: Synthetic oligonucleotide
gucgcuuauuugccccuuu

SEQ ID NO: 1900264 - RNA, 19 nt, Artificial Sequence
  Description of Artificial Sequence: Synthetic oligonucleotide
ggccucucuagcacaacgu

SEQ ID NO: 1900265 - RNA, 19 nt, Artificial Sequence
  Description of Artificial Sequence: Synthetic oligonucleotide
gguguccaucucgcgaucu

SEQ ID NO: 1900266 - RNA, 19 nt, Artificial Sequence
  Description of Artificial Sequence: Synthetic oligonucleotide
caccgccuucuucggccuc

SEQ ID NO: 1900267 - RNA, 19 nt, Artificial Sequence
  Description of Artificial Sequence: Synthetic oligonucleotide
cguccgagucugagagcgg

SEQ ID NO: 1900268 - RNA, 19 nt, Artificial Sequence
  Description of Artificial Sequence: Synthetic oligonucleotide
cucguucguuaggccucug

SEQ ID NO: 1900269 - RNA, 19 nt, Artificial Sequence
  Description of Artificial Sequence: Synthetic oligonucleotide
cguucguuaggccucuggu

SEQ ID NO: 1900270 - RNA, 19 nt, Artificial Sequence
  Description of Artificial Sequence: Synthetic oligonucleotide
gcgcucgaaguugcuuggc

SEQ ID NO: 1900271 - RNA, 19 nt, Artificial Sequence
  Description of Artificial Sequence: Synthetic oligonucleotide
cucucacgaguguuccauu

SEQ ID NO: 1900272 - RNA, 19 nt, Artificial Sequence
  Description of Artificial Sequence: Synthetic oligonucleotide
cccggucugagaccaggga

SEQ ID NO: 1900273 - RNA, 19 nt, Artificial Sequence
  Description of Artificial Sequence: Synthetic oligonucleotide
ccccucaaggaaauccagu

SEQ ID NO: 1900274 - RNA, 19 nt, Artificial Sequence
  Description of Artificial Sequence: Synthetic oligonucleotide
gcacaacguugaggccugg

SEQ ID NO: 1900275 - RNA, 19 nt, Artificial Sequence
  Description of Artificial Sequence: Synthetic oligonucleotide
cacgugcccugaagacgaa

SEQ ID NO: 1900276 - RNA, 19 nt, Artificial Sequence
  Description of Artificial Sequence: Synthetic oligonucleotide
cgcgaucucccgccccgcg

SEQ ID NO: 1900277 - RNA, 19 nt, Artificial Sequence
  Description of Artificial Sequence: Synthetic oligonucleotide
gccuuugcaccucguucgu

SEQ ID NO: 1900278 - RNA, 19 nt, Artificial Sequence
  Description of Artificial Sequence: Synthetic oligonucleotide
ccgucugaauucagccaaa

SEQ ID NO: 1900279 - RNA, 19 nt, Artificial Sequence
  Description of Artificial Sequence: Synthetic oligonucleotide
gggccuggcgguagaaacu

SEQ ID NO: 1900280 - RNA, 19 nt, Artificial Sequence
  Description of Artificial Sequence: Synthetic oligonucleotide
cgcguccgagucugagagc

SEQ ID NO: 1900281 - RNA, 19 nt, Artificial Sequence
  Description of Artificial Sequence: Synthetic oligonucleotide
gccgugggccaccuuggcu

SEQ ID NO: 1900282 - RNA, 19 nt, Artificial Sequence
  Description of Artificial Sequence: Synthetic oligonucleotide
cucccgccccgcggggcgc

SEQ ID NO: 1900283 - RNA, 19 nt, Artificial Sequence
  Description of Artificial Sequence: Synthetic oligonucleotide
ggggcgcgacagccacucc

SEQ ID NO: 1900284 - RNA, 19 nt, Artificial Sequence
  Description of Artificial Sequence: Synthetic oligonucleotide
ggucgcuugguggggacuu

SEQ ID NO: 1900285 - RNA, 19 nt, Artificial Sequence
  Description of Artificial Sequence: Synthetic oligonucleotide
acuccgcguccgagucuga

SEQ ID NO: 1900286 - RNA, 19 nt, Artificial Sequence
  Description of Artificial Sequence: Synthetic oligonucleotide
cggggcgcgacagccacuc

SEQ ID NO: 1900287 - RNA, 19 nt, Artificial Sequence
  Description of Artificial Sequence: Synthetic oligonucleotide
cgcgacagccacuccacgu

SEQ ID NO: 1900288 - RNA, 19 nt, Artificial Sequence
  Description of Artificial Sequence: Synthetic oligonucleotide
cugauggagccgggguaau

SEQ ID NO: 1900289 - RNA, 19 nt, Artificial Sequence
  Description of Artificial Sequence: Synthetic oligonucleotide
gggccaccuuggcucggaa

SEQ ID NO: 1900290 - RNA, 19 nt, Artificial Sequence
  Description of Artificial Sequence: Synthetic oligonucleotide
gaacccgcgccggcagcuu

SEQ ID NO: 1900291 - RNA, 19 nt, Artificial Sequence
  Description of Artificial Sequence: Synthetic oligonucleotide
cuggucagacuuggccauu

SEQ ID NO: 1900292 - RNA, 19 nt, Artificial Sequence
  Description of Artificial Sequence: Synthetic oligonucleotide
ggucgcuuauuugccccuu

SEQ ID NO: 1900293 - RNA, 19 nt, Artificial Sequence
  Description of Artificial Sequence: Synthetic oligonucleotide
ccccgcggggcgcgacagc

SEQ ID NO: 1900294 - RNA, 19 nt, Artificial Sequence
  Description of Artificial Sequence: Synthetic oligonucleotide
ccucagucugcaccuucuu

SEQ ID NO: 1900295 - RNA, 19 nt, Artificial Sequence
  Description of Artificial Sequence: Synthetic oligonucleotide
ccucguucguuaggccucu

SEQ ID NO: 1900296 - RNA, 19 nt, Artificial Sequence
  Description of Artificial Sequence: Synthetic oligonucleotide
cgucauucaccgccuucuu

SEQ ID NO: 1900297 - RNA, 19 nt, Artificial Sequence
  Description of Artificial Sequence: Synthetic oligonucleotide
ccacaagccucuggcuuuu

SEQ ID NO: 1900298 - RNA, 19 nt, Artificial Sequence
  Description of Artificial Sequence: Synthetic oligonucleotide
cgacuccgcguccgagucu

SEQ ID NO: 1900299 - RNA, 19 nt, Artificial Sequence
  Description of Artificial Sequence: Synthetic oligonucleotide
gcggggcgcgacagccacu

SEQ ID NO: 1900300 - RNA, 19 nt, Artificial Sequence
  Description of Artificial Sequence: Synthetic oligonucleotide
cguuuggcauugggcccuu

SEQ ID NO: 1900301 - RNA, 19 nt, Artificial Sequence
  Description of Artificial Sequence: Synthetic oligonucleotide
aagggaauuaaguugaucg

SEQ ID NO: 1900302 - RNA, 19 nt, Artificial Sequence
  Description of Artificial Sequence: Synthetic oligonucleotide
ugaaauaugguaaaggaca

SEQ ID NO: 1900303 - RNA, 19 nt, Artificial Sequence
  Description of Artificial Sequence: Synthetic oligonucleotide
acuacaaauacuuagaaga

SEQ ID NO: 1900304 - RNA, 19 nt, Artificial Sequence
  Description of Artificial Sequence: Synthetic oligonucleotide
auuucucaaagacagaggc

SEQ ID NO: 1900305 - RNA, 19 nt, Artificial Sequence
  Description of Artificial Sequence: Synthetic oligonucleotide
uuuagauucaacauacaug

SEQ ID NO: 1900306 - RNA, 19 nt, Artificial Sequence
  Description of Artificial Sequence: Synthetic oligonucleotide
uuugaaauaugguaaagga

SEQ ID NO: 1900307 - RNA, 19 nt, Artificial Sequence
  Description of Artificial Sequence: Synthetic oligonucleotide
uuaauaacucaucagcacc

SEQ ID NO: 1900308 - RNA, 19 nt, Artificial Sequence
  Description of Artificial Sequence: Synthetic oligonucleotide
aaguauuucucaaagacag

SEQ ID NO: 1900309 - RNA, 19 nt, Artificial Sequence
  Description of Artificial Sequence: Synthetic oligonucleotide
aauuaaguugaucgagugg

SEQ ID NO: 1900310 - RNA, 19 nt, Artificial Sequence
  Description of Artificial Sequence: Synthetic oligonucleotide
uuaaacaccgugcugaaga

SEQ ID NO: 1900311 - RNA, 19 nt, Artificial Sequence
  Description of Artificial Sequence: Synthetic oligonucleotide
uugaacuacaaauacuuag

SEQ ID NO: 1900312 - RNA, 19 nt, Artificial Sequence
  Description of Artificial Sequence: Synthetic oligonucleotide
uauugcaaagcaaacagcu

SEQ ID NO: 1900313 - RNA, 19 nt, Artificial Sequence
  Description of Artificial Sequence: Synthetic oligonucleotide
agauucaacauacaugguc

SEQ ID NO: 1900314 - RNA, 19 nt, Artificial Sequence
  Description of Artificial Sequence: Synthetic oligonucleotide
ucguguaugaauauaggcc

SEQ ID NO: 1900315 - RNA, 19 nt, Artificial Sequence
  Description of Artificial Sequence: Synthetic oligonucleotide
cauauugcaaagcaaacag

SEQ ID NO: 1900316 - RNA, 19 nt, Artificial Sequence
  Description of Artificial Sequence: Synthetic oligonucleotide
aaagaaacauuguauccug

SEQ ID NO: 1900317 - RNA, 19 nt, Artificial Sequence
  Description of Artificial Sequence: Synthetic oligonucleotide
ugaauauaggccuuagagc

SEQ ID NO: 1900318 - RNA, 19 nt, Artificial Sequence
  Description of Artificial Sequence: Synthetic oligonucleotide
aucgucgucauccuuaaac

SEQ ID NO: 1900319 - RNA, 19 nt, Artificial Sequence
  Description of Artificial Sequence: Synthetic oligonucleotide
auuaggauuugaaauaugg

SEQ ID NO: 1900320 - RNA, 19 nt, Artificial Sequence
  Description of Artificial Sequence: Synthetic oligonucleotide
aguaacauauugcaaagca

SEQ ID NO: 1900321 - RNA, 19 nt, Artificial Sequence
  Description of Artificial Sequence: Synthetic oligonucleotide
uuucgcuucaacaugccag

SEQ ID NO: 1900322 - RNA, 19 nt, Artificial Sequence
  Description of Artificial Sequence: Synthetic oligonucleotide
auuaccaguaacauauugc

SEQ ID NO: 1900323 - RNA, 19 nt, Artificial Sequence
  Description of Artificial Sequence: Synthetic oligonucleotide
aacucguacaaaauggaac

SEQ ID NO: 1900324 - RNA, 19 nt, Artificial Sequence
  Description of Artificial Sequence: Synthetic oligonucleotide
cuuagagcacuuaaugugg

SEQ ID NO: 1900325 - RNA, 19 nt, Artificial Sequence
  Description of Artificial Sequence: Synthetic oligonucleotide
uugcaaagcaaacagcuug

SEQ ID NO: 1900326 - RNA, 19 nt, Artificial Sequence
  Description of Artificial Sequence: Synthetic oligonucleotide
ugcauuaucugcuaacuca

SEQ ID NO: 1900327 - RNA, 19 nt, Artificial Sequence
  Description of Artificial Sequence: Synthetic oligonucleotide
ugaagggcuacgauuaucc

SEQ ID NO: 1900328 - RNA, 19 nt, Artificial Sequence
  Description of Artificial Sequence: Synthetic oligonucleotide
uuuguuuugucuccauuag

SEQ ID NO: 1900329 - RNA, 19 nt, Artificial Sequence
  Description of Artificial Sequence: Synthetic oligonucleotide
aaaaguuaagacugcauua

SEQ ID NO: 1900330 - RNA, 19 nt, Artificial Sequence
  Description of Artificial Sequence: Synthetic oligonucleotide
auacagguaguuuugaacu

SEQ ID NO: 1900331 - RNA, 19 nt, Artificial Sequence
  Description of Artificial Sequence: Synthetic oligonucleotide
ugaggaggggaaaauaaag

SEQ ID NO: 1900332 - RNA, 19 nt, Artificial Sequence
  Description of Artificial Sequence: Synthetic oligonucleotide
uauuucucaaagacagagg

SEQ ID NO: 1900333 - RNA, 19 nt, Artificial Sequence
  Description of Artificial Sequence: Synthetic oligonucleotide
uugaaauaugguaaaggac

SEQ ID NO: 1900334 - RNA, 19 nt, Artificial Sequence
  Description of Artificial Sequence: Synthetic oligonucleotide
uaacucaucagcaccaugu

SEQ ID NO: 1900335 - RNA, 19 nt, Artificial Sequence
  Description of Artificial Sequence: Synthetic oligonucleotide
agaaauacugaccaucacu

SEQ ID NO: 1900336 - RNA, 19 nt, Artificial Sequence
  Description of Artificial Sequence: Synthetic oligonucleotide
aacagcuuggaaaaggaag

SEQ ID NO: 1900337 - RNA, 19 nt, Artificial Sequence
  Description of Artificial Sequence: Synthetic oligonucleotide
uuauccaguagcaagcggu

SEQ ID NO: 1900338 - RNA, 19 nt, Artificial Sequence
  Description of Artificial Sequence: Synthetic oligonucleotide
gaacguguggaucagguug

SEQ ID NO: 1900339 - RNA, 19 nt, Artificial Sequence
  Description of Artificial Sequence: Synthetic oligonucleotide
uucguguaugaauauaggc

SEQ ID NO: 1900340 - RNA, 19 nt, Artificial Sequence
  Description of Artificial Sequence: Synthetic oligonucleotide
acgauuauccaguagcaag

SEQ ID NO: 1900341 - RNA, 19 nt, Artificial Sequence
  Description of Artificial Sequence: Synthetic oligonucleotide
auuaaguugaucgagugga

SEQ ID NO: 1900342 - RNA, 19 nt, Artificial Sequence
  Description of Artificial Sequence: Synthetic oligonucleotide
acaauagaauccuuggaug

SEQ ID NO: 1900343 - RNA, 19 nt, Artificial Sequence
  Description of Artificial Sequence: Synthetic oligonucleotide
gauacagguaguuuugaac

SEQ ID NO: 1900344 - RNA, 19 nt, Artificial Sequence
  Description of Artificial Sequence: Synthetic oligonucleotide
ugcaaagcaaacagcuugg

SEQ ID NO: 1900345 - RNA, 19 nt, Artificial Sequence
  Description of Artificial Sequence: Synthetic oligonucleotide
aacauauugcaaagcaaac

SEQ ID NO: 1900346 - RNA, 19 nt, Artificial Sequence
  Description of Artificial Sequence: Synthetic oligonucleotide
ucccuuaagaaccuggaga

SEQ ID NO: 1900347 - RNA, 19 nt, Artificial Sequence
  Description of Artificial Sequence: Synthetic oligonucleotide
caauagaauccuuggaugc

SEQ ID NO: 1900348 - RNA, 19 nt, Artificial Sequence
  Description of Artificial Sequence: Synthetic oligonucleotide
ugcagauagucccggaacg

SEQ ID NO: 1900349 - RNA, 19 nt, Artificial Sequence
  Description of Artificial Sequence: Synthetic oligonucleotide
aaauaugguaaaggacacc

SEQ ID NO: 1900350 - RNA, 19 nt, Artificial Sequence
  Description of Artificial Sequence: Synthetic oligonucleotide
gaauuaaguugaucgagug

SEQ ID NO: 1900351 - RNA, 19 nt, Artificial Sequence
  Description of Artificial Sequence: Synthetic oligonucleotide
aagggcuacgauuauccag

SEQ ID NO: 1900352 - RNA, 19 nt, Artificial Sequence
  Description of Artificial Sequence: Synthetic oligonucleotide
aaguuaagacugcauuauc

SEQ ID NO: 1900353 - RNA, 19 nt, Artificial Sequence
  Description of Artificial Sequence: Synthetic oligonucleotide
uuuucucggcaucugggcg

SEQ ID NO: 1900354 - RNA, 19 nt, Artificial Sequence
  Description of Artificial Sequence: Synthetic oligonucleotide
ucuggguuuaccaggaaac

SEQ ID NO: 1900355 - RNA, 19 nt, Artificial Sequence
  Description of Artificial Sequence: Synthetic oligonucleotide
uaucugcuaacucauuacc

SEQ ID NO: 1900356 - RNA, 19 nt, Artificial Sequence
  Description of Artificial Sequence: Synthetic oligonucleotide
aguagcaagcgguccagcc

SEQ ID NO: 1900357 - RNA, 19 nt, Artificial Sequence
  Description of Artificial Sequence: Synthetic oligonucleotide
acuacugugacucugucuu

SEQ ID NO: 1900358 - RNA, 19 nt, Artificial Sequence
  Description of Artificial Sequence: Synthetic oligonucleotide
aacaugaagggcuacgauu

SEQ ID NO: 1900359 - RNA, 19 nt, Artificial Sequence
  Description of Artificial Sequence: Synthetic oligonucleotide
aaaguauuucucaaagaca

SEQ ID NO: 1900360 - RNA, 19 nt, Artificial Sequence
  Description of Artificial Sequence: Synthetic oligonucleotide
ugguagugcagauaguccc

SEQ ID NO: 1900361 - RNA, 19 nt, Artificial Sequence
  Description of Artificial Sequence: Synthetic oligonucleotide
acagaggcaaagcaauuuc

SEQ ID NO: 1900362 - RNA, 19 nt, Artificial Sequence
  Description of Artificial Sequence: Synthetic oligonucleotide
aaaguuaagacugcauuau

SEQ ID NO: 1900363 - RNA, 19 nt, Artificial Sequence
  Description of Artificial Sequence: Synthetic oligonucleotide
gcuacgauuauccaguagc

SEQ ID NO: 1900364 - RNA, 19 nt, Artificial Sequence
  Description of Artificial Sequence: Synthetic oligonucleotide
agcacaaaggugauguagc

SEQ ID NO: 1900365 - RNA, 19 nt, Artificial Sequence
  Description of Artificial Sequence: Synthetic oligonucleotide
uccuuaaacaccgugcuga

SEQ ID NO: 1900366 - RNA, 19 nt, Artificial Sequence
  Description of Artificial Sequence: Synthetic oligonucleotide
agaauccuuggaugcaggc

SEQ ID NO: 1900367 - RNA, 19 nt, Artificial Sequence
  Description of Artificial Sequence: Synthetic oligonucleotide
aggaaacucccguauacuc

SEQ ID NO: 1900368 - RNA, 19 nt, Artificial Sequence
  Description of Artificial Sequence: Synthetic oligonucleotide
uccauuaggauuugaaaua

SEQ ID NO: 1900369 - RNA, 19 nt, Artificial Sequence
  Description of Artificial Sequence: Synthetic oligonucleotide
agguugaugguguugucuc

SEQ ID NO: 1900370 - RNA, 19 nt, Artificial Sequence
  Description of Artificial Sequence: Synthetic oligonucleotide
uccuugcaagcacagcucg

SEQ ID NO: 1900371 - RNA, 19 nt, Artificial Sequence
  Description of Artificial Sequence: Synthetic oligonucleotide
ccaaacucguacaaaaugg

SEQ ID NO: 1900372 - RNA, 19 nt, Artificial Sequence
  Description of Artificial Sequence: Synthetic oligonucleotide
auauugcaaagcaaacagc

SEQ ID NO: 1900373 - RNA, 19 nt, Artificial Sequence
  Description of Artificial Sequence: Synthetic oligonucleotide
augaaguccuugcaagcac

SEQ ID NO: 1900374 - RNA, 19 nt, Artificial Sequence
  Description of Artificial Sequence: Synthetic oligonucleotide
ggaacuaugaaguccuugc

SEQ ID NO: 1900375 - RNA, 19 nt, Artificial Sequence
  Description of Artificial Sequence: Synthetic oligonucleotide
aauauaggccuuagagcac

SEQ ID NO: 1900376 - RNA, 19 nt, Artificial Sequence
  Description of Artificial Sequence: Synthetic oligonucleotide
acgguugagcaccuuaagg

SEQ ID NO: 1900377 - RNA, 19 nt, Artificial Sequence
  Description of Artificial Sequence: Synthetic oligonucleotide
uuuccgaugaccacaucgu

SEQ ID NO: 1900378 - RNA, 19 nt, Artificial Sequence
  Description of Artificial Sequence: Synthetic oligonucleotide
agguuauuugccaaacucg

SEQ ID NO: 1900379 - RNA, 19 nt, Artificial Sequence
  Description of Artificial Sequence: Synthetic oligonucleotide
agaggcaaagcaauuucgc

SEQ ID NO: 1900380 - RNA, 19 nt, Artificial Sequence
  Description of Artificial Sequence: Synthetic oligonucleotide
aaguugaucgaguggaauu

SEQ ID NO: 1900381 - RNA, 19 nt, Artificial Sequence
  Description of Artificial Sequence: Synthetic oligonucleotide
gauuauccaguagcaagcg

SEQ ID NO: 1900382 - RNA, 19 nt, Artificial Sequence
  Description of Artificial Sequence: Synthetic oligonucleotide
uaugaauauaggccuuaga

SEQ ID NO: 1900383 - RNA, 19 nt, Artificial Sequence
  Description of Artificial Sequence: Synthetic oligonucleotide
aauagaauccuuggaugca

SEQ ID NO: 1900384 - RNA, 19 nt, Artificial Sequence
  Description of Artificial Sequence: Synthetic oligonucleotide
auuauccaguagcaagcgg

SEQ ID NO: 1900385 - RNA, 19 nt, Artificial Sequence
  Description of Artificial Sequence: Synthetic oligonucleotide
aauuucgcuucaacaugcc

SEQ ID NO: 1900386 - RNA, 19 nt, Artificial Sequence
  Description of Artificial Sequence: Synthetic oligonucleotide
agagcacuuaaugugguag

SEQ ID NO: 1900387 - RNA, 19 nt, Artificial Sequence
  Description of Artificial Sequence: Synthetic oligonucleotide
gaaucccuuaagaaccugg

SEQ ID NO: 1900388 - RNA, 19 nt, Artificial Sequence
  Description of Artificial Sequence: Synthetic oligonucleotide
gaaauaugguaaaggacac

SEQ ID NO: 1900389 - RNA, 19 nt, Artificial Sequence
  Description of Artificial Sequence: Synthetic oligonucleotide
cagaggcaaagcaauuucg

SEQ ID NO: 1900390 - RNA, 19 nt, Artificial Sequence
  Description of Artificial Sequence: Synthetic oligonucleotide
cagguuauuugccaaacuc

SEQ ID NO: 1900391 - RNA, 19 nt, Artificial Sequence
  Description of Artificial Sequence: Synthetic oligonucleotide
uuaagaaccuggagaggug

SEQ ID NO: 1900392 - RNA, 19 nt, Artificial Sequence
  Description of Artificial Sequence: Synthetic oligonucleotide
ucccgguaauggaugaccg

SEQ ID NO: 1900393 - RNA, 19 nt, Artificial Sequence
  Description of Artificial Sequence: Synthetic oligonucleotide
aguuaagacugcauuaucu

SEQ ID NO: 1900394 - RNA, 19 nt, Artificial Sequence
  Description of Artificial Sequence: Synthetic oligonucleotide
auucaacauacauggucuc

SEQ ID NO: 1900395 - RNA, 19 nt, Artificial Sequence
  Description of Artificial Sequence: Synthetic oligonucleotide
ucgucgucauccuuaaaca

SEQ ID NO: 1900396 - RNA, 19 nt, Artificial Sequence
  Description of Artificial Sequence: Synthetic oligonucleotide
uugccaaacucguacaaaa

SEQ ID NO: 1900397 - RNA, 19 nt, Artificial Sequence
  Description of Artificial Sequence: Synthetic oligonucleotide
uagaauccuuggaugcagg

SEQ ID NO: 1900398 - RNA, 19 nt, Artificial Sequence
  Description of Artificial Sequence: Synthetic oligonucleotide
acagguaguuuugaacuac

SEQ ID NO: 1900399 - RNA, 19 nt, Artificial Sequence
  Description of Artificial Sequence: Synthetic oligonucleotide
gcaaagaaacauuguaucc

SEQ ID NO: 1900400 - RNA, 19 nt, Artificial Sequence
  Description of Artificial Sequence: Synthetic oligonucleotide
ugccugaaguuccuuguag

SEQ ID NO: 1900401 - RNA, 19 nt, Artificial Sequence
  Description of Artificial Sequence: Synthetic oligonucleotide
agcaccuuaaggaagucag

SEQ ID NO: 1900402 - RNA, 19 nt, Artificial Sequence
  Description of Artificial Sequence: Synthetic oligonucleotide
auacauggucucaucgucc

SEQ ID NO: 1900403 - RNA, 19 nt, Artificial Sequence
  Description of Artificial Sequence: Synthetic oligonucleotide
guagccaauguugucaccc

SEQ ID NO: 1900404 - RNA, 19 nt, Artificial Sequence
  Description of Artificial Sequence: Synthetic oligonucleotide
ugcaacaugaagggcuacg

SEQ ID NO: 1900405 - RNA, 19 nt, Artificial Sequence
  Description of Artificial Sequence: Synthetic oligonucleotide
uuugaacuacaaauacuua

SEQ ID NO: 1900406 - RNA, 19 nt, Artificial Sequence
  Description of Artificial Sequence: Synthetic oligonucleotide
acauauugcaaagcaaaca

SEQ ID NO: 1900407 - RNA, 19 nt, Artificial Sequence
  Description of Artificial Sequence: Synthetic oligonucleotide
ugaauuccugcaugaagac

SEQ ID NO: 1900408 - RNA, 19 nt, Artificial Sequence
  Description of Artificial Sequence: Synthetic oligonucleotide
uggaucagguugauggugu

SEQ ID NO: 1900409 - RNA, 19 nt, Artificial Sequence
  Description of Artificial Sequence: Synthetic oligonucleotide
cuaacucauuaccaguaac

SEQ ID NO: 1900410 - RNA, 19 nt, Artificial Sequence
  Description of Artificial Sequence: Synthetic oligonucleotide
gauucaacauacauggucu

SEQ ID NO: 1900411 - RNA, 19 nt, Artificial Sequence
  Description of Artificial Sequence: Synthetic oligonucleotide
uacucucuuuaauaacuca

SEQ ID NO: 1900412 - RNA, 19 nt, Artificial Sequence
  Description of Artificial Sequence: Synthetic oligonucleotide
ucgcauucguguaugaaua

SEQ ID NO: 1900413 - RNA, 19 nt, Artificial Sequence
  Description of Artificial Sequence: Synthetic oligonucleotide
uuagagcacuuaauguggu

SEQ ID NO: 1900414 - RNA, 19 nt, Artificial Sequence
  Description of Artificial Sequence: Synthetic oligonucleotide
uccaguagcaagcggucca

SEQ ID NO: 1900415 - RNA, 19 nt, Artificial Sequence
  Description of Artificial Sequence: Synthetic oligonucleotide
cauacauggucucaucguc

SEQ ID NO: 1900416 - RNA, 19 nt, Artificial Sequence
  Description of Artificial Sequence: Synthetic oligonucleotide
uacaaauacuuagaagaaa

SEQ ID NO: 1900417 - RNA, 19 nt, Artificial Sequence
  Description of Artificial Sequence: Synthetic oligonucleotide
agggaauuaaguugaucga

SEQ ID NO: 1900418 - RNA, 19 nt, Artificial Sequence
  Description of Artificial Sequence: Synthetic oligonucleotide
uaauggaugaccgcucugu

SEQ ID NO: 1900419 - RNA, 19 nt, Artificial Sequence
  Description of Artificial Sequence: Synthetic oligonucleotide
auggaugaccgcucuguuc

SEQ ID NO: 1900420 - RNA, 19 nt, Artificial Sequence
  Description of Artificial Sequence: Synthetic oligonucleotide
cuuaaugugguagugcaga

SEQ ID NO: 1900421 - RNA, 19 nt, Artificial Sequence
  Description of Artificial Sequence: Synthetic oligonucleotide
aguucccaagcguuagcgg

SEQ ID NO: 1900422 - RNA, 19 nt, Artificial Sequence
  Description of Artificial Sequence: Synthetic oligonucleotide
auagaauccuuggaugcag

SEQ ID NO: 1900423 - RNA, 19 nt, Artificial Sequence
  Description of Artificial Sequence: Synthetic oligonucleotide
ccuuagagcacuuaaugug

SEQ ID NO: 1900424 - RNA, 19 nt, Artificial Sequence
  Description of Artificial Sequence: Synthetic oligonucleotide
accaugugccugaaguucc

SEQ ID NO: 1900425 - RNA, 19 nt, Artificial Sequence
  Description of Artificial Sequence: Synthetic oligonucleotide
cugcaugaagaccuuuccg

SEQ ID NO: 1900426 - RNA, 19 nt, Artificial Sequence
  Description of Artificial Sequence: Synthetic oligonucleotide
uuaaggaagucagauguuu

SEQ ID NO: 1900427 - RNA, 19 nt, Artificial Sequence
  Description of Artificial Sequence: Synthetic oligonucleotide
cucaucgucccgguaaugg

SEQ ID NO: 1900428 - RNA, 19 nt, Artificial Sequence
  Description of Artificial Sequence: Synthetic oligonucleotide
ugauuguuuucauuucuuu

SEQ ID NO: 1900429 - RNA, 19 nt, Artificial Sequence
  Description of Artificial Sequence: Synthetic oligonucleotide
uaggccuuagagcacuuaa

SEQ ID NO: 1900430 - RNA, 19 nt, Artificial Sequence
  Description of Artificial Sequence: Synthetic oligonucleotide
cacuuaaugugguagugca

SEQ ID NO: 1900431 - RNA, 19 nt, Artificial Sequence
  Description of Artificial Sequence: Synthetic oligonucleotide
uuucaaggucauauagcaa

SEQ ID NO: 1900432 - RNA, 19 nt, Artificial Sequence
  Description of Artificial Sequence: Synthetic oligonucleotide
auacucucuuuaauaacuc

SEQ ID NO: 1900433 - RNA, 19 nt, Artificial Sequence
  Description of Artificial Sequence: Synthetic oligonucleotide
ucguccuucuuugaauucc

SEQ ID NO: 1900434 - RNA, 19 nt, Artificial Sequence
  Description of Artificial Sequence: Synthetic oligonucleotide
ugugucuuucagcucuaga

SEQ ID NO: 1900435 - RNA, 19 nt, Artificial Sequence
  Description of Artificial Sequence: Synthetic oligonucleotide
caugaagaccuuuccgaug

SEQ ID NO: 1900436 - RNA, 19 nt, Artificial Sequence
  Description of Artificial Sequence: Synthetic oligonucleotide
aaucccuuaagaaccugga

SEQ ID NO: 1900437 - RNA, 19 nt, Artificial Sequence
  Description of Artificial Sequence: Synthetic oligonucleotide
guggcauugguauggcgag

SEQ ID NO: 1900438 - RNA, 19 nt, Artificial Sequence
  Description of Artificial Sequence: Synthetic oligonucleotide
ucuagaggagguucccugu

SEQ ID NO: 1900439 - RNA, 19 nt, Artificial Sequence
  Description of Artificial Sequence: Synthetic oligonucleotide
uaaacaccgugcugaagac

SEQ ID NO: 1900440 - RNA, 19 nt, Artificial Sequence
  Description of Artificial Sequence: Synthetic oligonucleotide
uuaaguugaucgaguggaa

SEQ ID NO: 1900441 - RNA, 19 nt, Artificial Sequence
  Description of Artificial Sequence: Synthetic oligonucleotide
acggagaaucccuuaagaa

SEQ ID NO: 1900442 - RNA, 19 nt, Artificial Sequence
  Description of Artificial Sequence: Synthetic oligonucleotide
cccuuaagaaccuggagag

SEQ ID NO: 1900443 - RNA, 19 nt, Artificial Sequence
  Description of Artificial Sequence: Synthetic oligonucleotide
aacaccgugcugaagacua

SEQ ID NO: 1900444 - RNA, 19 nt, Artificial Sequence
  Description of Artificial Sequence: Synthetic oligonucleotide
aguggcauugguauggcga

SEQ ID NO: 1900445 - RNA, 19 nt, Artificial Sequence
  Description of Artificial Sequence: Synthetic oligonucleotide
uauccaguagcaagcgguc

SEQ ID NO: 1900446 - RNA, 19 nt, Artificial Sequence
  Description of Artificial Sequence: Synthetic oligonucleotide
cauggucucaucgucccgg

SEQ ID NO: 1900447 - RNA, 19 nt, Artificial Sequence
  Description of Artificial Sequence: Synthetic oligonucleotide
cauuaggauuugaaauaug

SEQ ID NO: 1900448 - RNA, 19 nt, Artificial Sequence
  Description of Artificial Sequence: Synthetic oligonucleotide
gaauuccugcaugaagacc

SEQ ID NO: 1900449 - RNA, 19 nt, Artificial Sequence
  Description of Artificial Sequence: Synthetic oligonucleotide
uuugcucgcauucguguau

SEQ ID NO: 1900450 - RNA, 19 nt, Artificial Sequence
  Description of Artificial Sequence: Synthetic oligonucleotide
aagacugcauuaucugcua

SEQ ID NO: 1900451 - RNA, 19 nt, Artificial Sequence
  Description of Artificial Sequence: Synthetic oligonucleotide
uuagcgggaugaaaauguc

SEQ ID NO: 1900452 - RNA, 19 nt, Artificial Sequence
  Description of Artificial Sequence: Synthetic oligonucleotide
ggaugaaaaugucuucccc

SEQ ID NO: 1900453 - RNA, 19 nt, Artificial Sequence
  Description of Artificial Sequence: Synthetic oligonucleotide
auaacucaucagcaccaug

SEQ ID NO: 1900454 - RNA, 19 nt, Artificial Sequence
  Description of Artificial Sequence: Synthetic oligonucleotide
uguggaucagguugauggu

SEQ ID NO: 1900455 - RNA, 19 nt, Artificial Sequence
  Description of Artificial Sequence: Synthetic oligonucleotide
gggaauuaaguugaucgag

SEQ ID NO: 1900456 - RNA, 19 nt, Artificial Sequence
  Description of Artificial Sequence: Synthetic oligonucleotide
uuaaugugguagugcagau

SEQ ID NO: 1900457 - RNA, 19 nt, Artificial Sequence
  Description of Artificial Sequence: Synthetic oligonucleotide
gcaauuucgcuucaacaug

SEQ ID NO: 1900458 - RNA, 19 nt, Artificial Sequence
  Description of Artificial Sequence: Synthetic oligonucleotide
ucaucgucccgguaaugga

SEQ ID NO: 1900459 - RNA, 19 nt, Artificial Sequence
  Description of Artificial Sequence: Synthetic oligonucleotide
uccugcaugaagaccuuuc

SEQ ID NO: 1900460 - RNA, 19 nt, Artificial Sequence
  Description of Artificial Sequence: Synthetic oligonucleotide
uagcgggaugaaaaugucu

SEQ ID NO: 1900461 - RNA, 19 nt, Artificial Sequence
  Description of Artificial Sequence: Synthetic oligonucleotide
ucagcucuagaggagguuc

SEQ ID NO: 1900462 - RNA, 19 nt, Artificial Sequence
  Description of Artificial Sequence: Synthetic oligonucleotide
ggagaggugcaacaugaag

SEQ ID NO: 1900463 - RNA, 19 nt, Artificial Sequence
  Description of Artificial Sequence: Synthetic oligonucleotide
auuucgcuucaacaugcca

SEQ ID NO: 1900464 - RNA, 19 nt, Artificial Sequence
  Description of Artificial Sequence: Synthetic oligonucleotide
uuucagcucuagaggaggu

SEQ ID NO: 1900465 - RNA, 19 nt, Artificial Sequence
  Description of Artificial Sequence: Synthetic oligonucleotide
gaagaccuuuccgaugacc

SEQ ID NO: 1900466 - RNA, 19 nt, Artificial Sequence
  Description of Artificial Sequence: Synthetic oligonucleotide
agauuuucaaggucauaua

SEQ ID NO: 1900467 - RNA, 19 nt, Artificial Sequence
  Description of Artificial Sequence: Synthetic oligonucleotide
agggcuacgauuauccagu

SEQ ID NO: 1900468 - RNA, 19 nt, Artificial Sequence
  Description of Artificial Sequence: Synthetic oligonucleotide
ggccuuagagcacuuaaug

SEQ ID NO: 1900469 - RNA, 19 nt, Artificial Sequence
  Description of Artificial Sequence: Synthetic oligonucleotide
auauaggccuuagagcacu

SEQ ID NO: 1900470 - RNA, 19 nt, Artificial Sequence
  Description of Artificial Sequence: Synthetic oligonucleotide
aacguguggaucagguuga

SEQ ID NO: 1900471 - RNA, 19 nt, Artificial Sequence
  Description of Artificial Sequence: Synthetic oligonucleotide
cuacgauuauccaguagca

SEQ ID NO: 1900472 - RNA, 19 nt, Artificial Sequence
  Description of Artificial Sequence: Synthetic oligonucleotide
agauacagguaguuuugaa

SEQ ID NO: 1900473 - RNA, 19 nt, Artificial Sequence
  Description of Artificial Sequence: Synthetic oligonucleotide
aggcagauuuucaagguca

SEQ ID NO: 1900474 - RNA, 19 nt, Artificial Sequence
  Description of Artificial Sequence: Synthetic oligonucleotide
augguguugucucgagcag

SEQ ID NO: 1900475 - RNA, 19 nt, Artificial Sequence
  Description of Artificial Sequence: Synthetic oligonucleotide
uguaugaauauaggccuua

SEQ ID NO: 1900476 - RNA, 19 nt, Artificial Sequence
  Description of Artificial Sequence: Synthetic oligonucleotide
acaugaagggcuacgauua

SEQ ID NO: 1900477 - RNA, 19 nt, Artificial Sequence
  Description of Artificial Sequence: Synthetic oligonucleotide
uaccaggaaacucccguau

SEQ ID NO: 1900478 - RNA, 19 nt, Artificial Sequence
  Description of Artificial Sequence: Synthetic oligonucleotide
caguucccaagcguuagcg

SEQ ID NO: 1900479 - RNA, 19 nt, Artificial Sequence
  Description of Artificial Sequence: Synthetic oligonucleotide
ucuugggaacuaugaaguc

SEQ ID NO: 1900480 - RNA, 19 nt, Artificial Sequence
  Description of Artificial Sequence: Synthetic oligonucleotide
guaugaauauaggccuuag

SEQ ID NO: 1900481 - RNA, 19 nt, Artificial Sequence
  Description of Artificial Sequence: Synthetic oligonucleotide
agugaggaggggaaaauaa

SEQ ID NO: 1900482 - RNA, 19 nt, Artificial Sequence
  Description of Artificial Sequence: Synthetic oligonucleotide
agcgguccagccuuccauc

SEQ ID NO: 1900483 - RNA, 19 nt, Artificial Sequence
  Description of Artificial Sequence: Synthetic oligonucleotide
aagaaacauuguauccuga

SEQ ID NO: 1900484 - RNA, 19 nt, Artificial Sequence
  Description of Artificial Sequence: Synthetic oligonucleotide
uaaguugaucgaguggaau

SEQ ID NO: 1900485 - RNA, 19 nt, Artificial Sequence
  Description of Artificial Sequence: Synthetic oligonucleotide
augaagggcuacgauuauc

SEQ ID NO: 1900486 - RNA, 19 nt, Artificial Sequence
  Description of Artificial Sequence: Synthetic oligonucleotide
auccuuaaacaccgugcug

SEQ ID NO: 1900487 - RNA, 19 nt, Artificial Sequence
  Description of Artificial Sequence: Synthetic oligonucleotide
ugcagguuauuugccaaac

SEQ ID NO: 1900488 - RNA, 19 nt, Artificial Sequence
  Description of Artificial Sequence: Synthetic oligonucleotide
agcucuagaggagguuccc

SEQ ID NO: 1900489 - RNA, 19 nt, Artificial Sequence
  Description of Artificial Sequence: Synthetic oligonucleotide
ccuuguagaauuucaaaga

SEQ ID NO: 1900490 - RNA, 19 nt, Artificial Sequence
  Description of Artificial Sequence: Synthetic oligonucleotide
gggaugaaaaugucuuccc

SEQ ID NO: 1900491 - RNA, 19 nt, Artificial Sequence
  Description of Artificial Sequence: Synthetic oligonucleotide
uggguuuaccaggaaacuc

SEQ ID NO: 1900492 - RNA, 19 nt, Artificial Sequence
  Description of Artificial Sequence: Synthetic oligonucleotide
cucguacaaaauggaaccc

SEQ ID NO: 1900493 - RNA, 19 nt, Artificial Sequence
  Description of Artificial Sequence: Synthetic oligonucleotide
aagcgguccagccuuccau

SEQ ID NO: 1900494 - RNA, 19 nt, Artificial Sequence
  Description of Artificial Sequence: Synthetic oligonucleotide
agcacagcucguuucugca

SEQ ID NO: 1900495 - RNA, 19 nt, Artificial Sequence
  Description of Artificial Sequence: Synthetic oligonucleotide
guaacauauugcaaagcaa

SEQ ID NO: 1900496 - RNA, 19 nt, Artificial Sequence
  Description of Artificial Sequence: Synthetic oligonucleotide
uuguauccugauucugggu

SEQ ID NO: 1900497 - RNA, 19 nt, Artificial Sequence
  Description of Artificial Sequence: Synthetic oligonucleotide
ccaauguugucacccacgg

SEQ ID NO: 1900498 - RNA, 19 nt, Artificial Sequence
  Description of Artificial Sequence: Synthetic oligonucleotide
agcguuagcgggaugaaaa

SEQ ID NO: 1900499 - RNA, 19 nt, Artificial Sequence
  Description of Artificial Sequence: Synthetic oligonucleotide
uagcaagcgguccagccuu

SEQ ID NO: 1900500 - RNA, 19 nt, Artificial Sequence
  Description of Artificial Sequence: Synthetic oligonucleotide
caguaacauauugcaaagc

SEQ ID NO: 1900501 - RNA, 19 nt, Artificial Sequence
  Description of Artificial Sequence: Synthetic oligonucleotide
ucccguauacucucuuuaa

SEQ ID NO: 1900502 - RNA, 19 nt, Artificial Sequence
  Description of Artificial Sequence: Synthetic oligonucleotide
caaagaaacauuguauccu

SEQ ID NO: 1900503 - RNA, 19 nt, Artificial Sequence
  Description of Artificial Sequence: Synthetic oligonucleotide
uauggcgagggaagagcac

SEQ ID NO: 1900504 - RNA, 19 nt, Artificial Sequence
  Description of Artificial Sequence: Synthetic oligonucleotide
ugcacgguugagcaccuua

SEQ ID NO: 1900505 - RNA, 19 nt, Artificial Sequence
  Description of Artificial Sequence: Synthetic oligonucleotide
cgauuauccaguagcaagc

SEQ ID NO: 1900506 - RNA, 19 nt, Artificial Sequence
  Description of Artificial Sequence: Synthetic oligonucleotide
uuaccaggaaacucccgua

SEQ ID NO: 1900507 - RNA, 19 nt, Artificial Sequence
  Description of Artificial Sequence: Synthetic oligonucleotide
guuagcgggaugaaaaugu

SEQ ID NO: 1900508 - RNA, 19 nt, Artificial Sequence
  Description of Artificial Sequence: Synthetic oligonucleotide
cacaauagaauccuuggau

SEQ ID NO: 1900509 - RNA, 19 nt, Artificial Sequence
  Description of Artificial Sequence: Synthetic oligonucleotide
aggucauauagcaaagaaa

SEQ ID NO: 1900510 - RNA, 19 nt, Artificial Sequence
  Description of Artificial Sequence: Synthetic oligonucleotide
aguugaucgaguggaauuu

SEQ ID NO: 1900511 - RNA, 19 nt, Artificial Sequence
  Description of Artificial Sequence: Synthetic oligonucleotide
ucaacagcgcuuccuccuc

SEQ ID NO: 1900512 - RNA, 19 nt, Artificial Sequence
  Description of Artificial Sequence: Synthetic oligonucleotide
acauuguauccugauucug

SEQ ID NO: 1900513 - RNA, 19 nt, Artificial Sequence
  Description of Artificial Sequence: Synthetic oligonucleotide
gaauccuuggaugcaggca

SEQ ID NO: 1900514 - RNA, 19 nt, Artificial Sequence
  Description of Artificial Sequence: Synthetic oligonucleotide
gguaguuuugaacuacaaa

SEQ ID NO: 1900515 - RNA, 19 nt, Artificial Sequence
  Description of Artificial Sequence: Synthetic oligonucleotide
uacgauuauccaguagcaa

SEQ ID NO: 1900516 - RNA, 19 nt, Artificial Sequence
  Description of Artificial Sequence: Synthetic oligonucleotide
acuuaaugugguagugcag

SEQ ID NO: 1900517 - RNA, 19 nt, Artificial Sequence
  Description of Artificial Sequence: Synthetic oligonucleotide
ggauuugaaauaugguaaa

SEQ ID NO: 1900518 - RNA, 19 nt, Artificial Sequence
  Description of Artificial Sequence: Synthetic oligonucleotide
cuuggaugcaggcagauuu

SEQ ID NO: 1900519 - RNA, 19 nt, Artificial Sequence
  Description of Artificial Sequence: Synthetic oligonucleotide
gugguagugcagauagucc

SEQ ID NO: 1900520 - RNA, 19 nt, Artificial Sequence
  Description of Artificial Sequence: Synthetic oligonucleotide
aaacaccgugcugaagacu

SEQ ID NO: 1900521 - RNA, 19 nt, Artificial Sequence
  Description of Artificial Sequence: Synthetic oligonucleotide
cagcucuagaggagguucc

SEQ ID NO: 1900522 - RNA, 19 nt, Artificial Sequence
  Description of Artificial Sequence: Synthetic oligonucleotide
gucucgagcaguggcauug

SEQ ID NO: 1900523 - RNA, 19 nt, Artificial Sequence
  Description of Artificial Sequence: Synthetic oligonucleotide
guaauggaugaccgcucug

SEQ ID NO: 1900524 - RNA, 19 nt, Artificial Sequence
  Description of Artificial Sequence: Synthetic oligonucleotide
ugaagacuacugugacucu

SEQ ID NO: 1900525 - RNA, 19 nt, Artificial Sequence
  Description of Artificial Sequence: Synthetic oligonucleotide
uuggaugcaggcagauuuu

SEQ ID NO: 1900526 - RNA, 19 nt, Artificial Sequence
  Description of Artificial Sequence: Synthetic oligonucleotide
agcgggaugaaaaugucuu

SEQ ID NO: 1900527 - RNA, 19 nt, Artificial Sequence
  Description of Artificial Sequence: Synthetic oligonucleotide
auggcgagggaagagcaca

SEQ ID NO: 1900528 - RNA, 19 nt, Artificial Sequence
  Description of Artificial Sequence: Synthetic oligonucleotide
uucguccuucuuugaauuc

SEQ ID NO: 1900529 - RNA, 19 nt, Artificial Sequence
  Description of Artificial Sequence: Synthetic oligonucleotide
aggagguucccugugacua

SEQ ID NO: 1900530 - RNA, 19 nt, Artificial Sequence
  Description of Artificial Sequence: Synthetic oligonucleotide
agcucguuucugcagguua

SEQ ID NO: 1900531 - RNA, 19 nt, Artificial Sequence
  Description of Artificial Sequence: Synthetic oligonucleotide
gaagggcuacgauuaucca

SEQ ID NO: 1900532 - RNA, 19 nt, Artificial Sequence
  Description of Artificial Sequence: Synthetic oligonucleotide
cuuaaacaccgugcugaag

SEQ ID NO: 1900533 - RNA, 19 nt, Artificial Sequence
  Description of Artificial Sequence: Synthetic oligonucleotide
gguauggcgagggaagagc

SEQ ID NO: 1900534 - RNA, 19 nt, Artificial Sequence
  Description of Artificial Sequence: Synthetic oligonucleotide
gcgagggaagagcacaaag

SEQ ID NO: 1900535 - RNA, 19 nt, Artificial Sequence
  Description of Artificial Sequence: Synthetic oligonucleotide
cacgguugagcaccuuaag

SEQ ID NO: 1900536 - RNA, 19 nt, Artificial Sequence
  Description of Artificial Sequence: Synthetic oligonucleotide
gaaccuggagaggugcaac

SEQ ID NO: 1900537 - RNA, 19 nt, Artificial Sequence
  Description of Artificial Sequence: Synthetic oligonucleotide
uucaacaugccagccugau

SEQ ID NO: 1900538 - RNA, 19 nt, Artificial Sequence
  Description of Artificial Sequence: Synthetic oligonucleotide
ugggcgugcacgguugagc

SEQ ID NO: 1900539 - RNA, 19 nt, Artificial Sequence
  Description of Artificial Sequence: Synthetic oligonucleotide
agcaaacagcuuggaaaag

SEQ ID NO: 1900540 - RNA, 19 nt, Artificial Sequence
  Description of Artificial Sequence: Synthetic oligonucleotide
cagauagucccggaacgug

SEQ ID NO: 1900541 - RNA, 19 nt, Artificial Sequence
  Description of Artificial Sequence: Synthetic oligonucleotide
uaaugugguagugcagaua

SEQ ID NO: 1900542 - RNA, 19 nt, Artificial Sequence
  Description of Artificial Sequence: Synthetic oligonucleotide
cauccuuaaacaccgugcu

SEQ ID NO: 1900543 - RNA, 19 nt, Artificial Sequence
  Description of Artificial Sequence: Synthetic oligonucleotide
cacaucgucgucauccuua

SEQ ID NO: 1900544 - RNA, 19 nt, Artificial Sequence
  Description of Artificial Sequence: Synthetic oligonucleotide
ugguguugucucgagcagu

SEQ ID NO: 1900545 - RNA, 19 nt, Artificial Sequence
  Description of Artificial Sequence: Synthetic oligonucleotide
uggagaggugcaacaugaa

SEQ ID NO: 1900546 - RNA, 19 nt, Artificial Sequence
  Description of Artificial Sequence: Synthetic oligonucleotide
aacucccguauacucucuu

SEQ ID NO: 1900547 - RNA, 19 nt, Artificial Sequence
  Description of Artificial Sequence: Synthetic oligonucleotide
gguaaaggacaccaucaaa

SEQ ID NO: 1900548 - RNA, 19 nt, Artificial Sequence
  Description of Artificial Sequence: Synthetic oligonucleotide
aagaaccuggagaggugca

SEQ ID NO: 1900549 - RNA, 19 nt, Artificial Sequence
  Description of Artificial Sequence: Synthetic oligonucleotide
ugaagaccuuuccgaugac

SEQ ID NO: 1900550 - RNA, 19 nt, Artificial Sequence
  Description of Artificial Sequence: Synthetic oligonucleotide
ucgucccgguaauggauga

SEQ ID NO: 1900551 - RNA, 19 nt, Artificial Sequence
  Description of Artificial Sequence: Synthetic oligonucleotide
uugcucgcauucguguaug

SEQ ID NO: 1900552 - RNA, 19 nt, Artificial Sequence
  Description of Artificial Sequence: Synthetic oligonucleotide
gaggugcaacaugaagggc

SEQ ID NO: 1900553 - RNA, 19 nt, Artificial Sequence
  Description of Artificial Sequence: Synthetic oligonucleotide
gguuuaccaggaaacuccc

SEQ ID NO: 1900554 - RNA, 19 nt, Artificial Sequence
  Description of Artificial Sequence: Synthetic oligonucleotide
acagcucguuucugcaggu

SEQ ID NO: 1900555 - RNA, 19 nt, Artificial Sequence
  Description of Artificial Sequence: Synthetic oligonucleotide
uacugugacucugucuuuu

SEQ ID NO: 1900556 - RNA, 19 nt, Artificial Sequence
  Description of Artificial Sequence: Synthetic oligonucleotide
gagcacuuaaugugguagu

SEQ ID NO: 1900557 - RNA, 19 nt, Artificial Sequence
  Description of Artificial Sequence: Synthetic oligonucleotide
auugcaaagcaaacagcuu

SEQ ID NO: 1900558 - RNA, 19 nt, Artificial Sequence
  Description of Artificial Sequence: Synthetic oligonucleotide
guauggcgagggaagagca

SEQ ID NO: 1900559 - RNA, 19 nt, Artificial Sequence
  Description of Artificial Sequence: Synthetic oligonucleotide
uuccaucaacagcgcuucc

SEQ ID NO: 1900560 - RNA, 19 nt, Artificial Sequence
  Description of Artificial Sequence: Synthetic oligonucleotide
gacuacugugacucugucu

SEQ ID NO: 1900561 - RNA, 19 nt, Artificial Sequence
  Description of Artificial Sequence: Synthetic oligonucleotide
agaaucccuuaagaaccug

SEQ ID NO: 1900562 - RNA, 19 nt, Artificial Sequence
  Description of Artificial Sequence: Synthetic oligonucleotide
cucgcauucguguaugaau

SEQ ID NO: 1900563 - RNA, 19 nt, Artificial Sequence
  Description of Artificial Sequence: Synthetic oligonucleotide
aucgucccgguaauggaug

SEQ ID NO: 1900564 - RNA, 19 nt, Artificial Sequence
  Description of Artificial Sequence: Synthetic oligonucleotide
uggcgagggaagagcacaa

SEQ ID NO: 1900565 - RNA, 19 nt, Artificial Sequence
  Description of Artificial Sequence: Synthetic oligonucleotide
aagcguuagcgggaugaaa

SEQ ID NO: 1900566 - RNA, 19 nt, Artificial Sequence
  Description of Artificial Sequence: Synthetic oligonucleotide
uauccugauucuggguuua

SEQ ID NO: 1900567 - RNA, 19 nt, Artificial Sequence
  Description of Artificial Sequence: Synthetic oligonucleotide
gguuauuugccaaacucgu

SEQ ID NO: 1900568 - RNA, 19 nt, Artificial Sequence
  Description of Artificial Sequence: Synthetic oligonucleotide
ucugggcgugcacgguuga

SEQ ID NO: 1900569 - RNA, 19 nt, Artificial Sequence
  Description of Artificial Sequence: Synthetic oligonucleotide
cguauacucucuuuaauaa

SEQ ID NO: 1900570 - RNA, 19 nt, Artificial Sequence
  Description of Artificial Sequence: Synthetic oligonucleotide
ccagccugaugcacaauag

SEQ ID NO: 1900571 - RNA, 19 nt, Artificial Sequence
  Description of Artificial Sequence: Synthetic oligonucleotide
guagcaagcgguccagccu

SEQ ID NO: 1900572 - RNA, 19 nt, Artificial Sequence
  Description of Artificial Sequence: Synthetic oligonucleotide
acucccguauacucucuuu

SEQ ID NO: 1900573 - RNA, 19 nt, Artificial Sequence
  Description of Artificial Sequence: Synthetic oligonucleotide
ugcucgcauucguguauga

SEQ ID NO: 1900574 - RNA, 19 nt, Artificial Sequence
  Description of Artificial Sequence: Synthetic oligonucleotide
auccugauucuggguuuac

SEQ ID NO: 1900575 - RNA, 19 nt, Artificial Sequence
  Description of Artificial Sequence: Synthetic oligonucleotide
ggcuacgauuauccaguag

SEQ ID NO: 1900576 - RNA, 19 nt, Artificial Sequence
  Description of Artificial Sequence: Synthetic oligonucleotide
ggaauuaaguugaucgagu

SEQ ID NO: 1900577 - RNA, 19 nt, Artificial Sequence
  Description of Artificial Sequence: Synthetic oligonucleotide
guuauuugccaaacucgua

SEQ ID NO: 1900578 - RNA, 19 nt, Artificial Sequence
  Description of Artificial Sequence: Synthetic oligonucleotide
cguguaugaauauaggccu

SEQ ID NO: 1900579 - RNA, 19 nt, Artificial Sequence
  Description of Artificial Sequence: Synthetic oligonucleotide
ucucaucgucccgguaaug

SEQ ID NO: 1900580 - RNA, 19 nt, Artificial Sequence
  Description of Artificial Sequence: Synthetic oligonucleotide
agguaguuuugaacuacaa

SEQ ID NO: 1900581 - RNA, 19 nt, Artificial Sequence
  Description of Artificial Sequence: Synthetic oligonucleotide
ucggcaucugggcgugcac

SEQ ID NO: 1900582 - RNA, 19 nt, Artificial Sequence
  Description of Artificial Sequence: Synthetic oligonucleotide
cucccguauacucucuuua

SEQ ID NO: 1900583 - RNA, 19 nt, Artificial Sequence
  Description of Artificial Sequence: Synthetic oligonucleotide
gcgugcacgguugagcacc

SEQ ID NO: 1900584 - RNA, 19 nt, Artificial Sequence
  Description of Artificial Sequence: Synthetic oligonucleotide
gacagaggcaaagcaauuu

SEQ ID NO: 1900585 - RNA, 19 nt, Artificial Sequence
  Description of Artificial Sequence: Synthetic oligonucleotide
gcuaacucauuaccaguaa

SEQ ID NO: 1900586 - RNA, 19 nt, Artificial Sequence
  Description of Artificial Sequence: Synthetic oligonucleotide
gccuuagagcacuuaaugu

SEQ ID NO: 1900587 - RNA, 19 nt, Artificial Sequence
  Description of Artificial Sequence: Synthetic oligonucleotide
cuucaacaugccagccuga

SEQ ID NO: 1900588 - RNA, 19 nt, Artificial Sequence
  Description of Artificial Sequence: Synthetic oligonucleotide
acaccgugcugaagacuac

SEQ ID NO: 1900589 - RNA, 19 nt, Artificial Sequence
  Description of Artificial Sequence: Synthetic oligonucleotide
gguaauggaugaccgcucu

SEQ ID NO: 1900590 - RNA, 19 nt, Artificial Sequence
  Description of Artificial Sequence: Synthetic oligonucleotide
acccacggcagcaucugug

SEQ ID NO: 1900591 - RNA, 19 nt, Artificial Sequence
  Description of Artificial Sequence: Synthetic oligonucleotide
gagaaucccuuaagaaccu

SEQ ID NO: 1900592 - RNA, 19 nt, Artificial Sequence
  Description of Artificial Sequence: Synthetic oligonucleotide
ccuuaagaaccuggagagg

SEQ ID NO: 1900593 - RNA, 19 nt, Artificial Sequence
  Description of Artificial Sequence: Synthetic oligonucleotide
gcaacaugaagggcuacga

SEQ ID NO: 1900594 - RNA, 19 nt, Artificial Sequence
  Description of Artificial Sequence: Synthetic oligonucleotide
ccguauacucucuuuaaua

SEQ ID NO: 1900595 - RNA, 19 nt, Artificial Sequence
  Description of Artificial Sequence: Synthetic oligonucleotide
cuucguccuucuuugaauu

SEQ ID NO: 1900596 - RNA, 19 nt, Artificial Sequence
  Description of Artificial Sequence: Synthetic oligonucleotide
uggaacccaaacggagaau

SEQ ID NO: 1900597 - RNA, 19 nt, Artificial Sequence
  Description of Artificial Sequence: Synthetic oligonucleotide
ccuccucaguucccaagcg

SEQ ID NO: 1900598 - RNA, 19 nt, Artificial Sequence
  Description of Artificial Sequence: Synthetic oligonucleotide
acagcgcuuccuccucagu

SEQ ID NO: 1900599 - RNA, 19 nt, Artificial Sequence
  Description of Artificial Sequence: Synthetic oligonucleotide
cugcagguuauuugccaaa

SEQ ID NO: 1900600 - RNA, 19 nt, Artificial Sequence
  Description of Artificial Sequence: Synthetic oligonucleotide
cacggcagcaucugugucu

SEQ ID NO: 1900601 - RNA, 19 nt, Artificial Sequence
  Description of Artificial Sequence: Synthetic oligonucleotide
aggccuuagagcacuuaau

SEQ ID NO: 1900602 - RNA, 19 nt, Artificial Sequence
  Description of Artificial Sequence: Synthetic oligonucleotide
gaggagguucccugugacu

SEQ ID NO: 1900603 - RNA, 19 nt, Artificial Sequence
  Description of Artificial Sequence: Synthetic oligonucleotide
ugggaacuaugaaguccuu

SEQ ID NO: 1900604 - RNA, 19 nt, Artificial Sequence
  Description of Artificial Sequence: Synthetic oligonucleotide
caccuuaaggaagucagau

SEQ ID NO: 1900605 - RNA, 19 nt, Artificial Sequence
  Description of Artificial Sequence: Synthetic oligonucleotide
gggcgugcacgguugagca

SEQ ID NO: 1900606 - RNA, 19 nt, Artificial Sequence
  Description of Artificial Sequence: Synthetic oligonucleotide
accuuuccgaugaccacau

SEQ ID NO: 1900607 - RNA, 19 nt, Artificial Sequence
  Description of Artificial Sequence: Synthetic oligonucleotide
agaagggaauuaaguugau

SEQ ID NO: 1900608 - RNA, 19 nt, Artificial Sequence
  Description of Artificial Sequence: Synthetic oligonucleotide
ggaaacucccguauacucu

SEQ ID NO: 1900609 - RNA, 19 nt, Artificial Sequence
  Description of Artificial Sequence: Synthetic oligonucleotide
ugucucgagcaguggcauu

SEQ ID NO: 1900610 - RNA, 19 nt, Artificial Sequence
  Description of Artificial Sequence: Synthetic oligonucleotide
ccgugauuguuuucauuuc

SEQ ID NO: 1900611 - RNA, 19 nt, Artificial Sequence
  Description of Artificial Sequence: Synthetic oligonucleotide
guauccugauucuggguuu

SEQ ID NO: 1900612 - RNA, 19 nt, Artificial Sequence
  Description of Artificial Sequence: Synthetic oligonucleotide
agacagaggcaaagcaauu

SEQ ID NO: 1900613 - RNA, 19 nt, Artificial Sequence
  Description of Artificial Sequence: Synthetic oligonucleotide
caguagcaagcgguccagc

SEQ ID NO: 1900614 - RNA, 19 nt, Artificial Sequence
  Description of Artificial Sequence: Synthetic oligonucleotide
gcgggaugaaaaugucuuc

SEQ ID NO: 1900615 - RNA, 19 nt, Artificial Sequence
  Description of Artificial Sequence: Synthetic oligonucleotide
cccgguaauggaugaccgc

SEQ ID NO: 1900616 - RNA, 19 nt, Artificial Sequence
  Description of Artificial Sequence: Synthetic oligonucleotide
gaccgcucuguucucuccu

SEQ ID NO: 1900617 - RNA, 19 nt, Artificial Sequence
  Description of Artificial Sequence: Synthetic oligonucleotide
gaugaccgcucuguucucu

SEQ ID NO: 1900618 - RNA, 19 nt, Artificial Sequence
  Description of Artificial Sequence: Synthetic oligonucleotide
ccaagcguuagcgggauga

SEQ ID NO: 1900619 - RNA, 19 nt, Artificial Sequence
  Description of Artificial Sequence: Synthetic oligonucleotide
ucccaagcguuagcgggau

SEQ ID NO: 1900620 - RNA, 19 nt, Artificial Sequence
  Description of Artificial Sequence: Synthetic oligonucleotide
cugaaguuccuuguagaau

SEQ ID NO: 1900621 - RNA, 19 nt, Artificial Sequence
  Description of Artificial Sequence: Synthetic oligonucleotide
caucgucccgguaauggau

SEQ ID NO: 1900622 - RNA, 19 nt, Artificial Sequence
  Description of Artificial Sequence: Synthetic oligonucleotide
agcaagcgguccagccuuc

SEQ ID NO: 1900623 - RNA, 19 nt, Artificial Sequence
  Description of Artificial Sequence: Synthetic oligonucleotide
auaggccuuagagcacuua

SEQ ID NO: 1900624 - RNA, 19 nt, Artificial Sequence
  Description of Artificial Sequence: Synthetic oligonucleotide
caagcgguccagccuucca

SEQ ID NO: 1900625 - RNA, 19 nt, Artificial Sequence
  Description of Artificial Sequence: Synthetic oligonucleotide
gcaugaagaccuuuccgau

SEQ ID NO: 1900626 - RNA, 19 nt, Artificial Sequence
  Description of Artificial Sequence: Synthetic oligonucleotide
gucccggaacguguggauc

SEQ ID NO: 1900627 - RNA, 19 nt, Artificial Sequence
  Description of Artificial Sequence: Synthetic oligonucleotide
gcugaagacuacugugacu

SEQ ID NO: 1900628 - RNA, 19 nt, Artificial Sequence
  Description of Artificial Sequence: Synthetic oligonucleotide
cccgugauuguuuucauuu

SEQ ID NO: 1900629 - RNA, 19 nt, Artificial Sequence
  Description of Artificial Sequence: Synthetic oligonucleotide
cuggguuuaccaggaaacu

SEQ ID NO: 1900630 - RNA, 19 nt, Artificial Sequence
  Description of Artificial Sequence: Synthetic oligonucleotide
cguuagcgggaugaaaaug

SEQ ID NO: 1900631 - RNA, 19 nt, Artificial Sequence
  Description of Artificial Sequence: Synthetic oligonucleotide
gcauuaucugcuaacucau

SEQ ID NO: 1900632 - RNA, 19 nt, Artificial Sequence
  Description of Artificial Sequence: Synthetic oligonucleotide
ggagguucccugugacuaa

SEQ ID NO: 1900633 - RNA, 19 nt, Artificial Sequence
  Description of Artificial Sequence: Synthetic oligonucleotide
caggaaacucccguauacu

SEQ ID NO: 1900634 - RNA, 19 nt, Artificial Sequence
  Description of Artificial Sequence: Synthetic oligonucleotide
gucucaucgucccgguaau

SEQ ID NO: 1900635 - RNA, 19 nt, Artificial Sequence
  Description of Artificial Sequence: Synthetic oligonucleotide
cugggcgugcacgguugag

SEQ ID NO: 1900636 - RNA, 19 nt, Artificial Sequence
  Description of Artificial Sequence: Synthetic oligonucleotide
gcauucguguaugaauaua

SEQ ID NO: 1900637 - RNA, 19 nt, Artificial Sequence
  Description of Artificial Sequence: Synthetic oligonucleotide
gcagguuauuugccaaacu

SEQ ID NO: 1900638 - RNA, 19 nt, Artificial Sequence
  Description of Artificial Sequence: Synthetic oligonucleotide
caagcguuagcgggaugaa

SEQ ID NO: 1900639 - RNA, 19 nt, Artificial Sequence
  Description of Artificial Sequence: Synthetic oligonucleotide
guugaucgaguggaauuuu

SEQ ID NO: 1900640 - RNA, 19 nt, Artificial Sequence
  Description of Artificial Sequence: Synthetic oligonucleotide
gcgguccagccuuccauca

SEQ ID NO: 1900641 - RNA, 19 nt, Artificial Sequence
  Description of Artificial Sequence: Synthetic oligonucleotide
cgugauuguuuucauuucu

SEQ ID NO: 1900642 - RNA, 19 nt, Artificial Sequence
  Description of Artificial Sequence: Synthetic oligonucleotide
guguaugaauauaggccuu

SEQ ID NO: 1900643 - RNA, 19 nt, Artificial Sequence
  Description of Artificial Sequence: Synthetic oligonucleotide
cgguaauggaugaccgcuc

SEQ ID NO: 1900644 - RNA, 19 nt, Artificial Sequence
  Description of Artificial Sequence: Synthetic oligonucleotide
ggcgugcacgguugagcac

SEQ ID NO: 1900645 - RNA, 19 nt, Artificial Sequence
  Description of Artificial Sequence: Synthetic oligonucleotide
ccauuaggauuugaaauau

SEQ ID NO: 1900646 - RNA, 19 nt, Artificial Sequence
  Description of Artificial Sequence: Synthetic oligonucleotide
ccaaacggagaaucccuua

SEQ ID NO: 1900647 - RNA, 19 nt, Artificial Sequence
  Description of Artificial Sequence: Synthetic oligonucleotide
gcacgguugagcaccuuaa

SEQ ID NO: 1900648 - RNA, 19 nt, Artificial Sequence
  Description of Artificial Sequence: Synthetic oligonucleotide
ggaugaccgcucuguucuc

SEQ ID NO: 1900649 - RNA, 19 nt, Artificial Sequence
  Description of Artificial Sequence: Synthetic oligonucleotide
gccugaugcacaauagaau

SEQ ID NO: 1900650 - RNA, 19 nt, Artificial Sequence
  Description of Artificial Sequence: Synthetic oligonucleotide
agguucccugugacuaaaa

SEQ ID NO: 1900651 - RNA, 19 nt, Artificial Sequence
  Description of Artificial Sequence: Synthetic oligonucleotide
acguguggaucagguugau

SEQ ID NO: 1900652 - RNA, 19 nt, Artificial Sequence
  Description of Artificial Sequence: Synthetic oligonucleotide
ccgguaauggaugaccgcu

SEQ ID NO: 1900653 - RNA, 19 nt, Artificial Sequence
  Description of Artificial Sequence: Synthetic oligonucleotide
gcagauagucccggaacgu

SEQ ID NO: 1900654 - RNA, 19 nt, Artificial Sequence
  Description of Artificial Sequence: Synthetic oligonucleotide
gcaagcgguccagccuucc

SEQ ID NO: 1900655 - RNA, 19 nt, Artificial Sequence
  Description of Artificial Sequence: Synthetic oligonucleotide
ggaacguguggaucagguu

SEQ ID NO: 1900656 - RNA, 19 nt, Artificial Sequence
  Description of Artificial Sequence: Synthetic oligonucleotide
gcguuagcgggaugaaaau

SEQ ID NO: 1900657 - RNA, 19 nt, Artificial Sequence
  Description of Artificial Sequence: Synthetic oligonucleotide
gcucgcauucguguaugaa

SEQ ID NO: 1900658 - RNA, 19 nt, Artificial Sequence
  Description of Artificial Sequence: Synthetic oligonucleotide
gcccucuucuuggaacuga

SEQ ID NO: 1900659 - RNA, 19 nt, Artificial Sequence
  Description of Artificial Sequence: Synthetic oligonucleotide
caccgugcugaagacuacu

SEQ ID NO: 1900660 - RNA, 19 nt, Artificial Sequence
  Description of Artificial Sequence: Synthetic oligonucleotide
caucugggcgugcacgguu

SEQ ID NO: 1900661 - RNA, 19 nt, Artificial Sequence
  Description of Artificial Sequence: Synthetic oligonucleotide
gggcuacgauuauccagua

SEQ ID NO: 1900662 - RNA, 19 nt, Artificial Sequence
  Description of Artificial Sequence: Synthetic oligonucleotide
cccguauacucucuuuaau

SEQ ID NO: 1900663 - RNA, 19 nt, Artificial Sequence
  Description of Artificial Sequence: Synthetic oligonucleotide
cggaacguguggaucaggu

SEQ ID NO: 1900664 - RNA, 19 nt, Artificial Sequence
  Description of Artificial Sequence: Synthetic oligonucleotide
cguguggaucagguugaug

SEQ ID NO: 1900665 - RNA, 19 nt, Artificial Sequence
  Description of Artificial Sequence: Synthetic oligonucleotide
ggcgagggaagagcacaaa

SEQ ID NO: 1900666 - RNA, 19 nt, Artificial Sequence
  Description of Artificial Sequence: Synthetic oligonucleotide
gcucuagaggagguucccu

SEQ ID NO: 1900667 - RNA, 19 nt, Artificial Sequence
  Description of Artificial Sequence: Synthetic oligonucleotide
cucguuucugcagguuauu

SEQ ID NO: 1900668 - RNA, 19 nt, Artificial Sequence
  Description of Artificial Sequence: Synthetic oligonucleotide
ccuuuccgaugaccacauc

SEQ ID NO: 1900669 - RNA, 19 nt, Artificial Sequence
  Description of Artificial Sequence: Synthetic oligonucleotide
ccuugcaagcacagcucgu

SEQ ID NO: 1900670 - RNA, 19 nt, Artificial Sequence
  Description of Artificial Sequence: Synthetic oligonucleotide
cccaagcguuagcgggaug

SEQ ID NO: 1900671 - RNA, 19 nt, Artificial Sequence
  Description of Artificial Sequence: Synthetic oligonucleotide
cccaaacggagaaucccuu

SEQ ID NO: 1900672 - RNA, 19 nt, Artificial Sequence
  Description of Artificial Sequence: Synthetic oligonucleotide
cgucccgguaauggaugac

SEQ ID NO: 1900673 - RNA, 19 nt, Artificial Sequence
  Description of Artificial Sequence: Synthetic oligonucleotide
cgcauucguguaugaauau

SEQ ID NO: 1900674 - RNA, 19 nt, Artificial Sequence
  Description of Artificial Sequence: Synthetic oligonucleotide
cagcucguuucugcagguu

SEQ ID NO: 1900675 - RNA, 19 nt, Artificial Sequence
  Description of Artificial Sequence: Synthetic oligonucleotide
ccccgugauuguuuucauu

SEQ ID NO: 1900676 - RNA, 19 nt, Artificial Sequence
  Description of Artificial Sequence: Synthetic oligonucleotide
gugcacgguugagcaccuu

SEQ ID NO: 1900677 - RNA, 19 nt, Artificial Sequence
  Description of Artificial Sequence: Synthetic oligonucleotide
ugaaauucagguuagagca

SEQ ID NO: 1900678 - RNA, 19 nt, Artificial Sequence
  Description of Artificial Sequence: Synthetic oligonucleotide
aauacuugaaucugugaac

SEQ ID NO: 1900679 - RNA, 19 nt, Artificial Sequence
  Description of Artificial Sequence: Synthetic oligonucleotide
uugaaaaucaaguugauuc

SEQ ID NO: 1900680 - RNA, 19 nt, Artificial Sequence
  Description of Artificial Sequence: Synthetic oligonucleotide
ugaguuacuggccacaugg

SEQ ID NO: 1900681 - RNA, 19 nt, Artificial Sequence
  Description of Artificial Sequence: Synthetic oligonucleotide
ugauucaacauucugaaac

SEQ ID NO: 1900682 - RNA, 19 nt, Artificial Sequence
  Description of Artificial Sequence: Synthetic oligonucleotide
augaaauucagguuagagc

SEQ ID NO: 1900683 - RNA, 19 nt, Artificial Sequence
  Description of Artificial Sequence: Synthetic oligonucleotide
uagaaaagaggucagagug

SEQ ID NO: 1900684 - RNA, 19 nt, Artificial Sequence
  Description of Artificial Sequence: Synthetic oligonucleotide
uuucauuccagguugaggc

SEQ ID NO: 1900685 - RNA, 19 nt, Artificial Sequence
  Description of Artificial Sequence: Synthetic oligonucleotide
uguuaagacaacauaauuc

SEQ ID NO: 1900686 - RNA, 19 nt, Artificial Sequence
  Description of Artificial Sequence: Synthetic oligonucleotide
caaacucagaauuaaaagc

SEQ ID NO: 1900687 - RNA, 19 nt, Artificial Sequence
  Description of Artificial Sequence: Synthetic oligonucleotide
uggggaacugaacagaugg

SEQ ID NO: 1900688 - RNA, 19 nt, Artificial Sequence
  Description of Artificial Sequence: Synthetic oligonucleotide
uucaaugacauccacagaa

SEQ ID NO: 1900689 - RNA, 19 nt, Artificial Sequence
  Description of Artificial Sequence: Synthetic oligonucleotide
aguaguauugaguuacugg

SEQ ID NO: 1900690 - RNA, 19 nt, Artificial Sequence
  Description of Artificial Sequence: Synthetic oligonucleotide
aauggcaacugcuuguuag

SEQ ID NO: 1900691 - RNA, 19 nt, Artificial Sequence
  Description of Artificial Sequence: Synthetic oligonucleotide
auauuuugucuucagcacc

SEQ ID NO: 1900692 - RNA, 19 nt, Artificial Sequence
  Description of Artificial Sequence: Synthetic oligonucleotide
auuaauguaucaucauuac

SEQ ID NO: 1900693 - RNA, 19 nt, Artificial Sequence
  Description of Artificial Sequence: Synthetic oligonucleotide
auaggaaggacuuugccuc

SEQ ID NO: 1900694 - RNA, 19 nt, Artificial Sequence
  Description of Artificial Sequence: Synthetic oligonucleotide
uuauuaaugaagauccaga

SEQ ID NO: 1900695 - RNA, 19 nt, Artificial Sequence
  Description of Artificial Sequence: Synthetic oligonucleotide
uauguuuugaaaucagagc

SEQ ID NO: 1900696 - RNA, 19 nt, Artificial Sequence
  Description of Artificial Sequence: Synthetic oligonucleotide
uguaguaucgauacuguga

SEQ ID NO: 1900697 - RNA, 19 nt, Artificial Sequence
  Description of Artificial Sequence: Synthetic oligonucleotide
gaaauaacuagcuggaauc

SEQ ID NO: 1900698 - RNA, 19 nt, Artificial Sequence
  Description of Artificial Sequence: Synthetic oligonucleotide
uggucaauuaaacugucag

SEQ ID NO: 1900699 - RNA, 19 nt, Artificial Sequence
  Description of Artificial Sequence: Synthetic oligonucleotide
auuaaugaagauccagagg

SEQ ID NO: 1900700 - RNA, 19 nt, Artificial Sequence
  Description of Artificial Sequence: Synthetic oligonucleotide
guaguauugaguuacuggc

SEQ ID NO: 1900701 - RNA, 19 nt, Artificial Sequence
  Description of Artificial Sequence: Synthetic oligonucleotide
aaauucagguuagagcagc

SEQ ID NO: 1900702 - RNA, 19 nt, Artificial Sequence
  Description of Artificial Sequence: Synthetic oligonucleotide
aauuccuugucaugauuac

SEQ ID NO: 1900703 - RNA, 19 nt, Artificial Sequence
  Description of Artificial Sequence: Synthetic oligonucleotide
ugaaguuucaauauuucau

SEQ ID NO: 1900704 - RNA, 19 nt, Artificial Sequence
  Description of Artificial Sequence: Synthetic oligonucleotide
aaaagaucuccacugggug

SEQ ID NO: 1900705 - RNA, 19 nt, Artificial Sequence
  Description of Artificial Sequence: Synthetic oligonucleotide
aguaucgauacugugauag

SEQ ID NO: 1900706 - RNA, 19 nt, Artificial Sequence
  Description of Artificial Sequence: Synthetic oligonucleotide
uuugccucugucuuuaaag

SEQ ID NO: 1900707 - RNA, 19 nt, Artificial Sequence
  Description of Artificial Sequence: Synthetic oligonucleotide
aaucagagccuuuugaaaa

SEQ ID NO: 1900708 - RNA, 19 nt, Artificial Sequence
  Description of Artificial Sequence: Synthetic oligonucleotide
uuccuggucaauuaaacug

SEQ ID NO: 1900709 - RNA, 19 nt, Artificial Sequence
  Description of Artificial Sequence: Synthetic oligonucleotide
aaauaacuagcuggaaucg

SEQ ID NO: 1900710 - RNA, 19 nt, Artificial Sequence
  Description of Artificial Sequence: Synthetic oligonucleotide
agguguguaguaucgauac

SEQ ID NO: 1900711 - RNA, 19 nt, Artificial Sequence
  Description of Artificial Sequence: Synthetic oligonucleotide
aagacaacauaauucucug

SEQ ID NO: 1900712 - RNA, 19 nt, Artificial Sequence
  Description of Artificial Sequence: Synthetic oligonucleotide
uaaacugucagaaauucuu

SEQ ID NO: 1900713 - RNA, 19 nt, Artificial Sequence
  Description of Artificial Sequence: Synthetic oligonucleotide
ugucuuggaaauaacuagc

SEQ ID NO: 1900714 - RNA, 19 nt, Artificial Sequence
  Description of Artificial Sequence: Synthetic oligonucleotide
aagguuuguccuucuaagg

SEQ ID NO: 1900715 - RNA, 19 nt, Artificial Sequence
  Description of Artificial Sequence: Synthetic oligonucleotide
uggauuauuuucauuccag

SEQ ID NO: 1900716 - RNA, 19 nt, Artificial Sequence
  Description of Artificial Sequence: Synthetic oligonucleotide
agucucaaccuuuucauag

SEQ ID NO: 1900717 - RNA, 19 nt, Artificial Sequence
  Description of Artificial Sequence: Synthetic oligonucleotide
acaccugaauacuugaauc

SEQ ID NO: 1900718 - RNA, 19 nt, Artificial Sequence
  Description of Artificial Sequence: Synthetic oligonucleotide
aagagaacaucuugucuuc

SEQ ID NO: 1900719 - RNA, 19 nt, Artificial Sequence
  Description of Artificial Sequence: Synthetic oligonucleotide
uuccuugucaugauuacug

SEQ ID NO: 1900720 - RNA, 19 nt, Artificial Sequence
  Description of Artificial Sequence: Synthetic oligonucleotide
uucaauauuucaucaguca

SEQ ID NO: 1900721 - RNA, 19 nt, Artificial Sequence
  Description of Artificial Sequence: Synthetic oligonucleotide
gauauuuugucuucagcac

SEQ ID NO: 1900722 - RNA, 19 nt, Artificial Sequence
  Description of Artificial Sequence: Synthetic oligonucleotide
aaccuuuucauagucacug

SEQ ID NO: 1900723 - RNA, 19 nt, Artificial Sequence
  Description of Artificial Sequence: Synthetic oligonucleotide
uuuagaguuaauuccuugu

SEQ ID NO: 1900724 - RNA, 19 nt, Artificial Sequence
  Description of Artificial Sequence: Synthetic oligonucleotide
aaaaucaaguugauucaac

SEQ ID NO: 1900725 - RNA, 19 nt, Artificial Sequence
  Description of Artificial Sequence: Synthetic oligonucleotide
ucagauaugaaguuucaau

SEQ ID NO: 1900726 - RNA, 19 nt, Artificial Sequence
  Description of Artificial Sequence: Synthetic oligonucleotide
gucaccuucaaugacaucc

SEQ ID NO: 1900727 - RNA, 19 nt, Artificial Sequence
  Description of Artificial Sequence: Synthetic oligonucleotide
uuccaaaagaucuccacug

SEQ ID NO: 1900728 - RNA, 19 nt, Artificial Sequence
  Description of Artificial Sequence: Synthetic oligonucleotide
aaaggagauauuuugucuu

SEQ ID NO: 1900729 - RNA, 19 nt, Artificial Sequence
  Description of Artificial Sequence: Synthetic oligonucleotide
uuuguguucacuucugagu

SEQ ID NO: 1900730 - RNA, 19 nt, Artificial Sequence
  Description of Artificial Sequence: Synthetic oligonucleotide
ucaggauagauuuuacugu

SEQ ID NO: 1900731 - RNA, 19 nt, Artificial Sequence
  Description of Artificial Sequence: Synthetic oligonucleotide
uuccaugaaauucagguua

SEQ ID NO: 1900732 - RNA, 19 nt, Artificial Sequence
  Description of Artificial Sequence: Synthetic oligonucleotide
ucaaugcucauuuccauga

SEQ ID NO: 1900733 - RNA, 19 nt, Artificial Sequence
  Description of Artificial Sequence: Synthetic oligonucleotide
aacuagcuggaaucggugg

SEQ ID NO: 1900734 - RNA, 19 nt, Artificial Sequence
  Description of Artificial Sequence: Synthetic oligonucleotide
aauaacuagcuggaaucgg

SEQ ID NO: 1900735 - RNA, 19 nt, Artificial Sequence
  Description of Artificial Sequence: Synthetic oligonucleotide
guauguuuugaaaucagag

SEQ ID NO: 1900736 - RNA, 19 nt, Artificial Sequence
  Description of Artificial Sequence: Synthetic oligonucleotide
aguuucaauauuucaucag

SEQ ID NO: 1900737 - RNA, 19 nt, Artificial Sequence
  Description of Artificial Sequence: Synthetic oligonucleotide
auuuuacugucugagaaag

SEQ ID NO: 1900738 - RNA, 19 nt, Artificial Sequence
  Description of Artificial Sequence: Synthetic oligonucleotide
cagaguguccuuuuggagg

SEQ ID NO: 1900739 - RNA, 19 nt, Artificial Sequence
  Description of Artificial Sequence: Synthetic oligonucleotide
guuaagacaacauaauucu

SEQ ID NO: 1900740 - RNA, 19 nt, Artificial Sequence
  Description of Artificial Sequence: Synthetic oligonucleotide
uuaauguaucaucauuacu

SEQ ID NO: 1900741 - RNA, 19 nt, Artificial Sequence
  Description of Artificial Sequence: Synthetic oligonucleotide
agaggucagucuucaaugc

SEQ ID NO: 1900742 - RNA, 19 nt, Artificial Sequence
  Description of Artificial Sequence: Synthetic oligonucleotide
uagaguuaauuccuuguca

SEQ ID NO: 1900743 - RNA, 19 nt, Artificial Sequence
  Description of Artificial Sequence: Synthetic oligonucleotide
ucuugcugaauuaauguau

SEQ ID NO: 1900744 - RNA, 19 nt, Artificial Sequence
  Description of Artificial Sequence: Synthetic oligonucleotide
gugucuuggaaauaacuag

SEQ ID NO: 1900745 - RNA, 19 nt, Artificial Sequence
  Description of Artificial Sequence: Synthetic oligonucleotide
aaggagaaaaguaguauug

SEQ ID NO: 1900746 - RNA, 19 nt, Artificial Sequence
  Description of Artificial Sequence: Synthetic oligonucleotide
aaguugauucaacauucug

SEQ ID NO: 1900747 - RNA, 19 nt, Artificial Sequence
  Description of Artificial Sequence: Synthetic oligonucleotide
aaucuugucccauccuaag

SEQ ID NO: 1900748 - RNA, 19 nt, Artificial Sequence
  Description of Artificial Sequence: Synthetic oligonucleotide
aucauugaccuguugaacu

SEQ ID NO: 1900749 - RNA, 19 nt, Artificial Sequence
  Description of Artificial Sequence: Synthetic oligonucleotide
aaaucagagccuuuugaaa

SEQ ID NO: 1900750 - RNA, 19 nt, Artificial Sequence
  Description of Artificial Sequence: Synthetic oligonucleotide
ugugauaggaaggacuuug

SEQ ID NO: 1900751 - RNA, 19 nt, Artificial Sequence
  Description of Artificial Sequence: Synthetic oligonucleotide
aguauugaguuacuggcca

SEQ ID NO: 1900752 - RNA, 19 nt, Artificial Sequence
  Description of Artificial Sequence: Synthetic oligonucleotide
ucauccuucggcauagaug

SEQ ID NO: 1900753 - RNA, 19 nt, Artificial Sequence
  Description of Artificial Sequence: Synthetic oligonucleotide
uucagguuagagcagcucu

SEQ ID NO: 1900754 - RNA, 19 nt, Artificial Sequence
  Description of Artificial Sequence: Synthetic oligonucleotide
cauccuucggcauagauga

SEQ ID NO: 1900755 - RNA, 19 nt, Artificial Sequence
  Description of Artificial Sequence: Synthetic oligonucleotide
caacauaauucucuggaag

SEQ ID NO: 1900756 - RNA, 19 nt, Artificial Sequence
  Description of Artificial Sequence: Synthetic oligonucleotide
uucaguauguuuugaaauc

SEQ ID NO: 1900757 - RNA, 19 nt, Artificial Sequence
  Description of Artificial Sequence: Synthetic oligonucleotide
uuacuuacaaguucaguau

SEQ ID NO: 1900758 - RNA, 19 nt, Artificial Sequence
  Description of Artificial Sequence: Synthetic oligonucleotide
uuagaguuaauuccuuguc

SEQ ID NO: 1900759 - RNA, 19 nt, Artificial Sequence
  Description of Artificial Sequence: Synthetic oligonucleotide
agauaugaaguuucaauau

SEQ ID NO: 1900760 - RNA, 19 nt, Artificial Sequence
  Description of Artificial Sequence: Synthetic oligonucleotide
ugaaucugugaacagguau

SEQ ID NO: 1900761 - RNA, 19 nt, Artificial Sequence
  Description of Artificial Sequence: Synthetic oligonucleotide
acucagaauuaaaagcugc

SEQ ID NO: 1900762 - RNA, 19 nt, Artificial Sequence
  Description of Artificial Sequence: Synthetic oligonucleotide
uuguguucacuucugaguc

SEQ ID NO: 1900763 - RNA, 19 nt, Artificial Sequence
  Description of Artificial Sequence: Synthetic oligonucleotide
acagugauguguuaagaca

SEQ ID NO: 1900764 - RNA, 19 nt, Artificial Sequence
  Description of Artificial Sequence: Synthetic oligonucleotide
cuuggauuauuuucauucc

SEQ ID NO: 1900765 - RNA, 19 nt, Artificial Sequence
  Description of Artificial Sequence: Synthetic oligonucleotide
ugucugagaaaguugugug

SEQ ID NO: 1900766 - RNA, 19 nt, Artificial Sequence
  Description of Artificial Sequence: Synthetic oligonucleotide
uuuucauuccagguugagg

SEQ ID NO: 1900767 - RNA, 19 nt, Artificial Sequence
  Description of Artificial Sequence: Synthetic oligonucleotide
aaagaucuccacugggugu

SEQ ID NO: 1900768 - RNA, 19 nt, Artificial Sequence
  Description of Artificial Sequence: Synthetic oligonucleotide
uucggcauagaugacaaca

SEQ ID NO: 1900769 - RNA, 19 nt, Artificial Sequence
  Description of Artificial Sequence: Synthetic oligonucleotide
ccaucuuuaaucuuguccc

SEQ ID NO: 1900770 - RNA, 19 nt, Artificial Sequence
  Description of Artificial Sequence: Synthetic oligonucleotide
uuggauuauuuucauucca

SEQ ID NO: 1900771 - RNA, 19 nt, Artificial Sequence
  Description of Artificial Sequence: Synthetic oligonucleotide
uggaguauuuauuaaugaa

SEQ ID NO: 1900772 - RNA, 19 nt, Artificial Sequence
  Description of Artificial Sequence: Synthetic oligonucleotide
cuuuaaucuugucccaucc

SEQ ID NO: 1900773 - RNA, 19 nt, Artificial Sequence
  Description of Artificial Sequence: Synthetic oligonucleotide
uagaugacaacauguccag

SEQ ID NO: 1900774 - RNA, 19 nt, Artificial Sequence
  Description of Artificial Sequence: Synthetic oligonucleotide
cuuuaaagugcguggagug

SEQ ID NO: 1900775 - RNA, 19 nt, Artificial Sequence
  Description of Artificial Sequence: Synthetic oligonucleotide
ucgauacugugauaggaag

SEQ ID NO: 1900776 - RNA, 19 nt, Artificial Sequence
  Description of Artificial Sequence: Synthetic oligonucleotide
aguuaauuccuugucauga

SEQ ID NO: 1900777 - RNA, 19 nt, Artificial Sequence
  Description of Artificial Sequence: Synthetic oligonucleotide
uaguauugaguuacuggcc

SEQ ID NO: 1900778 - RNA, 19 nt, Artificial Sequence
  Description of Artificial Sequence: Synthetic oligonucleotide
agguaaagagaacaucuug

SEQ ID NO: 1900779 - RNA, 19 nt, Artificial Sequence
  Description of Artificial Sequence: Synthetic oligonucleotide
agaaaagaggucagagugc

SEQ ID NO: 1900780 - RNA, 19 nt, Artificial Sequence
  Description of Artificial Sequence: Synthetic oligonucleotide
acuagcuggaaucgguggg

SEQ ID NO: 1900781 - RNA, 19 nt, Artificial Sequence
  Description of Artificial Sequence: Synthetic oligonucleotide
agaauuaaaagcugcucaa

SEQ ID NO: 1900782 - RNA, 19 nt, Artificial Sequence
  Description of Artificial Sequence: Synthetic oligonucleotide
ugauaggaaggacuuugcc

SEQ ID NO: 1900783 - RNA, 19 nt, Artificial Sequence
  Description of Artificial Sequence: Synthetic oligonucleotide
gagauauuuugucuucagc

SEQ ID NO: 1900784 - RNA, 19 nt, Artificial Sequence
  Description of Artificial Sequence: Synthetic oligonucleotide
uuaaacugucagaaauucu

SEQ ID NO: 1900785 - RNA, 19 nt, Artificial Sequence
  Description of Artificial Sequence: Synthetic oligonucleotide
uccuggucaauuaaacugu

SEQ ID NO: 1900786 - RNA, 19 nt, Artificial Sequence
  Description of Artificial Sequence: Synthetic oligonucleotide
aaggacuuugccucugucu

SEQ ID NO: 1900787 - RNA, 19 nt, Artificial Sequence
  Description of Artificial Sequence: Synthetic oligonucleotide
gacagugauguguuaagac

SEQ ID NO: 1900788 - RNA, 19 nt, Artificial Sequence
  Description of Artificial Sequence: Synthetic oligonucleotide
guaaaggagauauuuuguc

SEQ ID NO: 1900789 - RNA, 19 nt, Artificial Sequence
  Description of Artificial Sequence: Synthetic oligonucleotide
ucugagaaaguugugugga

SEQ ID NO: 1900790 - RNA, 19 nt, Artificial Sequence
  Description of Artificial Sequence: Synthetic oligonucleotide
uuuacugucugagaaaguu

SEQ ID NO: 1900791 - RNA, 19 nt, Artificial Sequence
  Description of Artificial Sequence: Synthetic oligonucleotide
uuguuagaaaagaggucag

SEQ ID NO: 1900792 - RNA, 19 nt, Artificial Sequence
  Description of Artificial Sequence: Synthetic oligonucleotide
agaguuaauuccuugucau

SEQ ID NO: 1900793 - RNA, 19 nt, Artificial Sequence
  Description of Artificial Sequence: Synthetic oligonucleotide
aauucagucuggguuucgg

SEQ ID NO: 1900794 - RNA, 19 nt, Artificial Sequence
  Description of Artificial Sequence: Synthetic oligonucleotide
gauacugugauaggaagga

SEQ ID NO: 1900795 - RNA, 19 nt, Artificial Sequence
  Description of Artificial Sequence: Synthetic oligonucleotide
agugaauggcaacugcuug

SEQ ID NO: 1900796 - RNA, 19 nt, Artificial Sequence
  Description of Artificial Sequence: Synthetic oligonucleotide
aaggguaaaggagauauuu

SEQ ID NO: 1900797 - RNA, 19 nt, Artificial Sequence
  Description of Artificial Sequence: Synthetic oligonucleotide
uguguaguaucgauacugu

SEQ ID NO: 1900798 - RNA, 19 nt, Artificial Sequence
  Description of Artificial Sequence: Synthetic oligonucleotide
uccuucuaaggguaaagga

SEQ ID NO: 1900799 - RNA, 19 nt, Artificial Sequence
  Description of Artificial Sequence: Synthetic oligonucleotide
uugucuucauccuucggca

SEQ ID NO: 1900800 - RNA, 19 nt, Artificial Sequence
  Description of Artificial Sequence: Synthetic oligonucleotide
gaacugaacagauggggac

SEQ ID NO: 1900801 - RNA, 19 nt, Artificial Sequence
  Description of Artificial Sequence: Synthetic oligonucleotide
ucuuuuggcagguguguag

SEQ ID NO: 1900802 - RNA, 19 nt, Artificial Sequence
  Description of Artificial Sequence: Synthetic oligonucleotide
aguugauucaacauucuga

SEQ ID NO: 1900803 - RNA, 19 nt, Artificial Sequence
  Description of Artificial Sequence: Synthetic oligonucleotide
guguggagagcucacagag

SEQ ID NO: 1900804 - RNA, 19 nt, Artificial Sequence
  Description of Artificial Sequence: Synthetic oligonucleotide
uuguguggagagcucacag

SEQ ID NO: 1900805 - RNA, 19 nt, Artificial Sequence
  Description of Artificial Sequence: Synthetic oligonucleotide
caugaaauucagguuagag

SEQ ID NO: 1900806 - RNA, 19 nt, Artificial Sequence
  Description of Artificial Sequence: Synthetic oligonucleotide
aguauuuauuaaugaagau

SEQ ID NO: 1900807 - RNA, 19 nt, Artificial Sequence
  Description of Artificial Sequence: Synthetic oligonucleotide
ucaucauugaccuguugaa

SEQ ID NO: 1900808 - RNA, 19 nt, Artificial Sequence
  Description of Artificial Sequence: Synthetic oligonucleotide
ugaauuaauguaucaucau

SEQ ID NO: 1900809 - RNA, 19 nt, Artificial Sequence
  Description of Artificial Sequence: Synthetic oligonucleotide
uccucagauaugaaguuuc

SEQ ID NO: 1900810 - RNA, 19 nt, Artificial Sequence
  Description of Artificial Sequence: Synthetic oligonucleotide
auggaguauuuauuaauga

SEQ ID NO: 1900811 - RNA, 19 nt, Artificial Sequence
  Description of Artificial Sequence: Synthetic oligonucleotide
uuugaguuccuugucucag

SEQ ID NO: 1900812 - RNA, 19 nt, Artificial Sequence
  Description of Artificial Sequence: Synthetic oligonucleotide
aaagaggucagagugcuuu

SEQ ID NO: 1900813 - RNA, 19 nt, Artificial Sequence
  Description of Artificial Sequence: Synthetic oligonucleotide
uuaggugccugcuuugugu

SEQ ID NO: 1900814 - RNA, 19 nt, Artificial Sequence
  Description of Artificial Sequence: Synthetic oligonucleotide
cagaauuaaaagcugcuca

SEQ ID NO: 1900815 - RNA, 19 nt, Artificial Sequence
  Description of Artificial Sequence: Synthetic oligonucleotide
aacugcuuguuagaaaaga

SEQ ID NO: 1900816 - RNA, 19 nt, Artificial Sequence
  Description of Artificial Sequence: Synthetic oligonucleotide
uaucgauacugugauagga

SEQ ID NO: 1900817 - RNA, 19 nt, Artificial Sequence
  Description of Artificial Sequence: Synthetic oligonucleotide
cuucuaaggguaaaggaga

SEQ ID NO: 1900818 - RNA, 19 nt, Artificial Sequence
  Description of Artificial Sequence: Synthetic oligonucleotide
uuaagacaacauaauucuc

SEQ ID NO: 1900819 - RNA, 19 nt, Artificial Sequence
  Description of Artificial Sequence: Synthetic oligonucleotide
aucuugucccauccuaagg

SEQ ID NO: 1900820 - RNA, 19 nt, Artificial Sequence
  Description of Artificial Sequence: Synthetic oligonucleotide
uucugaguccguuugaguu

SEQ ID NO: 1900821 - RNA, 19 nt, Artificial Sequence
  Description of Artificial Sequence: Synthetic oligonucleotide
aaaauucaccagguaaaga

SEQ ID NO: 1900822 - RNA, 19 nt, Artificial Sequence
  Description of Artificial Sequence: Synthetic oligonucleotide
acauggaguauuuauuaau

SEQ ID NO: 1900823 - RNA, 19 nt, Artificial Sequence
  Description of Artificial Sequence: Synthetic oligonucleotide
uaacuagcuggaaucggug

SEQ ID NO: 1900824 - RNA, 19 nt, Artificial Sequence
  Description of Artificial Sequence: Synthetic oligonucleotide
ggagaaaaguaguauugag

SEQ ID NO: 1900825 - RNA, 19 nt, Artificial Sequence
  Description of Artificial Sequence: Synthetic oligonucleotide
gauaggaaggacuuugccu

SEQ ID NO: 1900826 - RNA, 19 nt, Artificial Sequence
  Description of Artificial Sequence: Synthetic oligonucleotide
ucauauaauuaggugccug

SEQ ID NO: 1900827 - RNA, 19 nt, Artificial Sequence
  Description of Artificial Sequence: Synthetic oligonucleotide
aacucagaauuaaaagcug

SEQ ID NO: 1900828 - RNA, 19 nt, Artificial Sequence
  Description of Artificial Sequence: Synthetic oligonucleotide
agaaaguuguguggagagc

SEQ ID NO: 1900829 - RNA, 19 nt, Artificial Sequence
  Description of Artificial Sequence: Synthetic oligonucleotide
uaaucuugucccauccuaa

SEQ ID NO: 1900830 - RNA, 19 nt, Artificial Sequence
  Description of Artificial Sequence: Synthetic oligonucleotide
ccuucuaaggguaaaggag

SEQ ID NO: 1900831 - RNA, 19 nt, Artificial Sequence
  Description of Artificial Sequence: Synthetic oligonucleotide
acagaguguccuuuuggag

SEQ ID NO: 1900832 - RNA, 19 nt, Artificial Sequence
  Description of Artificial Sequence: Synthetic oligonucleotide
agaguguccuuuuggagga

SEQ ID NO: 1900833 - RNA, 19 nt, Artificial Sequence
  Description of Artificial Sequence: Synthetic oligonucleotide
ucagcaccauuuaucauau

SEQ ID NO: 1900834 - RNA, 19 nt, Artificial Sequence
  Description of Artificial Sequence: Synthetic oligonucleotide
caggauagauuuuacuguc

SEQ ID NO: 1900835 - RNA, 19 nt, Artificial Sequence
  Description of Artificial Sequence: Synthetic oligonucleotide
uuucauagucacugucacc

SEQ ID NO: 1900836 - RNA, 19 nt, Artificial Sequence
  Description of Artificial Sequence: Synthetic oligonucleotide
aaguaguauugaguuacug

SEQ ID NO: 1900837 - RNA, 19 nt, Artificial Sequence
  Description of Artificial Sequence: Synthetic oligonucleotide
uuacuggccacauggagua

SEQ ID NO: 1900838 - RNA, 19 nt, Artificial Sequence
  Description of Artificial Sequence: Synthetic oligonucleotide
ucagaauuaaaagcugcuc

SEQ ID NO: 1900839 - RNA, 19 nt, Artificial Sequence
  Description of Artificial Sequence: Synthetic oligonucleotide
uagagccccaucuuuaauc

SEQ ID NO: 1900840 - RNA, 19 nt, Artificial Sequence
  Description of Artificial Sequence: Synthetic oligonucleotide
gaccuguugaacuguaaca

SEQ ID NO: 1900841 - RNA, 19 nt, Artificial Sequence
  Description of Artificial Sequence: Synthetic oligonucleotide
ugucuuuaaagugcgugga

SEQ ID NO: 1900842 - RNA, 19 nt, Artificial Sequence
  Description of Artificial Sequence: Synthetic oligonucleotide
gauucaacauucugaaacu

SEQ ID NO: 1900843 - RNA, 19 nt, Artificial Sequence
  Description of Artificial Sequence: Synthetic oligonucleotide
aaugacauccacagaaguu

SEQ ID NO: 1900844 - RNA, 19 nt, Artificial Sequence
  Description of Artificial Sequence: Synthetic oligonucleotide
uuuaaagugcguggaguga

SEQ ID NO: 1900845 - RNA, 19 nt, Artificial Sequence
  Description of Artificial Sequence: Synthetic oligonucleotide
agagccccaucuuuaaucu

SEQ ID NO: 1900846 - RNA, 19 nt, Artificial Sequence
  Description of Artificial Sequence: Synthetic oligonucleotide
uccuucuuuuggcaggugu

SEQ ID NO: 1900847 - RNA, 19 nt, Artificial Sequence
  Description of Artificial Sequence: Synthetic oligonucleotide
cagauaugaaguuucaaua

SEQ ID NO: 1900848 - RNA, 19 nt, Artificial Sequence
  Description of Artificial Sequence: Synthetic oligonucleotide
guaucgauacugugauagg

SEQ ID NO: 1900849 - RNA, 19 nt, Artificial Sequence
  Description of Artificial Sequence: Synthetic oligonucleotide
gcugaauuaauguaucauc

SEQ ID NO: 1900850 - RNA, 19 nt, Artificial Sequence
  Description of Artificial Sequence: Synthetic oligonucleotide
uuaaagugcguggagugaa

SEQ ID NO: 1900851 - RNA, 19 nt, Artificial Sequence
  Description of Artificial Sequence: Synthetic oligonucleotide
uaauuaggugccugcuuug

SEQ ID NO: 1900852 - RNA, 19 nt, Artificial Sequence
  Description of Artificial Sequence: Synthetic oligonucleotide
ucuuuaaucuugucccauc

SEQ ID NO: 1900853 - RNA, 19 nt, Artificial Sequence
  Description of Artificial Sequence: Synthetic oligonucleotide
uacuugaaucugugaacag

SEQ ID NO: 1900854 - RNA, 19 nt, Artificial Sequence
  Description of Artificial Sequence: Synthetic oligonucleotide
uccuugucaugauuacugc

SEQ ID NO: 1900855 - RNA, 19 nt, Artificial Sequence
  Description of Artificial Sequence: Synthetic oligonucleotide
aacugaacagauggggaca

SEQ ID NO: 1900856 - RNA, 19 nt, Artificial Sequence
  Description of Artificial Sequence: Synthetic oligonucleotide
uuaauuccuugucaugauu

SEQ ID NO: 1900857 - RNA, 19 nt, Artificial Sequence
  Description of Artificial Sequence: Synthetic oligonucleotide
gaaauucagguuagagcag

SEQ ID NO: 1900858 - RNA, 19 nt, Artificial Sequence
  Description of Artificial Sequence: Synthetic oligonucleotide
gaggucagagugcuuuucc

SEQ ID NO: 1900859 - RNA, 19 nt, Artificial Sequence
  Description of Artificial Sequence: Synthetic oligonucleotide
guaucaucauuacuuacaa

SEQ ID NO: 1900860 - RNA, 19 nt, Artificial Sequence
  Description of Artificial Sequence: Synthetic oligonucleotide
aagauccagaggucagucu

SEQ ID NO: 1900861 - RNA, 19 nt, Artificial Sequence
  Description of Artificial Sequence: Synthetic oligonucleotide
acuguaacaccugaauacu

SEQ ID NO: 1900862 - RNA, 19 nt, Artificial Sequence
  Description of Artificial Sequence: Synthetic oligonucleotide
uugcugaauuaauguauca

SEQ ID NO: 1900863 - RNA, 19 nt, Artificial Sequence
  Description of Artificial Sequence: Synthetic oligonucleotide
acacuggggaacugaacag

SEQ ID NO: 1900864 - RNA, 19 nt, Artificial Sequence
  Description of Artificial Sequence: Synthetic oligonucleotide
caauuaaacugucagaaau

SEQ ID NO: 1900865 - RNA, 19 nt, Artificial Sequence
  Description of Artificial Sequence: Synthetic oligonucleotide
aaaguuguguggagagcuc

SEQ ID NO: 1900866 - RNA, 19 nt, Artificial Sequence
  Description of Artificial Sequence: Synthetic oligonucleotide
uuagagcagcucuucuuca

SEQ ID NO: 1900867 - RNA, 19 nt, Artificial Sequence
  Description of Artificial Sequence: Synthetic oligonucleotide
ucucagcugucccaaacuc

SEQ ID NO: 1900868 - RNA, 19 nt, Artificial Sequence
  Description of Artificial Sequence: Synthetic oligonucleotide
ggauagauuuuacugucug

SEQ ID NO: 1900869 - RNA, 19 nt, Artificial Sequence
  Description of Artificial Sequence: Synthetic oligonucleotide
uucugaaacuguuuugcuu

SEQ ID NO: 1900870 - RNA, 19 nt, Artificial Sequence
  Description of Artificial Sequence: Synthetic oligonucleotide
uguguggagagcucacaga

SEQ ID NO: 1900871 - RNA, 19 nt, Artificial Sequence
  Description of Artificial Sequence: Synthetic oligonucleotide
aaagugcguggagugaaug

SEQ ID NO: 1900872 - RNA, 19 nt, Artificial Sequence
  Description of Artificial Sequence: Synthetic oligonucleotide
guguucacuucugaguccg

SEQ ID NO: 1900873 - RNA, 19 nt, Artificial Sequence
  Description of Artificial Sequence: Synthetic oligonucleotide
ucagagugcuuuuccaaaa

SEQ ID NO: 1900874 - RNA, 19 nt, Artificial Sequence
  Description of Artificial Sequence: Synthetic oligonucleotide
gaauuaauguaucaucauu

SEQ ID NO: 1900875 - RNA, 19 nt, Artificial Sequence
  Description of Artificial Sequence: Synthetic oligonucleotide
uucuaaggguaaaggagau

SEQ ID NO: 1900876 - RNA, 19 nt, Artificial Sequence
  Description of Artificial Sequence: Synthetic oligonucleotide
uguccuucuaaggguaaag

SEQ ID NO: 1900877 - RNA, 19 nt, Artificial Sequence
  Description of Artificial Sequence: Synthetic oligonucleotide
gaacuguaacaccugaaua

SEQ ID NO: 1900878 - RNA, 19 nt, Artificial Sequence
  Description of Artificial Sequence: Synthetic oligonucleotide
augacauccacagaaguuu

SEQ ID NO: 1900879 - RNA, 19 nt, Artificial Sequence
  Description of Artificial Sequence: Synthetic oligonucleotide
ucggcauagaugacaacau

SEQ ID NO: 1900880 - RNA, 19 nt, Artificial Sequence
  Description of Artificial Sequence: Synthetic oligonucleotide
aauuaggugccugcuuugu

SEQ ID NO: 1900881 - RNA, 19 nt, Artificial Sequence
  Description of Artificial Sequence: Synthetic oligonucleotide
aguccguuugaguuccuug

SEQ ID NO: 1900882 - RNA, 19 nt, Artificial Sequence
  Description of Artificial Sequence: Synthetic oligonucleotide
ucuggaagucucaaccuuu

SEQ ID NO: 1900883 - RNA, 19 nt, Artificial Sequence
  Description of Artificial Sequence: Synthetic oligonucleotide
uauugaguuacuggccaca

SEQ ID NO: 1900884 - RNA, 19 nt, Artificial Sequence
  Description of Artificial Sequence: Synthetic oligonucleotide
agugauguguuaagacaac

SEQ ID NO: 1900885 - RNA, 19 nt, Artificial Sequence
  Description of Artificial Sequence: Synthetic oligonucleotide
aggacuuugccucugucuu

SEQ ID NO: 1900886 - RNA, 19 nt, Artificial Sequence
  Description of Artificial Sequence: Synthetic oligonucleotide
ugucucagcugucccaaac

SEQ ID NO: 1900887 - RNA, 19 nt, Artificial Sequence
  Description of Artificial Sequence: Synthetic oligonucleotide
gaaaaguaguauugaguua

SEQ ID NO: 1900888 - RNA, 19 nt, Artificial Sequence
  Description of Artificial Sequence: Synthetic oligonucleotide
uuugaaaaucaaguugauu

SEQ ID NO: 1900889 - RNA, 19 nt, Artificial Sequence
  Description of Artificial Sequence: Synthetic oligonucleotide
aaguuguguggagagcuca

SEQ ID NO: 1900890 - RNA, 19 nt, Artificial Sequence
  Description of Artificial Sequence: Synthetic oligonucleotide
gaaaguuguguggagagcu

SEQ ID NO: 1900891 - RNA, 19 nt, Artificial Sequence
  Description of Artificial Sequence: Synthetic oligonucleotide
aggcuucaagaucugucuc

SEQ ID NO: 1900892 - RNA, 19 nt, Artificial Sequence
  Description of Artificial Sequence: Synthetic oligonucleotide
auaacuagcuggaaucggu

SEQ ID NO: 1900893 - RNA, 19 nt, Artificial Sequence
  Description of Artificial Sequence: Synthetic oligonucleotide
uccacagaaguuuccuggu

SEQ ID NO: 1900894 - RNA, 19 nt, Artificial Sequence
  Description of Artificial Sequence: Synthetic oligonucleotide
gaagucucaaccuuuucau

SEQ ID NO: 1900895 - RNA, 19 nt, Artificial Sequence
  Description of Artificial Sequence: Synthetic oligonucleotide
uugaguuccuugucucagc

SEQ ID NO: 1900896 - RNA, 19 nt, Artificial Sequence
  Description of Artificial Sequence: Synthetic oligonucleotide
gggaacugaacagaugggg

SEQ ID NO: 1900897 - RNA, 19 nt, Artificial Sequence
  Description of Artificial Sequence: Synthetic oligonucleotide
auucaacauucugaaacug

SEQ ID NO: 1900898 - RNA, 19 nt, Artificial Sequence
  Description of Artificial Sequence: Synthetic oligonucleotide
uguagagccccaucuuuaa

SEQ ID NO: 1900899 - RNA, 19 nt, Artificial Sequence
  Description of Artificial Sequence: Synthetic oligonucleotide
aggagaaaaguaguauuga

SEQ ID NO: 1900900 - RNA, 19 nt, Artificial Sequence
  Description of Artificial Sequence: Synthetic oligonucleotide
aaucugugaacagguauua

SEQ ID NO: 1900901 - RNA, 19 nt, Artificial Sequence
  Description of Artificial Sequence: Synthetic oligonucleotide
gaaguuuccuggucaauua

SEQ ID NO: 1900902 - RNA, 19 nt, Artificial Sequence
  Description of Artificial Sequence: Synthetic oligonucleotide
acuuacaaguucaguaugu

SEQ ID NO: 1900903 - RNA, 19 nt, Artificial Sequence
  Description of Artificial Sequence: Synthetic oligonucleotide
cagugauguguuaagacaa

SEQ ID NO: 1900904 - RNA, 19 nt, Artificial Sequence
  Description of Artificial Sequence: Synthetic oligonucleotide
cugagaaaguuguguggag

SEQ ID NO: 1900905 - RNA, 19 nt, Artificial Sequence
  Description of Artificial Sequence: Synthetic oligonucleotide
accugaauacuugaaucug

SEQ ID NO: 1900906 - RNA, 19 nt, Artificial Sequence
  Description of Artificial Sequence: Synthetic oligonucleotide
uucauuccagguugaggcu

SEQ ID NO: 1900907 - RNA, 19 nt, Artificial Sequence
  Description of Artificial Sequence: Synthetic oligonucleotide
guaguaucgauacugugau

SEQ ID NO: 1900908 - RNA, 19 nt, Artificial Sequence
  Description of Artificial Sequence: Synthetic oligonucleotide
uugaguuacuggccacaug

SEQ ID NO: 1900909 - RNA, 19 nt, Artificial Sequence
  Description of Artificial Sequence: Synthetic oligonucleotide
uccuucggcauagaugaca

SEQ ID NO: 1900910 - RNA, 19 nt, Artificial Sequence
  Description of Artificial Sequence: Synthetic oligonucleotide
guguaguaucgauacugug

SEQ ID NO: 1900911 - RNA, 19 nt, Artificial Sequence
  Description of Artificial Sequence: Synthetic oligonucleotide
uccuugucucagcuguccc

SEQ ID NO: 1900912 - RNA, 19 nt, Artificial Sequence
  Description of Artificial Sequence: Synthetic oligonucleotide
uuggcagguguguaguauc

SEQ ID NO: 1900913 - RNA, 19 nt, Artificial Sequence
  Description of Artificial Sequence: Synthetic oligonucleotide
auggcaacugcuuguuaga

SEQ ID NO: 1900914 - RNA, 19 nt, Artificial Sequence
  Description of Artificial Sequence: Synthetic oligonucleotide
ucagguuagagcagcucuu

SEQ ID NO: 1900915 - RNA, 19 nt, Artificial Sequence
  Description of Artificial Sequence: Synthetic oligonucleotide
aaaguaguauugaguuacu

SEQ ID NO: 1900916 - RNA, 19 nt, Artificial Sequence
  Description of Artificial Sequence: Synthetic oligonucleotide
uuuguccuucuaaggguaa

SEQ ID NO: 1900917 - RNA, 19 nt, Artificial Sequence
  Description of Artificial Sequence: Synthetic oligonucleotide
ugcucaauucagucugggu

SEQ ID NO: 1900918 - RNA, 19 nt, Artificial Sequence
  Description of Artificial Sequence: Synthetic oligonucleotide
acagaaguuuccuggucaa

SEQ ID NO: 1900919 - RNA, 19 nt, Artificial Sequence
  Description of Artificial Sequence: Synthetic oligonucleotide
cuaagguuuguccuucuaa

SEQ ID NO: 1900920 - RNA, 19 nt, Artificial Sequence
  Description of Artificial Sequence: Synthetic oligonucleotide
gaagauccagaggucaguc

SEQ ID NO: 1900921 - RNA, 19 nt, Artificial Sequence
  Description of Artificial Sequence: Synthetic oligonucleotide
ugcguggagugaauggcaa

SEQ ID NO: 1900922 - RNA, 19 nt, Artificial Sequence
  Description of Artificial Sequence: Synthetic oligonucleotide
caucauugaccuguugaac

SEQ ID NO: 1900923 - RNA, 19 nt, Artificial Sequence
  Description of Artificial Sequence: Synthetic oligonucleotide
aauucagguuagagcagcu

SEQ ID NO: 1900924 - RNA, 19 nt, Artificial Sequence
  Description of Artificial Sequence: Synthetic oligonucleotide
gaacugcuggcgcucuugc

SEQ ID NO: 1900925 - RNA, 19 nt, Artificial Sequence
  Description of Artificial Sequence: Synthetic oligonucleotide
uccguuugaguuccuuguc

SEQ ID NO: 1900926 - RNA, 19 nt, Artificial Sequence
  Description of Artificial Sequence: Synthetic oligonucleotide
cuagcuggaaucggugggc

SEQ ID NO: 1900927 - RNA, 19 nt, Artificial Sequence
  Description of Artificial Sequence: Synthetic oligonucleotide
agagcucacagaguguccu

SEQ ID NO: 1900928 - RNA, 19 nt, Artificial Sequence
  Description of Artificial Sequence: Synthetic oligonucleotide
agcagcucuucuucaucag

SEQ ID NO: 1900929 - RNA, 19 nt, Artificial Sequence
  Description of Artificial Sequence: Synthetic oligonucleotide
aguuguguggagagcucac

SEQ ID NO: 1900930 - RNA, 19 nt, Artificial Sequence
  Description of Artificial Sequence: Synthetic oligonucleotide
agccccaucuuuaaucuug

SEQ ID NO: 1900931 - RNA, 19 nt, Artificial Sequence
  Description of Artificial Sequence: Synthetic oligonucleotide
guauugaguuacuggccac

SEQ ID NO: 1900932 - RNA, 19 nt, Artificial Sequence
  Description of Artificial Sequence: Synthetic oligonucleotide
uuuggcagguguguaguau

SEQ ID NO: 1900933 - RNA, 19 nt, Artificial Sequence
  Description of Artificial Sequence: Synthetic oligonucleotide
uguccuuuuggaggacugc

SEQ ID NO: 1900934 - RNA, 19 nt, Artificial Sequence
  Description of Artificial Sequence: Synthetic oligonucleotide
caaaagaucuccacugggu

SEQ ID NO: 1900935 - RNA, 19 nt, Artificial Sequence
  Description of Artificial Sequence: Synthetic oligonucleotide
ccuguugaacuguaacacc

SEQ ID NO: 1900936 - RNA, 19 nt, Artificial Sequence
  Description of Artificial Sequence: Synthetic oligonucleotide
auuccuugucaugauuacu

SEQ ID NO: 1900937 - RNA, 19 nt, Artificial Sequence
  Description of Artificial Sequence: Synthetic oligonucleotide
aagaggucagagugcuuuu

SEQ ID NO: 1900938 - RNA, 19 nt, Artificial Sequence
  Description of Artificial Sequence: Synthetic oligonucleotide
uaaggguaaaggagauauu

SEQ ID NO: 1900939 - RNA, 19 nt, Artificial Sequence
  Description of Artificial Sequence: Synthetic oligonucleotide
cucacagaguguccuuuug

SEQ ID NO: 1900940 - RNA, 19 nt, Artificial Sequence
  Description of Artificial Sequence: Synthetic oligonucleotide
uugaccuguugaacuguaa

SEQ ID NO: 1900941 - RNA, 19 nt, Artificial Sequence
  Description of Artificial Sequence: Synthetic oligonucleotide
gccucugucuuuaaagugc

SEQ ID NO: 1900942 - RNA, 19 nt, Artificial Sequence
  Description of Artificial Sequence: Synthetic oligonucleotide
aggagauauuuugucuuca

SEQ ID NO: 1900943 - RNA, 19 nt, Artificial Sequence
  Description of Artificial Sequence: Synthetic oligonucleotide
aucgauacugugauaggaa

SEQ ID NO: 1900944 - RNA, 19 nt, Artificial Sequence
  Description of Artificial Sequence: Synthetic oligonucleotide
gguaaagagaacaucuugu

SEQ ID NO: 1900945 - RNA, 19 nt, Artificial Sequence
  Description of Artificial Sequence: Synthetic oligonucleotide
ccuugucaugauuacugcc

SEQ ID NO: 1900946 - RNA, 19 nt, Artificial Sequence
  Description of Artificial Sequence: Synthetic oligonucleotide
caucuuuaaucuuguccca

SEQ ID NO: 1900947 - RNA, 19 nt, Artificial Sequence
  Description of Artificial Sequence: Synthetic oligonucleotide
ugaauggcaacugcuuguu

SEQ ID NO: 1900948 - RNA, 19 nt, Artificial Sequence
  Description of Artificial Sequence: Synthetic oligonucleotide
gugauaggaaggacuuugc

SEQ ID NO: 1900949 - RNA, 19 nt, Artificial Sequence
  Description of Artificial Sequence: Synthetic oligonucleotide
cucagaauuaaaagcugcu

SEQ ID NO: 1900950 - RNA, 19 nt, Artificial Sequence
  Description of Artificial Sequence: Synthetic oligonucleotide
uggaagucucaaccuuuuc

SEQ ID NO: 1900951 - RNA, 19 nt, Artificial Sequence
  Description of Artificial Sequence: Synthetic oligonucleotide
ggaaauaacuagcuggaau

SEQ ID NO: 1900952 - RNA, 19 nt, Artificial Sequence
  Description of Artificial Sequence: Synthetic oligonucleotide
uccuggaacugcuggcgcu

SEQ ID NO: 1900953 - RNA, 19 nt, Artificial Sequence
  Description of Artificial Sequence: Synthetic oligonucleotide
gaaggacuuugccucuguc

SEQ ID NO: 1900954 - RNA, 19 nt, Artificial Sequence
  Description of Artificial Sequence: Synthetic oligonucleotide
cucuugcugaauuaaugua

SEQ ID NO: 1900955 - RNA, 19 nt, Artificial Sequence
  Description of Artificial Sequence: Synthetic oligonucleotide
cacauggaguauuuauuaa

SEQ ID NO: 1900956 - RNA, 19 nt, Artificial Sequence
  Description of Artificial Sequence: Synthetic oligonucleotide
gugauguguuaagacaaca

SEQ ID NO: 1900957 - RNA, 19 nt, Artificial Sequence
  Description of Artificial Sequence: Synthetic oligonucleotide
aucauauaauuaggugccu

SEQ ID NO: 1900958 - RNA, 19 nt, Artificial Sequence
  Description of Artificial Sequence: Synthetic oligonucleotide
aucuuuaaucuugucccau

SEQ ID NO: 1900959 - RNA, 19 nt, Artificial Sequence
  Description of Artificial Sequence: Synthetic oligonucleotide
ugcuguagagccccaucuu

SEQ ID NO: 1900960 - RNA, 19 nt, Artificial Sequence
  Description of Artificial Sequence: Synthetic oligonucleotide
cccauccuaagguuugucc

SEQ ID NO: 1900961 - RNA, 19 nt, Artificial Sequence
  Description of Artificial Sequence: Synthetic oligonucleotide
gacaacauguccagggccu

SEQ ID NO: 1900962 - RNA, 19 nt, Artificial Sequence
  Description of Artificial Sequence: Synthetic oligonucleotide
guuacuggccacauggagu

SEQ ID NO: 1900963 - RNA, 19 nt, Artificial Sequence
  Description of Artificial Sequence: Synthetic oligonucleotide
gaaucugugaacagguauu

SEQ ID NO: 1900964 - RNA, 19 nt, Artificial Sequence
  Description of Artificial Sequence: Synthetic oligonucleotide
gugaauggcaacugcuugu

SEQ ID NO: 1900965 - RNA, 19 nt, Artificial Sequence
  Description of Artificial Sequence: Synthetic oligonucleotide
uuuuggcagguguguagua

SEQ ID NO: 1900966 - RNA, 19 nt, Artificial Sequence
  Description of Artificial Sequence: Synthetic oligonucleotide
gguuucggcuuccauccgc

SEQ ID NO: 1900967 - RNA, 19 nt, Artificial Sequence
  Description of Artificial Sequence: Synthetic oligonucleotide
cugcucaauucagucuggg

SEQ ID NO: 1900968 - RNA, 19 nt, Artificial Sequence
  Description of Artificial Sequence: Synthetic oligonucleotide
ucuaaggguaaaggagaua

SEQ ID NO: 1900969 - RNA, 19 nt, Artificial Sequence
  Description of Artificial Sequence: Synthetic oligonucleotide
aggauagauuuuacugucu

SEQ ID NO: 1900970 - RNA, 19 nt, Artificial Sequence
  Description of Artificial Sequence: Synthetic oligonucleotide
gcauagaugacaacauguc

SEQ ID NO: 1900971 - RNA, 19 nt, Artificial Sequence
  Description of Artificial Sequence: Synthetic oligonucleotide
gagugcuuuuccaaaagau

SEQ ID NO: 1900972 - RNA, 19 nt, Artificial Sequence
  Description of Artificial Sequence: Synthetic oligonucleotide
cucaauucagucuggguuu

SEQ ID NO: 1900973 - RNA, 19 nt, Artificial Sequence
  Description of Artificial Sequence: Synthetic oligonucleotide
gguugaggcuucaagaucu

SEQ ID NO: 1900974 - RNA, 19 nt, Artificial Sequence
  Description of Artificial Sequence: Synthetic oligonucleotide
uaggugccugcuuuguguu

SEQ ID NO: 1900975 - RNA, 19 nt, Artificial Sequence
  Description of Artificial Sequence: Synthetic oligonucleotide
uucuuuuggcaggugugua

SEQ ID NO: 1900976 - RNA, 19 nt, Artificial Sequence
  Description of Artificial Sequence: Synthetic oligonucleotide
guuaauuccuugucaugau

SEQ ID NO: 1900977 - RNA, 19 nt, Artificial Sequence
  Description of Artificial Sequence: Synthetic oligonucleotide
uuuugacacuggggaacug

SEQ ID NO: 1900978 - RNA, 19 nt, Artificial Sequence
  Description of Artificial Sequence: Synthetic oligonucleotide
aguguccuuuuggaggacu

SEQ ID NO: 1900979 - RNA, 19 nt, Artificial Sequence
  Description of Artificial Sequence: Synthetic oligonucleotide
uggcaacugcuuguuagaa

SEQ ID NO: 1900980 - RNA, 19 nt, Artificial Sequence
  Description of Artificial Sequence: Synthetic oligonucleotide
uugaggcuucaagaucugu

SEQ ID NO: 1900981 - RNA, 19 nt, Artificial Sequence
  Description of Artificial Sequence: Synthetic oligonucleotide
ggcauagaugacaacaugu

SEQ ID NO: 1900982 - RNA, 19 nt, Artificial Sequence
  Description of Artificial Sequence: Synthetic oligonucleotide
ccagguugaggcuucaaga

SEQ ID NO: 1900983 - RNA, 19 nt, Artificial Sequence
  Description of Artificial Sequence: Synthetic oligonucleotide
guccguuugaguuccuugu

SEQ ID NO: 1900984 - RNA, 19 nt, Artificial Sequence
  Description of Artificial Sequence: Synthetic oligonucleotide
cagucuucaaugcucauuu

SEQ ID NO: 1900985 - RNA, 19 nt, Artificial Sequence
  Description of Artificial Sequence: Synthetic oligonucleotide
uuguccuucuaaggguaaa

SEQ ID NO: 1900986 - RNA, 19 nt, Artificial Sequence
  Description of Artificial Sequence: Synthetic oligonucleotide
gaggacugcuguagagccc

SEQ ID NO: 1900987 - RNA, 19 nt, Artificial Sequence
  Description of Artificial Sequence: Synthetic oligonucleotide
gagaacaucuugucuucau

SEQ ID NO: 1900988 - RNA, 19 nt, Artificial Sequence
  Description of Artificial Sequence: Synthetic oligonucleotide
gcucaauucagucuggguu

SEQ ID NO: 1900989 - RNA, 19 nt, Artificial Sequence
  Description of Artificial Sequence: Synthetic oligonucleotide
guguccuuuuggaggacug

SEQ ID NO: 1900990 - RNA, 19 nt, Artificial Sequence
  Description of Artificial Sequence: Synthetic oligonucleotide
cagguuagagcagcucuuc

SEQ ID NO: 1900991 - RNA, 19 nt, Artificial Sequence
  Description of Artificial Sequence: Synthetic oligonucleotide
cuguagagccccaucuuua

SEQ ID NO: 1900992 - RNA, 19 nt, Artificial Sequence
  Description of Artificial Sequence: Synthetic oligonucleotide
gucccaaacucagaauuaa

SEQ ID NO: 1900993 - RNA, 19 nt, Artificial Sequence
  Description of Artificial Sequence: Synthetic oligonucleotide
ggggaacugaacagauggg

SEQ ID NO: 1900994 - RNA, 19 nt, Artificial Sequence
  Description of Artificial Sequence: Synthetic oligonucleotide
guuuugaaaucagagccuu

SEQ ID NO: 1900995 - RNA, 19 nt, Artificial Sequence
  Description of Artificial Sequence: Synthetic oligonucleotide
uaguaucgauacugugaua

SEQ ID NO: 1900996 - RNA, 19 nt, Artificial Sequence
  Description of Artificial Sequence: Synthetic oligonucleotide
cagguguguaguaucgaua

SEQ ID NO: 1900997 - RNA, 19 nt, Artificial Sequence
  Description of Artificial Sequence: Synthetic oligonucleotide
cuugucucagcugucccaa

SEQ ID NO: 1900998 - RNA, 19 nt, Artificial Sequence
  Description of Artificial Sequence: Synthetic oligonucleotide
cugucugagaaaguugugu

SEQ ID NO: 1900999 - RNA, 19 nt, Artificial Sequence
  Description of Artificial Sequence: Synthetic oligonucleotide
caaguugauucaacauucu

SEQ ID NO: 1901000 - RNA, 19 nt, Artificial Sequence
  Description of Artificial Sequence: Synthetic oligonucleotide
gaguuacuggccacaugga

SEQ ID NO: 1901001 - RNA, 19 nt, Artificial Sequence
  Description of Artificial Sequence: Synthetic oligonucleotide
cuucggcauagaugacaac

SEQ ID NO: 1901002 - RNA, 19 nt, Artificial Sequence
  Description of Artificial Sequence: Synthetic oligonucleotide
cagucuggguuucggcuuc

SEQ ID NO: 1901003 - RNA, 19 nt, Artificial Sequence
  Description of Artificial Sequence: Synthetic oligonucleotide
cucagauaugaaguuucaa

SEQ ID NO: 1901004 - RNA, 19 nt, Artificial Sequence
  Description of Artificial Sequence: Synthetic oligonucleotide
aucugugaacagguauuaa

SEQ ID NO: 1901005 - RNA, 19 nt, Artificial Sequence
  Description of Artificial Sequence: Synthetic oligonucleotide
gucucagcugucccaaacu

SEQ ID NO: 1901006 - RNA, 19 nt, Artificial Sequence
  Description of Artificial Sequence: Synthetic oligonucleotide
gaauggcaacugcuuguua

SEQ ID NO: 1901007 - RNA, 19 nt, Artificial Sequence
  Description of Artificial Sequence: Synthetic oligonucleotide
uccauccgcugcccuggga

SEQ ID NO: 1901008 - RNA, 19 nt, Artificial Sequence
  Description of Artificial Sequence: Synthetic oligonucleotide
cacuggggaacugaacaga

SEQ ID NO: 1901009 - RNA, 19 nt, Artificial Sequence
  Description of Artificial Sequence: Synthetic oligonucleotide
aaaagaggucagagugcuu

SEQ ID NO: 1901010 - RNA, 19 nt, Artificial Sequence
  Description of Artificial Sequence: Synthetic oligonucleotide
auugaccuguugaacugua

SEQ ID NO: 1901011 - RNA, 19 nt, Artificial Sequence
  Description of Artificial Sequence: Synthetic oligonucleotide
gcuuuguguucacuucuga

SEQ ID NO: 1901012 - RNA, 19 nt, Artificial Sequence
  Description of Artificial Sequence: Synthetic oligonucleotide
uggcgcucuugcugaauua

SEQ ID NO: 1901013 - RNA, 19 nt, Artificial Sequence
  Description of Artificial Sequence: Synthetic oligonucleotide
uccagaggucagucuucaa

SEQ ID NO: 1901014 - RNA, 19 nt, Artificial Sequence
  Description of Artificial Sequence: Synthetic oligonucleotide
ggacagugauguguuaaga

SEQ ID NO: 1901015 - RNA, 19 nt, Artificial Sequence
  Description of Artificial Sequence: Synthetic oligonucleotide
uugucucagcugucccaaa

SEQ ID NO: 1901016 - RNA, 19 nt, Artificial Sequence
  Description of Artificial Sequence: Synthetic oligonucleotide
gagugaauggcaacugcuu

SEQ ID NO: 1901017 - RNA, 19 nt, Artificial Sequence
  Description of Artificial Sequence: Synthetic oligonucleotide
caagaucugucucaucauu

SEQ ID NO: 1901018 - RNA, 19 nt, Artificial Sequence
  Description of Artificial Sequence: Synthetic oligonucleotide
ggcaacugcuuguuagaaa

SEQ ID NO: 1901019 - RNA, 19 nt, Artificial Sequence
  Description of Artificial Sequence: Synthetic oligonucleotide
gcugcucaauucagucugg

SEQ ID NO: 1901020 - RNA, 19 nt, Artificial Sequence
  Description of Artificial Sequence: Synthetic oligonucleotide
gugcguggagugaauggca

SEQ ID NO: 1901021 - RNA, 19 nt, Artificial Sequence
  Description of Artificial Sequence: Synthetic oligonucleotide
cacuucugaguccguuuga

SEQ ID NO: 1901022 - RNA, 19 nt, Artificial Sequence
  Description of Artificial Sequence: Synthetic oligonucleotide
cuucugaguccguuugagu

SEQ ID NO: 1901023 - RNA, 19 nt, Artificial Sequence
  Description of Artificial Sequence: Synthetic oligonucleotide
cugucaccuucaaugacau

SEQ ID NO: 1901024 - RNA, 19 nt, Artificial Sequence
  Description of Artificial Sequence: Synthetic oligonucleotide
cagguaaagagaacaucuu

SEQ ID NO: 1901025 - RNA, 19 nt, Artificial Sequence
  Description of Artificial Sequence: Synthetic oligonucleotide
ccuucggcauagaugacaa

SEQ ID NO: 1901026 - RNA, 19 nt, Artificial Sequence
  Description of Artificial Sequence: Synthetic oligonucleotide
auccuucggcauagaugac

SEQ ID NO: 1901027 - RNA, 19 nt, Artificial Sequence
  Description of Artificial Sequence: Synthetic oligonucleotide
uuccuucuuuuggcaggug

SEQ ID NO: 1901028 - RNA, 19 nt, Artificial Sequence
  Description of Artificial Sequence: Synthetic oligonucleotide
cacugggugucuuggaaau

SEQ ID NO: 1901029 - RNA, 19 nt, Artificial Sequence
  Description of Artificial Sequence: Synthetic oligonucleotide
cauccuaagguuuguccuu

SEQ ID NO: 1901030 - RNA, 19 nt, Artificial Sequence
  Description of Artificial Sequence: Synthetic oligonucleotide
ggccacauggaguauuuau

SEQ ID NO: 1901031 - RNA, 19 nt, Artificial Sequence
  Description of Artificial Sequence: Synthetic oligonucleotide
ugaguccguuugaguuccu

SEQ ID NO: 1901032 - RNA, 19 nt, Artificial Sequence
  Description of Artificial Sequence: Synthetic oligonucleotide
ccugaauacuugaaucugu

SEQ ID NO: 1901033 - RNA, 19 nt, Artificial Sequence
  Description of Artificial Sequence: Synthetic oligonucleotide
uccgcugcccugggaaauc

SEQ ID NO: 1901034 - RNA, 19 nt, Artificial Sequence
  Description of Artificial Sequence: Synthetic oligonucleotide
ggguuucggcuuccauccg

SEQ ID NO: 1901035 - RNA, 19 nt, Artificial Sequence
  Description of Artificial Sequence: Synthetic oligonucleotide
uggggacagugauguguua

SEQ ID NO: 1901036 - RNA, 19 nt, Artificial Sequence
  Description of Artificial Sequence: Synthetic oligonucleotide
ccucagauaugaaguuuca

SEQ ID NO: 1901037 - RNA, 19 nt, Artificial Sequence
  Description of Artificial Sequence: Synthetic oligonucleotide
cuguaacaccugaauacuu

SEQ ID NO: 1901038 - RNA, 19 nt, Artificial Sequence
  Description of Artificial Sequence: Synthetic oligonucleotide
agaucuccacugggugucu

SEQ ID NO: 1901039 - RNA, 19 nt, Artificial Sequence
  Description of Artificial Sequence: Synthetic oligonucleotide
ccacagaaguuuccugguc

SEQ ID NO: 1901040 - RNA, 19 nt, Artificial Sequence
  Description of Artificial Sequence: Synthetic oligonucleotide
ugccugcuuuguguucacu

SEQ ID NO: 1901041 - RNA, 19 nt, Artificial Sequence
  Description of Artificial Sequence: Synthetic oligonucleotide
cauugaccuguugaacugu

SEQ ID NO: 1901042 - RNA, 19 nt, Artificial Sequence
  Description of Artificial Sequence: Synthetic oligonucleotide
gaguguccuuuuggaggac

SEQ ID NO: 1901043 - RNA, 19 nt, Artificial Sequence
  Description of Artificial Sequence: Synthetic oligonucleotide
auccgcugcccugggaaau

SEQ ID NO: 1901044 - RNA, 19 nt, Artificial Sequence
  Description of Artificial Sequence: Synthetic oligonucleotide
acugggugucuuggaaaua

SEQ ID NO: 1901045 - RNA, 19 nt, Artificial Sequence
  Description of Artificial Sequence: Synthetic oligonucleotide
guagagccccaucuuuaau

SEQ ID NO: 1901046 - RNA, 19 nt, Artificial Sequence
  Description of Artificial Sequence: Synthetic oligonucleotide
cuggaagucucaaccuuuu

SEQ ID NO: 1901047 - RNA, 19 nt, Artificial Sequence
  Description of Artificial Sequence: Synthetic oligonucleotide
gcguggagugaauggcaac

SEQ ID NO: 1901048 - RNA, 19 nt, Artificial Sequence
  Description of Artificial Sequence: Synthetic oligonucleotide
gcagguguguaguaucgau

SEQ ID NO: 1901049 - RNA, 19 nt, Artificial Sequence
  Description of Artificial Sequence: Synthetic oligonucleotide
cauccgcugcccugggaaa

SEQ ID NO: 1901050 - RNA, 19 nt, Artificial Sequence
  Description of Artificial Sequence: Synthetic oligonucleotide
cggcauagaugacaacaug

SEQ ID NO: 1901051 - RNA, 19 nt, Artificial Sequence
  Description of Artificial Sequence: Synthetic oligonucleotide
ggcgcucuugcugaauuaa

SEQ ID NO: 1901052 - RNA, 19 nt, Artificial Sequence
  Description of Artificial Sequence: Synthetic oligonucleotide
cuucagcaccauuuaucau

SEQ ID NO: 1901053 - RNA, 19 nt, Artificial Sequence
  Description of Artificial Sequence: Synthetic oligonucleotide
cuucaucaggauagauuuu

SEQ ID NO: 1901054 - RNA, 19 nt, Artificial Sequence
  Description of Artificial Sequence: Synthetic oligonucleotide
gguguguaguaucgauacu

SEQ ID NO: 1901055 - RNA, 19 nt, Artificial Sequence
  Description of Artificial Sequence: Synthetic oligonucleotide
gcuguagagccccaucuuu

SEQ ID NO: 1901056 - RNA, 19 nt, Artificial Sequence
  Description of Artificial Sequence: Synthetic oligonucleotide
cugaaacuguuuugcuuuu

SEQ ID NO: 1901057 - RNA, 19 nt, Artificial Sequence
  Description of Artificial Sequence: Synthetic oligonucleotide
ccauccgcugcccugggaa

SEQ ID NO: 1901058 - RNA, 19 nt, Artificial Sequence
  Description of Artificial Sequence: Synthetic oligonucleotide
guucacuucugaguccguu

SEQ ID NO: 1901059 - RNA, 19 nt, Artificial Sequence
  Description of Artificial Sequence: Synthetic oligonucleotide
uacuggccacauggaguau

SEQ ID NO: 1901060 - RNA, 19 nt, Artificial Sequence
  Description of Artificial Sequence: Synthetic oligonucleotide
cuggcgcucuugcugaauu

SEQ ID NO: 1901061 - RNA, 19 nt, Artificial Sequence
  Description of Artificial Sequence: Synthetic oligonucleotide
ccguuugaguuccuugucu

SEQ ID NO: 1901062 - RNA, 19 nt, Artificial Sequence
  Description of Artificial Sequence: Synthetic oligonucleotide
gagccccaucuuuaaucuu

SEQ ID NO: 1901063 - RNA, 19 nt, Artificial Sequence
  Description of Artificial Sequence: Synthetic oligonucleotide
ccuaagguuuguccuucua

SEQ ID NO: 1901064 - RNA, 19 nt, Artificial Sequence
  Description of Artificial Sequence: Synthetic oligonucleotide
gaguccguuugaguuccuu

SEQ ID NO: 1901065 - RNA, 19 nt, Artificial Sequence
  Description of Artificial Sequence: Synthetic oligonucleotide
ccaugaaauucagguuaga

SEQ ID NO: 1901066 - RNA, 19 nt, Artificial Sequence
  Description of Artificial Sequence: Synthetic oligonucleotide
gacugcuguagagccccau

SEQ ID NO: 1901067 - RNA, 19 nt, Artificial Sequence
  Description of Artificial Sequence: Synthetic oligonucleotide
cagaaguuuccuggucaau

SEQ ID NO: 1901068 - RNA, 19 nt, Artificial Sequence
  Description of Artificial Sequence: Synthetic oligonucleotide
ccgcugcccugggaaaucc

SEQ ID NO: 1901069 - RNA, 19 nt, Artificial Sequence
  Description of Artificial Sequence: Synthetic oligonucleotide
cugugauaggaaggacuuu

SEQ ID NO: 1901070 - RNA, 19 nt, Artificial Sequence
  Description of Artificial Sequence: Synthetic oligonucleotide
cugaacagauggggacagu

SEQ ID NO: 1901071 - RNA, 19 nt, Artificial Sequence
  Description of Artificial Sequence: Synthetic oligonucleotide
gccccaucuuuaaucuugu

SEQ ID NO: 1901072 - RNA, 19 nt, Artificial Sequence
  Description of Artificial Sequence: Synthetic oligonucleotide
ggacugcuguagagcccca

SEQ ID NO: 1901073 - RNA, 19 nt, Artificial Sequence
  Description of Artificial Sequence: Synthetic oligonucleotide
gcgcucuugcugaauuaau

SEQ ID NO: 1901074 - RNA, 19 nt, Artificial Sequence
  Description of Artificial Sequence: Synthetic oligonucleotide
gcuggcgcucuugcugaau

SEQ ID NO: 1901075 - RNA, 19 nt, Artificial Sequence
  Description of Artificial Sequence: Synthetic oligonucleotide
uuucauguuacuuauauca

SEQ ID NO: 1901076 - RNA, 19 nt, Artificial Sequence
  Description of Artificial Sequence: Synthetic oligonucleotide
aaguguuugcgucaaauac

SEQ ID NO: 1901077 - RNA, 19 nt, Artificial Sequence
  Description of Artificial Sequence: Synthetic oligonucleotide
uauaucaaugcaaugaaga

SEQ ID NO: 1901078 - RNA, 19 nt, Artificial Sequence
  Description of Artificial Sequence: Synthetic oligonucleotide
agaguuuugucccaguugc

SEQ ID NO: 1901079 - RNA, 19 nt, Artificial Sequence
  Description of Artificial Sequence: Synthetic oligonucleotide
uuauuagucaacuacaguc

SEQ ID NO: 1901080 - RNA, 19 nt, Artificial Sequence
  Description of Artificial Sequence: Synthetic oligonucleotide
aaauaugagcagcuguggc

SEQ ID NO: 1901081 - RNA, 19 nt, Artificial Sequence
  Description of Artificial Sequence: Synthetic oligonucleotide
caugggaugacacacaugg

SEQ ID NO: 1901082 - RNA, 19 nt, Artificial Sequence
  Description of Artificial Sequence: Synthetic oligonucleotide
uuuagaaugacagaaucug

SEQ ID NO: 1901083 - RNA, 19 nt, Artificial Sequence
  Description of Artificial Sequence: Synthetic oligonucleotide
aaagcaaucgucauagauc

SEQ ID NO: 1901084 - RNA, 19 nt, Artificial Sequence
  Description of Artificial Sequence: Synthetic oligonucleotide
aagcaaucgucauagaucu

SEQ ID NO: 1901085 - RNA, 19 nt, Artificial Sequence
  Description of Artificial Sequence: Synthetic oligonucleotide
acaauuucgauuuccugac

SEQ ID NO: 1901086 - RNA, 19 nt, Artificial Sequence
  Description of Artificial Sequence: Synthetic oligonucleotide
aauuucgauuuccugacug

SEQ ID NO: 1901087 - RNA, 19 nt, Artificial Sequence
  Description of Artificial Sequence: Synthetic oligonucleotide
ucaaaguguaccauguagc

SEQ ID NO: 1901088 - RNA, 19 nt, Artificial Sequence
  Description of Artificial Sequence: Synthetic oligonucleotide
aagaccuucccucucuugg

SEQ ID NO: 1901089 - RNA, 19 nt, Artificial Sequence
  Description of Artificial Sequence: Synthetic oligonucleotide
auguuacuuauaucaaugc

SEQ ID NO: 1901090 - RNA, 19 nt, Artificial Sequence
  Description of Artificial Sequence: Synthetic oligonucleotide
uggacgaagaguuuugucc

SEQ ID NO: 1901091 - RNA, 19 nt, Artificial Sequence
  Description of Artificial Sequence: Synthetic oligonucleotide
aaacagagcaacauguuag

SEQ ID NO: 1901092 - RNA, 19 nt, Artificial Sequence
  Description of Artificial Sequence: Synthetic oligonucleotide
ucuggugugguccaagucc

SEQ ID NO: 1901093 - RNA, 19 nt, Artificial Sequence
  Description of Artificial Sequence: Synthetic oligonucleotide
ugggaugacacacauggag

SEQ ID NO: 1901094 - RNA, 19 nt, Artificial Sequence
  Description of Artificial Sequence: Synthetic oligonucleotide
uaccauguagcuuuccugg

SEQ ID NO: 1901095 - RNA, 19 nt, Artificial Sequence
  Description of Artificial Sequence: Synthetic oligonucleotide
guuugcgucaaauacgugc

SEQ ID NO: 1901096 - RNA, 19 nt, Artificial Sequence
  Description of Artificial Sequence: Synthetic oligonucleotide
uguuacuuauaucaaugca

SEQ ID NO: 1901097 - RNA, 19 nt, Artificial Sequence
  Description of Artificial Sequence: Synthetic oligonucleotide
acuuauaucaaugcaauga

SEQ ID NO: 1901098 - RNA, 19 nt, Artificial Sequence
  Description of Artificial Sequence: Synthetic oligonucleotide
uuguacaucguguucagug

SEQ ID NO: 1901099 - RNA, 19 nt, Artificial Sequence
  Description of Artificial Sequence: Synthetic oligonucleotide
cauguuacuuauaucaaug

SEQ ID NO: 1901100 - RNA, 19 nt, Artificial Sequence
  Description of Artificial Sequence: Synthetic oligonucleotide
uuauaucaaugcaaugaag

SEQ ID NO: 1901101 - RNA, 19 nt, Artificial Sequence
  Description of Artificial Sequence: Synthetic oligonucleotide
ugacaagccuccauggacg

SEQ ID NO: 1901102 - RNA, 19 nt, Artificial Sequence
  Description of Artificial Sequence: Synthetic oligonucleotide
auuagucaacuacagucac

SEQ ID NO: 1901103 - RNA, 19 nt, Artificial Sequence
  Description of Artificial Sequence: Synthetic oligonucleotide
aaagacauauagcugguuu

SEQ ID NO: 1901104 - RNA, 19 nt, Artificial Sequence
  Description of Artificial Sequence: Synthetic oligonucleotide
uuacuuauaucaaugcaau

SEQ ID NO: 1901105 - RNA, 19 nt, Artificial Sequence
  Description of Artificial Sequence: Synthetic oligonucleotide
uuugcgucaaauacgugca

SEQ ID NO: 1901106 - RNA, 19 nt, Artificial Sequence
  Description of Artificial Sequence: Synthetic oligonucleotide
gugugauacuuguacaucg

SEQ ID NO: 1901107 - RNA, 19 nt, Artificial Sequence
  Description of Artificial Sequence: Synthetic oligonucleotide
uuguagacaauuucgauuu

SEQ ID NO: 1901108 - RNA, 19 nt, Artificial Sequence
  Description of Artificial Sequence: Synthetic oligonucleotide
aaucgucauagaucucccc

SEQ ID NO: 1901109 - RNA, 19 nt, Artificial Sequence
  Description of Artificial Sequence: Synthetic oligonucleotide
uuuauuagucaacuacagu

SEQ ID NO: 1901110 - RNA, 19 nt, Artificial Sequence
  Description of Artificial Sequence: Synthetic oligonucleotide
aaaacagagcaacauguua

SEQ ID NO: 1901111 - RNA, 19 nt, Artificial Sequence
  Description of Artificial Sequence: Synthetic oligonucleotide
gucaaaguguaccauguag

SEQ ID NO: 1901112 - RNA, 19 nt, Artificial Sequence
  Description of Artificial Sequence: Synthetic oligonucleotide
uucacauuuuagaaugaca

SEQ ID NO: 1901113 - RNA, 19 nt, Artificial Sequence
  Description of Artificial Sequence: Synthetic oligonucleotide
aaugaagaccuucccucuc

SEQ ID NO: 1901114 - RNA, 19 nt, Artificial Sequence
  Description of Artificial Sequence: Synthetic oligonucleotide
gaagcuggcaugcucauac

SEQ ID NO: 1901115 - RNA, 19 nt, Artificial Sequence
  Description of Artificial Sequence: Synthetic oligonucleotide
ugaagugagguccaaugcu

SEQ ID NO: 1901116 - RNA, 19 nt, Artificial Sequence
  Description of Artificial Sequence: Synthetic oligonucleotide
ugauacuuguacaucgugu

SEQ ID NO: 1901117 - RNA, 19 nt, Artificial Sequence
  Description of Artificial Sequence: Synthetic oligonucleotide
ugaugugcacaucugagaa

SEQ ID NO: 1901118 - RNA, 19 nt, Artificial Sequence
  Description of Artificial Sequence: Synthetic oligonucleotide
ugugaggagugcaggaggg

SEQ ID NO: 1901119 - RNA, 19 nt, Artificial Sequence
  Description of Artificial Sequence: Synthetic oligonucleotide
agacauauagcugguuucc

SEQ ID NO: 1901120 - RNA, 19 nt, Artificial Sequence
  Description of Artificial Sequence: Synthetic oligonucleotide
uaaauaugagcagcugugg

SEQ ID NO: 1901121 - RNA, 19 nt, Artificial Sequence
  Description of Artificial Sequence: Synthetic oligonucleotide
ucuguauucaucccaccga

SEQ ID NO: 1901122 - RNA, 19 nt, Artificial Sequence
  Description of Artificial Sequence: Synthetic oligonucleotide
auuucgauuuccugacugg

SEQ ID NO: 1901123 - RNA, 19 nt, Artificial Sequence
  Description of Artificial Sequence: Synthetic oligonucleotide
auuucauguuacuuauauc

SEQ ID NO: 1901124 - RNA, 19 nt, Artificial Sequence
  Description of Artificial Sequence: Synthetic oligonucleotide
aaauacgugcaacuucaca

SEQ ID NO: 1901125 - RNA, 19 nt, Artificial Sequence
  Description of Artificial Sequence: Synthetic oligonucleotide
uuagaaugacagaaucuga

SEQ ID NO: 1901126 - RNA, 19 nt, Artificial Sequence
  Description of Artificial Sequence: Synthetic oligonucleotide
ugagaccacaucaaagugu

SEQ ID NO: 1901127 - RNA, 19 nt, Artificial Sequence
  Description of Artificial Sequence: Synthetic oligonucleotide
ugcaaugaagaucaucaaa

SEQ ID NO: 1901128 - RNA, 19 nt, Artificial Sequence
  Description of Artificial Sequence: Synthetic oligonucleotide
uguucccaaauccaugaug

SEQ ID NO: 1901129 - RNA, 19 nt, Artificial Sequence
  Description of Artificial Sequence: Synthetic oligonucleotide
aaguaucaaacugaaguga

SEQ ID NO: 1901130 - RNA, 19 nt, Artificial Sequence
  Description of Artificial Sequence: Synthetic oligonucleotide
guaaauaugagcagcugug

SEQ ID NO: 1901131 - RNA, 19 nt, Artificial Sequence
  Description of Artificial Sequence: Synthetic oligonucleotide
aguguuugcgucaaauacg

SEQ ID NO: 1901132 - RNA, 19 nt, Artificial Sequence
  Description of Artificial Sequence: Synthetic oligonucleotide
ucuguggugacuguguccc

SEQ ID NO: 1901133 - RNA, 19 nt, Artificial Sequence
  Description of Artificial Sequence: Synthetic oligonucleotide
ugugggacuaagcuucugc

SEQ ID NO: 1901134 - RNA, 19 nt, Artificial Sequence
  Description of Artificial Sequence: Synthetic oligonucleotide
uccccuucuguauucaucc

SEQ ID NO: 1901135 - RNA, 19 nt, Artificial Sequence
  Description of Artificial Sequence: Synthetic oligonucleotide
acugcuguguucccaaauc

SEQ ID NO: 1901136 - RNA, 19 nt, Artificial Sequence
  Description of Artificial Sequence: Synthetic oligonucleotide
aacacccagaugcugugag

SEQ ID NO: 1901137 - RNA, 19 nt, Artificial Sequence
  Description of Artificial Sequence: Synthetic oligonucleotide
caugaugugcacaucugag

SEQ ID NO: 1901138 - RNA, 19 nt, Artificial Sequence
  Description of Artificial Sequence: Synthetic oligonucleotide
acugguaguugcuucauga

SEQ ID NO: 1901139 - RNA, 19 nt, Artificial Sequence
  Description of Artificial Sequence: Synthetic oligonucleotide
uguaccauguagcuuuccu

SEQ ID NO: 1901140 - RNA, 19 nt, Artificial Sequence
  Description of Artificial Sequence: Synthetic oligonucleotide
auaucaaugcaaugaagau

SEQ ID NO: 1901141 - RNA, 19 nt, Artificial Sequence
  Description of Artificial Sequence: Synthetic oligonucleotide
ugguaguugcuucaugaug

SEQ ID NO: 1901142 - RNA, 19 nt, Artificial Sequence
  Description of Artificial Sequence: Synthetic oligonucleotide
agcaacauguuagucuggc

SEQ ID NO: 1901143 - RNA, 19 nt, Artificial Sequence
  Description of Artificial Sequence: Synthetic oligonucleotide
uacacauguuuucccacag

SEQ ID NO: 1901144 - RNA, 19 nt, Artificial Sequence
  Description of Artificial Sequence: Synthetic oligonucleotide
agaacuuguccccugacaa

SEQ ID NO: 1901145 - RNA, 19 nt, Artificial Sequence
  Description of Artificial Sequence: Synthetic oligonucleotide
uccacugggagucauuccu

SEQ ID NO: 1901146 - RNA, 19 nt, Artificial Sequence
  Description of Artificial Sequence: Synthetic oligonucleotide
aacauguuagucuggcuuu

SEQ ID NO: 1901147 - RNA, 19 nt, Artificial Sequence
  Description of Artificial Sequence: Synthetic oligonucleotide
uacgugcaacuucacaucc

SEQ ID NO: 1901148 - RNA, 19 nt, Artificial Sequence
  Description of Artificial Sequence: Synthetic oligonucleotide
uacuuguacaucguguuca

SEQ ID NO: 1901149 - RNA, 19 nt, Artificial Sequence
  Description of Artificial Sequence: Synthetic oligonucleotide
ucauagaucuccccuucug

SEQ ID NO: 1901150 - RNA, 19 nt, Artificial Sequence
  Description of Artificial Sequence: Synthetic oligonucleotide
augugucucuggcugagac

SEQ ID NO: 1901151 - RNA, 19 nt, Artificial Sequence
  Description of Artificial Sequence: Synthetic oligonucleotide
aauagcagcugcugacgug

SEQ ID NO: 1901152 - RNA, 19 nt, Artificial Sequence
  Description of Artificial Sequence: Synthetic oligonucleotide
uauucaucccaccgaacac

SEQ ID NO: 1901153 - RNA, 19 nt, Artificial Sequence
  Description of Artificial Sequence: Synthetic oligonucleotide
guuacuuauaucaaugcaa

SEQ ID NO: 1901154 - RNA, 19 nt, Artificial Sequence
  Description of Artificial Sequence: Synthetic oligonucleotide
acagucacaaagcaaucgu

SEQ ID NO: 1901155 - RNA, 19 nt, Artificial Sequence
  Description of Artificial Sequence: Synthetic oligonucleotide
auacuuguacaucguguuc

SEQ ID NO: 1901156 - RNA, 19 nt, Artificial Sequence
  Description of Artificial Sequence: Synthetic oligonucleotide
caccgaacacaaaacagag

SEQ ID NO: 1901157 - RNA, 19 nt, Artificial Sequence
  Description of Artificial Sequence: Synthetic oligonucleotide
aucaaacugaagugagguc

SEQ ID NO: 1901158 - RNA, 19 nt, Artificial Sequence
  Description of Artificial Sequence: Synthetic oligonucleotide
guauucaucccaccgaaca

SEQ ID NO: 1901159 - RNA, 19 nt, Artificial Sequence
  Description of Artificial Sequence: Synthetic oligonucleotide
cuuuccucagguaacccac

SEQ ID NO: 1901160 - RNA, 19 nt, Artificial Sequence
  Description of Artificial Sequence: Synthetic oligonucleotide
gacguguggaauguucucg

SEQ ID NO: 1901161 - RNA, 19 nt, Artificial Sequence
  Description of Artificial Sequence: Synthetic oligonucleotide
uagucaacuacagucacaa

SEQ ID NO: 1901162 - RNA, 19 nt, Artificial Sequence
  Description of Artificial Sequence: Synthetic oligonucleotide
cucacuucugguguggucc

SEQ ID NO: 1901163 - RNA, 19 nt, Artificial Sequence
  Description of Artificial Sequence: Synthetic oligonucleotide
uuagucaacuacagucaca

SEQ ID NO: 1901164 - RNA, 19 nt, Artificial Sequence
  Description of Artificial Sequence: Synthetic oligonucleotide
acacauguuuucccacagc

SEQ ID NO: 1901165 - RNA, 19 nt, Artificial Sequence
  Description of Artificial Sequence: Synthetic oligonucleotide
ugugauacuuguacaucgu

SEQ ID NO: 1901166 - RNA, 19 nt, Artificial Sequence
  Description of Artificial Sequence: Synthetic oligonucleotide
guuagucuggcuuuccuca

SEQ ID NO: 1901167 - RNA, 19 nt, Artificial Sequence
  Description of Artificial Sequence: Synthetic oligonucleotide
cuuauaucaaugcaaugaa

SEQ ID NO: 1901168 - RNA, 19 nt, Artificial Sequence
  Description of Artificial Sequence: Synthetic oligonucleotide
gaugacacacauggagugg

SEQ ID NO: 1901169 - RNA, 19 nt, Artificial Sequence
  Description of Artificial Sequence: Synthetic oligonucleotide
uccuccaaacauauacaca

SEQ ID NO: 1901170 - RNA, 19 nt, Artificial Sequence
  Description of Artificial Sequence: Synthetic oligonucleotide
cugaagugagguccaaugc

SEQ ID NO: 1901171 - RNA, 19 nt, Artificial Sequence
  Description of Artificial Sequence: Synthetic oligonucleotide
ggauccaagacuuguagac

SEQ ID NO: 1901172 - RNA, 19 nt, Artificial Sequence
  Description of Artificial Sequence: Synthetic oligonucleotide
agcuggcaugcucauaccg

SEQ ID NO: 1901173 - RNA, 19 nt, Artificial Sequence
  Description of Artificial Sequence: Synthetic oligonucleotide
acguguggaauguucucgg

SEQ ID NO: 1901174 - RNA, 19 nt, Artificial Sequence
  Description of Artificial Sequence: Synthetic oligonucleotide
agcuucugccauuucaugu

SEQ ID NO: 1901175 - RNA, 19 nt, Artificial Sequence
  Description of Artificial Sequence: Synthetic oligonucleotide
agacaauuucgauuuccug

SEQ ID NO: 1901176 - RNA, 19 nt, Artificial Sequence
  Description of Artificial Sequence: Synthetic oligonucleotide
guagacaauuucgauuucc

SEQ ID NO: 1901177 - RNA, 19 nt, Artificial Sequence
  Description of Artificial Sequence: Synthetic oligonucleotide
auggacgaagaguuuuguc

SEQ ID NO: 1901178 - RNA, 19 nt, Artificial Sequence
  Description of Artificial Sequence: Synthetic oligonucleotide
ggccaugccgagcagaugg

SEQ ID NO: 1901179 - RNA, 19 nt, Artificial Sequence
  Description of Artificial Sequence: Synthetic oligonucleotide
caugccgagcagauggagg

SEQ ID NO: 1901180 - RNA, 19 nt, Artificial Sequence
  Description of Artificial Sequence: Synthetic oligonucleotide
acaucguguucagugcucc

SEQ ID NO: 1901181 - RNA, 19 nt, Artificial Sequence
  Description of Artificial Sequence: Synthetic oligonucleotide
ucccaccgaacacaaaaca

SEQ ID NO: 1901182 - RNA, 19 nt, Artificial Sequence
  Description of Artificial Sequence: Synthetic oligonucleotide
aguccugguuucaggaucc

SEQ ID NO: 1901183 - RNA, 19 nt, Artificial Sequence
  Description of Artificial Sequence: Synthetic oligonucleotide
gaacuuguccccugacaag

SEQ ID NO: 1901184 - RNA, 19 nt, Artificial Sequence
  Description of Artificial Sequence: Synthetic oligonucleotide
cugacaagccuccauggac

SEQ ID NO: 1901185 - RNA, 19 nt, Artificial Sequence
  Description of Artificial Sequence: Synthetic oligonucleotide
caucacauggccaugccga

SEQ ID NO: 1901186 - RNA, 19 nt, Artificial Sequence
  Description of Artificial Sequence: Synthetic oligonucleotide
aagcuucugccauuucaug

SEQ ID NO: 1901187 - RNA, 19 nt, Artificial Sequence
  Description of Artificial Sequence: Synthetic oligonucleotide
guaucaaacugaagugagg

SEQ ID NO: 1901188 - RNA, 19 nt, Artificial Sequence
  Description of Artificial Sequence: Synthetic oligonucleotide
cuacaaugaagaccuuccc

SEQ ID NO: 1901189 - RNA, 19 nt, Artificial Sequence
  Description of Artificial Sequence: Synthetic oligonucleotide
cucagguaacccaccaccc

SEQ ID NO: 1901190 - RNA, 19 nt, Artificial Sequence
  Description of Artificial Sequence: Synthetic oligonucleotide
uggucuagucguccagggg

SEQ ID NO: 1901191 - RNA, 19 nt, Artificial Sequence
  Description of Artificial Sequence: Synthetic oligonucleotide
uguuagucuggcuuuccuc

SEQ ID NO: 1901192 - RNA, 19 nt, Artificial Sequence
  Description of Artificial Sequence: Synthetic oligonucleotide
guaccauguagcuuuccug

SEQ ID NO: 1901193 - RNA, 19 nt, Artificial Sequence
  Description of Artificial Sequence: Synthetic oligonucleotide
agggaaugaagcuggcaug

SEQ ID NO: 1901194 - RNA, 19 nt, Artificial Sequence
  Description of Artificial Sequence: Synthetic oligonucleotide
uuagucuggcuuuccucag

SEQ ID NO: 1901195 - RNA, 19 nt, Artificial Sequence
  Description of Artificial Sequence: Synthetic oligonucleotide
auaugagcagcuguggcca

SEQ ID NO: 1901196 - RNA, 19 nt, Artificial Sequence
  Description of Artificial Sequence: Synthetic oligonucleotide
ggacgaagaguuuuguccc

SEQ ID NO: 1901197 - RNA, 19 nt, Artificial Sequence
  Description of Artificial Sequence: Synthetic oligonucleotide
cugugaggagugcaggagg

SEQ ID NO: 1901198 - RNA, 19 nt, Artificial Sequence
  Description of Artificial Sequence: Synthetic oligonucleotide
uggaggacuuccauguguc

SEQ ID NO: 1901199 - RNA, 19 nt, Artificial Sequence
  Description of Artificial Sequence: Synthetic oligonucleotide
aguugcuucaugaugcccu

SEQ ID NO: 1901200 - RNA, 19 nt, Artificial Sequence
  Description of Artificial Sequence: Synthetic oligonucleotide
caaucgucauagaucuccc

SEQ ID NO: 1901201 - RNA, 19 nt, Artificial Sequence
  Description of Artificial Sequence: Synthetic oligonucleotide
cugcuguguucccaaaucc

SEQ ID NO: 1901202 - RNA, 19 nt, Artificial Sequence
  Description of Artificial Sequence: Synthetic oligonucleotide
ugugucucuggcugagacc

SEQ ID NO: 1901203 - RNA, 19 nt, Artificial Sequence
  Description of Artificial Sequence: Synthetic oligonucleotide
auggaggacuuccaugugu

SEQ ID NO: 1901204 - RNA, 19 nt, Artificial Sequence
  Description of Artificial Sequence: Synthetic oligonucleotide
ugggacuaagcuucugcca

SEQ ID NO: 1901205 - RNA, 19 nt, Artificial Sequence
  Description of Artificial Sequence: Synthetic oligonucleotide
uggcaugcucauaccgugg

SEQ ID NO: 1901206 - RNA, 19 nt, Artificial Sequence
  Description of Artificial Sequence: Synthetic oligonucleotide
ccgaacacaaaacagagca

SEQ ID NO: 1901207 - RNA, 19 nt, Artificial Sequence
  Description of Artificial Sequence: Synthetic oligonucleotide
uggcaagaggccuucugug

SEQ ID NO: 1901208 - RNA, 19 nt, Artificial Sequence
  Description of Artificial Sequence: Synthetic oligonucleotide
guugccaccaucacauggc

SEQ ID NO: 1901209 - RNA, 19 nt, Artificial Sequence
  Description of Artificial Sequence: Synthetic oligonucleotide
uguaugucagcagcauccc

SEQ ID NO: 1901210 - RNA, 19 nt, Artificial Sequence
  Description of Artificial Sequence: Synthetic oligonucleotide
augccgagcagauggagga

SEQ ID NO: 1901211 - RNA, 19 nt, Artificial Sequence
  Description of Artificial Sequence: Synthetic oligonucleotide
ugugugauacuuguacauc

SEQ ID NO: 1901212 - RNA, 19 nt, Artificial Sequence
  Description of Artificial Sequence: Synthetic oligonucleotide
gugggacuaagcuucugcc

SEQ ID NO: 1901213 - RNA, 19 nt, Artificial Sequence
  Description of Artificial Sequence: Synthetic oligonucleotide
gcaaucgucauagaucucc

SEQ ID NO: 1901214 - RNA, 19 nt, Artificial Sequence
  Description of Artificial Sequence: Synthetic oligonucleotide
uguauucaucccaccgaac

SEQ ID NO: 1901215 - RNA, 19 nt, Artificial Sequence
  Description of Artificial Sequence: Synthetic oligonucleotide
gugauacuuguacaucgug

SEQ ID NO: 1901216 - RNA, 19 nt, Artificial Sequence
  Description of Artificial Sequence: Synthetic oligonucleotide
aguuuugucccaguugcca

SEQ ID NO: 1901217 - RNA, 19 nt, Artificial Sequence
  Description of Artificial Sequence: Synthetic oligonucleotide
aucguguucagugcuccac

SEQ ID NO: 1901218 - RNA, 19 nt, Artificial Sequence
  Description of Artificial Sequence: Synthetic oligonucleotide
auagcagcugcugacgugu

SEQ ID NO: 1901219 - RNA, 19 nt, Artificial Sequence
  Description of Artificial Sequence: Synthetic oligonucleotide
uuucgauuuccugacuggu

SEQ ID NO: 1901220 - RNA, 19 nt, Artificial Sequence
  Description of Artificial Sequence: Synthetic oligonucleotide
guuuugucccaguugccac

SEQ ID NO: 1901221 - RNA, 19 nt, Artificial Sequence
  Description of Artificial Sequence: Synthetic oligonucleotide
ggaugacacacauggagug

SEQ ID NO: 1901222 - RNA, 19 nt, Artificial Sequence
  Description of Artificial Sequence: Synthetic oligonucleotide
gauacuuguacaucguguu

SEQ ID NO: 1901223 - RNA, 19 nt, Artificial Sequence
  Description of Artificial Sequence: Synthetic oligonucleotide
aggauccaagacuuguaga

SEQ ID NO: 1901224 - RNA, 19 nt, Artificial Sequence
  Description of Artificial Sequence: Synthetic oligonucleotide
caagccuccauggacgaag

SEQ ID NO: 1901225 - RNA, 19 nt, Artificial Sequence
  Description of Artificial Sequence: Synthetic oligonucleotide
aguggucuagucguccagg

SEQ ID NO: 1901226 - RNA, 19 nt, Artificial Sequence
  Description of Artificial Sequence: Synthetic oligonucleotide
cagauggaggacuuccaug

SEQ ID NO: 1901227 - RNA, 19 nt, Artificial Sequence
  Description of Artificial Sequence: Synthetic oligonucleotide
accgaacacaaaacagagc

SEQ ID NO: 1901228 - RNA, 19 nt, Artificial Sequence
  Description of Artificial Sequence: Synthetic oligonucleotide
accacccugagccacuugu

SEQ ID NO: 1901229 - RNA, 19 nt, Artificial Sequence
  Description of Artificial Sequence: Synthetic oligonucleotide
acagagcaacauguuaguc

SEQ ID NO: 1901230 - RNA, 19 nt, Artificial Sequence
  Description of Artificial Sequence: Synthetic oligonucleotide
auagaucuccccuucugua

SEQ ID NO: 1901231 - RNA, 19 nt, Artificial Sequence
  Description of Artificial Sequence: Synthetic oligonucleotide
uguccccugacaagccucc

SEQ ID NO: 1901232 - RNA, 19 nt, Artificial Sequence
  Description of Artificial Sequence: Synthetic oligonucleotide
cuggcaugcucauaccgug

SEQ ID NO: 1901233 - RNA, 19 nt, Artificial Sequence
  Description of Artificial Sequence: Synthetic oligonucleotide
cacauuuuagaaugacaga

SEQ ID NO: 1901234 - RNA, 19 nt, Artificial Sequence
  Description of Artificial Sequence: Synthetic oligonucleotide
guaguugcuucaugaugcc

SEQ ID NO: 1901235 - RNA, 19 nt, Artificial Sequence
  Description of Artificial Sequence: Synthetic oligonucleotide
ucguguucagugcuccacu

SEQ ID NO: 1901236 - RNA, 19 nt, Artificial Sequence
  Description of Artificial Sequence: Synthetic oligonucleotide
aaaguguaccauguagcuu

SEQ ID NO: 1901237 - RNA, 19 nt, Artificial Sequence
  Description of Artificial Sequence: Synthetic oligonucleotide
cuggcuuuccucagguaac

SEQ ID NO: 1901238 - RNA, 19 nt, Artificial Sequence
  Description of Artificial Sequence: Synthetic oligonucleotide
aacuacagucacaaagcaa

SEQ ID NO: 1901239 - RNA, 19 nt, Artificial Sequence
  Description of Artificial Sequence: Synthetic oligonucleotide
ggcaagaggccuucugugg

SEQ ID NO: 1901240 - RNA, 19 nt, Artificial Sequence
  Description of Artificial Sequence: Synthetic oligonucleotide
cuguguucccaaauccaug

SEQ ID NO: 1901241 - RNA, 19 nt, Artificial Sequence
  Description of Artificial Sequence: Synthetic oligonucleotide
uuucaggauccaagacuug

SEQ ID NO: 1901242 - RNA, 19 nt, Artificial Sequence
  Description of Artificial Sequence: Synthetic oligonucleotide
aucacauggccaugccgag

SEQ ID NO: 1901243 - RNA, 19 nt, Artificial Sequence
  Description of Artificial Sequence: Synthetic oligonucleotide
agcauccccuuucucagcu

SEQ ID NO: 1901244 - RNA, 19 nt, Artificial Sequence
  Description of Artificial Sequence: Synthetic oligonucleotide
agucuggcuuuccucaggu

SEQ ID NO: 1901245 - RNA, 19 nt, Artificial Sequence
  Description of Artificial Sequence: Synthetic oligonucleotide
cacugggagucauuccucc

SEQ ID NO: 1901246 - RNA, 19 nt, Artificial Sequence
  Description of Artificial Sequence: Synthetic oligonucleotide
gugucucuggcugagacca

SEQ ID NO: 1901247 - RNA, 19 nt, Artificial Sequence
  Description of Artificial Sequence: Synthetic oligonucleotide
ccugguuucaggauccaag

SEQ ID NO: 1901248 - RNA, 19 nt, Artificial Sequence
  Description of Artificial Sequence: Synthetic oligonucleotide
aacucgagggcaggguuug

SEQ ID NO: 1901249 - RNA, 19 nt, Artificial Sequence
  Description of Artificial Sequence: Synthetic oligonucleotide
caaacacccagaugcugug

SEQ ID NO: 1901250 - RNA, 19 nt, Artificial Sequence
  Description of Artificial Sequence: Synthetic oligonucleotide
cagguaacccaccacccug

SEQ ID NO: 1901251 - RNA, 19 nt, Artificial Sequence
  Description of Artificial Sequence: Synthetic oligonucleotide
ugcgucaaauacgugcaac

SEQ ID NO: 1901252 - RNA, 19 nt, Artificial Sequence
  Description of Artificial Sequence: Synthetic oligonucleotide
cuccaaacauauacacaug

SEQ ID NO: 1901253 - RNA, 19 nt, Artificial Sequence
  Description of Artificial Sequence: Synthetic oligonucleotide
cucauaccguggcaagagg

SEQ ID NO: 1901254 - RNA, 19 nt, Artificial Sequence
  Description of Artificial Sequence: Synthetic oligonucleotide
cauggaguggucuagucgu

SEQ ID NO: 1901255 - RNA, 19 nt, Artificial Sequence
  Description of Artificial Sequence: Synthetic oligonucleotide
gauggaggacuuccaugug

SEQ ID NO: 1901256 - RNA, 19 nt, Artificial Sequence
  Description of Artificial Sequence: Synthetic oligonucleotide
gauccaagacuuguagaca

SEQ ID NO: 1901257 - RNA, 19 nt, Artificial Sequence
  Description of Artificial Sequence: Synthetic oligonucleotide
uguagacaauuucgauuuc

SEQ ID NO: 1901258 - RNA, 19 nt, Artificial Sequence
  Description of Artificial Sequence: Synthetic oligonucleotide
augcucauaccguggcaag

SEQ ID NO: 1901259 - RNA, 19 nt, Artificial Sequence
  Description of Artificial Sequence: Synthetic oligonucleotide
aggaaaguaucaaacugaa

SEQ ID NO: 1901260 - RNA, 19 nt, Artificial Sequence
  Description of Artificial Sequence: Synthetic oligonucleotide
acauguuagucuggcuuuc

SEQ ID NO: 1901261 - RNA, 19 nt, Artificial Sequence
  Description of Artificial Sequence: Synthetic oligonucleotide
uggaauguucucggggaug

SEQ ID NO: 1901262 - RNA, 19 nt, Artificial Sequence
  Description of Artificial Sequence: Synthetic oligonucleotide
caacuucacauccugcaca

SEQ ID NO: 1901263 - RNA, 19 nt, Artificial Sequence
  Description of Artificial Sequence: Synthetic oligonucleotide
ugguuuggauuuugcuccc

SEQ ID NO: 1901264 - RNA, 19 nt, Artificial Sequence
  Description of Artificial Sequence: Synthetic oligonucleotide
caaacugaagugaggucca

SEQ ID NO: 1901265 - RNA, 19 nt, Artificial Sequence
  Description of Artificial Sequence: Synthetic oligonucleotide
agugagguccaaugcugcu

SEQ ID NO: 1901266 - RNA, 19 nt, Artificial Sequence
  Description of Artificial Sequence: Synthetic oligonucleotide
cuacagucacaaagcaauc

SEQ ID NO: 1901267 - RNA, 19 nt, Artificial Sequence
  Description of Artificial Sequence: Synthetic oligonucleotide
aucccaccgaacacaaaac

SEQ ID NO: 1901268 - RNA, 19 nt, Artificial Sequence
  Description of Artificial Sequence: Synthetic oligonucleotide
acuaagcuucugccauuuc

SEQ ID NO: 1901269 - RNA, 19 nt, Artificial Sequence
  Description of Artificial Sequence: Synthetic oligonucleotide
augacacacauggaguggu

SEQ ID NO: 1901270 - RNA, 19 nt, Artificial Sequence
  Description of Artificial Sequence: Synthetic oligonucleotide
ugguccaaguccugguuuc

SEQ ID NO: 1901271 - RNA, 19 nt, Artificial Sequence
  Description of Artificial Sequence: Synthetic oligonucleotide
ccucagguaacccaccacc

SEQ ID NO: 1901272 - RNA, 19 nt, Artificial Sequence
  Description of Artificial Sequence: Synthetic oligonucleotide
uguuugcgucaaauacgug

SEQ ID NO: 1901273 - RNA, 19 nt, Artificial Sequence
  Description of Artificial Sequence: Synthetic oligonucleotide
uccauggacgaagaguuuu

SEQ ID NO: 1901274 - RNA, 19 nt, Artificial Sequence
  Description of Artificial Sequence: Synthetic oligonucleotide
gauuuccugacugguccgc

SEQ ID NO: 1901275 - RNA, 19 nt, Artificial Sequence
  Description of Artificial Sequence: Synthetic oligonucleotide
caaaguguaccauguagcu

SEQ ID NO: 1901276 - RNA, 19 nt, Artificial Sequence
  Description of Artificial Sequence: Synthetic oligonucleotide
ugggagucauuccuccaaa

SEQ ID NO: 1901277 - RNA, 19 nt, Artificial Sequence
  Description of Artificial Sequence: Synthetic oligonucleotide
gcugcugacguguggaaug

SEQ ID NO: 1901278 - RNA, 19 nt, Artificial Sequence
  Description of Artificial Sequence: Synthetic oligonucleotide
agccacuuguaugucagca

SEQ ID NO: 1901279 - RNA, 19 nt, Artificial Sequence
  Description of Artificial Sequence: Synthetic oligonucleotide
ccacuuguaugucagcagc

SEQ ID NO: 1901280 - RNA, 19 nt, Artificial Sequence
  Description of Artificial Sequence: Synthetic oligonucleotide
gacugugucccacugcugu

SEQ ID NO: 1901281 - RNA, 19 nt, Artificial Sequence
  Description of Artificial Sequence: Synthetic oligonucleotide
guccaaugcugcuuuucug

SEQ ID NO: 1901282 - RNA, 19 nt, Artificial Sequence
  Description of Artificial Sequence: Synthetic oligonucleotide
guaugucagcagcaucccc

SEQ ID NO: 1901283 - RNA, 19 nt, Artificial Sequence
  Description of Artificial Sequence: Synthetic oligonucleotide
uccaugugucucuggcuga

SEQ ID NO: 1901284 - RNA, 19 nt, Artificial Sequence
  Description of Artificial Sequence: Synthetic oligonucleotide
ugacguguggaauguucuc

SEQ ID NO: 1901285 - RNA, 19 nt, Artificial Sequence
  Description of Artificial Sequence: Synthetic oligonucleotide
ucgucauagaucuccccuu

SEQ ID NO: 1901286 - RNA, 19 nt, Artificial Sequence
  Description of Artificial Sequence: Synthetic oligonucleotide
gacugguaguugcuucaug

SEQ ID NO: 1901287 - RNA, 19 nt, Artificial Sequence
  Description of Artificial Sequence: Synthetic oligonucleotide
ucacuucugguguggucca

SEQ ID NO: 1901288 - RNA, 19 nt, Artificial Sequence
  Description of Artificial Sequence: Synthetic oligonucleotide
uuuccugacugguccgcac

SEQ ID NO: 1901289 - RNA, 19 nt, Artificial Sequence
  Description of Artificial Sequence: Synthetic oligonucleotide
ggagucauuccuccaaaca

SEQ ID NO: 1901290 - RNA, 19 nt, Artificial Sequence
  Description of Artificial Sequence: Synthetic oligonucleotide
guggacaucacuggccaug

SEQ ID NO: 1901291 - RNA, 19 nt, Artificial Sequence
  Description of Artificial Sequence: Synthetic oligonucleotide
uggaguggucuagucgucc

SEQ ID NO: 1901292 - RNA, 19 nt, Artificial Sequence
  Description of Artificial Sequence: Synthetic oligonucleotide
cccaccgaacacaaaacag

SEQ ID NO: 1901293 - RNA, 19 nt, Artificial Sequence
  Description of Artificial Sequence: Synthetic oligonucleotide
augacagaaucugagucuu

SEQ ID NO: 1901294 - RNA, 19 nt, Artificial Sequence
  Description of Artificial Sequence: Synthetic oligonucleotide
gggaaugaagcuggcaugc

SEQ ID NO: 1901295 - RNA, 19 nt, Artificial Sequence
  Description of Artificial Sequence: Synthetic oligonucleotide
augcaaugaagaucaucaa

SEQ ID NO: 1901296 - RNA, 19 nt, Artificial Sequence
  Description of Artificial Sequence: Synthetic oligonucleotide
caaauacgugcaacuucac

SEQ ID NO: 1901297 - RNA, 19 nt, Artificial Sequence
  Description of Artificial Sequence: Synthetic oligonucleotide
gacgaagaguuuuguccca

SEQ ID NO: 1901298 - RNA, 19 nt, Artificial Sequence
  Description of Artificial Sequence: Synthetic oligonucleotide
cacacauggaguggucuag

SEQ ID NO: 1901299 - RNA, 19 nt, Artificial Sequence
  Description of Artificial Sequence: Synthetic oligonucleotide
caagaggccuucuguggug

SEQ ID NO: 1901300 - RNA, 19 nt, Artificial Sequence
  Description of Artificial Sequence: Synthetic oligonucleotide
uaguugcuucaugaugccc

SEQ ID NO: 1901301 - RNA, 19 nt, Artificial Sequence
  Description of Artificial Sequence: Synthetic oligonucleotide
uggcuuuccucagguaacc

SEQ ID NO: 1901302 - RNA, 19 nt, Artificial Sequence
  Description of Artificial Sequence: Synthetic oligonucleotide
uggcugagaccacaucaaa

SEQ ID NO: 1901303 - RNA, 19 nt, Artificial Sequence
  Description of Artificial Sequence: Synthetic oligonucleotide
uguggccaacucgagggca

SEQ ID NO: 1901304 - RNA, 19 nt, Artificial Sequence
  Description of Artificial Sequence: Synthetic oligonucleotide
caucacuggccaugggaug

SEQ ID NO: 1901305 - RNA, 19 nt, Artificial Sequence
  Description of Artificial Sequence: Synthetic oligonucleotide
cuguauucaucccaccgaa

SEQ ID NO: 1901306 - RNA, 19 nt, Artificial Sequence
  Description of Artificial Sequence: Synthetic oligonucleotide
guuccaagacugguaguug

SEQ ID NO: 1901307 - RNA, 19 nt, Artificial Sequence
  Description of Artificial Sequence: Synthetic oligonucleotide
ugacugugucccacugcug

SEQ ID NO: 1901308 - RNA, 19 nt, Artificial Sequence
  Description of Artificial Sequence: Synthetic oligonucleotide
cauguuagucuggcuuucc

SEQ ID NO: 1901309 - RNA, 19 nt, Artificial Sequence
  Description of Artificial Sequence: Synthetic oligonucleotide
gacaagccuccauggacga

SEQ ID NO: 1901310 - RNA, 19 nt, Artificial Sequence
  Description of Artificial Sequence: Synthetic oligonucleotide
agucauuccuccaaacaua

SEQ ID NO: 1901311 - RNA, 19 nt, Artificial Sequence
  Description of Artificial Sequence: Synthetic oligonucleotide
gacauauagcugguuucca

SEQ ID NO: 1901312 - RNA, 19 nt, Artificial Sequence
  Description of Artificial Sequence: Synthetic oligonucleotide
ugcucauaccguggcaaga

SEQ ID NO: 1901313 - RNA, 19 nt, Artificial Sequence
  Description of Artificial Sequence: Synthetic oligonucleotide
ucccucucuuggcaucacc

SEQ ID NO: 1901314 - RNA, 19 nt, Artificial Sequence
  Description of Artificial Sequence: Synthetic oligonucleotide
acacacauggaguggucua

SEQ ID NO: 1901315 - RNA, 19 nt, Artificial Sequence
  Description of Artificial Sequence: Synthetic oligonucleotide
cacuuguaugucagcagca

SEQ ID NO: 1901316 - RNA, 19 nt, Artificial Sequence
  Description of Artificial Sequence: Synthetic oligonucleotide
aacugaagugagguccaau

SEQ ID NO: 1901317 - RNA, 19 nt, Artificial Sequence
  Description of Artificial Sequence: Synthetic oligonucleotide
acauguuuucccacagcca

SEQ ID NO: 1901318 - RNA, 19 nt, Artificial Sequence
  Description of Artificial Sequence: Synthetic oligonucleotide
acugggagucauuccucca

SEQ ID NO: 1901319 - RNA, 19 nt, Artificial Sequence
  Description of Artificial Sequence: Synthetic oligonucleotide
ugguuuccaauagcagcug

SEQ ID NO: 1901320 - RNA, 19 nt, Artificial Sequence
  Description of Artificial Sequence: Synthetic oligonucleotide
ugacacacauggagugguc

SEQ ID NO: 1901321 - RNA, 19 nt, Artificial Sequence
  Description of Artificial Sequence: Synthetic oligonucleotide
gaguuuugucccaguugcc

SEQ ID NO: 1901322 - RNA, 19 nt, Artificial Sequence
  Description of Artificial Sequence: Synthetic oligonucleotide
auaccguggcaagaggccu

SEQ ID NO: 1901323 - RNA, 19 nt, Artificial Sequence
  Description of Artificial Sequence: Synthetic oligonucleotide
cuccacugggagucauucc

SEQ ID NO: 1901324 - RNA, 19 nt, Artificial Sequence
  Description of Artificial Sequence: Synthetic oligonucleotide
ucucuggcugagaccacau

SEQ ID NO: 1901325 - RNA, 19 nt, Artificial Sequence
  Description of Artificial Sequence: Synthetic oligonucleotide
cacaucaaaguguuugcgu

SEQ ID NO: 1901326 - RNA, 19 nt, Artificial Sequence
  Description of Artificial Sequence: Synthetic oligonucleotide
ucucagagguggacaucac

SEQ ID NO: 1901327 - RNA, 19 nt, Artificial Sequence
  Description of Artificial Sequence: Synthetic oligonucleotide
ucaaaguguuugcgucaaa

SEQ ID NO: 1901328 - RNA, 19 nt, Artificial Sequence
  Description of Artificial Sequence: Synthetic oligonucleotide
ggcaugcucauaccguggc

SEQ ID NO: 1901329 - RNA, 19 nt, Artificial Sequence
  Description of Artificial Sequence: Synthetic oligonucleotide
caacauguuagucuggcuu

SEQ ID NO: 1901330 - RNA, 19 nt, Artificial Sequence
  Description of Artificial Sequence: Synthetic oligonucleotide
uugcgucaaauacgugcaa

SEQ ID NO: 1901331 - RNA, 19 nt, Artificial Sequence
  Description of Artificial Sequence: Synthetic oligonucleotide
guguuugcgucaaauacgu

SEQ ID NO: 1901332 - RNA, 19 nt, Artificial Sequence
  Description of Artificial Sequence: Synthetic oligonucleotide
ucacauggccaugccgagc

SEQ ID NO: 1901333 - RNA, 19 nt, Artificial Sequence
  Description of Artificial Sequence: Synthetic oligonucleotide
ucccaguugccaccaucac

SEQ ID NO: 1901334 - RNA, 19 nt, Artificial Sequence
  Description of Artificial Sequence: Synthetic oligonucleotide
gcucauaccguggcaagag

SEQ ID NO: 1901335 - RNA, 19 nt, Artificial Sequence
  Description of Artificial Sequence: Synthetic oligonucleotide
gggcgagucaaaguguacc

SEQ ID NO: 1901336 - RNA, 19 nt, Artificial Sequence
  Description of Artificial Sequence: Synthetic oligonucleotide
ggcgagucaaaguguacca

SEQ ID NO: 1901337 - RNA, 19 nt, Artificial Sequence
  Description of Artificial Sequence: Synthetic oligonucleotide
ccaccgaacacaaaacaga

SEQ ID NO: 1901338 - RNA, 19 nt, Artificial Sequence
  Description of Artificial Sequence: Synthetic oligonucleotide
caugcucauaccguggcaa

SEQ ID NO: 1901339 - RNA, 19 nt, Artificial Sequence
  Description of Artificial Sequence: Synthetic oligonucleotide
gagccacuuguaugucagc

SEQ ID NO: 1901340 - RNA, 19 nt, Artificial Sequence
  Description of Artificial Sequence: Synthetic oligonucleotide
ccaucacauggccaugccg

SEQ ID NO: 1901341 - RNA, 19 nt, Artificial Sequence
  Description of Artificial Sequence: Synthetic oligonucleotide
cauagaucuccccuucugu

SEQ ID NO: 1901342 - RNA, 19 nt, Artificial Sequence
  Description of Artificial Sequence: Synthetic oligonucleotide
augaagcuggcaugcucau

SEQ ID NO: 1901343 - RNA, 19 nt, Artificial Sequence
  Description of Artificial Sequence: Synthetic oligonucleotide
cacccagaugcugugagga

SEQ ID NO: 1901344 - RNA, 19 nt, Artificial Sequence
  Description of Artificial Sequence: Synthetic oligonucleotide
ccauguagcuuuccugggc

SEQ ID NO: 1901345 - RNA, 19 nt, Artificial Sequence
  Description of Artificial Sequence: Synthetic oligonucleotide
cccugacaagccuccaugg

SEQ ID NO: 1901346 - RNA, 19 nt, Artificial Sequence
  Description of Artificial Sequence: Synthetic oligonucleotide
uccccugacaagccuccau

SEQ ID NO: 1901347 - RNA, 19 nt, Artificial Sequence
  Description of Artificial Sequence: Synthetic oligonucleotide
ugugucccacugcuguguu

SEQ ID NO: 1901348 - RNA, 19 nt, Artificial Sequence
  Description of Artificial Sequence: Synthetic oligonucleotide
aaacugaagugagguccaa

SEQ ID NO: 1901349 - RNA, 19 nt, Artificial Sequence
  Description of Artificial Sequence: Synthetic oligonucleotide
agggcgagucaaaguguac

SEQ ID NO: 1901350 - RNA, 19 nt, Artificial Sequence
  Description of Artificial Sequence: Synthetic oligonucleotide
auuuccugacugguccgca

SEQ ID NO: 1901351 - RNA, 19 nt, Artificial Sequence
  Description of Artificial Sequence: Synthetic oligonucleotide
cucuuggcaucaccagcug

SEQ ID NO: 1901352 - RNA, 19 nt, Artificial Sequence
  Description of Artificial Sequence: Synthetic oligonucleotide
acccaccacccugagccac

SEQ ID NO: 1901353 - RNA, 19 nt, Artificial Sequence
  Description of Artificial Sequence: Synthetic oligonucleotide
ugucuccagggcgagucaa

SEQ ID NO: 1901354 - RNA, 19 nt, Artificial Sequence
  Description of Artificial Sequence: Synthetic oligonucleotide
agccccugugggacuaagc

SEQ ID NO: 1901355 - RNA, 19 nt, Artificial Sequence
  Description of Artificial Sequence: Synthetic oligonucleotide
guccaaguccugguuucag

SEQ ID NO: 1901356 - RNA, 19 nt, Artificial Sequence
  Description of Artificial Sequence: Synthetic oligonucleotide
auggaguggucuagucguc

SEQ ID NO: 1901357 - RNA, 19 nt, Artificial Sequence
  Description of Artificial Sequence: Synthetic oligonucleotide
gagugcaggagggaaugaa

SEQ ID NO: 1901358 - RNA, 19 nt, Artificial Sequence
  Description of Artificial Sequence: Synthetic oligonucleotide
agcaugggcagcacagccu

SEQ ID NO: 1901359 - RNA, 19 nt, Artificial Sequence
  Description of Artificial Sequence: Synthetic oligonucleotide
cugggagucauuccuccaa

SEQ ID NO: 1901360 - RNA, 19 nt, Artificial Sequence
  Description of Artificial Sequence: Synthetic oligonucleotide
gggguaggaaaguaucaaa

SEQ ID NO: 1901361 - RNA, 19 nt, Artificial Sequence
  Description of Artificial Sequence: Synthetic oligonucleotide
gugcaacuucacauccugc

SEQ ID NO: 1901362 - RNA, 19 nt, Artificial Sequence
  Description of Artificial Sequence: Synthetic oligonucleotide
gacacacauggaguggucu

SEQ ID NO: 1901363 - RNA, 19 nt, Artificial Sequence
  Description of Artificial Sequence: Synthetic oligonucleotide
ccauggacgaagaguuuug

SEQ ID NO: 1901364 - RNA, 19 nt, Artificial Sequence
  Description of Artificial Sequence: Synthetic oligonucleotide
uaccguggcaagaggccuu

SEQ ID NO: 1901365 - RNA, 19 nt, Artificial Sequence
  Description of Artificial Sequence: Synthetic oligonucleotide
agcagauggaggacuucca

SEQ ID NO: 1901366 - RNA, 19 nt, Artificial Sequence
  Description of Artificial Sequence: Synthetic oligonucleotide
agguaacccaccacccuga

SEQ ID NO: 1901367 - RNA, 19 nt, Artificial Sequence
  Description of Artificial Sequence: Synthetic oligonucleotide
caaaguguuugcgucaaau

SEQ ID NO: 1901368 - RNA, 19 nt, Artificial Sequence
  Description of Artificial Sequence: Synthetic oligonucleotide
gggagucauuccuccaaac

SEQ ID NO: 1901369 - RNA, 19 nt, Artificial Sequence
  Description of Artificial Sequence: Synthetic oligonucleotide
cuggugugguccaaguccu

SEQ ID NO: 1901370 - RNA, 19 nt, Artificial Sequence
  Description of Artificial Sequence: Synthetic oligonucleotide
ccaguugccaccaucacau

SEQ ID NO: 1901371 - RNA, 19 nt, Artificial Sequence
  Description of Artificial Sequence: Synthetic oligonucleotide
auguagcuuuccugggcuu

SEQ ID NO: 1901372 - RNA, 19 nt, Artificial Sequence
  Description of Artificial Sequence: Synthetic oligonucleotide
ggaguggucuagucgucca

SEQ ID NO: 1901373 - RNA, 19 nt, Artificial Sequence
  Description of Artificial Sequence: Synthetic oligonucleotide
agcaaucgucauagaucuc

SEQ ID NO: 1901374 - RNA, 19 nt, Artificial Sequence
  Description of Artificial Sequence: Synthetic oligonucleotide
ugcucacuucugguguggu

SEQ ID NO: 1901375 - RNA, 19 nt, Artificial Sequence
  Description of Artificial Sequence: Synthetic oligonucleotide
uccugguuucaggauccaa

SEQ ID NO: 1901376 - RNA, 19 nt, Artificial Sequence
  Description of Artificial Sequence: Synthetic oligonucleotide
gggacuaagcuucugccau

SEQ ID NO: 1901377 - RNA, 19 nt, Artificial Sequence
  Description of Artificial Sequence: Synthetic oligonucleotide
cagggcgagucaaagugua

SEQ ID NO: 1901378 - RNA, 19 nt, Artificial Sequence
  Description of Artificial Sequence: Synthetic oligonucleotide
gcugacguguggaauguuc

SEQ ID NO: 1901379 - RNA, 19 nt, Artificial Sequence
  Description of Artificial Sequence: Synthetic oligonucleotide
cucuggcugagaccacauc

SEQ ID NO: 1901380 - RNA, 19 nt, Artificial Sequence
  Description of Artificial Sequence: Synthetic oligonucleotide
agacugguaguugcuucau

SEQ ID NO: 1901381 - RNA, 19 nt, Artificial Sequence
  Description of Artificial Sequence: Synthetic oligonucleotide
cucgagggcaggguuuguc

SEQ ID NO: 1901382 - RNA, 19 nt, Artificial Sequence
  Description of Artificial Sequence: Synthetic oligonucleotide
gucucuggcugagaccaca

SEQ ID NO: 1901383 - RNA, 19 nt, Artificial Sequence
  Description of Artificial Sequence: Synthetic oligonucleotide
caauagcagcugcugacgu

SEQ ID NO: 1901384 - RNA, 19 nt, Artificial Sequence
  Description of Artificial Sequence: Synthetic oligonucleotide
ccaugaugugcacaucuga

SEQ ID NO: 1901385 - RNA, 19 nt, Artificial Sequence
  Description of Artificial Sequence: Synthetic oligonucleotide
cgauuuccugacugguccg

SEQ ID NO: 1901386 - RNA, 19 nt, Artificial Sequence
  Description of Artificial Sequence: Synthetic oligonucleotide
gcgucaaauacgugcaacu

SEQ ID NO: 1901387 - RNA, 19 nt, Artificial Sequence
  Description of Artificial Sequence: Synthetic oligonucleotide
gucauagaucuccccuucu

SEQ ID NO: 1901388 - RNA, 19 nt, Artificial Sequence
  Description of Artificial Sequence: Synthetic oligonucleotide
agcugcugacguguggaau

SEQ ID NO: 1901389 - RNA, 19 nt, Artificial Sequence
  Description of Artificial Sequence: Synthetic oligonucleotide
ugcuccacugggagucauu

SEQ ID NO: 1901390 - RNA, 19 nt, Artificial Sequence
  Description of Artificial Sequence: Synthetic oligonucleotide
acgugcaacuucacauccu

SEQ ID NO: 1901391 - RNA, 19 nt, Artificial Sequence
  Description of Artificial Sequence: Synthetic oligonucleotide
ccccugacaagccuccaug

SEQ ID NO: 1901392 - RNA, 19 nt, Artificial Sequence
  Description of Artificial Sequence: Synthetic oligonucleotide
gggaugacacacauggagu

SEQ ID NO: 1901393 - RNA, 19 nt, Artificial Sequence
  Description of Artificial Sequence: Synthetic oligonucleotide
gguuugucuccagggcgag

SEQ ID NO: 1901394 - RNA, 19 nt, Artificial Sequence
  Description of Artificial Sequence: Synthetic oligonucleotide
caucguguucagugcucca

SEQ ID NO: 1901395 - RNA, 19 nt, Artificial Sequence
  Description of Artificial Sequence: Synthetic oligonucleotide
gguuuggauuuugcucccc

SEQ ID NO: 1901396 - RNA, 19 nt, Artificial Sequence
  Description of Artificial Sequence: Synthetic oligonucleotide
cccucucuuggcaucacca

SEQ ID NO: 1901397 - RNA, 19 nt, Artificial Sequence
  Description of Artificial Sequence: Synthetic oligonucleotide
gacuaagcuucugccauuu

SEQ ID NO: 1901398 - RNA, 19 nt, Artificial Sequence
  Description of Artificial Sequence: Synthetic oligonucleotide
gcaagaggccuucuguggu

SEQ ID NO: 1901399 - RNA, 19 nt, Artificial Sequence
  Description of Artificial Sequence: Synthetic oligonucleotide
gguuccaagacugguaguu

SEQ ID NO: 1901400 - RNA, 19 nt, Artificial Sequence
  Description of Artificial Sequence: Synthetic oligonucleotide
agugcuccacugggaguca

SEQ ID NO: 1901401 - RNA, 19 nt, Artificial Sequence
  Description of Artificial Sequence: Synthetic oligonucleotide
cguguucagugcuccacug

SEQ ID NO: 1901402 - RNA, 19 nt, Artificial Sequence
  Description of Artificial Sequence: Synthetic oligonucleotide
gccccugugggacuaagcu

SEQ ID NO: 1901403 - RNA, 19 nt, Artificial Sequence
  Description of Artificial Sequence: Synthetic oligonucleotide
ccaugggaugacacacaug

SEQ ID NO: 1901404 - RNA, 19 nt, Artificial Sequence
  Description of Artificial Sequence: Synthetic oligonucleotide
caaguccugguuucaggau

SEQ ID NO: 1901405 - RNA, 19 nt, Artificial Sequence
  Description of Artificial Sequence: Synthetic oligonucleotide
caauuucgauuuccugacu

SEQ ID NO: 1901406 - RNA, 19 nt, Artificial Sequence
  Description of Artificial Sequence: Synthetic oligonucleotide
gugaggagugcaggaggga

SEQ ID NO: 1901407 - RNA, 19 nt, Artificial Sequence
  Description of Artificial Sequence: Synthetic oligonucleotide
guggaauguucucggggau

SEQ ID NO: 1901408 - RNA, 19 nt, Artificial Sequence
  Description of Artificial Sequence: Synthetic oligonucleotide
cauccugcacaggcugguc

SEQ ID NO: 1901409 - RNA, 19 nt, Artificial Sequence
  Description of Artificial Sequence: Synthetic oligonucleotide
ccaugugucucuggcugag

SEQ ID NO: 1901410 - RNA, 19 nt, Artificial Sequence
  Description of Artificial Sequence: Synthetic oligonucleotide
cauggacgaagaguuuugu

SEQ ID NO: 1901411 - RNA, 19 nt, Artificial Sequence
  Description of Artificial Sequence: Synthetic oligonucleotide
gcaugcucauaccguggca

SEQ ID NO: 1901412 - RNA, 19 nt, Artificial Sequence
  Description of Artificial Sequence: Synthetic oligonucleotide
ccuucccucucuuggcauc

SEQ ID NO: 1901413 - RNA, 19 nt, Artificial Sequence
  Description of Artificial Sequence: Synthetic oligonucleotide
ccugacaagccuccaugga

SEQ ID NO: 1901414 - RNA, 19 nt, Artificial Sequence
  Description of Artificial Sequence: Synthetic oligonucleotide
guagcuuuccugggcuugu

SEQ ID NO: 1901415 - RNA, 19 nt, Artificial Sequence
  Description of Artificial Sequence: Synthetic oligonucleotide
cccugagccacuuguaugu

SEQ ID NO: 1901416 - RNA, 19 nt, Artificial Sequence
  Description of Artificial Sequence: Synthetic oligonucleotide
gcugcuuuucugugugaua

SEQ ID NO: 1901417 - RNA, 19 nt, Artificial Sequence
  Description of Artificial Sequence: Synthetic oligonucleotide
gaacagccccugugggacu

SEQ ID NO: 1901418 - RNA, 19 nt, Artificial Sequence
  Description of Artificial Sequence: Synthetic oligonucleotide
acaagccuccauggacgaa

SEQ ID NO: 1901419 - RNA, 19 nt, Artificial Sequence
  Description of Artificial Sequence: Synthetic oligonucleotide
gaggccuucuguggugacu

SEQ ID NO: 1901420 - RNA, 19 nt, Artificial Sequence
  Description of Artificial Sequence: Synthetic oligonucleotide
ccaaagacauauagcuggu

SEQ ID NO: 1901421 - RNA, 19 nt, Artificial Sequence
  Description of Artificial Sequence: Synthetic oligonucleotide
ccaugccgagcagauggag

SEQ ID NO: 1901422 - RNA, 19 nt, Artificial Sequence
  Description of Artificial Sequence: Synthetic oligonucleotide
cacccugagccacuuguau

SEQ ID NO: 1901423 - RNA, 19 nt, Artificial Sequence
  Description of Artificial Sequence: Synthetic oligonucleotide
caugugucucuggcugaga

SEQ ID NO: 1901424 - RNA, 19 nt, Artificial Sequence
  Description of Artificial Sequence: Synthetic oligonucleotide
gcuguguucccaaauccau

SEQ ID NO: 1901425 - RNA, 19 nt, Artificial Sequence
  Description of Artificial Sequence: Synthetic oligonucleotide
ugcugacguguggaauguu

SEQ ID NO: 1901426 - RNA, 19 nt, Artificial Sequence
  Description of Artificial Sequence: Synthetic oligonucleotide
gcuggcaugcucauaccgu

SEQ ID NO: 1901427 - RNA, 19 nt, Artificial Sequence
  Description of Artificial Sequence: Synthetic oligonucleotide
caacucgagggcaggguuu

SEQ ID NO: 1901428 - RNA, 19 nt, Artificial Sequence
  Description of Artificial Sequence: Synthetic oligonucleotide
gguccaaguccugguuuca

SEQ ID NO: 1901429 - RNA, 19 nt, Artificial Sequence
  Description of Artificial Sequence: Synthetic oligonucleotide
cagccccugugggacuaag

SEQ ID NO: 1901430 - RNA, 19 nt, Artificial Sequence
  Description of Artificial Sequence: Synthetic oligonucleotide
gaauguucucggggauggu

SEQ ID NO: 1901431 - RNA, 19 nt, Artificial Sequence
  Description of Artificial Sequence: Synthetic oligonucleotide
cacugcuguguucccaaau

SEQ ID NO: 1901432 - RNA, 19 nt, Artificial Sequence
  Description of Artificial Sequence: Synthetic oligonucleotide
cuuguacaucguguucagu

SEQ ID NO: 1901433 - RNA, 19 nt, Artificial Sequence
  Description of Artificial Sequence: Synthetic oligonucleotide
ggaggacuuccaugugucu

SEQ ID NO: 1901434 - RNA, 19 nt, Artificial Sequence
  Description of Artificial Sequence: Synthetic oligonucleotide
caccacccugagccacuug

SEQ ID NO: 1901435 - RNA, 19 nt, Artificial Sequence
  Description of Artificial Sequence: Synthetic oligonucleotide
gucuccagggcgagucaaa

SEQ ID NO: 1901436 - RNA, 19 nt, Artificial Sequence
  Description of Artificial Sequence: Synthetic oligonucleotide
acucgagggcaggguuugu

SEQ ID NO: 1901437 - RNA, 19 nt, Artificial Sequence
  Description of Artificial Sequence: Synthetic oligonucleotide
cugcugacguguggaaugu

SEQ ID NO: 1901438 - RNA, 19 nt, Artificial Sequence
  Description of Artificial Sequence: Synthetic oligonucleotide
caaagacauauagcugguu

SEQ ID NO: 1901439 - RNA, 19 nt, Artificial Sequence
  Description of Artificial Sequence: Synthetic oligonucleotide
guccugguuucaggaucca

SEQ ID NO: 1901440 - RNA, 19 nt, Artificial Sequence
  Description of Artificial Sequence: Synthetic oligonucleotide
cugggcuugucuccagguu

SEQ ID NO: 1901441 - RNA, 19 nt, Artificial Sequence
  Description of Artificial Sequence: Synthetic oligonucleotide
gagguccaaugcugcuuuu

SEQ ID NO: 1901442 - RNA, 19 nt, Artificial Sequence
  Description of Artificial Sequence: Synthetic oligonucleotide
ccaagacuuguagacaauu

SEQ ID NO: 1901443 - RNA, 19 nt, Artificial Sequence
  Description of Artificial Sequence: Synthetic oligonucleotide
ccagggcgagucaaagugu

SEQ ID NO: 1901444 - RNA, 19 nt, Artificial Sequence
  Description of Artificial Sequence: Synthetic oligonucleotide
guccccugacaagccucca

SEQ ID NO: 1901445 - RNA, 19 nt, Artificial Sequence
  Description of Artificial Sequence: Synthetic oligonucleotide
cccagaugcugugaggagu

SEQ ID NO: 1901446 - RNA, 19 nt, Artificial Sequence
  Description of Artificial Sequence: Synthetic oligonucleotide
gcgagucaaaguguaccau

SEQ ID NO: 1901447 - RNA, 19 nt, Artificial Sequence
  Description of Artificial Sequence: Synthetic oligonucleotide
cacuucuggugugguccaa

SEQ ID NO: 1901448 - RNA, 19 nt, Artificial Sequence
  Description of Artificial Sequence: Synthetic oligonucleotide
ccaacucgagggcaggguu

SEQ ID NO: 1901449 - RNA, 19 nt, Artificial Sequence
  Description of Artificial Sequence: Synthetic oligonucleotide
gccaacucgagggcagggu

SEQ ID NO: 1901450 - RNA, 19 nt, Artificial Sequence
  Description of Artificial Sequence: Synthetic oligonucleotide
cgaagaguuuugucccagu

SEQ ID NO: 1901451 - RNA, 19 nt, Artificial Sequence
  Description of Artificial Sequence: Synthetic oligonucleotide
ccaagacugguaguugcuu

SEQ ID NO: 1901452 - RNA, 19 nt, Artificial Sequence
  Description of Artificial Sequence: Synthetic oligonucleotide
ccgagcagauggaggacuu

SEQ ID NO: 1901453 - RNA, 19 nt, Artificial Sequence
  Description of Artificial Sequence: Synthetic oligonucleotide
gcauccccuuucucagcuu

SEQ ID NO: 1901454 - RNA, 19 nt, Artificial Sequence
  Description of Artificial Sequence: Synthetic oligonucleotide
ccaccacccugagccacuu

SEQ ID NO: 1901455 - RNA, 19 nt, Artificial Sequence
  Description of Artificial Sequence: Synthetic oligonucleotide
ccguggcaagaggccuucu

SEQ ID NO: 1901456 - RNA, 19 nt, Artificial Sequence
  Description of Artificial Sequence: Synthetic oligonucleotide
uaaacuuuuagaaagacgg

SEQ ID NO: 1901457 - RNA, 19 nt, Artificial Sequence
  Description of Artificial Sequence: Synthetic oligonucleotide
auuauucuuaaucaguucc

SEQ ID NO: 1901458 - RNA, 19 nt, Artificial Sequence
  Description of Artificial Sequence: Synthetic oligonucleotide
aagauucagauucacaagc

SEQ ID NO: 1901459 - RNA, 19 nt, Artificial Sequence
  Description of Artificial Sequence: Synthetic oligonucleotide
ugaaguacaaacuauguug

SEQ ID NO: 1901460 - RNA, 19 nt, Artificial Sequence
  Description of Artificial Sequence: Synthetic oligonucleotide
uguacaauauauuucauga

SEQ ID NO: 1901461 - RNA, 19 nt, Artificial Sequence
  Description of Artificial Sequence: Synthetic oligonucleotide
acuauguugggccagggcc

SEQ ID NO: 1901462 - RNA, 19 nt, Artificial Sequence
  Description of Artificial Sequence: Synthetic oligonucleotide
uuauaaaugucuucuagcc

SEQ ID NO: 1901463 - RNA, 19 nt, Artificial Sequence
  Description of Artificial Sequence: Synthetic oligonucleotide
uuuacagcauucaaggaag

SEQ ID NO: 1901464 - RNA, 19 nt, Artificial Sequence
  Description of Artificial Sequence: Synthetic oligonucleotide
uaagcuaagguuuuagucc

SEQ ID NO: 1901465 - RNA, 19 nt, Artificial Sequence
  Description of Artificial Sequence: Synthetic oligonucleotide
auaaauaaggcaaagacca

SEQ ID NO: 1901466 - RNA, 19 nt, Artificial Sequence
  Description of Artificial Sequence: Synthetic oligonucleotide
gacgugaccaaauugaacc

SEQ ID NO: 1901467 - RNA, 19 nt, Artificial Sequence
  Description of Artificial Sequence: Synthetic oligonucleotide
uuuugaauucccaucaaug

SEQ ID NO: 1901468 - RNA, 19 nt, Artificial Sequence
  Description of Artificial Sequence: Synthetic oligonucleotide
aguuaaggaacacuucacc

SEQ ID NO: 1901469 - RNA, 19 nt, Artificial Sequence
  Description of Artificial Sequence: Synthetic oligonucleotide
uaaguuaaggaacacuuca

SEQ ID NO: 1901470 - RNA, 19 nt, Artificial Sequence
  Description of Artificial Sequence: Synthetic oligonucleotide
uggguaaugaauaaguuaa

SEQ ID NO: 1901471 - RNA, 19 nt, Artificial Sequence
  Description of Artificial Sequence: Synthetic oligonucleotide
aacuuuuagaaagacgggg

SEQ ID NO: 1901472 - RNA, 19 nt, Artificial Sequence
  Description of Artificial Sequence: Synthetic oligonucleotide
aaguuaaguaccuugacuu

SEQ ID NO: 1901473 - RNA, 19 nt, Artificial Sequence
  Description of Artificial Sequence: Synthetic oligonucleotide
aaagguuauaauaaauaag

SEQ ID NO: 1901474 - RNA, 19 nt, Artificial Sequence
  Description of Artificial Sequence: Synthetic oligonucleotide
ugaguaacuaaaaccuugg

SEQ ID NO: 1901475 - RNA, 19 nt, Artificial Sequence
  Description of Artificial Sequence: Synthetic oligonucleotide
uauuuuaucuaagcuaagg

SEQ ID NO: 1901476 - RNA, 19 nt, Artificial Sequence
  Description of Artificial Sequence: Synthetic oligonucleotide
gaugaaguuaaguaccuug

SEQ ID NO: 1901477 - RNA, 19 nt, Artificial Sequence
  Description of Artificial Sequence: Synthetic oligonucleotide
uuuaauuaacuccuuccug

SEQ ID NO: 1901478 - RNA, 19 nt, Artificial Sequence
  Description of Artificial Sequence: Synthetic oligonucleotide
agucagcuuauuuauauuc

SEQ ID NO: 1901479 - RNA, 19 nt, Artificial Sequence
  Description of Artificial Sequence: Synthetic oligonucleotide
ucugacgugaccaaauuga

SEQ ID NO: 1901480 - RNA, 19 nt, Artificial Sequence
  Description of Artificial Sequence: Synthetic oligonucleotide
ugugaagugacagugacca

SEQ ID NO: 1901481 - RNA, 19 nt, Artificial Sequence
  Description of Artificial Sequence: Synthetic oligonucleotide
agcugaugaaguuaaguac

SEQ ID NO: 1901482 - RNA, 19 nt, Artificial Sequence
  Description of Artificial Sequence: Synthetic oligonucleotide
aaugaagaacuguggucgc

SEQ ID NO: 1901483 - RNA, 19 nt, Artificial Sequence
  Description of Artificial Sequence: Synthetic oligonucleotide
aguaccuugacuuuuggga

SEQ ID NO: 1901484 - RNA, 19 nt, Artificial Sequence
  Description of Artificial Sequence: Synthetic oligonucleotide
aguacaaacuauguugggc

SEQ ID NO: 1901485 - RNA, 19 nt, Artificial Sequence
  Description of Artificial Sequence: Synthetic oligonucleotide
aacuauguaaaauguacaa

SEQ ID NO: 1901486 - RNA, 19 nt, Artificial Sequence
  Description of Artificial Sequence: Synthetic oligonucleotide
ugaaagguuauaauaaaua

SEQ ID NO: 1901487 - RNA, 19 nt, Artificial Sequence
  Description of Artificial Sequence: Synthetic oligonucleotide
ugacuuuugggaucuaggg

SEQ ID NO: 1901488 - RNA, 19 nt, Artificial Sequence
  Description of Artificial Sequence: Synthetic oligonucleotide
uuuagucccauauauauuu

SEQ ID NO: 1901489 - RNA, 19 nt, Artificial Sequence
  Description of Artificial Sequence: Synthetic oligonucleotide
agugguagaacucguacuc

SEQ ID NO: 1901490 - RNA, 19 nt, Artificial Sequence
  Description of Artificial Sequence: Synthetic oligonucleotide
aagacggggagcuuuauga

SEQ ID NO: 1901491 - RNA, 19 nt, Artificial Sequence
  Description of Artificial Sequence: Synthetic oligonucleotide
auuuuaucuaagcuaaggu

SEQ ID NO: 1901492 - RNA, 19 nt, Artificial Sequence
  Description of Artificial Sequence: Synthetic oligonucleotide
uaacuaaaaccuuggaaug

SEQ ID NO: 1901493 - RNA, 19 nt, Artificial Sequence
  Description of Artificial Sequence: Synthetic oligonucleotide
uugacuuuugggaucuagg

SEQ ID NO: 1901494 - RNA, 19 nt, Artificial Sequence
  Description of Artificial Sequence: Synthetic oligonucleotide
ugcaaguaauauuagcccc

SEQ ID NO: 1901495 - RNA, 19 nt, Artificial Sequence
  Description of Artificial Sequence: Synthetic oligonucleotide
guaaugaauaaguuaagga

SEQ ID NO: 1901496 - RNA, 19 nt, Artificial Sequence
  Description of Artificial Sequence: Synthetic oligonucleotide
uucuuaaucaguuccauuu

SEQ ID NO: 1901497 - RNA, 19 nt, Artificial Sequence
  Description of Artificial Sequence: Synthetic oligonucleotide
guacaaacuauguugggcc

SEQ ID NO: 1901498 - RNA, 19 nt, Artificial Sequence
  Description of Artificial Sequence: Synthetic oligonucleotide
uguugugaaugucugacgu

SEQ ID NO: 1901499 - RNA, 19 nt, Artificial Sequence
  Description of Artificial Sequence: Synthetic oligonucleotide
ugcugaaagguuauaauaa

SEQ ID NO: 1901500 - RNA, 19 nt, Artificial Sequence
  Description of Artificial Sequence: Synthetic oligonucleotide
uauguaaaauguacaauau

SEQ ID NO: 1901501 - RNA, 19 nt, Artificial Sequence
  Description of Artificial Sequence: Synthetic oligonucleotide
ugcucuuugacguaguggu

SEQ ID NO: 1901502 - RNA, 19 nt, Artificial Sequence
  Description of Artificial Sequence: Synthetic oligonucleotide
uuuuaucuaagcuaagguu

SEQ ID NO: 1901503 - RNA, 19 nt, Artificial Sequence
  Description of Artificial Sequence: Synthetic oligonucleotide
gacuuuugggaucuagggg

SEQ ID NO: 1901504 - RNA, 19 nt, Artificial Sequence
  Description of Artificial Sequence: Synthetic oligonucleotide
uuuagaaagacggggagcu

SEQ ID NO: 1901505 - RNA, 19 nt, Artificial Sequence
  Description of Artificial Sequence: Synthetic oligonucleotide
ucgucuauaggcucgucgg

SEQ ID NO: 1901506 - RNA, 19 nt, Artificial Sequence
  Description of Artificial Sequence: Synthetic oligonucleotide
aguaacuaaaaccuuggaa

SEQ ID NO: 1901507 - RNA, 19 nt, Artificial Sequence
  Description of Artificial Sequence: Synthetic oligonucleotide
cuaagcuaagguuuuaguc

SEQ ID NO: 1901508 - RNA, 19 nt, Artificial Sequence
  Description of Artificial Sequence: Synthetic oligonucleotide
ugauuauucuuaaucaguu

SEQ ID NO: 1901509 - RNA, 19 nt, Artificial Sequence
  Description of Artificial Sequence: Synthetic oligonucleotide
uuucuauggguaaugaaua

SEQ ID NO: 1901510 - RNA, 19 nt, Artificial Sequence
  Description of Artificial Sequence: Synthetic oligonucleotide
gauucucagaagcaagacc

SEQ ID NO: 1901511 - RNA, 19 nt, Artificial Sequence
  Description of Artificial Sequence: Synthetic oligonucleotide
ucuuaaucaguuccauuug

SEQ ID NO: 1901512 - RNA, 19 nt, Artificial Sequence
  Description of Artificial Sequence: Synthetic oligonucleotide
aaguaccuugacuuuuggg

SEQ ID NO: 1901513 - RNA, 19 nt, Artificial Sequence
  Description of Artificial Sequence: Synthetic oligonucleotide
agcuuauuuauauucauuu

SEQ ID NO: 1901514 - RNA, 19 nt, Artificial Sequence
  Description of Artificial Sequence: Synthetic oligonucleotide
uuuguugugaaugucugac

SEQ ID NO: 1901515 - RNA, 19 nt, Artificial Sequence
  Description of Artificial Sequence: Synthetic oligonucleotide
guaacuaaaaccuuggaau

SEQ ID NO: 1901516 - RNA, 19 nt, Artificial Sequence
  Description of Artificial Sequence: Synthetic oligonucleotide
uuaaacuauguaaaaugua

SEQ ID NO: 1901517 - RNA, 19 nt, Artificial Sequence
  Description of Artificial Sequence: Synthetic oligonucleotide
cugcaaguaauauuagccc

SEQ ID NO: 1901518 - RNA, 19 nt, Artificial Sequence
  Description of Artificial Sequence: Synthetic oligonucleotide
cucagaagcaagaccacgg

SEQ ID NO: 1901519 - RNA, 19 nt, Artificial Sequence
  Description of Artificial Sequence: Synthetic oligonucleotide
ugcuguguaaacuuuuaga

SEQ ID NO: 1901520 - RNA, 19 nt, Artificial Sequence
  Description of Artificial Sequence: Synthetic oligonucleotide
cuauguaaaauguacaaua

SEQ ID NO: 1901521 - RNA, 19 nt, Artificial Sequence
  Description of Artificial Sequence: Synthetic oligonucleotide
aaguuaaggaacacuucac

SEQ ID NO: 1901522 - RNA, 19 nt, Artificial Sequence
  Description of Artificial Sequence: Synthetic oligonucleotide
guaaacuuuuagaaagacg

SEQ ID NO: 1901523 - RNA, 19 nt, Artificial Sequence
  Description of Artificial Sequence: Synthetic oligonucleotide
uuuauuucuauggguaaug

SEQ ID NO: 1901524 - RNA, 19 nt, Artificial Sequence
  Description of Artificial Sequence: Synthetic oligonucleotide
agucauguugccaaguuuc

SEQ ID NO: 1901525 - RNA, 19 nt, Artificial Sequence
  Description of Artificial Sequence: Synthetic oligonucleotide
aauaaggcaaagaccaacu

SEQ ID NO: 1901526 - RNA, 19 nt, Artificial Sequence
  Description of Artificial Sequence: Synthetic oligonucleotide
ucaccucuuauaaaugucu

SEQ ID NO: 1901527 - RNA, 19 nt, Artificial Sequence
  Description of Artificial Sequence: Synthetic oligonucleotide
aaacuuuuagaaagacggg

SEQ ID NO: 1901528 - RNA, 19 nt, Artificial Sequence
  Description of Artificial Sequence: Synthetic oligonucleotide
uaauuaacuccuuccugag

SEQ ID NO: 1901529 - RNA, 19 nt, Artificial Sequence
  Description of Artificial Sequence: Synthetic oligonucleotide
agaccaacuagcuuaaaau

SEQ ID NO: 1901530 - RNA, 19 nt, Artificial Sequence
  Description of Artificial Sequence: Synthetic oligonucleotide
aaggaagucagcugagggu

SEQ ID NO: 1901531 - RNA, 19 nt, Artificial Sequence
  Description of Artificial Sequence: Synthetic oligonucleotide
uucacggucacagucaugu

SEQ ID NO: 1901532 - RNA, 19 nt, Artificial Sequence
  Description of Artificial Sequence: Synthetic oligonucleotide
aagaccaacuagcuuaaaa

SEQ ID NO: 1901533 - RNA, 19 nt, Artificial Sequence
  Description of Artificial Sequence: Synthetic oligonucleotide
accaaauugaacccgugcu

SEQ ID NO: 1901534 - RNA, 19 nt, Artificial Sequence
  Description of Artificial Sequence: Synthetic oligonucleotide
uaucaccucuuauaaaugu

SEQ ID NO: 1901535 - RNA, 19 nt, Artificial Sequence
  Description of Artificial Sequence: Synthetic oligonucleotide
aucaaucugaccaaaauaa

SEQ ID NO: 1901536 - RNA, 19 nt, Artificial Sequence
  Description of Artificial Sequence: Synthetic oligonucleotide
uaaaaccuuggaaugugcu

SEQ ID NO: 1901537 - RNA, 19 nt, Artificial Sequence
  Description of Artificial Sequence: Synthetic oligonucleotide
ugugagcugaugaaguuaa

SEQ ID NO: 1901538 - RNA, 19 nt, Artificial Sequence
  Description of Artificial Sequence: Synthetic oligonucleotide
cuguugagcacacagcaag

SEQ ID NO: 1901539 - RNA, 19 nt, Artificial Sequence
  Description of Artificial Sequence: Synthetic oligonucleotide
ccugcaaguaauauuagcc

SEQ ID NO: 1901540 - RNA, 19 nt, Artificial Sequence
  Description of Artificial Sequence: Synthetic oligonucleotide
ucuauggguaaugaauaag

SEQ ID NO: 1901541 - RNA, 19 nt, Artificial Sequence
  Description of Artificial Sequence: Synthetic oligonucleotide
acucguaucucauucgcug

SEQ ID NO: 1901542 - RNA, 19 nt, Artificial Sequence
  Description of Artificial Sequence: Synthetic oligonucleotide
cuuuuagaaagacggggag

SEQ ID NO: 1901543 - RNA, 19 nt, Artificial Sequence
  Description of Artificial Sequence: Synthetic oligonucleotide
auuucuauggguaaugaau

SEQ ID NO: 1901544 - RNA, 19 nt, Artificial Sequence
  Description of Artificial Sequence: Synthetic oligonucleotide
gguaaugaauaaguuaagg

SEQ ID NO: 1901545 - RNA, 19 nt, Artificial Sequence
  Description of Artificial Sequence: Synthetic oligonucleotide
gacguagugguagaacucg

SEQ ID NO: 1901546 - RNA, 19 nt, Artificial Sequence
  Description of Artificial Sequence: Synthetic oligonucleotide
acgugaccaaauugaaccc

SEQ ID NO: 1901547 - RNA, 19 nt, Artificial Sequence
  Description of Artificial Sequence: Synthetic oligonucleotide
uuauuuuaucuaagcuaag

SEQ ID NO: 1901548 - RNA, 19 nt, Artificial Sequence
  Description of Artificial Sequence: Synthetic oligonucleotide
acagugaccaugcuguuga

SEQ ID NO: 1901549 - RNA, 19 nt, Artificial Sequence
  Description of Artificial Sequence: Synthetic oligonucleotide
gaagcaagaccacggugcg

SEQ ID NO: 1901550 - RNA, 19 nt, Artificial Sequence
  Description of Artificial Sequence: Synthetic oligonucleotide
aucgucuauaggcucgucg

SEQ ID NO: 1901551 - RNA, 19 nt, Artificial Sequence
  Description of Artificial Sequence: Synthetic oligonucleotide
caagauucucagaagcaag

SEQ ID NO: 1901552 - RNA, 19 nt, Artificial Sequence
  Description of Artificial Sequence: Synthetic oligonucleotide
uuuaugagugaccggcugu

SEQ ID NO: 1901553 - RNA, 19 nt, Artificial Sequence
  Description of Artificial Sequence: Synthetic oligonucleotide
agguuuuagucccauauau

SEQ ID NO: 1901554 - RNA, 19 nt, Artificial Sequence
  Description of Artificial Sequence: Synthetic oligonucleotide
ugaaguuaaguaccuugac

SEQ ID NO: 1901555 - RNA, 19 nt, Artificial Sequence
  Description of Artificial Sequence: Synthetic oligonucleotide
aacucguacucguaucuca

SEQ ID NO: 1901556 - RNA, 19 nt, Artificial Sequence
  Description of Artificial Sequence: Synthetic oligonucleotide
uguaaacuuuuagaaagac

SEQ ID NO: 1901557 - RNA, 19 nt, Artificial Sequence
  Description of Artificial Sequence: Synthetic oligonucleotide
guugccaaguuuccuaugc

SEQ ID NO: 1901558 - RNA, 19 nt, Artificial Sequence
  Description of Artificial Sequence: Synthetic oligonucleotide
gauucagauucacaagcac

SEQ ID NO: 1901559 - RNA, 19 nt, Artificial Sequence
  Description of Artificial Sequence: Synthetic oligonucleotide
agcaagaccacggugcgac

SEQ ID NO: 1901560 - RNA, 19 nt, Artificial Sequence
  Description of Artificial Sequence: Synthetic oligonucleotide
uaaguaccuugacuuuugg

SEQ ID NO: 1901561 - RNA, 19 nt, Artificial Sequence
  Description of Artificial Sequence: Synthetic oligonucleotide
aauuaacuccuuccugagu

SEQ ID NO: 1901562 - RNA, 19 nt, Artificial Sequence
  Description of Artificial Sequence: Synthetic oligonucleotide
aacuaaaaccuuggaaugu

SEQ ID NO: 1901563 - RNA, 19 nt, Artificial Sequence
  Description of Artificial Sequence: Synthetic oligonucleotide
accucuuauaaaugucuuc

SEQ ID NO: 1901564 - RNA, 19 nt, Artificial Sequence
  Description of Artificial Sequence: Synthetic oligonucleotide
ucuaagcuaagguuuuagu

SEQ ID NO: 1901565 - RNA, 19 nt, Artificial Sequence
  Description of Artificial Sequence: Synthetic oligonucleotide
ggagcuuuaugagugaccg

SEQ ID NO: 1901566 - RNA, 19 nt, Artificial Sequence
  Description of Artificial Sequence: Synthetic oligonucleotide
gauaccaccaggguccugc

SEQ ID NO: 1901567 - RNA, 19 nt, Artificial Sequence
  Description of Artificial Sequence: Synthetic oligonucleotide
aaauugaacccgugcuucu

SEQ ID NO: 1901568 - RNA, 19 nt, Artificial Sequence
  Description of Artificial Sequence: Synthetic oligonucleotide
uccagcugucaaaauaaca

SEQ ID NO: 1901569 - RNA, 19 nt, Artificial Sequence
  Description of Artificial Sequence: Synthetic oligonucleotide
acagcauucaaggaaguca

SEQ ID NO: 1901570 - RNA, 19 nt, Artificial Sequence
  Description of Artificial Sequence: Synthetic oligonucleotide
ugguucgagacuucagucc

SEQ ID NO: 1901571 - RNA, 19 nt, Artificial Sequence
  Description of Artificial Sequence: Synthetic oligonucleotide
aaagacggggagcuuuaug

SEQ ID NO: 1901572 - RNA, 19 nt, Artificial Sequence
  Description of Artificial Sequence: Synthetic oligonucleotide
uccugcaaguaauauuagc

SEQ ID NO: 1901573 - RNA, 19 nt, Artificial Sequence
  Description of Artificial Sequence: Synthetic oligonucleotide
uaaucaguuccauuugcuc

SEQ ID NO: 1901574 - RNA, 19 nt, Artificial Sequence
  Description of Artificial Sequence: Synthetic oligonucleotide
uuuaguaagccugguuuug

SEQ ID NO: 1901575 - RNA, 19 nt, Artificial Sequence
  Description of Artificial Sequence: Synthetic oligonucleotide
acacuugccaacucuguug

SEQ ID NO: 1901576 - RNA, 19 nt, Artificial Sequence
  Description of Artificial Sequence: Synthetic oligonucleotide
cuaaaaccuuggaaugugc

SEQ ID NO: 1901577 - RNA, 19 nt, Artificial Sequence
  Description of Artificial Sequence: Synthetic oligonucleotide
augaauaaguuaaggaaca

SEQ ID NO: 1901578 - RNA, 19 nt, Artificial Sequence
  Description of Artificial Sequence: Synthetic oligonucleotide
gaccaaauugaacccgugc

SEQ ID NO: 1901579 - RNA, 19 nt, Artificial Sequence
  Description of Artificial Sequence: Synthetic oligonucleotide
ugugcugaaagguuauaau

SEQ ID NO: 1901580 - RNA, 19 nt, Artificial Sequence
  Description of Artificial Sequence: Synthetic oligonucleotide
gugcugauuauucuuaauc

SEQ ID NO: 1901581 - RNA, 19 nt, Artificial Sequence
  Description of Artificial Sequence: Synthetic oligonucleotide
aguaagccugguuuuguug

SEQ ID NO: 1901582 - RNA, 19 nt, Artificial Sequence
  Description of Artificial Sequence: Synthetic oligonucleotide
agaacucguacucguaucu

SEQ ID NO: 1901583 - RNA, 19 nt, Artificial Sequence
  Description of Artificial Sequence: Synthetic oligonucleotide
ucucagaagcaagaccacg

SEQ ID NO: 1901584 - RNA, 19 nt, Artificial Sequence
  Description of Artificial Sequence: Synthetic oligonucleotide
ucguacucguaucucauuc

SEQ ID NO: 1901585 - RNA, 19 nt, Artificial Sequence
  Description of Artificial Sequence: Synthetic oligonucleotide
ucuaggggcuaugugcugg

SEQ ID NO: 1901586 - RNA, 19 nt, Artificial Sequence
  Description of Artificial Sequence: Synthetic oligonucleotide
uucuagccacuuuucauca

SEQ ID NO: 1901587 - RNA, 19 nt, Artificial Sequence
  Description of Artificial Sequence: Synthetic oligonucleotide
agauucucagaagcaagac

SEQ ID NO: 1901588 - RNA, 19 nt, Artificial Sequence
  Description of Artificial Sequence: Synthetic oligonucleotide
uuuuaguaagccugguuuu

SEQ ID NO: 1901589 - RNA, 19 nt, Artificial Sequence
  Description of Artificial Sequence: Synthetic oligonucleotide
cuauguugggccagggccc

SEQ ID NO: 1901590 - RNA, 19 nt, Artificial Sequence
  Description of Artificial Sequence: Synthetic oligonucleotide
gguucgagacuucaguccg

SEQ ID NO: 1901591 - RNA, 19 nt, Artificial Sequence
  Description of Artificial Sequence: Synthetic oligonucleotide
uauuucuauggguaaugaa

SEQ ID NO: 1901592 - RNA, 19 nt, Artificial Sequence
  Description of Artificial Sequence: Synthetic oligonucleotide
guuuuagucccauauauau

SEQ ID NO: 1901593 - RNA, 19 nt, Artificial Sequence
  Description of Artificial Sequence: Synthetic oligonucleotide
ugagugaccggcuguccgg

SEQ ID NO: 1901594 - RNA, 19 nt, Artificial Sequence
  Description of Artificial Sequence: Synthetic oligonucleotide
ucuuuaauuuccagcuguc

SEQ ID NO: 1901595 - RNA, 19 nt, Artificial Sequence
  Description of Artificial Sequence: Synthetic oligonucleotide
guagugguagaacucguac

SEQ ID NO: 1901596 - RNA, 19 nt, Artificial Sequence
  Description of Artificial Sequence: Synthetic oligonucleotide
agaacuguggucgcagagg

SEQ ID NO: 1901597 - RNA, 19 nt, Artificial Sequence
  Description of Artificial Sequence: Synthetic oligonucleotide
gaggaggucugcugguucg

SEQ ID NO: 1901598 - RNA, 19 nt, Artificial Sequence
  Description of Artificial Sequence: Synthetic oligonucleotide
acaucaaucugaccaaaau

SEQ ID NO: 1901599 - RNA, 19 nt, Artificial Sequence
  Description of Artificial Sequence: Synthetic oligonucleotide
uuuuagucccauauauauu

SEQ ID NO: 1901600 - RNA, 19 nt, Artificial Sequence
  Description of Artificial Sequence: Synthetic oligonucleotide
uuauuucuauggguaauga

SEQ ID NO: 1901601 - RNA, 19 nt, Artificial Sequence
  Description of Artificial Sequence: Synthetic oligonucleotide
augagugaccggcuguccg

SEQ ID NO: 1901602 - RNA, 19 nt, Artificial Sequence
  Description of Artificial Sequence: Synthetic oligonucleotide
cucguaucucauucgcugg

SEQ ID NO: 1901603 - RNA, 19 nt, Artificial Sequence
  Description of Artificial Sequence: Synthetic oligonucleotide
accaacuagcuuaaaaugu

SEQ ID NO: 1901604 - RNA, 19 nt, Artificial Sequence
  Description of Artificial Sequence: Synthetic oligonucleotide
gagcugaugaaguuaagua

SEQ ID NO: 1901605 - RNA, 19 nt, Artificial Sequence
  Description of Artificial Sequence: Synthetic oligonucleotide
uagugguagaacucguacu

SEQ ID NO: 1901606 - RNA, 19 nt, Artificial Sequence
  Description of Artificial Sequence: Synthetic oligonucleotide
uaaauaaggcaaagaccaa

SEQ ID NO: 1901607 - RNA, 19 nt, Artificial Sequence
  Description of Artificial Sequence: Synthetic oligonucleotide
uacaaacuauguugggcca

SEQ ID NO: 1901608 - RNA, 19 nt, Artificial Sequence
  Description of Artificial Sequence: Synthetic oligonucleotide
guggaacugcucuuugacg

SEQ ID NO: 1901609 - RNA, 19 nt, Artificial Sequence
  Description of Artificial Sequence: Synthetic oligonucleotide
auguaaaauguacaauaua

SEQ ID NO: 1901610 - RNA, 19 nt, Artificial Sequence
  Description of Artificial Sequence: Synthetic oligonucleotide
cucgucggucuccagaggg

SEQ ID NO: 1901611 - RNA, 19 nt, Artificial Sequence
  Description of Artificial Sequence: Synthetic oligonucleotide
ugacgugaccaaauugaac

SEQ ID NO: 1901612 - RNA, 19 nt, Artificial Sequence
  Description of Artificial Sequence: Synthetic oligonucleotide
uucuauggguaaugaauaa

SEQ ID NO: 1901613 - RNA, 19 nt, Artificial Sequence
  Description of Artificial Sequence: Synthetic oligonucleotide
acuuuuagaaagacgggga

SEQ ID NO: 1901614 - RNA, 19 nt, Artificial Sequence
  Description of Artificial Sequence: Synthetic oligonucleotide
cuugccaacucuguuguac

SEQ ID NO: 1901615 - RNA, 19 nt, Artificial Sequence
  Description of Artificial Sequence: Synthetic oligonucleotide
guuaaggaacacuucaccu

SEQ ID NO: 1901616 - RNA, 19 nt, Artificial Sequence
  Description of Artificial Sequence: Synthetic oligonucleotide
agugaccaugcuguugagc

SEQ ID NO: 1901617 - RNA, 19 nt, Artificial Sequence
  Description of Artificial Sequence: Synthetic oligonucleotide
cuuuaugagugaccggcug

SEQ ID NO: 1901618 - RNA, 19 nt, Artificial Sequence
  Description of Artificial Sequence: Synthetic oligonucleotide
guaucucauucgcugguag

SEQ ID NO: 1901619 - RNA, 19 nt, Artificial Sequence
  Description of Artificial Sequence: Synthetic oligonucleotide
caaauugaacccgugcuuc

SEQ ID NO: 1901620 - RNA, 19 nt, Artificial Sequence
  Description of Artificial Sequence: Synthetic oligonucleotide
ucgcugguagagaaucugc

SEQ ID NO: 1901621 - RNA, 19 nt, Artificial Sequence
  Description of Artificial Sequence: Synthetic oligonucleotide
gcugggacaagauaccacc

SEQ ID NO: 1901622 - RNA, 19 nt, Artificial Sequence
  Description of Artificial Sequence: Synthetic oligonucleotide
ugguagaacucguacucgu

SEQ ID NO: 1901623 - RNA, 19 nt, Artificial Sequence
  Description of Artificial Sequence: Synthetic oligonucleotide
aggggcuaugugcugggac

SEQ ID NO: 1901624 - RNA, 19 nt, Artificial Sequence
  Description of Artificial Sequence: Synthetic oligonucleotide
aucaccucuuauaaauguc

SEQ ID NO: 1901625 - RNA, 19 nt, Artificial Sequence
  Description of Artificial Sequence: Synthetic oligonucleotide
aucuaagcuaagguuuuag

SEQ ID NO: 1901626 - RNA, 19 nt, Artificial Sequence
  Description of Artificial Sequence: Synthetic oligonucleotide
augaaguuaaguaccuuga

SEQ ID NO: 1901627 - RNA, 19 nt, Artificial Sequence
  Description of Artificial Sequence: Synthetic oligonucleotide
aaacuauguugggccaggg

SEQ ID NO: 1901628 - RNA, 19 nt, Artificial Sequence
  Description of Artificial Sequence: Synthetic oligonucleotide
guugugaaugucugacgug

SEQ ID NO: 1901629 - RNA, 19 nt, Artificial Sequence
  Description of Artificial Sequence: Synthetic oligonucleotide
ugacguagugguagaacuc

SEQ ID NO: 1901630 - RNA, 19 nt, Artificial Sequence
  Description of Artificial Sequence: Synthetic oligonucleotide
cacggucacagucauguug

SEQ ID NO: 1901631 - RNA, 19 nt, Artificial Sequence
  Description of Artificial Sequence: Synthetic oligonucleotide
uugccaacucuguuguaca

SEQ ID NO: 1901632 - RNA, 19 nt, Artificial Sequence
  Description of Artificial Sequence: Synthetic oligonucleotide
caaguuuccuaugcucugg

SEQ ID NO: 1901633 - RNA, 19 nt, Artificial Sequence
  Description of Artificial Sequence: Synthetic oligonucleotide
agacggggagcuuuaugag

SEQ ID NO: 1901634 - RNA, 19 nt, Artificial Sequence
  Description of Artificial Sequence: Synthetic oligonucleotide
ucccaucaaugucuaacac

SEQ ID NO: 1901635 - RNA, 19 nt, Artificial Sequence
  Description of Artificial Sequence: Synthetic oligonucleotide
gugaaugucugacgugacc

SEQ ID NO: 1901636 - RNA, 19 nt, Artificial Sequence
  Description of Artificial Sequence: Synthetic oligonucleotide
cuucaguccgagcuugcgc

SEQ ID NO: 1901637 - RNA, 19 nt, Artificial Sequence
  Description of Artificial Sequence: Synthetic oligonucleotide
cauucgcugguagagaauc

SEQ ID NO: 1901638 - RNA, 19 nt, Artificial Sequence
  Description of Artificial Sequence: Synthetic oligonucleotide
ucgucggucuccagagggg

SEQ ID NO: 1901639 - RNA, 19 nt, Artificial Sequence
  Description of Artificial Sequence: Synthetic oligonucleotide
uuaguaagccugguuuugu

SEQ ID NO: 1901640 - RNA, 19 nt, Artificial Sequence
  Description of Artificial Sequence: Synthetic oligonucleotide
uagaacucguacucguauc

SEQ ID NO: 1901641 - RNA, 19 nt, Artificial Sequence
  Description of Artificial Sequence: Synthetic oligonucleotide
ugaccaaauugaacccgug

SEQ ID NO: 1901642 - RNA, 19 nt, Artificial Sequence
  Description of Artificial Sequence: Synthetic oligonucleotide
ugugaaugucugacgugac

SEQ ID NO: 1901643 - RNA, 19 nt, Artificial Sequence
  Description of Artificial Sequence: Synthetic oligonucleotide
uacucguaucucauucgcu

SEQ ID NO: 1901644 - RNA, 19 nt, Artificial Sequence
  Description of Artificial Sequence: Synthetic oligonucleotide
ucguaucucauucgcuggu

SEQ ID NO: 1901645 - RNA, 19 nt, Artificial Sequence
  Description of Artificial Sequence: Synthetic oligonucleotide
caaacuauguugggccagg

SEQ ID NO: 1901646 - RNA, 19 nt, Artificial Sequence
  Description of Artificial Sequence: Synthetic oligonucleotide
cuugacuuuugggaucuag

SEQ ID NO: 1901647 - RNA, 19 nt, Artificial Sequence
  Description of Artificial Sequence: Synthetic oligonucleotide
gguaucaccucuuauaaau

SEQ ID NO: 1901648 - RNA, 19 nt, Artificial Sequence
  Description of Artificial Sequence: Synthetic oligonucleotide
gucugacgugaccaaauug

SEQ ID NO: 1901649 - RNA, 19 nt, Artificial Sequence
  Description of Artificial Sequence: Synthetic oligonucleotide
gugcugaaagguuauaaua

SEQ ID NO: 1901650 - RNA, 19 nt, Artificial Sequence
  Description of Artificial Sequence: Synthetic oligonucleotide
cugguucgagacuucaguc

SEQ ID NO: 1901651 - RNA, 19 nt, Artificial Sequence
  Description of Artificial Sequence: Synthetic oligonucleotide
gugcuguguaaacuuuuag

SEQ ID NO: 1901652 - RNA, 19 nt, Artificial Sequence
  Description of Artificial Sequence: Synthetic oligonucleotide
cugugaagugacagugacc

SEQ ID NO: 1901653 - RNA, 19 nt, Artificial Sequence
  Description of Artificial Sequence: Synthetic oligonucleotide
cauaagaauaauuuuccuu

SEQ ID NO: 1901654 - RNA, 19 nt, Artificial Sequence
  Description of Artificial Sequence: Synthetic oligonucleotide
gaauaaguuaaggaacacu

SEQ ID NO: 1901655 - RNA, 19 nt, Artificial Sequence
  Description of Artificial Sequence: Synthetic oligonucleotide
cacggugcgacucccacac

SEQ ID NO: 1901656 - RNA, 19 nt, Artificial Sequence
  Description of Artificial Sequence: Synthetic oligonucleotide
uucgagacuucaguccgag

SEQ ID NO: 1901657 - RNA, 19 nt, Artificial Sequence
  Description of Artificial Sequence: Synthetic oligonucleotide
gagcuuuaugagugaccgg

SEQ ID NO: 1901658 - RNA, 19 nt, Artificial Sequence
  Description of Artificial Sequence: Synthetic oligonucleotide
uugccaaguuuccuaugcu

SEQ ID NO: 1901659 - RNA, 19 nt, Artificial Sequence
  Description of Artificial Sequence: Synthetic oligonucleotide
cuccugugaagugacagug

SEQ ID NO: 1901660 - RNA, 19 nt, Artificial Sequence
  Description of Artificial Sequence: Synthetic oligonucleotide
aaugucugacgugaccaaa

SEQ ID NO: 1901661 - RNA, 19 nt, Artificial Sequence
  Description of Artificial Sequence: Synthetic oligonucleotide
uuccagcugucaaaauaac

SEQ ID NO: 1901662 - RNA, 19 nt, Artificial Sequence
  Description of Artificial Sequence: Synthetic oligonucleotide
gaacccgugcuucucugac

SEQ ID NO: 1901663 - RNA, 19 nt, Artificial Sequence
  Description of Artificial Sequence: Synthetic oligonucleotide
uuaugagugaccggcuguc

SEQ ID NO: 1901664 - RNA, 19 nt, Artificial Sequence
  Description of Artificial Sequence: Synthetic oligonucleotide
uuagucccauauauauuuu

SEQ ID NO: 1901665 - RNA, 19 nt, Artificial Sequence
  Description of Artificial Sequence: Synthetic oligonucleotide
ugcgacucccacacuugcc

SEQ ID NO: 1901666 - RNA, 19 nt, Artificial Sequence
  Description of Artificial Sequence: Synthetic oligonucleotide
acggggagcuuuaugagug

SEQ ID NO: 1901667 - RNA, 19 nt, Artificial Sequence
  Description of Artificial Sequence: Synthetic oligonucleotide
uguugccaaguuuccuaug

SEQ ID NO: 1901668 - RNA, 19 nt, Artificial Sequence
  Description of Artificial Sequence: Synthetic oligonucleotide
aacaucaaucugaccaaaa

SEQ ID NO: 1901669 - RNA, 19 nt, Artificial Sequence
  Description of Artificial Sequence: Synthetic oligonucleotide
uugaacccgugcuucucug

SEQ ID NO: 1901670 - RNA, 19 nt, Artificial Sequence
  Description of Artificial Sequence: Synthetic oligonucleotide
ggaacacuucaccucaaac

SEQ ID NO: 1901671 - RNA, 19 nt, Artificial Sequence
  Description of Artificial Sequence: Synthetic oligonucleotide
acagaucacuuucauuauu

SEQ ID NO: 1901672 - RNA, 19 nt, Artificial Sequence
  Description of Artificial Sequence: Synthetic oligonucleotide
cuaggggcuaugugcuggg

SEQ ID NO: 1901673 - RNA, 19 nt, Artificial Sequence
  Description of Artificial Sequence: Synthetic oligonucleotide
guaagccugguuuuguugu

SEQ ID NO: 1901674 - RNA, 19 nt, Artificial Sequence
  Description of Artificial Sequence: Synthetic oligonucleotide
acuucaguccgagcuugcg

SEQ ID NO: 1901675 - RNA, 19 nt, Artificial Sequence
  Description of Artificial Sequence: Synthetic oligonucleotide
ucauguugccaaguuuccu

SEQ ID NO: 1901676 - RNA, 19 nt, Artificial Sequence
  Description of Artificial Sequence: Synthetic oligonucleotide
aacccgugcuucucugaca

SEQ ID NO: 1901677 - RNA, 19 nt, Artificial Sequence
  Description of Artificial Sequence: Synthetic oligonucleotide
ucucauucgcugguagaga

SEQ ID NO: 1901678 - RNA, 19 nt, Artificial Sequence
  Description of Artificial Sequence: Synthetic oligonucleotide
acagccuccggagagggga

SEQ ID NO: 1901679 - RNA, 19 nt, Artificial Sequence
  Description of Artificial Sequence: Synthetic oligonucleotide
agcauucaaggaagucagc

SEQ ID NO: 1901680 - RNA, 19 nt, Artificial Sequence
  Description of Artificial Sequence: Synthetic oligonucleotide
gguccugcaaguaauauua

SEQ ID NO: 1901681 - RNA, 19 nt, Artificial Sequence
  Description of Artificial Sequence: Synthetic oligonucleotide
gacaagauaccaccagggu

SEQ ID NO: 1901682 - RNA, 19 nt, Artificial Sequence
  Description of Artificial Sequence: Synthetic oligonucleotide
ugaacccgugcuucucuga

SEQ ID NO: 1901683 - RNA, 19 nt, Artificial Sequence
  Description of Artificial Sequence: Synthetic oligonucleotide
cucauucgcugguagagaa

SEQ ID NO: 1901684 - RNA, 19 nt, Artificial Sequence
  Description of Artificial Sequence: Synthetic oligonucleotide
augugcugaaagguuauaa

SEQ ID NO: 1901685 - RNA, 19 nt, Artificial Sequence
  Description of Artificial Sequence: Synthetic oligonucleotide
acccgugcuucucugacaa

SEQ ID NO: 1901686 - RNA, 19 nt, Artificial Sequence
  Description of Artificial Sequence: Synthetic oligonucleotide
ugccaacucuguuguacac

SEQ ID NO: 1901687 - RNA, 19 nt, Artificial Sequence
  Description of Artificial Sequence: Synthetic oligonucleotide
ucauucgcugguagagaau

SEQ ID NO: 1901688 - RNA, 19 nt, Artificial Sequence
  Description of Artificial Sequence: Synthetic oligonucleotide
gaaugucugacgugaccaa

SEQ ID NO: 1901689 - RNA, 19 nt, Artificial Sequence
  Description of Artificial Sequence: Synthetic oligonucleotide
gacucccacacuugccaac

SEQ ID NO: 1901690 - RNA, 19 nt, Artificial Sequence
  Description of Artificial Sequence: Synthetic oligonucleotide
gaucuaggggcuaugugcu

SEQ ID NO: 1901691 - RNA, 19 nt, Artificial Sequence
  Description of Artificial Sequence: Synthetic oligonucleotide
augcuggcggugcugauua

SEQ ID NO: 1901692 - RNA, 19 nt, Artificial Sequence
  Description of Artificial Sequence: Synthetic oligonucleotide
ggcucgucggucuccagag

SEQ ID NO: 1901693 - RNA, 19 nt, Artificial Sequence
  Description of Artificial Sequence: Synthetic oligonucleotide
uuugggaucuaggggcuau

SEQ ID NO: 1901694 - RNA, 19 nt, Artificial Sequence
  Description of Artificial Sequence: Synthetic oligonucleotide
caaagaccaacuagcuuaa

SEQ ID NO: 1901695 - RNA, 19 nt, Artificial Sequence
  Description of Artificial Sequence: Synthetic oligonucleotide
aaugugcugaaagguuaua

SEQ ID NO: 1901696 - RNA, 19 nt, Artificial Sequence
  Description of Artificial Sequence: Synthetic oligonucleotide
cacuuucauuauuuuaucu

SEQ ID NO: 1901697 - RNA, 19 nt, Artificial Sequence
  Description of Artificial Sequence: Synthetic oligonucleotide
guaccuugacuuuugggau

SEQ ID NO: 1901698 - RNA, 19 nt, Artificial Sequence
  Description of Artificial Sequence: Synthetic oligonucleotide
uguccgguaucaccucuua

SEQ ID NO: 1901699 - RNA, 19 nt, Artificial Sequence
  Description of Artificial Sequence: Synthetic oligonucleotide
guagaacucguacucguau

SEQ ID NO: 1901700 - RNA, 19 nt, Artificial Sequence
  Description of Artificial Sequence: Synthetic oligonucleotide
aggaacacuucaccucaaa

SEQ ID NO: 1901701 - RNA, 19 nt, Artificial Sequence
  Description of Artificial Sequence: Synthetic oligonucleotide
gucuauaggcucgucgguc

SEQ ID NO: 1901702 - RNA, 19 nt, Artificial Sequence
  Description of Artificial Sequence: Synthetic oligonucleotide
ucaucgucuauaggcucgu

SEQ ID NO: 1901703 - RNA, 19 nt, Artificial Sequence
  Description of Artificial Sequence: Synthetic oligonucleotide
agaccacggugcgacuccc

SEQ ID NO: 1901704 - RNA, 19 nt, Artificial Sequence
  Description of Artificial Sequence: Synthetic oligonucleotide
ugggaucuaggggcuaugu

SEQ ID NO: 1901705 - RNA, 19 nt, Artificial Sequence
  Description of Artificial Sequence: Synthetic oligonucleotide
ucuagccacuuuucaucau

SEQ ID NO: 1901706 - RNA, 19 nt, Artificial Sequence
  Description of Artificial Sequence: Synthetic oligonucleotide
cugacgugaccaaauugaa

SEQ ID NO: 1901707 - RNA, 19 nt, Artificial Sequence
  Description of Artificial Sequence: Synthetic oligonucleotide
ggguaaugaauaaguuaag

SEQ ID NO: 1901708 - RNA, 19 nt, Artificial Sequence
  Description of Artificial Sequence: Synthetic oligonucleotide
gugcgacucccacacuugc

SEQ ID NO: 1901709 - RNA, 19 nt, Artificial Sequence
  Description of Artificial Sequence: Synthetic oligonucleotide
gaacucguacucguaucuc

SEQ ID NO: 1901710 - RNA, 19 nt, Artificial Sequence
  Description of Artificial Sequence: Synthetic oligonucleotide
gaggucugcugguucgaga

SEQ ID NO: 1901711 - RNA, 19 nt, Artificial Sequence
  Description of Artificial Sequence: Synthetic oligonucleotide
uggcggugcugauuauucu

SEQ ID NO: 1901712 - RNA, 19 nt, Artificial Sequence
  Description of Artificial Sequence: Synthetic oligonucleotide
cagaucacuuucauuauuu

SEQ ID NO: 1901713 - RNA, 19 nt, Artificial Sequence
  Description of Artificial Sequence: Synthetic oligonucleotide
ucgagacuucaguccgagc

SEQ ID NO: 1901714 - RNA, 19 nt, Artificial Sequence
  Description of Artificial Sequence: Synthetic oligonucleotide
ccaacucuguuguacacca

SEQ ID NO: 1901715 - RNA, 19 nt, Artificial Sequence
  Description of Artificial Sequence: Synthetic oligonucleotide
gacggggagcuuuaugagu

SEQ ID NO: 1901716 - RNA, 19 nt, Artificial Sequence
  Description of Artificial Sequence: Synthetic oligonucleotide
ccaaguuuccuaugcucug

SEQ ID NO: 1901717 - RNA, 19 nt, Artificial Sequence
  Description of Artificial Sequence: Synthetic oligonucleotide
guccugcaaguaauauuag

SEQ ID NO: 1901718 - RNA, 19 nt, Artificial Sequence
  Description of Artificial Sequence: Synthetic oligonucleotide
augucugacgugaccaaau

SEQ ID NO: 1901719 - RNA, 19 nt, Artificial Sequence
  Description of Artificial Sequence: Synthetic oligonucleotide
ggaaugugcugaaagguua

SEQ ID NO: 1901720 - RNA, 19 nt, Artificial Sequence
  Description of Artificial Sequence: Synthetic oligonucleotide
ugaccggcuguccgguauc

SEQ ID NO: 1901721 - RNA, 19 nt, Artificial Sequence
  Description of Artificial Sequence: Synthetic oligonucleotide
guuaaguaccuugacuuuu

SEQ ID NO: 1901722 - RNA, 19 nt, Artificial Sequence
  Description of Artificial Sequence: Synthetic oligonucleotide
ugcgcuucaguagguggaa

SEQ ID NO: 1901723 - RNA, 19 nt, Artificial Sequence
  Description of Artificial Sequence: Synthetic oligonucleotide
gguagagaaucugcacagc

SEQ ID NO: 1901724 - RNA, 19 nt, Artificial Sequence
  Description of Artificial Sequence: Synthetic oligonucleotide
caacucuguuguacaccac

SEQ ID NO: 1901725 - RNA, 19 nt, Artificial Sequence
  Description of Artificial Sequence: Synthetic oligonucleotide
uugggaucuaggggcuaug

SEQ ID NO: 1901726 - RNA, 19 nt, Artificial Sequence
  Description of Artificial Sequence: Synthetic oligonucleotide
aaagaccaacuagcuuaaa

SEQ ID NO: 1901727 - RNA, 19 nt, Artificial Sequence
  Description of Artificial Sequence: Synthetic oligonucleotide
gacuucaguccgagcuugc

SEQ ID NO: 1901728 - RNA, 19 nt, Artificial Sequence
  Description of Artificial Sequence: Synthetic oligonucleotide
acucguacucguaucucau

SEQ ID NO: 1901729 - RNA, 19 nt, Artificial Sequence
  Description of Artificial Sequence: Synthetic oligonucleotide
caacuagcuuaaaauguau

SEQ ID NO: 1901730 - RNA, 19 nt, Artificial Sequence
  Description of Artificial Sequence: Synthetic oligonucleotide
auaggcucgucggucucca

SEQ ID NO: 1901731 - RNA, 19 nt, Artificial Sequence
  Description of Artificial Sequence: Synthetic oligonucleotide
uccggagaggggacaguuu

SEQ ID NO: 1901732 - RNA, 19 nt, Artificial Sequence
  Description of Artificial Sequence: Synthetic oligonucleotide
gggagcuuuaugagugacc

SEQ ID NO: 1901733 - RNA, 19 nt, Artificial Sequence
  Description of Artificial Sequence: Synthetic oligonucleotide
gcgacucccacacuugcca

SEQ ID NO: 1901734 - RNA, 19 nt, Artificial Sequence
  Description of Artificial Sequence: Synthetic oligonucleotide
gccaacucuguuguacacc

SEQ ID NO: 1901735 - RNA, 19 nt, Artificial Sequence
  Description of Artificial Sequence: Synthetic oligonucleotide
gaaugugcugaaagguuau

SEQ ID NO: 1901736 - RNA, 19 nt, Artificial Sequence
  Description of Artificial Sequence: Synthetic oligonucleotide
uuagaaagacggggagcuu

SEQ ID NO: 1901737 - RNA, 19 nt, Artificial Sequence
  Description of Artificial Sequence: Synthetic oligonucleotide
agaaagacggggagcuuua

SEQ ID NO: 1901738 - RNA, 19 nt, Artificial Sequence
  Description of Artificial Sequence: Synthetic oligonucleotide
ccggcuguccgguaucacc

SEQ ID NO: 1901739 - RNA, 19 nt, Artificial Sequence
  Description of Artificial Sequence: Synthetic oligonucleotide
aggguccugcaaguaauau

SEQ ID NO: 1901740 - RNA, 19 nt, Artificial Sequence
  Description of Artificial Sequence: Synthetic oligonucleotide
gagacuucaguccgagcuu

SEQ ID NO: 1901741 - RNA, 19 nt, Artificial Sequence
  Description of Artificial Sequence: Synthetic oligonucleotide
gcauucaaggaagucagcu

SEQ ID NO: 1901742 - RNA, 19 nt, Artificial Sequence
  Description of Artificial Sequence: Synthetic oligonucleotide
ccucuuauaaaugucuucu

SEQ ID NO: 1901743 - RNA, 19 nt, Artificial Sequence
  Description of Artificial Sequence: Synthetic oligonucleotide
gcugguucgagacuucagu

SEQ ID NO: 1901744 - RNA, 19 nt, Artificial Sequence
  Description of Artificial Sequence: Synthetic oligonucleotide
aaggaacacuucaccucaa

SEQ ID NO: 1901745 - RNA, 19 nt, Artificial Sequence
  Description of Artificial Sequence: Synthetic oligonucleotide
aguuuucuucacggucaca

SEQ ID NO: 1901746 - RNA, 19 nt, Artificial Sequence
  Description of Artificial Sequence: Synthetic oligonucleotide
uuuugggaucuaggggcua

SEQ ID NO: 1901747 - RNA, 19 nt, Artificial Sequence
  Description of Artificial Sequence: Synthetic oligonucleotide
uguggucgcagaggagguc

SEQ ID NO: 1901748 - RNA, 19 nt, Artificial Sequence
  Description of Artificial Sequence: Synthetic oligonucleotide
gguuuuagucccauauaua

SEQ ID NO: 1901749 - RNA, 19 nt, Artificial Sequence
  Description of Artificial Sequence: Synthetic oligonucleotide
gcuaugugcugggacaaga

SEQ ID NO: 1901750 - RNA, 19 nt, Artificial Sequence
  Description of Artificial Sequence: Synthetic oligonucleotide
gugaccaaauugaacccgu

SEQ ID NO: 1901751 - RNA, 19 nt, Artificial Sequence
  Description of Artificial Sequence: Synthetic oligonucleotide
acguagugguagaacucgu

SEQ ID NO: 1901752 - RNA, 19 nt, Artificial Sequence
  Description of Artificial Sequence: Synthetic oligonucleotide
ggugcgacucccacacuug

SEQ ID NO: 1901753 - RNA, 19 nt, Artificial Sequence
  Description of Artificial Sequence: Synthetic oligonucleotide
ggcccgugugagcugauga

SEQ ID NO: 1901754 - RNA, 19 nt, Artificial Sequence
  Description of Artificial Sequence: Synthetic oligonucleotide
ccgguaucaccucuuauaa

SEQ ID NO: 1901755 - RNA, 19 nt, Artificial Sequence
  Description of Artificial Sequence: Synthetic oligonucleotide
cuuugacguagugguagaa

SEQ ID NO: 1901756 - RNA, 19 nt, Artificial Sequence
  Description of Artificial Sequence: Synthetic oligonucleotide
cccucuccugugaagugac

SEQ ID NO: 1901757 - RNA, 19 nt, Artificial Sequence
  Description of Artificial Sequence: Synthetic oligonucleotide
guggucgcagaggaggucu

SEQ ID NO: 1901758 - RNA, 19 nt, Artificial Sequence
  Description of Artificial Sequence: Synthetic oligonucleotide
agcuaagguuuuaguccca

SEQ ID NO: 1901759 - RNA, 19 nt, Artificial Sequence
  Description of Artificial Sequence: Synthetic oligonucleotide
cagccuccggagaggggac

SEQ ID NO: 1901760 - RNA, 19 nt, Artificial Sequence
  Description of Artificial Sequence: Synthetic oligonucleotide
caagugcuguguaaacuuu

SEQ ID NO: 1901761 - RNA, 19 nt, Artificial Sequence
  Description of Artificial Sequence: Synthetic oligonucleotide
aggaggucugcugguucga

SEQ ID NO: 1901762 - RNA, 19 nt, Artificial Sequence
  Description of Artificial Sequence: Synthetic oligonucleotide
caccucuuauaaaugucuu

SEQ ID NO: 1901763 - RNA, 19 nt, Artificial Sequence
  Description of Artificial Sequence: Synthetic oligonucleotide
guagguggaacugcucuuu

SEQ ID NO: 1901764 - RNA, 19 nt, Artificial Sequence
  Description of Artificial Sequence: Synthetic oligonucleotide
ccgugcuucucugacaaga

SEQ ID NO: 1901765 - RNA, 19 nt, Artificial Sequence
  Description of Artificial Sequence: Synthetic oligonucleotide
ggacaguuuucuucacggu

SEQ ID NO: 1901766 - RNA, 19 nt, Artificial Sequence
  Description of Artificial Sequence: Synthetic oligonucleotide
gguagaacucguacucgua

SEQ ID NO: 1901767 - RNA, 19 nt, Artificial Sequence
  Description of Artificial Sequence: Synthetic oligonucleotide
ccgagcuugcgcuucagua

SEQ ID NO: 1901768 - RNA, 19 nt, Artificial Sequence
  Description of Artificial Sequence: Synthetic oligonucleotide
ggcuaugugcugggacaag

SEQ ID NO: 1901769 - RNA, 19 nt, Artificial Sequence
  Description of Artificial Sequence: Synthetic oligonucleotide
caggguccugcaaguaaua

SEQ ID NO: 1901770 - RNA, 19 nt, Artificial Sequence
  Description of Artificial Sequence: Synthetic oligonucleotide
ggcaaagaccaacuagcuu

SEQ ID NO: 1901771 - RNA, 19 nt, Artificial Sequence
  Description of Artificial Sequence: Synthetic oligonucleotide
agugaccggcuguccggua

SEQ ID NO: 1901772 - RNA, 19 nt, Artificial Sequence
  Description of Artificial Sequence: Synthetic oligonucleotide
gugaccggcuguccgguau

SEQ ID NO: 1901773 - RNA, 19 nt, Artificial Sequence
  Description of Artificial Sequence: Synthetic oligonucleotide
cgcugguagagaaucugca

SEQ ID NO: 1901774 - RNA, 19 nt, Artificial Sequence
  Description of Artificial Sequence: Synthetic oligonucleotide
caucgucuauaggcucguc

SEQ ID NO: 1901775 - RNA, 19 nt, Artificial Sequence
  Description of Artificial Sequence: Synthetic oligonucleotide
ggcggugcugauuauucuu

SEQ ID NO: 1901776 - RNA, 19 nt, Artificial Sequence
  Description of Artificial Sequence: Synthetic oligonucleotide
acggugcgacucccacacu

SEQ ID NO: 1901777 - RNA, 19 nt, Artificial Sequence
  Description of Artificial Sequence: Synthetic oligonucleotide
ugcuggcggugcugauuau

SEQ ID NO: 1901778 - RNA, 19 nt, Artificial Sequence
  Description of Artificial Sequence: Synthetic oligonucleotide
caucaaugucuaacaccau

SEQ ID NO: 1901779 - RNA, 19 nt, Artificial Sequence
  Description of Artificial Sequence: Synthetic oligonucleotide
gagugaccggcuguccggu

SEQ ID NO: 1901780 - RNA, 19 nt, Artificial Sequence
  Description of Artificial Sequence: Synthetic oligonucleotide
gcccgugugagcugaugaa

SEQ ID NO: 1901781 - RNA, 19 nt, Artificial Sequence
  Description of Artificial Sequence: Synthetic oligonucleotide
gucgcagaggaggucugcu

SEQ ID NO: 1901782 - RNA, 19 nt, Artificial Sequence
  Description of Artificial Sequence: Synthetic oligonucleotide
gaaagacggggagcuuuau

SEQ ID NO: 1901783 - RNA, 19 nt, Artificial Sequence
  Description of Artificial Sequence: Synthetic oligonucleotide
ccaaauugaacccgugcuu

SEQ ID NO: 1901784 - RNA, 19 nt, Artificial Sequence
  Description of Artificial Sequence: Synthetic oligonucleotide
gcggugcugauuauucuua

SEQ ID NO: 1901785 - RNA, 19 nt, Artificial Sequence
  Description of Artificial Sequence: Synthetic oligonucleotide
cucguacucguaucucauu

SEQ ID NO: 1901786 - RNA, 19 nt, Artificial Sequence
  Description of Artificial Sequence: Synthetic oligonucleotide
gaccacggugcgacuccca

SEQ ID NO: 1901787 - RNA, 19 nt, Artificial Sequence
  Description of Artificial Sequence: Synthetic oligonucleotide
guccgguaucaccucuuau

SEQ ID NO: 1901788 - RNA, 19 nt, Artificial Sequence
  Description of Artificial Sequence: Synthetic oligonucleotide
gugaagugacagugaccau

SEQ ID NO: 1901789 - RNA, 19 nt, Artificial Sequence
  Description of Artificial Sequence: Synthetic oligonucleotide
gcagaggaggucugcuggu

SEQ ID NO: 1901790 - RNA, 19 nt, Artificial Sequence
  Description of Artificial Sequence: Synthetic oligonucleotide
ccaggguccugcaaguaau

SEQ ID NO: 1901791 - RNA, 19 nt, Artificial Sequence
  Description of Artificial Sequence: Synthetic oligonucleotide
gcuaagguuuuagucccau

SEQ ID NO: 1901792 - RNA, 19 nt, Artificial Sequence
  Description of Artificial Sequence: Synthetic oligonucleotide
guugggccagggcccgugu

SEQ ID NO: 1901793 - RNA, 19 nt, Artificial Sequence
  Description of Artificial Sequence: Synthetic oligonucleotide
ggucugcugguucgagacu

SEQ ID NO: 1901794 - RNA, 19 nt, Artificial Sequence
  Description of Artificial Sequence: Synthetic oligonucleotide
cuguccgguaucaccucuu

SEQ ID NO: 1901795 - RNA, 19 nt, Artificial Sequence
  Description of Artificial Sequence: Synthetic oligonucleotide
cgcuucaguagguggaacu

SEQ ID NO: 1901796 - RNA, 19 nt, Artificial Sequence
  Description of Artificial Sequence: Synthetic oligonucleotide
gcucuuugacguaguggua

SEQ ID NO: 1901797 - RNA, 19 nt, Artificial Sequence
  Description of Artificial Sequence: Synthetic oligonucleotide
ccacggugcgacucccaca

SEQ ID NO: 1901798 - RNA, 19 nt, Artificial Sequence
  Description of Artificial Sequence: Synthetic oligonucleotide
cgguaucaccucuuauaaa

SEQ ID NO: 1901799 - RNA, 19 nt, Artificial Sequence
  Description of Artificial Sequence: Synthetic oligonucleotide
ccggagaggggacaguuuu

SEQ ID NO: 1901800 - RNA, 19 nt, Artificial Sequence
  Description of Artificial Sequence: Synthetic oligonucleotide
cggugcugauuauucuuaa

SEQ ID NO: 1901801 - RNA, 19 nt, Artificial Sequence
  Description of Artificial Sequence: Synthetic oligonucleotide
cggggagcuuuaugaguga

SEQ ID NO: 1901802 - RNA, 19 nt, Artificial Sequence
  Description of Artificial Sequence: Synthetic oligonucleotide
cguaucucauucgcuggua

SEQ ID NO: 1901803 - RNA, 19 nt, Artificial Sequence
  Description of Artificial Sequence: Synthetic oligonucleotide
cgacucccacacuugccaa

SEQ ID NO: 1901804 - RNA, 19 nt, Artificial Sequence
  Description of Artificial Sequence: Synthetic oligonucleotide
cgucuauaggcucgucggu

SEQ ID NO: 1901805 - RNA, 19 nt, Artificial Sequence
  Description of Artificial Sequence: Synthetic oligonucleotide
ccaugcuguugagcacaca

SEQ ID NO: 1901806 - RNA, 19 nt, Artificial Sequence
  Description of Artificial Sequence: Synthetic oligonucleotide
cggugcgacucccacacuu

SEQ ID NO: 1901807 - RNA, 19 nt, Artificial Sequence
  Description of Artificial Sequence: Synthetic oligonucleotide
aaaucuuuuaguuugcagc

SEQ ID NO: 1901808 - RNA, 19 nt, Artificial Sequence
  Description of Artificial Sequence: Synthetic oligonucleotide
aaugaaaucaggcucauuc

SEQ ID NO: 1901809 - RNA, 19 nt, Artificial Sequence
  Description of Artificial Sequence: Synthetic oligonucleotide
aauauaucuuuauacagac

SEQ ID NO: 1901810 - RNA, 19 nt, Artificial Sequence
  Description of Artificial Sequence: Synthetic oligonucleotide
aauuuaagaucauaaaauc

SEQ ID NO: 1901811 - RNA, 19 nt, Artificial Sequence
  Description of Artificial Sequence: Synthetic oligonucleotide
auacuuaacaauuacauuc

SEQ ID NO: 1901812 - RNA, 19 nt, Artificial Sequence
  Description of Artificial Sequence: Synthetic oligonucleotide
aauaguaaugaaaucaggc

SEQ ID NO: 1901813 - RNA, 19 nt, Artificial Sequence
  Description of Artificial Sequence: Synthetic oligonucleotide
ugauaauugauauauaucu

SEQ ID NO: 1901814 - RNA, 19 nt, Artificial Sequence
  Description of Artificial Sequence: Synthetic oligonucleotide
aauuucucuagucuuacac

SEQ ID NO: 1901815 - RNA, 19 nt, Artificial Sequence
  Description of Artificial Sequence: Synthetic oligonucleotide
uuauaaaacaauaaacuga

SEQ ID NO: 1901816 - RNA, 19 nt, Artificial Sequence
  Description of Artificial Sequence: Synthetic oligonucleotide
aauuacauucugcugaagg

SEQ ID NO: 1901817 - RNA, 19 nt, Artificial Sequence
  Description of Artificial Sequence: Synthetic oligonucleotide
aaaaguuuagcauacacaa

SEQ ID NO: 1901818 - RNA, 19 nt, Artificial Sequence
  Description of Artificial Sequence: Synthetic oligonucleotide
aaacuauaaaucuaagcag

SEQ ID NO: 1901819 - RNA, 19 nt, Artificial Sequence
  Description of Artificial Sequence: Synthetic oligonucleotide
uaucauucaaaccaugagg

SEQ ID NO: 1901820 - RNA, 19 nt, Artificial Sequence
  Description of Artificial Sequence: Synthetic oligonucleotide
aagaucauaaaaucauugg

SEQ ID NO: 1901821 - RNA, 19 nt, Artificial Sequence
  Description of Artificial Sequence: Synthetic oligonucleotide
aacaauuacauucugcuga

SEQ ID NO: 1901822 - RNA, 19 nt, Artificial Sequence
  Description of Artificial Sequence: Synthetic oligonucleotide
cuauaagugauuuaaagac

SEQ ID NO: 1901823 - RNA, 19 nt, Artificial Sequence
  Description of Artificial Sequence: Synthetic oligonucleotide
uguauuuggaaacugauaa

SEQ ID NO: 1901824 - RNA, 19 nt, Artificial Sequence
  Description of Artificial Sequence: Synthetic oligonucleotide
aguuuuaugaaugaacccc

SEQ ID NO: 1901825 - RNA, 19 nt, Artificial Sequence
  Description of Artificial Sequence: Synthetic oligonucleotide
aaaaucauuggcaauguac

SEQ ID NO: 1901826 - RNA, 19 nt, Artificial Sequence
  Description of Artificial Sequence: Synthetic oligonucleotide
ucaguuuuaugaaugaacc

SEQ ID NO: 1901827 - RNA, 19 nt, Artificial Sequence
  Description of Artificial Sequence: Synthetic oligonucleotide
uguaguaaaauauagcuau

SEQ ID NO: 1901828 - RNA, 19 nt, Artificial Sequence
  Description of Artificial Sequence: Synthetic oligonucleotide
ucuaacaagauggaaaagg

SEQ ID NO: 1901829 - RNA, 19 nt, Artificial Sequence
  Description of Artificial Sequence: Synthetic oligonucleotide
aauacaaccagcaguacac

SEQ ID NO: 1901830 - RNA, 19 nt, Artificial Sequence
  Description of Artificial Sequence: Synthetic oligonucleotide
aaaauauagcuauaaguga

SEQ ID NO: 1901831 - RNA, 19 nt, Artificial Sequence
  Description of Artificial Sequence: Synthetic oligonucleotide
aaguugcugacucacaaac

SEQ ID NO: 1901832 - RNA, 19 nt, Artificial Sequence
  Description of Artificial Sequence: Synthetic oligonucleotide
uuaacaauuacauucugcu

SEQ ID NO: 1901833 - RNA, 19 nt, Artificial Sequence
  Description of Artificial Sequence: Synthetic oligonucleotide
uuuacaaucucauuaccag

SEQ ID NO: 1901834 - RNA, 19 nt, Artificial Sequence
  Description of Artificial Sequence: Synthetic oligonucleotide
acacuuaucauucaaacca

SEQ ID NO: 1901835 - RNA, 19 nt, Artificial Sequence
  Description of Artificial Sequence: Synthetic oligonucleotide
uauaaaucuaagcagguuc

SEQ ID NO: 1901836 - RNA, 19 nt, Artificial Sequence
  Description of Artificial Sequence: Synthetic oligonucleotide
aaaugugcucuguuaauac

SEQ ID NO: 1901837 - RNA, 19 nt, Artificial Sequence
  Description of Artificial Sequence: Synthetic oligonucleotide
aacuucauguuauaaaaca

SEQ ID NO: 1901838 - RNA, 19 nt, Artificial Sequence
  Description of Artificial Sequence: Synthetic oligonucleotide
uguuaauacaaccagcagu

SEQ ID NO: 1901839 - RNA, 19 nt, Artificial Sequence
  Description of Artificial Sequence: Synthetic oligonucleotide
uuucuuuauacauagaaua

SEQ ID NO: 1901840 - RNA, 19 nt, Artificial Sequence
  Description of Artificial Sequence: Synthetic oligonucleotide
aaaauaguaaugaaaucag

SEQ ID NO: 1901841 - RNA, 19 nt, Artificial Sequence
  Description of Artificial Sequence: Synthetic oligonucleotide
ucuguuaauacaaccagca

SEQ ID NO: 1901842 - RNA, 19 nt, Artificial Sequence
  Description of Artificial Sequence: Synthetic oligonucleotide
uaagaucauaaaaucauug

SEQ ID NO: 1901843 - RNA, 19 nt, Artificial Sequence
  Description of Artificial Sequence: Synthetic oligonucleotide
aauaccuucccauagcuaa

SEQ ID NO: 1901844 - RNA, 19 nt, Artificial Sequence
  Description of Artificial Sequence: Synthetic oligonucleotide
aaucuuuuaguuugcagcu

SEQ ID NO: 1901845 - RNA, 19 nt, Artificial Sequence
  Description of Artificial Sequence: Synthetic oligonucleotide
ugauuagaagaauucacag

SEQ ID NO: 1901846 - RNA, 19 nt, Artificial Sequence
  Description of Artificial Sequence: Synthetic oligonucleotide
auuagaagaauucacagua

SEQ ID NO: 1901847 - RNA, 19 nt, Artificial Sequence
  Description of Artificial Sequence: Synthetic oligonucleotide
aaaacugauacaugaccag

SEQ ID NO: 1901848 - RNA, 19 nt, Artificial Sequence
  Description of Artificial Sequence: Synthetic oligonucleotide
uauuaugcacagauaaaag

SEQ ID NO: 1901849 - RNA, 19 nt, Artificial Sequence
  Description of Artificial Sequence: Synthetic oligonucleotide
uuaucauucaaaccaugag

SEQ ID NO: 1901850 - RNA, 19 nt, Artificial Sequence
  Description of Artificial Sequence: Synthetic oligonucleotide
uauacauagaauauacuua

SEQ ID NO: 1901851 - RNA, 19 nt, Artificial Sequence
  Description of Artificial Sequence: Synthetic oligonucleotide
uagucuuacaccaucaccu

SEQ ID NO: 1901852 - RNA, 19 nt, Artificial Sequence
  Description of Artificial Sequence: Synthetic oligonucleotide
aaacugauaacaguccuuc

SEQ ID NO: 1901853 - RNA, 19 nt, Artificial Sequence
  Description of Artificial Sequence: Synthetic oligonucleotide
agcagguucacaaaguugc

SEQ ID NO: 1901854 - RNA, 19 nt, Artificial Sequence
  Description of Artificial Sequence: Synthetic oligonucleotide
agaaauaucuagguccucc

SEQ ID NO: 1901855 - RNA, 19 nt, Artificial Sequence
  Description of Artificial Sequence: Synthetic oligonucleotide
aaaauugugguuaucaaaa

SEQ ID NO: 1901856 - RNA, 19 nt, Artificial Sequence
  Description of Artificial Sequence: Synthetic oligonucleotide
uuuaguuugcagcuuauaa

SEQ ID NO: 1901857 - RNA, 19 nt, Artificial Sequence
  Description of Artificial Sequence: Synthetic oligonucleotide
aaacugauacaugaccagc

SEQ ID NO: 1901858 - RNA, 19 nt, Artificial Sequence
  Description of Artificial Sequence: Synthetic oligonucleotide
uacgcucugacccucauag

SEQ ID NO: 1901859 - RNA, 19 nt, Artificial Sequence
  Description of Artificial Sequence: Synthetic oligonucleotide
uauaucuuuuauuaugcac

SEQ ID NO: 1901860 - RNA, 19 nt, Artificial Sequence
  Description of Artificial Sequence: Synthetic oligonucleotide
agcuauaagugauuuaaag

SEQ ID NO: 1901861 - RNA, 19 nt, Artificial Sequence
  Description of Artificial Sequence: Synthetic oligonucleotide
acauagaauauacuuaaca

SEQ ID NO: 1901862 - RNA, 19 nt, Artificial Sequence
  Description of Artificial Sequence: Synthetic oligonucleotide
auaguaaugaaaucaggcu

SEQ ID NO: 1901863 - RNA, 19 nt, Artificial Sequence
  Description of Artificial Sequence: Synthetic oligonucleotide
ugacucacaaacaggacag

SEQ ID NO: 1901864 - RNA, 19 nt, Artificial Sequence
  Description of Artificial Sequence: Synthetic oligonucleotide
uuuagcauacacaacucac

SEQ ID NO: 1901865 - RNA, 19 nt, Artificial Sequence
  Description of Artificial Sequence: Synthetic oligonucleotide
uaccagacgagcaagacac

SEQ ID NO: 1901866 - RNA, 19 nt, Artificial Sequence
  Description of Artificial Sequence: Synthetic oligonucleotide
ucaggguacgcucugaccc

SEQ ID NO: 1901867 - RNA, 19 nt, Artificial Sequence
  Description of Artificial Sequence: Synthetic oligonucleotide
uuguaaguuaauuuaagau

SEQ ID NO: 1901868 - RNA, 19 nt, Artificial Sequence
  Description of Artificial Sequence: Synthetic oligonucleotide
uuggaaacugauaacaguc

SEQ ID NO: 1901869 - RNA, 19 nt, Artificial Sequence
  Description of Artificial Sequence: Synthetic oligonucleotide
ugaagguuaggcaaagcgc

SEQ ID NO: 1901870 - RNA, 19 nt, Artificial Sequence
  Description of Artificial Sequence: Synthetic oligonucleotide
uauaagugauuuaaagacu

SEQ ID NO: 1901871 - RNA, 19 nt, Artificial Sequence
  Description of Artificial Sequence: Synthetic oligonucleotide
aauaucuagguccuccaca

SEQ ID NO: 1901872 - RNA, 19 nt, Artificial Sequence
  Description of Artificial Sequence: Synthetic oligonucleotide
aaauauaucuuuauacaga

SEQ ID NO: 1901873 - RNA, 19 nt, Artificial Sequence
  Description of Artificial Sequence: Synthetic oligonucleotide
uagcguagaaauaucuagg

SEQ ID NO: 1901874 - RNA, 19 nt, Artificial Sequence
  Description of Artificial Sequence: Synthetic oligonucleotide
aaauaucuagguccuccac

SEQ ID NO: 1901875 - RNA, 19 nt, Artificial Sequence
  Description of Artificial Sequence: Synthetic oligonucleotide
aaaagaagggcgcacgccu

SEQ ID NO: 1901876 - RNA, 19 nt, Artificial Sequence
  Description of Artificial Sequence: Synthetic oligonucleotide
uaguaaugaaaucaggcuc

SEQ ID NO: 1901877 - RNA, 19 nt, Artificial Sequence
  Description of Artificial Sequence: Synthetic oligonucleotide
guaaguuaauuuaagauca

SEQ ID NO: 1901878 - RNA, 19 nt, Artificial Sequence
  Description of Artificial Sequence: Synthetic oligonucleotide
ugauacaugaccagcucag

SEQ ID NO: 1901879 - RNA, 19 nt, Artificial Sequence
  Description of Artificial Sequence: Synthetic oligonucleotide
uuagcauacacaacucacc

SEQ ID NO: 1901880 - RNA, 19 nt, Artificial Sequence
  Description of Artificial Sequence: Synthetic oligonucleotide
auagaauauacuuaacaau

SEQ ID NO: 1901881 - RNA, 19 nt, Artificial Sequence
  Description of Artificial Sequence: Synthetic oligonucleotide
auacaugaccagcucaggc

SEQ ID NO: 1901882 - RNA, 19 nt, Artificial Sequence
  Description of Artificial Sequence: Synthetic oligonucleotide
aagaauucacaguaacuga

SEQ ID NO: 1901883 - RNA, 19 nt, Artificial Sequence
  Description of Artificial Sequence: Synthetic oligonucleotide
guagcguagaaauaucuag

SEQ ID NO: 1901884 - RNA, 19 nt, Artificial Sequence
  Description of Artificial Sequence: Synthetic oligonucleotide
uacaaucucauuaccagac

SEQ ID NO: 1901885 - RNA, 19 nt, Artificial Sequence
  Description of Artificial Sequence: Synthetic oligonucleotide
aaaucauuggcaauguacu

SEQ ID NO: 1901886 - RNA, 19 nt, Artificial Sequence
  Description of Artificial Sequence: Synthetic oligonucleotide
aaauaguaaugaaaucagg

SEQ ID NO: 1901887 - RNA, 19 nt, Artificial Sequence
  Description of Artificial Sequence: Synthetic oligonucleotide
uugauaauugauauauauc

SEQ ID NO: 1901888 - RNA, 19 nt, Artificial Sequence
  Description of Artificial Sequence: Synthetic oligonucleotide
uauuguauuuggaaacuga

SEQ ID NO: 1901889 - RNA, 19 nt, Artificial Sequence
  Description of Artificial Sequence: Synthetic oligonucleotide
uccaucuaagaaaugaauc

SEQ ID NO: 1901890 - RNA, 19 nt, Artificial Sequence
  Description of Artificial Sequence: Synthetic oligonucleotide
acaacuucauguuauaaaa

SEQ ID NO: 1901891 - RNA, 19 nt, Artificial Sequence
  Description of Artificial Sequence: Synthetic oligonucleotide
uuaacucuguccaucuaag

SEQ ID NO: 1901892 - RNA, 19 nt, Artificial Sequence
  Description of Artificial Sequence: Synthetic oligonucleotide
aggauuuacaaucucauua

SEQ ID NO: 1901893 - RNA, 19 nt, Artificial Sequence
  Description of Artificial Sequence: Synthetic oligonucleotide
uaauacaaccagcaguaca

SEQ ID NO: 1901894 - RNA, 19 nt, Artificial Sequence
  Description of Artificial Sequence: Synthetic oligonucleotide
aaauauagcuauaagugau

SEQ ID NO: 1901895 - RNA, 19 nt, Artificial Sequence
  Description of Artificial Sequence: Synthetic oligonucleotide
guugcugacucacaaacag

SEQ ID NO: 1901896 - RNA, 19 nt, Artificial Sequence
  Description of Artificial Sequence: Synthetic oligonucleotide
uuugcagcuuauaaauuug

SEQ ID NO: 1901897 - RNA, 19 nt, Artificial Sequence
  Description of Artificial Sequence: Synthetic oligonucleotide
aagugauuuaaagacucuc

SEQ ID NO: 1901898 - RNA, 19 nt, Artificial Sequence
  Description of Artificial Sequence: Synthetic oligonucleotide
uaaaauugugguuaucaaa

SEQ ID NO: 1901899 - RNA, 19 nt, Artificial Sequence
  Description of Artificial Sequence: Synthetic oligonucleotide
uacuuaacaauuacauucu

SEQ ID NO: 1901900 - RNA, 19 nt, Artificial Sequence
  Description of Artificial Sequence: Synthetic oligonucleotide
gaucauaaaaucauuggca

SEQ ID NO: 1901901 - RNA, 19 nt, Artificial Sequence
  Description of Artificial Sequence: Synthetic oligonucleotide
aaaucaggcucauucagaa

SEQ ID NO: 1901902 - RNA, 19 nt, Artificial Sequence
  Description of Artificial Sequence: Synthetic oligonucleotide
aacaagauggaaaagguuu

SEQ ID NO: 1901903 - RNA, 19 nt, Artificial Sequence
  Description of Artificial Sequence: Synthetic oligonucleotide
uucacaaaguugcugacuc

SEQ ID NO: 1901904 - RNA, 19 nt, Artificial Sequence
  Description of Artificial Sequence: Synthetic oligonucleotide
agaggaguauuguauuugg

SEQ ID NO: 1901905 - RNA, 19 nt, Artificial Sequence
  Description of Artificial Sequence: Synthetic oligonucleotide
uagcauacacaacucaccc

SEQ ID NO: 1901906 - RNA, 19 nt, Artificial Sequence
  Description of Artificial Sequence: Synthetic oligonucleotide
aauagaggaguauuguauu

SEQ ID NO: 1901907 - RNA, 19 nt, Artificial Sequence
  Description of Artificial Sequence: Synthetic oligonucleotide
aaaacauuucacguggggu

SEQ ID NO: 1901908 - RNA, 19 nt, Artificial Sequence
  Description of Artificial Sequence: Synthetic oligonucleotide
uacacuuaucauucaaacc

SEQ ID NO: 1901909 - RNA, 19 nt, Artificial Sequence
  Description of Artificial Sequence: Synthetic oligonucleotide
uaguuugcagcuuauaaau

SEQ ID NO: 1901910 - RNA, 19 nt, Artificial Sequence
  Description of Artificial Sequence: Synthetic oligonucleotide
uuaguuugcagcuuauaaa

SEQ ID NO: 1901911 - RNA, 19 nt, Artificial Sequence
  Description of Artificial Sequence: Synthetic oligonucleotide
auuggcaauguacuauuuc

SEQ ID NO: 1901912 - RNA, 19 nt, Artificial Sequence
  Description of Artificial Sequence: Synthetic oligonucleotide
uucuuuauacauagaauau

SEQ ID NO: 1901913 - RNA, 19 nt, Artificial Sequence
  Description of Artificial Sequence: Synthetic oligonucleotide
aaacauuucacguggggua

SEQ ID NO: 1901914 - RNA, 19 nt, Artificial Sequence
  Description of Artificial Sequence: Synthetic oligonucleotide
cauucaaaccaugagguag

SEQ ID NO: 1901915 - RNA, 19 nt, Artificial Sequence
  Description of Artificial Sequence: Synthetic oligonucleotide
auagcuauaagugauuuaa

SEQ ID NO: 1901916 - RNA, 19 nt, Artificial Sequence
  Description of Artificial Sequence: Synthetic oligonucleotide
aagacaucuuuaaacaucu

SEQ ID NO: 1901917 - RNA, 19 nt, Artificial Sequence
  Description of Artificial Sequence: Synthetic oligonucleotide
agugauuuaaagacucucg

SEQ ID NO: 1901918 - RNA, 19 nt, Artificial Sequence
  Description of Artificial Sequence: Synthetic oligonucleotide
ucacaaacaggacagguua

SEQ ID NO: 1901919 - RNA, 19 nt, Artificial Sequence
  Description of Artificial Sequence: Synthetic oligonucleotide
cguagaaauaucuaggucc

SEQ ID NO: 1901920 - RNA, 19 nt, Artificial Sequence
  Description of Artificial Sequence: Synthetic oligonucleotide
uuuaaacacagguagcgua

SEQ ID NO: 1901921 - RNA, 19 nt, Artificial Sequence
  Description of Artificial Sequence: Synthetic oligonucleotide
agauaaaacaaacgguuaa

SEQ ID NO: 1901922 - RNA, 19 nt, Artificial Sequence
  Description of Artificial Sequence: Synthetic oligonucleotide
ucucuaaaacauuuaaaua

SEQ ID NO: 1901923 - RNA, 19 nt, Artificial Sequence
  Description of Artificial Sequence: Synthetic oligonucleotide
aaaguuuagcauacacaac

SEQ ID NO: 1901924 - RNA, 19 nt, Artificial Sequence
  Description of Artificial Sequence: Synthetic oligonucleotide
aauaucugucaguuuuaug

SEQ ID NO: 1901925 - RNA, 19 nt, Artificial Sequence
  Description of Artificial Sequence: Synthetic oligonucleotide
uuaaaauugugguuaucaa

SEQ ID NO: 1901926 - RNA, 19 nt, Artificial Sequence
  Description of Artificial Sequence: Synthetic oligonucleotide
acugauaacaguccuuccu

SEQ ID NO: 1901927 - RNA, 19 nt, Artificial Sequence
  Description of Artificial Sequence: Synthetic oligonucleotide
aucaggcucauucagaaaa

SEQ ID NO: 1901928 - RNA, 19 nt, Artificial Sequence
  Description of Artificial Sequence: Synthetic oligonucleotide
cucuaaaacauuuaaauau

SEQ ID NO: 1901929 - RNA, 19 nt, Artificial Sequence
  Description of Artificial Sequence: Synthetic oligonucleotide
uuguaguaaaauauagcua

SEQ ID NO: 1901930 - RNA, 19 nt, Artificial Sequence
  Description of Artificial Sequence: Synthetic oligonucleotide
aguuaauuuaagaucauaa

SEQ ID NO: 1901931 - RNA, 19 nt, Artificial Sequence
  Description of Artificial Sequence: Synthetic oligonucleotide
ucucauuaccagacgagca

SEQ ID NO: 1901932 - RNA, 19 nt, Artificial Sequence
  Description of Artificial Sequence: Synthetic oligonucleotide
aaaucuccagccuuugaaa

SEQ ID NO: 1901933 - RNA, 19 nt, Artificial Sequence
  Description of Artificial Sequence: Synthetic oligonucleotide
ugggguaacuuaaauuucu

SEQ ID NO: 1901934 - RNA, 19 nt, Artificial Sequence
  Description of Artificial Sequence: Synthetic oligonucleotide
guacacuuaucauucaaac

SEQ ID NO: 1901935 - RNA, 19 nt, Artificial Sequence
  Description of Artificial Sequence: Synthetic oligonucleotide
uaacaauuacauucugcug

SEQ ID NO: 1901936 - RNA, 19 nt, Artificial Sequence
  Description of Artificial Sequence: Synthetic oligonucleotide
uuaagaucauaaaaucauu

SEQ ID NO: 1901937 - RNA, 19 nt, Artificial Sequence
  Description of Artificial Sequence: Synthetic oligonucleotide
cuagucuuacaccaucacc

SEQ ID NO: 1901938 - RNA, 19 nt, Artificial Sequence
  Description of Artificial Sequence: Synthetic oligonucleotide
ucuaagaaaugaaucuuuu

SEQ ID NO: 1901939 - RNA, 19 nt, Artificial Sequence
  Description of Artificial Sequence: Synthetic oligonucleotide
ugauuuaaagacucucguc

SEQ ID NO: 1901940 - RNA, 19 nt, Artificial Sequence
  Description of Artificial Sequence: Synthetic oligonucleotide
uugauauauaucuuuuauu

SEQ ID NO: 1901941 - RNA, 19 nt, Artificial Sequence
  Description of Artificial Sequence: Synthetic oligonucleotide
aaucucauuaccagacgag

SEQ ID NO: 1901942 - RNA, 19 nt, Artificial Sequence
  Description of Artificial Sequence: Synthetic oligonucleotide
guaacuuaaauuucucuaa

SEQ ID NO: 1901943 - RNA, 19 nt, Artificial Sequence
  Description of Artificial Sequence: Synthetic oligonucleotide
ugauaacaguccuuccuag

SEQ ID NO: 1901944 - RNA, 19 nt, Artificial Sequence
  Description of Artificial Sequence: Synthetic oligonucleotide
acugauacaugaccagcuc

SEQ ID NO: 1901945 - RNA, 19 nt, Artificial Sequence
  Description of Artificial Sequence: Synthetic oligonucleotide
ucaggcagaagaaaaucuc

SEQ ID NO: 1901946 - RNA, 19 nt, Artificial Sequence
  Description of Artificial Sequence: Synthetic oligonucleotide
uguucaaacuggccacagg

SEQ ID NO: 1901947 - RNA, 19 nt, Artificial Sequence
  Description of Artificial Sequence: Synthetic oligonucleotide
ucaaacuggccacagggau

SEQ ID NO: 1901948 - RNA, 19 nt, Artificial Sequence
  Description of Artificial Sequence: Synthetic oligonucleotide
aggaguauuguauuuggaa

SEQ ID NO: 1901949 - RNA, 19 nt, Artificial Sequence
  Description of Artificial Sequence: Synthetic oligonucleotide
uuuaaagacucucgucuuc

SEQ ID NO: 1901950 - RNA, 19 nt, Artificial Sequence
  Description of Artificial Sequence: Synthetic oligonucleotide
aguaaugaaaucaggcuca

SEQ ID NO: 1901951 - RNA, 19 nt, Artificial Sequence
  Description of Artificial Sequence: Synthetic oligonucleotide
acaaucucauuaccagacg

SEQ ID NO: 1901952 - RNA, 19 nt, Artificial Sequence
  Description of Artificial Sequence: Synthetic oligonucleotide
ugguuaucaaaacuauaaa

SEQ ID NO: 1901953 - RNA, 19 nt, Artificial Sequence
  Description of Artificial Sequence: Synthetic oligonucleotide
uuaccagacgagcaagaca

SEQ ID NO: 1901954 - RNA, 19 nt, Artificial Sequence
  Description of Artificial Sequence: Synthetic oligonucleotide
ucuuacaccaucaccucuc

SEQ ID NO: 1901955 - RNA, 19 nt, Artificial Sequence
  Description of Artificial Sequence: Synthetic oligonucleotide
cuuaucauucaaaccauga

SEQ ID NO: 1901956 - RNA, 19 nt, Artificial Sequence
  Description of Artificial Sequence: Synthetic oligonucleotide
agcguagaaauaucuaggu

SEQ ID NO: 1901957 - RNA, 19 nt, Artificial Sequence
  Description of Artificial Sequence: Synthetic oligonucleotide
caggcagaagaaaaucucc

SEQ ID NO: 1901958 - RNA, 19 nt, Artificial Sequence
  Description of Artificial Sequence: Synthetic oligonucleotide
caguuuuaugaaugaaccc

SEQ ID NO: 1901959 - RNA, 19 nt, Artificial Sequence
  Description of Artificial Sequence: Synthetic oligonucleotide
aucaaaacuauaaaucuaa

SEQ ID NO: 1901960 - RNA, 19 nt, Artificial Sequence
  Description of Artificial Sequence: Synthetic oligonucleotide
uacacaacucacccgacaa

SEQ ID NO: 1901961 - RNA, 19 nt, Artificial Sequence
  Description of Artificial Sequence: Synthetic oligonucleotide
auaacaguccuuccuagaa

SEQ ID NO: 1901962 - RNA, 19 nt, Artificial Sequence
  Description of Artificial Sequence: Synthetic oligonucleotide
uaguaaaauauagcuauaa

SEQ ID NO: 1901963 - RNA, 19 nt, Artificial Sequence
  Description of Artificial Sequence: Synthetic oligonucleotide
cugauuagaagaauucaca

SEQ ID NO: 1901964 - RNA, 19 nt, Artificial Sequence
  Description of Artificial Sequence: Synthetic oligonucleotide
agcaagacaccauuuugug

SEQ ID NO: 1901965 - RNA, 19 nt, Artificial Sequence
  Description of Artificial Sequence: Synthetic oligonucleotide
cacaaugacaacuucaugu

SEQ ID NO: 1901966 - RNA, 19 nt, Artificial Sequence
  Description of Artificial Sequence: Synthetic oligonucleotide
cugccgagaacacacacag

SEQ ID NO: 1901967 - RNA, 19 nt, Artificial Sequence
  Description of Artificial Sequence: Synthetic oligonucleotide
agcauacacaacucacccg

SEQ ID NO: 1901968 - RNA, 19 nt, Artificial Sequence
  Description of Artificial Sequence: Synthetic oligonucleotide
auauaucuuuuauuaugca

SEQ ID NO: 1901969 - RNA, 19 nt, Artificial Sequence
  Description of Artificial Sequence: Synthetic oligonucleotide
aaaaugugcucuguuaaua

SEQ ID NO: 1901970 - RNA, 19 nt, Artificial Sequence
  Description of Artificial Sequence: Synthetic oligonucleotide
caugagguaguuacaguac

SEQ ID NO: 1901971 - RNA, 19 nt, Artificial Sequence
  Description of Artificial Sequence: Synthetic oligonucleotide
ggauuuacaaucucauuac

SEQ ID NO: 1901972 - RNA, 19 nt, Artificial Sequence
  Description of Artificial Sequence: Synthetic oligonucleotide
accaucaccucucucucuc

SEQ ID NO: 1901973 - RNA, 19 nt, Artificial Sequence
  Description of Artificial Sequence: Synthetic oligonucleotide
auuaccagacgagcaagac

SEQ ID NO: 1901974 - RNA, 19 nt, Artificial Sequence
  Description of Artificial Sequence: Synthetic oligonucleotide
gcuauaagugauuuaaaga

SEQ ID NO: 1901975 - RNA, 19 nt, Artificial Sequence
  Description of Artificial Sequence: Synthetic oligonucleotide
aacucacccgacaaaaugu

SEQ ID NO: 1901976 - RNA, 19 nt, Artificial Sequence
  Description of Artificial Sequence: Synthetic oligonucleotide
aaaucuaagcagguucaca

SEQ ID NO: 1901977 - RNA, 19 nt, Artificial Sequence
  Description of Artificial Sequence: Synthetic oligonucleotide
agucuuacaccaucaccuc

SEQ ID NO: 1901978 - RNA, 19 nt, Artificial Sequence
  Description of Artificial Sequence: Synthetic oligonucleotide
agcuaauuuucuaacaaga

SEQ ID NO: 1901979 - RNA, 19 nt, Artificial Sequence
  Description of Artificial Sequence: Synthetic oligonucleotide
augaaaucaggcucauuca

SEQ ID NO: 1901980 - RNA, 19 nt, Artificial Sequence
  Description of Artificial Sequence: Synthetic oligonucleotide
gucaguuuuaugaaugaac

SEQ ID NO: 1901981 - RNA, 19 nt, Artificial Sequence
  Description of Artificial Sequence: Synthetic oligonucleotide
aaaguugcugacucacaaa

SEQ ID NO: 1901982 - RNA, 19 nt, Artificial Sequence
  Description of Artificial Sequence: Synthetic oligonucleotide
uuguauuuggaaacugaua

SEQ ID NO: 1901983 - RNA, 19 nt, Artificial Sequence
  Description of Artificial Sequence: Synthetic oligonucleotide
auaaaucuaagcagguuca

SEQ ID NO: 1901984 - RNA, 19 nt, Artificial Sequence
  Description of Artificial Sequence: Synthetic oligonucleotide
aacugauacaugaccagcu

SEQ ID NO: 1901985 - RNA, 19 nt, Artificial Sequence
  Description of Artificial Sequence: Synthetic oligonucleotide
ucuagucuuacaccaucac

SEQ ID NO: 1901986 - RNA, 19 nt, Artificial Sequence
  Description of Artificial Sequence: Synthetic oligonucleotide
gauuagaagaauucacagu

SEQ ID NO: 1901987 - RNA, 19 nt, Artificial Sequence
  Description of Artificial Sequence: Synthetic oligonucleotide
uuaaagacucucgucuucu

SEQ ID NO: 1901988 - RNA, 19 nt, Artificial Sequence
  Description of Artificial Sequence: Synthetic oligonucleotide
ccccagauaaaacaaacgg

SEQ ID NO: 1901989 - RNA, 19 nt, Artificial Sequence
  Description of Artificial Sequence: Synthetic oligonucleotide
aaucauuggcaauguacua

SEQ ID NO: 1901990 - RNA, 19 nt, Artificial Sequence
  Description of Artificial Sequence: Synthetic oligonucleotide
auugugguuaucaaaacua

SEQ ID NO: 1901991 - RNA, 19 nt, Artificial Sequence
  Description of Artificial Sequence: Synthetic oligonucleotide
uugugguuaucaaaacuau

SEQ ID NO: 1901992 - RNA, 19 nt, Artificial Sequence
  Description of Artificial Sequence: Synthetic oligonucleotide
ucauuaccagacgagcaag

SEQ ID NO: 1901993 - RNA, 19 nt, Artificial Sequence
  Description of Artificial Sequence: Synthetic oligonucleotide
uagaggaguauuguauuug

SEQ ID NO: 1901994 - RNA, 19 nt, Artificial Sequence
  Description of Artificial Sequence: Synthetic oligonucleotide
aagauggaaaagguuuugu

SEQ ID NO: 1901995 - RNA, 19 nt, Artificial Sequence
  Description of Artificial Sequence: Synthetic oligonucleotide
gugguuaucaaaacuauaa

SEQ ID NO: 1901996 - RNA, 19 nt, Artificial Sequence
  Description of Artificial Sequence: Synthetic oligonucleotide
agaauagaggaguauugua

SEQ ID NO: 1901997 - RNA, 19 nt, Artificial Sequence
  Description of Artificial Sequence: Synthetic oligonucleotide
acagguagcguagaaauau

SEQ ID NO: 1901998 - RNA, 19 nt, Artificial Sequence
  Description of Artificial Sequence: Synthetic oligonucleotide
acuuaacaauuacauucug

SEQ ID NO: 1901999 - RNA, 19 nt, Artificial Sequence
  Description of Artificial Sequence: Synthetic oligonucleotide
ugugguuaucaaaacuaua

SEQ ID NO: 1902000 - RNA, 19 nt, Artificial Sequence
  Description of Artificial Sequence: Synthetic oligonucleotide
gauaaaacaaacgguuaaa

SEQ ID NO: 1902001 - RNA, 19 nt, Artificial Sequence
  Description of Artificial Sequence: Synthetic oligonucleotide
agguaguuacaguacaaaa

SEQ ID NO: 1902002 - RNA, 19 nt, Artificial Sequence
  Description of Artificial Sequence: Synthetic oligonucleotide
uuaggcaaagcgcauuguu

SEQ ID NO: 1902003 - RNA, 19 nt, Artificial Sequence
  Description of Artificial Sequence: Synthetic oligonucleotide
acaccugccgagaacacac

SEQ ID NO: 1902004 - RNA, 19 nt, Artificial Sequence
  Description of Artificial Sequence: Synthetic oligonucleotide
uugcagcuuauaaauuugu

SEQ ID NO: 1902005 - RNA, 19 nt, Artificial Sequence
  Description of Artificial Sequence: Synthetic oligonucleotide
cauagcuaauuuucuaaca

SEQ ID NO: 1902006 - RNA, 19 nt, Artificial Sequence
  Description of Artificial Sequence: Synthetic oligonucleotide
aaagacucucgucuucuuu

SEQ ID NO: 1902007 - RNA, 19 nt, Artificial Sequence
  Description of Artificial Sequence: Synthetic oligonucleotide
cauuuuguguuuaggaaaa

SEQ ID NO: 1902008 - RNA, 19 nt, Artificial Sequence
  Description of Artificial Sequence: Synthetic oligonucleotide
uucccauagcuaauuuucu

SEQ ID NO: 1902009 - RNA, 19 nt, Artificial Sequence
  Description of Artificial Sequence: Synthetic oligonucleotide
cugacucacaaacaggaca

SEQ ID NO: 1902010 - RNA, 19 nt, Artificial Sequence
  Description of Artificial Sequence: Synthetic oligonucleotide
auuuaaagacucucgucuu

SEQ ID NO: 1902011 - RNA, 19 nt, Artificial Sequence
  Description of Artificial Sequence: Synthetic oligonucleotide
gauacaugaccagcucagg

SEQ ID NO: 1902012 - RNA, 19 nt, Artificial Sequence
  Description of Artificial Sequence: Synthetic oligonucleotide
acaauuacauucugcugaa

SEQ ID NO: 1902013 - RNA, 19 nt, Artificial Sequence
  Description of Artificial Sequence: Synthetic oligonucleotide
cuguuaauacaaccagcag

SEQ ID NO: 1902014 - RNA, 19 nt, Artificial Sequence
  Description of Artificial Sequence: Synthetic oligonucleotide
guuuagcauacacaacuca

SEQ ID NO: 1902015 - RNA, 19 nt, Artificial Sequence
  Description of Artificial Sequence: Synthetic oligonucleotide
agauggaaaagguuuuguu

SEQ ID NO: 1902016 - RNA, 19 nt, Artificial Sequence
  Description of Artificial Sequence: Synthetic oligonucleotide
ucauuggcaauguacuauu

SEQ ID NO: 1902017 - RNA, 19 nt, Artificial Sequence
  Description of Artificial Sequence: Synthetic oligonucleotide
aaguuaauuuaagaucaua

SEQ ID NO: 1902018 - RNA, 19 nt, Artificial Sequence
  Description of Artificial Sequence: Synthetic oligonucleotide
auuguauuuggaaacugau

SEQ ID NO: 1902019 - RNA, 19 nt, Artificial Sequence
  Description of Artificial Sequence: Synthetic oligonucleotide
uauagcuauaagugauuua

SEQ ID NO: 1902020 - RNA, 19 nt, Artificial Sequence
  Description of Artificial Sequence: Synthetic oligonucleotide
cuaacaagauggaaaaggu

SEQ ID NO: 1902021 - RNA, 19 nt, Artificial Sequence
  Description of Artificial Sequence: Synthetic oligonucleotide
ugcagcuuauaaauuugua

SEQ ID NO: 1902022 - RNA, 19 nt, Artificial Sequence
  Description of Artificial Sequence: Synthetic oligonucleotide
uagguccuccacaaugaca

SEQ ID NO: 1902023 - RNA, 19 nt, Artificial Sequence
  Description of Artificial Sequence: Synthetic oligonucleotide
accugccgagaacacacac

SEQ ID NO: 1902024 - RNA, 19 nt, Artificial Sequence
  Description of Artificial Sequence: Synthetic oligonucleotide
auagaggaguauuguauuu

SEQ ID NO: 1902025 - RNA, 19 nt, Artificial Sequence
  Description of Artificial Sequence: Synthetic oligonucleotide
ggaguauuguauuuggaaa

SEQ ID NO: 1902026 - RNA, 19 nt, Artificial Sequence
  Description of Artificial Sequence: Synthetic oligonucleotide
caccauuuuguguuuagga

SEQ ID NO: 1902027 - RNA, 19 nt, Artificial Sequence
  Description of Artificial Sequence: Synthetic oligonucleotide
aaacacagguagcguagaa

SEQ ID NO: 1902028 - RNA, 19 nt, Artificial Sequence
  Description of Artificial Sequence: Synthetic oligonucleotide
aacauuucacgugggguaa

SEQ ID NO: 1902029 - RNA, 19 nt, Artificial Sequence
  Description of Artificial Sequence: Synthetic oligonucleotide
aucauuggcaauguacuau

SEQ ID NO: 1902030 - RNA, 19 nt, Artificial Sequence
  Description of Artificial Sequence: Synthetic oligonucleotide
uaacucuguccaucuaaga

SEQ ID NO: 1902031 - RNA, 19 nt, Artificial Sequence
  Description of Artificial Sequence: Synthetic oligonucleotide
guauuguauuuggaaacug

SEQ ID NO: 1902032 - RNA, 19 nt, Artificial Sequence
  Description of Artificial Sequence: Synthetic oligonucleotide
auacacaacucacccgaca

SEQ ID NO: 1902033 - RNA, 19 nt, Artificial Sequence
  Description of Artificial Sequence: Synthetic oligonucleotide
gaauagaggaguauuguau

SEQ ID NO: 1902034 - RNA, 19 nt, Artificial Sequence
  Description of Artificial Sequence: Synthetic oligonucleotide
uagcuauaagugauuuaaa

SEQ ID NO: 1902035 - RNA, 19 nt, Artificial Sequence
  Description of Artificial Sequence: Synthetic oligonucleotide
acaccauuuuguguuuagg

SEQ ID NO: 1902036 - RNA, 19 nt, Artificial Sequence
  Description of Artificial Sequence: Synthetic oligonucleotide
agguccuccacaaugacaa

SEQ ID NO: 1902037 - RNA, 19 nt, Artificial Sequence
  Description of Artificial Sequence: Synthetic oligonucleotide
cacucaggcacaccugccg

SEQ ID NO: 1902038 - RNA, 19 nt, Artificial Sequence
  Description of Artificial Sequence: Synthetic oligonucleotide
gguuaucaaaacuauaaau

SEQ ID NO: 1902039 - RNA, 19 nt, Artificial Sequence
  Description of Artificial Sequence: Synthetic oligonucleotide
cucacccgacaaaaugugc

SEQ ID NO: 1902040 - RNA, 19 nt, Artificial Sequence
  Description of Artificial Sequence: Synthetic oligonucleotide
aaucaggcucauucagaaa

SEQ ID NO: 1902041 - RNA, 19 nt, Artificial Sequence
  Description of Artificial Sequence: Synthetic oligonucleotide
uaaaucuaagcagguucac

SEQ ID NO: 1902042 - RNA, 19 nt, Artificial Sequence
  Description of Artificial Sequence: Synthetic oligonucleotide
aagaagggcgcacgccugu

SEQ ID NO: 1902043 - RNA, 19 nt, Artificial Sequence
  Description of Artificial Sequence: Synthetic oligonucleotide
auauagcuauaagugauuu

SEQ ID NO: 1902044 - RNA, 19 nt, Artificial Sequence
  Description of Artificial Sequence: Synthetic oligonucleotide
uaauaccuucccauagcua

SEQ ID NO: 1902045 - RNA, 19 nt, Artificial Sequence
  Description of Artificial Sequence: Synthetic oligonucleotide
ucauucaaaccaugaggua

SEQ ID NO: 1902046 - RNA, 19 nt, Artificial Sequence
  Description of Artificial Sequence: Synthetic oligonucleotide
gcagcuuauaaauuuguaa

SEQ ID NO: 1902047 - RNA, 19 nt, Artificial Sequence
  Description of Artificial Sequence: Synthetic oligonucleotide
aagggcgcacgccugugca

SEQ ID NO: 1902048 - RNA, 19 nt, Artificial Sequence
  Description of Artificial Sequence: Synthetic oligonucleotide
gugauuuaaagacucucgu

SEQ ID NO: 1902049 - RNA, 19 nt, Artificial Sequence
  Description of Artificial Sequence: Synthetic oligonucleotide
aguaacugauuagaagaau

SEQ ID NO: 1902050 - RNA, 19 nt, Artificial Sequence
  Description of Artificial Sequence: Synthetic oligonucleotide
aguacacuuaucauucaaa

SEQ ID NO: 1902051 - RNA, 19 nt, Artificial Sequence
  Description of Artificial Sequence: Synthetic oligonucleotide
caaaguugcugacucacaa

SEQ ID NO: 1902052 - RNA, 19 nt, Artificial Sequence
  Description of Artificial Sequence: Synthetic oligonucleotide
ugacaacuucauguuauaa

SEQ ID NO: 1902053 - RNA, 19 nt, Artificial Sequence
  Description of Artificial Sequence: Synthetic oligonucleotide
gguuaggcaaagcgcauug

SEQ ID NO: 1902054 - RNA, 19 nt, Artificial Sequence
  Description of Artificial Sequence: Synthetic oligonucleotide
aucugucaguuuuaugaau

SEQ ID NO: 1902055 - RNA, 19 nt, Artificial Sequence
  Description of Artificial Sequence: Synthetic oligonucleotide
gaaacaggauuuacaaucu

SEQ ID NO: 1902056 - RNA, 19 nt, Artificial Sequence
  Description of Artificial Sequence: Synthetic oligonucleotide
guuugcagcuuauaaauuu

SEQ ID NO: 1902057 - RNA, 19 nt, Artificial Sequence
  Description of Artificial Sequence: Synthetic oligonucleotide
uuaauacaaccagcaguac

SEQ ID NO: 1902058 - RNA, 19 nt, Artificial Sequence
  Description of Artificial Sequence: Synthetic oligonucleotide
caucuuuaaacaucuuucu

SEQ ID NO: 1902059 - RNA, 19 nt, Artificial Sequence
  Description of Artificial Sequence: Synthetic oligonucleotide
ucccauagcuaauuuucua

SEQ ID NO: 1902060 - RNA, 19 nt, Artificial Sequence
  Description of Artificial Sequence: Synthetic oligonucleotide
guuacagcagggguguuca

SEQ ID NO: 1902061 - RNA, 19 nt, Artificial Sequence
  Description of Artificial Sequence: Synthetic oligonucleotide
ugccgagaacacacacagg

SEQ ID NO: 1902062 - RNA, 19 nt, Artificial Sequence
  Description of Artificial Sequence: Synthetic oligonucleotide
cagauaaaacaaacgguua

SEQ ID NO: 1902063 - RNA, 19 nt, Artificial Sequence
  Description of Artificial Sequence: Synthetic oligonucleotide
uacaaccagcaguacacuu

SEQ ID NO: 1902064 - RNA, 19 nt, Artificial Sequence
  Description of Artificial Sequence: Synthetic oligonucleotide
acuuaucauucaaaccaug

SEQ ID NO: 1902065 - RNA, 19 nt, Artificial Sequence
  Description of Artificial Sequence: Synthetic oligonucleotide
agacgagcaagacaccauu

SEQ ID NO: 1902066 - RNA, 19 nt, Artificial Sequence
  Description of Artificial Sequence: Synthetic oligonucleotide
agacucucgucuucuuuga

SEQ ID NO: 1902067 - RNA, 19 nt, Artificial Sequence
  Description of Artificial Sequence: Synthetic oligonucleotide
acgugggguaacuuaaauu

SEQ ID NO: 1902068 - RNA, 19 nt, Artificial Sequence
  Description of Artificial Sequence: Synthetic oligonucleotide
cucauuaccagacgagcaa

SEQ ID NO: 1902069 - RNA, 19 nt, Artificial Sequence
  Description of Artificial Sequence: Synthetic oligonucleotide
acgagcaagacaccauuuu

SEQ ID NO: 1902070 - RNA, 19 nt, Artificial Sequence
  Description of Artificial Sequence: Synthetic oligonucleotide
agggguguucaaacuggcc

SEQ ID NO: 1902071 - RNA, 19 nt, Artificial Sequence
  Description of Artificial Sequence: Synthetic oligonucleotide
cugucaguuuuaugaauga

SEQ ID NO: 1902072 - RNA, 19 nt, Artificial Sequence
  Description of Artificial Sequence: Synthetic oligonucleotide
ccauagcuaauuuucuaac

SEQ ID NO: 1902073 - RNA, 19 nt, Artificial Sequence
  Description of Artificial Sequence: Synthetic oligonucleotide
gacucacaaacaggacagg

SEQ ID NO: 1902074 - RNA, 19 nt, Artificial Sequence
  Description of Artificial Sequence: Synthetic oligonucleotide
gauaauugauauauaucuu

SEQ ID NO: 1902075 - RNA, 19 nt, Artificial Sequence
  Description of Artificial Sequence: Synthetic oligonucleotide
aucaccucucucucucucu

SEQ ID NO: 1902076 - RNA, 19 nt, Artificial Sequence
  Description of Artificial Sequence: Synthetic oligonucleotide
cucuagucuuacaccauca

SEQ ID NO: 1902077 - RNA, 19 nt, Artificial Sequence
  Description of Artificial Sequence: Synthetic oligonucleotide
agguagcguagaaauaucu

SEQ ID NO: 1902078 - RNA, 19 nt, Artificial Sequence
  Description of Artificial Sequence: Synthetic oligonucleotide
guagaaauaucuagguccu

SEQ ID NO: 1902079 - RNA, 19 nt, Artificial Sequence
  Description of Artificial Sequence: Synthetic oligonucleotide
auauaucuuuauacagacu

SEQ ID NO: 1902080 - RNA, 19 nt, Artificial Sequence
  Description of Artificial Sequence: Synthetic oligonucleotide
aaccagaauagaggaguau

SEQ ID NO: 1902081 - RNA, 19 nt, Artificial Sequence
  Description of Artificial Sequence: Synthetic oligonucleotide
cagggguguucaaacuggc

SEQ ID NO: 1902082 - RNA, 19 nt, Artificial Sequence
  Description of Artificial Sequence: Synthetic oligonucleotide
aggcacaccugccgagaac

SEQ ID NO: 1902083 - RNA, 19 nt, Artificial Sequence
  Description of Artificial Sequence: Synthetic oligonucleotide
uuuucaggguacgcucuga

SEQ ID NO: 1902084 - RNA, 19 nt, Artificial Sequence
  Description of Artificial Sequence: Synthetic oligonucleotide
acaagauggaaaagguuuu

SEQ ID NO: 1902085 - RNA, 19 nt, Artificial Sequence
  Description of Artificial Sequence: Synthetic oligonucleotide
acucacccgacaaaaugug

SEQ ID NO: 1902086 - RNA, 19 nt, Artificial Sequence
  Description of Artificial Sequence: Synthetic oligonucleotide
cauuaccagacgagcaaga

SEQ ID NO: 1902087 - RNA, 19 nt, Artificial Sequence
  Description of Artificial Sequence: Synthetic oligonucleotide
augacaacuucauguuaua

SEQ ID NO: 1902088 - RNA, 19 nt, Artificial Sequence
  Description of Artificial Sequence: Synthetic oligonucleotide
aggacagguuacagcaggg

SEQ ID NO: 1902089 - RNA, 19 nt, Artificial Sequence
  Description of Artificial Sequence: Synthetic oligonucleotide
cagguagcguagaaauauc

SEQ ID NO: 1902090 - RNA, 19 nt, Artificial Sequence
  Description of Artificial Sequence: Synthetic oligonucleotide
acacucaggcacaccugcc

SEQ ID NO: 1902091 - RNA, 19 nt, Artificial Sequence
  Description of Artificial Sequence: Synthetic oligonucleotide
gagcaagacaccauuuugu

SEQ ID NO: 1902092 - RNA, 19 nt, Artificial Sequence
  Description of Artificial Sequence: Synthetic oligonucleotide
gaagggcgcacgccugugc

SEQ ID NO: 1902093 - RNA, 19 nt, Artificial Sequence
  Description of Artificial Sequence: Synthetic oligonucleotide
ggguguucaaacuggccac

SEQ ID NO: 1902094 - RNA, 19 nt, Artificial Sequence
  Description of Artificial Sequence: Synthetic oligonucleotide
cucaggcacaccugccgag

SEQ ID NO: 1902095 - RNA, 19 nt, Artificial Sequence
  Description of Artificial Sequence: Synthetic oligonucleotide
ccaucuaagaaaugaaucu

SEQ ID NO: 1902096 - RNA, 19 nt, Artificial Sequence
  Description of Artificial Sequence: Synthetic oligonucleotide
ucacgugggguaacuuaaa

SEQ ID NO: 1902097 - RNA, 19 nt, Artificial Sequence
  Description of Artificial Sequence: Synthetic oligonucleotide
cucgucuucuuugaagaca

SEQ ID NO: 1902098 - RNA, 19 nt, Artificial Sequence
  Description of Artificial Sequence: Synthetic oligonucleotide
aguugcugacucacaaaca

SEQ ID NO: 1902099 - RNA, 19 nt, Artificial Sequence
  Description of Artificial Sequence: Synthetic oligonucleotide
acacaacucacccgacaaa

SEQ ID NO: 1902100 - RNA, 19 nt, Artificial Sequence
  Description of Artificial Sequence: Synthetic oligonucleotide
ggcaauguacuauuucucu

SEQ ID NO: 1902101 - RNA, 19 nt, Artificial Sequence
  Description of Artificial Sequence: Synthetic oligonucleotide
cacaacucacccgacaaaa

SEQ ID NO: 1902102 - RNA, 19 nt, Artificial Sequence
  Description of Artificial Sequence: Synthetic oligonucleotide
uaaagacucucgucuucuu

SEQ ID NO: 1902103 - RNA, 19 nt, Artificial Sequence
  Description of Artificial Sequence: Synthetic oligonucleotide
guguucaaacuggccacag

SEQ ID NO: 1902104 - RNA, 19 nt, Artificial Sequence
  Description of Artificial Sequence: Synthetic oligonucleotide
uuacaccaucaccucucuc

SEQ ID NO: 1902105 - RNA, 19 nt, Artificial Sequence
  Description of Artificial Sequence: Synthetic oligonucleotide
aagguuaggcaaagcgcau

SEQ ID NO: 1902106 - RNA, 19 nt, Artificial Sequence
  Description of Artificial Sequence: Synthetic oligonucleotide
gguucacaaaguugcugac

SEQ ID NO: 1902107 - RNA, 19 nt, Artificial Sequence
  Description of Artificial Sequence: Synthetic oligonucleotide
gugggguaacuuaaauuuc

SEQ ID NO: 1902108 - RNA, 19 nt, Artificial Sequence
  Description of Artificial Sequence: Synthetic oligonucleotide
cacacaggaaacaggauuu

SEQ ID NO: 1902109 - RNA, 19 nt, Artificial Sequence
  Description of Artificial Sequence: Synthetic oligonucleotide
acaaaguugcugacucaca

SEQ ID NO: 1902110 - RNA, 19 nt, Artificial Sequence
  Description of Artificial Sequence: Synthetic oligonucleotide
ccagauaaaacaaacgguu

SEQ ID NO: 1902111 - RNA, 19 nt, Artificial Sequence
  Description of Artificial Sequence: Synthetic oligonucleotide
caucaccucucucucucuc

SEQ ID NO: 1902112 - RNA, 19 nt, Artificial Sequence
  Description of Artificial Sequence: Synthetic oligonucleotide
acccgacaaaaugugcucu

SEQ ID NO: 1902113 - RNA, 19 nt, Artificial Sequence
  Description of Artificial Sequence: Synthetic oligonucleotide
gcguagaaauaucuagguc

SEQ ID NO: 1902114 - RNA, 19 nt, Artificial Sequence
  Description of Artificial Sequence: Synthetic oligonucleotide
caauuacauucugcugaag

SEQ ID NO: 1902115 - RNA, 19 nt, Artificial Sequence
  Description of Artificial Sequence: Synthetic oligonucleotide
accagacgagcaagacacc

SEQ ID NO: 1902116 - RNA, 19 nt, Artificial Sequence
  Description of Artificial Sequence: Synthetic oligonucleotide
aguuugcagcuuauaaauu

SEQ ID NO: 1902117 - RNA, 19 nt, Artificial Sequence
  Description of Artificial Sequence: Synthetic oligonucleotide
guaguaaaauauagcuaua

SEQ ID NO: 1902118 - RNA, 19 nt, Artificial Sequence
  Description of Artificial Sequence: Synthetic oligonucleotide
uagaaauaucuagguccuc

SEQ ID NO: 1902119 - RNA, 19 nt, Artificial Sequence
  Description of Artificial Sequence: Synthetic oligonucleotide
aaccagcaguacacuuauc

SEQ ID NO: 1902120 - RNA, 19 nt, Artificial Sequence
  Description of Artificial Sequence: Synthetic oligonucleotide
ccaugagguaguuacagua

SEQ ID NO: 1902121 - RNA, 19 nt, Artificial Sequence
  Description of Artificial Sequence: Synthetic oligonucleotide
ucugacccucauagaugaa

SEQ ID NO: 1902122 - RNA, 19 nt, Artificial Sequence
  Description of Artificial Sequence: Synthetic oligonucleotide
cgagcaagacaccauuuug

SEQ ID NO: 1902123 - RNA, 19 nt, Artificial Sequence
  Description of Artificial Sequence: Synthetic oligonucleotide
cagaauagaggaguauugu

SEQ ID NO: 1902124 - RNA, 19 nt, Artificial Sequence
  Description of Artificial Sequence: Synthetic oligonucleotide
uaccuucccauagcuaauu

SEQ ID NO: 1902125 - RNA, 19 nt, Artificial Sequence
  Description of Artificial Sequence: Synthetic oligonucleotide
aggguacgcucugacccuc

SEQ ID NO: 1902126 - RNA, 19 nt, Artificial Sequence
  Description of Artificial Sequence: Synthetic oligonucleotide
accuucccauagcuaauuu

SEQ ID NO: 1902127 - RNA, 19 nt, Artificial Sequence
  Description of Artificial Sequence: Synthetic oligonucleotide
cacuuaucauucaaaccau

SEQ ID NO: 1902128 - RNA, 19 nt, Artificial Sequence
  Description of Artificial Sequence: Synthetic oligonucleotide
acaacucacccgacaaaau

SEQ ID NO: 1902129 - RNA, 19 nt, Artificial Sequence
  Description of Artificial Sequence: Synthetic oligonucleotide
cucacaaacaggacagguu

SEQ ID NO: 1902130 - RNA, 19 nt, Artificial Sequence
  Description of Artificial Sequence: Synthetic oligonucleotide
aucuuucuuuauacauaga

SEQ ID NO: 1902131 - RNA, 19 nt, Artificial Sequence
  Description of Artificial Sequence: Synthetic oligonucleotide
gucuuacaccaucaccucu

SEQ ID NO: 1902132 - RNA, 19 nt, Artificial Sequence
  Description of Artificial Sequence: Synthetic oligonucleotide
uaaugaaaucaggcucauu

SEQ ID NO: 1902133 - RNA, 19 nt, Artificial Sequence
  Description of Artificial Sequence: Synthetic oligonucleotide
cccagauaaaacaaacggu

SEQ ID NO: 1902134 - RNA, 19 nt, Artificial Sequence
  Description of Artificial Sequence: Synthetic oligonucleotide
guucacaaaguugcugacu

SEQ ID NO: 1902135 - RNA, 19 nt, Artificial Sequence
  Description of Artificial Sequence: Synthetic oligonucleotide
gacucucgucuucuuugaa

SEQ ID NO: 1902136 - RNA, 19 nt, Artificial Sequence
  Description of Artificial Sequence: Synthetic oligonucleotide
gguagcguagaaauaucua

SEQ ID NO: 1902137 - RNA, 19 nt, Artificial Sequence
  Description of Artificial Sequence: Synthetic oligonucleotide
auaccuucccauagcuaau

SEQ ID NO: 1902138 - RNA, 19 nt, Artificial Sequence
  Description of Artificial Sequence: Synthetic oligonucleotide
agguuaggcaaagcgcauu

SEQ ID NO: 1902139 - RNA, 19 nt, Artificial Sequence
  Description of Artificial Sequence: Synthetic oligonucleotide
cuuuaacucuguccaucua

SEQ ID NO: 1902140 - RNA, 19 nt, Artificial Sequence
  Description of Artificial Sequence: Synthetic oligonucleotide
ccacaaugacaacuucaug

SEQ ID NO: 1902141 - RNA, 19 nt, Artificial Sequence
  Description of Artificial Sequence: Synthetic oligonucleotide
cccgacaaaaugugcucug

SEQ ID NO: 1902142 - RNA, 19 nt, Artificial Sequence
  Description of Artificial Sequence: Synthetic oligonucleotide
agaagggcgcacgccugug

SEQ ID NO: 1902143 - RNA, 19 nt, Artificial Sequence
  Description of Artificial Sequence: Synthetic oligonucleotide
cuuuuaguuugcagcuuau

SEQ ID NO: 1902144 - RNA, 19 nt, Artificial Sequence
  Description of Artificial Sequence: Synthetic oligonucleotide
cgugggguaacuuaaauuu

SEQ ID NO: 1902145 - RNA, 19 nt, Artificial Sequence
  Description of Artificial Sequence: Synthetic oligonucleotide
cuauaaaucuaagcagguu

SEQ ID NO: 1902146 - RNA, 19 nt, Artificial Sequence
  Description of Artificial Sequence: Synthetic oligonucleotide
gcaagacaccauuuugugu

SEQ ID NO: 1902147 - RNA, 19 nt, Artificial Sequence
  Description of Artificial Sequence: Synthetic oligonucleotide
cagguuacagcaggggugu

SEQ ID NO: 1902148 - RNA, 19 nt, Artificial Sequence
  Description of Artificial Sequence: Synthetic oligonucleotide
agacaccauuuuguguuua

SEQ ID NO: 1902149 - RNA, 19 nt, Artificial Sequence
  Description of Artificial Sequence: Synthetic oligonucleotide
gcugacucacaaacaggac

SEQ ID NO: 1902150 - RNA, 19 nt, Artificial Sequence
  Description of Artificial Sequence: Synthetic oligonucleotide
caaacuggccacagggauu

SEQ ID NO: 1902151 - RNA, 19 nt, Artificial Sequence
  Description of Artificial Sequence: Synthetic oligonucleotide
ccugccgagaacacacaca

SEQ ID NO: 1902152 - RNA, 19 nt, Artificial Sequence
  Description of Artificial Sequence: Synthetic oligonucleotide
caggauuuacaaucucauu

SEQ ID NO: 1902153 - RNA, 19 nt, Artificial Sequence
  Description of Artificial Sequence: Synthetic oligonucleotide
guaaugaaaucaggcucau

SEQ ID NO: 1902154 - RNA, 19 nt, Artificial Sequence
  Description of Artificial Sequence: Synthetic oligonucleotide
guuaggcaaagcgcauugu

SEQ ID NO: 1902155 - RNA, 19 nt, Artificial Sequence
  Description of Artificial Sequence: Synthetic oligonucleotide
ccagacgagcaagacacca

SEQ ID NO: 1902156 - RNA, 19 nt, Artificial Sequence
  Description of Artificial Sequence: Synthetic oligonucleotide
cagacgagcaagacaccau

SEQ ID NO: 1902157 - RNA, 19 nt, Artificial Sequence
  Description of Artificial Sequence: Synthetic oligonucleotide
gacgagcaagacaccauuu

SEQ ID NO: 1902158 - RNA, 19 nt, Artificial Sequence
  Description of Artificial Sequence: Synthetic oligonucleotide
gggcgcacgccugugcacc

SEQ ID NO: 1902159 - RNA, 19 nt, Artificial Sequence
  Description of Artificial Sequence: Synthetic oligonucleotide
cauuggcaauguacuauuu

SEQ ID NO: 1902160 - RNA, 19 nt, Artificial Sequence
  Description of Artificial Sequence: Synthetic oligonucleotide
cacgugggguaacuuaaau

SEQ ID NO: 1902161 - RNA, 19 nt, Artificial Sequence
  Description of Artificial Sequence: Synthetic oligonucleotide
cauuucacgugggguaacu

SEQ ID NO: 1902162 - RNA, 19 nt, Artificial Sequence
  Description of Artificial Sequence: Synthetic oligonucleotide
guacgcucugacccucaua

SEQ ID NO: 1902163 - RNA, 19 nt, Artificial Sequence
  Description of Artificial Sequence: Synthetic oligonucleotide
gguccuccacaaugacaac

SEQ ID NO: 1902164 - RNA, 19 nt, Artificial Sequence
  Description of Artificial Sequence: Synthetic oligonucleotide
caggguacgcucugacccu

SEQ ID NO: 1902165 - RNA, 19 nt, Artificial Sequence
  Description of Artificial Sequence: Synthetic oligonucleotide
caccugccgagaacacaca

SEQ ID NO: 1902166 - RNA, 19 nt, Artificial Sequence
  Description of Artificial Sequence: Synthetic oligonucleotide
caggcacaccugccgagaa

SEQ ID NO: 1902167 - RNA, 19 nt, Artificial Sequence
  Description of Artificial Sequence: Synthetic oligonucleotide
gguacgcucugacccucau

SEQ ID NO: 1902168 - RNA, 19 nt, Artificial Sequence
  Description of Artificial Sequence: Synthetic oligonucleotide
ggguacgcucugacccuca

SEQ ID NO: 1902169 - RNA, 19 nt, Artificial Sequence
  Description of Artificial Sequence: Synthetic oligonucleotide
ccaucaccucucucucucu

SEQ ID NO: 1902170 - RNA, 19 nt, Artificial Sequence
  Description of Artificial Sequence: Synthetic oligonucleotide
gcacgccugugcaccccac

SEQ ID NO: 1902171 - RNA, 19 nt, Artificial Sequence
  Description of Artificial Sequence: Synthetic oligonucleotide
ccugugcaccccacacacu

SEQ ID NO: 1902172 - RNA, 19 nt, Artificial Sequence
  Description of Artificial Sequence: Synthetic oligonucleotide
aacucaauguuguauaccc

SEQ ID NO: 1902173 - RNA, 19 nt, Artificial Sequence
  Description of Artificial Sequence: Synthetic oligonucleotide
aauauauaaggaugugucc

SEQ ID NO: 1902174 - RNA, 19 nt, Artificial Sequence
  Description of Artificial Sequence: Synthetic oligonucleotide
aauacuguagaacuggcuc

SEQ ID NO: 1902175 - RNA, 19 nt, Artificial Sequence
  Description of Artificial Sequence: Synthetic oligonucleotide
uaggaaagaauauacaugg

SEQ ID NO: 1902176 - RNA, 19 nt, Artificial Sequence
  Description of Artificial Sequence: Synthetic oligonucleotide
aguacauuuuccuugaagg

SEQ ID NO: 1902177 - RNA, 19 nt, Artificial Sequence
  Description of Artificial Sequence: Synthetic oligonucleotide
aauuuaagcacuuggaggu

SEQ ID NO: 1902178 - RNA, 19 nt, Artificial Sequence
  Description of Artificial Sequence: Synthetic oligonucleotide
aauacugcccuccucaagg

SEQ ID NO: 1902179 - RNA, 19 nt, Artificial Sequence
  Description of Artificial Sequence: Synthetic oligonucleotide
uaauuuaagcacuuggagg

SEQ ID NO: 1902180 - RNA, 19 nt, Artificial Sequence
  Description of Artificial Sequence: Synthetic oligonucleotide
uguauuuucucacuugggg

SEQ ID NO: 1902181 - RNA, 19 nt, Artificial Sequence
  Description of Artificial Sequence: Synthetic oligonucleotide
agacauaauuuucagagac

SEQ ID NO: 1902182 - RNA, 19 nt, Artificial Sequence
  Description of Artificial Sequence: Synthetic oligonucleotide
aaagaguacauuuuccuug

SEQ ID NO: 1902183 - RNA, 19 nt, Artificial Sequence
  Description of Artificial Sequence: Synthetic oligonucleotide
uauauagccauuaugaaua

SEQ ID NO: 1902184 - RNA, 19 nt, Artificial Sequence
  Description of Artificial Sequence: Synthetic oligonucleotide
uaucugguaaguuuuaucc

SEQ ID NO: 1902185 - RNA, 19 nt, Artificial Sequence
  Description of Artificial Sequence: Synthetic oligonucleotide
aaggaaucuaaagugaccg

SEQ ID NO: 1902186 - RNA, 19 nt, Artificial Sequence
  Description of Artificial Sequence: Synthetic oligonucleotide
uuuaaugaccucaaagggc

SEQ ID NO: 1902187 - RNA, 19 nt, Artificial Sequence
  Description of Artificial Sequence: Synthetic oligonucleotide
uuaaugaccucaaagggca

SEQ ID NO: 1902188 - RNA, 19 nt, Artificial Sequence
  Description of Artificial Sequence: Synthetic oligonucleotide
guuuaaugaccucaaaggg

SEQ ID NO: 1902189 - RNA, 19 nt, Artificial Sequence
  Description of Artificial Sequence: Synthetic oligonucleotide
ggagguuuaaacaagaggg

SEQ ID NO: 1902190 - RNA, 19 nt, Artificial Sequence
  Description of Artificial Sequence: Synthetic oligonucleotide
uuuagauugguuucccagg

SEQ ID NO: 1902191 - RNA, 19 nt, Artificial Sequence
  Description of Artificial Sequence: Synthetic oligonucleotide
agcacuuggagguuuaaac

SEQ ID NO: 1902192 - RNA, 19 nt, Artificial Sequence
  Description of Artificial Sequence: Synthetic oligonucleotide
ucaguaggaaagaauauac

SEQ ID NO: 1902193 - RNA, 19 nt, Artificial Sequence
  Description of Artificial Sequence: Synthetic oligonucleotide
caccaaguaauauaaagag

SEQ ID NO: 1902194 - RNA, 19 nt, Artificial Sequence
  Description of Artificial Sequence: Synthetic oligonucleotide
guaauuuaagcacuuggag

SEQ ID NO: 1902195 - RNA, 19 nt, Artificial Sequence
  Description of Artificial Sequence: Synthetic oligonucleotide
ucugguaaguuuuauccag

SEQ ID NO: 1902196 - RNA, 19 nt, Artificial Sequence
  Description of Artificial Sequence: Synthetic oligonucleotide
uuagcaccaaguaauauaa

SEQ ID NO: 1902197 - RNA, 19 nt, Artificial Sequence
  Description of Artificial Sequence: Synthetic oligonucleotide
agcaccaaguaauauaaag

SEQ ID NO: 1902198 - RNA, 19 nt, Artificial Sequence
  Description of Artificial Sequence: Synthetic oligonucleotide
aguaggaaagaauauacau

SEQ ID NO: 1902199 - RNA, 19 nt, Artificial Sequence
  Description of Artificial Sequence: Synthetic oligonucleotide
gacuauauagccauuauga

SEQ ID NO: 1902200 - RNA, 19 nt, Artificial Sequence
  Description of Artificial Sequence: Synthetic oligonucleotide
ucaaagggcacguugaggu

SEQ ID NO: 1902201 - RNA, 19 nt, Artificial Sequence
  Description of Artificial Sequence: Synthetic oligonucleotide
gugaccgaaguuuagauug

SEQ ID NO: 1902202 - RNA, 19 nt, Artificial Sequence
  Description of Artificial Sequence: Synthetic oligonucleotide
aaucuaaagugaccgaagu

SEQ ID NO: 1902203 - RNA, 19 nt, Artificial Sequence
  Description of Artificial Sequence: Synthetic oligonucleotide
cucaauguuguauacccgg

SEQ ID NO: 1902204 - RNA, 19 nt, Artificial Sequence
  Description of Artificial Sequence: Synthetic oligonucleotide
auaaggauguguccuugcc

SEQ ID NO: 1902205 - RNA, 19 nt, Artificial Sequence
  Description of Artificial Sequence: Synthetic oligonucleotide
aauguuguauacccggcca

SEQ ID NO: 1902206 - RNA, 19 nt, Artificial Sequence
  Description of Artificial Sequence: Synthetic oligonucleotide
cacuaaggaaucuaaagug

SEQ ID NO: 1902207 - RNA, 19 nt, Artificial Sequence
  Description of Artificial Sequence: Synthetic oligonucleotide
cuguaauuuaagcacuugg

SEQ ID NO: 1902208 - RNA, 19 nt, Artificial Sequence
  Description of Artificial Sequence: Synthetic oligonucleotide
aaguaauauaaagaguaca

SEQ ID NO: 1902209 - RNA, 19 nt, Artificial Sequence
  Description of Artificial Sequence: Synthetic oligonucleotide
gucaaugaaagucuuggcc

SEQ ID NO: 1902210 - RNA, 19 nt, Artificial Sequence
  Description of Artificial Sequence: Synthetic oligonucleotide
aaagucuuggccagcacac

SEQ ID NO: 1902211 - RNA, 19 nt, Artificial Sequence
  Description of Artificial Sequence: Synthetic oligonucleotide
uucccuuggucaaugaaag

SEQ ID NO: 1902212 - RNA, 19 nt, Artificial Sequence
  Description of Artificial Sequence: Synthetic oligonucleotide
uuuagcaccaaguaauaua

SEQ ID NO: 1902213 - RNA, 19 nt, Artificial Sequence
  Description of Artificial Sequence: Synthetic oligonucleotide
ucagagacgucuuaggaaa

SEQ ID NO: 1902214 - RNA, 19 nt, Artificial Sequence
  Description of Artificial Sequence: Synthetic oligonucleotide
uaaggaaucuaaagugacc

SEQ ID NO: 1902215 - RNA, 19 nt, Artificial Sequence
  Description of Artificial Sequence: Synthetic oligonucleotide
ucuaaagugaccgaaguuu

SEQ ID NO: 1902216 - RNA, 19 nt, Artificial Sequence
  Description of Artificial Sequence: Synthetic oligonucleotide
uguaaggcguuguuuaaug

SEQ ID NO: 1902217 - RNA, 19 nt, Artificial Sequence
  Description of Artificial Sequence: Synthetic oligonucleotide
auauauaaggauguguccu

SEQ ID NO: 1902218 - RNA, 19 nt, Artificial Sequence
  Description of Artificial Sequence: Synthetic oligonucleotide
aauuaggccagcguggacu

SEQ ID NO: 1902219 - RNA, 19 nt, Artificial Sequence
  Description of Artificial Sequence: Synthetic oligonucleotide
guaaguuuuauccagggcu

SEQ ID NO: 1902220 - RNA, 19 nt, Artificial Sequence
  Description of Artificial Sequence: Synthetic oligonucleotide
cuaaggaaucuaaagugac

SEQ ID NO: 1902221 - RNA, 19 nt, Artificial Sequence
  Description of Artificial Sequence: Synthetic oligonucleotide
ucgucaguaggaaagaaua

SEQ ID NO: 1902222 - RNA, 19 nt, Artificial Sequence
  Description of Artificial Sequence: Synthetic oligonucleotide
cauccugcuaaauacugcc

SEQ ID NO: 1902223 - RNA, 19 nt, Artificial Sequence
  Description of Artificial Sequence: Synthetic oligonucleotide
aaaccauccaacagccagc

SEQ ID NO: 1902224 - RNA, 19 nt, Artificial Sequence
  Description of Artificial Sequence: Synthetic oligonucleotide
auagccauuaugaauaaga

SEQ ID NO: 1902225 - RNA, 19 nt, Artificial Sequence
  Description of Artificial Sequence: Synthetic oligonucleotide
ugagguuuaucacuguguc

SEQ ID NO: 1902226 - RNA, 19 nt, Artificial Sequence
  Description of Artificial Sequence: Synthetic oligonucleotide
uugauucuuugauuuagca

SEQ ID NO: 1902227 - RNA, 19 nt, Artificial Sequence
  Description of Artificial Sequence: Synthetic oligonucleotide
aguaauauaaagaguacau

SEQ ID NO: 1902228 - RNA, 19 nt, Artificial Sequence
  Description of Artificial Sequence: Synthetic oligonucleotide
gguaauacuguagaacugg

SEQ ID NO: 1902229 - RNA, 19 nt, Artificial Sequence
  Description of Artificial Sequence: Synthetic oligonucleotide
guaggaaagaauauacaug

SEQ ID NO: 1902230 - RNA, 19 nt, Artificial Sequence
  Description of Artificial Sequence: Synthetic oligonucleotide
uacgccuuuagucucuuga

SEQ ID NO: 1902231 - RNA, 19 nt, Artificial Sequence
  Description of Artificial Sequence: Synthetic oligonucleotide
uagccauuaugaauaagac

SEQ ID NO: 1902232 - RNA, 19 nt, Artificial Sequence
  Description of Artificial Sequence: Synthetic oligonucleotide
gaaguuuagauugguuucc

SEQ ID NO: 1902233 - RNA, 19 nt, Artificial Sequence
  Description of Artificial Sequence: Synthetic oligonucleotide
cugugcaagggcuugauuc

SEQ ID NO: 1902234 - RNA, 19 nt, Artificial Sequence
  Description of Artificial Sequence: Synthetic oligonucleotide
agguuuaaacaagaggguc

SEQ ID NO: 1902235 - RNA, 19 nt, Artificial Sequence
  Description of Artificial Sequence: Synthetic oligonucleotide
uugagguuuaucacugugu

SEQ ID NO: 1902236 - RNA, 19 nt, Artificial Sequence
  Description of Artificial Sequence: Synthetic oligonucleotide
aaauacugcccuccucaag

SEQ ID NO: 1902237 - RNA, 19 nt, Artificial Sequence
  Description of Artificial Sequence: Synthetic oligonucleotide
uaaagugaccgaaguuuag

SEQ ID NO: 1902238 - RNA, 19 nt, Artificial Sequence
  Description of Artificial Sequence: Synthetic oligonucleotide
uguauacccggccacuggc

SEQ ID NO: 1902239 - RNA, 19 nt, Artificial Sequence
  Description of Artificial Sequence: Synthetic oligonucleotide
ggucaugaaaauuaggcca

SEQ ID NO: 1902240 - RNA, 19 nt, Artificial Sequence
  Description of Artificial Sequence: Synthetic oligonucleotide
cauggugacggacaguggc

SEQ ID NO: 1902241 - RNA, 19 nt, Artificial Sequence
  Description of Artificial Sequence: Synthetic oligonucleotide
ucugucugggcuucauacg

SEQ ID NO: 1902242 - RNA, 19 nt, Artificial Sequence
  Description of Artificial Sequence: Synthetic oligonucleotide
auuucugugcccugcagca

SEQ ID NO: 1902243 - RNA, 19 nt, Artificial Sequence
  Description of Artificial Sequence: Synthetic oligonucleotide
uucagcucgaaguguuugg

SEQ ID NO: 1902244 - RNA, 19 nt, Artificial Sequence
  Description of Artificial Sequence: Synthetic oligonucleotide
aaauuaggccagcguggac

SEQ ID NO: 1902245 - RNA, 19 nt, Artificial Sequence
  Description of Artificial Sequence: Synthetic oligonucleotide
aagagggucaugaaaauua

SEQ ID NO: 1902246 - RNA, 19 nt, Artificial Sequence
  Description of Artificial Sequence: Synthetic oligonucleotide
ucauccugcuaaauacugc

SEQ ID NO: 1902247 - RNA, 19 nt, Artificial Sequence
  Description of Artificial Sequence: Synthetic oligonucleotide
uaauacuguagaacuggcu

SEQ ID NO: 1902248 - RNA, 19 nt, Artificial Sequence
  Description of Artificial Sequence: Synthetic oligonucleotide
aggaggcccugcuucaucc

SEQ ID NO: 1902249 - RNA, 19 nt, Artificial Sequence
  Description of Artificial Sequence: Synthetic oligonucleotide
uccugcuaaauacugcccu

SEQ ID NO: 1902250 - RNA, 19 nt, Artificial Sequence
  Description of Artificial Sequence: Synthetic oligonucleotide
acuauauagccauuaugaa

SEQ ID NO: 1902251 - RNA, 19 nt, Artificial Sequence
  Description of Artificial Sequence: Synthetic oligonucleotide
ugaccgaaguuuagauugg

SEQ ID NO: 1902252 - RNA, 19 nt, Artificial Sequence
  Description of Artificial Sequence: Synthetic oligonucleotide
aaagugaccgaaguuuaga

SEQ ID NO: 1902253 - RNA, 19 nt, Artificial Sequence
  Description of Artificial Sequence: Synthetic oligonucleotide
uggggccagaucuuguugg

SEQ ID NO: 1902254 - RNA, 19 nt, Artificial Sequence
  Description of Artificial Sequence: Synthetic oligonucleotide
ugaaucagagguucuccug

SEQ ID NO: 1902255 - RNA, 19 nt, Artificial Sequence
  Description of Artificial Sequence: Synthetic oligonucleotide
agauugguuucccaggccu

SEQ ID NO: 1902256 - RNA, 19 nt, Artificial Sequence
  Description of Artificial Sequence: Synthetic oligonucleotide
uuguauacccggccacugg

SEQ ID NO: 1902257 - RNA, 19 nt, Artificial Sequence
  Description of Artificial Sequence: Synthetic oligonucleotide
uucagagacgucuuaggaa

SEQ ID NO: 1902258 - RNA, 19 nt, Artificial Sequence
  Description of Artificial Sequence: Synthetic oligonucleotide
acgucuuaggaaaagagcu

SEQ ID NO: 1902259 - RNA, 19 nt, Artificial Sequence
  Description of Artificial Sequence: Synthetic oligonucleotide
uaaguuuuauccagggcuu

SEQ ID NO: 1902260 - RNA, 19 nt, Artificial Sequence
  Description of Artificial Sequence: Synthetic oligonucleotide
aagugaccgaaguuuagau

SEQ ID NO: 1902261 - RNA, 19 nt, Artificial Sequence
  Description of Artificial Sequence: Synthetic oligonucleotide
auguuguauacccggccac

SEQ ID NO: 1902262 - RNA, 19 nt, Artificial Sequence
  Description of Artificial Sequence: Synthetic oligonucleotide
aaguguuuggugaugcgug

SEQ ID NO: 1902263 - RNA, 19 nt, Artificial Sequence
  Description of Artificial Sequence: Synthetic oligonucleotide
uauaaggauguguccuugc

SEQ ID NO: 1902264 - RNA, 19 nt, Artificial Sequence
  Description of Artificial Sequence: Synthetic oligonucleotide
ggagaggugcuucagcucg

SEQ ID NO: 1902265 - RNA, 19 nt, Artificial Sequence
  Description of Artificial Sequence: Synthetic oligonucleotide
gacgucuuaggaaaagagc

SEQ ID NO: 1902266 - RNA, 19 nt, Artificial Sequence
  Description of Artificial Sequence: Synthetic oligonucleotide
agccauuaugaauaagaca

SEQ ID NO: 1902267 - RNA, 19 nt, Artificial Sequence
  Description of Artificial Sequence: Synthetic oligonucleotide
auacuguagaacuggcucu

SEQ ID NO: 1902268 - RNA, 19 nt, Artificial Sequence
  Description of Artificial Sequence: Synthetic oligonucleotide
uuugucguccucucgcuga

SEQ ID NO: 1902269 - RNA, 19 nt, Artificial Sequence
  Description of Artificial Sequence: Synthetic oligonucleotide
uaaagaguacauuuuccuu

SEQ ID NO: 1902270 - RNA, 19 nt, Artificial Sequence
  Description of Artificial Sequence: Synthetic oligonucleotide
gaaguguccuuggaaaacc

SEQ ID NO: 1902271 - RNA, 19 nt, Artificial Sequence
  Description of Artificial Sequence: Synthetic oligonucleotide
cugguaaguuuuauccagg

SEQ ID NO: 1902272 - RNA, 19 nt, Artificial Sequence
  Description of Artificial Sequence: Synthetic oligonucleotide
cacaguuuugggaggauug

SEQ ID NO: 1902273 - RNA, 19 nt, Artificial Sequence
  Description of Artificial Sequence: Synthetic oligonucleotide
ugcgugacgacacggugcc

SEQ ID NO: 1902274 - RNA, 19 nt, Artificial Sequence
  Description of Artificial Sequence: Synthetic oligonucleotide
accaauuucugugcccugc

SEQ ID NO: 1902275 - RNA, 19 nt, Artificial Sequence
  Description of Artificial Sequence: Synthetic oligonucleotide
uauacccggccacuggcag

SEQ ID NO: 1902276 - RNA, 19 nt, Artificial Sequence
  Description of Artificial Sequence: Synthetic oligonucleotide
guugagguuuaucacugug

SEQ ID NO: 1902277 - RNA, 19 nt, Artificial Sequence
  Description of Artificial Sequence: Synthetic oligonucleotide
uccagcgagcuguaaggcg

SEQ ID NO: 1902278 - RNA, 19 nt, Artificial Sequence
  Description of Artificial Sequence: Synthetic oligonucleotide
ccaacagccagcuacacug

SEQ ID NO: 1902279 - RNA, 19 nt, Artificial Sequence
  Description of Artificial Sequence: Synthetic oligonucleotide
acuaaggaaucuaaaguga

SEQ ID NO: 1902280 - RNA, 19 nt, Artificial Sequence
  Description of Artificial Sequence: Synthetic oligonucleotide
cugucugggcuucauacgc

SEQ ID NO: 1902281 - RNA, 19 nt, Artificial Sequence
  Description of Artificial Sequence: Synthetic oligonucleotide
uccuuggaaaaccauccaa

SEQ ID NO: 1902282 - RNA, 19 nt, Artificial Sequence
  Description of Artificial Sequence: Synthetic oligonucleotide
ugguuuccguuccagagaa

SEQ ID NO: 1902283 - RNA, 19 nt, Artificial Sequence
  Description of Artificial Sequence: Synthetic oligonucleotide
gccagcguggacuauauag

SEQ ID NO: 1902284 - RNA, 19 nt, Artificial Sequence
  Description of Artificial Sequence: Synthetic oligonucleotide
cagcacaccaauuucugug

SEQ ID NO: 1902285 - RNA, 19 nt, Artificial Sequence
  Description of Artificial Sequence: Synthetic oligonucleotide
caauguuguauacccggcc

SEQ ID NO: 1902286 - RNA, 19 nt, Artificial Sequence
  Description of Artificial Sequence: Synthetic oligonucleotide
ccaaguaauauaaagagua

SEQ ID NO: 1902287 - RNA, 19 nt, Artificial Sequence
  Description of Artificial Sequence: Synthetic oligonucleotide
uucgucaguaggaaagaau

SEQ ID NO: 1902288 - RNA, 19 nt, Artificial Sequence
  Description of Artificial Sequence: Synthetic oligonucleotide
aaguuuuauccagggcuuc

SEQ ID NO: 1902289 - RNA, 19 nt, Artificial Sequence
  Description of Artificial Sequence: Synthetic oligonucleotide
cuaucugguaaguuuuauc

SEQ ID NO: 1902290 - RNA, 19 nt, Artificial Sequence
  Description of Artificial Sequence: Synthetic oligonucleotide
agguuuaucacugugucua

SEQ ID NO: 1902291 - RNA, 19 nt, Artificial Sequence
  Description of Artificial Sequence: Synthetic oligonucleotide
uccuugaagguagaguugu

SEQ ID NO: 1902292 - RNA, 19 nt, Artificial Sequence
  Description of Artificial Sequence: Synthetic oligonucleotide
agguucuccugucagguca

SEQ ID NO: 1902293 - RNA, 19 nt, Artificial Sequence
  Description of Artificial Sequence: Synthetic oligonucleotide
uaaacaagagggucaugaa

SEQ ID NO: 1902294 - RNA, 19 nt, Artificial Sequence
  Description of Artificial Sequence: Synthetic oligonucleotide
gaacucaauguuguauacc

SEQ ID NO: 1902295 - RNA, 19 nt, Artificial Sequence
  Description of Artificial Sequence: Synthetic oligonucleotide
uggcaggaugaauccagcg

SEQ ID NO: 1902296 - RNA, 19 nt, Artificial Sequence
  Description of Artificial Sequence: Synthetic oligonucleotide
gcuucauacgccuuuaguc

SEQ ID NO: 1902297 - RNA, 19 nt, Artificial Sequence
  Description of Artificial Sequence: Synthetic oligonucleotide
ugaagggccagccgcguca

SEQ ID NO: 1902298 - RNA, 19 nt, Artificial Sequence
  Description of Artificial Sequence: Synthetic oligonucleotide
cagcguggacuauauagcc

SEQ ID NO: 1902299 - RNA, 19 nt, Artificial Sequence
  Description of Artificial Sequence: Synthetic oligonucleotide
aagucuuggccagcacacc

SEQ ID NO: 1902300 - RNA, 19 nt, Artificial Sequence
  Description of Artificial Sequence: Synthetic oligonucleotide
gggucaugaaaauuaggcc

SEQ ID NO: 1902301 - RNA, 19 nt, Artificial Sequence
  Description of Artificial Sequence: Synthetic oligonucleotide
guucuggcggagcaggucc

SEQ ID NO: 1902302 - RNA, 19 nt, Artificial Sequence
  Description of Artificial Sequence: Synthetic oligonucleotide
ggcacguugagguuuauca

SEQ ID NO: 1902303 - RNA, 19 nt, Artificial Sequence
  Description of Artificial Sequence: Synthetic oligonucleotide
ucacuuggggccacaauau

SEQ ID NO: 1902304 - RNA, 19 nt, Artificial Sequence
  Description of Artificial Sequence: Synthetic oligonucleotide
agcuguaaggcguuguuua

SEQ ID NO: 1902305 - RNA, 19 nt, Artificial Sequence
  Description of Artificial Sequence: Synthetic oligonucleotide
gaucacggcgcgcagcagc

SEQ ID NO: 1902306 - RNA, 19 nt, Artificial Sequence
  Description of Artificial Sequence: Synthetic oligonucleotide
uucauacgccuuuagucuc

SEQ ID NO: 1902307 - RNA, 19 nt, Artificial Sequence
  Description of Artificial Sequence: Synthetic oligonucleotide
gaauguuuccaacacuccu

SEQ ID NO: 1902308 - RNA, 19 nt, Artificial Sequence
  Description of Artificial Sequence: Synthetic oligonucleotide
cuuuagucucuugaucacc

SEQ ID NO: 1902309 - RNA, 19 nt, Artificial Sequence
  Description of Artificial Sequence: Synthetic oligonucleotide
uggacuauauagccauuau

SEQ ID NO: 1902310 - RNA, 19 nt, Artificial Sequence
  Description of Artificial Sequence: Synthetic oligonucleotide
gggaggauugaacucaaug

SEQ ID NO: 1902311 - RNA, 19 nt, Artificial Sequence
  Description of Artificial Sequence: Synthetic oligonucleotide
agacgucuuaggaaaagag

SEQ ID NO: 1902312 - RNA, 19 nt, Artificial Sequence
  Description of Artificial Sequence: Synthetic oligonucleotide
uuggugaugcgugacgaca

SEQ ID NO: 1902313 - RNA, 19 nt, Artificial Sequence
  Description of Artificial Sequence: Synthetic oligonucleotide
acagaggcuuucuggguag

SEQ ID NO: 1902314 - RNA, 19 nt, Artificial Sequence
  Description of Artificial Sequence: Synthetic oligonucleotide
ggacuauauagccauuaug

SEQ ID NO: 1902315 - RNA, 19 nt, Artificial Sequence
  Description of Artificial Sequence: Synthetic oligonucleotide
auugguuucccaggccugg

SEQ ID NO: 1902316 - RNA, 19 nt, Artificial Sequence
  Description of Artificial Sequence: Synthetic oligonucleotide
cccacuaaggaaucuaaag

SEQ ID NO: 1902317 - RNA, 19 nt, Artificial Sequence
  Description of Artificial Sequence: Synthetic oligonucleotide
uauagccauuaugaauaag

SEQ ID NO: 1902318 - RNA, 19 nt, Artificial Sequence
  Description of Artificial Sequence: Synthetic oligonucleotide
uggugaugcgugacgacac

SEQ ID NO: 1902319 - RNA, 19 nt, Artificial Sequence
  Description of Artificial Sequence: Synthetic oligonucleotide
aacuuucgucaguaggaaa

SEQ ID NO: 1902320 - RNA, 19 nt, Artificial Sequence
  Description of Artificial Sequence: Synthetic oligonucleotide
cugaaauaaaacaggccaa

SEQ ID NO: 1902321 - RNA, 19 nt, Artificial Sequence
  Description of Artificial Sequence: Synthetic oligonucleotide
guguccuugccccacuaag

SEQ ID NO: 1902322 - RNA, 19 nt, Artificial Sequence
  Description of Artificial Sequence: Synthetic oligonucleotide
augcgugacgacacggugc

SEQ ID NO: 1902323 - RNA, 19 nt, Artificial Sequence
  Description of Artificial Sequence: Synthetic oligonucleotide
uggaaguguccuuggaaaa

SEQ ID NO: 1902324 - RNA, 19 nt, Artificial Sequence
  Description of Artificial Sequence: Synthetic oligonucleotide
guaauacuguagaacuggc

SEQ ID NO: 1902325 - RNA, 19 nt, Artificial Sequence
  Description of Artificial Sequence: Synthetic oligonucleotide
aguuuagauugguuuccca

SEQ ID NO: 1902326 - RNA, 19 nt, Artificial Sequence
  Description of Artificial Sequence: Synthetic oligonucleotide
cuucauacgccuuuagucu

SEQ ID NO: 1902327 - RNA, 19 nt, Artificial Sequence
  Description of Artificial Sequence: Synthetic oligonucleotide
ugaucaccgucucugguuu

SEQ ID NO: 1902328 - RNA, 19 nt, Artificial Sequence
  Description of Artificial Sequence: Synthetic oligonucleotide
ucauacgccuuuagucucu

SEQ ID NO: 1902329 - RNA, 19 nt, Artificial Sequence
  Description of Artificial Sequence: Synthetic oligonucleotide
augaucacggcgcgcagca

SEQ ID NO: 1902330 - RNA, 19 nt, Artificial Sequence
  Description of Artificial Sequence: Synthetic oligonucleotide
ucuggaacuuucgucagua

SEQ ID NO: 1902331 - RNA, 19 nt, Artificial Sequence
  Description of Artificial Sequence: Synthetic oligonucleotide
accaaguaauauaaagagu

SEQ ID NO: 1902332 - RNA, 19 nt, Artificial Sequence
  Description of Artificial Sequence: Synthetic oligonucleotide
aggaaagaauauacauggg

SEQ ID NO: 1902333 - RNA, 19 nt, Artificial Sequence
  Description of Artificial Sequence: Synthetic oligonucleotide
gguaaguuuuauccagggc

SEQ ID NO: 1902334 - RNA, 19 nt, Artificial Sequence
  Description of Artificial Sequence: Synthetic oligonucleotide
cuauauagccauuaugaau

SEQ ID NO: 1902335 - RNA, 19 nt, Artificial Sequence
  Description of Artificial Sequence: Synthetic oligonucleotide
auauaaggauguguccuug

SEQ ID NO: 1902336 - RNA, 19 nt, Artificial Sequence
  Description of Artificial Sequence: Synthetic oligonucleotide
uccaacagccagcuacacu

SEQ ID NO: 1902337 - RNA, 19 nt, Artificial Sequence
  Description of Artificial Sequence: Synthetic oligonucleotide
gaaucagagguucuccugu

SEQ ID NO: 1902338 - RNA, 19 nt, Artificial Sequence
  Description of Artificial Sequence: Synthetic oligonucleotide
gccaaaauuucaaagccug

SEQ ID NO: 1902339 - RNA, 19 nt, Artificial Sequence
  Description of Artificial Sequence: Synthetic oligonucleotide
gucuuaggaaaagagcuuc

SEQ ID NO: 1902340 - RNA, 19 nt, Artificial Sequence
  Description of Artificial Sequence: Synthetic oligonucleotide
uaaauacugcccuccucaa

SEQ ID NO: 1902341 - RNA, 19 nt, Artificial Sequence
  Description of Artificial Sequence: Synthetic oligonucleotide
cuucccuuggucaaugaaa

SEQ ID NO: 1902342 - RNA, 19 nt, Artificial Sequence
  Description of Artificial Sequence: Synthetic oligonucleotide
agagguucuccugucaggu

SEQ ID NO: 1902343 - RNA, 19 nt, Artificial Sequence
  Description of Artificial Sequence: Synthetic oligonucleotide
auccagcgagcuguaaggc

SEQ ID NO: 1902344 - RNA, 19 nt, Artificial Sequence
  Description of Artificial Sequence: Synthetic oligonucleotide
ucaugacaucaucugggau

SEQ ID NO: 1902345 - RNA, 19 nt, Artificial Sequence
  Description of Artificial Sequence: Synthetic oligonucleotide
aaagggcacguugagguuu

SEQ ID NO: 1902346 - RNA, 19 nt, Artificial Sequence
  Description of Artificial Sequence: Synthetic oligonucleotide
agagacgucuuaggaaaag

SEQ ID NO: 1902347 - RNA, 19 nt, Artificial Sequence
  Description of Artificial Sequence: Synthetic oligonucleotide
auccugcuaaauacugccc

SEQ ID NO: 1902348 - RNA, 19 nt, Artificial Sequence
  Description of Artificial Sequence: Synthetic oligonucleotide
aucuaaagugaccgaaguu

SEQ ID NO: 1902349 - RNA, 19 nt, Artificial Sequence
  Description of Artificial Sequence: Synthetic oligonucleotide
cuaaagugaccgaaguuua

SEQ ID NO: 1902350 - RNA, 19 nt, Artificial Sequence
  Description of Artificial Sequence: Synthetic oligonucleotide
uuaagcacuuggagguuua

SEQ ID NO: 1902351 - RNA, 19 nt, Artificial Sequence
  Description of Artificial Sequence: Synthetic oligonucleotide
uuuggugaugcgugacgac

SEQ ID NO: 1902352 - RNA, 19 nt, Artificial Sequence
  Description of Artificial Sequence: Synthetic oligonucleotide
cugucaggucaucaaugcc

SEQ ID NO: 1902353 - RNA, 19 nt, Artificial Sequence
  Description of Artificial Sequence: Synthetic oligonucleotide
cucgcugaaucagagguuc

SEQ ID NO: 1902354 - RNA, 19 nt, Artificial Sequence
  Description of Artificial Sequence: Synthetic oligonucleotide
cugcuaaauacugcccucc

SEQ ID NO: 1902355 - RNA, 19 nt, Artificial Sequence
  Description of Artificial Sequence: Synthetic oligonucleotide
caguaggaaagaauauaca

SEQ ID NO: 1902356 - RNA, 19 nt, Artificial Sequence
  Description of Artificial Sequence: Synthetic oligonucleotide
uguuguauacccggccacu

SEQ ID NO: 1902357 - RNA, 19 nt, Artificial Sequence
  Description of Artificial Sequence: Synthetic oligonucleotide
agugaccgaaguuuagauu

SEQ ID NO: 1902358 - RNA, 19 nt, Artificial Sequence
  Description of Artificial Sequence: Synthetic oligonucleotide
auauagccauuaugaauaa

SEQ ID NO: 1902359 - RNA, 19 nt, Artificial Sequence
  Description of Artificial Sequence: Synthetic oligonucleotide
ggaacuuucgucaguagga

SEQ ID NO: 1902360 - RNA, 19 nt, Artificial Sequence
  Description of Artificial Sequence: Synthetic oligonucleotide
uuagugguacacaccugua

SEQ ID NO: 1902361 - RNA, 19 nt, Artificial Sequence
  Description of Artificial Sequence: Synthetic oligonucleotide
gacgacacggugcccuugc

SEQ ID NO: 1902362 - RNA, 19 nt, Artificial Sequence
  Description of Artificial Sequence: Synthetic oligonucleotide
cgucaugacaucaucuggg

SEQ ID NO: 1902363 - RNA, 19 nt, Artificial Sequence
  Description of Artificial Sequence: Synthetic oligonucleotide
cuuagugguacacaccugu

SEQ ID NO: 1902364 - RNA, 19 nt, Artificial Sequence
  Description of Artificial Sequence: Synthetic oligonucleotide
acggacaguggcccgagcu

SEQ ID NO: 1902365 - RNA, 19 nt, Artificial Sequence
  Description of Artificial Sequence: Synthetic oligonucleotide
uuuaagcacuuggagguuu

SEQ ID NO: 1902366 - RNA, 19 nt, Artificial Sequence
  Description of Artificial Sequence: Synthetic oligonucleotide
ucuaucugguaaguuuuau

SEQ ID NO: 1902367 - RNA, 19 nt, Artificial Sequence
  Description of Artificial Sequence: Synthetic oligonucleotide
guaaggcguuguuuaauga

SEQ ID NO: 1902368 - RNA, 19 nt, Artificial Sequence
  Description of Artificial Sequence: Synthetic oligonucleotide
acguugagguuuaucacug

SEQ ID NO: 1902369 - RNA, 19 nt, Artificial Sequence
  Description of Artificial Sequence: Synthetic oligonucleotide
cucacuuggggccacaaua

SEQ ID NO: 1902370 - RNA, 19 nt, Artificial Sequence
  Description of Artificial Sequence: Synthetic oligonucleotide
uucuggaacuuucgucagu

SEQ ID NO: 1902371 - RNA, 19 nt, Artificial Sequence
  Description of Artificial Sequence: Synthetic oligonucleotide
gucaugacaucaucuggga

SEQ ID NO: 1902372 - RNA, 19 nt, Artificial Sequence
  Description of Artificial Sequence: Synthetic oligonucleotide
aauauacauggggccagau

SEQ ID NO: 1902373 - RNA, 19 nt, Artificial Sequence
  Description of Artificial Sequence: Synthetic oligonucleotide
caacagccagcuacacugg

SEQ ID NO: 1902374 - RNA, 19 nt, Artificial Sequence
  Description of Artificial Sequence: Synthetic oligonucleotide
guacauuuuccuugaaggu

SEQ ID NO: 1902375 - RNA, 19 nt, Artificial Sequence
  Description of Artificial Sequence: Synthetic oligonucleotide
gauugguuucccaggccug

SEQ ID NO: 1902376 - RNA, 19 nt, Artificial Sequence
  Description of Artificial Sequence: Synthetic oligonucleotide
aucacggcgcgcagcagcc

SEQ ID NO: 1902377 - RNA, 19 nt, Artificial Sequence
  Description of Artificial Sequence: Synthetic oligonucleotide
ccagcguggacuauauagc

SEQ ID NO: 1902378 - RNA, 19 nt, Artificial Sequence
  Description of Artificial Sequence: Synthetic oligonucleotide
aggaugaauccagcgagcu

SEQ ID NO: 1902379 - RNA, 19 nt, Artificial Sequence
  Description of Artificial Sequence: Synthetic oligonucleotide
uuuaaacaagagggucaug

SEQ ID NO: 1902380 - RNA, 19 nt, Artificial Sequence
  Description of Artificial Sequence: Synthetic oligonucleotide
augagcuucccuuggucaa

SEQ ID NO: 1902381 - RNA, 19 nt, Artificial Sequence
  Description of Artificial Sequence: Synthetic oligonucleotide
ucucuugaucaccgucucu

SEQ ID NO: 1902382 - RNA, 19 nt, Artificial Sequence
  Description of Artificial Sequence: Synthetic oligonucleotide
ucagcucgaaguguuuggu

SEQ ID NO: 1902383 - RNA, 19 nt, Artificial Sequence
  Description of Artificial Sequence: Synthetic oligonucleotide
aguuuuauccagggcuucu

SEQ ID NO: 1902384 - RNA, 19 nt, Artificial Sequence
  Description of Artificial Sequence: Synthetic oligonucleotide
cuggcaggaugaauccagc

SEQ ID NO: 1902385 - RNA, 19 nt, Artificial Sequence
  Description of Artificial Sequence: Synthetic oligonucleotide
auacccggccacuggcagg

SEQ ID NO: 1902386 - RNA, 19 nt, Artificial Sequence
  Description of Artificial Sequence: Synthetic oligonucleotide
ucccaggccuggcuuagug

SEQ ID NO: 1902387 - RNA, 19 nt, Artificial Sequence
  Description of Artificial Sequence: Synthetic oligonucleotide
aucagagguucuccuguca

SEQ ID NO: 1902388 - RNA, 19 nt, Artificial Sequence
  Description of Artificial Sequence: Synthetic oligonucleotide
gcgucaugacaucaucugg

SEQ ID NO: 1902389 - RNA, 19 nt, Artificial Sequence
  Description of Artificial Sequence: Synthetic oligonucleotide
auuuagcaccaaguaauau

SEQ ID NO: 1902390 - RNA, 19 nt, Artificial Sequence
  Description of Artificial Sequence: Synthetic oligonucleotide
cucucgcugaaucagaggu

SEQ ID NO: 1902391 - RNA, 19 nt, Artificial Sequence
  Description of Artificial Sequence: Synthetic oligonucleotide
caccgucucugguuugucg

SEQ ID NO: 1902392 - RNA, 19 nt, Artificial Sequence
  Description of Artificial Sequence: Synthetic oligonucleotide
gugaugcgugacgacacgg

SEQ ID NO: 1902393 - RNA, 19 nt, Artificial Sequence
  Description of Artificial Sequence: Synthetic oligonucleotide
uaaugaccucaaagggcac

SEQ ID NO: 1902394 - RNA, 19 nt, Artificial Sequence
  Description of Artificial Sequence: Synthetic oligonucleotide
gucaguaggaaagaauaua

SEQ ID NO: 1902395 - RNA, 19 nt, Artificial Sequence
  Description of Artificial Sequence: Synthetic oligonucleotide
uggccagcacaccaauuuc

SEQ ID NO: 1902396 - RNA, 19 nt, Artificial Sequence
  Description of Artificial Sequence: Synthetic oligonucleotide
gagacgucuuaggaaaaga

SEQ ID NO: 1902397 - RNA, 19 nt, Artificial Sequence
  Description of Artificial Sequence: Synthetic oligonucleotide
guuguauacccggccacug

SEQ ID NO: 1902398 - RNA, 19 nt, Artificial Sequence
  Description of Artificial Sequence: Synthetic oligonucleotide
guuuggugaugcgugacga

SEQ ID NO: 1902399 - RNA, 19 nt, Artificial Sequence
  Description of Artificial Sequence: Synthetic oligonucleotide
uuucgucaguaggaaagaa

SEQ ID NO: 1902400 - RNA, 19 nt, Artificial Sequence
  Description of Artificial Sequence: Synthetic oligonucleotide
guccuugccccacuaagga

SEQ ID NO: 1902401 - RNA, 19 nt, Artificial Sequence
  Description of Artificial Sequence: Synthetic oligonucleotide
gaaguguuuggugaugcgu

SEQ ID NO: 1902402 - RNA, 19 nt, Artificial Sequence
  Description of Artificial Sequence: Synthetic oligonucleotide
uguguccuugccccacuaa

SEQ ID NO: 1902403 - RNA, 19 nt, Artificial Sequence
  Description of Artificial Sequence: Synthetic oligonucleotide
guacacaccuguaauuuaa

SEQ ID NO: 1902404 - RNA, 19 nt, Artificial Sequence
  Description of Artificial Sequence: Synthetic oligonucleotide
auuaggccagcguggacua

SEQ ID NO: 1902405 - RNA, 19 nt, Artificial Sequence
  Description of Artificial Sequence: Synthetic oligonucleotide
auacugcccuccucaagga

SEQ ID NO: 1902406 - RNA, 19 nt, Artificial Sequence
  Description of Artificial Sequence: Synthetic oligonucleotide
cuugccccacuaaggaauc

SEQ ID NO: 1902407 - RNA, 19 nt, Artificial Sequence
  Description of Artificial Sequence: Synthetic oligonucleotide
gaacuuucgucaguaggaa

SEQ ID NO: 1902408 - RNA, 19 nt, Artificial Sequence
  Description of Artificial Sequence: Synthetic oligonucleotide
guuugucguccucucgcug

SEQ ID NO: 1902409 - RNA, 19 nt, Artificial Sequence
  Description of Artificial Sequence: Synthetic oligonucleotide
cuggaacuuucgucaguag

SEQ ID NO: 1902410 - RNA, 19 nt, Artificial Sequence
  Description of Artificial Sequence: Synthetic oligonucleotide
uucuggcggagcagguccc

SEQ ID NO: 1902411 - RNA, 19 nt, Artificial Sequence
  Description of Artificial Sequence: Synthetic oligonucleotide
uuucccaggccuggcuuag

SEQ ID NO: 1902412 - RNA, 19 nt, Artificial Sequence
  Description of Artificial Sequence: Synthetic oligonucleotide
ggcaggaugaauccagcga

SEQ ID NO: 1902413 - RNA, 19 nt, Artificial Sequence
  Description of Artificial Sequence: Synthetic oligonucleotide
acgccuuuagucucuugau

SEQ ID NO: 1902414 - RNA, 19 nt, Artificial Sequence
  Description of Artificial Sequence: Synthetic oligonucleotide
acgacacggugcccuugcc

SEQ ID NO: 1902415 - RNA, 19 nt, Artificial Sequence
  Description of Artificial Sequence: Synthetic oligonucleotide
ggugaugcgugacgacacg

SEQ ID NO: 1902416 - RNA, 19 nt, Artificial Sequence
  Description of Artificial Sequence: Synthetic oligonucleotide
ucucgcugaaucagagguu

SEQ ID NO: 1902417 - RNA, 19 nt, Artificial Sequence
  Description of Artificial Sequence: Synthetic oligonucleotide
augaccucaaagggcacgu

SEQ ID NO: 1902418 - RNA, 19 nt, Artificial Sequence
  Description of Artificial Sequence: Synthetic oligonucleotide
gagguuuaaacaagagggu

SEQ ID NO: 1902419 - RNA, 19 nt, Artificial Sequence
  Description of Artificial Sequence: Synthetic oligonucleotide
caugaucacggcgcgcagc

SEQ ID NO: 1902420 - RNA, 19 nt, Artificial Sequence
  Description of Artificial Sequence: Synthetic oligonucleotide
gucguccucucgcugaauc

SEQ ID NO: 1902421 - RNA, 19 nt, Artificial Sequence
  Description of Artificial Sequence: Synthetic oligonucleotide
acugcccuccucaaggagu

SEQ ID NO: 1902422 - RNA, 19 nt, Artificial Sequence
  Description of Artificial Sequence: Synthetic oligonucleotide
aggcguuguuuaaugaccu

SEQ ID NO: 1902423 - RNA, 19 nt, Artificial Sequence
  Description of Artificial Sequence: Synthetic oligonucleotide
cagcucgaaguguuuggug

SEQ ID NO: 1902424 - RNA, 19 nt, Artificial Sequence
  Description of Artificial Sequence: Synthetic oligonucleotide
gugucuaucugguaaguuu

SEQ ID NO: 1902425 - RNA, 19 nt, Artificial Sequence
  Description of Artificial Sequence: Synthetic oligonucleotide
uccuugccccacuaaggaa

SEQ ID NO: 1902426 - RNA, 19 nt, Artificial Sequence
  Description of Artificial Sequence: Synthetic oligonucleotide
ucucacuuggggccacaau

SEQ ID NO: 1902427 - RNA, 19 nt, Artificial Sequence
  Description of Artificial Sequence: Synthetic oligonucleotide
gcugaaucagagguucucc

SEQ ID NO: 1902428 - RNA, 19 nt, Artificial Sequence
  Description of Artificial Sequence: Synthetic oligonucleotide
ucccuuggucaaugaaagu

SEQ ID NO: 1902429 - RNA, 19 nt, Artificial Sequence
  Description of Artificial Sequence: Synthetic oligonucleotide
ggaaguguccuuggaaaac

SEQ ID NO: 1902430 - RNA, 19 nt, Artificial Sequence
  Description of Artificial Sequence: Synthetic oligonucleotide
gaacuggcucugucugggc

SEQ ID NO: 1902431 - RNA, 19 nt, Artificial Sequence
  Description of Artificial Sequence: Synthetic oligonucleotide
gagguuuaucacugugucu

SEQ ID NO: 1902432 - RNA, 19 nt, Artificial Sequence
  Description of Artificial Sequence: Synthetic oligonucleotide
agggcuucugccuguggaa

SEQ ID NO: 1902433 - RNA, 19 nt, Artificial Sequence
  Description of Artificial Sequence: Synthetic oligonucleotide
ccagagaauguuuccaaca

SEQ ID NO: 1902434 - RNA, 19 nt, Artificial Sequence
  Description of Artificial Sequence: Synthetic oligonucleotide
gaucaccgucucugguuug

SEQ ID NO: 1902435 - RNA, 19 nt, Artificial Sequence
  Description of Artificial Sequence: Synthetic oligonucleotide
ucgcugaaucagagguucu

SEQ ID NO: 1902436 - RNA, 19 nt, Artificial Sequence
  Description of Artificial Sequence: Synthetic oligonucleotide
cuuucgucaguaggaaaga

SEQ ID NO: 1902437 - RNA, 19 nt, Artificial Sequence
  Description of Artificial Sequence: Synthetic oligonucleotide
gacacugggcugcggccug

SEQ ID NO: 1902438 - RNA, 19 nt, Artificial Sequence
  Description of Artificial Sequence: Synthetic oligonucleotide
ccuuuagucucuugaucac

SEQ ID NO: 1902439 - RNA, 19 nt, Artificial Sequence
  Description of Artificial Sequence: Synthetic oligonucleotide
agcguggacuauauagcca

SEQ ID NO: 1902440 - RNA, 19 nt, Artificial Sequence
  Description of Artificial Sequence: Synthetic oligonucleotide
cucgaaguguuuggugaug

SEQ ID NO: 1902441 - RNA, 19 nt, Artificial Sequence
  Description of Artificial Sequence: Synthetic oligonucleotide
guccuuggaaaaccaucca

SEQ ID NO: 1902442 - RNA, 19 nt, Artificial Sequence
  Description of Artificial Sequence: Synthetic oligonucleotide
caaggaguaacagaggcuu

SEQ ID NO: 1902443 - RNA, 19 nt, Artificial Sequence
  Description of Artificial Sequence: Synthetic oligonucleotide
aucaccgucucugguuugu

SEQ ID NO: 1902444 - RNA, 19 nt, Artificial Sequence
  Description of Artificial Sequence: Synthetic oligonucleotide
ggauugaacucaauguugu

SEQ ID NO: 1902445 - RNA, 19 nt, Artificial Sequence
  Description of Artificial Sequence: Synthetic oligonucleotide
ggugacggacaguggcccg

SEQ ID NO: 1902446 - RNA, 19 nt, Artificial Sequence
  Description of Artificial Sequence: Synthetic oligonucleotide
cugaaucagagguucuccu

SEQ ID NO: 1902447 - RNA, 19 nt, Artificial Sequence
  Description of Artificial Sequence: Synthetic oligonucleotide
agaguacauuuuccuugaa

SEQ ID NO: 1902448 - RNA, 19 nt, Artificial Sequence
  Description of Artificial Sequence: Synthetic oligonucleotide
uuuucucacuuggggccac

SEQ ID NO: 1902449 - RNA, 19 nt, Artificial Sequence
  Description of Artificial Sequence: Synthetic oligonucleotide
auuuaagcacuuggagguu

SEQ ID NO: 1902450 - RNA, 19 nt, Artificial Sequence
  Description of Artificial Sequence: Synthetic oligonucleotide
ugagcuucccuuggucaau

SEQ ID NO: 1902451 - RNA, 19 nt, Artificial Sequence
  Description of Artificial Sequence: Synthetic oligonucleotide
gcguuguuuaaugaccuca

SEQ ID NO: 1902452 - RNA, 19 nt, Artificial Sequence
  Description of Artificial Sequence: Synthetic oligonucleotide
guccccgcuggagaggugc

SEQ ID NO: 1902453 - RNA, 19 nt, Artificial Sequence
  Description of Artificial Sequence: Synthetic oligonucleotide
guggacuauauagccauua

SEQ ID NO: 1902454 - RNA, 19 nt, Artificial Sequence
  Description of Artificial Sequence: Synthetic oligonucleotide
uggcggagcagguccccgc

SEQ ID NO: 1902455 - RNA, 19 nt, Artificial Sequence
  Description of Artificial Sequence: Synthetic oligonucleotide
uaagcacuuggagguuuaa

SEQ ID NO: 1902456 - RNA, 19 nt, Artificial Sequence
  Description of Artificial Sequence: Synthetic oligonucleotide
cacggcgcgcagcagccgc

SEQ ID NO: 1902457 - RNA, 19 nt, Artificial Sequence
  Description of Artificial Sequence: Synthetic oligonucleotide
ccacuaaggaaucuaaagu

SEQ ID NO: 1902458 - RNA, 19 nt, Artificial Sequence
  Description of Artificial Sequence: Synthetic oligonucleotide
auacgccuuuagucucuug

SEQ ID NO: 1902459 - RNA, 19 nt, Artificial Sequence
  Description of Artificial Sequence: Synthetic oligonucleotide
aaggaguaacagaggcuuu

SEQ ID NO: 1902460 - RNA, 19 nt, Artificial Sequence
  Description of Artificial Sequence: Synthetic oligonucleotide
ugccccacuaaggaaucua

SEQ ID NO: 1902461 - RNA, 19 nt, Artificial Sequence
  Description of Artificial Sequence: Synthetic oligonucleotide
ccugcuaaauacugcccuc

SEQ ID NO: 1902462 - RNA, 19 nt, Artificial Sequence
  Description of Artificial Sequence: Synthetic oligonucleotide
ugcggccuggccugcgcgc

SEQ ID NO: 1902463 - RNA, 19 nt, Artificial Sequence
  Description of Artificial Sequence: Synthetic oligonucleotide
caccaauuucugugcccug

SEQ ID NO: 1902464 - RNA, 19 nt, Artificial Sequence
  Description of Artificial Sequence: Synthetic oligonucleotide
ugggaggauugaacucaau

SEQ ID NO: 1902465 - RNA, 19 nt, Artificial Sequence
  Description of Artificial Sequence: Synthetic oligonucleotide
gguacacaccuguaauuua

SEQ ID NO: 1902466 - RNA, 19 nt, Artificial Sequence
  Description of Artificial Sequence: Synthetic oligonucleotide
cgcgucaugacaucaucug

SEQ ID NO: 1902467 - RNA, 19 nt, Artificial Sequence
  Description of Artificial Sequence: Synthetic oligonucleotide
ccucucgcugaaucagagg

SEQ ID NO: 1902468 - RNA, 19 nt, Artificial Sequence
  Description of Artificial Sequence: Synthetic oligonucleotide
ugggcuucauacgccuuua

SEQ ID NO: 1902469 - RNA, 19 nt, Artificial Sequence
  Description of Artificial Sequence: Synthetic oligonucleotide
uucucacuuggggccacaa

SEQ ID NO: 1902470 - RNA, 19 nt, Artificial Sequence
  Description of Artificial Sequence: Synthetic oligonucleotide
aagggcacguugagguuua

SEQ ID NO: 1902471 - RNA, 19 nt, Artificial Sequence
  Description of Artificial Sequence: Synthetic oligonucleotide
uuucucacuuggggccaca

SEQ ID NO: 1902472 - RNA, 19 nt, Artificial Sequence
  Description of Artificial Sequence: Synthetic oligonucleotide
cuuggucaaugaaagucuu

SEQ ID NO: 1902473 - RNA, 19 nt, Artificial Sequence
  Description of Artificial Sequence: Synthetic oligonucleotide
cuugaucaccgucucuggu

SEQ ID NO: 1902474 - RNA, 19 nt, Artificial Sequence
  Description of Artificial Sequence: Synthetic oligonucleotide
guauacccggccacuggca

SEQ ID NO: 1902475 - RNA, 19 nt, Artificial Sequence
  Description of Artificial Sequence: Synthetic oligonucleotide
gauguguccuugccccacu

SEQ ID NO: 1902476 - RNA, 19 nt, Artificial Sequence
  Description of Artificial Sequence: Synthetic oligonucleotide
accgaaguuuagauugguu

SEQ ID NO: 1902477 - RNA, 19 nt, Artificial Sequence
  Description of Artificial Sequence: Synthetic oligonucleotide
cgaaguguuuggugaugcg

SEQ ID NO: 1902478 - RNA, 19 nt, Artificial Sequence
  Description of Artificial Sequence: Synthetic oligonucleotide
cuguggaaguguccuugga

SEQ ID NO: 1902479 - RNA, 19 nt, Artificial Sequence
  Description of Artificial Sequence: Synthetic oligonucleotide
cccaggccuggcuuagugg

SEQ ID NO: 1902480 - RNA, 19 nt, Artificial Sequence
  Description of Artificial Sequence: Synthetic oligonucleotide
gacggacaguggcccgagc

SEQ ID NO: 1902481 - RNA, 19 nt, Artificial Sequence
  Description of Artificial Sequence: Synthetic oligonucleotide
ugacaucaucugggaugag

SEQ ID NO: 1902482 - RNA, 19 nt, Artificial Sequence
  Description of Artificial Sequence: Synthetic oligonucleotide
cagagacgucuuaggaaaa

SEQ ID NO: 1902483 - RNA, 19 nt, Artificial Sequence
  Description of Artificial Sequence: Synthetic oligonucleotide
uccccgcuggagaggugcu

SEQ ID NO: 1902484 - RNA, 19 nt, Artificial Sequence
  Description of Artificial Sequence: Synthetic oligonucleotide
cuggcggagcagguccccg

SEQ ID NO: 1902485 - RNA, 19 nt, Artificial Sequence
  Description of Artificial Sequence: Synthetic oligonucleotide
ccgaaguuuagauugguuu

SEQ ID NO: 1902486 - RNA, 19 nt, Artificial Sequence
  Description of Artificial Sequence: Synthetic oligonucleotide
gcaaggaggcccugcuuca

SEQ ID NO: 1902487 - RNA, 19 nt, Artificial Sequence
  Description of Artificial Sequence: Synthetic oligonucleotide
uugccccacuaaggaaucu

SEQ ID NO: 1902488 - RNA, 19 nt, Artificial Sequence
  Description of Artificial Sequence: Synthetic oligonucleotide
ggcguuguuuaaugaccuc

SEQ ID NO: 1902489 - RNA, 19 nt, Artificial Sequence
  Description of Artificial Sequence: Synthetic oligonucleotide
auguguccuugccccacua

SEQ ID NO: 1902490 - RNA, 19 nt, Artificial Sequence
  Description of Artificial Sequence: Synthetic oligonucleotide
cugcccuccucaaggagua

SEQ ID NO: 1902491 - RNA, 19 nt, Artificial Sequence
  Description of Artificial Sequence: Synthetic oligonucleotide
auacauggggccagaucuu

SEQ ID NO: 1902492 - RNA, 19 nt, Artificial Sequence
  Description of Artificial Sequence: Synthetic oligonucleotide
ucaccgucucugguuuguc

SEQ ID NO: 1902493 - RNA, 19 nt, Artificial Sequence
  Description of Artificial Sequence: Synthetic oligonucleotide
gaccgaaguuuagauuggu

SEQ ID NO: 1902494 - RNA, 19 nt, Artificial Sequence
  Description of Artificial Sequence: Synthetic oligonucleotide
gcgcucacggggcuccccg

SEQ ID NO: 1902495 - RNA, 19 nt, Artificial Sequence
  Description of Artificial Sequence: Synthetic oligonucleotide
gcauguucuggcggagcag

SEQ ID NO: 1902496 - RNA, 19 nt, Artificial Sequence
  Description of Artificial Sequence: Synthetic oligonucleotide
gugacggacaguggcccga

SEQ ID NO: 1902497 - RNA, 19 nt, Artificial Sequence
  Description of Artificial Sequence: Synthetic oligonucleotide
ggccaaaauuucaaagccu

SEQ ID NO: 1902498 - RNA, 19 nt, Artificial Sequence
  Description of Artificial Sequence: Synthetic oligonucleotide
cagguccccgcuggagagg

SEQ ID NO: 1902499 - RNA, 19 nt, Artificial Sequence
  Description of Artificial Sequence: Synthetic oligonucleotide
agcgagcuguaaggcguug

SEQ ID NO: 1902500 - RNA, 19 nt, Artificial Sequence
  Description of Artificial Sequence: Synthetic oligonucleotide
gcuuagugguacacaccug

SEQ ID NO: 1902501 - RNA, 19 nt, Artificial Sequence
  Description of Artificial Sequence: Synthetic oligonucleotide
guccucucgcugaaucaga

SEQ ID NO: 1902502 - RNA, 19 nt, Artificial Sequence
  Description of Artificial Sequence: Synthetic oligonucleotide
gguuugucguccucucgcu

SEQ ID NO: 1902503 - RNA, 19 nt, Artificial Sequence
  Description of Artificial Sequence: Synthetic oligonucleotide
cgacacggugcccuugccg

SEQ ID NO: 1902504 - RNA, 19 nt, Artificial Sequence
  Description of Artificial Sequence: Synthetic oligonucleotide
cguuguuuaaugaccucaa

SEQ ID NO: 1902505 - RNA, 19 nt, Artificial Sequence
  Description of Artificial Sequence: Synthetic oligonucleotide
cacuuggggccacaauaua

SEQ ID NO: 1902506 - RNA, 19 nt, Artificial Sequence
  Description of Artificial Sequence: Synthetic oligonucleotide
gccgcgucaugacaucauc

SEQ ID NO: 1902507 - RNA, 19 nt, Artificial Sequence
  Description of Artificial Sequence: Synthetic oligonucleotide
ccaaaauuucaaagccugu

SEQ ID NO: 1902508 - RNA, 19 nt, Artificial Sequence
  Description of Artificial Sequence: Synthetic oligonucleotide
cccaugaucacggcgcgca

SEQ ID NO: 1902509 - RNA, 19 nt, Artificial Sequence
  Description of Artificial Sequence: Synthetic oligonucleotide
ccuugccccacuaaggaau

SEQ ID NO: 1902510 - RNA, 19 nt, Artificial Sequence
  Description of Artificial Sequence: Synthetic oligonucleotide
caguggcccgagcugcaca

SEQ ID NO: 1902511 - RNA, 19 nt, Artificial Sequence
  Description of Artificial Sequence: Synthetic oligonucleotide
uuaggccagcguggacuau

SEQ ID NO: 1902512 - RNA, 19 nt, Artificial Sequence
  Description of Artificial Sequence: Synthetic oligonucleotide
cuguaaggcguuguuuaau

SEQ ID NO: 1902513 - RNA, 19 nt, Artificial Sequence
  Description of Artificial Sequence: Synthetic oligonucleotide
gcccuccucaaggaguaac

SEQ ID NO: 1902514 - RNA, 19 nt, Artificial Sequence
  Description of Artificial Sequence: Synthetic oligonucleotide
agccgcgucaugacaucau

SEQ ID NO: 1902515 - RNA, 19 nt, Artificial Sequence
  Description of Artificial Sequence: Synthetic oligonucleotide
uucccaggccuggcuuagu

SEQ ID NO: 1902516 - RNA, 19 nt, Artificial Sequence
  Description of Artificial Sequence: Synthetic oligonucleotide
cuacacugggugagguuuu

SEQ ID NO: 1902517 - RNA, 19 nt, Artificial Sequence
  Description of Artificial Sequence: Synthetic oligonucleotide
cagccgcgucaugacauca

SEQ ID NO: 1902518 - RNA, 19 nt, Artificial Sequence
  Description of Artificial Sequence: Synthetic oligonucleotide
gcucgaaguguuuggugau

SEQ ID NO: 1902519 - RNA, 19 nt, Artificial Sequence
  Description of Artificial Sequence: Synthetic oligonucleotide
gggaugagcuucccuuggu

SEQ ID NO: 1902520 - RNA, 19 nt, Artificial Sequence
  Description of Artificial Sequence: Synthetic oligonucleotide
ccccacuaaggaaucuaaa

SEQ ID NO: 1902521 - RNA, 19 nt, Artificial Sequence
  Description of Artificial Sequence: Synthetic oligonucleotide
caugaagggccagccgcgu

SEQ ID NO: 1902522 - RNA, 19 nt, Artificial Sequence
  Description of Artificial Sequence: Synthetic oligonucleotide
gggcacguugagguuuauc

SEQ ID NO: 1902523 - RNA, 19 nt, Artificial Sequence
  Description of Artificial Sequence: Synthetic oligonucleotide
gaagggccagccgcgucau

SEQ ID NO: 1902524 - RNA, 19 nt, Artificial Sequence
  Description of Artificial Sequence: Synthetic oligonucleotide
cagcuacacugggugaggu

SEQ ID NO: 1902525 - RNA, 19 nt, Artificial Sequence
  Description of Artificial Sequence: Synthetic oligonucleotide
cccggccacuggcaggaug

SEQ ID NO: 1902526 - RNA, 19 nt, Artificial Sequence
  Description of Artificial Sequence: Synthetic oligonucleotide
gugacgacacggugcccuu

SEQ ID NO: 1902527 - RNA, 19 nt, Artificial Sequence
  Description of Artificial Sequence: Synthetic oligonucleotide
cgucaguaggaaagaauau

SEQ ID NO: 1902528 - RNA, 19 nt, Artificial Sequence
  Description of Artificial Sequence: Synthetic oligonucleotide
ccgcgucaugacaucaucu

SEQ ID NO: 1902529 - RNA, 19 nt, Artificial Sequence
  Description of Artificial Sequence: Synthetic oligonucleotide
gugcaagggcuugauucuu

SEQ ID NO: 1902530 - RNA, 19 nt, Artificial Sequence
  Description of Artificial Sequence: Synthetic oligonucleotide
ggcccgagcugcacagaca

SEQ ID NO: 1902531 - RNA, 19 nt, Artificial Sequence
  Description of Artificial Sequence: Synthetic oligonucleotide
cugcgcgcucacggggcuc

SEQ ID NO: 1902532 - RNA, 19 nt, Artificial Sequence
  Description of Artificial Sequence: Synthetic oligonucleotide
ccuggccugcgcgcucacg

SEQ ID NO: 1902533 - RNA, 19 nt, Artificial Sequence
  Description of Artificial Sequence: Synthetic oligonucleotide
cgucuuaggaaaagagcuu

SEQ ID NO: 1902534 - RNA, 19 nt, Artificial Sequence
  Description of Artificial Sequence: Synthetic oligonucleotide
cgcucacggggcuccccgg

SEQ ID NO: 1902535 - RNA, 19 nt, Artificial Sequence
  Description of Artificial Sequence: Synthetic oligonucleotide
ccccaugaucacggcgcgc

SEQ ID NO: 1902536 - RNA, 19 nt, Artificial Sequence
  Description of Artificial Sequence: Synthetic oligonucleotide
agggcacguugagguuuau

SEQ ID NO: 1902537 - RNA, 19 nt, Artificial Sequence
  Description of Artificial Sequence: Synthetic oligonucleotide
ggcgaggcaaggaggcccu

SEQ ID NO: 1902538 - RNA, 19 nt, Artificial Sequence
  Description of Artificial Sequence: Synthetic oligonucleotide
cgugacgacacggugcccu

SEQ ID NO: 1902539 - RNA, 19 nt, Artificial Sequence
  Description of Artificial Sequence: Synthetic oligonucleotide
cagcgagcuguaaggcguu

SEQ ID NO: 1902540 - RNA, 19 nt, Artificial Sequence
  Description of Artificial Sequence: Synthetic oligonucleotide
cauacgccuuuagucucuu

SEQ ID NO: 1902541 - RNA, 19 nt, Artificial Sequence
  Description of Artificial Sequence: Synthetic oligonucleotide
caaggaggcccugcuucau

SEQ ID NO: 1902542 - RNA, 19 nt, Artificial Sequence
  Description of Artificial Sequence: Synthetic oligonucleotide
gcgagcuguaaggcguugu

SEQ ID NO: 1902543 - RNA, 19 nt, Artificial Sequence
  Description of Artificial Sequence: Synthetic oligonucleotide
ggccuggccugcgcgcuca

SEQ ID NO: 1902544 - RNA, 19 nt, Artificial Sequence
  Description of Artificial Sequence: Synthetic oligonucleotide
cguugagguuuaucacugu

SEQ ID NO: 1902545 - RNA, 19 nt, Artificial Sequence
  Description of Artificial Sequence: Synthetic oligonucleotide
gcgugacgacacggugccc

SEQ ID NO: 1902546 - RNA, 19 nt, Artificial Sequence
  Description of Artificial Sequence: Synthetic oligonucleotide
gcgaggcaaggaggcccug

SEQ ID NO: 1902547 - RNA, 19 nt, Artificial Sequence
  Description of Artificial Sequence: Synthetic oligonucleotide
ccuugaagguagaguuguu

SEQ ID NO: 1902548 - RNA, 19 nt, Artificial Sequence
  Description of Artificial Sequence: Synthetic oligonucleotide
cgagcuguaaggcguuguu

SEQ ID NO: 1902549 - RNA, 19 nt, Artificial Sequence
  Description of Artificial Sequence: Synthetic oligonucleotide
acccggccacuggcaggau

SEQ ID NO: 1902550 - RNA, 19 nt, Artificial Sequence
  Description of Artificial Sequence: Synthetic oligonucleotide
ccugcgcgcucacggggcu

SEQ ID NO: 1902551 - RNA, 19 nt, Artificial Sequence
  Description of Artificial Sequence: Synthetic oligonucleotide
gcggccuggccugcgcgcu

SEQ ID NO: 1902552 - RNA, 19 nt, Artificial Sequence
  Description of Artificial Sequence: Synthetic oligonucleotide
cguggacuauauagccauu

SEQ ID NO: 1902553 - RNA, 19 nt, Artificial Sequence
  Description of Artificial Sequence: Synthetic oligonucleotide
ccccgcuggagaggugcuu

SEQ ID NO: 1902554 - RNA, 19 nt, Artificial Sequence
  Description of Artificial Sequence: Synthetic oligonucleotide
uuuucauugaauuugggag

SEQ ID NO: 1902555 - RNA, 19 nt, Artificial Sequence
  Description of Artificial Sequence: Synthetic oligonucleotide
cuuauauaucacaagaugc

SEQ ID NO: 1902556 - RNA, 19 nt, Artificial Sequence
  Description of Artificial Sequence: Synthetic oligonucleotide
uuuuauugcaacaaacugu

SEQ ID NO: 1902557 - RNA, 19 nt, Artificial Sequence
  Description of Artificial Sequence: Synthetic oligonucleotide
auuagaaccagacaugaug

SEQ ID NO: 1902558 - RNA, 19 nt, Artificial Sequence
  Description of Artificial Sequence: Synthetic oligonucleotide
uuauuguaacuacagaucu

SEQ ID NO: 1902559 - RNA, 19 nt, Artificial Sequence
  Description of Artificial Sequence: Synthetic oligonucleotide
uguaagaugcauuucccgg

SEQ ID NO: 1902560 - RNA, 19 nt, Artificial Sequence
  Description of Artificial Sequence: Synthetic oligonucleotide
aauuugggagaaaaguugc

SEQ ID NO: 1902561 - RNA, 19 nt, Artificial Sequence
  Description of Artificial Sequence: Synthetic oligonucleotide
ucaacgauccacuccaucg

SEQ ID NO: 1902562 - RNA, 19 nt, Artificial Sequence
  Description of Artificial Sequence: Synthetic oligonucleotide
agaaaaguugcuuucacug

SEQ ID NO: 1902563 - RNA, 19 nt, Artificial Sequence
  Description of Artificial Sequence: Synthetic oligonucleotide
ugcaguguauuccacaggg

SEQ ID NO: 1902564 - RNA, 19 nt, Artificial Sequence
  Description of Artificial Sequence: Synthetic oligonucleotide
uuauauaucacaagaugcu

SEQ ID NO: 1902565 - RNA, 19 nt, Artificial Sequence
  Description of Artificial Sequence: Synthetic oligonucleotide
uucuguaaggaguucaggg

SEQ ID NO: 1902566 - RNA, 19 nt, Artificial Sequence
  Description of Artificial Sequence: Synthetic oligonucleotide
uuuauuguaacuacagauc

SEQ ID NO: 1902567 - RNA, 19 nt, Artificial Sequence
  Description of Artificial Sequence: Synthetic oligonucleotide
aggguuauagucuugccac

SEQ ID NO: 1902568 - RNA, 19 nt, Artificial Sequence
  Description of Artificial Sequence: Synthetic oligonucleotide
uaucacaagaugcucuugg

SEQ ID NO: 1902569 - RNA, 19 nt, Artificial Sequence
  Description of Artificial Sequence: Synthetic oligonucleotide
uugagaguggcacugaucu

SEQ ID NO: 1902570 - RNA, 19 nt, Artificial Sequence
  Description of Artificial Sequence: Synthetic oligonucleotide
acaaaaucuggcaagcucc

SEQ ID NO: 1902571 - RNA, 19 nt, Artificial Sequence
  Description of Artificial Sequence: Synthetic oligonucleotide
uauaaugggaucugcagca

SEQ ID NO: 1902572 - RNA, 19 nt, Artificial Sequence
  Description of Artificial Sequence: Synthetic oligonucleotide
uguucguacauacaaaauc

SEQ ID NO: 1902573 - RNA, 19 nt, Artificial Sequence
  Description of Artificial Sequence: Synthetic oligonucleotide
ucguacauacaaaaucugg

SEQ ID NO: 1902574 - RNA, 19 nt, Artificial Sequence
  Description of Artificial Sequence: Synthetic oligonucleotide
ucgggaagagaauucaacg

SEQ ID NO: 1902575 - RNA, 19 nt, Artificial Sequence
  Description of Artificial Sequence: Synthetic oligonucleotide
ugugauuuuauucccgcug

SEQ ID NO: 1902576 - RNA, 19 nt, Artificial Sequence
  Description of Artificial Sequence: Synthetic oligonucleotide
uuuggcaccauuagaacca

SEQ ID NO: 1902577 - RNA, 19 nt, Artificial Sequence
  Description of Artificial Sequence: Synthetic oligonucleotide
aguggcacugaucuucucc

SEQ ID NO: 1902578 - RNA, 19 nt, Artificial Sequence
  Description of Artificial Sequence: Synthetic oligonucleotide
uuaaauuuguucagacaug

SEQ ID NO: 1902579 - RNA, 19 nt, Artificial Sequence
  Description of Artificial Sequence: Synthetic oligonucleotide
uuuauucccgcugucaucc

SEQ ID NO: 1902580 - RNA, 19 nt, Artificial Sequence
  Description of Artificial Sequence: Synthetic oligonucleotide
gagucugaugaacugagag

SEQ ID NO: 1902581 - RNA, 19 nt, Artificial Sequence
  Description of Artificial Sequence: Synthetic oligonucleotide
uugaauuugggagaaaagu

SEQ ID NO: 1902582 - RNA, 19 nt, Artificial Sequence
  Description of Artificial Sequence: Synthetic oligonucleotide
uuucauugaauuugggaga

SEQ ID NO: 1902583 - RNA, 19 nt, Artificial Sequence
  Description of Artificial Sequence: Synthetic oligonucleotide
uuccaccugguuauaaugg

SEQ ID NO: 1902584 - RNA, 19 nt, Artificial Sequence
  Description of Artificial Sequence: Synthetic oligonucleotide
aaucucguacaguccauuc

SEQ ID NO: 1902585 - RNA, 19 nt, Artificial Sequence
  Description of Artificial Sequence: Synthetic oligonucleotide
auaaguucugugucccugc

SEQ ID NO: 1902586 - RNA, 19 nt, Artificial Sequence
  Description of Artificial Sequence: Synthetic oligonucleotide
aacuuuugaaccuggguaa

SEQ ID NO: 1902587 - RNA, 19 nt, Artificial Sequence
  Description of Artificial Sequence: Synthetic oligonucleotide
uuuguucguacauacaaaa

SEQ ID NO: 1902588 - RNA, 19 nt, Artificial Sequence
  Description of Artificial Sequence: Synthetic oligonucleotide
aaaaguugcuuucacugau

SEQ ID NO: 1902589 - RNA, 19 nt, Artificial Sequence
  Description of Artificial Sequence: Synthetic oligonucleotide
agucuugccacucaacaag

SEQ ID NO: 1902590 - RNA, 19 nt, Artificial Sequence
  Description of Artificial Sequence: Synthetic oligonucleotide
agaugcauuucccggaaac

SEQ ID NO: 1902591 - RNA, 19 nt, Artificial Sequence
  Description of Artificial Sequence: Synthetic oligonucleotide
auuccacaggguuauaguc

SEQ ID NO: 1902592 - RNA, 19 nt, Artificial Sequence
  Description of Artificial Sequence: Synthetic oligonucleotide
gaauuugggagaaaaguug

SEQ ID NO: 1902593 - RNA, 19 nt, Artificial Sequence
  Description of Artificial Sequence: Synthetic oligonucleotide
cuucguucaacuuuugaac

SEQ ID NO: 1902594 - RNA, 19 nt, Artificial Sequence
  Description of Artificial Sequence: Synthetic oligonucleotide
aucaacauaccccuuauau

SEQ ID NO: 1902595 - RNA, 19 nt, Artificial Sequence
  Description of Artificial Sequence: Synthetic oligonucleotide
cauuuguuauuuaaauuug

SEQ ID NO: 1902596 - RNA, 19 nt, Artificial Sequence
  Description of Artificial Sequence: Synthetic oligonucleotide
gaagagaauucaacgaucc

SEQ ID NO: 1902597 - RNA, 19 nt, Artificial Sequence
  Description of Artificial Sequence: Synthetic oligonucleotide
uuugcggagcauaaguucu

SEQ ID NO: 1902598 - RNA, 19 nt, Artificial Sequence
  Description of Artificial Sequence: Synthetic oligonucleotide
gaaccagacaugauguugg

SEQ ID NO: 1902599 - RNA, 19 nt, Artificial Sequence
  Description of Artificial Sequence: Synthetic oligonucleotide
cuuuggcaccauuagaacc

SEQ ID NO: 1902600 - RNA, 19 nt, Artificial Sequence
  Description of Artificial Sequence: Synthetic oligonucleotide
ucucguacaguccauucug

SEQ ID NO: 1902601 - RNA, 19 nt, Artificial Sequence
  Description of Artificial Sequence: Synthetic oligonucleotide
ugcauuucccggaaacagg

SEQ ID NO: 1902602 - RNA, 19 nt, Artificial Sequence
  Description of Artificial Sequence: Synthetic oligonucleotide
gaauucaacgauccacucc

SEQ ID NO: 1902603 - RNA, 19 nt, Artificial Sequence
  Description of Artificial Sequence: Synthetic oligonucleotide
gcaacaaacuguaagaugc

SEQ ID NO: 1902604 - RNA, 19 nt, Artificial Sequence
  Description of Artificial Sequence: Synthetic oligonucleotide
uacaaaaucuggcaagcuc

SEQ ID NO: 1902605 - RNA, 19 nt, Artificial Sequence
  Description of Artificial Sequence: Synthetic oligonucleotide
cauuaggaaccucacuucg

SEQ ID NO: 1902606 - RNA, 19 nt, Artificial Sequence
  Description of Artificial Sequence: Synthetic oligonucleotide
auagucuugccacucaaca

SEQ ID NO: 1902607 - RNA, 19 nt, Artificial Sequence
  Description of Artificial Sequence: Synthetic oligonucleotide
cuacagaucuucaaagaac

SEQ ID NO: 1902608 - RNA, 19 nt, Artificial Sequence
  Description of Artificial Sequence: Synthetic oligonucleotide
ugugugauuuuauucccgc

SEQ ID NO: 1902609 - RNA, 19 nt, Artificial Sequence
  Description of Artificial Sequence: Synthetic oligonucleotide
aucgugguaguucacagcu

SEQ ID NO: 1902610 - RNA, 19 nt, Artificial Sequence
  Description of Artificial Sequence: Synthetic oligonucleotide
ugcaacaaacuguaagaug

SEQ ID NO: 1902611 - RNA, 19 nt, Artificial Sequence
  Description of Artificial Sequence: Synthetic oligonucleotide
agcauaaguucuguguccc

SEQ ID NO: 1902612 - RNA, 19 nt, Artificial Sequence
  Description of Artificial Sequence: Synthetic oligonucleotide
cuggguaaggagauguccg

SEQ ID NO: 1902613 - RNA, 19 nt, Artificial Sequence
  Description of Artificial Sequence: Synthetic oligonucleotide
ucugaugaacugagagugg

SEQ ID NO: 1902614 - RNA, 19 nt, Artificial Sequence
  Description of Artificial Sequence: Synthetic oligonucleotide
augucaacccacuucaccu

SEQ ID NO: 1902615 - RNA, 19 nt, Artificial Sequence
  Description of Artificial Sequence: Synthetic oligonucleotide
acuucguucaacuuuugaa

SEQ ID NO: 1902616 - RNA, 19 nt, Artificial Sequence
  Description of Artificial Sequence: Synthetic oligonucleotide
ucaucucccgccuccaggg

SEQ ID NO: 1902617 - RNA, 19 nt, Artificial Sequence
  Description of Artificial Sequence: Synthetic oligonucleotide
acuacagaucuucaaagaa

SEQ ID NO: 1902618 - RNA, 19 nt, Artificial Sequence
  Description of Artificial Sequence: Synthetic oligonucleotide
guugcuuucacugaucuga

SEQ ID NO: 1902619 - RNA, 19 nt, Artificial Sequence
  Description of Artificial Sequence: Synthetic oligonucleotide
auugucaguguuccgagga

SEQ ID NO: 1902620 - RNA, 19 nt, Artificial Sequence
  Description of Artificial Sequence: Synthetic oligonucleotide
uuuuguucguacauacaaa

SEQ ID NO: 1902621 - RNA, 19 nt, Artificial Sequence
  Description of Artificial Sequence: Synthetic oligonucleotide
acuguaagaugcauuuccc

SEQ ID NO: 1902622 - RNA, 19 nt, Artificial Sequence
  Description of Artificial Sequence: Synthetic oligonucleotide
uucucgaucucccucuucu

SEQ ID NO: 1902623 - RNA, 19 nt, Artificial Sequence
  Description of Artificial Sequence: Synthetic oligonucleotide
cuguaagaugcauuucccg

SEQ ID NO: 1902624 - RNA, 19 nt, Artificial Sequence
  Description of Artificial Sequence: Synthetic oligonucleotide
guaaggagauguccgagcc

SEQ ID NO: 1902625 - RNA, 19 nt, Artificial Sequence
  Description of Artificial Sequence: Synthetic oligonucleotide
agaauucaacgauccacuc

SEQ ID NO: 1902626 - RNA, 19 nt, Artificial Sequence
  Description of Artificial Sequence: Synthetic oligonucleotide
cauacaaaaucuggcaagc

SEQ ID NO: 1902627 - RNA, 19 nt, Artificial Sequence
  Description of Artificial Sequence: Synthetic oligonucleotide
uucgggaagagaauucaac

SEQ ID NO: 1902628 - RNA, 19 nt, Artificial Sequence
  Description of Artificial Sequence: Synthetic oligonucleotide
uuucaaucucguacagucc

SEQ ID NO: 1902629 - RNA, 19 nt, Artificial Sequence
  Description of Artificial Sequence: Synthetic oligonucleotide
caugcauugucaguguucc

SEQ ID NO: 1902630 - RNA, 19 nt, Artificial Sequence
  Description of Artificial Sequence: Synthetic oligonucleotide
auuucccggaaacagggug

SEQ ID NO: 1902631 - RNA, 19 nt, Artificial Sequence
  Description of Artificial Sequence: Synthetic oligonucleotide
ucaucgugguaguucacag

SEQ ID NO: 1902632 - RNA, 19 nt, Artificial Sequence
  Description of Artificial Sequence: Synthetic oligonucleotide
aucuggcaagcuccaaucc

SEQ ID NO: 1902633 - RNA, 19 nt, Artificial Sequence
  Description of Artificial Sequence: Synthetic oligonucleotide
ucaucccuuuuccaccugg

SEQ ID NO: 1902634 - RNA, 19 nt, Artificial Sequence
  Description of Artificial Sequence: Synthetic oligonucleotide
aaccucacuucguucaacu

SEQ ID NO: 1902635 - RNA, 19 nt, Artificial Sequence
  Description of Artificial Sequence: Synthetic oligonucleotide
acauaccccuuauauauca

SEQ ID NO: 1902636 - RNA, 19 nt, Artificial Sequence
  Description of Artificial Sequence: Synthetic oligonucleotide
uuccacaggguuauagucu

SEQ ID NO: 1902637 - RNA, 19 nt, Artificial Sequence
  Description of Artificial Sequence: Synthetic oligonucleotide
ugaucugaggauccgccca

SEQ ID NO: 1902638 - RNA, 19 nt, Artificial Sequence
  Description of Artificial Sequence: Synthetic oligonucleotide
agucugaugaacugagagu

SEQ ID NO: 1902639 - RNA, 19 nt, Artificial Sequence
  Description of Artificial Sequence: Synthetic oligonucleotide
ucaacauaccccuuauaua

SEQ ID NO: 1902640 - RNA, 19 nt, Artificial Sequence
  Description of Artificial Sequence: Synthetic oligonucleotide
gagcauaaguucugugucc

SEQ ID NO: 1902641 - RNA, 19 nt, Artificial Sequence
  Description of Artificial Sequence: Synthetic oligonucleotide
acaagcuauggaccacggc

SEQ ID NO: 1902642 - RNA, 19 nt, Artificial Sequence
  Description of Artificial Sequence: Synthetic oligonucleotide
aagagaauucaacgaucca

SEQ ID NO: 1902643 - RNA, 19 nt, Artificial Sequence
  Description of Artificial Sequence: Synthetic oligonucleotide
gggugugugauuuuauucc

SEQ ID NO: 1902644 - RNA, 19 nt, Artificial Sequence
  Description of Artificial Sequence: Synthetic oligonucleotide
uaccccuuauauaucacaa

SEQ ID NO: 1902645 - RNA, 19 nt, Artificial Sequence
  Description of Artificial Sequence: Synthetic oligonucleotide
agauguccgagccuuguug

SEQ ID NO: 1902646 - RNA, 19 nt, Artificial Sequence
  Description of Artificial Sequence: Synthetic oligonucleotide
uauaucacaagaugcucuu

SEQ ID NO: 1902647 - RNA, 19 nt, Artificial Sequence
  Description of Artificial Sequence: Synthetic oligonucleotide
guuucaucgugguaguuca

SEQ ID NO: 1902648 - RNA, 19 nt, Artificial Sequence
  Description of Artificial Sequence: Synthetic oligonucleotide
ucauuaggaaccucacuuc

SEQ ID NO: 1902649 - RNA, 19 nt, Artificial Sequence
  Description of Artificial Sequence: Synthetic oligonucleotide
aggaaccucacuucguuca

SEQ ID NO: 1902650 - RNA, 19 nt, Artificial Sequence
  Description of Artificial Sequence: Synthetic oligonucleotide
ugcaugcagcuucuucucg

SEQ ID NO: 1902651 - RNA, 19 nt, Artificial Sequence
  Description of Artificial Sequence: Synthetic oligonucleotide
aguucagggcuuccucacc

SEQ ID NO: 1902652 - RNA, 19 nt, Artificial Sequence
  Description of Artificial Sequence: Synthetic oligonucleotide
cuuugcggagcauaaguuc

SEQ ID NO: 1902653 - RNA, 19 nt, Artificial Sequence
  Description of Artificial Sequence: Synthetic oligonucleotide
ccaaacucccucuugagag

SEQ ID NO: 1902654 - RNA, 19 nt, Artificial Sequence
  Description of Artificial Sequence: Synthetic oligonucleotide
agaaccagacaugauguug

SEQ ID NO: 1902655 - RNA, 19 nt, Artificial Sequence
  Description of Artificial Sequence: Synthetic oligonucleotide
auugaauuugggagaaaag

SEQ ID NO: 1902656 - RNA, 19 nt, Artificial Sequence
  Description of Artificial Sequence: Synthetic oligonucleotide
ucuuuggcaccauuagaac

SEQ ID NO: 1902657 - RNA, 19 nt, Artificial Sequence
  Description of Artificial Sequence: Synthetic oligonucleotide
uuauagucuugccacucaa

SEQ ID NO: 1902658 - RNA, 19 nt, Artificial Sequence
  Description of Artificial Sequence: Synthetic oligonucleotide
ugguuugggccccaucucc

SEQ ID NO: 1902659 - RNA, 19 nt, Artificial Sequence
  Description of Artificial Sequence: Synthetic oligonucleotide
augcccguccuuuucauug

SEQ ID NO: 1902660 - RNA, 19 nt, Artificial Sequence
  Description of Artificial Sequence: Synthetic oligonucleotide
cuucucauuaggaaccuca

SEQ ID NO: 1902661 - RNA, 19 nt, Artificial Sequence
  Description of Artificial Sequence: Synthetic oligonucleotide
uucucauuaggaaccucac

SEQ ID NO: 1902662 - RNA, 19 nt, Artificial Sequence
  Description of Artificial Sequence: Synthetic oligonucleotide
ucgaucucccucuucucag

SEQ ID NO: 1902663 - RNA, 19 nt, Artificial Sequence
  Description of Artificial Sequence: Synthetic oligonucleotide
uuaggaaccucacuucguu

SEQ ID NO: 1902664 - RNA, 19 nt, Artificial Sequence
  Description of Artificial Sequence: Synthetic oligonucleotide
cugucaucccuuuuccacc

SEQ ID NO: 1902665 - RNA, 19 nt, Artificial Sequence
  Description of Artificial Sequence: Synthetic oligonucleotide
aacauaccccuuauauauc

SEQ ID NO: 1902666 - RNA, 19 nt, Artificial Sequence
  Description of Artificial Sequence: Synthetic oligonucleotide
uguuucaucgugguaguuc

SEQ ID NO: 1902667 - RNA, 19 nt, Artificial Sequence
  Description of Artificial Sequence: Synthetic oligonucleotide
aucguacuggcucauuuga

SEQ ID NO: 1902668 - RNA, 19 nt, Artificial Sequence
  Description of Artificial Sequence: Synthetic oligonucleotide
ugagacuguccauuguuuc

SEQ ID NO: 1902669 - RNA, 19 nt, Artificial Sequence
  Description of Artificial Sequence: Synthetic oligonucleotide
cacucaacaagccagccca

SEQ ID NO: 1902670 - RNA, 19 nt, Artificial Sequence
  Description of Artificial Sequence: Synthetic oligonucleotide
uaaugggaucugcagcaug

SEQ ID NO: 1902671 - RNA, 19 nt, Artificial Sequence
  Description of Artificial Sequence: Synthetic oligonucleotide
uugcuuucacugaucugag

SEQ ID NO: 1902672 - RNA, 19 nt, Artificial Sequence
  Description of Artificial Sequence: Synthetic oligonucleotide
auaccccuuauauaucaca

SEQ ID NO: 1902673 - RNA, 19 nt, Artificial Sequence
  Description of Artificial Sequence: Synthetic oligonucleotide
guaagaugcauuucccgga

SEQ ID NO: 1902674 - RNA, 19 nt, Artificial Sequence
  Description of Artificial Sequence: Synthetic oligonucleotide
cucccugcaggauuucugg

SEQ ID NO: 1902675 - RNA, 19 nt, Artificial Sequence
  Description of Artificial Sequence: Synthetic oligonucleotide
cuucccggcaucaucuccc

SEQ ID NO: 1902676 - RNA, 19 nt, Artificial Sequence
  Description of Artificial Sequence: Synthetic oligonucleotide
uucauugaauuugggagaa

SEQ ID NO: 1902677 - RNA, 19 nt, Artificial Sequence
  Description of Artificial Sequence: Synthetic oligonucleotide
ugaacugagaguggcuggc

SEQ ID NO: 1902678 - RNA, 19 nt, Artificial Sequence
  Description of Artificial Sequence: Synthetic oligonucleotide
caacuuuugaaccugggua

SEQ ID NO: 1902679 - RNA, 19 nt, Artificial Sequence
  Description of Artificial Sequence: Synthetic oligonucleotide
aaacucccucuugagagug

SEQ ID NO: 1902680 - RNA, 19 nt, Artificial Sequence
  Description of Artificial Sequence: Synthetic oligonucleotide
ucaucaacauaccccuuau

SEQ ID NO: 1902681 - RNA, 19 nt, Artificial Sequence
  Description of Artificial Sequence: Synthetic oligonucleotide
cauuuucaaucucguacag

SEQ ID NO: 1902682 - RNA, 19 nt, Artificial Sequence
  Description of Artificial Sequence: Synthetic oligonucleotide
aggaguucagggcuuccuc

SEQ ID NO: 1902683 - RNA, 19 nt, Artificial Sequence
  Description of Artificial Sequence: Synthetic oligonucleotide
cacuccaucguacuggcuc

SEQ ID NO: 1902684 - RNA, 19 nt, Artificial Sequence
  Description of Artificial Sequence: Synthetic oligonucleotide
uuguucguacauacaaaau

SEQ ID NO: 1902685 - RNA, 19 nt, Artificial Sequence
  Description of Artificial Sequence: Synthetic oligonucleotide
accugguuauaaugggauc

SEQ ID NO: 1902686 - RNA, 19 nt, Artificial Sequence
  Description of Artificial Sequence: Synthetic oligonucleotide
ugggagaaaaguugcuuuc

SEQ ID NO: 1902687 - RNA, 19 nt, Artificial Sequence
  Description of Artificial Sequence: Synthetic oligonucleotide
caacauaccccuuauauau

SEQ ID NO: 1902688 - RNA, 19 nt, Artificial Sequence
  Description of Artificial Sequence: Synthetic oligonucleotide
uauuguaacuacagaucuu

SEQ ID NO: 1902689 - RNA, 19 nt, Artificial Sequence
  Description of Artificial Sequence: Synthetic oligonucleotide
auuucugggccuuccauuu

SEQ ID NO: 1902690 - RNA, 19 nt, Artificial Sequence
  Description of Artificial Sequence: Synthetic oligonucleotide
uguccauuguuuccccugu

SEQ ID NO: 1902691 - RNA, 19 nt, Artificial Sequence
  Description of Artificial Sequence: Synthetic oligonucleotide
ugaugaacugagaguggcu

SEQ ID NO: 1902692 - RNA, 19 nt, Artificial Sequence
  Description of Artificial Sequence: Synthetic oligonucleotide
ucugaggauccgcccauug

SEQ ID NO: 1902693 - RNA, 19 nt, Artificial Sequence
  Description of Artificial Sequence: Synthetic oligonucleotide
uuucacugaucugaggauc

SEQ ID NO: 1902694 - RNA, 19 nt, Artificial Sequence
  Description of Artificial Sequence: Synthetic oligonucleotide
uccccaaaagaccccggcc

SEQ ID NO: 1902695 - RNA, 19 nt, Artificial Sequence
  Description of Artificial Sequence: Synthetic oligonucleotide
guauuccacaggguuauag

SEQ ID NO: 1902696 - RNA, 19 nt, Artificial Sequence
  Description of Artificial Sequence: Synthetic oligonucleotide
aucaucaacauaccccuua

SEQ ID NO: 1902697 - RNA, 19 nt, Artificial Sequence
  Description of Artificial Sequence: Synthetic oligonucleotide
aucucguacaguccauucu

SEQ ID NO: 1902698 - RNA, 19 nt, Artificial Sequence
  Description of Artificial Sequence: Synthetic oligonucleotide
cucguacaguccauucugg

SEQ ID NO: 1902699 - RNA, 19 nt, Artificial Sequence
  Description of Artificial Sequence: Synthetic oligonucleotide
gcuuucacugaucugagga

SEQ ID NO: 1902700 - RNA, 19 nt, Artificial Sequence
  Description of Artificial Sequence: Synthetic oligonucleotide
accccuuauauaucacaag

SEQ ID NO: 1902701 - RNA, 19 nt, Artificial Sequence
  Description of Artificial Sequence: Synthetic oligonucleotide
agaugcucuuggcugaaga

SEQ ID NO: 1902702 - RNA, 19 nt, Artificial Sequence
  Description of Artificial Sequence: Synthetic oligonucleotide
acggcugucagcagcaggg

SEQ ID NO: 1902703 - RNA, 19 nt, Artificial Sequence
  Description of Artificial Sequence: Synthetic oligonucleotide
aaaagaccccggccaacca

SEQ ID NO: 1902704 - RNA, 19 nt, Artificial Sequence
  Description of Artificial Sequence: Synthetic oligonucleotide
ugggauugcccacucucca

SEQ ID NO: 1902705 - RNA, 19 nt, Artificial Sequence
  Description of Artificial Sequence: Synthetic oligonucleotide
ggugugugauuuuauuccc

SEQ ID NO: 1902706 - RNA, 19 nt, Artificial Sequence
  Description of Artificial Sequence: Synthetic oligonucleotide
uaaguucugugucccugca

SEQ ID NO: 1902707 - RNA, 19 nt, Artificial Sequence
  Description of Artificial Sequence: Synthetic oligonucleotide
aguguuccgaggaucauca

SEQ ID NO: 1902708 - RNA, 19 nt, Artificial Sequence
  Description of Artificial Sequence: Synthetic oligonucleotide
cauaaguucugugucccug

SEQ ID NO: 1902709 - RNA, 19 nt, Artificial Sequence
  Description of Artificial Sequence: Synthetic oligonucleotide
cacuccagugugcaucucg

SEQ ID NO: 1902710 - RNA, 19 nt, Artificial Sequence
  Description of Artificial Sequence: Synthetic oligonucleotide
acuccagugugcaucucgc

SEQ ID NO: 1902711 - RNA, 19 nt, Artificial Sequence
  Description of Artificial Sequence: Synthetic oligonucleotide
cuuuugaaccuggguaagg

SEQ ID NO: 1902712 - RNA, 19 nt, Artificial Sequence
  Description of Artificial Sequence: Synthetic oligonucleotide
uauggaccacggcugucag

SEQ ID NO: 1902713 - RNA, 19 nt, Artificial Sequence
  Description of Artificial Sequence: Synthetic oligonucleotide
ugcuuucacugaucugagg

SEQ ID NO: 1902714 - RNA, 19 nt, Artificial Sequence
  Description of Artificial Sequence: Synthetic oligonucleotide
ugucaucccuuuuccaccu

SEQ ID NO: 1902715 - RNA, 19 nt, Artificial Sequence
  Description of Artificial Sequence: Synthetic oligonucleotide
uagucuugccacucaacaa

SEQ ID NO: 1902716 - RNA, 19 nt, Artificial Sequence
  Description of Artificial Sequence: Synthetic oligonucleotide
caagcuauggaccacggcu

SEQ ID NO: 1902717 - RNA, 19 nt, Artificial Sequence
  Description of Artificial Sequence: Synthetic oligonucleotide
ucaacccacuucaccuucc

SEQ ID NO: 1902718 - RNA, 19 nt, Artificial Sequence
  Description of Artificial Sequence: Synthetic oligonucleotide
caucguacuggcucauuug

SEQ ID NO: 1902719 - RNA, 19 nt, Artificial Sequence
  Description of Artificial Sequence: Synthetic oligonucleotide
cauugucaguguuccgagg

SEQ ID NO: 1902720 - RNA, 19 nt, Artificial Sequence
  Description of Artificial Sequence: Synthetic oligonucleotide
uggguaaggagauguccga

SEQ ID NO: 1902721 - RNA, 19 nt, Artificial Sequence
  Description of Artificial Sequence: Synthetic oligonucleotide
ugauuuuauucccgcuguc

SEQ ID NO: 1902722 - RNA, 19 nt, Artificial Sequence
  Description of Artificial Sequence: Synthetic oligonucleotide
ggagcauaaguucuguguc

SEQ ID NO: 1902723 - RNA, 19 nt, Artificial Sequence
  Description of Artificial Sequence: Synthetic oligonucleotide
uaaggagauguccgagccu

SEQ ID NO: 1902724 - RNA, 19 nt, Artificial Sequence
  Description of Artificial Sequence: Synthetic oligonucleotide
auacagcuugagcugguca

SEQ ID NO: 1902725 - RNA, 19 nt, Artificial Sequence
  Description of Artificial Sequence: Synthetic oligonucleotide
accauuagaaccagacaug

SEQ ID NO: 1902726 - RNA, 19 nt, Artificial Sequence
  Description of Artificial Sequence: Synthetic oligonucleotide
gguaaggagauguccgagc

SEQ ID NO: 1902727 - RNA, 19 nt, Artificial Sequence
  Description of Artificial Sequence: Synthetic oligonucleotide
caucgugguaguucacagc

SEQ ID NO: 1902728 - RNA, 19 nt, Artificial Sequence
  Description of Artificial Sequence: Synthetic oligonucleotide
uucaacgauccacuccauc

SEQ ID NO: 1902729 - RNA, 19 nt, Artificial Sequence
  Description of Artificial Sequence: Synthetic oligonucleotide
cugaucugaggauccgccc

SEQ ID NO: 1902730 - RNA, 19 nt, Artificial Sequence
  Description of Artificial Sequence: Synthetic oligonucleotide
ugguuauaaugggaucugc

SEQ ID NO: 1902731 - RNA, 19 nt, Artificial Sequence
  Description of Artificial Sequence: Synthetic oligonucleotide
cauugaauuugggagaaaa

SEQ ID NO: 1902732 - RNA, 19 nt, Artificial Sequence
  Description of Artificial Sequence: Synthetic oligonucleotide
cuuguugugggaauucucu

SEQ ID NO: 1902733 - RNA, 19 nt, Artificial Sequence
  Description of Artificial Sequence: Synthetic oligonucleotide
ucagcacuggacuucugua

SEQ ID NO: 1902734 - RNA, 19 nt, Artificial Sequence
  Description of Artificial Sequence: Synthetic oligonucleotide
acuuuugaaccuggguaag

SEQ ID NO: 1902735 - RNA, 19 nt, Artificial Sequence
  Description of Artificial Sequence: Synthetic oligonucleotide
uggcuuguggggacaagcu

SEQ ID NO: 1902736 - RNA, 19 nt, Artificial Sequence
  Description of Artificial Sequence: Synthetic oligonucleotide
gcaagcuccaauccuucgg

SEQ ID NO: 1902737 - RNA, 19 nt, Artificial Sequence
  Description of Artificial Sequence: Synthetic oligonucleotide
gugugugauuuuauucccg

SEQ ID NO: 1902738 - RNA, 19 nt, Artificial Sequence
  Description of Artificial Sequence: Synthetic oligonucleotide
caaacuguaagaugcauuu

SEQ ID NO: 1902739 - RNA, 19 nt, Artificial Sequence
  Description of Artificial Sequence: Synthetic oligonucleotide
caccauuagaaccagacau

SEQ ID NO: 1902740 - RNA, 19 nt, Artificial Sequence
  Description of Artificial Sequence: Synthetic oligonucleotide
cuugagaguggcacugauc

SEQ ID NO: 1902741 - RNA, 19 nt, Artificial Sequence
  Description of Artificial Sequence: Synthetic oligonucleotide
ucccucuugagaguggcac

SEQ ID NO: 1902742 - RNA, 19 nt, Artificial Sequence
  Description of Artificial Sequence: Synthetic oligonucleotide
gacaugcuuuuguucguac

SEQ ID NO: 1902743 - RNA, 19 nt, Artificial Sequence
  Description of Artificial Sequence: Synthetic oligonucleotide
aacgauccacuccaucgua

SEQ ID NO: 1902744 - RNA, 19 nt, Artificial Sequence
  Description of Artificial Sequence: Synthetic oligonucleotide
aucucccucuucucagcac

SEQ ID NO: 1902745 - RNA, 19 nt, Artificial Sequence
  Description of Artificial Sequence: Synthetic oligonucleotide
cuugagcuggucacugaug

SEQ ID NO: 1902746 - RNA, 19 nt, Artificial Sequence
  Description of Artificial Sequence: Synthetic oligonucleotide
cuguccauuguuuccccug

SEQ ID NO: 1902747 - RNA, 19 nt, Artificial Sequence
  Description of Artificial Sequence: Synthetic oligonucleotide
acuccaucguacuggcuca

SEQ ID NO: 1902748 - RNA, 19 nt, Artificial Sequence
  Description of Artificial Sequence: Synthetic oligonucleotide
uccuucgggaagagaauuc

SEQ ID NO: 1902749 - RNA, 19 nt, Artificial Sequence
  Description of Artificial Sequence: Synthetic oligonucleotide
acgagucugaugaacugag

SEQ ID NO: 1902750 - RNA, 19 nt, Artificial Sequence
  Description of Artificial Sequence: Synthetic oligonucleotide
gacaagcuauggaccacgg

SEQ ID NO: 1902751 - RNA, 19 nt, Artificial Sequence
  Description of Artificial Sequence: Synthetic oligonucleotide
uugcggagcauaaguucug

SEQ ID NO: 1902752 - RNA, 19 nt, Artificial Sequence
  Description of Artificial Sequence: Synthetic oligonucleotide
uauucccgcugucaucccu

SEQ ID NO: 1902753 - RNA, 19 nt, Artificial Sequence
  Description of Artificial Sequence: Synthetic oligonucleotide
ucuccccaaaagaccccgg

SEQ ID NO: 1902754 - RNA, 19 nt, Artificial Sequence
  Description of Artificial Sequence: Synthetic oligonucleotide
agggugagacuguccauug

SEQ ID NO: 1902755 - RNA, 19 nt, Artificial Sequence
  Description of Artificial Sequence: Synthetic oligonucleotide
cucauuaggaaccucacuu

SEQ ID NO: 1902756 - RNA, 19 nt, Artificial Sequence
  Description of Artificial Sequence: Synthetic oligonucleotide
cauaccccuuauauaucac

SEQ ID NO: 1902757 - RNA, 19 nt, Artificial Sequence
  Description of Artificial Sequence: Synthetic oligonucleotide
uucuccgccacgagucuga

SEQ ID NO: 1902758 - RNA, 19 nt, Artificial Sequence
  Description of Artificial Sequence: Synthetic oligonucleotide
cuugccacucaacaagcca

SEQ ID NO: 1902759 - RNA, 19 nt, Artificial Sequence
  Description of Artificial Sequence: Synthetic oligonucleotide
gcugucaucccuuuuccac

SEQ ID NO: 1902760 - RNA, 19 nt, Artificial Sequence
  Description of Artificial Sequence: Synthetic oligonucleotide
ggaucaucaacauaccccu

SEQ ID NO: 1902761 - RNA, 19 nt, Artificial Sequence
  Description of Artificial Sequence: Synthetic oligonucleotide
accccggccaaccaguccu

SEQ ID NO: 1902762 - RNA, 19 nt, Artificial Sequence
  Description of Artificial Sequence: Synthetic oligonucleotide
ucaaucucguacaguccau

SEQ ID NO: 1902763 - RNA, 19 nt, Artificial Sequence
  Description of Artificial Sequence: Synthetic oligonucleotide
caggguuauagucuugcca

SEQ ID NO: 1902764 - RNA, 19 nt, Artificial Sequence
  Description of Artificial Sequence: Synthetic oligonucleotide
ucucccgccuccaggguga

SEQ ID NO: 1902765 - RNA, 19 nt, Artificial Sequence
  Description of Artificial Sequence: Synthetic oligonucleotide
cuggcuuguggggacaagc

SEQ ID NO: 1902766 - RNA, 19 nt, Artificial Sequence
  Description of Artificial Sequence: Synthetic oligonucleotide
ggagaaaaguugcuuucac

SEQ ID NO: 1902767 - RNA, 19 nt, Artificial Sequence
  Description of Artificial Sequence: Synthetic oligonucleotide
caaaaucuggcaagcucca

SEQ ID NO: 1902768 - RNA, 19 nt, Artificial Sequence
  Description of Artificial Sequence: Synthetic oligonucleotide
auacaaaaucuggcaagcu

SEQ ID NO: 1902769 - RNA, 19 nt, Artificial Sequence
  Description of Artificial Sequence: Synthetic oligonucleotide
agcccaccuucucauuagg

SEQ ID NO: 1902770 - RNA, 19 nt, Artificial Sequence
  Description of Artificial Sequence: Synthetic oligonucleotide
acgauccacuccaucguac

SEQ ID NO: 1902771 - RNA, 19 nt, Artificial Sequence
  Description of Artificial Sequence: Synthetic oligonucleotide
uuguugugggaauucucuu

SEQ ID NO: 1902772 - RNA, 19 nt, Artificial Sequence
  Description of Artificial Sequence: Synthetic oligonucleotide
aagaugcauuucccggaaa

SEQ ID NO: 1902773 - RNA, 19 nt, Artificial Sequence
  Description of Artificial Sequence: Synthetic oligonucleotide
gugauuuuauucccgcugu

SEQ ID NO: 1902774 - RNA, 19 nt, Artificial Sequence
  Description of Artificial Sequence: Synthetic oligonucleotide
ugucaguguuccgaggauc

SEQ ID NO: 1902775 - RNA, 19 nt, Artificial Sequence
  Description of Artificial Sequence: Synthetic oligonucleotide
agcuccaauccuucgggaa

SEQ ID NO: 1902776 - RNA, 19 nt, Artificial Sequence
  Description of Artificial Sequence: Synthetic oligonucleotide
aauccuucgggaagagaau

SEQ ID NO: 1902777 - RNA, 19 nt, Artificial Sequence
  Description of Artificial Sequence: Synthetic oligonucleotide
gcuccaauccuucgggaag

SEQ ID NO: 1902778 - RNA, 19 nt, Artificial Sequence
  Description of Artificial Sequence: Synthetic oligonucleotide
uaggaaccucacuucguuc

SEQ ID NO: 1902779 - RNA, 19 nt, Artificial Sequence
  Description of Artificial Sequence: Synthetic oligonucleotide
cuggacuucuguaaggagu

SEQ ID NO: 1902780 - RNA, 19 nt, Artificial Sequence
  Description of Artificial Sequence: Synthetic oligonucleotide
auuaggaaccucacuucgu

SEQ ID NO: 1902781 - RNA, 19 nt, Artificial Sequence
  Description of Artificial Sequence: Synthetic oligonucleotide
aagagugcaugcagcuucu

SEQ ID NO: 1902782 - RNA, 19 nt, Artificial Sequence
  Description of Artificial Sequence: Synthetic oligonucleotide
augcauugucaguguuccg

SEQ ID NO: 1902783 - RNA, 19 nt, Artificial Sequence
  Description of Artificial Sequence: Synthetic oligonucleotide
aguguauuccacaggguua

SEQ ID NO: 1902784 - RNA, 19 nt, Artificial Sequence
  Description of Artificial Sequence: Synthetic oligonucleotide
uccgaggaucaucaacaua

SEQ ID NO: 1902785 - RNA, 19 nt, Artificial Sequence
  Description of Artificial Sequence: Synthetic oligonucleotide
auuugggagaaaaguugcu

SEQ ID NO: 1902786 - RNA, 19 nt, Artificial Sequence
  Description of Artificial Sequence: Synthetic oligonucleotide
uuucaucgugguaguucac

SEQ ID NO: 1902787 - RNA, 19 nt, Artificial Sequence
  Description of Artificial Sequence: Synthetic oligonucleotide
uucucagcacuggacuucu

SEQ ID NO: 1902788 - RNA, 19 nt, Artificial Sequence
  Description of Artificial Sequence: Synthetic oligonucleotide
auaucacaagaugcucuug

SEQ ID NO: 1902789 - RNA, 19 nt, Artificial Sequence
  Description of Artificial Sequence: Synthetic oligonucleotide
aagaccccggccaaccagu

SEQ ID NO: 1902790 - RNA, 19 nt, Artificial Sequence
  Description of Artificial Sequence: Synthetic oligonucleotide
cacugaucuucuccccagg

SEQ ID NO: 1902791 - RNA, 19 nt, Artificial Sequence
  Description of Artificial Sequence: Synthetic oligonucleotide
guacuggcucauuugaccu

SEQ ID NO: 1902792 - RNA, 19 nt, Artificial Sequence
  Description of Artificial Sequence: Synthetic oligonucleotide
ggcauacagcuugagcugg

SEQ ID NO: 1902793 - RNA, 19 nt, Artificial Sequence
  Description of Artificial Sequence: Synthetic oligonucleotide
ugucaacccacuucaccuu

SEQ ID NO: 1902794 - RNA, 19 nt, Artificial Sequence
  Description of Artificial Sequence: Synthetic oligonucleotide
ucacuucguucaacuuuug

SEQ ID NO: 1902795 - RNA, 19 nt, Artificial Sequence
  Description of Artificial Sequence: Synthetic oligonucleotide
agcuauggaccacggcugu

SEQ ID NO: 1902796 - RNA, 19 nt, Artificial Sequence
  Description of Artificial Sequence: Synthetic oligonucleotide
cucaacaagccagcccacc

SEQ ID NO: 1902797 - RNA, 19 nt, Artificial Sequence
  Description of Artificial Sequence: Synthetic oligonucleotide
cuguaaggaguucagggcu

SEQ ID NO: 1902798 - RNA, 19 nt, Artificial Sequence
  Description of Artificial Sequence: Synthetic oligonucleotide
gguuauaaugggaucugca

SEQ ID NO: 1902799 - RNA, 19 nt, Artificial Sequence
  Description of Artificial Sequence: Synthetic oligonucleotide
aacucccucuugagagugg

SEQ ID NO: 1902800 - RNA, 19 nt, Artificial Sequence
  Description of Artificial Sequence: Synthetic oligonucleotide
cagcccaccuucucauuag

SEQ ID NO: 1902801 - RNA, 19 nt, Artificial Sequence
  Description of Artificial Sequence: Synthetic oligonucleotide
uuauucccgcugucauccc

SEQ ID NO: 1902802 - RNA, 19 nt, Artificial Sequence
  Description of Artificial Sequence: Synthetic oligonucleotide
caacccacuucaccuuccc

SEQ ID NO: 1902803 - RNA, 19 nt, Artificial Sequence
  Description of Artificial Sequence: Synthetic oligonucleotide
aggacggagacugcagugu

SEQ ID NO: 1902804 - RNA, 19 nt, Artificial Sequence
  Description of Artificial Sequence: Synthetic oligonucleotide
ccccuuauauaucacaaga

SEQ ID NO: 1902805 - RNA, 19 nt, Artificial Sequence
  Description of Artificial Sequence: Synthetic oligonucleotide
gcugaagagugcaugcagc

SEQ ID NO: 1902806 - RNA, 19 nt, Artificial Sequence
  Description of Artificial Sequence: Synthetic oligonucleotide
uggcugaagagugcaugca

SEQ ID NO: 1902807 - RNA, 19 nt, Artificial Sequence
  Description of Artificial Sequence: Synthetic oligonucleotide
gucaacccacuucaccuuc

SEQ ID NO: 1902808 - RNA, 19 nt, Artificial Sequence
  Description of Artificial Sequence: Synthetic oligonucleotide
gauuucugggccuuccauu

SEQ ID NO: 1902809 - RNA, 19 nt, Artificial Sequence
  Description of Artificial Sequence: Synthetic oligonucleotide
acauguccuuugcggagca

SEQ ID NO: 1902810 - RNA, 19 nt, Artificial Sequence
  Description of Artificial Sequence: Synthetic oligonucleotide
ggccccaucuccccaaaag

SEQ ID NO: 1902811 - RNA, 19 nt, Artificial Sequence
  Description of Artificial Sequence: Synthetic oligonucleotide
ugcccguccuuuucauuga

SEQ ID NO: 1902812 - RNA, 19 nt, Artificial Sequence
  Description of Artificial Sequence: Synthetic oligonucleotide
gcuucugucuccauccaug

SEQ ID NO: 1902813 - RNA, 19 nt, Artificial Sequence
  Description of Artificial Sequence: Synthetic oligonucleotide
uggcucuuucucuccacau

SEQ ID NO: 1902814 - RNA, 19 nt, Artificial Sequence
  Description of Artificial Sequence: Synthetic oligonucleotide
uccaauccuucgggaagag

SEQ ID NO: 1902815 - RNA, 19 nt, Artificial Sequence
  Description of Artificial Sequence: Synthetic oligonucleotide
cacugaucugaggauccgc

SEQ ID NO: 1902816 - RNA, 19 nt, Artificial Sequence
  Description of Artificial Sequence: Synthetic oligonucleotide
cagcgcucccagauggccc

SEQ ID NO: 1902817 - RNA, 19 nt, Artificial Sequence
  Description of Artificial Sequence: Synthetic oligonucleotide
caugcuuuuguucguacau

SEQ ID NO: 1902818 - RNA, 19 nt, Artificial Sequence
  Description of Artificial Sequence: Synthetic oligonucleotide
ugcggagcauaaguucugu

SEQ ID NO: 1902819 - RNA, 19 nt, Artificial Sequence
  Description of Artificial Sequence: Synthetic oligonucleotide
cuauggaccacggcuguca

SEQ ID NO: 1902820 - RNA, 19 nt, Artificial Sequence
  Description of Artificial Sequence: Synthetic oligonucleotide
accuucccggcaucaucuc

SEQ ID NO: 1902821 - RNA, 19 nt, Artificial Sequence
  Description of Artificial Sequence: Synthetic oligonucleotide
acucaacaagccagcccac

SEQ ID NO: 1902822 - RNA, 19 nt, Artificial Sequence
  Description of Artificial Sequence: Synthetic oligonucleotide
gaaccucacuucguucaac

SEQ ID NO: 1902823 - RNA, 19 nt, Artificial Sequence
  Description of Artificial Sequence: Synthetic oligonucleotide
gcacugaucuucuccccag

SEQ ID NO: 1902824 - RNA, 19 nt, Artificial Sequence
  Description of Artificial Sequence: Synthetic oligonucleotide
ccuggguaaggagaugucc

SEQ ID NO: 1902825 - RNA, 19 nt, Artificial Sequence
  Description of Artificial Sequence: Synthetic oligonucleotide
uucagggcuuccucaccaa

SEQ ID NO: 1902826 - RNA, 19 nt, Artificial Sequence
  Description of Artificial Sequence: Synthetic oligonucleotide
gguuauagucuugccacuc

SEQ ID NO: 1902827 - RNA, 19 nt, Artificial Sequence
  Description of Artificial Sequence: Synthetic oligonucleotide
cuccauccaugcauuguca

SEQ ID NO: 1902828 - RNA, 19 nt, Artificial Sequence
  Description of Artificial Sequence: Synthetic oligonucleotide
cacuucguucaacuuuuga

SEQ ID NO: 1902829 - RNA, 19 nt, Artificial Sequence
  Description of Artificial Sequence: Synthetic oligonucleotide
auccuucgggaagagaauu

SEQ ID NO: 1902830 - RNA, 19 nt, Artificial Sequence
  Description of Artificial Sequence: Synthetic oligonucleotide
aucucgcuucuccgccacg

SEQ ID NO: 1902831 - RNA, 19 nt, Artificial Sequence
  Description of Artificial Sequence: Synthetic oligonucleotide
caguguuccgaggaucauc

SEQ ID NO: 1902832 - RNA, 19 nt, Artificial Sequence
  Description of Artificial Sequence: Synthetic oligonucleotide
uacuggcucauuugaccuu

SEQ ID NO: 1902833 - RNA, 19 nt, Artificial Sequence
  Description of Artificial Sequence: Synthetic oligonucleotide
ccugggauugcccacucuc

SEQ ID NO: 1902834 - RNA, 19 nt, Artificial Sequence
  Description of Artificial Sequence: Synthetic oligonucleotide
auguccuuugcggagcaua

SEQ ID NO: 1902835 - RNA, 19 nt, Artificial Sequence
  Description of Artificial Sequence: Synthetic oligonucleotide
cacgagucugaugaacuga

SEQ ID NO: 1902836 - RNA, 19 nt, Artificial Sequence
  Description of Artificial Sequence: Synthetic oligonucleotide
auaaugggaucugcagcau

SEQ ID NO: 1902837 - RNA, 19 nt, Artificial Sequence
  Description of Artificial Sequence: Synthetic oligonucleotide
ccacauguccuuugcggag

SEQ ID NO: 1902838 - RNA, 19 nt, Artificial Sequence
  Description of Artificial Sequence: Synthetic oligonucleotide
cucccucuucucagcacug

SEQ ID NO: 1902839 - RNA, 19 nt, Artificial Sequence
  Description of Artificial Sequence: Synthetic oligonucleotide
uccacaugcccguccuuuu

SEQ ID NO: 1902840 - RNA, 19 nt, Artificial Sequence
  Description of Artificial Sequence: Synthetic oligonucleotide
acaugcccguccuuuucau

SEQ ID NO: 1902841 - RNA, 19 nt, Artificial Sequence
  Description of Artificial Sequence: Synthetic oligonucleotide
ccaugcauugucaguguuc

SEQ ID NO: 1902842 - RNA, 19 nt, Artificial Sequence
  Description of Artificial Sequence: Synthetic oligonucleotide
cauacagcuugagcugguc

SEQ ID NO: 1902843 - RNA, 19 nt, Artificial Sequence
  Description of Artificial Sequence: Synthetic oligonucleotide
ccacucaacaagccagccc

SEQ ID NO: 1902844 - RNA, 19 nt, Artificial Sequence
  Description of Artificial Sequence: Synthetic oligonucleotide
caguguauuccacaggguu

SEQ ID NO: 1902845 - RNA, 19 nt, Artificial Sequence
  Description of Artificial Sequence: Synthetic oligonucleotide
cuuucacugaucugaggau

SEQ ID NO: 1902846 - RNA, 19 nt, Artificial Sequence
  Description of Artificial Sequence: Synthetic oligonucleotide
guaaggaguucagggcuuc

SEQ ID NO: 1902847 - RNA, 19 nt, Artificial Sequence
  Description of Artificial Sequence: Synthetic oligonucleotide
ggguaaggagauguccgag

SEQ ID NO: 1902848 - RNA, 19 nt, Artificial Sequence
  Description of Artificial Sequence: Synthetic oligonucleotide
cgugguaguucacagcuuc

SEQ ID NO: 1902849 - RNA, 19 nt, Artificial Sequence
  Description of Artificial Sequence: Synthetic oligonucleotide
acggagacugcaguguauu

SEQ ID NO: 1902850 - RNA, 19 nt, Artificial Sequence
  Description of Artificial Sequence: Synthetic oligonucleotide
ccauuagaaccagacauga

SEQ ID NO: 1902851 - RNA, 19 nt, Artificial Sequence
  Description of Artificial Sequence: Synthetic oligonucleotide
caccugguuauaaugggau

SEQ ID NO: 1902852 - RNA, 19 nt, Artificial Sequence
  Description of Artificial Sequence: Synthetic oligonucleotide
gggagaaaaguugcuuuca

SEQ ID NO: 1902853 - RNA, 19 nt, Artificial Sequence
  Description of Artificial Sequence: Synthetic oligonucleotide
cucccagauggccccuggc

SEQ ID NO: 1902854 - RNA, 19 nt, Artificial Sequence
  Description of Artificial Sequence: Synthetic oligonucleotide
ccuuguugugggaauucuc

SEQ ID NO: 1902855 - RNA, 19 nt, Artificial Sequence
  Description of Artificial Sequence: Synthetic oligonucleotide
gcaugcagcuucuucucga

SEQ ID NO: 1902856 - RNA, 19 nt, Artificial Sequence
  Description of Artificial Sequence: Synthetic oligonucleotide
gggauugcccacucuccac

SEQ ID NO: 1902857 - RNA, 19 nt, Artificial Sequence
  Description of Artificial Sequence: Synthetic oligonucleotide
gugugauuuuauucccgcu

SEQ ID NO: 1902858 - RNA, 19 nt, Artificial Sequence
  Description of Artificial Sequence: Synthetic oligonucleotide
agacaugcuuuuguucgua

SEQ ID NO: 1902859 - RNA, 19 nt, Artificial Sequence
  Description of Artificial Sequence: Synthetic oligonucleotide
guccuuugcggagcauaag

SEQ ID NO: 1902860 - RNA, 19 nt, Artificial Sequence
  Description of Artificial Sequence: Synthetic oligonucleotide
cucagcacuggacuucugu

SEQ ID NO: 1902861 - RNA, 19 nt, Artificial Sequence
  Description of Artificial Sequence: Synthetic oligonucleotide
uucaccuucccggcaucau

SEQ ID NO: 1902862 - RNA, 19 nt, Artificial Sequence
  Description of Artificial Sequence: Synthetic oligonucleotide
cagaucuucaaagaacauu

SEQ ID NO: 1902863 - RNA, 19 nt, Artificial Sequence
  Description of Artificial Sequence: Synthetic oligonucleotide
cuucuccgccacgagucug

SEQ ID NO: 1902864 - RNA, 19 nt, Artificial Sequence
  Description of Artificial Sequence: Synthetic oligonucleotide
cccgcugucaucccuuuuc

SEQ ID NO: 1902865 - RNA, 19 nt, Artificial Sequence
  Description of Artificial Sequence: Synthetic oligonucleotide
ccacgagucugaugaacug

SEQ ID NO: 1902866 - RNA, 19 nt, Artificial Sequence
  Description of Artificial Sequence: Synthetic oligonucleotide
caacgauccacuccaucgu

SEQ ID NO: 1902867 - RNA, 19 nt, Artificial Sequence
  Description of Artificial Sequence: Synthetic oligonucleotide
uccgagccuuguuguggga

SEQ ID NO: 1902868 - RNA, 19 nt, Artificial Sequence
  Description of Artificial Sequence: Synthetic oligonucleotide
gucaucccuuuuccaccug

SEQ ID NO: 1902869 - RNA, 19 nt, Artificial Sequence
  Description of Artificial Sequence: Synthetic oligonucleotide
acagggugugugauuuuau

SEQ ID NO: 1902870 - RNA, 19 nt, Artificial Sequence
  Description of Artificial Sequence: Synthetic oligonucleotide
ggugagacuguccauuguu

SEQ ID NO: 1902871 - RNA, 19 nt, Artificial Sequence
  Description of Artificial Sequence: Synthetic oligonucleotide
caucaacauaccccuuaua

SEQ ID NO: 1902872 - RNA, 19 nt, Artificial Sequence
  Description of Artificial Sequence: Synthetic oligonucleotide
cccgccuccagggugagac

SEQ ID NO: 1902873 - RNA, 19 nt, Artificial Sequence
  Description of Artificial Sequence: Synthetic oligonucleotide
gcggagcauaaguucugug

SEQ ID NO: 1902874 - RNA, 19 nt, Artificial Sequence
  Description of Artificial Sequence: Synthetic oligonucleotide
uguauuccacaggguuaua

SEQ ID NO: 1902875 - RNA, 19 nt, Artificial Sequence
  Description of Artificial Sequence: Synthetic oligonucleotide
cgcuucuccgccacgaguc

SEQ ID NO: 1902876 - RNA, 19 nt, Artificial Sequence
  Description of Artificial Sequence: Synthetic oligonucleotide
agaccccggccaaccaguc

SEQ ID NO: 1902877 - RNA, 19 nt, Artificial Sequence
  Description of Artificial Sequence: Synthetic oligonucleotide
ccgcugucaucccuuuucc

SEQ ID NO: 1902878 - RNA, 19 nt, Artificial Sequence
  Description of Artificial Sequence: Synthetic oligonucleotide
auucccgcugucaucccuu

SEQ ID NO: 1902879 - RNA, 19 nt, Artificial Sequence
  Description of Artificial Sequence: Synthetic oligonucleotide
cugcaucugcagcgcuccc

SEQ ID NO: 1902880 - RNA, 19 nt, Artificial Sequence
  Description of Artificial Sequence: Synthetic oligonucleotide
ccaccugguuauaauggga

SEQ ID NO: 1902881 - RNA, 19 nt, Artificial Sequence
  Description of Artificial Sequence: Synthetic oligonucleotide
cagacaugcuuuuguucgu

SEQ ID NO: 1902882 - RNA, 19 nt, Artificial Sequence
  Description of Artificial Sequence: Synthetic oligonucleotide
uucccgcugucaucccuuu

SEQ ID NO: 1902883 - RNA, 19 nt, Artificial Sequence
  Description of Artificial Sequence: Synthetic oligonucleotide
ugggccccaucuccccaaa

SEQ ID NO: 1902884 - RNA, 19 nt, Artificial Sequence
  Description of Artificial Sequence: Synthetic oligonucleotide
gccacucaacaagccagcc

SEQ ID NO: 1902885 - RNA, 19 nt, Artificial Sequence
  Description of Artificial Sequence: Synthetic oligonucleotide
aggagauguccgagccuug

SEQ ID NO: 1902886 - RNA, 19 nt, Artificial Sequence
  Description of Artificial Sequence: Synthetic oligonucleotide
guuuccccuguuucaucgu

SEQ ID NO: 1902887 - RNA, 19 nt, Artificial Sequence
  Description of Artificial Sequence: Synthetic oligonucleotide
caucccuuuuccaccuggu

SEQ ID NO: 1902888 - RNA, 19 nt, Artificial Sequence
  Description of Artificial Sequence: Synthetic oligonucleotide
gcuuguggggacaagcuau

SEQ ID NO: 1902889 - RNA, 19 nt, Artificial Sequence
  Description of Artificial Sequence: Synthetic oligonucleotide
cauuucccggaaacagggu

SEQ ID NO: 1902890 - RNA, 19 nt, Artificial Sequence
  Description of Artificial Sequence: Synthetic oligonucleotide
cuccgccacgagucugaug

SEQ ID NO: 1902891 - RNA, 19 nt, Artificial Sequence
  Description of Artificial Sequence: Synthetic oligonucleotide
gagauguccgagccuuguu

SEQ ID NO: 1902892 - RNA, 19 nt, Artificial Sequence
  Description of Artificial Sequence: Synthetic oligonucleotide
cagcaggguccucacucca

SEQ ID NO: 1902893 - RNA, 19 nt, Artificial Sequence
  Description of Artificial Sequence: Synthetic oligonucleotide
ucccggaaacagggugugu

SEQ ID NO: 1902894 - RNA, 19 nt, Artificial Sequence
  Description of Artificial Sequence: Synthetic oligonucleotide
cccuuauauaucacaagau

SEQ ID NO: 1902895 - RNA, 19 nt, Artificial Sequence
  Description of Artificial Sequence: Synthetic oligonucleotide
cgaucucccucuucucagc

SEQ ID NO: 1902896 - RNA, 19 nt, Artificial Sequence
  Description of Artificial Sequence: Synthetic oligonucleotide
auucaacgauccacuccau

SEQ ID NO: 1902897 - RNA, 19 nt, Artificial Sequence
  Description of Artificial Sequence: Synthetic oligonucleotide
ggacggagacugcagugua

SEQ ID NO: 1902898 - RNA, 19 nt, Artificial Sequence
  Description of Artificial Sequence: Synthetic oligonucleotide
gugagacuguccauuguuu

SEQ ID NO: 1902899 - RNA, 19 nt, Artificial Sequence
  Description of Artificial Sequence: Synthetic oligonucleotide
ggguuauagucuugccacu

SEQ ID NO: 1902900 - RNA, 19 nt, Artificial Sequence
  Description of Artificial Sequence: Synthetic oligonucleotide
ucccgcugucaucccuuuu

SEQ ID NO: 1902901 - RNA, 19 nt, Artificial Sequence
  Description of Artificial Sequence: Synthetic oligonucleotide
gcuggucacugaugucaac

SEQ ID NO: 1902902 - RNA, 19 nt, Artificial Sequence
  Description of Artificial Sequence: Synthetic oligonucleotide
ccggaaacaggguguguga

SEQ ID NO: 1902903 - RNA, 19 nt, Artificial Sequence
  Description of Artificial Sequence: Synthetic oligonucleotide
ggccuuccauuuucaaucu

SEQ ID NO: 1902904 - RNA, 19 nt, Artificial Sequence
  Description of Artificial Sequence: Synthetic oligonucleotide
cccuuuuccaccugguuau

SEQ ID NO: 1902905 - RNA, 19 nt, Artificial Sequence
  Description of Artificial Sequence: Synthetic oligonucleotide
cggagcauaaguucugugu

SEQ ID NO: 1902906 - RNA, 19 nt, Artificial Sequence
  Description of Artificial Sequence: Synthetic oligonucleotide
ccacaugcccguccuuuuc

SEQ ID NO: 1902907 - RNA, 19 nt, Artificial Sequence
  Description of Artificial Sequence: Synthetic oligonucleotide
gccacgagucugaugaacu

SEQ ID NO: 1902908 - RNA, 19 nt, Artificial Sequence
  Description of Artificial Sequence: Synthetic oligonucleotide
guguuccgaggaucaucaa

SEQ ID NO: 1902909 - RNA, 19 nt, Artificial Sequence
  Description of Artificial Sequence: Synthetic oligonucleotide
cuguccucccugcaggauu

SEQ ID NO: 1902910 - RNA, 19 nt, Artificial Sequence
  Description of Artificial Sequence: Synthetic oligonucleotide
gacggagacugcaguguau

SEQ ID NO: 1902911 - RNA, 19 nt, Artificial Sequence
  Description of Artificial Sequence: Synthetic oligonucleotide
ggaccacggcugucagcag

SEQ ID NO: 1902912 - RNA, 19 nt, Artificial Sequence
  Description of Artificial Sequence: Synthetic oligonucleotide
ccguccuuuucauugaauu

SEQ ID NO: 1902913 - RNA, 19 nt, Artificial Sequence
  Description of Artificial Sequence: Synthetic oligonucleotide
gcaugguuugggccccauc

SEQ ID NO: 1902914 - RNA, 19 nt, Artificial Sequence
  Description of Artificial Sequence: Synthetic oligonucleotide
ggacuucuguaaggaguuc

SEQ ID NO: 1902915 - RNA, 19 nt, Artificial Sequence
  Description of Artificial Sequence: Synthetic oligonucleotide
agagugcaugcagcuucuu

SEQ ID NO: 1902916 - RNA, 19 nt, Artificial Sequence
  Description of Artificial Sequence: Synthetic oligonucleotide
ggagauguccgagccuugu

SEQ ID NO: 1902917 - RNA, 19 nt, Artificial Sequence
  Description of Artificial Sequence: Synthetic oligonucleotide
cccaaaagaccccggccaa

SEQ ID NO: 1902918 - RNA, 19 nt, Artificial Sequence
  Description of Artificial Sequence: Synthetic oligonucleotide
gaauucucuuuggcaccau

SEQ ID NO: 1902919 - RNA, 19 nt, Artificial Sequence
  Description of Artificial Sequence: Synthetic oligonucleotide
gcccaccuucucauuagga

SEQ ID NO: 1902920 - RNA, 19 nt, Artificial Sequence
  Description of Artificial Sequence: Synthetic oligonucleotide
ccagcccaccuucucauua

SEQ ID NO: 1902921 - RNA, 19 nt, Artificial Sequence
  Description of Artificial Sequence: Synthetic oligonucleotide
gcuauggaccacggcuguc

SEQ ID NO: 1902922 - RNA, 19 nt, Artificial Sequence
  Description of Artificial Sequence: Synthetic oligonucleotide
cggagacugcaguguauuc

SEQ ID NO: 1902923 - RNA, 19 nt, Artificial Sequence
  Description of Artificial Sequence: Synthetic oligonucleotide
ccuuugcggagcauaaguu

SEQ ID NO: 1902924 - RNA, 19 nt, Artificial Sequence
  Description of Artificial Sequence: Synthetic oligonucleotide
gccccuggcuuguggggac

SEQ ID NO: 1902925 - RNA, 19 nt, Artificial Sequence
  Description of Artificial Sequence: Synthetic oligonucleotide
gccaaccaguccuguccuc

SEQ ID NO: 1902926 - RNA, 19 nt, Artificial Sequence
  Description of Artificial Sequence: Synthetic oligonucleotide
ccggccaaccaguccuguc

SEQ ID NO: 1902927 - RNA, 19 nt, Artificial Sequence
  Description of Artificial Sequence: Synthetic oligonucleotide
gcuucuccgccacgagucu

SEQ ID NO: 1902928 - RNA, 19 nt, Artificial Sequence
  Description of Artificial Sequence: Synthetic oligonucleotide
ccaucguacuggcucauuu

SEQ ID NO: 1902929 - RNA, 19 nt, Artificial Sequence
  Description of Artificial Sequence: Synthetic oligonucleotide
cucccgccuccagggugag

SEQ ID NO: 1902930 - RNA, 19 nt, Artificial Sequence
  Description of Artificial Sequence: Synthetic oligonucleotide
gcccguccuuuucauugaa

SEQ ID NO: 1902931 - RNA, 19 nt, Artificial Sequence
  Description of Artificial Sequence: Synthetic oligonucleotide
ccaggacggagacugcagu

SEQ ID NO: 1902932 - RNA, 19 nt, Artificial Sequence
  Description of Artificial Sequence: Synthetic oligonucleotide
ccaauccuucgggaagaga

SEQ ID NO: 1902933 - RNA, 19 nt, Artificial Sequence
  Description of Artificial Sequence: Synthetic oligonucleotide
ucccgccuccagggugaga

SEQ ID NO: 1902934 - RNA, 19 nt, Artificial Sequence
  Description of Artificial Sequence: Synthetic oligonucleotide
caucucccgccuccagggu

SEQ ID NO: 1902935 - RNA, 19 nt, Artificial Sequence
  Description of Artificial Sequence: Synthetic oligonucleotide
ccgagccuuguugugggaa

SEQ ID NO: 1902936 - RNA, 19 nt, Artificial Sequence
  Description of Artificial Sequence: Synthetic oligonucleotide
ccccggccaaccaguccug

SEQ ID NO: 1902937 - RNA, 19 nt, Artificial Sequence
  Description of Artificial Sequence: Synthetic oligonucleotide
cccagauggccccuggcuu

SEQ ID NO: 1902938 - RNA, 19 nt, Artificial Sequence
  Description of Artificial Sequence: Synthetic oligonucleotide
cuguuucaucgugguaguu

SEQ ID NO: 1902939 - RNA, 19 nt, Artificial Sequence
  Description of Artificial Sequence: Synthetic oligonucleotide
cagcaugguuugggcccca

SEQ ID NO: 1902940 - RNA, 19 nt, Artificial Sequence
  Description of Artificial Sequence: Synthetic oligonucleotide
ccggcaucaucucccgccu

SEQ ID NO: 1902941 - RNA, 19 nt, Artificial Sequence
  Description of Artificial Sequence: Synthetic oligonucleotide
cauguccuuugcggagcau

SEQ ID NO: 1902942 - RNA, 19 nt, Artificial Sequence
  Description of Artificial Sequence: Synthetic oligonucleotide
cuccaucguacuggcucau

SEQ ID NO: 1902943 - RNA, 19 nt, Artificial Sequence
  Description of Artificial Sequence: Synthetic oligonucleotide
ccgccacgagucugaugaa

SEQ ID NO: 1902944 - RNA, 19 nt, Artificial Sequence
  Description of Artificial Sequence: Synthetic oligonucleotide
ccacuccaucguacuggcu

SEQ ID NO: 1902945 - RNA, 19 nt, Artificial Sequence
  Description of Artificial Sequence: Synthetic oligonucleotide
cccugggauugcccacucu

SEQ ID NO: 1902946 - RNA, 19 nt, Artificial Sequence
  Description of Artificial Sequence: Synthetic oligonucleotide
cccggccaaccaguccugu

SEQ ID NO: 1902947 - RNA, 19 nt, Artificial Sequence
  Description of Artificial Sequence: Synthetic oligonucleotide
gcgcucccagauggccccu

SEQ ID NO: 1902948 - RNA, 19 nt, Artificial Sequence
  Description of Artificial Sequence: Synthetic oligonucleotide
aagaaguccgccuugcacc

SEQ ID NO: 1902949 - RNA, 19 nt, Artificial Sequence
  Description of Artificial Sequence: Synthetic oligonucleotide
ucauguauuucucaggcag

SEQ ID NO: 1902950 - RNA, 19 nt, Artificial Sequence
  Description of Artificial Sequence: Synthetic oligonucleotide
aacuugacgaggaagaagg

SEQ ID NO: 1902951 - RNA, 19 nt, Artificial Sequence
  Description of Artificial Sequence: Synthetic oligonucleotide
uccaguaaagcgcagaaca

SEQ ID NO: 1902952 - RNA, 19 nt, Artificial Sequence
  Description of Artificial Sequence: Synthetic oligonucleotide
ugugcagaugacauggacg

SEQ ID NO: 1902953 - RNA, 19 nt, Artificial Sequence
  Description of Artificial Sequence: Synthetic oligonucleotide
ucuuugacaagcuuguaga

SEQ ID NO: 1902954 - RNA, 19 nt, Artificial Sequence
  Description of Artificial Sequence: Synthetic oligonucleotide
aaccugguauucccgaacc

SEQ ID NO: 1902955 - RNA, 19 nt, Artificial Sequence
  Description of Artificial Sequence: Synthetic oligonucleotide
aggaagaaggcauuugggg

SEQ ID NO: 1902956 - RNA, 19 nt, Artificial Sequence
  Description of Artificial Sequence: Synthetic oligonucleotide
ucaucugugggucaaugcc

SEQ ID NO: 1902957 - RNA, 19 nt, Artificial Sequence
  Description of Artificial Sequence: Synthetic oligonucleotide
ugaacugugcuguugaggu

SEQ ID NO: 1902958 - RNA, 19 nt, Artificial Sequence
  Description of Artificial Sequence: Synthetic oligonucleotide
uuguggaccucaaaggugc

SEQ ID NO: 1902959 - RNA, 19 nt, Artificial Sequence
  Description of Artificial Sequence: Synthetic oligonucleotide
uucgaagacaaaagcaaug

SEQ ID NO: 1902960 - RNA, 19 nt, Artificial Sequence
  Description of Artificial Sequence: Synthetic oligonucleotide
aacuuguucugcaggacgc

SEQ ID NO: 1902961 - RNA, 19 nt, Artificial Sequence
  Description of Artificial Sequence: Synthetic oligonucleotide
gaagcgaccguucuccagg

SEQ ID NO: 1902962 - RNA, 19 nt, Artificial Sequence
  Description of Artificial Sequence: Synthetic oligonucleotide
uguacugugagcugacccc

SEQ ID NO: 1902963 - RNA, 19 nt, Artificial Sequence
  Description of Artificial Sequence: Synthetic oligonucleotide
gaaagcaggguuugucugg

SEQ ID NO: 1902964 - RNA, 19 nt, Artificial Sequence
  Description of Artificial Sequence: Synthetic oligonucleotide
agacaaucugugcagauga

SEQ ID NO: 1902965 - RNA, 19 nt, Artificial Sequence
  Description of Artificial Sequence: Synthetic oligonucleotide
gaugacauggacgccaugc

SEQ ID NO: 1902966 - RNA, 19 nt, Artificial Sequence
  Description of Artificial Sequence: Synthetic oligonucleotide
gauguguacaaacaggugu

SEQ ID NO: 1902967 - RNA, 19 nt, Artificial Sequence
  Description of Artificial Sequence: Synthetic oligonucleotide
guagacauggugcugugcc

SEQ ID NO: 1902968 - RNA, 19 nt, Artificial Sequence
  Description of Artificial Sequence: Synthetic oligonucleotide
uugacgaggaagaaggcau

SEQ ID NO: 1902969 - RNA, 19 nt, Artificial Sequence
  Description of Artificial Sequence: Synthetic oligonucleotide
gacaagcuuguagacaugg

SEQ ID NO: 1902970 - RNA, 19 nt, Artificial Sequence
  Description of Artificial Sequence: Synthetic oligonucleotide
agguguguggaagaagucc

SEQ ID NO: 1902971 - RNA, 19 nt, Artificial Sequence
  Description of Artificial Sequence: Synthetic oligonucleotide
cauguacucgcacaugggg

SEQ ID NO: 1902972 - RNA, 19 nt, Artificial Sequence
  Description of Artificial Sequence: Synthetic oligonucleotide
aacagguguuugcuguacg

SEQ ID NO: 1902973 - RNA, 19 nt, Artificial Sequence
  Description of Artificial Sequence: Synthetic oligonucleotide
ucguagaguuccuucagcc

SEQ ID NO: 1902974 - RNA, 19 nt, Artificial Sequence
  Description of Artificial Sequence: Synthetic oligonucleotide
augccaaccugguauuccc

SEQ ID NO: 1902975 - RNA, 19 nt, Artificial Sequence
  Description of Artificial Sequence: Synthetic oligonucleotide
auggaugcgguacacgaag

SEQ ID NO: 1902976 - RNA, 19 nt, Artificial Sequence
  Description of Artificial Sequence: Synthetic oligonucleotide
gacgccaugcuuuggagug

SEQ ID NO: 1902977 - RNA, 19 nt, Artificial Sequence
  Description of Artificial Sequence: Synthetic oligonucleotide
ucauagaucugccgaacgu

SEQ ID NO: 1902978 - RNA, 19 nt, Artificial Sequence
  Description of Artificial Sequence: Synthetic oligonucleotide
cacuccagaaccuugagga

SEQ ID NO: 1902979 - RNA, 19 nt, Artificial Sequence
  Description of Artificial Sequence: Synthetic oligonucleotide
cauguauuucucaggcagg

SEQ ID NO: 1902980 - RNA, 19 nt, Artificial Sequence
  Description of Artificial Sequence: Synthetic oligonucleotide
caagcuuguagacauggug

SEQ ID NO: 1902981 - RNA, 19 nt, Artificial Sequence
  Description of Artificial Sequence: Synthetic oligonucleotide
ugugcuguugaggucagcc

SEQ ID NO: 1902982 - RNA, 19 nt, Artificial Sequence
  Description of Artificial Sequence: Synthetic oligonucleotide
uuugacaagcuuguagaca

SEQ ID NO: 1902983 - RNA, 19 nt, Artificial Sequence
  Description of Artificial Sequence: Synthetic oligonucleotide
aggguuuccugugaguccc

SEQ ID NO: 1902984 - RNA, 19 nt, Artificial Sequence
  Description of Artificial Sequence: Synthetic oligonucleotide
aaacagguguuugcuguac

SEQ ID NO: 1902985 - RNA, 19 nt, Artificial Sequence
  Description of Artificial Sequence: Synthetic oligonucleotide
uauucccgaaccuucuccc

SEQ ID NO: 1902986 - RNA, 19 nt, Artificial Sequence
  Description of Artificial Sequence: Synthetic oligonucleotide
agggaggcagccugggucc

SEQ ID NO: 1902987 - RNA, 19 nt, Artificial Sequence
  Description of Artificial Sequence: Synthetic oligonucleotide
gaagaaguccgccuugcac

SEQ ID NO: 1902988 - RNA, 19 nt, Artificial Sequence
  Description of Artificial Sequence: Synthetic oligonucleotide
uguuguccuagaagagggg

SEQ ID NO: 1902989 - RNA, 19 nt, Artificial Sequence
  Description of Artificial Sequence: Synthetic oligonucleotide
agcaggguuugucuggccg

SEQ ID NO: 1902990 - RNA, 19 nt, Artificial Sequence
  Description of Artificial Sequence: Synthetic oligonucleotide
ucucguagaguuccuucag

SEQ ID NO: 1902991 - RNA, 19 nt, Artificial Sequence
  Description of Artificial Sequence: Synthetic oligonucleotide
aguaaagcgcagaacagug

SEQ ID NO: 1902992 - RNA, 19 nt, Artificial Sequence
  Description of Artificial Sequence: Synthetic oligonucleotide
acguccacugccuccagcg

SEQ ID NO: 1902993 - RNA, 19 nt, Artificial Sequence
  Description of Artificial Sequence: Synthetic oligonucleotide
aagcgcagaacaguggcag

SEQ ID NO: 1902994 - RNA, 19 nt, Artificial Sequence
  Description of Artificial Sequence: Synthetic oligonucleotide
aagcgaccguucuccaggc

SEQ ID NO: 1902995 - RNA, 19 nt, Artificial Sequence
  Description of Artificial Sequence: Synthetic oligonucleotide
acucgugaccaccugcagg

SEQ ID NO: 1902996 - RNA, 19 nt, Artificial Sequence
  Description of Artificial Sequence: Synthetic oligonucleotide
uccugaacugugcuguuga

SEQ ID NO: 1902997 - RNA, 19 nt, Artificial Sequence
  Description of Artificial Sequence: Synthetic oligonucleotide
auggucaugcugucggccg

SEQ ID NO: 1902998 - RNA, 19 nt, Artificial Sequence
  Description of Artificial Sequence: Synthetic oligonucleotide
agacauggugcugugcccc

SEQ ID NO: 1902999 - RNA, 19 nt, Artificial Sequence
  Description of Artificial Sequence: Synthetic oligonucleotide
cuuguggaccucaaaggug

SEQ ID NO: 1903000 - RNA, 19 nt, Artificial Sequence
  Description of Artificial Sequence: Synthetic oligonucleotide
uugccgaaggagcacaccu

SEQ ID NO: 1903001 - RNA, 19 nt, Artificial Sequence
  Description of Artificial Sequence: Synthetic oligonucleotide
uccagaaccuugaggaggu

SEQ ID NO: 1903002 - RNA, 19 nt, Artificial Sequence
  Description of Artificial Sequence: Synthetic oligonucleotide
gacgcugauggucaugcug

SEQ ID NO: 1903003 - RNA, 19 nt, Artificial Sequence
  Description of Artificial Sequence: Synthetic oligonucleotide
uacaaacagguguuugcug

SEQ ID NO: 1903004 - RNA, 19 nt, Artificial Sequence
  Description of Artificial Sequence: Synthetic oligonucleotide
ucccguugcaccuccauga

SEQ ID NO: 1903005 - RNA, 19 nt, Artificial Sequence
  Description of Artificial Sequence: Synthetic oligonucleotide
aaugacgagcaggguuucc

SEQ ID NO: 1903006 - RNA, 19 nt, Artificial Sequence
  Description of Artificial Sequence: Synthetic oligonucleotide
agacagccgggguaaaggg

SEQ ID NO: 1903007 - RNA, 19 nt, Artificial Sequence
  Description of Artificial Sequence: Synthetic oligonucleotide
cuguacugugagcugaccc

SEQ ID NO: 1903008 - RNA, 19 nt, Artificial Sequence
  Description of Artificial Sequence: Synthetic oligonucleotide
gaacuugacgaggaagaag

SEQ ID NO: 1903009 - RNA, 19 nt, Artificial Sequence
  Description of Artificial Sequence: Synthetic oligonucleotide
cuugauguccugagacggg

SEQ ID NO: 1903010 - RNA, 19 nt, Artificial Sequence
  Description of Artificial Sequence: Synthetic oligonucleotide
gaugggguaggcaggcugg

SEQ ID NO: 1903011 - RNA, 19 nt, Artificial Sequence
  Description of Artificial Sequence: Synthetic oligonucleotide
agcaaugacgagcaggguu

SEQ ID NO: 1903012 - RNA, 19 nt, Artificial Sequence
  Description of Artificial Sequence: Synthetic oligonucleotide
aaaggugcgcuagucuuug

SEQ ID NO: 1903013 - RNA, 19 nt, Artificial Sequence
  Description of Artificial Sequence: Synthetic oligonucleotide
aggugcgcuagucuuugac

SEQ ID NO: 1903014 - RNA, 19 nt, Artificial Sequence
  Description of Artificial Sequence: Synthetic oligonucleotide
ugagcugaccccguagaag

SEQ ID NO: 1903015 - RNA, 19 nt, Artificial Sequence
  Description of Artificial Sequence: Synthetic oligonucleotide
cuugaggccugguggagcc

SEQ ID NO: 1903016 - RNA, 19 nt, Artificial Sequence
  Description of Artificial Sequence: Synthetic oligonucleotide
cuccagaaccuugaggagg

SEQ ID NO: 1903017 - RNA, 19 nt, Artificial Sequence
  Description of Artificial Sequence: Synthetic oligonucleotide
cugggucccagccugaaac

SEQ ID NO: 1903018 - RNA, 19 nt, Artificial Sequence
  Description of Artificial Sequence: Synthetic oligonucleotide
uggccgauguguacaaaca

SEQ ID NO: 1903019 - RNA, 19 nt, Artificial Sequence
  Description of Artificial Sequence: Synthetic oligonucleotide
ucacuugaggccuggugga

SEQ ID NO: 1903020 - RNA, 19 nt, Artificial Sequence
  Description of Artificial Sequence: Synthetic oligonucleotide
agcggugggucugagaaag

SEQ ID NO: 1903021 - RNA, 19 nt, Artificial Sequence
  Description of Artificial Sequence: Synthetic oligonucleotide
ugaccauguacucgcacau

SEQ ID NO: 1903022 - RNA, 19 nt, Artificial Sequence
  Description of Artificial Sequence: Synthetic oligonucleotide
gacgcuggcagagacaauc

SEQ ID NO: 1903023 - RNA, 19 nt, Artificial Sequence
  Description of Artificial Sequence: Synthetic oligonucleotide
gagcaugugugcuggggcc

SEQ ID NO: 1903024 - RNA, 19 nt, Artificial Sequence
  Description of Artificial Sequence: Synthetic oligonucleotide
uugauguccugagacgggc

SEQ ID NO: 1903025 - RNA, 19 nt, Artificial Sequence
  Description of Artificial Sequence: Synthetic oligonucleotide
cacgaagcgaccguucucc

SEQ ID NO: 1903026 - RNA, 19 nt, Artificial Sequence
  Description of Artificial Sequence: Synthetic oligonucleotide
guaaagcgcagaacagugg

SEQ ID NO: 1903027 - RNA, 19 nt, Artificial Sequence
  Description of Artificial Sequence: Synthetic oligonucleotide
uugagcguugguggcaggg

SEQ ID NO: 1903028 - RNA, 19 nt, Artificial Sequence
  Description of Artificial Sequence: Synthetic oligonucleotide
uguguggaagaaguccgcc

SEQ ID NO: 1903029 - RNA, 19 nt, Artificial Sequence
  Description of Artificial Sequence: Synthetic oligonucleotide
ugagucccgacucgugacc

SEQ ID NO: 1903030 - RNA, 19 nt, Artificial Sequence
  Description of Artificial Sequence: Synthetic oligonucleotide
cagaacaguggcagggagc

SEQ ID NO: 1903031 - RNA, 19 nt, Artificial Sequence
  Description of Artificial Sequence: Synthetic oligonucleotide
cuugaugccaaccugguau

SEQ ID NO: 1903032 - RNA, 19 nt, Artificial Sequence
  Description of Artificial Sequence: Synthetic oligonucleotide
aaacccacgggugggugag

SEQ ID NO: 1903033 - RNA, 19 nt, Artificial Sequence
  Description of Artificial Sequence: Synthetic oligonucleotide
acuugaggccugguggagc

SEQ ID NO: 1903034 - RNA, 19 nt, Artificial Sequence
  Description of Artificial Sequence: Synthetic oligonucleotide
uguggaccucaaaggugcg

SEQ ID NO: 1903035 - RNA, 19 nt, Artificial Sequence
  Description of Artificial Sequence: Synthetic oligonucleotide
uuugucuggccgaugugua

SEQ ID NO: 1903036 - RNA, 19 nt, Artificial Sequence
  Description of Artificial Sequence: Synthetic oligonucleotide
uguugagcguugguggcag

SEQ ID NO: 1903037 - RNA, 19 nt, Artificial Sequence
  Description of Artificial Sequence: Synthetic oligonucleotide
cugccgaacguccacugcc

SEQ ID NO: 1903038 - RNA, 19 nt, Artificial Sequence
  Description of Artificial Sequence: Synthetic oligonucleotide
uggagugcuuuguccuugg

SEQ ID NO: 1903039 - RNA, 19 nt, Artificial Sequence
  Description of Artificial Sequence: Synthetic oligonucleotide
cuggcggagacuucgaaga

SEQ ID NO: 1903040 - RNA, 19 nt, Artificial Sequence
  Description of Artificial Sequence: Synthetic oligonucleotide
cucgugaccaccugcagga

SEQ ID NO: 1903041 - RNA, 19 nt, Artificial Sequence
  Description of Artificial Sequence: Synthetic oligonucleotide
uggaugcgguacacgaagc

SEQ ID NO: 1903042 - RNA, 19 nt, Artificial Sequence
  Description of Artificial Sequence: Synthetic oligonucleotide
ugcgguacacgaagcgacc

SEQ ID NO: 1903043 - RNA, 19 nt, Artificial Sequence
  Description of Artificial Sequence: Synthetic oligonucleotide
cauagaucugccgaacguc

SEQ ID NO: 1903044 - RNA, 19 nt, Artificial Sequence
  Description of Artificial Sequence: Synthetic oligonucleotide
uacuccgucuccacuuucu

SEQ ID NO: 1903045 - RNA, 19 nt, Artificial Sequence
  Description of Artificial Sequence: Synthetic oligonucleotide
guacugugagcugaccccg

SEQ ID NO: 1903046 - RNA, 19 nt, Artificial Sequence
  Description of Artificial Sequence: Synthetic oligonucleotide
gggucaaugcccaggaagg

SEQ ID NO: 1903047 - RNA, 19 nt, Artificial Sequence
  Description of Artificial Sequence: Synthetic oligonucleotide
augacauggacgccaugcu

SEQ ID NO: 1903048 - RNA, 19 nt, Artificial Sequence
  Description of Artificial Sequence: Synthetic oligonucleotide
ugcgcuagucuuugacaag

SEQ ID NO: 1903049 - RNA, 19 nt, Artificial Sequence
  Description of Artificial Sequence: Synthetic oligonucleotide
uagaucugccgaacgucca

SEQ ID NO: 1903050 - RNA, 19 nt, Artificial Sequence
  Description of Artificial Sequence: Synthetic oligonucleotide
gagaaagcaggguuugucu

SEQ ID NO: 1903051 - RNA, 19 nt, Artificial Sequence
  Description of Artificial Sequence: Synthetic oligonucleotide
uuccugugagucccgacuc

SEQ ID NO: 1903052 - RNA, 19 nt, Artificial Sequence
  Description of Artificial Sequence: Synthetic oligonucleotide
gacauggugcugugccccg

SEQ ID NO: 1903053 - RNA, 19 nt, Artificial Sequence
  Description of Artificial Sequence: Synthetic oligonucleotide
ugagcguugguggcagggg

SEQ ID NO: 1903054 - RNA, 19 nt, Artificial Sequence
  Description of Artificial Sequence: Synthetic oligonucleotide
gagguggagaagacagccg

SEQ ID NO: 1903055 - RNA, 19 nt, Artificial Sequence
  Description of Artificial Sequence: Synthetic oligonucleotide
ugugccccgugcucgcugg

SEQ ID NO: 1903056 - RNA, 19 nt, Artificial Sequence
  Description of Artificial Sequence: Synthetic oligonucleotide
auggacgccaugcuuugga

SEQ ID NO: 1903057 - RNA, 19 nt, Artificial Sequence
  Description of Artificial Sequence: Synthetic oligonucleotide
gacagccgggguaaagggg

SEQ ID NO: 1903058 - RNA, 19 nt, Artificial Sequence
  Description of Artificial Sequence: Synthetic oligonucleotide
uggacgccaugcuuuggag

SEQ ID NO: 1903059 - RNA, 19 nt, Artificial Sequence
  Description of Artificial Sequence: Synthetic oligonucleotide
gaugucacuugaggccugg

SEQ ID NO: 1903060 - RNA, 19 nt, Artificial Sequence
  Description of Artificial Sequence: Synthetic oligonucleotide
acacgaagcgaccguucuc

SEQ ID NO: 1903061 - RNA, 19 nt, Artificial Sequence
  Description of Artificial Sequence: Synthetic oligonucleotide
cucuucucuccaguaaagc

SEQ ID NO: 1903062 - RNA, 19 nt, Artificial Sequence
  Description of Artificial Sequence: Synthetic oligonucleotide
ugcuguacgugucgggguc

SEQ ID NO: 1903063 - RNA, 19 nt, Artificial Sequence
  Description of Artificial Sequence: Synthetic oligonucleotide
ggaugcgguacacgaagcg

SEQ ID NO: 1903064 - RNA, 19 nt, Artificial Sequence
  Description of Artificial Sequence: Synthetic oligonucleotide
uggagaagacagccggggu

SEQ ID NO: 1903065 - RNA, 19 nt, Artificial Sequence
  Description of Artificial Sequence: Synthetic oligonucleotide
acauggacgccaugcuuug

SEQ ID NO: 1903066 - RNA, 19 nt, Artificial Sequence
  Description of Artificial Sequence: Synthetic oligonucleotide
agagacaaucugugcagau

SEQ ID NO: 1903067 - RNA, 19 nt, Artificial Sequence
  Description of Artificial Sequence: Synthetic oligonucleotide
gcaggggacggcuggaugg

SEQ ID NO: 1903068 - RNA, 19 nt, Artificial Sequence
  Description of Artificial Sequence: Synthetic oligonucleotide
gaccucaaaggugcgcuag

SEQ ID NO: 1903069 - RNA, 19 nt, Artificial Sequence
  Description of Artificial Sequence: Synthetic oligonucleotide
gaugcgguacacgaagcga

SEQ ID NO: 1903070 - RNA, 19 nt, Artificial Sequence
  Description of Artificial Sequence: Synthetic oligonucleotide
ugauggucaugcugucggc

SEQ ID NO: 1903071 - RNA, 19 nt, Artificial Sequence
  Description of Artificial Sequence: Synthetic oligonucleotide
agcgcagaacaguggcagg

SEQ ID NO: 1903072 - RNA, 19 nt, Artificial Sequence
  Description of Artificial Sequence: Synthetic oligonucleotide
agacgggccaggcuguugu

SEQ ID NO: 1903073 - RNA, 19 nt, Artificial Sequence
  Description of Artificial Sequence: Synthetic oligonucleotide
agaaccuugaggaggugga

SEQ ID NO: 1903074 - RNA, 19 nt, Artificial Sequence
  Description of Artificial Sequence: Synthetic oligonucleotide
ugacaagcuuguagacaug

SEQ ID NO: 1903075 - RNA, 19 nt, Artificial Sequence
  Description of Artificial Sequence: Synthetic oligonucleotide
auacuccgucuccacuuuc

SEQ ID NO: 1903076 - RNA, 19 nt, Artificial Sequence
  Description of Artificial Sequence: Synthetic oligonucleotide
cguagaaggcuccagggcc

SEQ ID NO: 1903077 - RNA, 19 nt, Artificial Sequence
  Description of Artificial Sequence: Synthetic oligonucleotide
ugucggccgagcuguacug

SEQ ID NO: 1903078 - RNA, 19 nt, Artificial Sequence
  Description of Artificial Sequence: Synthetic oligonucleotide
cuugacgaggaagaaggca

SEQ ID NO: 1903079 - RNA, 19 nt, Artificial Sequence
  Description of Artificial Sequence: Synthetic oligonucleotide
uuuggagugcuuuguccuu

SEQ ID NO: 1903080 - RNA, 19 nt, Artificial Sequence
  Description of Artificial Sequence: Synthetic oligonucleotide
ggagaccugguccagguuc

SEQ ID NO: 1903081 - RNA, 19 nt, Artificial Sequence
  Description of Artificial Sequence: Synthetic oligonucleotide
ugaugucacuugaggccug

SEQ ID NO: 1903082 - RNA, 19 nt, Artificial Sequence
  Description of Artificial Sequence: Synthetic oligonucleotide
cagggagcaugugugcugg

SEQ ID NO: 1903083 - RNA, 19 nt, Artificial Sequence
  Description of Artificial Sequence: Synthetic oligonucleotide
gugcgcuagucuuugacaa

SEQ ID NO: 1903084 - RNA, 19 nt, Artificial Sequence
  Description of Artificial Sequence: Synthetic oligonucleotide
gucggggucccguugcacc

SEQ ID NO: 1903085 - RNA, 19 nt, Artificial Sequence
  Description of Artificial Sequence: Synthetic oligonucleotide
acgcugauggucaugcugu

SEQ ID NO: 1903086 - RNA, 19 nt, Artificial Sequence
  Description of Artificial Sequence: Synthetic oligonucleotide
gcgaccguucuccaggcgg

SEQ ID NO: 1903087 - RNA, 19 nt, Artificial Sequence
  Description of Artificial Sequence: Synthetic oligonucleotide
gaaacccacggguggguga

SEQ ID NO: 1903088 - RNA, 19 nt, Artificial Sequence
  Description of Artificial Sequence: Synthetic oligonucleotide
gacucgugaccaccugcag

SEQ ID NO: 1903089 - RNA, 19 nt, Artificial Sequence
  Description of Artificial Sequence: Synthetic oligonucleotide
gaaccuugaggagguggag

SEQ ID NO: 1903090 - RNA, 19 nt, Artificial Sequence
  Description of Artificial Sequence: Synthetic oligonucleotide
agcgauggaugcgguacac

SEQ ID NO: 1903091 - RNA, 19 nt, Artificial Sequence
  Description of Artificial Sequence: Synthetic oligonucleotide
uugaugccaaccugguauu

SEQ ID NO: 1903092 - RNA, 19 nt, Artificial Sequence
  Description of Artificial Sequence: Synthetic oligonucleotide
ccaguaaagcgcagaacag

SEQ ID NO: 1903093 - RNA, 19 nt, Artificial Sequence
  Description of Artificial Sequence: Synthetic oligonucleotide
ccugagacgggccaggcug

SEQ ID NO: 1903094 - RNA, 19 nt, Artificial Sequence
  Description of Artificial Sequence: Synthetic oligonucleotide
ggaaggccacaucaccacg

SEQ ID NO: 1903095 - RNA, 19 nt, Artificial Sequence
  Description of Artificial Sequence: Synthetic oligonucleotide
ucucagggaacuugucaua

SEQ ID NO: 1903096 - RNA, 19 nt, Artificial Sequence
  Description of Artificial Sequence: Synthetic oligonucleotide
ugccgaacguccacugccu

SEQ ID NO: 1903097 - RNA, 19 nt, Artificial Sequence
  Description of Artificial Sequence: Synthetic oligonucleotide
acagccgggguaaagggga

SEQ ID NO: 1903098 - RNA, 19 nt, Artificial Sequence
  Description of Artificial Sequence: Synthetic oligonucleotide
cugugggucaaugcccagg

SEQ ID NO: 1903099 - RNA, 19 nt, Artificial Sequence
  Description of Artificial Sequence: Synthetic oligonucleotide
ugaccccguagaaggcucc

SEQ ID NO: 1903100 - RNA, 19 nt, Artificial Sequence
  Description of Artificial Sequence: Synthetic oligonucleotide
augacgagcaggguuuccu

SEQ ID NO: 1903101 - RNA, 19 nt, Artificial Sequence
  Description of Artificial Sequence: Synthetic oligonucleotide
gccacaucaccacggagcc

SEQ ID NO: 1903102 - RNA, 19 nt, Artificial Sequence
  Description of Artificial Sequence: Synthetic oligonucleotide
acgggccaggcuguugucc

SEQ ID NO: 1903103 - RNA, 19 nt, Artificial Sequence
  Description of Artificial Sequence: Synthetic oligonucleotide
uggucaugcugucggccga

SEQ ID NO: 1903104 - RNA, 19 nt, Artificial Sequence
  Description of Artificial Sequence: Synthetic oligonucleotide
ugaaacccacgggugggug

SEQ ID NO: 1903105 - RNA, 19 nt, Artificial Sequence
  Description of Artificial Sequence: Synthetic oligonucleotide
ucggccgagcuguacugug

SEQ ID NO: 1903106 - RNA, 19 nt, Artificial Sequence
  Description of Artificial Sequence: Synthetic oligonucleotide
gccugaaacccacgggugg

SEQ ID NO: 1903107 - RNA, 19 nt, Artificial Sequence
  Description of Artificial Sequence: Synthetic oligonucleotide
ugacgaggaagaaggcauu

SEQ ID NO: 1903108 - RNA, 19 nt, Artificial Sequence
  Description of Artificial Sequence: Synthetic oligonucleotide
agucccgacucgugaccac

SEQ ID NO: 1903109 - RNA, 19 nt, Artificial Sequence
  Description of Artificial Sequence: Synthetic oligonucleotide
gugagucccgacucgugac

SEQ ID NO: 1903110 - RNA, 19 nt, Artificial Sequence
  Description of Artificial Sequence: Synthetic oligonucleotide
caaaagcaaugacgagcag

SEQ ID NO: 1903111 - RNA, 19 nt, Artificial Sequence
  Description of Artificial Sequence: Synthetic oligonucleotide
uggcagggagcaugugugc

SEQ ID NO: 1903112 - RNA, 19 nt, Artificial Sequence
  Description of Artificial Sequence: Synthetic oligonucleotide
ugcuugccgaaggagcaca

SEQ ID NO: 1903113 - RNA, 19 nt, Artificial Sequence
  Description of Artificial Sequence: Synthetic oligonucleotide
ggagcgauggaugcgguac

SEQ ID NO: 1903114 - RNA, 19 nt, Artificial Sequence
  Description of Artificial Sequence: Synthetic oligonucleotide
acgaggaagaaggcauuug

SEQ ID NO: 1903115 - RNA, 19 nt, Artificial Sequence
  Description of Artificial Sequence: Synthetic oligonucleotide
agccggucaucuguggguc

SEQ ID NO: 1903116 - RNA, 19 nt, Artificial Sequence
  Description of Artificial Sequence: Synthetic oligonucleotide
guucauggccuugaugcca

SEQ ID NO: 1903117 - RNA, 19 nt, Artificial Sequence
  Description of Artificial Sequence: Synthetic oligonucleotide
cagguguuugcuguacgug

SEQ ID NO: 1903118 - RNA, 19 nt, Artificial Sequence
  Description of Artificial Sequence: Synthetic oligonucleotide
cccguagaaggcuccaggg

SEQ ID NO: 1903119 - RNA, 19 nt, Artificial Sequence
  Description of Artificial Sequence: Synthetic oligonucleotide
uggcggagacuucgaagac

SEQ ID NO: 1903120 - RNA, 19 nt, Artificial Sequence
  Description of Artificial Sequence: Synthetic oligonucleotide
gaacugugcuguugagguc

SEQ ID NO: 1903121 - RNA, 19 nt, Artificial Sequence
  Description of Artificial Sequence: Synthetic oligonucleotide
agcaggguuuccugugagu

SEQ ID NO: 1903122 - RNA, 19 nt, Artificial Sequence
  Description of Artificial Sequence: Synthetic oligonucleotide
gcuggcggagacuucgaag

SEQ ID NO: 1903123 - RNA, 19 nt, Artificial Sequence
  Description of Artificial Sequence: Synthetic oligonucleotide
agcguugguggcaggggac

SEQ ID NO: 1903124 - RNA, 19 nt, Artificial Sequence
  Description of Artificial Sequence: Synthetic oligonucleotide
gacggcuggaugggguagg

SEQ ID NO: 1903125 - RNA, 19 nt, Artificial Sequence
  Description of Artificial Sequence: Synthetic oligonucleotide
aaguccgccuugcacccuu

SEQ ID NO: 1903126 - RNA, 19 nt, Artificial Sequence
  Description of Artificial Sequence: Synthetic oligonucleotide
cagguucauggccuugaug

SEQ ID NO: 1903127 - RNA, 19 nt, Artificial Sequence
  Description of Artificial Sequence: Synthetic oligonucleotide
ucaccacggagcccgcccu

SEQ ID NO: 1903128 - RNA, 19 nt, Artificial Sequence
  Description of Artificial Sequence: Synthetic oligonucleotide
accugguauucccgaaccu

SEQ ID NO: 1903129 - RNA, 19 nt, Artificial Sequence
  Description of Artificial Sequence: Synthetic oligonucleotide
gagcguugguggcagggga

SEQ ID NO: 1903130 - RNA, 19 nt, Artificial Sequence
  Description of Artificial Sequence: Synthetic oligonucleotide
acacccggggagaccaggc

SEQ ID NO: 1903131 - RNA, 19 nt, Artificial Sequence
  Description of Artificial Sequence: Synthetic oligonucleotide
ggugcgcuagucuuugaca

SEQ ID NO: 1903132 - RNA, 19 nt, Artificial Sequence
  Description of Artificial Sequence: Synthetic oligonucleotide
ucggggucccguugcaccu

SEQ ID NO: 1903133 - RNA, 19 nt, Artificial Sequence
  Description of Artificial Sequence: Synthetic oligonucleotide
cuugccgaaggagcacacc

SEQ ID NO: 1903134 - RNA, 19 nt, Artificial Sequence
  Description of Artificial Sequence: Synthetic oligonucleotide
acgccaugcuuuggagugc

SEQ ID NO: 1903135 - RNA, 19 nt, Artificial Sequence
  Description of Artificial Sequence: Synthetic oligonucleotide
guuuccugugagucccgac

SEQ ID NO: 1903136 - RNA, 19 nt, Artificial Sequence
  Description of Artificial Sequence: Synthetic oligonucleotide
guacaaacagguguuugcu

SEQ ID NO: 1903137 - RNA, 19 nt, Artificial Sequence
  Description of Artificial Sequence: Synthetic oligonucleotide
augcuuuggagugcuuugu

SEQ ID NO: 1903138 - RNA, 19 nt, Artificial Sequence
  Description of Artificial Sequence: Synthetic oligonucleotide
uacugugagcugaccccgu

SEQ ID NO: 1903139 - RNA, 19 nt, Artificial Sequence
  Description of Artificial Sequence: Synthetic oligonucleotide
cagguguguggaagaaguc

SEQ ID NO: 1903140 - RNA, 19 nt, Artificial Sequence
  Description of Artificial Sequence: Synthetic oligonucleotide
gaccauguacucgcacaug

SEQ ID NO: 1903141 - RNA, 19 nt, Artificial Sequence
  Description of Artificial Sequence: Synthetic oligonucleotide
ccauguacucgcacauggg

SEQ ID NO: 1903142 - RNA, 19 nt, Artificial Sequence
  Description of Artificial Sequence: Synthetic oligonucleotide
guuugucuggccgaugugu

SEQ ID NO: 1903143 - RNA, 19 nt, Artificial Sequence
  Description of Artificial Sequence: Synthetic oligonucleotide
gauggaugcgguacacgaa

SEQ ID NO: 1903144 - RNA, 19 nt, Artificial Sequence
  Description of Artificial Sequence: Synthetic oligonucleotide
gagaccugguccagguuca

SEQ ID NO: 1903145 - RNA, 19 nt, Artificial Sequence
  Description of Artificial Sequence: Synthetic oligonucleotide
gcgcuagucuuugacaagc

SEQ ID NO: 1903146 - RNA, 19 nt, Artificial Sequence
  Description of Artificial Sequence: Synthetic oligonucleotide
aaggugcgcuagucuuuga

SEQ ID NO: 1903147 - RNA, 19 nt, Artificial Sequence
  Description of Artificial Sequence: Synthetic oligonucleotide
agcgaccguucuccaggcg

SEQ ID NO: 1903148 - RNA, 19 nt, Artificial Sequence
  Description of Artificial Sequence: Synthetic oligonucleotide
gagcgauggaugcgguaca

SEQ ID NO: 1903149 - RNA, 19 nt, Artificial Sequence
  Description of Artificial Sequence: Synthetic oligonucleotide
guugagcguugguggcagg

SEQ ID NO: 1903150 - RNA, 19 nt, Artificial Sequence
  Description of Artificial Sequence: Synthetic oligonucleotide
uguacgugucggggucccg

SEQ ID NO: 1903151 - RNA, 19 nt, Artificial Sequence
  Description of Artificial Sequence: Synthetic oligonucleotide
cugggcgaagggcuugaug

SEQ ID NO: 1903152 - RNA, 19 nt, Artificial Sequence
  Description of Artificial Sequence: Synthetic oligonucleotide
guguguggaagaaguccgc

SEQ ID NO: 1903153 - RNA, 19 nt, Artificial Sequence
  Description of Artificial Sequence: Synthetic oligonucleotide
ugcucgcuggcggagacuu

SEQ ID NO: 1903154 - RNA, 19 nt, Artificial Sequence
  Description of Artificial Sequence: Synthetic oligonucleotide
agccugaaacccacgggug

SEQ ID NO: 1903155 - RNA, 19 nt, Artificial Sequence
  Description of Artificial Sequence: Synthetic oligonucleotide
ggcgaagggcuugaugucc

SEQ ID NO: 1903156 - RNA, 19 nt, Artificial Sequence
  Description of Artificial Sequence: Synthetic oligonucleotide
gcugauggucaugcugucg

SEQ ID NO: 1903157 - RNA, 19 nt, Artificial Sequence
  Description of Artificial Sequence: Synthetic oligonucleotide
augggguaggcaggcuggg

SEQ ID NO: 1903158 - RNA, 19 nt, Artificial Sequence
  Description of Artificial Sequence: Synthetic oligonucleotide
auguccugagacgggccag

SEQ ID NO: 1903159 - RNA, 19 nt, Artificial Sequence
  Description of Artificial Sequence: Synthetic oligonucleotide
gcaggguuuccugugaguc

SEQ ID NO: 1903160 - RNA, 19 nt, Artificial Sequence
  Description of Artificial Sequence: Synthetic oligonucleotide
ggccgagcuguacugugag

SEQ ID NO: 1903161 - RNA, 19 nt, Artificial Sequence
  Description of Artificial Sequence: Synthetic oligonucleotide
ugaugccaaccugguauuc

SEQ ID NO: 1903162 - RNA, 19 nt, Artificial Sequence
  Description of Artificial Sequence: Synthetic oligonucleotide
cccagccugaaacccacgg

SEQ ID NO: 1903163 - RNA, 19 nt, Artificial Sequence
  Description of Artificial Sequence: Synthetic oligonucleotide
agcaugugugcuggggcca

SEQ ID NO: 1903164 - RNA, 19 nt, Artificial Sequence
  Description of Artificial Sequence: Synthetic oligonucleotide
ccugaaacccacggguggg

SEQ ID NO: 1903165 - RNA, 19 nt, Artificial Sequence
  Description of Artificial Sequence: Synthetic oligonucleotide
uugaggccugguggagccg

SEQ ID NO: 1903166 - RNA, 19 nt, Artificial Sequence
  Description of Artificial Sequence: Synthetic oligonucleotide
cauggacgccaugcuuugg

SEQ ID NO: 1903167 - RNA, 19 nt, Artificial Sequence
  Description of Artificial Sequence: Synthetic oligonucleotide
caggggacggcuggauggg

SEQ ID NO: 1903168 - RNA, 19 nt, Artificial Sequence
  Description of Artificial Sequence: Synthetic oligonucleotide
gaacguccacugccuccag

SEQ ID NO: 1903169 - RNA, 19 nt, Artificial Sequence
  Description of Artificial Sequence: Synthetic oligonucleotide
caaacagguguuugcugua

SEQ ID NO: 1903170 - RNA, 19 nt, Artificial Sequence
  Description of Artificial Sequence: Synthetic oligonucleotide
gguauucccgaaccuucuc

SEQ ID NO: 1903171 - RNA, 19 nt, Artificial Sequence
  Description of Artificial Sequence: Synthetic oligonucleotide
ccguagaaggcuccagggc

SEQ ID NO: 1903172 - RNA, 19 nt, Artificial Sequence
  Description of Artificial Sequence: Synthetic oligonucleotide
cgaagacaaaagcaaugac

SEQ ID NO: 1903173 - RNA, 19 nt, Artificial Sequence
  Description of Artificial Sequence: Synthetic oligonucleotide
acgaagcgaccguucucca

SEQ ID NO: 1903174 - RNA, 19 nt, Artificial Sequence
  Description of Artificial Sequence: Synthetic oligonucleotide
gguguuugcuguacguguc

SEQ ID NO: 1903175 - RNA, 19 nt, Artificial Sequence
  Description of Artificial Sequence: Synthetic oligonucleotide
ccaacgcacacccggggag

SEQ ID NO: 1903176 - RNA, 19 nt, Artificial Sequence
  Description of Artificial Sequence: Synthetic oligonucleotide
guggaccucaaaggugcgc

SEQ ID NO: 1903177 - RNA, 19 nt, Artificial Sequence
  Description of Artificial Sequence: Synthetic oligonucleotide
caccugcuugccgaaggag

SEQ ID NO: 1903178 - RNA, 19 nt, Artificial Sequence
  Description of Artificial Sequence: Synthetic oligonucleotide
acgugucggggucccguug

SEQ ID NO: 1903179 - RNA, 19 nt, Artificial Sequence
  Description of Artificial Sequence: Synthetic oligonucleotide
cacacccggggagaccagg

SEQ ID NO: 1903180 - RNA, 19 nt, Artificial Sequence
  Description of Artificial Sequence: Synthetic oligonucleotide
ggucaucugugggucaaug

SEQ ID NO: 1903181 - RNA, 19 nt, Artificial Sequence
  Description of Artificial Sequence: Synthetic oligonucleotide
ccagcggugggucugagaa

SEQ ID NO: 1903182 - RNA, 19 nt, Artificial Sequence
  Description of Artificial Sequence: Synthetic oligonucleotide
gucccgacucgugaccacc

SEQ ID NO: 1903183 - RNA, 19 nt, Artificial Sequence
  Description of Artificial Sequence: Synthetic oligonucleotide
gugagcugaccccguagaa

SEQ ID NO: 1903184 - RNA, 19 nt, Artificial Sequence
  Description of Artificial Sequence: Synthetic oligonucleotide
guacacgaagcgaccguuc

SEQ ID NO: 1903185 - RNA, 19 nt, Artificial Sequence
  Description of Artificial Sequence: Synthetic oligonucleotide
ugcaggacgcuggcagaga

SEQ ID NO: 1903186 - RNA, 19 nt, Artificial Sequence
  Description of Artificial Sequence: Synthetic oligonucleotide
ccccguagaaggcuccagg

SEQ ID NO: 1903187 - RNA, 19 nt, Artificial Sequence
  Description of Artificial Sequence: Synthetic oligonucleotide
gcgguacacgaagcgaccg

SEQ ID NO: 1903188 - RNA, 19 nt, Artificial Sequence
  Description of Artificial Sequence: Synthetic oligonucleotide
gcaggacgcuggcagagac

SEQ ID NO: 1903189 - RNA, 19 nt, Artificial Sequence
  Description of Artificial Sequence: Synthetic oligonucleotide
aggcgggcauacuccgucu

SEQ ID NO: 1903190 - RNA, 19 nt, Artificial Sequence
  Description of Artificial Sequence: Synthetic oligonucleotide
ccgauguguacaaacaggu

SEQ ID NO: 1903191 - RNA, 19 nt, Artificial Sequence
  Description of Artificial Sequence: Synthetic oligonucleotide
caguaaagcgcagaacagu

SEQ ID NO: 1903192 - RNA, 19 nt, Artificial Sequence
  Description of Artificial Sequence: Synthetic oligonucleotide
ccgaacguccacugccucc

SEQ ID NO: 1903193 - RNA, 19 nt, Artificial Sequence
  Description of Artificial Sequence: Synthetic oligonucleotide
cgggguaaaggggagggcg

SEQ ID NO: 1903194 - RNA, 19 nt, Artificial Sequence
  Description of Artificial Sequence: Synthetic oligonucleotide
uggagaccugguccagguu

SEQ ID NO: 1903195 - RNA, 19 nt, Artificial Sequence
  Description of Artificial Sequence: Synthetic oligonucleotide
gcagguguguggaagaagu

SEQ ID NO: 1903196 - RNA, 19 nt, Artificial Sequence
  Description of Artificial Sequence: Synthetic oligonucleotide
caccuccaugauguugagc

SEQ ID NO: 1903197 - RNA, 19 nt, Artificial Sequence
  Description of Artificial Sequence: Synthetic oligonucleotide
cccggggagaccaggcagg

SEQ ID NO: 1903198 - RNA, 19 nt, Artificial Sequence
  Description of Artificial Sequence: Synthetic oligonucleotide
cgauguguacaaacaggug

SEQ ID NO: 1903199 - RNA, 19 nt, Artificial Sequence
  Description of Artificial Sequence: Synthetic oligonucleotide
ggcagguguguggaagaag

SEQ ID NO: 1903200 - RNA, 19 nt, Artificial Sequence
  Description of Artificial Sequence: Synthetic oligonucleotide
uacgugucggggucccguu

SEQ ID NO: 1903201 - RNA, 19 nt, Artificial Sequence
  Description of Artificial Sequence: Synthetic oligonucleotide
caaugacgagcaggguuuc

SEQ ID NO: 1903202 - RNA, 19 nt, Artificial Sequence
  Description of Artificial Sequence: Synthetic oligonucleotide
gguaaaggggagggcgggc

SEQ ID NO: 1903203 - RNA, 19 nt, Artificial Sequence
  Description of Artificial Sequence: Synthetic oligonucleotide
ggaagaaguccgccuugca

SEQ ID NO: 1903204 - RNA, 19 nt, Artificial Sequence
  Description of Artificial Sequence: Synthetic oligonucleotide
ugucggggucccguugcac

SEQ ID NO: 1903205 - RNA, 19 nt, Artificial Sequence
  Description of Artificial Sequence: Synthetic oligonucleotide
gcaggguuugucuggccga

SEQ ID NO: 1903206 - RNA, 19 nt, Artificial Sequence
  Description of Artificial Sequence: Synthetic oligonucleotide
gccaaccugguauucccga

SEQ ID NO: 1903207 - RNA, 19 nt, Artificial Sequence
  Description of Artificial Sequence: Synthetic oligonucleotide
gcguugguggcaggggacg

SEQ ID NO: 1903208 - RNA, 19 nt, Artificial Sequence
  Description of Artificial Sequence: Synthetic oligonucleotide
ccgacucgugaccaccugc

SEQ ID NO: 1903209 - RNA, 19 nt, Artificial Sequence
  Description of Artificial Sequence: Synthetic oligonucleotide
gcgggcugaacuuguucug

SEQ ID NO: 1903210 - RNA, 19 nt, Artificial Sequence
  Description of Artificial Sequence: Synthetic oligonucleotide
gggucccagccugaaaccc

SEQ ID NO: 1903211 - RNA, 19 nt, Artificial Sequence
  Description of Artificial Sequence: Synthetic oligonucleotide
acgcuggcagagacaaucu

SEQ ID NO: 1903212 - RNA, 19 nt, Artificial Sequence
  Description of Artificial Sequence: Synthetic oligonucleotide
gaccguucuccaggcgggc

SEQ ID NO: 1903213 - RNA, 19 nt, Artificial Sequence
  Description of Artificial Sequence: Synthetic oligonucleotide
gcgauggaugcgguacacg

SEQ ID NO: 1903214 - RNA, 19 nt, Artificial Sequence
  Description of Artificial Sequence: Synthetic oligonucleotide
ccacgggugggugaguccc

SEQ ID NO: 1903215 - RNA, 19 nt, Artificial Sequence
  Description of Artificial Sequence: Synthetic oligonucleotide
aggggacggcuggaugggg

SEQ ID NO: 1903216 - RNA, 19 nt, Artificial Sequence
  Description of Artificial Sequence: Synthetic oligonucleotide
accccguagaaggcuccag

SEQ ID NO: 1903217 - RNA, 19 nt, Artificial Sequence
  Description of Artificial Sequence: Synthetic oligonucleotide
gaucugccgaacguccacu

SEQ ID NO: 1903218 - RNA, 19 nt, Artificial Sequence
  Description of Artificial Sequence: Synthetic oligonucleotide
gucuggccgauguguacaa

SEQ ID NO: 1903219 - RNA, 19 nt, Artificial Sequence
  Description of Artificial Sequence: Synthetic oligonucleotide
ggcaggggacggcuggaug

SEQ ID NO: 1903220 - RNA, 19 nt, Artificial Sequence
  Description of Artificial Sequence: Synthetic oligonucleotide
ucuggccgauguguacaaa

SEQ ID NO: 1903221 - RNA, 19 nt, Artificial Sequence
  Description of Artificial Sequence: Synthetic oligonucleotide
cugugccccgugcucgcug

SEQ ID NO: 1903222 - RNA, 19 nt, Artificial Sequence
  Description of Artificial Sequence: Synthetic oligonucleotide
cgaccguucuccaggcggg

SEQ ID NO: 1903223 - RNA, 19 nt, Artificial Sequence
  Description of Artificial Sequence: Synthetic oligonucleotide
caggacgcuggcagagaca

SEQ ID NO: 1903224 - RNA, 19 nt, Artificial Sequence
  Description of Artificial Sequence: Synthetic oligonucleotide
gcuggcagagacaaucugu

SEQ ID NO: 1903225 - RNA, 19 nt, Artificial Sequence
  Description of Artificial Sequence: Synthetic oligonucleotide
ggcggagacuucgaagaca

SEQ ID NO: 1903226 - RNA, 19 nt, Artificial Sequence
  Description of Artificial Sequence: Synthetic oligonucleotide
gacgggccaggcuguuguc

SEQ ID NO: 1903227 - RNA, 19 nt, Artificial Sequence
  Description of Artificial Sequence: Synthetic oligonucleotide
ggucaugcugucggccgag

SEQ ID NO: 1903228 - RNA, 19 nt, Artificial Sequence
  Description of Artificial Sequence: Synthetic oligonucleotide
accguucuccaggcgggca

SEQ ID NO: 1903229 - RNA, 19 nt, Artificial Sequence
  Description of Artificial Sequence: Synthetic oligonucleotide
caaaggugcgcuagucuuu

SEQ ID NO: 1903230 - RNA, 19 nt, Artificial Sequence
  Description of Artificial Sequence: Synthetic oligonucleotide
aggguuugucuggccgaug

SEQ ID NO: 1903231 - RNA, 19 nt, Artificial Sequence
  Description of Artificial Sequence: Synthetic oligonucleotide
aggccugguggagccgguc

SEQ ID NO: 1903232 - RNA, 19 nt, Artificial Sequence
  Description of Artificial Sequence: Synthetic oligonucleotide
gacgaggaagaaggcauuu

SEQ ID NO: 1903233 - RNA, 19 nt, Artificial Sequence
  Description of Artificial Sequence: Synthetic oligonucleotide
ggagggcgggcugaacuug

SEQ ID NO: 1903234 - RNA, 19 nt, Artificial Sequence
  Description of Artificial Sequence: Synthetic oligonucleotide
accacggagcccgcccucu

SEQ ID NO: 1903235 - RNA, 19 nt, Artificial Sequence
  Description of Artificial Sequence: Synthetic oligonucleotide
gggcauacuccgucuccac

SEQ ID NO: 1903236 - RNA, 19 nt, Artificial Sequence
  Description of Artificial Sequence: Synthetic oligonucleotide
gcaaugacgagcaggguuu

SEQ ID NO: 1903237 - RNA, 19 nt, Artificial Sequence
  Description of Artificial Sequence: Synthetic oligonucleotide
gaccccguagaaggcucca

SEQ ID NO: 1903238 - RNA, 19 nt, Artificial Sequence
  Description of Artificial Sequence: Synthetic oligonucleotide
gggcgaagggcuugauguc

SEQ ID NO: 1903239 - RNA, 19 nt, Artificial Sequence
  Description of Artificial Sequence: Synthetic oligonucleotide
cgugucggggucccguugc

SEQ ID NO: 1903240 - RNA, 19 nt, Artificial Sequence
  Description of Artificial Sequence: Synthetic oligonucleotide
cugucggccgagcuguacu

SEQ ID NO: 1903241 - RNA, 19 nt, Artificial Sequence
  Description of Artificial Sequence: Synthetic oligonucleotide
ggagacgcugauggucaug

SEQ ID NO: 1903242 - RNA, 19 nt, Artificial Sequence
  Description of Artificial Sequence: Synthetic oligonucleotide
caacgcacacccggggaga

SEQ ID NO: 1903243 - RNA, 19 nt, Artificial Sequence
  Description of Artificial Sequence: Synthetic oligonucleotide
ccucaaaggugcgcuaguc

SEQ ID NO: 1903244 - RNA, 19 nt, Artificial Sequence
  Description of Artificial Sequence: Synthetic oligonucleotide
gccgagcuguacugugagc

SEQ ID NO: 1903245 - RNA, 19 nt, Artificial Sequence
  Description of Artificial Sequence: Synthetic oligonucleotide
ggggucccguugcaccucc

SEQ ID NO: 1903246 - RNA, 19 nt, Artificial Sequence
  Description of Artificial Sequence: Synthetic oligonucleotide
gcaugugugcuggggccag

SEQ ID NO: 1903247 - RNA, 19 nt, Artificial Sequence
  Description of Artificial Sequence: Synthetic oligonucleotide
ggucccagccugaaaccca

SEQ ID NO: 1903248 - RNA, 19 nt, Artificial Sequence
  Description of Artificial Sequence: Synthetic oligonucleotide
cgaagcgaccguucuccag

SEQ ID NO: 1903249 - RNA, 19 nt, Artificial Sequence
  Description of Artificial Sequence: Synthetic oligonucleotide
cagaugacauggacgccau

SEQ ID NO: 1903250 - RNA, 19 nt, Artificial Sequence
  Description of Artificial Sequence: Synthetic oligonucleotide
acaccuugguggagacgcu

SEQ ID NO: 1903251 - RNA, 19 nt, Artificial Sequence
  Description of Artificial Sequence: Synthetic oligonucleotide
ggacgccaugcuuuggagu

SEQ ID NO: 1903252 - RNA, 19 nt, Artificial Sequence
  Description of Artificial Sequence: Synthetic oligonucleotide
gugucggggucccguugca

SEQ ID NO: 1903253 - RNA, 19 nt, Artificial Sequence
  Description of Artificial Sequence: Synthetic oligonucleotide
gggcgggcugaacuuguuc

SEQ ID NO: 1903254 - RNA, 19 nt, Artificial Sequence
  Description of Artificial Sequence: Synthetic oligonucleotide
cacccggggagaccaggca

SEQ ID NO: 1903255 - RNA, 19 nt, Artificial Sequence
  Description of Artificial Sequence: Synthetic oligonucleotide
ccccaacgcacacccgggg

SEQ ID NO: 1903256 - RNA, 19 nt, Artificial Sequence
  Description of Artificial Sequence: Synthetic oligonucleotide
aacccacgggugggugagu

SEQ ID NO: 1903257 - RNA, 19 nt, Artificial Sequence
  Description of Artificial Sequence: Synthetic oligonucleotide
uggcaggggacggcuggau

SEQ ID NO: 1903258 - RNA, 19 nt, Artificial Sequence
  Description of Artificial Sequence: Synthetic oligonucleotide
gcacaccuugguggagacg

SEQ ID NO: 1903259 - RNA, 19 nt, Artificial Sequence
  Description of Artificial Sequence: Synthetic oligonucleotide
cauacuccgucuccacuuu

SEQ ID NO: 1903260 - RNA, 19 nt, Artificial Sequence
  Description of Artificial Sequence: Synthetic oligonucleotide
ugagacgggccaggcuguu

SEQ ID NO: 1903261 - RNA, 19 nt, Artificial Sequence
  Description of Artificial Sequence: Synthetic oligonucleotide
cugagacgggccaggcugu

SEQ ID NO: 1903262 - RNA, 19 nt, Artificial Sequence
  Description of Artificial Sequence: Synthetic oligonucleotide
ggagugcuuuguccuugga

SEQ ID NO: 1903263 - RNA, 19 nt, Artificial Sequence
  Description of Artificial Sequence: Synthetic oligonucleotide
guacgugucggggucccgu

SEQ ID NO: 1903264 - RNA, 19 nt, Artificial Sequence
  Description of Artificial Sequence: Synthetic oligonucleotide
ccguugcaccuccaugaug

SEQ ID NO: 1903265 - RNA, 19 nt, Artificial Sequence
  Description of Artificial Sequence: Synthetic oligonucleotide
ggguuuccugugagucccg

SEQ ID NO: 1903266 - RNA, 19 nt, Artificial Sequence
  Description of Artificial Sequence: Synthetic oligonucleotide
caccacggagcccgcccuc

SEQ ID NO: 1903267 - RNA, 19 nt, Artificial Sequence
  Description of Artificial Sequence: Synthetic oligonucleotide
cccacgggugggugagucc

SEQ ID NO: 1903268 - RNA, 19 nt, Artificial Sequence
  Description of Artificial Sequence: Synthetic oligonucleotide
gguuuccugugagucccga

SEQ ID NO: 1903269 - RNA, 19 nt, Artificial Sequence
  Description of Artificial Sequence: Synthetic oligonucleotide
cgacucgugaccaccugca

SEQ ID NO: 1903270 - RNA, 19 nt, Artificial Sequence
  Description of Artificial Sequence: Synthetic oligonucleotide
ugcugucggccgagcugua

SEQ ID NO: 1903271 - RNA, 19 nt, Artificial Sequence
  Description of Artificial Sequence: Synthetic oligonucleotide
cacccuuguggaccucaaa

SEQ ID NO: 1903272 - RNA, 19 nt, Artificial Sequence
  Description of Artificial Sequence: Synthetic oligonucleotide
gagggcgggcugaacuugu

SEQ ID NO: 1903273 - RNA, 19 nt, Artificial Sequence
  Description of Artificial Sequence: Synthetic oligonucleotide
gggcccuccugaacugugc

SEQ ID NO: 1903274 - RNA, 19 nt, Artificial Sequence
  Description of Artificial Sequence: Synthetic oligonucleotide
cagcggugggucugagaaa

SEQ ID NO: 1903275 - RNA, 19 nt, Artificial Sequence
  Description of Artificial Sequence: Synthetic oligonucleotide
aguccgccuugcacccuug

SEQ ID NO: 1903276 - RNA, 19 nt, Artificial Sequence
  Description of Artificial Sequence: Synthetic oligonucleotide
gggacggcuggauggggua

SEQ ID NO: 1903277 - RNA, 19 nt, Artificial Sequence
  Description of Artificial Sequence: Synthetic oligonucleotide
gccuugcacccuuguggac

SEQ ID NO: 1903278 - RNA, 19 nt, Artificial Sequence
  Description of Artificial Sequence: Synthetic oligonucleotide
gcuugccgaaggagcacac

SEQ ID NO: 1903279 - RNA, 19 nt, Artificial Sequence
  Description of Artificial Sequence: Synthetic oligonucleotide
gguacacgaagcgaccguu

SEQ ID NO: 1903280 - RNA, 19 nt, Artificial Sequence
  Description of Artificial Sequence: Synthetic oligonucleotide
gccgaacguccacugccuc

SEQ ID NO: 1903281 - RNA, 19 nt, Artificial Sequence
  Description of Artificial Sequence: Synthetic oligonucleotide
cgccuugcacccuugugga

SEQ ID NO: 1903282 - RNA, 19 nt, Artificial Sequence
  Description of Artificial Sequence: Synthetic oligonucleotide
gugccccgugcucgcuggc

SEQ ID NO: 1903283 - RNA, 19 nt, Artificial Sequence
  Description of Artificial Sequence: Synthetic oligonucleotide
cccaacgcacacccgggga

SEQ ID NO: 1903284 - RNA, 19 nt, Artificial Sequence
  Description of Artificial Sequence: Synthetic oligonucleotide
cguugguggcaggggacgg

SEQ ID NO: 1903285 - RNA, 19 nt, Artificial Sequence
  Description of Artificial Sequence: Synthetic oligonucleotide
caguggcagggagcaugug

SEQ ID NO: 1903286 - RNA, 19 nt, Artificial Sequence
  Description of Artificial Sequence: Synthetic oligonucleotide
cgaacguccacugccucca

SEQ ID NO: 1903287 - RNA, 19 nt, Artificial Sequence
  Description of Artificial Sequence: Synthetic oligonucleotide
cuccagcggugggucugag

SEQ ID NO: 1903288 - RNA, 19 nt, Artificial Sequence
  Description of Artificial Sequence: Synthetic oligonucleotide
gcugucggccgagcuguac

SEQ ID NO: 1903289 - RNA, 19 nt, Artificial Sequence
  Description of Artificial Sequence: Synthetic oligonucleotide
ggagcccgcccucuucucu

SEQ ID NO: 1903290 - RNA, 19 nt, Artificial Sequence
  Description of Artificial Sequence: Synthetic oligonucleotide
gggagcgauggaugcggua

SEQ ID NO: 1903291 - RNA, 19 nt, Artificial Sequence
  Description of Artificial Sequence: Synthetic oligonucleotide
gguaggcaggcugggcgaa

SEQ ID NO: 1903292 - RNA, 19 nt, Artificial Sequence
  Description of Artificial Sequence: Synthetic oligonucleotide
ccggggagaccaggcaggc

SEQ ID NO: 1903293 - RNA, 19 nt, Artificial Sequence
  Description of Artificial Sequence: Synthetic oligonucleotide
cccgacucgugaccaccug

SEQ ID NO: 1903294 - RNA, 19 nt, Artificial Sequence
  Description of Artificial Sequence: Synthetic oligonucleotide
gaaguccgccuugcacccu

SEQ ID NO: 1903295 - RNA, 19 nt, Artificial Sequence
  Description of Artificial Sequence: Synthetic oligonucleotide
ccugguggagccggucauc

SEQ ID NO: 1903296 - RNA, 19 nt, Artificial Sequence
  Description of Artificial Sequence: Synthetic oligonucleotide
cggugggucugagaaagca

SEQ ID NO: 1903297 - RNA, 19 nt, Artificial Sequence
  Description of Artificial Sequence: Synthetic oligonucleotide
gucggccgagcuguacugu

SEQ ID NO: 1903298 - RNA, 19 nt, Artificial Sequence
  Description of Artificial Sequence: Synthetic oligonucleotide
ccuugaugccaaccuggua

SEQ ID NO: 1903299 - RNA, 19 nt, Artificial Sequence
  Description of Artificial Sequence: Synthetic oligonucleotide
gccccuucucguagaguuc

SEQ ID NO: 1903300 - RNA, 19 nt, Artificial Sequence
  Description of Artificial Sequence: Synthetic oligonucleotide
uugcacccuuguggaccuc

SEQ ID NO: 1903301 - RNA, 19 nt, Artificial Sequence
  Description of Artificial Sequence: Synthetic oligonucleotide
gggagggcgggcugaacuu

SEQ ID NO: 1903302 - RNA, 19 nt, Artificial Sequence
  Description of Artificial Sequence: Synthetic oligonucleotide
gcgaagggcuugauguccu

SEQ ID NO: 1903303 - RNA, 19 nt, Artificial Sequence
  Description of Artificial Sequence: Synthetic oligonucleotide
guccgccuugcacccuugu

SEQ ID NO: 1903304 - RNA, 19 nt, Artificial Sequence
  Description of Artificial Sequence: Synthetic oligonucleotide
ccugguauucccgaaccuu

SEQ ID NO: 1903305 - RNA, 19 nt, Artificial Sequence
  Description of Artificial Sequence: Synthetic oligonucleotide
agggcgggcugaacuuguu

SEQ ID NO: 1903306 - RNA, 19 nt, Artificial Sequence
  Description of Artificial Sequence: Synthetic oligonucleotide
ggggacggcuggauggggu

SEQ ID NO: 1903307 - RNA, 19 nt, Artificial Sequence
  Description of Artificial Sequence: Synthetic oligonucleotide
cgcagaacaguggcaggga

SEQ ID NO: 1903308 - RNA, 19 nt, Artificial Sequence
  Description of Artificial Sequence: Synthetic oligonucleotide
cgggcauacuccgucucca

SEQ ID NO: 1903309 - RNA, 19 nt, Artificial Sequence
  Description of Artificial Sequence: Synthetic oligonucleotide
gccugguggagccggucau

SEQ ID NO: 1903310 - RNA, 19 nt, Artificial Sequence
  Description of Artificial Sequence: Synthetic oligonucleotide
cagggcccuccugaacugu

SEQ ID NO: 1903311 - RNA, 19 nt, Artificial Sequence
  Description of Artificial Sequence: Synthetic oligonucleotide
cggccgagcuguacuguga

SEQ ID NO: 1903312 - RNA, 19 nt, Artificial Sequence
  Description of Artificial Sequence: Synthetic oligonucleotide
cgcuagucuuugacaagcu

SEQ ID NO: 1903313 - RNA, 19 nt, Artificial Sequence
  Description of Artificial Sequence: Synthetic oligonucleotide
gugcucgcuggcggagacu

SEQ ID NO: 1903314 - RNA, 19 nt, Artificial Sequence
  Description of Artificial Sequence: Synthetic oligonucleotide
ggggccacuccagaaccuu

SEQ ID NO: 1903315 - RNA, 19 nt, Artificial Sequence
  Description of Artificial Sequence: Synthetic oligonucleotide
gcucgcuggcggagacuuc

SEQ ID NO: 1903316 - RNA, 19 nt, Artificial Sequence
  Description of Artificial Sequence: Synthetic oligonucleotide
ccuccagcggugggucuga

SEQ ID NO: 1903317 - RNA, 19 nt, Artificial Sequence
  Description of Artificial Sequence: Synthetic oligonucleotide
ccagguucauggccuugau

SEQ ID NO: 1903318 - RNA, 19 nt, Artificial Sequence
  Description of Artificial Sequence: Synthetic oligonucleotide
ccguucuccaggcgggcau

SEQ ID NO: 1903319 - RNA, 19 nt, Artificial Sequence
  Description of Artificial Sequence: Synthetic oligonucleotide
cccguugcaccuccaugau

SEQ ID NO: 1903320 - RNA, 19 nt, Artificial Sequence
  Description of Artificial Sequence: Synthetic oligonucleotide
ggggagcgauggaugcggu

SEQ ID NO: 1903321 - RNA, 19 nt, Artificial Sequence
  Description of Artificial Sequence: Synthetic oligonucleotide
cggagcccgcccucuucuc

SEQ ID NO: 1903322 - RNA, 19 nt, Artificial Sequence
  Description of Artificial Sequence: Synthetic oligonucleotide
cgguacacgaagcgaccgu

SEQ ID NO: 1903323 - RNA, 19 nt, Artificial Sequence
  Description of Artificial Sequence: Synthetic oligonucleotide
cgcccucuucucuccagua

SEQ ID NO: 1903324 - RNA, 19 nt, Artificial Sequence
  Description of Artificial Sequence: Synthetic oligonucleotide
ccuucucguagaguuccuu

SEQ ID NO: 1903325 - RNA, 19 nt, Artificial Sequence
  Description of Artificial Sequence: Synthetic oligonucleotide
cgcuggcggagacuucgaa

SEQ ID NO: 1903326 - RNA, 19 nt, Artificial Sequence
  Description of Artificial Sequence: Synthetic oligonucleotide
cgccaugcuuuggagugcu

SEQ ID NO: 1903327 - RNA, 19 nt, Artificial Sequence
  Description of Artificial Sequence: Synthetic oligonucleotide
cguucuccaggcgggcaua

SEQ ID NO: 1903328 - RNA, 19 nt, Artificial Sequence
  Description of Artificial Sequence: Synthetic oligonucleotide
gcugugccccgugcucgcu

SEQ ID NO: 1903329 - RNA, 19 nt, Artificial Sequence
  Description of Artificial Sequence: Synthetic oligonucleotide
cggggucccguugcaccuc

SEQ ID NO: 1903330 - RNA, 19 nt, Artificial Sequence
  Description of Artificial Sequence: Synthetic oligonucleotide
ggacgcuggcagagacaau

SEQ ID NO: 1903331 - RNA, 19 nt, Artificial Sequence
  Description of Artificial Sequence: Synthetic oligonucleotide
aaaacgacagaauauaucc

SEQ ID NO: 1903332 - RNA, 19 nt, Artificial Sequence
  Description of Artificial Sequence: Synthetic oligonucleotide
uuaaauaucgcacguagcc

SEQ ID NO: 1903333 - RNA, 19 nt, Artificial Sequence
  Description of Artificial Sequence: Synthetic oligonucleotide
aaauucagauuguuguucc

SEQ ID NO: 1903334 - RNA, 19 nt, Artificial Sequence
  Description of Artificial Sequence: Synthetic oligonucleotide
auaaggaucucgcugaacc

SEQ ID NO: 1903335 - RNA, 19 nt, Artificial Sequence
  Description of Artificial Sequence: Synthetic oligonucleotide
auuaguuagucuuuguucg

SEQ ID NO: 1903336 - RNA, 19 nt, Artificial Sequence
  Description of Artificial Sequence: Synthetic oligonucleotide
uuagguucagccaagagug

SEQ ID NO: 1903337 - RNA, 19 nt, Artificial Sequence
  Description of Artificial Sequence: Synthetic oligonucleotide
uuuucagucagucagcuca

SEQ ID NO: 1903338 - RNA, 19 nt, Artificial Sequence
  Description of Artificial Sequence: Synthetic oligonucleotide
cauaauucgaauaaggauc

SEQ ID NO: 1903339 - RNA, 19 nt, Artificial Sequence
  Description of Artificial Sequence: Synthetic oligonucleotide
aacgacagaauauauccuc

SEQ ID NO: 1903340 - RNA, 19 nt, Artificial Sequence
  Description of Artificial Sequence: Synthetic oligonucleotide
aaugcugcaauacucgaug

SEQ ID NO: 1903341 - RNA, 19 nt, Artificial Sequence
  Description of Artificial Sequence: Synthetic oligonucleotide
augacuuucagucggacuc

SEQ ID NO: 1903342 - RNA, 19 nt, Artificial Sequence
  Description of Artificial Sequence: Synthetic oligonucleotide
uaucagguuaccaaaacga

SEQ ID NO: 1903343 - RNA, 19 nt, Artificial Sequence
  Description of Artificial Sequence: Synthetic oligonucleotide
agaugcuacauuaaaauac

SEQ ID NO: 1903344 - RNA, 19 nt, Artificial Sequence
  Description of Artificial Sequence: Synthetic oligonucleotide
uaaugguaauggaugaggg

SEQ ID NO: 1903345 - RNA, 19 nt, Artificial Sequence
  Description of Artificial Sequence: Synthetic oligonucleotide
guaauaaucuuguucuggg

SEQ ID NO: 1903346 - RNA, 19 nt, Artificial Sequence
  Description of Artificial Sequence: Synthetic oligonucleotide
aacgaagggaaacagauuu

SEQ ID NO: 1903347 - RNA, 19 nt, Artificial Sequence
  Description of Artificial Sequence: Synthetic oligonucleotide
uuugaggcaacugugaccc

SEQ ID NO: 1903348 - RNA, 19 nt, Artificial Sequence
  Description of Artificial Sequence: Synthetic oligonucleotide
auugaugcgagcugggacg

SEQ ID NO: 1903349 - RNA, 19 nt, Artificial Sequence
  Description of Artificial Sequence: Synthetic oligonucleotide
ugguuuuaaauaucgcacg

SEQ ID NO: 1903350 - RNA, 19 nt, Artificial Sequence
  Description of Artificial Sequence: Synthetic oligonucleotide
uuaauaaugcugcaauacu

SEQ ID NO: 1903351 - RNA, 19 nt, Artificial Sequence
  Description of Artificial Sequence: Synthetic oligonucleotide
uuguucgagacucaguaag

SEQ ID NO: 1903352 - RNA, 19 nt, Artificial Sequence
  Description of Artificial Sequence: Synthetic oligonucleotide
aauucagauuguuguuccc

SEQ ID NO: 1903353 - RNA, 19 nt, Artificial Sequence
  Description of Artificial Sequence: Synthetic oligonucleotide
aaauaucgcacguagccca

SEQ ID NO: 1903354 - RNA, 19 nt, Artificial Sequence
  Description of Artificial Sequence: Synthetic oligonucleotide
aauggaugaggguuaaaca

SEQ ID NO: 1903355 - RNA, 19 nt, Artificial Sequence
  Description of Artificial Sequence: Synthetic oligonucleotide
uggaugaggguuaaacacg

SEQ ID NO: 1903356 - RNA, 19 nt, Artificial Sequence
  Description of Artificial Sequence: Synthetic oligonucleotide
acagauuuacucucgguuc

SEQ ID NO: 1903357 - RNA, 19 nt, Artificial Sequence
  Description of Artificial Sequence: Synthetic oligonucleotide
guugagauugcaucguugg

SEQ ID NO: 1903358 - RNA, 19 nt, Artificial Sequence
  Description of Artificial Sequence: Synthetic oligonucleotide
agaauauauccuccaacac

SEQ ID NO: 1903359 - RNA, 19 nt, Artificial Sequence
  Description of Artificial Sequence: Synthetic oligonucleotide
uaugucauuaguuagucuu

SEQ ID NO: 1903360 - RNA, 19 nt, Artificial Sequence
  Description of Artificial Sequence: Synthetic oligonucleotide
uuuagagauagcuuccuga

SEQ ID NO: 1903361 - RNA, 19 nt, Artificial Sequence
  Description of Artificial Sequence: Synthetic oligonucleotide
gaaggaaacaccuauccga

SEQ ID NO: 1903362 - RNA, 19 nt, Artificial Sequence
  Description of Artificial Sequence: Synthetic oligonucleotide
auuugaggcaacugugacc

SEQ ID NO: 1903363 - RNA, 19 nt, Artificial Sequence
  Description of Artificial Sequence: Synthetic oligonucleotide
acaagguaaacuucuauca

SEQ ID NO: 1903364 - RNA, 19 nt, Artificial Sequence
  Description of Artificial Sequence: Synthetic oligonucleotide
ugagauugcaucguuggcg

SEQ ID NO: 1903365 - RNA, 19 nt, Artificial Sequence
  Description of Artificial Sequence: Synthetic oligonucleotide
ugcuacauuaaaauacuga

SEQ ID NO: 1903366 - RNA, 19 nt, Artificial Sequence
  Description of Artificial Sequence: Synthetic oligonucleotide
uuuaaauaucgcacguagc

SEQ ID NO: 1903367 - RNA, 19 nt, Artificial Sequence
  Description of Artificial Sequence: Synthetic oligonucleotide
aacagauuuacucucgguu

SEQ ID NO: 1903368 - RNA, 19 nt, Artificial Sequence
  Description of Artificial Sequence: Synthetic oligonucleotide
auacaccuuaaauucuccc

SEQ ID NO: 1903369 - RNA, 19 nt, Artificial Sequence
  Description of Artificial Sequence: Synthetic oligonucleotide
agggaguucguccagucac

SEQ ID NO: 1903370 - RNA, 19 nt, Artificial Sequence
  Description of Artificial Sequence: Synthetic oligonucleotide
ucgagacucaguaaguucu

SEQ ID NO: 1903371 - RNA, 19 nt, Artificial Sequence
  Description of Artificial Sequence: Synthetic oligonucleotide
cauuaguuagucuuuguuc

SEQ ID NO: 1903372 - RNA, 19 nt, Artificial Sequence
  Description of Artificial Sequence: Synthetic oligonucleotide
gaaacagauuuacucucgg

SEQ ID NO: 1903373 - RNA, 19 nt, Artificial Sequence
  Description of Artificial Sequence: Synthetic oligonucleotide
cuaucagguuaccaaaacg

SEQ ID NO: 1903374 - RNA, 19 nt, Artificial Sequence
  Description of Artificial Sequence: Synthetic oligonucleotide
agauuguuguuccccaacg

SEQ ID NO: 1903375 - RNA, 19 nt, Artificial Sequence
  Description of Artificial Sequence: Synthetic oligonucleotide
ugcuacuguaauaaucuug

SEQ ID NO: 1903376 - RNA, 19 nt, Artificial Sequence
  Description of Artificial Sequence: Synthetic oligonucleotide
guauuuugcauaaacagca

SEQ ID NO: 1903377 - RNA, 19 nt, Artificial Sequence
  Description of Artificial Sequence: Synthetic oligonucleotide
auuacuuccgucauccagg

SEQ ID NO: 1903378 - RNA, 19 nt, Artificial Sequence
  Description of Artificial Sequence: Synthetic oligonucleotide
ugagacaacugacaggcgu

SEQ ID NO: 1903379 - RNA, 19 nt, Artificial Sequence
  Description of Artificial Sequence: Synthetic oligonucleotide
uuagagauagcuuccugac

SEQ ID NO: 1903380 - RNA, 19 nt, Artificial Sequence
  Description of Artificial Sequence: Synthetic oligonucleotide
ugacacaagguaaacuucu

SEQ ID NO: 1903381 - RNA, 19 nt, Artificial Sequence
  Description of Artificial Sequence: Synthetic oligonucleotide
caccauacaccuuaaauuc

SEQ ID NO: 1903382 - RNA, 19 nt, Artificial Sequence
  Description of Artificial Sequence: Synthetic oligonucleotide
aguucguccagucacauuu

SEQ ID NO: 1903383 - RNA, 19 nt, Artificial Sequence
  Description of Artificial Sequence: Synthetic oligonucleotide
gacgccaccaucugugugg

SEQ ID NO: 1903384 - RNA, 19 nt, Artificial Sequence
  Description of Artificial Sequence: Synthetic oligonucleotide
uuuacucucgguucaugcc

SEQ ID NO: 1903385 - RNA, 19 nt, Artificial Sequence
  Description of Artificial Sequence: Synthetic oligonucleotide
ugcaauuuguauuuugcau

SEQ ID NO: 1903386 - RNA, 19 nt, Artificial Sequence
  Description of Artificial Sequence: Synthetic oligonucleotide
acaccaugaccauaauucg

SEQ ID NO: 1903387 - RNA, 19 nt, Artificial Sequence
  Description of Artificial Sequence: Synthetic oligonucleotide
uaauggaugaggguuaaac

SEQ ID NO: 1903388 - RNA, 19 nt, Artificial Sequence
  Description of Artificial Sequence: Synthetic oligonucleotide
gaucugccgaauuacuucc

SEQ ID NO: 1903389 - RNA, 19 nt, Artificial Sequence
  Description of Artificial Sequence: Synthetic oligonucleotide
uacaacaucugucuggauu

SEQ ID NO: 1903390 - RNA, 19 nt, Artificial Sequence
  Description of Artificial Sequence: Synthetic oligonucleotide
uuuuagguucagccaagag

SEQ ID NO: 1903391 - RNA, 19 nt, Artificial Sequence
  Description of Artificial Sequence: Synthetic oligonucleotide
gagauugcaucguuggcgc

SEQ ID NO: 1903392 - RNA, 19 nt, Artificial Sequence
  Description of Artificial Sequence: Synthetic oligonucleotide
ucuaucagguuaccaaaac

SEQ ID NO: 1903393 - RNA, 19 nt, Artificial Sequence
  Description of Artificial Sequence: Synthetic oligonucleotide
guaaacuucuaucagguua

SEQ ID NO: 1903394 - RNA, 19 nt, Artificial Sequence
  Description of Artificial Sequence: Synthetic oligonucleotide
aggauuaugucauuaguua

SEQ ID NO: 1903395 - RNA, 19 nt, Artificial Sequence
  Description of Artificial Sequence: Synthetic oligonucleotide
ucgcacguagcccagaccu

SEQ ID NO: 1903396 - RNA, 19 nt, Artificial Sequence
  Description of Artificial Sequence: Synthetic oligonucleotide
caaaacgacagaauauauc

SEQ ID NO: 1903397 - RNA, 19 nt, Artificial Sequence
  Description of Artificial Sequence: Synthetic oligonucleotide
auaaacagcagaugcuaca

SEQ ID NO: 1903398 - RNA, 19 nt, Artificial Sequence
  Description of Artificial Sequence: Synthetic oligonucleotide
uaaauaucgcacguagccc

SEQ ID NO: 1903399 - RNA, 19 nt, Artificial Sequence
  Description of Artificial Sequence: Synthetic oligonucleotide
uuuggguucuucucguggc

SEQ ID NO: 1903400 - RNA, 19 nt, Artificial Sequence
  Description of Artificial Sequence: Synthetic oligonucleotide
ugaugguuuuaaauaucgc

SEQ ID NO: 1903401 - RNA, 19 nt, Artificial Sequence
  Description of Artificial Sequence: Synthetic oligonucleotide
uagucuuuguucgagacuc

SEQ ID NO: 1903402 - RNA, 19 nt, Artificial Sequence
  Description of Artificial Sequence: Synthetic oligonucleotide
cacaagguaaacuucuauc

SEQ ID NO: 1903403 - RNA, 19 nt, Artificial Sequence
  Description of Artificial Sequence: Synthetic oligonucleotide
aaacagauuuacucucggu

SEQ ID NO: 1903404 - RNA, 19 nt, Artificial Sequence
  Description of Artificial Sequence: Synthetic oligonucleotide
uucugaugagaucugccga

SEQ ID NO: 1903405 - RNA, 19 nt, Artificial Sequence
  Description of Artificial Sequence: Synthetic oligonucleotide
aauaaggaucucgcugaac

SEQ ID NO: 1903406 - RNA, 19 nt, Artificial Sequence
  Description of Artificial Sequence: Synthetic oligonucleotide
caagguaaacuucuaucag

SEQ ID NO: 1903407 - RNA, 19 nt, Artificial Sequence
  Description of Artificial Sequence: Synthetic oligonucleotide
gauuugaggcaacugugac

SEQ ID NO: 1903408 - RNA, 19 nt, Artificial Sequence
  Description of Artificial Sequence: Synthetic oligonucleotide
caggguugagauugcaucg

SEQ ID NO: 1903409 - RNA, 19 nt, Artificial Sequence
  Description of Artificial Sequence: Synthetic oligonucleotide
ugccgaauuacuuccguca

SEQ ID NO: 1903410 - RNA, 19 nt, Artificial Sequence
  Description of Artificial Sequence: Synthetic oligonucleotide
aggauggaaguacaacauc

SEQ ID NO: 1903411 - RNA, 19 nt, Artificial Sequence
  Description of Artificial Sequence: Synthetic oligonucleotide
uuuccugacacaagguaaa

SEQ ID NO: 1903412 - RNA, 19 nt, Artificial Sequence
  Description of Artificial Sequence: Synthetic oligonucleotide
cuccauucagaauuuuccc

SEQ ID NO: 1903413 - RNA, 19 nt, Artificial Sequence
  Description of Artificial Sequence: Synthetic oligonucleotide
uccaacacgucuaauggua

SEQ ID NO: 1903414 - RNA, 19 nt, Artificial Sequence
  Description of Artificial Sequence: Synthetic oligonucleotide
ggauuaugucauuaguuag

SEQ ID NO: 1903415 - RNA, 19 nt, Artificial Sequence
  Description of Artificial Sequence: Synthetic oligonucleotide
aacacgucuaaugguaaug

SEQ ID NO: 1903416 - RNA, 19 nt, Artificial Sequence
  Description of Artificial Sequence: Synthetic oligonucleotide
uuuugcaggauggaaguac

SEQ ID NO: 1903417 - RNA, 19 nt, Artificial Sequence
  Description of Artificial Sequence: Synthetic oligonucleotide
augagaucugccgaauuac

SEQ ID NO: 1903418 - RNA, 19 nt, Artificial Sequence
  Description of Artificial Sequence: Synthetic oligonucleotide
auaauucgaauaaggaucu

SEQ ID NO: 1903419 - RNA, 19 nt, Artificial Sequence
  Description of Artificial Sequence: Synthetic oligonucleotide
acgacagaauauauccucc

SEQ ID NO: 1903420 - RNA, 19 nt, Artificial Sequence
  Description of Artificial Sequence: Synthetic oligonucleotide
uuucagucggacuccauuc

SEQ ID NO: 1903421 - RNA, 19 nt, Artificial Sequence
  Description of Artificial Sequence: Synthetic oligonucleotide
cuggaauccaugcaauuug

SEQ ID NO: 1903422 - RNA, 19 nt, Artificial Sequence
  Description of Artificial Sequence: Synthetic oligonucleotide
uuagucuuuguucgagacu

SEQ ID NO: 1903423 - RNA, 19 nt, Artificial Sequence
  Description of Artificial Sequence: Synthetic oligonucleotide
ucuaaugguaauggaugag

SEQ ID NO: 1903424 - RNA, 19 nt, Artificial Sequence
  Description of Artificial Sequence: Synthetic oligonucleotide
ucugcauacuugacguagc

SEQ ID NO: 1903425 - RNA, 19 nt, Artificial Sequence
  Description of Artificial Sequence: Synthetic oligonucleotide
uguuccccaacgaagggaa

SEQ ID NO: 1903426 - RNA, 19 nt, Artificial Sequence
  Description of Artificial Sequence: Synthetic oligonucleotide
aucagguuaccaaaacgac

SEQ ID NO: 1903427 - RNA, 19 nt, Artificial Sequence
  Description of Artificial Sequence: Synthetic oligonucleotide
acacgucuaaugguaaugg

SEQ ID NO: 1903428 - RNA, 19 nt, Artificial Sequence
  Description of Artificial Sequence: Synthetic oligonucleotide
gaaacaccuauccgauucc

SEQ ID NO: 1903429 - RNA, 19 nt, Artificial Sequence
  Description of Artificial Sequence: Synthetic oligonucleotide
caugcuacuguaauaaucu

SEQ ID NO: 1903430 - RNA, 19 nt, Artificial Sequence
  Description of Artificial Sequence: Synthetic oligonucleotide
aaacuucuaucagguuacc

SEQ ID NO: 1903431 - RNA, 19 nt, Artificial Sequence
  Description of Artificial Sequence: Synthetic oligonucleotide
uugagauugcaucguuggc

SEQ ID NO: 1903432 - RNA, 19 nt, Artificial Sequence
  Description of Artificial Sequence: Synthetic oligonucleotide
uguucgagacucaguaagu

SEQ ID NO: 1903433 - RNA, 19 nt, Artificial Sequence
  Description of Artificial Sequence: Synthetic oligonucleotide
ugagaucugccgaauuacu

SEQ ID NO: 1903434 - RNA, 19 nt, Artificial Sequence
  Description of Artificial Sequence: Synthetic oligonucleotide
accuuaaauucucccguag

SEQ ID NO: 1903435 - RNA, 19 nt, Artificial Sequence
  Description of Artificial Sequence: Synthetic oligonucleotide
aauacucgaugucaccaua

SEQ ID NO: 1903436 - RNA, 19 nt, Artificial Sequence
  Description of Artificial Sequence: Synthetic oligonucleotide
cuaucacaguuuucuauug

SEQ ID NO: 1903437 - RNA, 19 nt, Artificial Sequence
  Description of Artificial Sequence: Synthetic oligonucleotide
uggaauccaugcaauuugu

SEQ ID NO: 1903438 - RNA, 19 nt, Artificial Sequence
  Description of Artificial Sequence: Synthetic oligonucleotide
ggaaggaaacaccuauccg

SEQ ID NO: 1903439 - RNA, 19 nt, Artificial Sequence
  Description of Artificial Sequence: Synthetic oligonucleotide
gauggaaguacaacaucug

SEQ ID NO: 1903440 - RNA, 19 nt, Artificial Sequence
  Description of Artificial Sequence: Synthetic oligonucleotide
accauaauucgaauaagga

SEQ ID NO: 1903441 - RNA, 19 nt, Artificial Sequence
  Description of Artificial Sequence: Synthetic oligonucleotide
ggcguuuagagauagcuuc

SEQ ID NO: 1903442 - RNA, 19 nt, Artificial Sequence
  Description of Artificial Sequence: Synthetic oligonucleotide
ugcaauacucgaugucacc

SEQ ID NO: 1903443 - RNA, 19 nt, Artificial Sequence
  Description of Artificial Sequence: Synthetic oligonucleotide
uucgaauaaggaucucgcu

SEQ ID NO: 1903444 - RNA, 19 nt, Artificial Sequence
  Description of Artificial Sequence: Synthetic oligonucleotide
uaguuagucuuuguucgag

SEQ ID NO: 1903445 - RNA, 19 nt, Artificial Sequence
  Description of Artificial Sequence: Synthetic oligonucleotide
cuuggguuacuccacacca

SEQ ID NO: 1903446 - RNA, 19 nt, Artificial Sequence
  Description of Artificial Sequence: Synthetic oligonucleotide
uucagucggacuccauuca

SEQ ID NO: 1903447 - RNA, 19 nt, Artificial Sequence
  Description of Artificial Sequence: Synthetic oligonucleotide
aacaccuauccgauucccg

SEQ ID NO: 1903448 - RNA, 19 nt, Artificial Sequence
  Description of Artificial Sequence: Synthetic oligonucleotide
gaugagaucugccgaauua

SEQ ID NO: 1903449 - RNA, 19 nt, Artificial Sequence
  Description of Artificial Sequence: Synthetic oligonucleotide
cauugaugcgagcugggac

SEQ ID NO: 1903450 - RNA, 19 nt, Artificial Sequence
  Description of Artificial Sequence: Synthetic oligonucleotide
acaccuauccgauucccga

SEQ ID NO: 1903451 - RNA, 19 nt, Artificial Sequence
  Description of Artificial Sequence: Synthetic oligonucleotide
agacucaguaaguucucug

SEQ ID NO: 1903452 - RNA, 19 nt, Artificial Sequence
  Description of Artificial Sequence: Synthetic oligonucleotide
uucgagacucaguaaguuc

SEQ ID NO: 1903453 - RNA, 19 nt, Artificial Sequence
  Description of Artificial Sequence: Synthetic oligonucleotide
accuauccgauucccgagg

SEQ ID NO: 1903454 - RNA, 19 nt, Artificial Sequence
  Description of Artificial Sequence: Synthetic oligonucleotide
ucuuuguucgagacucagu

SEQ ID NO: 1903455 - RNA, 19 nt, Artificial Sequence
  Description of Artificial Sequence: Synthetic oligonucleotide
uuaugucauuaguuagucu

SEQ ID NO: 1903456 - RNA, 19 nt, Artificial Sequence
  Description of Artificial Sequence: Synthetic oligonucleotide
ucuugccucaugcuacugu

SEQ ID NO: 1903457 - RNA, 19 nt, Artificial Sequence
  Description of Artificial Sequence: Synthetic oligonucleotide
agguaaacuucuaucaggu

SEQ ID NO: 1903458 - RNA, 19 nt, Artificial Sequence
  Description of Artificial Sequence: Synthetic oligonucleotide
uagagauagcuuccugacu

SEQ ID NO: 1903459 - RNA, 19 nt, Artificial Sequence
  Description of Artificial Sequence: Synthetic oligonucleotide
uaaggaucucgcugaaccu

SEQ ID NO: 1903460 - RNA, 19 nt, Artificial Sequence
  Description of Artificial Sequence: Synthetic oligonucleotide
gauuguuguuccccaacga

SEQ ID NO: 1903461 - RNA, 19 nt, Artificial Sequence
  Description of Artificial Sequence: Synthetic oligonucleotide
uccacaccauugaugcgag

SEQ ID NO: 1903462 - RNA, 19 nt, Artificial Sequence
  Description of Artificial Sequence: Synthetic oligonucleotide
ucccaugcaggguugagau

SEQ ID NO: 1903463 - RNA, 19 nt, Artificial Sequence
  Description of Artificial Sequence: Synthetic oligonucleotide
aaggaaacaccuauccgau

SEQ ID NO: 1903464 - RNA, 19 nt, Artificial Sequence
  Description of Artificial Sequence: Synthetic oligonucleotide
uuuguucgagacucaguaa

SEQ ID NO: 1903465 - RNA, 19 nt, Artificial Sequence
  Description of Artificial Sequence: Synthetic oligonucleotide
aguuagucuuuguucgaga

SEQ ID NO: 1903466 - RNA, 19 nt, Artificial Sequence
  Description of Artificial Sequence: Synthetic oligonucleotide
uacucucgguucaugcccc

SEQ ID NO: 1903467 - RNA, 19 nt, Artificial Sequence
  Description of Artificial Sequence: Synthetic oligonucleotide
uuacuuccgucauccagga

SEQ ID NO: 1903468 - RNA, 19 nt, Artificial Sequence
  Description of Artificial Sequence: Synthetic oligonucleotide
ucgcugaaccucacaauac

SEQ ID NO: 1903469 - RNA, 19 nt, Artificial Sequence
  Description of Artificial Sequence: Synthetic oligonucleotide
uuucuauugcuugggcggc

SEQ ID NO: 1903470 - RNA, 19 nt, Artificial Sequence
  Description of Artificial Sequence: Synthetic oligonucleotide
cucguggcgagucugccag

SEQ ID NO: 1903471 - RNA, 19 nt, Artificial Sequence
  Description of Artificial Sequence: Synthetic oligonucleotide
cuguucuuccgugaagggg

SEQ ID NO: 1903472 - RNA, 19 nt, Artificial Sequence
  Description of Artificial Sequence: Synthetic oligonucleotide
uugagacaacugacaggcg

SEQ ID NO: 1903473 - RNA, 19 nt, Artificial Sequence
  Description of Artificial Sequence: Synthetic oligonucleotide
cuugucaaaacuugaaaau

SEQ ID NO: 1903474 - RNA, 19 nt, Artificial Sequence
  Description of Artificial Sequence: Synthetic oligonucleotide
ugacuuggguuacuccaca

SEQ ID NO: 1903475 - RNA, 19 nt, Artificial Sequence
  Description of Artificial Sequence: Synthetic oligonucleotide
aucgcacguagcccagacc

SEQ ID NO: 1903476 - RNA, 19 nt, Artificial Sequence
  Description of Artificial Sequence: Synthetic oligonucleotide
aaccacaccaugaccauaa

SEQ ID NO: 1903477 - RNA, 19 nt, Artificial Sequence
  Description of Artificial Sequence: Synthetic oligonucleotide
uucuaucugcauacuugac

SEQ ID NO: 1903478 - RNA, 19 nt, Artificial Sequence
  Description of Artificial Sequence: Synthetic oligonucleotide
ggaaacagauuuacucucg

SEQ ID NO: 1903479 - RNA, 19 nt, Artificial Sequence
  Description of Artificial Sequence: Synthetic oligonucleotide
aauaucgcacguagcccag

SEQ ID NO: 1903480 - RNA, 19 nt, Artificial Sequence
  Description of Artificial Sequence: Synthetic oligonucleotide
gcucauucuaucugcauac

SEQ ID NO: 1903481 - RNA, 19 nt, Artificial Sequence
  Description of Artificial Sequence: Synthetic oligonucleotide
gacaggcguuuagagauag

SEQ ID NO: 1903482 - RNA, 19 nt, Artificial Sequence
  Description of Artificial Sequence: Synthetic oligonucleotide
uggcgcucauucuaucugc

SEQ ID NO: 1903483 - RNA, 19 nt, Artificial Sequence
  Description of Artificial Sequence: Synthetic oligonucleotide
cugcauacuugacguagcc

SEQ ID NO: 1903484 - RNA, 19 nt, Artificial Sequence
  Description of Artificial Sequence: Synthetic oligonucleotide
cugcaauacucgaugucac

SEQ ID NO: 1903485 - RNA, 19 nt, Artificial Sequence
  Description of Artificial Sequence: Synthetic oligonucleotide
cugacuuggguuacuccac

SEQ ID NO: 1903486 - RNA, 19 nt, Artificial Sequence
  Description of Artificial Sequence: Synthetic oligonucleotide
uaucgcacguagcccagac

SEQ ID NO: 1903487 - RNA, 19 nt, Artificial Sequence
  Description of Artificial Sequence: Synthetic oligonucleotide
cauacuugacguagcccac

SEQ ID NO: 1903488 - RNA, 19 nt, Artificial Sequence
  Description of Artificial Sequence: Synthetic oligonucleotide
ccuuaaauucucccguagg

SEQ ID NO: 1903489 - RNA, 19 nt, Artificial Sequence
  Description of Artificial Sequence: Synthetic oligonucleotide
ucuuccgugaaggggacuc

SEQ ID NO: 1903490 - RNA, 19 nt, Artificial Sequence
  Description of Artificial Sequence: Synthetic oligonucleotide
ugccccaaagccucuugcc

SEQ ID NO: 1903491 - RNA, 19 nt, Artificial Sequence
  Description of Artificial Sequence: Synthetic oligonucleotide
cucgguucaugccccaaag

SEQ ID NO: 1903492 - RNA, 19 nt, Artificial Sequence
  Description of Artificial Sequence: Synthetic oligonucleotide
uggguuacuccacaccauu

SEQ ID NO: 1903493 - RNA, 19 nt, Artificial Sequence
  Description of Artificial Sequence: Synthetic oligonucleotide
cagauuguuguuccccaac

SEQ ID NO: 1903494 - RNA, 19 nt, Artificial Sequence
  Description of Artificial Sequence: Synthetic oligonucleotide
ugacuuucagucggacucc

SEQ ID NO: 1903495 - RNA, 19 nt, Artificial Sequence
  Description of Artificial Sequence: Synthetic oligonucleotide
agucagcucaggauuaugu

SEQ ID NO: 1903496 - RNA, 19 nt, Artificial Sequence
  Description of Artificial Sequence: Synthetic oligonucleotide
uccgugaaggggacucuug

SEQ ID NO: 1903497 - RNA, 19 nt, Artificial Sequence
  Description of Artificial Sequence: Synthetic oligonucleotide
auacugaaccacaccauga

SEQ ID NO: 1903498 - RNA, 19 nt, Artificial Sequence
  Description of Artificial Sequence: Synthetic oligonucleotide
accaugaccauaauucgaa

SEQ ID NO: 1903499 - RNA, 19 nt, Artificial Sequence
  Description of Artificial Sequence: Synthetic oligonucleotide
uuguuccccaacgaaggga

SEQ ID NO: 1903500 - RNA, 19 nt, Artificial Sequence
  Description of Artificial Sequence: Synthetic oligonucleotide
acguagcccagaccuuuac

SEQ ID NO: 1903501 - RNA, 19 nt, Artificial Sequence
  Description of Artificial Sequence: Synthetic oligonucleotide
ucuuucuuucacaggcguu

SEQ ID NO: 1903502 - RNA, 19 nt, Artificial Sequence
  Description of Artificial Sequence: Synthetic oligonucleotide
aacaucugucuggauuuga

SEQ ID NO: 1903503 - RNA, 19 nt, Artificial Sequence
  Description of Artificial Sequence: Synthetic oligonucleotide
ggacucuugagacaacuga

SEQ ID NO: 1903504 - RNA, 19 nt, Artificial Sequence
  Description of Artificial Sequence: Synthetic oligonucleotide
cagauuuacucucgguuca

SEQ ID NO: 1903505 - RNA, 19 nt, Artificial Sequence
  Description of Artificial Sequence: Synthetic oligonucleotide
uuccccaacgaagggaaac

SEQ ID NO: 1903506 - RNA, 19 nt, Artificial Sequence
  Description of Artificial Sequence: Synthetic oligonucleotide
ucagauuguuguuccccaa

SEQ ID NO: 1903507 - RNA, 19 nt, Artificial Sequence
  Description of Artificial Sequence: Synthetic oligonucleotide
ucuucucguggcgagucug

SEQ ID NO: 1903508 - RNA, 19 nt, Artificial Sequence
  Description of Artificial Sequence: Synthetic oligonucleotide
uccugacacaagguaaacu

SEQ ID NO: 1903509 - RNA, 19 nt, Artificial Sequence
  Description of Artificial Sequence: Synthetic oligonucleotide
acgucuaaugguaauggau

SEQ ID NO: 1903510 - RNA, 19 nt, Artificial Sequence
  Description of Artificial Sequence: Synthetic oligonucleotide
ugaugagaucugccgaauu

SEQ ID NO: 1903511 - RNA, 19 nt, Artificial Sequence
  Description of Artificial Sequence: Synthetic oligonucleotide
cuucucguggcgagucugc

SEQ ID NO: 1903512 - RNA, 19 nt, Artificial Sequence
  Description of Artificial Sequence: Synthetic oligonucleotide
caccuauccgauucccgag

SEQ ID NO: 1903513 - RNA, 19 nt, Artificial Sequence
  Description of Artificial Sequence: Synthetic oligonucleotide
cuauccgauucccgagggg

SEQ ID NO: 1903514 - RNA, 19 nt, Artificial Sequence
  Description of Artificial Sequence: Synthetic oligonucleotide
gauugcaucguuggcgcuc

SEQ ID NO: 1903515 - RNA, 19 nt, Artificial Sequence
  Description of Artificial Sequence: Synthetic oligonucleotide
acuccacaccauugaugcg

SEQ ID NO: 1903516 - RNA, 19 nt, Artificial Sequence
  Description of Artificial Sequence: Synthetic oligonucleotide
uggggacucagguacuuua

SEQ ID NO: 1903517 - RNA, 19 nt, Artificial Sequence
  Description of Artificial Sequence: Synthetic oligonucleotide
ccaugcaggguugagauug

SEQ ID NO: 1903518 - RNA, 19 nt, Artificial Sequence
  Description of Artificial Sequence: Synthetic oligonucleotide
gucuuuguucgagacucag

SEQ ID NO: 1903519 - RNA, 19 nt, Artificial Sequence
  Description of Artificial Sequence: Synthetic oligonucleotide
uccaguccugggacuaugu

SEQ ID NO: 1903520 - RNA, 19 nt, Artificial Sequence
  Description of Artificial Sequence: Synthetic oligonucleotide
uucgggaggggcuuucuuu

SEQ ID NO: 1903521 - RNA, 19 nt, Artificial Sequence
  Description of Artificial Sequence: Synthetic oligonucleotide
uugaugcgagcugggacgc

SEQ ID NO: 1903522 - RNA, 19 nt, Artificial Sequence
  Description of Artificial Sequence: Synthetic oligonucleotide
gguuacuccacaccauuga

SEQ ID NO: 1903523 - RNA, 19 nt, Artificial Sequence
  Description of Artificial Sequence: Synthetic oligonucleotide
augcugcaauacucgaugu

SEQ ID NO: 1903524 - RNA, 19 nt, Artificial Sequence
  Description of Artificial Sequence: Synthetic oligonucleotide
uugacguagcccacauuuu

SEQ ID NO: 1903525 - RNA, 19 nt, Artificial Sequence
  Description of Artificial Sequence: Synthetic oligonucleotide
gcaucguuggcgcucauuc

SEQ ID NO: 1903526 - RNA, 19 nt, Artificial Sequence
  Description of Artificial Sequence: Synthetic oligonucleotide
cucgcugaaccucacaaua

SEQ ID NO: 1903527 - RNA, 19 nt, Artificial Sequence
  Description of Artificial Sequence: Synthetic oligonucleotide
caugcaggguugagauugc

SEQ ID NO: 1903528 - RNA, 19 nt, Artificial Sequence
  Description of Artificial Sequence: Synthetic oligonucleotide
uucccaugcaggguugaga

SEQ ID NO: 1903529 - RNA, 19 nt, Artificial Sequence
  Description of Artificial Sequence: Synthetic oligonucleotide
uacuggaauccaugcaauu

SEQ ID NO: 1903530 - RNA, 19 nt, Artificial Sequence
  Description of Artificial Sequence: Synthetic oligonucleotide
uugcaggauggaaguacaa

SEQ ID NO: 1903531 - RNA, 19 nt, Artificial Sequence
  Description of Artificial Sequence: Synthetic oligonucleotide
ucucguggcgagucugcca

SEQ ID NO: 1903532 - RNA, 19 nt, Artificial Sequence
  Description of Artificial Sequence: Synthetic oligonucleotide
ugucaccauacaccuuaaa

SEQ ID NO: 1903533 - RNA, 19 nt, Artificial Sequence
  Description of Artificial Sequence: Synthetic oligonucleotide
gcuacuguaauaaucuugu

SEQ ID NO: 1903534 - RNA, 19 nt, Artificial Sequence
  Description of Artificial Sequence: Synthetic oligonucleotide
uucuucucguggcgagucu

SEQ ID NO: 1903535 - RNA, 19 nt, Artificial Sequence
  Description of Artificial Sequence: Synthetic oligonucleotide
auugcaucguuggcgcuca

SEQ ID NO: 1903536 - RNA, 19 nt, Artificial Sequence
  Description of Artificial Sequence: Synthetic oligonucleotide
auauauccuccaacacguc

SEQ ID NO: 1903537 - RNA, 19 nt, Artificial Sequence
  Description of Artificial Sequence: Synthetic oligonucleotide
agccucuugccucaugcua

SEQ ID NO: 1903538 - RNA, 19 nt, Artificial Sequence
  Description of Artificial Sequence: Synthetic oligonucleotide
ugacuucugcugucacucu

SEQ ID NO: 1903539 - RNA, 19 nt, Artificial Sequence
  Description of Artificial Sequence: Synthetic oligonucleotide
cugccgaauuacuuccguc

SEQ ID NO: 1903540 - RNA, 19 nt, Artificial Sequence
  Description of Artificial Sequence: Synthetic oligonucleotide
gguuaccaaaacgacagaa

SEQ ID NO: 1903541 - RNA, 19 nt, Artificial Sequence
  Description of Artificial Sequence: Synthetic oligonucleotide
uucuggggacucagguacu

SEQ ID NO: 1903542 - RNA, 19 nt, Artificial Sequence
  Description of Artificial Sequence: Synthetic oligonucleotide
uggguucuucucguggcga

SEQ ID NO: 1903543 - RNA, 19 nt, Artificial Sequence
  Description of Artificial Sequence: Synthetic oligonucleotide
ggauggaaguacaacaucu

SEQ ID NO: 1903544 - RNA, 19 nt, Artificial Sequence
  Description of Artificial Sequence: Synthetic oligonucleotide
gaugcgagcugggacgcca

SEQ ID NO: 1903545 - RNA, 19 nt, Artificial Sequence
  Description of Artificial Sequence: Synthetic oligonucleotide
gguugagauugcaucguug

SEQ ID NO: 1903546 - RNA, 19 nt, Artificial Sequence
  Description of Artificial Sequence: Synthetic oligonucleotide
aggguugagauugcaucgu

SEQ ID NO: 1903547 - RNA, 19 nt, Artificial Sequence
  Description of Artificial Sequence: Synthetic oligonucleotide
guagcccagaccuuuacuu

SEQ ID NO: 1903548 - RNA, 19 nt, Artificial Sequence
  Description of Artificial Sequence: Synthetic oligonucleotide
cacgucuaaugguaaugga

SEQ ID NO: 1903549 - RNA, 19 nt, Artificial Sequence
  Description of Artificial Sequence: Synthetic oligonucleotide
uucucguggcgagucugcc

SEQ ID NO: 1903550 - RNA, 19 nt, Artificial Sequence
  Description of Artificial Sequence: Synthetic oligonucleotide
auacuugacguagcccaca

SEQ ID NO: 1903551 - RNA, 19 nt, Artificial Sequence
  Description of Artificial Sequence: Synthetic oligonucleotide
guuaccaaaacgacagaau

SEQ ID NO: 1903552 - RNA, 19 nt, Artificial Sequence
  Description of Artificial Sequence: Synthetic oligonucleotide
acaggcguuuagagauagc

SEQ ID NO: 1903553 - RNA, 19 nt, Artificial Sequence
  Description of Artificial Sequence: Synthetic oligonucleotide
aucugccgaauuacuuccg

SEQ ID NO: 1903554 - RNA, 19 nt, Artificial Sequence
  Description of Artificial Sequence: Synthetic oligonucleotide
ugacaggcguuuagagaua

SEQ ID NO: 1903555 - RNA, 19 nt, Artificial Sequence
  Description of Artificial Sequence: Synthetic oligonucleotide
ggaugaggguuaaacacga

SEQ ID NO: 1903556 - RNA, 19 nt, Artificial Sequence
  Description of Artificial Sequence: Synthetic oligonucleotide
caggcguuucgggaggggc

SEQ ID NO: 1903557 - RNA, 19 nt, Artificial Sequence
  Description of Artificial Sequence: Synthetic oligonucleotide
agauugcaucguuggcgcu

SEQ ID NO: 1903558 - RNA, 19 nt, Artificial Sequence
  Description of Artificial Sequence: Synthetic oligonucleotide
agcugggacgccaccaucu

SEQ ID NO: 1903559 - RNA, 19 nt, Artificial Sequence
  Description of Artificial Sequence: Synthetic oligonucleotide
uuucgggaggggcuuucuu

SEQ ID NO: 1903560 - RNA, 19 nt, Artificial Sequence
  Description of Artificial Sequence: Synthetic oligonucleotide
cacaccauugaugcgagcu

SEQ ID NO: 1903561 - RNA, 19 nt, Artificial Sequence
  Description of Artificial Sequence: Synthetic oligonucleotide
ugcgagcugggacgccacc

SEQ ID NO: 1903562 - RNA, 19 nt, Artificial Sequence
  Description of Artificial Sequence: Synthetic oligonucleotide
caggcguuuagagauagcu

SEQ ID NO: 1903563 - RNA, 19 nt, Artificial Sequence
  Description of Artificial Sequence: Synthetic oligonucleotide
cuucuaucacaguuuucua

SEQ ID NO: 1903564 - RNA, 19 nt, Artificial Sequence
  Description of Artificial Sequence: Synthetic oligonucleotide
guuacuccacaccauugau

SEQ ID NO: 1903565 - RNA, 19 nt, Artificial Sequence
  Description of Artificial Sequence: Synthetic oligonucleotide
uucuauugcuugggcggcu

SEQ ID NO: 1903566 - RNA, 19 nt, Artificial Sequence
  Description of Artificial Sequence: Synthetic oligonucleotide
ccauaauucgaauaaggau

SEQ ID NO: 1903567 - RNA, 19 nt, Artificial Sequence
  Description of Artificial Sequence: Synthetic oligonucleotide
cuauugcuugggcggcuug

SEQ ID NO: 1903568 - RNA, 19 nt, Artificial Sequence
  Description of Artificial Sequence: Synthetic oligonucleotide
uacuccaguccugggacua

SEQ ID NO: 1903569 - RNA, 19 nt, Artificial Sequence
  Description of Artificial Sequence: Synthetic oligonucleotide
caugacuuucagucggacu

SEQ ID NO: 1903570 - RNA, 19 nt, Artificial Sequence
  Description of Artificial Sequence: Synthetic oligonucleotide
gcguuuagagauagcuucc

SEQ ID NO: 1903571 - RNA, 19 nt, Artificial Sequence
  Description of Artificial Sequence: Synthetic oligonucleotide
aggaaacaccuauccgauu

SEQ ID NO: 1903572 - RNA, 19 nt, Artificial Sequence
  Description of Artificial Sequence: Synthetic oligonucleotide
gacacaagguaaacuucua

SEQ ID NO: 1903573 - RNA, 19 nt, Artificial Sequence
  Description of Artificial Sequence: Synthetic oligonucleotide
caacaucugucuggauuug

SEQ ID NO: 1903574 - RNA, 19 nt, Artificial Sequence
  Description of Artificial Sequence: Synthetic oligonucleotide
ccucaugcuacuguaauaa

SEQ ID NO: 1903575 - RNA, 19 nt, Artificial Sequence
  Description of Artificial Sequence: Synthetic oligonucleotide
ggcaacugugacccagaac

SEQ ID NO: 1903576 - RNA, 19 nt, Artificial Sequence
  Description of Artificial Sequence: Synthetic oligonucleotide
acaggcguuucgggagggg

SEQ ID NO: 1903577 - RNA, 19 nt, Artificial Sequence
  Description of Artificial Sequence: Synthetic oligonucleotide
agacaacugacaggcguuu

SEQ ID NO: 1903578 - RNA, 19 nt, Artificial Sequence
  Description of Artificial Sequence: Synthetic oligonucleotide
ucuggggacucagguacuu

SEQ ID NO: 1903579 - RNA, 19 nt, Artificial Sequence
  Description of Artificial Sequence: Synthetic oligonucleotide
gagcugggacgccaccauc

SEQ ID NO: 1903580 - RNA, 19 nt, Artificial Sequence
  Description of Artificial Sequence: Synthetic oligonucleotide
gccucuugccucaugcuac

SEQ ID NO: 1903581 - RNA, 19 nt, Artificial Sequence
  Description of Artificial Sequence: Synthetic oligonucleotide
gagaucugccgaauuacuu

SEQ ID NO: 1903582 - RNA, 19 nt, Artificial Sequence
  Description of Artificial Sequence: Synthetic oligonucleotide
aggcguuuagagauagcuu

SEQ ID NO: 1903583 - RNA, 19 nt, Artificial Sequence
  Description of Artificial Sequence: Synthetic oligonucleotide
ggacucagguacuuuauuu

SEQ ID NO: 1903584 - RNA, 19 nt, Artificial Sequence
  Description of Artificial Sequence: Synthetic oligonucleotide
acgaagggaaacagauuua

SEQ ID NO: 1903585 - RNA, 19 nt, Artificial Sequence
  Description of Artificial Sequence: Synthetic oligonucleotide
uacuuccgucauccaggaa

SEQ ID NO: 1903586 - RNA, 19 nt, Artificial Sequence
  Description of Artificial Sequence: Synthetic oligonucleotide
agucuuuguucgagacuca

SEQ ID NO: 1903587 - RNA, 19 nt, Artificial Sequence
  Description of Artificial Sequence: Synthetic oligonucleotide
gagacaacugacaggcguu

SEQ ID NO: 1903588 - RNA, 19 nt, Artificial Sequence
  Description of Artificial Sequence: Synthetic oligonucleotide
gguucagccaagagugcuc

SEQ ID NO: 1903589 - RNA, 19 nt, Artificial Sequence
  Description of Artificial Sequence: Synthetic oligonucleotide
guucagccaagagugcucu

SEQ ID NO: 1903590 - RNA, 19 nt, Artificial Sequence
  Description of Artificial Sequence: Synthetic oligonucleotide
ccccaaagccucuugccuc

SEQ ID NO: 1903591 - RNA, 19 nt, Artificial Sequence
  Description of Artificial Sequence: Synthetic oligonucleotide
cagggaguucguccaguca

SEQ ID NO: 1903592 - RNA, 19 nt, Artificial Sequence
  Description of Artificial Sequence: Synthetic oligonucleotide
uuccgugaaggggacucuu

SEQ ID NO: 1903593 - RNA, 19 nt, Artificial Sequence
  Description of Artificial Sequence: Synthetic oligonucleotide
ugaugcgagcugggacgcc

SEQ ID NO: 1903594 - RNA, 19 nt, Artificial Sequence
  Description of Artificial Sequence: Synthetic oligonucleotide
ucguggcgagucugccagc

SEQ ID NO: 1903595 - RNA, 19 nt, Artificial Sequence
  Description of Artificial Sequence: Synthetic oligonucleotide
auaucgcacguagcccaga

SEQ ID NO: 1903596 - RNA, 19 nt, Artificial Sequence
  Description of Artificial Sequence: Synthetic oligonucleotide
ugcaucguuggcgcucauu

SEQ ID NO: 1903597 - RNA, 19 nt, Artificial Sequence
  Description of Artificial Sequence: Synthetic oligonucleotide
gguaauggaugaggguuaa

SEQ ID NO: 1903598 - RNA, 19 nt, Artificial Sequence
  Description of Artificial Sequence: Synthetic oligonucleotide
gacaacugacaggcguuua

SEQ ID NO: 1903599 - RNA, 19 nt, Artificial Sequence
  Description of Artificial Sequence: Synthetic oligonucleotide
augcaggguugagauugca

SEQ ID NO: 1903600 - RNA, 19 nt, Artificial Sequence
  Description of Artificial Sequence: Synthetic oligonucleotide
guucgagacucaguaaguu

SEQ ID NO: 1903601 - RNA, 19 nt, Artificial Sequence
  Description of Artificial Sequence: Synthetic oligonucleotide
ugggcggcuugugaugguu

SEQ ID NO: 1903602 - RNA, 19 nt, Artificial Sequence
  Description of Artificial Sequence: Synthetic oligonucleotide
cucuugccucaugcuacug

SEQ ID NO: 1903603 - RNA, 19 nt, Artificial Sequence
  Description of Artificial Sequence: Synthetic oligonucleotide
caacacgucuaaugguaau

SEQ ID NO: 1903604 - RNA, 19 nt, Artificial Sequence
  Description of Artificial Sequence: Synthetic oligonucleotide
caucguuggcgcucauucu

SEQ ID NO: 1903605 - RNA, 19 nt, Artificial Sequence
  Description of Artificial Sequence: Synthetic oligonucleotide
guaauggaugaggguuaaa

SEQ ID NO: 1903606 - RNA, 19 nt, Artificial Sequence
  Description of Artificial Sequence: Synthetic oligonucleotide
ccaacacgucuaaugguaa

SEQ ID NO: 1903607 - RNA, 19 nt, Artificial Sequence
  Description of Artificial Sequence: Synthetic oligonucleotide
cgacagaauauauccucca

SEQ ID NO: 1903608 - RNA, 19 nt, Artificial Sequence
  Description of Artificial Sequence: Synthetic oligonucleotide
caacgaagggaaacagauu

SEQ ID NO: 1903609 - RNA, 19 nt, Artificial Sequence
  Description of Artificial Sequence: Synthetic oligonucleotide
gcaugacuuucagucggac

SEQ ID NO: 1903610 - RNA, 19 nt, Artificial Sequence
  Description of Artificial Sequence: Synthetic oligonucleotide
augucaccauacaccuuaa

SEQ ID NO: 1903611 - RNA, 19 nt, Artificial Sequence
  Description of Artificial Sequence: Synthetic oligonucleotide
ccaguccugggacuauguc

SEQ ID NO: 1903612 - RNA, 19 nt, Artificial Sequence
  Description of Artificial Sequence: Synthetic oligonucleotide
ccccaacgaagggaaacag

SEQ ID NO: 1903613 - RNA, 19 nt, Artificial Sequence
  Description of Artificial Sequence: Synthetic oligonucleotide
gucuggauuugaggcaacu

SEQ ID NO: 1903614 - RNA, 19 nt, Artificial Sequence
  Description of Artificial Sequence: Synthetic oligonucleotide
gccucaugcuacuguaaua

SEQ ID NO: 1903615 - RNA, 19 nt, Artificial Sequence
  Description of Artificial Sequence: Synthetic oligonucleotide
acuuucagucggacuccau

SEQ ID NO: 1903616 - RNA, 19 nt, Artificial Sequence
  Description of Artificial Sequence: Synthetic oligonucleotide
gguaaacuucuaucagguu

SEQ ID NO: 1903617 - RNA, 19 nt, Artificial Sequence
  Description of Artificial Sequence: Synthetic oligonucleotide
cucauucuaucugcauacu

SEQ ID NO: 1903618 - RNA, 19 nt, Artificial Sequence
  Description of Artificial Sequence: Synthetic oligonucleotide
ccgugaaggggacucuuga

SEQ ID NO: 1903619 - RNA, 19 nt, Artificial Sequence
  Description of Artificial Sequence: Synthetic oligonucleotide
gaguucguccagucacauu

SEQ ID NO: 1903620 - RNA, 19 nt, Artificial Sequence
  Description of Artificial Sequence: Synthetic oligonucleotide
ggcgcucauucuaucugca

SEQ ID NO: 1903621 - RNA, 19 nt, Artificial Sequence
  Description of Artificial Sequence: Synthetic oligonucleotide
caacugugacccagaacuu

SEQ ID NO: 1903622 - RNA, 19 nt, Artificial Sequence
  Description of Artificial Sequence: Synthetic oligonucleotide
ccuccaaauugcagaaacu

SEQ ID NO: 1903623 - RNA, 19 nt, Artificial Sequence
  Description of Artificial Sequence: Synthetic oligonucleotide
cgcucauucuaucugcaua

SEQ ID NO: 1903624 - RNA, 19 nt, Artificial Sequence
  Description of Artificial Sequence: Synthetic oligonucleotide
uugcaucguuggcgcucau

SEQ ID NO: 1903625 - RNA, 19 nt, Artificial Sequence
  Description of Artificial Sequence: Synthetic oligonucleotide
cugaugagaucugccgaau

SEQ ID NO: 1903626 - RNA, 19 nt, Artificial Sequence
  Description of Artificial Sequence: Synthetic oligonucleotide
guacaacaucugucuggau

SEQ ID NO: 1903627 - RNA, 19 nt, Artificial Sequence
  Description of Artificial Sequence: Synthetic oligonucleotide
gggacucagguacuuuauu

SEQ ID NO: 1903628 - RNA, 19 nt, Artificial Sequence
  Description of Artificial Sequence: Synthetic oligonucleotide
gcgagcugggacgccacca

SEQ ID NO: 1903629 - RNA, 19 nt, Artificial Sequence
  Description of Artificial Sequence: Synthetic oligonucleotide
cacagggaguucguccagu

SEQ ID NO: 1903630 - RNA, 19 nt, Artificial Sequence
  Description of Artificial Sequence: Synthetic oligonucleotide
cguuggcgcucauucuauc

SEQ ID NO: 1903631 - RNA, 19 nt, Artificial Sequence
  Description of Artificial Sequence: Synthetic oligonucleotide
gguucuucucguggcgagu

SEQ ID NO: 1903632 - RNA, 19 nt, Artificial Sequence
  Description of Artificial Sequence: Synthetic oligonucleotide
cgcugaaccucacaauacu

SEQ ID NO: 1903633 - RNA, 19 nt, Artificial Sequence
  Description of Artificial Sequence: Synthetic oligonucleotide
gcgagucugccagcaugac

SEQ ID NO: 1903634 - RNA, 19 nt, Artificial Sequence
  Description of Artificial Sequence: Synthetic oligonucleotide
ggaguucguccagucacau

SEQ ID NO: 1903635 - RNA, 19 nt, Artificial Sequence
  Description of Artificial Sequence: Synthetic oligonucleotide
ccaugaccauaauucgaau

SEQ ID NO: 1903636 - RNA, 19 nt, Artificial Sequence
  Description of Artificial Sequence: Synthetic oligonucleotide
ccucuugccucaugcuacu

SEQ ID NO: 1903637 - RNA, 19 nt, Artificial Sequence
  Description of Artificial Sequence: Synthetic oligonucleotide
guggcgagucugccagcau

SEQ ID NO: 1903638 - RNA, 19 nt, Artificial Sequence
  Description of Artificial Sequence: Synthetic oligonucleotide
gcgcucauucuaucugcau

SEQ ID NO: 1903639 - RNA, 19 nt, Artificial Sequence
  Description of Artificial Sequence: Synthetic oligonucleotide
cguggcgagucugccagca

SEQ ID NO: 1903640 - RNA, 19 nt, Artificial Sequence
  Description of Artificial Sequence: Synthetic oligonucleotide
gcggcuugugaugguuuua

SEQ ID NO: 1903641 - RNA, 19 nt, Artificial Sequence
  Description of Artificial Sequence: Synthetic oligonucleotide
cguagcccagaccuuuacu

SEQ ID NO: 1903642 - RNA, 19 nt, Artificial Sequence
  Description of Artificial Sequence: Synthetic oligonucleotide
cuggggacucagguacuuu

SEQ ID NO: 1903643 - RNA, 19 nt, Artificial Sequence
  Description of Artificial Sequence: Synthetic oligonucleotide
cccaugcaggguugagauu

SEQ ID NO: 1903644 - RNA, 19 nt, Artificial Sequence
  Description of Artificial Sequence: Synthetic oligonucleotide
cgcacguagcccagaccuu

SEQ ID NO: 1903645 - RNA, 19 nt, Artificial Sequence
  Description of Artificial Sequence: Synthetic oligonucleotide
gcguuucgggaggggcuuu

SEQ ID NO: 1903646 - RNA, 19 nt, Artificial Sequence
  Description of Artificial Sequence: Synthetic oligonucleotide
aauaauaacacaagaacgg

SEQ ID NO: 1903647 - RNA, 19 nt, Artificial Sequence
  Description of Artificial Sequence: Synthetic oligonucleotide
aaauucccaaaauaauucc

SEQ ID NO: 1903648 - RNA, 19 nt, Artificial Sequence
  Description of Artificial Sequence: Synthetic oligonucleotide
ucaauuaacguuaagggga

SEQ ID NO: 1903649 - RNA, 19 nt, Artificial Sequence
  Description of Artificial Sequence: Synthetic oligonucleotide
ucuaagaugauucauuugu

SEQ ID NO: 1903650 - RNA, 19 nt, Artificial Sequence
  Description of Artificial Sequence: Synthetic oligonucleotide
agucaauuaacguuaaggg

SEQ ID NO: 1903651 - RNA, 19 nt, Artificial Sequence
  Description of Artificial Sequence: Synthetic oligonucleotide
aauugauagaccuaaccug

SEQ ID NO: 1903652 - RNA, 19 nt, Artificial Sequence
  Description of Artificial Sequence: Synthetic oligonucleotide
aaagguaucgcauugugga

SEQ ID NO: 1903653 - RNA, 19 nt, Artificial Sequence
  Description of Artificial Sequence: Synthetic oligonucleotide
uuucguaaaacauugguca

SEQ ID NO: 1903654 - RNA, 19 nt, Artificial Sequence
  Description of Artificial Sequence: Synthetic oligonucleotide
uuguaaguaaauauuguag

SEQ ID NO: 1903655 - RNA, 19 nt, Artificial Sequence
  Description of Artificial Sequence: Synthetic oligonucleotide
cuaaacaagggucuuaugg

SEQ ID NO: 1903656 - RNA, 19 nt, Artificial Sequence
  Description of Artificial Sequence: Synthetic oligonucleotide
aauaacacaagaacggcac

SEQ ID NO: 1903657 - RNA, 19 nt, Artificial Sequence
  Description of Artificial Sequence: Synthetic oligonucleotide
aauagauaauucaauuugg

SEQ ID NO: 1903658 - RNA, 19 nt, Artificial Sequence
  Description of Artificial Sequence: Synthetic oligonucleotide
auagaccuaaccuggaagc

SEQ ID NO: 1903659 - RNA, 19 nt, Artificial Sequence
  Description of Artificial Sequence: Synthetic oligonucleotide
aaaauacgauuugaaaggc

SEQ ID NO: 1903660 - RNA, 19 nt, Artificial Sequence
  Description of Artificial Sequence: Synthetic oligonucleotide
ucagaaaucccauuguaag

SEQ ID NO: 1903661 - RNA, 19 nt, Artificial Sequence
  Description of Artificial Sequence: Synthetic oligonucleotide
cucaacauaaccugcaagg

SEQ ID NO: 1903662 - RNA, 19 nt, Artificial Sequence
  Description of Artificial Sequence: Synthetic oligonucleotide
uguaaguaaauauuguagu

SEQ ID NO: 1903663 - RNA, 19 nt, Artificial Sequence
  Description of Artificial Sequence: Synthetic oligonucleotide
aguaaauaauaacacaaga

SEQ ID NO: 1903664 - RNA, 19 nt, Artificial Sequence
  Description of Artificial Sequence: Synthetic oligonucleotide
uaagaucgggaauugauag

SEQ ID NO: 1903665 - RNA, 19 nt, Artificial Sequence
  Description of Artificial Sequence: Synthetic oligonucleotide
gagucaauuaacguuaagg

SEQ ID NO: 1903666 - RNA, 19 nt, Artificial Sequence
  Description of Artificial Sequence: Synthetic oligonucleotide
cuuauggagucaauuaacg

SEQ ID NO: 1903667 - RNA, 19 nt, Artificial Sequence
  Description of Artificial Sequence: Synthetic oligonucleotide
aauaacuucuaacuucagu

SEQ ID NO: 1903668 - RNA, 19 nt, Artificial Sequence
  Description of Artificial Sequence: Synthetic oligonucleotide
aacccuaugaaagguaucg

SEQ ID NO: 1903669 - RNA, 19 nt, Artificial Sequence
  Description of Artificial Sequence: Synthetic oligonucleotide
  modified_base (17)..(17): a, c, u, g, unknown or other
auuaacguuaaggggancc

SEQ ID NO: 1903670 - RNA, 19 nt, Artificial Sequence
  Description of Artificial Sequence: Synthetic oligonucleotide
auguacccaguuuacaugc

SEQ ID NO: 1903671 - RNA, 19 nt, Artificial Sequence
  Description of Artificial Sequence: Synthetic oligonucleotide
gucaauuaacguuaagggg

SEQ ID NO: 1903672 - RNA, 19 nt, Artificial Sequence
  Description of Artificial Sequence: Synthetic oligonucleotide
uggaagaauacauaucuca

SEQ ID NO: 1903673 - RNA, 19 nt, Artificial Sequence
  Description of Artificial Sequence: Synthetic oligonucleotide
aaacaagggucuuauggag

SEQ ID NO: 1903674 - RNA, 19 nt, Artificial Sequence
  Description of Artificial Sequence: Synthetic oligonucleotide
auaacuucuaacuucaguu

SEQ ID NO: 1903675 - RNA, 19 nt, Artificial Sequence
  Description of Artificial Sequence: Synthetic oligonucleotide
auuuuaauuccccaaagaa

SEQ ID NO: 1903676 - RNA, 19 nt, Artificial Sequence
  Description of Artificial Sequence: Synthetic oligonucleotide
uuuuaauuccccaaagaau

SEQ ID NO: 1903677 - RNA, 19 nt, Artificial Sequence
  Description of Artificial Sequence: Synthetic oligonucleotide
ugagcaaacaguccucccg

SEQ ID NO: 1903678 - RNA, 19 nt, Artificial Sequence
  Description of Artificial Sequence: Synthetic oligonucleotide
agaggcaacaaaauguacc

SEQ ID NO: 1903679 - RNA, 19 nt, Artificial Sequence
  Description of Artificial Sequence: Synthetic oligonucleotide
aucuaguuagccaacaugg

SEQ ID NO: 1903680 - RNA, 19 nt, Artificial Sequence
  Description of Artificial Sequence: Synthetic oligonucleotide
ugaaauucccaaaauaauu

SEQ ID NO: 1903681 - RNA, 19 nt, Artificial Sequence
  Description of Artificial Sequence: Synthetic oligonucleotide
uuguaguaaacaaaacuac

SEQ ID NO: 1903682 - RNA, 19 nt, Artificial Sequence
  Description of Artificial Sequence: Synthetic oligonucleotide
aaagggaacauuccuagaa

SEQ ID NO: 1903683 - RNA, 19 nt, Artificial Sequence
  Description of Artificial Sequence: Synthetic oligonucleotide
aaaacuaccaaaauacgau

SEQ ID NO: 1903684 - RNA, 19 nt, Artificial Sequence
  Description of Artificial Sequence: Synthetic oligonucleotide
aacauuccuagaaugcagc

SEQ ID NO: 1903685 - RNA, 19 nt, Artificial Sequence
  Description of Artificial Sequence: Synthetic oligonucleotide
uaaacaagggucuuaugga

SEQ ID NO: 1903686 - RNA, 19 nt, Artificial Sequence
  Description of Artificial Sequence: Synthetic oligonucleotide
ucuuucguaaaacauuggu

SEQ ID NO: 1903687 - RNA, 19 nt, Artificial Sequence
  Description of Artificial Sequence: Synthetic oligonucleotide
uaugaaagguaucgcauug

SEQ ID NO: 1903688 - RNA, 19 nt, Artificial Sequence
  Description of Artificial Sequence: Synthetic oligonucleotide
  modified_base (10)..(10): a, c, u, g, unknown or other
uuaagggganccaucuuca

SEQ ID NO: 1903689 - RNA, 19 nt, Artificial Sequence
  Description of Artificial Sequence: Synthetic oligonucleotide
gauagaccuaaccuggaag

SEQ ID NO: 1903690 - RNA, 19 nt, Artificial Sequence
  Description of Artificial Sequence: Synthetic oligonucleotide
auugauagaccuaaccugg

SEQ ID NO: 1903691 - RNA, 19 nt, Artificial Sequence
  Description of Artificial Sequence: Synthetic oligonucleotide
cacauguucaauuauucug

SEQ ID NO: 1903692 - RNA, 19 nt, Artificial Sequence
  Description of Artificial Sequence: Synthetic oligonucleotide
uaauaacacaagaacggca

SEQ ID NO: 1903693 - RNA, 19 nt, Artificial Sequence
  Description of Artificial Sequence: Synthetic oligonucleotide
uuugccacaugucaacuug

SEQ ID NO: 1903694 - RNA, 19 nt, Artificial Sequence
  Description of Artificial Sequence: Synthetic oligonucleotide
uggauaauuuuaauucccc

SEQ ID NO: 1903695 - RNA, 19 nt, Artificial Sequence
  Description of Artificial Sequence: Synthetic oligonucleotide
aucauaauugcauuaucca

SEQ ID NO: 1903696 - RNA, 19 nt, Artificial Sequence
  Description of Artificial Sequence: Synthetic oligonucleotide
uggccuuugagcaagcagc

SEQ ID NO: 1903697 - RNA, 19 nt, Artificial Sequence
  Description of Artificial Sequence: Synthetic oligonucleotide
aagccaaacccuaugaaag

SEQ ID NO: 1903698 - RNA, 19 nt, Artificial Sequence
  Description of Artificial Sequence: Synthetic oligonucleotide
ucacuauuuaacauacaga

SEQ ID NO: 1903699 - RNA, 19 nt, Artificial Sequence
  Description of Artificial Sequence: Synthetic oligonucleotide
ucaauucuuucguaaaaca

SEQ ID NO: 1903700 - RNA, 19 nt, Artificial Sequence
  Description of Artificial Sequence: Synthetic oligonucleotide
auuguggaagaauacauau

SEQ ID NO: 1903701 - RNA, 19 nt, Artificial Sequence
  Description of Artificial Sequence: Synthetic oligonucleotide
gaaauucccaaaauaauuc

SEQ ID NO: 1903702 - RNA, 19 nt, Artificial Sequence
  Description of Artificial Sequence: Synthetic oligonucleotide
uaaccuggaagccaaggcc

SEQ ID NO: 1903703 - RNA, 19 nt, Artificial Sequence
  Description of Artificial Sequence: Synthetic oligonucleotide
uacgauuugaaaggcauag

SEQ ID NO: 1903704 - RNA, 19 nt, Artificial Sequence
  Description of Artificial Sequence: Synthetic oligonucleotide
uccccaaagaauaacuucu

SEQ ID NO: 1903705 - RNA, 19 nt, Artificial Sequence
  Description of Artificial Sequence: Synthetic oligonucleotide
ucuuauggagucaauuaac

SEQ ID NO: 1903706 - RNA, 19 nt, Artificial Sequence
  Description of Artificial Sequence: Synthetic oligonucleotide
auggauaauuuuaauuccc

SEQ ID NO: 1903707 - RNA, 19 nt, Artificial Sequence
  Description of Artificial Sequence: Synthetic oligonucleotide
agaucgggaauugauagac

SEQ ID NO: 1903708 - RNA, 19 nt, Artificial Sequence
  Description of Artificial Sequence: Synthetic oligonucleotide
uguaagaucgggaauugau

SEQ ID NO: 1903709 - RNA, 19 nt, Artificial Sequence
  Description of Artificial Sequence: Synthetic oligonucleotide
gaugucagauucucugugg

SEQ ID NO: 1903710 - RNA, 19 nt, Artificial Sequence
  Description of Artificial Sequence: Synthetic oligonucleotide
uauggagucaauuaacguu

SEQ ID NO: 1903711 - RNA, 19 nt, Artificial Sequence
  Description of Artificial Sequence: Synthetic oligonucleotide
ugugcuaacacgcguuugc

SEQ ID NO: 1903712 - RNA, 19 nt, Artificial Sequence
  Description of Artificial Sequence: Synthetic oligonucleotide
ucauaauugcauuauccaa

SEQ ID NO: 1903713 - RNA, 19 nt, Artificial Sequence
  Description of Artificial Sequence: Synthetic oligonucleotide
auagauaauucaauuuggg

SEQ ID NO: 1903714 - RNA, 19 nt, Artificial Sequence
  Description of Artificial Sequence: Synthetic oligonucleotide
auuguaaguaaauauugua

SEQ ID NO: 1903715 - RNA, 19 nt, Artificial Sequence
  Description of Artificial Sequence: Synthetic oligonucleotide
uauuuaacauacagaggca

SEQ ID NO: 1903716 - RNA, 19 nt, Artificial Sequence
  Description of Artificial Sequence: Synthetic oligonucleotide
cuuucguaaaacauugguc

SEQ ID NO: 1903717 - RNA, 19 nt, Artificial Sequence
  Description of Artificial Sequence: Synthetic oligonucleotide
uccugcaacaaucauaauu

SEQ ID NO: 1903718 - RNA, 19 nt, Artificial Sequence
  Description of Artificial Sequence: Synthetic oligonucleotide
ugaaagguaucgcauugug

SEQ ID NO: 1903719 - RNA, 19 nt, Artificial Sequence
  Description of Artificial Sequence: Synthetic oligonucleotide
gauucauuuguucguuucc

SEQ ID NO: 1903720 - RNA, 19 nt, Artificial Sequence
  Description of Artificial Sequence: Synthetic oligonucleotide
acaagggucuuauggaguc

SEQ ID NO: 1903721 - RNA, 19 nt, Artificial Sequence
  Description of Artificial Sequence: Synthetic oligonucleotide
cauagucaugcuaagucag

SEQ ID NO: 1903722 - RNA, 19 nt, Artificial Sequence
  Description of Artificial Sequence: Synthetic oligonucleotide
aauaauuccaauagauaau

SEQ ID NO: 1903723 - RNA, 19 nt, Artificial Sequence
  Description of Artificial Sequence: Synthetic oligonucleotide
auuguaguaaacaaaacua

SEQ ID NO: 1903724 - RNA, 19 nt, Artificial Sequence
  Description of Artificial Sequence: Synthetic oligonucleotide
  modified_base (14)..(14): a, c, u, g, unknown or other
aacguuaagggganccauc

SEQ ID NO: 1903725 - RNA, 19 nt, Artificial Sequence
  Description of Artificial Sequence: Synthetic oligonucleotide
cuugcuuugguguaagauc

SEQ ID NO: 1903726 - RNA, 19 nt, Artificial Sequence
  Description of Artificial Sequence: Synthetic oligonucleotide
gaauacauaucucagcugu

SEQ ID NO: 1903727 - RNA, 19 nt, Artificial Sequence
  Description of Artificial Sequence: Synthetic oligonucleotide
gaauugauagaccuaaccu

SEQ ID NO: 1903728 - RNA, 19 nt, Artificial Sequence
  Description of Artificial Sequence: Synthetic oligonucleotide
acuaccaaaauacgauuug

SEQ ID NO: 1903729 - RNA, 19 nt, Artificial Sequence
  Description of Artificial Sequence: Synthetic oligonucleotide
cagaugugugcuaacacgc

SEQ ID NO: 1903730 - RNA, 19 nt, Artificial Sequence
  Description of Artificial Sequence: Synthetic oligonucleotide
auacagaggcaacaaaaug

SEQ ID NO: 1903731 - RNA, 19 nt, Artificial Sequence
  Description of Artificial Sequence: Synthetic oligonucleotide
  modified_base (7)..(7): a, c, u, g, unknown or other
agggganccaucuucagaa

SEQ ID NO: 1903732 - RNA, 19 nt, Artificial Sequence
  Description of Artificial Sequence: Synthetic oligonucleotide
aggucaguaaauaauaaca

SEQ ID NO: 1903733 - RNA, 19 nt, Artificial Sequence
  Description of Artificial Sequence: Synthetic oligonucleotide
gucagauucucuguggugg

SEQ ID NO: 1903734 - RNA, 19 nt, Artificial Sequence
  Description of Artificial Sequence: Synthetic oligonucleotide
uguagaugaagucgcgcgc

SEQ ID NO: 1903735 - RNA, 19 nt, Artificial Sequence
  Description of Artificial Sequence: Synthetic oligonucleotide
acacaagaacggcacaaac

SEQ ID NO: 1903736 - RNA, 19 nt, Artificial Sequence
  Description of Artificial Sequence: Synthetic oligonucleotide
cacacacacacacacacag

SEQ ID NO: 1903737 - RNA, 19 nt, Artificial Sequence
  Description of Artificial Sequence: Synthetic oligonucleotide
auucuuucguaaaacauug

SEQ ID NO: 1903738 - RNA, 19 nt, Artificial Sequence
  Description of Artificial Sequence: Synthetic oligonucleotide
uaguuagccaacauggaua

SEQ ID NO: 1903739 - RNA, 19 nt, Artificial Sequence
  Description of Artificial Sequence: Synthetic oligonucleotide
  modified_base (3)..(3): a, c, u, g, unknown or other
ganccaucuucagaaaucc

SEQ ID NO: 1903740 - RNA, 19 nt, Artificial Sequence
  Description of Artificial Sequence: Synthetic oligonucleotide
aucgggaauugauagaccu

SEQ ID NO: 1903741 - RNA, 19 nt, Artificial Sequence
  Description of Artificial Sequence: Synthetic oligonucleotide
aaacuaccaaaauacgauu

SEQ ID NO: 1903742 - RNA, 19 nt, Artificial Sequence
  Description of Artificial Sequence: Synthetic oligonucleotide
gaaagguaucgcauugugg

SEQ ID NO: 1903743 - RNA, 19 nt, Artificial Sequence
  Description of Artificial Sequence: Synthetic oligonucleotide
  modified_base (11)..(11): a, c, u, g, unknown or other
guuaagggganccaucuuc

SEQ ID NO: 1903744 - RNA, 19 nt, Artificial Sequence
  Description of Artificial Sequence: Synthetic oligonucleotide
cauaauugcauuauccaaa

SEQ ID NO: 1903745 - RNA, 19 nt, Artificial Sequence
  Description of Artificial Sequence: Synthetic oligonucleotide
ugaacaggucaguaaauaa

SEQ ID NO: 1903746 - RNA, 19 nt, Artificial Sequence
  Description of Artificial Sequence: Synthetic oligonucleotide
guaguaaacaaaacuacca

SEQ ID NO: 1903747 - RNA, 19 nt, Artificial Sequence
  Description of Artificial Sequence: Synthetic oligonucleotide
ugggcgauggccuuugagc

SEQ ID NO: 1903748 - RNA, 19 nt, Artificial Sequence
  Description of Artificial Sequence: Synthetic oligonucleotide
aauucccaaaauaauucca

SEQ ID NO: 1903749 - RNA, 19 nt, Artificial Sequence
  Description of Artificial Sequence: Synthetic oligonucleotide
acuauuuaacauacagagg

SEQ ID NO: 1903750 - RNA, 19 nt, Artificial Sequence
  Description of Artificial Sequence: Synthetic oligonucleotide
ucccauuguaaguaaauau

SEQ ID NO: 1903751 - RNA, 19 nt, Artificial Sequence
  Description of Artificial Sequence: Synthetic oligonucleotide
caacauaaccugcaaggcc

SEQ ID NO: 1903752 - RNA, 19 nt, Artificial Sequence
  Description of Artificial Sequence: Synthetic oligonucleotide
  modified_base (16)..(16): a, c, u, g, unknown or other
uuaacguuaaggggancca

SEQ ID NO: 1903753 - RNA, 19 nt, Artificial Sequence
  Description of Artificial Sequence: Synthetic oligonucleotide
uucguuuccaguuucucau

SEQ ID NO: 1903754 - RNA, 19 nt, Artificial Sequence
  Description of Artificial Sequence: Synthetic oligonucleotide
uucuuucguaaaacauugg

SEQ ID NO: 1903755 - RNA, 19 nt, Artificial Sequence
  Description of Artificial Sequence: Synthetic oligonucleotide
acaaaacuaccaaaauacg

SEQ ID NO: 1903756 - RNA, 19 nt, Artificial Sequence
  Description of Artificial Sequence: Synthetic oligonucleotide
caguuuacaugcaugaaca

SEQ ID NO: 1903757 - RNA, 19 nt, Artificial Sequence
  Description of Artificial Sequence: Synthetic oligonucleotide
cacacacacacacacacac

SEQ ID NO: 1903758 - RNA, 19 nt, Artificial Sequence
  Description of Artificial Sequence: Synthetic oligonucleotide
gucacacacacacacacac

SEQ ID NO: 1903759 - RNA, 19 nt, Artificial Sequence
  Description of Artificial Sequence: Synthetic oligonucleotide
auucuaagaugauucauuu

SEQ ID NO: 1903760 - RNA, 19 nt, Artificial Sequence
  Description of Artificial Sequence: Synthetic oligonucleotide
uucauuuguucguuuccag

SEQ ID NO: 1903761 - RNA, 19 nt, Artificial Sequence
  Description of Artificial Sequence: Synthetic oligonucleotide
uuagccaacauggauaauu

SEQ ID NO: 1903762 - RNA, 19 nt, Artificial Sequence
  Description of Artificial Sequence: Synthetic oligonucleotide
ggaauugauagaccuaacc

SEQ ID NO: 1903763 - RNA, 19 nt, Artificial Sequence
  Description of Artificial Sequence: Synthetic oligonucleotide
uucucugugguggaaaaca

SEQ ID NO: 1903764 - RNA, 19 nt, Artificial Sequence
  Description of Artificial Sequence: Synthetic oligonucleotide
agggaacauuccuagaaug

SEQ ID NO: 1903765 - RNA, 19 nt, Artificial Sequence
  Description of Artificial Sequence: Synthetic oligonucleotide
uuccaauagauaauucaau

SEQ ID NO: 1903766 - RNA, 19 nt, Artificial Sequence
  Description of Artificial Sequence: Synthetic oligonucleotide
cuaaccuggaagccaaggc

SEQ ID NO: 1903767 - RNA, 19 nt, Artificial Sequence
  Description of Artificial Sequence: Synthetic oligonucleotide
aauacauaucucagcuguc

SEQ ID NO: 1903768 - RNA, 19 nt, Artificial Sequence
  Description of Artificial Sequence: Synthetic oligonucleotide
ucuaguuagccaacaugga

SEQ ID NO: 1903769 - RNA, 19 nt, Artificial Sequence
  Description of Artificial Sequence: Synthetic oligonucleotide
ucacgguacagcucucugg

SEQ ID NO: 1903770 - RNA, 19 nt, Artificial Sequence
  Description of Artificial Sequence: Synthetic oligonucleotide
uucuaagaugauucauuug

SEQ ID NO: 1903771 - RNA, 19 nt, Artificial Sequence
  Description of Artificial Sequence: Synthetic oligonucleotide
gaacauuccuagaaugcag

SEQ ID NO: 1903772 - RNA, 19 nt, Artificial Sequence
  Description of Artificial Sequence: Synthetic oligonucleotide
aagggaacauuccuagaau

SEQ ID NO: 1903773 - RNA, 19 nt, Artificial Sequence
  Description of Artificial Sequence: Synthetic oligonucleotide
aaggcauagucaugcuaag

SEQ ID NO: 1903774 - RNA, 19 nt, Artificial Sequence
  Description of Artificial Sequence: Synthetic oligonucleotide
ucauuuguucguuuccagu

SEQ ID NO: 1903775 - RNA, 19 nt, Artificial Sequence
  Description of Artificial Sequence: Synthetic oligonucleotide
agaauacauaucucagcug

SEQ ID NO: 1903776 - RNA, 19 nt, Artificial Sequence
  Description of Artificial Sequence: Synthetic oligonucleotide
caucuaguuagccaacaug

SEQ ID NO: 1903777 - RNA, 19 nt, Artificial Sequence
  Description of Artificial Sequence: Synthetic oligonucleotide
aagaucgggaauugauaga

SEQ ID NO: 1903778 - RNA, 19 nt, Artificial Sequence
  Description of Artificial Sequence: Synthetic oligonucleotide
auaauuccaauagauaauu

SEQ ID NO: 1903779 - RNA, 19 nt, Artificial Sequence
  Description of Artificial Sequence: Synthetic oligonucleotide
caggucaguaaauaauaac

SEQ ID NO: 1903780 - RNA, 19 nt, Artificial Sequence
  Description of Artificial Sequence: Synthetic oligonucleotide
uucguaaaacauuggucac

SEQ ID NO: 1903781 - RNA, 19 nt, Artificial Sequence
  Description of Artificial Sequence: Synthetic oligonucleotide
  modified_base (8)..(8): a, c, u, g, unknown or other
aagggganccaucuucaga

SEQ ID NO: 1903782 - RNA, 19 nt, Artificial Sequence
  Description of Artificial Sequence: Synthetic oligonucleotide
cugugucacacacacacac

SEQ ID NO: 1903783 - RNA, 19 nt, Artificial Sequence
  Description of Artificial Sequence: Synthetic oligonucleotide
aacaggucaguaaauaaua

SEQ ID NO: 1903784 - RNA, 19 nt, Artificial Sequence
  Description of Artificial Sequence: Synthetic oligonucleotide
guaaguaaauauuguagua

SEQ ID NO: 1903785 - RNA, 19 nt, Artificial Sequence
  Description of Artificial Sequence: Synthetic oligonucleotide
uaauuccaauagauaauuc

SEQ ID NO: 1903786 - RNA, 19 nt, Artificial Sequence
  Description of Artificial Sequence: Synthetic oligonucleotide
ugcuaagucaggguuuucc

SEQ ID NO: 1903787 - RNA, 19 nt, Artificial Sequence
  Description of Artificial Sequence: Synthetic oligonucleotide
uucagcgccuccaugggcu

SEQ ID NO: 1903788 - RNA, 19 nt, Artificial Sequence
  Description of Artificial Sequence: Synthetic oligonucleotide
cacgccaacagccuugccc

SEQ ID NO: 1903789 - RNA, 19 nt, Artificial Sequence
  Description of Artificial Sequence: Synthetic oligonucleotide
  modified_base (2)..(2): a, c, u, g, unknown or other
anccaucuucagaaauccc

SEQ ID NO: 1903790 - RNA, 19 nt, Artificial Sequence
  Description of Artificial Sequence: Synthetic oligonucleotide
ccauuguaaguaaauauug

SEQ ID NO: 1903791 - RNA, 19 nt, Artificial Sequence
  Description of Artificial Sequence: Synthetic oligonucleotide
gagcaaacaguccucccgc

SEQ ID NO: 1903792 - RNA, 19 nt, Artificial Sequence
  Description of Artificial Sequence: Synthetic oligonucleotide
uacccaguuuacaugcaug

SEQ ID NO: 1903793 - RNA, 19 nt, Artificial Sequence
  Description of Artificial Sequence: Synthetic oligonucleotide
uccaguuucagcugauguc

SEQ ID NO: 1903794 - RNA, 19 nt, Artificial Sequence
  Description of Artificial Sequence: Synthetic oligonucleotide
gugucacacacacacacac

SEQ ID NO: 1903795 - RNA, 19 nt, Artificial Sequence
  Description of Artificial Sequence: Synthetic oligonucleotide
  modified_base (18)..(18): a, c, u, g, unknown or other
aauuaacguuaagggganc

SEQ ID NO: 1903796 - RNA, 19 nt, Artificial Sequence
  Description of Artificial Sequence: Synthetic oligonucleotide
caauagucacgccaacagc

SEQ ID NO: 1903797 - RNA, 19 nt, Artificial Sequence
  Description of Artificial Sequence: Synthetic oligonucleotide
gaugaagucgcgcgcgccc

SEQ ID NO: 1903798 - RNA, 19 nt, Artificial Sequence
  Description of Artificial Sequence: Synthetic oligonucleotide
aggcuguagaugaagucgc

SEQ ID NO: 1903799 - RNA, 19 nt, Artificial Sequence
  Description of Artificial Sequence: Synthetic oligonucleotide
ccaaagaauaacuucuaac

SEQ ID NO: 1903800 - RNA, 19 nt, Artificial Sequence
  Description of Artificial Sequence: Synthetic oligonucleotide
aaauacgauuugaaaggca

SEQ ID NO: 1903801 - RNA, 19 nt, Artificial Sequence
  Description of Artificial Sequence: Synthetic oligonucleotide
ugugucacacacacacaca

SEQ ID NO: 1903802 - RNA, 19 nt, Artificial Sequence
  Description of Artificial Sequence: Synthetic oligonucleotide
agaaaucccauuguaagua

SEQ ID NO: 1903803 - RNA, 19 nt, Artificial Sequence
  Description of Artificial Sequence: Synthetic oligonucleotide
auggccuuugagcaagcag

SEQ ID NO: 1903804 - RNA, 19 nt, Artificial Sequence
  Description of Artificial Sequence: Synthetic oligonucleotide
ugccauuguugaaauuccc

SEQ ID NO: 1903805 - RNA, 19 nt, Artificial Sequence
  Description of Artificial Sequence: Synthetic oligonucleotide
uccaacuuuuccugggcga

SEQ ID NO: 1903806 - RNA, 19 nt, Artificial Sequence
  Description of Artificial Sequence: Synthetic oligonucleotide
ugagcaagcagcuccucuc

SEQ ID NO: 1903807 - RNA, 19 nt, Artificial Sequence
  Description of Artificial Sequence: Synthetic oligonucleotide
ugauagaccuaaccuggaa

SEQ ID NO: 1903808 - RNA, 19 nt, Artificial Sequence
  Description of Artificial Sequence: Synthetic oligonucleotide
ggcauagucaugcuaaguc

SEQ ID NO: 1903809 - RNA, 19 nt, Artificial Sequence
  Description of Artificial Sequence: Synthetic oligonucleotide
aacaaagggaacauuccua

SEQ ID NO: 1903810 - RNA, 19 nt, Artificial Sequence
  Description of Artificial Sequence: Synthetic oligonucleotide
aaacccuaugaaagguauc

SEQ ID NO: 1903811 - RNA, 19 nt, Artificial Sequence
  Description of Artificial Sequence: Synthetic oligonucleotide
aaucccauuguaaguaaau

SEQ ID NO: 1903812 - RNA, 19 nt, Artificial Sequence
  Description of Artificial Sequence: Synthetic oligonucleotide
uaacacaagaacggcacaa

SEQ ID NO: 1903813 - RNA, 19 nt, Artificial Sequence
  Description of Artificial Sequence: Synthetic oligonucleotide
aaccuggaagccaaggccu

SEQ ID NO: 1903814 - RNA, 19 nt, Artificial Sequence
  Description of Artificial Sequence: Synthetic oligonucleotide
uugauagaccuaaccugga

SEQ ID NO: 1903815 - RNA, 19 nt, Artificial Sequence
  Description of Artificial Sequence: Synthetic oligonucleotide
ugcuuugguguaagaucgg

SEQ ID NO: 1903816 - RNA, 19 nt, Artificial Sequence
  Description of Artificial Sequence: Synthetic oligonucleotide
  modified_base (9)..(9): a, c, u, g, unknown or other
uaagggganccaucuucag

SEQ ID NO: 1903817 - RNA, 19 nt, Artificial Sequence
  Description of Artificial Sequence: Synthetic oligonucleotide
ggucaguaaauaauaacac

SEQ ID NO: 1903818 - RNA, 19 nt, Artificial Sequence
  Description of Artificial Sequence: Synthetic oligonucleotide
ugucacacacacacacaca

SEQ ID NO: 1903819 - RNA, 19 nt, Artificial Sequence
  Description of Artificial Sequence: Synthetic oligonucleotide
gucuuauggagucaauuaa

SEQ ID NO: 1903820 - RNA, 19 nt, Artificial Sequence
  Description of Artificial Sequence: Synthetic oligonucleotide
aacaagggucuuauggagu

SEQ ID NO: 1903821 - RNA, 19 nt, Artificial Sequence
  Description of Artificial Sequence: Synthetic oligonucleotide
auaacacaagaacggcaca

SEQ ID NO: 1903822 - RNA, 19 nt, Artificial Sequence
  Description of Artificial Sequence: Synthetic oligonucleotide
aagguaucgcauuguggaa

SEQ ID NO: 1903823 - RNA, 19 nt, Artificial Sequence
  Description of Artificial Sequence: Synthetic oligonucleotide
agguaucgcauuguggaag

SEQ ID NO: 1903824 - RNA, 19 nt, Artificial Sequence
  Description of Artificial Sequence: Synthetic oligonucleotide
ggagcucuggugcugacag

SEQ ID NO: 1903825 - RNA, 19 nt, Artificial Sequence
  Description of Artificial Sequence: Synthetic oligonucleotide
auagucaugcuaagucagg

SEQ ID NO: 1903826 - RNA, 19 nt, Artificial Sequence
  Description of Artificial Sequence: Synthetic oligonucleotide
ucugugucacacacacaca

SEQ ID NO: 1903827 - RNA, 19 nt, Artificial Sequence
  Description of Artificial Sequence: Synthetic oligonucleotide
agucaugcuaagucagggu

SEQ ID NO: 1903828 - RNA, 19 nt, Artificial Sequence
  Description of Artificial Sequence: Synthetic oligonucleotide
acacgcguuugccacaugu

SEQ ID NO: 1903829 - RNA, 19 nt, Artificial Sequence
  Description of Artificial Sequence: Synthetic oligonucleotide
ucacacacacacacacaca

SEQ ID NO: 1903830 - RNA, 19 nt, Artificial Sequence
  Description of Artificial Sequence: Synthetic oligonucleotide
ccaauagucacgccaacag

SEQ ID NO: 1903831 - RNA, 19 nt, Artificial Sequence
  Description of Artificial Sequence: Synthetic oligonucleotide
uagaccuaaccuggaagcc

SEQ ID NO: 1903832 - RNA, 19 nt, Artificial Sequence
  Description of Artificial Sequence: Synthetic oligonucleotide
ugguguaagaucgggaauu

SEQ ID NO: 1903833 - RNA, 19 nt, Artificial Sequence
  Description of Artificial Sequence: Synthetic oligonucleotide
ucgcauuguggaagaauac

SEQ ID NO: 1903834 - RNA, 19 nt, Artificial Sequence
  Description of Artificial Sequence: Synthetic oligonucleotide
ugcuaacacgcguuugcca

SEQ ID NO: 1903835 - RNA, 19 nt, Artificial Sequence
  Description of Artificial Sequence: Synthetic oligonucleotide
acccuaugaaagguaucgc

SEQ ID NO: 1903836 - RNA, 19 nt, Artificial Sequence
  Description of Artificial Sequence: Synthetic oligonucleotide
acuaaacaagggucuuaug

SEQ ID NO: 1903837 - RNA, 19 nt, Artificial Sequence
  Description of Artificial Sequence: Synthetic oligonucleotide
gaaaucccauuguaaguaa

SEQ ID NO: 1903838 - RNA, 19 nt, Artificial Sequence
  Description of Artificial Sequence: Synthetic oligonucleotide
auuuguucguuuccaguuu

SEQ ID NO: 1903839 - RNA, 19 nt, Artificial Sequence
  Description of Artificial Sequence: Synthetic oligonucleotide
uagaugaagucgcgcgcgc

SEQ ID NO: 1903840 - RNA, 19 nt, Artificial Sequence
  Description of Artificial Sequence: Synthetic oligonucleotide
gcuaacacgcguuugccac

SEQ ID NO: 1903841 - RNA, 19 nt, Artificial Sequence
  Description of Artificial Sequence: Synthetic oligonucleotide
ggauaauuuuaauucccca

SEQ ID NO: 1903842 - RNA, 19 nt, Artificial Sequence
  Description of Artificial Sequence: Synthetic oligonucleotide
uguacccaguuuacaugca

SEQ ID NO: 1903843 - RNA, 19 nt, Artificial Sequence
  Description of Artificial Sequence: Synthetic oligonucleotide
cauuguaaguaaauauugu

SEQ ID NO: 1903844 - RNA, 19 nt, Artificial Sequence
  Description of Artificial Sequence: Synthetic oligonucleotide
agaugugugcuaacacgcg

SEQ ID NO: 1903845 - RNA, 19 nt, Artificial Sequence
  Description of Artificial Sequence: Synthetic oligonucleotide
gaaaggcauagucaugcua

SEQ ID NO: 1903846 - RNA, 19 nt, Artificial Sequence
  Description of Artificial Sequence: Synthetic oligonucleotide
ccuagaaugcagccaauag

SEQ ID NO: 1903847 - RNA, 19 nt, Artificial Sequence
  Description of Artificial Sequence: Synthetic oligonucleotide
  modified_base (19)..(19): a, c, u, g, unknown or other
caauuaacguuaaggggan

SEQ ID NO: 1903848 - RNA, 19 nt, Artificial Sequence
  Description of Artificial Sequence: Synthetic oligonucleotide
acacacacacacacacagc

SEQ ID NO: 1903849 - RNA, 19 nt, Artificial Sequence
  Description of Artificial Sequence: Synthetic oligonucleotide
cuagaaugcagccaauagu

SEQ ID NO: 1903850 - RNA, 19 nt, Artificial Sequence
  Description of Artificial Sequence: Synthetic oligonucleotide
cuaaaucugacacaagauu

SEQ ID NO: 1903851 - RNA, 19 nt, Artificial Sequence
  Description of Artificial Sequence: Synthetic oligonucleotide
uccaucuaguuagccaaca

SEQ ID NO: 1903852 - RNA, 19 nt, Artificial Sequence
  Description of Artificial Sequence: Synthetic oligonucleotide
aucgcauuguggaagaaua

SEQ ID NO: 1903853 - RNA, 19 nt, Artificial Sequence
  Description of Artificial Sequence: Synthetic oligonucleotide
agccaauagucacgccaac

SEQ ID NO: 1903854 - RNA, 19 nt, Artificial Sequence
  Description of Artificial Sequence: Synthetic oligonucleotide
ugugugcuaacacgcguuu

SEQ ID NO: 1903855 - RNA, 19 nt, Artificial Sequence
  Description of Artificial Sequence: Synthetic oligonucleotide
aaaucccauuguaaguaaa

SEQ ID NO: 1903856 - RNA, 19 nt, Artificial Sequence
  Description of Artificial Sequence: Synthetic oligonucleotide
cagaggcaacaaaauguac

SEQ ID NO: 1903857 - RNA, 19 nt, Artificial Sequence
  Description of Artificial Sequence: Synthetic oligonucleotide
acaguccucccgcagcuca

SEQ ID NO: 1903858 - RNA, 19 nt, Artificial Sequence
  Description of Artificial Sequence: Synthetic oligonucleotide
ucaacuugcuuugguguaa

SEQ ID NO: 1903859 - RNA, 19 nt, Artificial Sequence
  Description of Artificial Sequence: Synthetic oligonucleotide
uggagucaauuaacguuaa

SEQ ID NO: 1903860 - RNA, 19 nt, Artificial Sequence
  Description of Artificial Sequence: Synthetic oligonucleotide
uuccaucuaguuagccaac

SEQ ID NO: 1903861 - RNA, 19 nt, Artificial Sequence
  Description of Artificial Sequence: Synthetic oligonucleotide
cuaccaaaauacgauuuga

SEQ ID NO: 1903862 - RNA, 19 nt, Artificial Sequence
  Description of Artificial Sequence: Synthetic oligonucleotide
uaucgcauuguggaagaau

SEQ ID NO: 1903863 - RNA, 19 nt, Artificial Sequence
  Description of Artificial Sequence: Synthetic oligonucleotide
aacuugcuuugguguaaga

SEQ ID NO: 1903864 - RNA, 19 nt, Artificial Sequence
  Description of Artificial Sequence: Synthetic oligonucleotide
aguuucagcugaugucaga

SEQ ID NO: 1903865 - RNA, 19 nt, Artificial Sequence
  Description of Artificial Sequence: Synthetic oligonucleotide
  modified_base (13)..(13): a, c, u, g, unknown or other
acguuaagggganccaucu

SEQ ID NO: 1903866 - RNA, 19 nt, Artificial Sequence
  Description of Artificial Sequence: Synthetic oligonucleotide
gcauagucaugcuaaguca

SEQ ID NO: 1903867 - RNA, 19 nt, Artificial Sequence
  Description of Artificial Sequence: Synthetic oligonucleotide
augaacaggucaguaaaua

SEQ ID NO: 1903868 - RNA, 19 nt, Artificial Sequence
  Description of Artificial Sequence: Synthetic oligonucleotide
gaucgggaauugauagacc

SEQ ID NO: 1903869 - RNA, 19 nt, Artificial Sequence
  Description of Artificial Sequence: Synthetic oligonucleotide
guuuuccaucuaguuagcc

SEQ ID NO: 1903870 - RNA, 19 nt, Artificial Sequence
  Description of Artificial Sequence: Synthetic oligonucleotide
cauuguggaagaauacaua

SEQ ID NO: 1903871 - RNA, 19 nt, Artificial Sequence
  Description of Artificial Sequence: Synthetic oligonucleotide
caugaggcagggcagggca

SEQ ID NO: 1903872 - RNA, 19 nt, Artificial Sequence
  Description of Artificial Sequence: Synthetic oligonucleotide
gcagccaauagucacgcca

SEQ ID NO: 1903873 - RNA, 19 nt, Artificial Sequence
  Description of Artificial Sequence: Synthetic oligonucleotide
cacacacacacacacagcu

SEQ ID NO: 1903874 - RNA, 19 nt, Artificial Sequence
  Description of Artificial Sequence: Synthetic oligonucleotide
agaccuaaccuggaagcca

SEQ ID NO: 1903875 - RNA, 19 nt, Artificial Sequence
  Description of Artificial Sequence: Synthetic oligonucleotide
gaugugugcuaacacgcgu

SEQ ID NO: 1903876 - RNA, 19 nt, Artificial Sequence
  Description of Artificial Sequence: Synthetic oligonucleotide
ucgggaauugauagaccua

SEQ ID NO: 1903877 - RNA, 19 nt, Artificial Sequence
  Description of Artificial Sequence: Synthetic oligonucleotide
caguuucagcugaugucag

SEQ ID NO: 1903878 - RNA, 19 nt, Artificial Sequence
  Description of Artificial Sequence: Synthetic oligonucleotide
gcaugaacaggucaguaaa

SEQ ID NO: 1903879 - RNA, 19 nt, Artificial Sequence
  Description of Artificial Sequence: Synthetic oligonucleotide
cauucuaagaugauucauu

SEQ ID NO: 1903880 - RNA, 19 nt, Artificial Sequence
  Description of Artificial Sequence: Synthetic oligonucleotide
  modified_base (4)..(4): a, c, u, g, unknown or other
gganccaucuucagaaauc

SEQ ID NO: 1903881 - RNA, 19 nt, Artificial Sequence
  Description of Artificial Sequence: Synthetic oligonucleotide
cagagaacagcugccauga

SEQ ID NO: 1903882 - RNA, 19 nt, Artificial Sequence
  Description of Artificial Sequence: Synthetic oligonucleotide
cgauuugaaaggcauaguc

SEQ ID NO: 1903883 - RNA, 19 nt, Artificial Sequence
  Description of Artificial Sequence: Synthetic oligonucleotide
cacaagaacggcacaaacu

SEQ ID NO: 1903884 - RNA, 19 nt, Artificial Sequence
  Description of Artificial Sequence: Synthetic oligonucleotide
augaaagguaucgcauugu

SEQ ID NO: 1903885 - RNA, 19 nt, Artificial Sequence
  Description of Artificial Sequence: Synthetic oligonucleotide
  modified_base (15)..(15): a, c, u, g, unknown or other
uaacguuaagggganccau

SEQ ID NO: 1903886 - RNA, 19 nt, Artificial Sequence
  Description of Artificial Sequence: Synthetic oligonucleotide
ggaacauuccuagaaugca

SEQ ID NO: 1903887 - RNA, 19 nt, Artificial Sequence
  Description of Artificial Sequence: Synthetic oligonucleotide
cauacagaggcaacaaaau

SEQ ID NO: 1903888 - RNA, 19 nt, Artificial Sequence
  Description of Artificial Sequence: Synthetic oligonucleotide
guaagaucgggaauugaua

SEQ ID NO: 1903889 - RNA, 19 nt, Artificial Sequence
  Description of Artificial Sequence: Synthetic oligonucleotide
acacacagcugucauucua

SEQ ID NO: 1903890 - RNA, 19 nt, Artificial Sequence
  Description of Artificial Sequence: Synthetic oligonucleotide
guggagugcaggcuguaga

SEQ ID NO: 1903891 - RNA, 19 nt, Artificial Sequence
  Description of Artificial Sequence: Synthetic oligonucleotide
gcuuugguguaagaucggg

SEQ ID NO: 1903892 - RNA, 19 nt, Artificial Sequence
  Description of Artificial Sequence: Synthetic oligonucleotide
uccuagaaugcagccaaua

SEQ ID NO: 1903893 - RNA, 19 nt, Artificial Sequence
  Description of Artificial Sequence: Synthetic oligonucleotide
cacacagcugucauucuaa

SEQ ID NO: 1903894 - RNA, 19 nt, Artificial Sequence
  Description of Artificial Sequence: Synthetic oligonucleotide
ccaaaauaauuccaauaga

SEQ ID NO: 1903895 - RNA, 19 nt, Artificial Sequence
  Description of Artificial Sequence: Synthetic oligonucleotide
cacacacacacacagcugu

SEQ ID NO: 1903896 - RNA, 19 nt, Artificial Sequence
  Description of Artificial Sequence: Synthetic oligonucleotide
cucacgguacagcucucug

SEQ ID NO: 1903897 - RNA, 19 nt, Artificial Sequence
  Description of Artificial Sequence: Synthetic oligonucleotide
cauuuguucguuuccaguu

SEQ ID NO: 1903898 - RNA, 19 nt, Artificial Sequence
  Description of Artificial Sequence: Synthetic oligonucleotide
aacaguccucccgcagcuc

SEQ ID NO: 1903899 - RNA, 19 nt, Artificial Sequence
  Description of Artificial Sequence: Synthetic oligonucleotide
gguaucgcauuguggaaga

SEQ ID NO: 1903900 - RNA, 19 nt, Artificial Sequence
  Description of Artificial Sequence: Synthetic oligonucleotide
cauuccuagaaugcagcca

SEQ ID NO: 1903901 - RNA, 19 nt, Artificial Sequence
  Description of Artificial Sequence: Synthetic oligonucleotide
cuaguuagccaacauggau

SEQ ID NO: 1903902 - RNA, 19 nt, Artificial Sequence
  Description of Artificial Sequence: Synthetic oligonucleotide
aagucgcgcgcgcccugcg

SEQ ID NO: 1903903 - RNA, 19 nt, Artificial Sequence
  Description of Artificial Sequence: Synthetic oligonucleotide
caacuugcuuugguguaag

SEQ ID NO: 1903904 - RNA, 19 nt, Artificial Sequence
  Description of Artificial Sequence: Synthetic oligonucleotide
agauucucugugguggaaa

SEQ ID NO: 1903905 - RNA, 19 nt, Artificial Sequence
  Description of Artificial Sequence: Synthetic oligonucleotide
cagaaaucccauuguaagu

SEQ ID NO: 1903906 - RNA, 19 nt, Artificial Sequence
  Description of Artificial Sequence: Synthetic oligonucleotide
ucguuuccaguuucucauc

SEQ ID NO: 1903907 - RNA, 19 nt, Artificial Sequence
  Description of Artificial Sequence: Synthetic oligonucleotide
ggagucaauuaacguuaag

SEQ ID NO: 1903908 - RNA, 19 nt, Artificial Sequence
  Description of Artificial Sequence: Synthetic oligonucleotide
gagugggcgguagagcuuc

SEQ ID NO: 1903909 - RNA, 19 nt, Artificial Sequence
  Description of Artificial Sequence: Synthetic oligonucleotide
acggcacaaacugagcaaa

SEQ ID NO: 1903910 - RNA, 19 nt, Artificial Sequence
  Description of Artificial Sequence: Synthetic oligonucleotide
caaguccagcuaaaucuga

SEQ ID NO: 1903911 - RNA, 19 nt, Artificial Sequence
  Description of Artificial Sequence: Synthetic oligonucleotide
caaacccuaugaaagguau

SEQ ID NO: 1903912 - RNA, 19 nt, Artificial Sequence
  Description of Artificial Sequence: Synthetic oligonucleotide
auaucucagcuguccugga

SEQ ID NO: 1903913 - RNA, 19 nt, Artificial Sequence
  Description of Artificial Sequence: Synthetic oligonucleotide
cacgcguuugccacauguc

SEQ ID NO: 1903914 - RNA, 19 nt, Artificial Sequence
  Description of Artificial Sequence: Synthetic oligonucleotide
acgauuugaaaggcauagu

SEQ ID NO: 1903915 - RNA, 19 nt, Artificial Sequence
  Description of Artificial Sequence: Synthetic oligonucleotide
acgguacagcucucuggag

SEQ ID NO: 1903916 - RNA, 19 nt, Artificial Sequence
  Description of Artificial Sequence: Synthetic oligonucleotide
cugggcgauggccuuugag

SEQ ID NO: 1903917 - RNA, 19 nt, Artificial Sequence
  Description of Artificial Sequence: Synthetic oligonucleotide
gugcuaacacgcguuugcc

SEQ ID NO: 1903918 - RNA, 19 nt, Artificial Sequence
  Description of Artificial Sequence: Synthetic oligonucleotide
gguguaagaucgggaauug

SEQ ID NO: 1903919 - RNA, 19 nt, Artificial Sequence
  Description of Artificial Sequence: Synthetic oligonucleotide
cagcuaaaucugacacaag

SEQ ID NO: 1903920 - RNA, 19 nt, Artificial Sequence
  Description of Artificial Sequence: Synthetic oligonucleotide
acacacacacacagcuguc

SEQ ID NO: 1903921 - RNA, 19 nt, Artificial Sequence
  Description of Artificial Sequence: Synthetic oligonucleotide
ugaagucgcgcgcgcccug

SEQ ID NO: 1903922 - RNA, 19 nt, Artificial Sequence
  Description of Artificial Sequence: Synthetic oligonucleotide
gaccuaaccuggaagccaa

SEQ ID NO: 1903923 - RNA, 19 nt, Artificial Sequence
  Description of Artificial Sequence: Synthetic oligonucleotide
cagccaauagucacgccaa

SEQ ID NO: 1903924 - RNA, 19 nt, Artificial Sequence
  Description of Artificial Sequence: Synthetic oligonucleotide
gaugauucauuuguucguu

SEQ ID NO: 1903925 - RNA, 19 nt, Artificial Sequence
  Description of Artificial Sequence: Synthetic oligonucleotide
gggcgauggccuuugagca

SEQ ID NO: 1903926 - RNA, 19 nt, Artificial Sequence
  Description of Artificial Sequence: Synthetic oligonucleotide
cuaacacgcguuugccaca

SEQ ID NO: 1903927 - RNA, 19 nt, Artificial Sequence
  Description of Artificial Sequence: Synthetic oligonucleotide
acacacacacacacagcug

SEQ ID NO: 1903928 - RNA, 19 nt, Artificial Sequence
  Description of Artificial Sequence: Synthetic oligonucleotide
agccgcaccaggacggcgg

SEQ ID NO: 1903929 - RNA, 19 nt, Artificial Sequence
  Description of Artificial Sequence: Synthetic oligonucleotide
ucccgcagcucacgguaca

SEQ ID NO: 1903930 - RNA, 19 nt, Artificial Sequence
  Description of Artificial Sequence: Synthetic oligonucleotide
uaacacgcguuugccacau

SEQ ID NO: 1903931 - RNA, 19 nt, Artificial Sequence
  Description of Artificial Sequence: Synthetic oligonucleotide
aggcauagucaugcuaagu

SEQ ID NO: 1903932 - RNA, 19 nt, Artificial Sequence
  Description of Artificial Sequence: Synthetic oligonucleotide
guuucagcugaugucagau

SEQ ID NO: 1903933 - RNA, 19 nt, Artificial Sequence
  Description of Artificial Sequence: Synthetic oligonucleotide
ccaguuucagcugauguca

SEQ ID NO: 1903934 - RNA, 19 nt, Artificial Sequence
  Description of Artificial Sequence: Synthetic oligonucleotide
cccuaugaaagguaucgca

SEQ ID NO: 1903935 - RNA, 19 nt, Artificial Sequence
  Description of Artificial Sequence: Synthetic oligonucleotide
ccuaaccuggaagccaagg

SEQ ID NO: 1903936 - RNA, 19 nt, Artificial Sequence
  Description of Artificial Sequence: Synthetic oligonucleotide
uuccuagaaugcagccaau

SEQ ID NO: 1903937 - RNA, 19 nt, Artificial Sequence
  Description of Artificial Sequence: Synthetic oligonucleotide
cuaagaugauucauuuguu

SEQ ID NO: 1903938 - RNA, 19 nt, Artificial Sequence
  Description of Artificial Sequence: Synthetic oligonucleotide
gguacagcucucuggagcu

SEQ ID NO: 1903939 - RNA, 19 nt, Artificial Sequence
  Description of Artificial Sequence: Synthetic oligonucleotide
ccagcuaaaucugacacaa

SEQ ID NO: 1903940 - RNA, 19 nt, Artificial Sequence
  Description of Artificial Sequence: Synthetic oligonucleotide
ggccaaguccagcuaaauc

SEQ ID NO: 1903941 - RNA, 19 nt, Artificial Sequence
  Description of Artificial Sequence: Synthetic oligonucleotide
aacacgcguuugccacaug

SEQ ID NO: 1903942 - RNA, 19 nt, Artificial Sequence
  Description of Artificial Sequence: Synthetic oligonucleotide
acacuaaacaagggucuua

SEQ ID NO: 1903943 - RNA, 19 nt, Artificial Sequence
  Description of Artificial Sequence: Synthetic oligonucleotide
uuugagcaagcagcuccuc

SEQ ID NO: 1903944 - RNA, 19 nt, Artificial Sequence
  Description of Artificial Sequence: Synthetic oligonucleotide
ggcaguccaguuucagcug

SEQ ID NO: 1903945 - RNA, 19 nt, Artificial Sequence
  Description of Artificial Sequence: Synthetic oligonucleotide
cauaaccugcaaggccaag

SEQ ID NO: 1903946 - RNA, 19 nt, Artificial Sequence
  Description of Artificial Sequence: Synthetic oligonucleotide
ggcacaaacugagcaaaca

SEQ ID NO: 1903947 - RNA, 19 nt, Artificial Sequence
  Description of Artificial Sequence: Synthetic oligonucleotide
gcguuugccacaugucaac

SEQ ID NO: 1903948 - RNA, 19 nt, Artificial Sequence
  Description of Artificial Sequence: Synthetic oligonucleotide
gccauuguugaaauuccca

SEQ ID NO: 1903949 - RNA, 19 nt, Artificial Sequence
  Description of Artificial Sequence: Synthetic oligonucleotide
gucgcgcgcgcccugcgcc

SEQ ID NO: 1903950 - RNA, 19 nt, Artificial Sequence
  Description of Artificial Sequence: Synthetic oligonucleotide
acacacacacacacacaca

SEQ ID NO: 1903951 - RNA, 19 nt, Artificial Sequence
  Description of Artificial Sequence: Synthetic oligonucleotide
gucacgccaacagccuugc

SEQ ID NO: 1903952 - RNA, 19 nt, Artificial Sequence
  Description of Artificial Sequence: Synthetic oligonucleotide
gugugcuaacacgcguuug

SEQ ID NO: 1903953 - RNA, 19 nt, Artificial Sequence
  Description of Artificial Sequence: Synthetic oligonucleotide
augugugcuaacacgcguu

SEQ ID NO: 1903954 - RNA, 19 nt, Artificial Sequence
  Description of Artificial Sequence: Synthetic oligonucleotide
gaagucgcgcgcgcccugc

SEQ ID NO: 1903955 - RNA, 19 nt, Artificial Sequence
  Description of Artificial Sequence: Synthetic oligonucleotide
gcgauggccuuugagcaag

SEQ ID NO: 1903956 - RNA, 19 nt, Artificial Sequence
  Description of Artificial Sequence: Synthetic oligonucleotide
cugcgccguguucagcgcc

SEQ ID NO: 1903957 - RNA, 19 nt, Artificial Sequence
  Description of Artificial Sequence: Synthetic oligonucleotide
cagcucacgguacagcucu

SEQ ID NO: 1903958 - RNA, 19 nt, Artificial Sequence
  Description of Artificial Sequence: Synthetic oligonucleotide
cacacacacacagcuguca

SEQ ID NO: 1903959 - RNA, 19 nt, Artificial Sequence
  Description of Artificial Sequence: Synthetic oligonucleotide
caggacggcgggcggggcg

SEQ ID NO: 1903960 - RNA, 19 nt, Artificial Sequence
  Description of Artificial Sequence: Synthetic oligonucleotide
augaagucgcgcgcgcccu

SEQ ID NO: 1903961 - RNA, 19 nt, Artificial Sequence
  Description of Artificial Sequence: Synthetic oligonucleotide
ccaauagauaauucaauuu

SEQ ID NO: 1903962 - RNA, 19 nt, Artificial Sequence
  Description of Artificial Sequence: Synthetic oligonucleotide
caugaacaggucaguaaau

SEQ ID NO: 1903963 - RNA, 19 nt, Artificial Sequence
  Description of Artificial Sequence: Synthetic oligonucleotide
cucugugguggaaaacacu

SEQ ID NO: 1903964 - RNA, 19 nt, Artificial Sequence
  Description of Artificial Sequence: Synthetic oligonucleotide
augcuaagucaggguuuuc

SEQ ID NO: 1903965 - RNA, 19 nt, Artificial Sequence
  Description of Artificial Sequence: Synthetic oligonucleotide
cccauuguaaguaaauauu

SEQ ID NO: 1903966 - RNA, 19 nt, Artificial Sequence
  Description of Artificial Sequence: Synthetic oligonucleotide
guacccaguuuacaugcau

SEQ ID NO: 1903967 - RNA, 19 nt, Artificial Sequence
  Description of Artificial Sequence: Synthetic oligonucleotide
ccuaugaaagguaucgcau

SEQ ID NO: 1903968 - RNA, 19 nt, Artificial Sequence
  Description of Artificial Sequence: Synthetic oligonucleotide
gcuaaaucugacacaagau

SEQ ID NO: 1903969 - RNA, 19 nt, Artificial Sequence
  Description of Artificial Sequence: Synthetic oligonucleotide
gggugggugcccaggagcc

SEQ ID NO: 1903970 - RNA, 19 nt, Artificial Sequence
  Description of Artificial Sequence: Synthetic oligonucleotide
gccaauagucacgccaaca

SEQ ID NO: 1903971 - RNA, 19 nt, Artificial Sequence
  Description of Artificial Sequence: Synthetic oligonucleotide
acauaaccugcaaggccaa

SEQ ID NO: 1903972 - RNA, 19 nt, Artificial Sequence
  Description of Artificial Sequence: Synthetic oligonucleotide
  modified_base (5)..(5): a, c, u, g, unknown or other
ggganccaucuucagaaau

SEQ ID NO: 1903973 - RNA, 19 nt, Artificial Sequence
  Description of Artificial Sequence: Synthetic oligonucleotide
uuccugcaacaaucauaau

SEQ ID NO: 1903974 - RNA, 19 nt, Artificial Sequence
  Description of Artificial Sequence: Synthetic oligonucleotide
caccaggacggcgggcggg

SEQ ID NO: 1903975 - RNA, 19 nt, Artificial Sequence
  Description of Artificial Sequence: Synthetic oligonucleotide
agucaggguuuuccaucua

SEQ ID NO: 1903976 - RNA, 19 nt, Artificial Sequence
  Description of Artificial Sequence: Synthetic oligonucleotide
gggaauugauagaccuaac

SEQ ID NO: 1903977 - RNA, 19 nt, Artificial Sequence
  Description of Artificial Sequence: Synthetic oligonucleotide
aggccaaguccagcuaaau

SEQ ID NO: 1903978 - RNA, 19 nt, Artificial Sequence
  Description of Artificial Sequence: Synthetic oligonucleotide
agcugccauuguugaaauu

SEQ ID NO: 1903979 - RNA, 19 nt, Artificial Sequence
  Description of Artificial Sequence: Synthetic oligonucleotide
caagggucuuauggaguca

SEQ ID NO: 1903980 - RNA, 19 nt, Artificial Sequence
  Description of Artificial Sequence: Synthetic oligonucleotide
caugcaugaacaggucagu

SEQ ID NO: 1903981 - RNA, 19 nt, Artificial Sequence
  Description of Artificial Sequence: Synthetic oligonucleotide
guaaaacauuggucacuau

SEQ ID NO: 1903982 - RNA, 19 nt, Artificial Sequence
  Description of Artificial Sequence: Synthetic oligonucleotide
accuaaccuggaagccaag

SEQ ID NO: 1903983 - RNA, 19 nt, Artificial Sequence
  Description of Artificial Sequence: Synthetic oligonucleotide
ccaaacccuaugaaaggua

SEQ ID NO: 1903984 - RNA, 19 nt, Artificial Sequence
  Description of Artificial Sequence: Synthetic oligonucleotide
caugcuaagucaggguuuu

SEQ ID NO: 1903985 - RNA, 19 nt, Artificial Sequence
  Description of Artificial Sequence: Synthetic oligonucleotide
cgcauuguggaagaauaca

SEQ ID NO: 1903986 - RNA, 19 nt, Artificial Sequence
  Description of Artificial Sequence: Synthetic oligonucleotide
ggucacuauuuaacauaca

SEQ ID NO: 1903987 - RNA, 19 nt, Artificial Sequence
  Description of Artificial Sequence: Synthetic oligonucleotide
agcucacgguacagcucuc

SEQ ID NO: 1903988 - RNA, 19 nt, Artificial Sequence
  Description of Artificial Sequence: Synthetic oligonucleotide
gguagagcuuccaacuuuu

SEQ ID NO: 1903989 - RNA, 19 nt, Artificial Sequence
  Description of Artificial Sequence: Synthetic oligonucleotide
gccaaacccuaugaaaggu

SEQ ID NO: 1903990 - RNA, 19 nt, Artificial Sequence
  Description of Artificial Sequence: Synthetic oligonucleotide
  modified_base (6)..(6): a, c, u, g, unknown or other
gggganccaucuucagaaa

SEQ ID NO: 1903991 - RNA, 19 nt, Artificial Sequence
  Description of Artificial Sequence: Synthetic oligonucleotide
gccgcaccaggacggcggg

SEQ ID NO: 1903992 - RNA, 19 nt, Artificial Sequence
  Description of Artificial Sequence: Synthetic oligonucleotide
guacagcucucuggagcuc

SEQ ID NO: 1903993 - RNA, 19 nt, Artificial Sequence
  Description of Artificial Sequence: Synthetic oligonucleotide
guaucgcauuguggaagaa

SEQ ID NO: 1903994 - RNA, 19 nt, Artificial Sequence
  Description of Artificial Sequence: Synthetic oligonucleotide
cccggggaccccgagcgcg

SEQ ID NO: 1903995 - RNA, 19 nt, Artificial Sequence
  Description of Artificial Sequence: Synthetic oligonucleotide
ccccaaagaauaacuucua

SEQ ID NO: 1903996 - RNA, 19 nt, Artificial Sequence
  Description of Artificial Sequence: Synthetic oligonucleotide
cguguucagcgccuccaug

SEQ ID NO: 1903997 - RNA, 19 nt, Artificial Sequence
  Description of Artificial Sequence: Synthetic oligonucleotide
ggccuuugagcaagcagcu

SEQ ID NO: 1903998 - RNA, 19 nt, Artificial Sequence
  Description of Artificial Sequence: Synthetic oligonucleotide
cgcguuugccacaugucaa

SEQ ID NO: 1903999 - RNA, 19 nt, Artificial Sequence
  Description of Artificial Sequence: Synthetic oligonucleotide
gacggcgggcggggcgcgg

SEQ ID NO: 1904000 - RNA, 19 nt, Artificial Sequence
  Description of Artificial Sequence: Synthetic oligonucleotide
cccgcagcucacgguacag

SEQ ID NO: 1904001 - RNA, 19 nt, Artificial Sequence
  Description of Artificial Sequence: Synthetic oligonucleotide
cccaguuuacaugcaugaa

SEQ ID NO: 1904002 - RNA, 19 nt, Artificial Sequence
  Description of Artificial Sequence: Synthetic oligonucleotide
caguccaguuucagcugau

SEQ ID NO: 1904003 - RNA, 19 nt, Artificial Sequence
  Description of Artificial Sequence: Synthetic oligonucleotide
gcgguagagcuuccaacuu

SEQ ID NO: 1904004 - RNA, 19 nt, Artificial Sequence
  Description of Artificial Sequence: Synthetic oligonucleotide
gcucacgguacagcucucu

SEQ ID NO: 1904005 - RNA, 19 nt, Artificial Sequence
  Description of Artificial Sequence: Synthetic oligonucleotide
gggcagggcaguccaguuu

SEQ ID NO: 1904006 - RNA, 19 nt, Artificial Sequence
  Description of Artificial Sequence: Synthetic oligonucleotide
cgccguguucagcgccucc

SEQ ID NO: 1904007 - RNA, 19 nt, Artificial Sequence
  Description of Artificial Sequence: Synthetic oligonucleotide
cgcccugcgccguguucag

SEQ ID NO: 1904008 - RNA, 19 nt, Artificial Sequence
  Description of Artificial Sequence: Synthetic oligonucleotide
cguuugccacaugucaacu

SEQ ID NO: 1904009 - RNA, 19 nt, Artificial Sequence
  Description of Artificial Sequence: Synthetic oligonucleotide
  modified_base (12)..(12): a, c, u, g, unknown or other
cguuaagggganccaucuu

SEQ ID NO: 1904010 - RNA, 19 nt, Artificial Sequence
  Description of Artificial Sequence: Synthetic oligonucleotide
gcgccguguucagcgccuc

SEQ ID NO: 1904011 - RNA, 19 nt, Artificial Sequence
  Description of Artificial Sequence: Synthetic oligonucleotide
ccugggcgauggccuuuga

SEQ ID NO: 1904012 - RNA, 19 nt, Artificial Sequence
  Description of Artificial Sequence: Synthetic oligonucleotide
gcgcgcgcccugcgccgug

SEQ ID NO: 1904013 - RNA, 19 nt, Artificial Sequence
  Description of Artificial Sequence: Synthetic oligonucleotide
cgcgcccugcgccguguuc

SEQ ID NO: 1904014 - RNA, 19 nt, Artificial Sequence
  Description of Artificial Sequence: Synthetic oligonucleotide
gcgcgcccugcgccguguu

SEQ ID NO: 1904015 - RNA, 19 nt, Artificial Sequence
  Description of Artificial Sequence: Synthetic oligonucleotide
cgcgcgcccugcgccgugu

SEQ ID NO: 1904016 - RNA, 19 nt, Artificial Sequence
  Description of Artificial Sequence: Synthetic oligonucleotide
aaucaugacaggcagaaug

SEQ ID NO: 1904017 - RNA, 19 nt, Artificial Sequence
  Description of Artificial Sequence: Synthetic oligonucleotide
ucuacuagagccaacauac

SEQ ID NO: 1904018 - RNA, 19 nt, Artificial Sequence
  Description of Artificial Sequence: Synthetic oligonucleotide
aacgcuacuaccugugagc

SEQ ID NO: 1904019 - RNA, 19 nt, Artificial Sequence
  Description of Artificial Sequence: Synthetic oligonucleotide
aacauacggcccuuggucc

SEQ ID NO: 1904020 - RNA, 19 nt, Artificial Sequence
  Description of Artificial Sequence: Synthetic oligonucleotide
caugauguccucuacacgc

SEQ ID NO: 1904021 - RNA, 19 nt, Artificial Sequence
  Description of Artificial Sequence: Synthetic oligonucleotide
uacuagagccaacauacgg

SEQ ID NO: 1904022 - RNA, 19 nt, Artificial Sequence
  Description of Artificial Sequence: Synthetic oligonucleotide
uucuugaugcggaugaugc

SEQ ID NO: 1904023 - RNA, 19 nt, Artificial Sequence
  Description of Artificial Sequence: Synthetic oligonucleotide
ugugucuuaugcaaagaag

SEQ ID NO: 1904024 - RNA, 19 nt, Artificial Sequence
  Description of Artificial Sequence: Synthetic oligonucleotide
auagaguggacuuggguuc

SEQ ID NO: 1904025 - RNA, 19 nt, Artificial Sequence
  Description of Artificial Sequence: Synthetic oligonucleotide
aaggacuacccucucgugg

SEQ ID NO: 1904026 - RNA, 19 nt, Artificial Sequence
  Description of Artificial Sequence: Synthetic oligonucleotide
aagaaguccgcucucgucu

SEQ ID NO: 1904027 - RNA, 19 nt, Artificial Sequence
  Description of Artificial Sequence: Synthetic oligonucleotide
aaagaaguccgcucucguc

SEQ ID NO: 1904028 - RNA, 19 nt, Artificial Sequence
  Description of Artificial Sequence: Synthetic oligonucleotide
aauauaggccauccgguga

SEQ ID NO: 1904029 - RNA, 19 nt, Artificial Sequence
  Description of Artificial Sequence: Synthetic oligonucleotide
acuagagccaacauacggc

SEQ ID NO: 1904030 - RNA, 19 nt, Artificial Sequence
  Description of Artificial Sequence: Synthetic oligonucleotide
agucuuuugcaugugcugc

SEQ ID NO: 1904031 - RNA, 19 nt, Artificial Sequence
  Description of Artificial Sequence: Synthetic oligonucleotide
aaggaauauaggccauccg

SEQ ID NO: 1904032 - RNA, 19 nt, Artificial Sequence
  Description of Artificial Sequence: Synthetic oligonucleotide
ucaauugccuuccggagcu

SEQ ID NO: 1904033 - RNA, 19 nt, Artificial Sequence
  Description of Artificial Sequence: Synthetic oligonucleotide
gaugcuggugacguaagcg

SEQ ID NO: 1904034 - RNA, 19 nt, Artificial Sequence
  Description of Artificial Sequence: Synthetic oligonucleotide
cuagagccaacauacggcc

SEQ ID NO: 1904035 - RNA, 19 nt, Artificial Sequence
  Description of Artificial Sequence: Synthetic oligonucleotide
uauauagaguggacuuggg

SEQ ID NO: 1904036 - RNA, 19 nt, Artificial Sequence
  Description of Artificial Sequence: Synthetic oligonucleotide
cuauauagaguggacuugg

SEQ ID NO: 1904037 - RNA, 19 nt, Artificial Sequence
  Description of Artificial Sequence: Synthetic oligonucleotide
gaugacggcaaucaugaca

SEQ ID NO: 1904038 - RNA, 19 nt, Artificial Sequence
  Description of Artificial Sequence: Synthetic oligonucleotide
uucuauauagaguggacuu

SEQ ID NO: 1904039 - RNA, 19 nt, Artificial Sequence
  Description of Artificial Sequence: Synthetic oligonucleotide
uuccggagcuccuuuaggg

SEQ ID NO: 1904040 - RNA, 19 nt, Artificial Sequence
  Description of Artificial Sequence: Synthetic oligonucleotide
gaauauaggccauccggug

SEQ ID NO: 1904041 - RNA, 19 nt, Artificial Sequence
  Description of Artificial Sequence: Synthetic oligonucleotide
aggacuacccucucguggg

SEQ ID NO: 1904042 - RNA, 19 nt, Artificial Sequence
  Description of Artificial Sequence: Synthetic oligonucleotide
aguugagggcuacaguggg

SEQ ID NO: 1904043 - RNA, 19 nt, Artificial Sequence
  Description of Artificial Sequence: Synthetic oligonucleotide
uccgcucucgucuaguugc

SEQ ID NO: 1904044 - RNA, 19 nt, Artificial Sequence
  Description of Artificial Sequence: Synthetic oligonucleotide
ugugacagagcccucaauu

SEQ ID NO: 1904045 - RNA, 19 nt, Artificial Sequence
  Description of Artificial Sequence: Synthetic oligonucleotide
uuucuauauagaguggacu

SEQ ID NO: 1904046 - RNA, 19 nt, Artificial Sequence
  Description of Artificial Sequence: Synthetic oligonucleotide
ugucuuaugcaaagaaguc

SEQ ID NO: 1904047 - RNA, 19 nt, Artificial Sequence
  Description of Artificial Sequence: Synthetic oligonucleotide
aauugccuuccggagcucc

SEQ ID NO: 1904048 - RNA, 19 nt, Artificial Sequence
  Description of Artificial Sequence: Synthetic oligonucleotide
ugacuuuuacacccugugc

SEQ ID NO: 1904049 - RNA, 19 nt, Artificial Sequence
  Description of Artificial Sequence: Synthetic oligonucleotide
gucggagucacucgcaagg

SEQ ID NO: 1904050 - RNA, 19 nt, Artificial Sequence
  Description of Artificial Sequence: Synthetic oligonucleotide
uaacgcuacuaccugugag

SEQ ID NO: 1904051 - RNA, 19 nt, Artificial Sequence
  Description of Artificial Sequence: Synthetic oligonucleotide
auauaggccauccggugag

SEQ ID NO: 1904052 - RNA, 19 nt, Artificial Sequence
  Description of Artificial Sequence: Synthetic oligonucleotide
uaugcaaagaaguccgcuc

SEQ ID NO: 1904053 - RNA, 19 nt, Artificial Sequence
  Description of Artificial Sequence: Synthetic oligonucleotide
cuugucacaggauucugac

SEQ ID NO: 1904054 - RNA, 19 nt, Artificial Sequence
  Description of Artificial Sequence: Synthetic oligonucleotide
ucuauauagaguggacuug

SEQ ID NO: 1904055 - RNA, 19 nt, Artificial Sequence
  Description of Artificial Sequence: Synthetic oligonucleotide
aucccaaugagccugccga

SEQ ID NO: 1904056 - RNA, 19 nt, Artificial Sequence
  Description of Artificial Sequence: Synthetic oligonucleotide
gaaggaauauaggccaucc

SEQ ID NO: 1904057 - RNA, 19 nt, Artificial Sequence
  Description of Artificial Sequence: Synthetic oligonucleotide
guaagcgugguccacuccc

SEQ ID NO: 1904058 - RNA, 19 nt, Artificial Sequence
  Description of Artificial Sequence: Synthetic oligonucleotide
gucuuaugcaaagaagucc

SEQ ID NO: 1904059 - RNA, 19 nt, Artificial Sequence
  Description of Artificial Sequence: Synthetic oligonucleotide
gacuuuuacacccugugcu

SEQ ID NO: 1904060 - RNA, 19 nt, Artificial Sequence
  Description of Artificial Sequence: Synthetic oligonucleotide
aaugccugcugacuccaug

SEQ ID NO: 1904061 - RNA, 19 nt, Artificial Sequence
  Description of Artificial Sequence: Synthetic oligonucleotide
acuuuuacacccugugcug

SEQ ID NO: 1904062 - RNA, 19 nt, Artificial Sequence
  Description of Artificial Sequence: Synthetic oligonucleotide
aagcgaauggaugucucag

SEQ ID NO: 1904063 - RNA, 19 nt, Artificial Sequence
  Description of Artificial Sequence: Synthetic oligonucleotide
uugugagucugcccguggg

SEQ ID NO: 1904064 - RNA, 19 nt, Artificial Sequence
  Description of Artificial Sequence: Synthetic oligonucleotide
gagcgcaugcacuucagug

SEQ ID NO: 1904065 - RNA, 19 nt, Artificial Sequence
  Description of Artificial Sequence: Synthetic oligonucleotide
auauagaguggacuugggu

SEQ ID NO: 1904066 - RNA, 19 nt, Artificial Sequence
  Description of Artificial Sequence: Synthetic oligonucleotide
auucggacccgcuucagcu

SEQ ID NO: 1904067 - RNA, 19 nt, Artificial Sequence
  Description of Artificial Sequence: Synthetic oligonucleotide
cauccggugagguucacug

SEQ ID NO: 1904068 - RNA, 19 nt, Artificial Sequence
  Description of Artificial Sequence: Synthetic oligonucleotide
augcaaagaaguccgcucu

SEQ ID NO: 1904069 - RNA, 19 nt, Artificial Sequence
  Description of Artificial Sequence: Synthetic oligonucleotide
uggugugugucuuaugcaa

SEQ ID NO: 1904070 - RNA, 19 nt, Artificial Sequence
  Description of Artificial Sequence: Synthetic oligonucleotide
caacauacggcccuugguc

SEQ ID NO: 1904071 - RNA, 19 nt, Artificial Sequence
  Description of Artificial Sequence: Synthetic oligonucleotide
cucaauugccuuccggagc

SEQ ID NO: 1904072 - RNA, 19 nt, Artificial Sequence
  Description of Artificial Sequence: Synthetic oligonucleotide
cugacuuuuacacccugug

SEQ ID NO: 1904073 - RNA, 19 nt, Artificial Sequence
  Description of Artificial Sequence: Synthetic oligonucleotide
agagccaacauacggcccu

SEQ ID NO: 1904074 - RNA, 19 nt, Artificial Sequence
  Description of Artificial Sequence: Synthetic oligonucleotide
ggaucauggacucagggga

SEQ ID NO: 1904075 - RNA, 19 nt, Artificial Sequence
  Description of Artificial Sequence: Synthetic oligonucleotide
aggaugacggcaaucauga

SEQ ID NO: 1904076 - RNA, 19 nt, Artificial Sequence
  Description of Artificial Sequence: Synthetic oligonucleotide
ugugcugccgccgucgugc

SEQ ID NO: 1904077 - RNA, 19 nt, Artificial Sequence
  Description of Artificial Sequence: Synthetic oligonucleotide
uuaugcaaagaaguccgcu

SEQ ID NO: 1904078 - RNA, 19 nt, Artificial Sequence
  Description of Artificial Sequence: Synthetic oligonucleotide
uugagggcuacaguggggc

SEQ ID NO: 1904079 - RNA, 19 nt, Artificial Sequence
  Description of Artificial Sequence: Synthetic oligonucleotide
ucuacacgcacccgguacu

SEQ ID NO: 1904080 - RNA, 19 nt, Artificial Sequence
  Description of Artificial Sequence: Synthetic oligonucleotide
gacggcaaucaugacaggc

SEQ ID NO: 1904081 - RNA, 19 nt, Artificial Sequence
  Description of Artificial Sequence: Synthetic oligonucleotide
gcuugcagaaggaauauag

SEQ ID NO: 1904082 - RNA, 19 nt, Artificial Sequence
  Description of Artificial Sequence: Synthetic oligonucleotide
ucacucgcaagggagauuc

SEQ ID NO: 1904083 - RNA, 19 nt, Artificial Sequence
  Description of Artificial Sequence: Synthetic oligonucleotide
ugucggaaggacuacccuc

SEQ ID NO: 1904084 - RNA, 19 nt, Artificial Sequence
  Description of Artificial Sequence: Synthetic oligonucleotide
agaaagcugaguccucugu

SEQ ID NO: 1904085 - RNA, 19 nt, Artificial Sequence
  Description of Artificial Sequence: Synthetic oligonucleotide
ugcugccgcuugcagaagg

SEQ ID NO: 1904086 - RNA, 19 nt, Artificial Sequence
  Description of Artificial Sequence: Synthetic oligonucleotide
aagggagauucggacccgc

SEQ ID NO: 1904087 - RNA, 19 nt, Artificial Sequence
  Description of Artificial Sequence: Synthetic oligonucleotide
cuacuagagccaacauacg

SEQ ID NO: 1904088 - RNA, 19 nt, Artificial Sequence
  Description of Artificial Sequence: Synthetic oligonucleotide
acuacccucucgugggagg

SEQ ID NO: 1904089 - RNA, 19 nt, Artificial Sequence
  Description of Artificial Sequence: Synthetic oligonucleotide
cacuaucccggaaacuggc

SEQ ID NO: 1904090 - RNA, 19 nt, Artificial Sequence
  Description of Artificial Sequence: Synthetic oligonucleotide
uucagguugcugccgcuug

SEQ ID NO: 1904091 - RNA, 19 nt, Artificial Sequence
  Description of Artificial Sequence: Synthetic oligonucleotide
ugcugucauaggagggagg

SEQ ID NO: 1904092 - RNA, 19 nt, Artificial Sequence
  Description of Artificial Sequence: Synthetic oligonucleotide
gacucuacuagagccaaca

SEQ ID NO: 1904093 - RNA, 19 nt, Artificial Sequence
  Description of Artificial Sequence: Synthetic oligonucleotide
cuugguccugugcagugcc

SEQ ID NO: 1904094 - RNA, 19 nt, Artificial Sequence
  Description of Artificial Sequence: Synthetic oligonucleotide
agcgugguccacucccagc

SEQ ID NO: 1904095 - RNA, 19 nt, Artificial Sequence
  Description of Artificial Sequence: Synthetic oligonucleotide
aggccauccggugagguuc

SEQ ID NO: 1904096 - RNA, 19 nt, Artificial Sequence
  Description of Artificial Sequence: Synthetic oligonucleotide
agugccaaccgcagguccc

SEQ ID NO: 1904097 - RNA, 19 nt, Artificial Sequence
  Description of Artificial Sequence: Synthetic oligonucleotide
uuugggcaacagcauuagc

SEQ ID NO: 1904098 - RNA, 19 nt, Artificial Sequence
  Description of Artificial Sequence: Synthetic oligonucleotide
ucgcaagggagauucggac

SEQ ID NO: 1904099 - RNA, 19 nt, Artificial Sequence
  Description of Artificial Sequence: Synthetic oligonucleotide
aggacucaucuccccuucc

SEQ ID NO: 1904100 - RNA, 19 nt, Artificial Sequence
  Description of Artificial Sequence: Synthetic oligonucleotide
acgcuacuaccugugagcg

SEQ ID NO: 1904101 - RNA, 19 nt, Artificial Sequence
  Description of Artificial Sequence: Synthetic oligonucleotide
ugcaguugagggcuacagu

SEQ ID NO: 1904102 - RNA, 19 nt, Artificial Sequence
  Description of Artificial Sequence: Synthetic oligonucleotide
aguaacgcuacuaccugug

SEQ ID NO: 1904103 - RNA, 19 nt, Artificial Sequence
  Description of Artificial Sequence: Synthetic oligonucleotide
acucgcaagggagauucgg

SEQ ID NO: 1904104 - RNA, 19 nt, Artificial Sequence
  Description of Artificial Sequence: Synthetic oligonucleotide
ugugagcguucgauggagc

SEQ ID NO: 1904105 - RNA, 19 nt, Artificial Sequence
  Description of Artificial Sequence: Synthetic oligonucleotide
gcacuugucaucacugucg

SEQ ID NO: 1904106 - RNA, 19 nt, Artificial Sequence
  Description of Artificial Sequence: Synthetic oligonucleotide
ucuugaugcggaugaugcu

SEQ ID NO: 1904107 - RNA, 19 nt, Artificial Sequence
  Description of Artificial Sequence: Synthetic oligonucleotide
gugagcguucgauggagcc

SEQ ID NO: 1904108 - RNA, 19 nt, Artificial Sequence
  Description of Artificial Sequence: Synthetic oligonucleotide
gcugucauaggagggaggg

SEQ ID NO: 1904109 - RNA, 19 nt, Artificial Sequence
  Description of Artificial Sequence: Synthetic oligonucleotide
ggcacuaucccggaaacug

SEQ ID NO: 1904110 - RNA, 19 nt, Artificial Sequence
  Description of Artificial Sequence: Synthetic oligonucleotide
gugucuuaugcaaagaagu

SEQ ID NO: 1904111 - RNA, 19 nt, Artificial Sequence
  Description of Artificial Sequence: Synthetic oligonucleotide
ucagguugcugccgcuugc

SEQ ID NO: 1904112 - RNA, 19 nt, Artificial Sequence
  Description of Artificial Sequence: Synthetic oligonucleotide
auggugugugucuuaugca

SEQ ID NO: 1904113 - RNA, 19 nt, Artificial Sequence
  Description of Artificial Sequence: Synthetic oligonucleotide
acguaagcgugguccacuc

SEQ ID NO: 1904114 - RNA, 19 nt, Artificial Sequence
  Description of Artificial Sequence: Synthetic oligonucleotide
ugagcguucgauggagccc

SEQ ID NO: 1904115 - RNA, 19 nt, Artificial Sequence
  Description of Artificial Sequence: Synthetic oligonucleotide
cucuacacgcacccgguac

SEQ ID NO: 1904116 - RNA, 19 nt, Artificial Sequence
  Description of Artificial Sequence: Synthetic oligonucleotide
ucggacccgcuucagcuug

SEQ ID NO: 1904117 - RNA, 19 nt, Artificial Sequence
  Description of Artificial Sequence: Synthetic oligonucleotide
gagucugcccgugggaucc

SEQ ID NO: 1904118 - RNA, 19 nt, Artificial Sequence
  Description of Artificial Sequence: Synthetic oligonucleotide
uaagcgugguccacuccca

SEQ ID NO: 1904119 - RNA, 19 nt, Artificial Sequence
  Description of Artificial Sequence: Synthetic oligonucleotide
caggauucugacuuuucca

SEQ ID NO: 1904120 - RNA, 19 nt, Artificial Sequence
  Description of Artificial Sequence: Synthetic oligonucleotide
aucccggaaacuggcaagg

SEQ ID NO: 1904121 - RNA, 19 nt, Artificial Sequence
  Description of Artificial Sequence: Synthetic oligonucleotide
aagcgugguccacucccag

SEQ ID NO: 1904122 - RNA, 19 nt, Artificial Sequence
  Description of Artificial Sequence: Synthetic oligonucleotide
uugucacaggauucugacu

SEQ ID NO: 1904123 - RNA, 19 nt, Artificial Sequence
  Description of Artificial Sequence: Synthetic oligonucleotide
auuagccaggaugacggca

SEQ ID NO: 1904124 - RNA, 19 nt, Artificial Sequence
  Description of Artificial Sequence: Synthetic oligonucleotide
cuugugagucugcccgugg

SEQ ID NO: 1904125 - RNA, 19 nt, Artificial Sequence
  Description of Artificial Sequence: Synthetic oligonucleotide
gaucugaugguggagacau

SEQ ID NO: 1904126 - RNA, 19 nt, Artificial Sequence
  Description of Artificial Sequence: Synthetic oligonucleotide
ggacccucucuuuagagca

SEQ ID NO: 1904127 - RNA, 19 nt, Artificial Sequence
  Description of Artificial Sequence: Synthetic oligonucleotide
gugugucuuaugcaaagaa

SEQ ID NO: 1904128 - RNA, 19 nt, Artificial Sequence
  Description of Artificial Sequence: Synthetic oligonucleotide
gauguccucuacacgcacc

SEQ ID NO: 1904129 - RNA, 19 nt, Artificial Sequence
  Description of Artificial Sequence: Synthetic oligonucleotide
gauucugacuuuuccaguu

SEQ ID NO: 1904130 - RNA, 19 nt, Artificial Sequence
  Description of Artificial Sequence: Synthetic oligonucleotide
agcgaauggaugucucaga

SEQ ID NO: 1904131 - RNA, 19 nt, Artificial Sequence
  Description of Artificial Sequence: Synthetic oligonucleotide
ggaaggugcaguugagggc

SEQ ID NO: 1904132 - RNA, 19 nt, Artificial Sequence
  Description of Artificial Sequence: Synthetic oligonucleotide
ggagucacucgcaagggag

SEQ ID NO: 1904133 - RNA, 19 nt, Artificial Sequence
  Description of Artificial Sequence: Synthetic oligonucleotide
guggccugacuuuuacacc

SEQ ID NO: 1904134 - RNA, 19 nt, Artificial Sequence
  Description of Artificial Sequence: Synthetic oligonucleotide
uccggagcuccuuuagggu

SEQ ID NO: 1904135 - RNA, 19 nt, Artificial Sequence
  Description of Artificial Sequence: Synthetic oligonucleotide
uucuucccacucuaagauc

SEQ ID NO: 1904136 - RNA, 19 nt, Artificial Sequence
  Description of Artificial Sequence: Synthetic oligonucleotide
guccacucccagcagugag

SEQ ID NO: 1904137 - RNA, 19 nt, Artificial Sequence
  Description of Artificial Sequence: Synthetic oligonucleotide
guucuucccacucuaagau

SEQ ID NO: 1904138 - RNA, 19 nt, Artificial Sequence
  Description of Artificial Sequence: Synthetic oligonucleotide
uggaagcgaauggaugucu

SEQ ID NO: 1904139 - RNA, 19 nt, Artificial Sequence
  Description of Artificial Sequence: Synthetic oligonucleotide
ugccgcuugcagaaggaau

SEQ ID NO: 1904140 - RNA, 19 nt, Artificial Sequence
  Description of Artificial Sequence: Synthetic oligonucleotide
agguagccuccaaaggugg

SEQ ID NO: 1904141 - RNA, 19 nt, Artificial Sequence
  Description of Artificial Sequence: Synthetic oligonucleotide
acauacggcccuugguccu

SEQ ID NO: 1904142 - RNA, 19 nt, Artificial Sequence
  Description of Artificial Sequence: Synthetic oligonucleotide
acggcaaucaugacaggca

SEQ ID NO: 1904143 - RNA, 19 nt, Artificial Sequence
  Description of Artificial Sequence: Synthetic oligonucleotide
uauaggccauccggugagg

SEQ ID NO: 1904144 - RNA, 19 nt, Artificial Sequence
  Description of Artificial Sequence: Synthetic oligonucleotide
cuucaggggcuugugaguc

SEQ ID NO: 1904145 - RNA, 19 nt, Artificial Sequence
  Description of Artificial Sequence: Synthetic oligonucleotide
aguugcuguucuucccacu

SEQ ID NO: 1904146 - RNA, 19 nt, Artificial Sequence
  Description of Artificial Sequence: Synthetic oligonucleotide
ucaggacucaucuccccuu

SEQ ID NO: 1904147 - RNA, 19 nt, Artificial Sequence
  Description of Artificial Sequence: Synthetic oligonucleotide
cucuacuagagccaacaua

SEQ ID NO: 1904148 - RNA, 19 nt, Artificial Sequence
  Description of Artificial Sequence: Synthetic oligonucleotide
guggcacuaucccggaaac

SEQ ID NO: 1904149 - RNA, 19 nt, Artificial Sequence
  Description of Artificial Sequence: Synthetic oligonucleotide
gagcguucgauggagccca

SEQ ID NO: 1904150 - RNA, 19 nt, Artificial Sequence
  Description of Artificial Sequence: Synthetic oligonucleotide
acacgcacccgguacugcu

SEQ ID NO: 1904151 - RNA, 19 nt, Artificial Sequence
  Description of Artificial Sequence: Synthetic oligonucleotide
cugugagcguucgauggag

SEQ ID NO: 1904152 - RNA, 19 nt, Artificial Sequence
  Description of Artificial Sequence: Synthetic oligonucleotide
guugccugugguacuuucc

SEQ ID NO: 1904153 - RNA, 19 nt, Artificial Sequence
  Description of Artificial Sequence: Synthetic oligonucleotide
gaaguccgcucucgucuag

SEQ ID NO: 1904154 - RNA, 19 nt, Artificial Sequence
  Description of Artificial Sequence: Synthetic oligonucleotide
cagcuugcgcuugucacag

SEQ ID NO: 1904155 - RNA, 19 nt, Artificial Sequence
  Description of Artificial Sequence: Synthetic oligonucleotide
acucuacuagagccaacau

SEQ ID NO: 1904156 - RNA, 19 nt, Artificial Sequence
  Description of Artificial Sequence: Synthetic oligonucleotide
cucgcaagggagauucgga

SEQ ID NO: 1904157 - RNA, 19 nt, Artificial Sequence
  Description of Artificial Sequence: Synthetic oligonucleotide
ggaaacuggcaaggggugg

SEQ ID NO: 1904158 - RNA, 19 nt, Artificial Sequence
  Description of Artificial Sequence: Synthetic oligonucleotide
ugacggcaaucaugacagg

SEQ ID NO: 1904159 - RNA, 19 nt, Artificial Sequence
  Description of Artificial Sequence: Synthetic oligonucleotide
ccucaauugccuuccggag

SEQ ID NO: 1904160 - RNA, 19 nt, Artificial Sequence
  Description of Artificial Sequence: Synthetic oligonucleotide
ugagguucacuggcacuug

SEQ ID NO: 1904161 - RNA, 19 nt, Artificial Sequence
  Description of Artificial Sequence: Synthetic oligonucleotide
gugacguaagcguggucca

SEQ ID NO: 1904162 - RNA, 19 nt, Artificial Sequence
  Description of Artificial Sequence: Synthetic oligonucleotide
guaacgcuacuaccuguga

SEQ ID NO: 1904163 - RNA, 19 nt, Artificial Sequence
  Description of Artificial Sequence: Synthetic oligonucleotide
guggacugccacagaagag

SEQ ID NO: 1904164 - RNA, 19 nt, Artificial Sequence
  Description of Artificial Sequence: Synthetic oligonucleotide
gccaacauacggcccuugg

SEQ ID NO: 1904165 - RNA, 19 nt, Artificial Sequence
  Description of Artificial Sequence: Synthetic oligonucleotide
gacuacccucucgugggag

SEQ ID NO: 1904166 - RNA, 19 nt, Artificial Sequence
  Description of Artificial Sequence: Synthetic oligonucleotide
cuaucccggaaacuggcaa

SEQ ID NO: 1904167 - RNA, 19 nt, Artificial Sequence
  Description of Artificial Sequence: Synthetic oligonucleotide
ccaugauguccucuacacg

SEQ ID NO: 1904168 - RNA, 19 nt, Artificial Sequence
  Description of Artificial Sequence: Synthetic oligonucleotide
uguucaccuggaagcgaau

SEQ ID NO: 1904169 - RNA, 19 nt, Artificial Sequence
  Description of Artificial Sequence: Synthetic oligonucleotide
ugcccgugggauccagaga

SEQ ID NO: 1904170 - RNA, 19 nt, Artificial Sequence
  Description of Artificial Sequence: Synthetic oligonucleotide
ucucgucuaguugcuguuc

SEQ ID NO: 1904171 - RNA, 19 nt, Artificial Sequence
  Description of Artificial Sequence: Synthetic oligonucleotide
agaaguccgcucucgucua

SEQ ID NO: 1904172 - RNA, 19 nt, Artificial Sequence
  Description of Artificial Sequence: Synthetic oligonucleotide
cacugucggaaggacuacc

SEQ ID NO: 1904173 - RNA, 19 nt, Artificial Sequence
  Description of Artificial Sequence: Synthetic oligonucleotide
gguggcacuaucccggaaa

SEQ ID NO: 1904174 - RNA, 19 nt, Artificial Sequence
  Description of Artificial Sequence: Synthetic oligonucleotide
gcugccgccgucgugcugg

SEQ ID NO: 1904175 - RNA, 19 nt, Artificial Sequence
  Description of Artificial Sequence: Synthetic oligonucleotide
cagagaaagcugaguccuc

SEQ ID NO: 1904176 - RNA, 19 nt, Artificial Sequence
  Description of Artificial Sequence: Synthetic oligonucleotide
cacucccguaccaugaugu

SEQ ID NO: 1904177 - RNA, 19 nt, Artificial Sequence
  Description of Artificial Sequence: Synthetic oligonucleotide
aaguccgcucucgucuagu

SEQ ID NO: 1904178 - RNA, 19 nt, Artificial Sequence
  Description of Artificial Sequence: Synthetic oligonucleotide
gagucacucgcaagggaga

SEQ ID NO: 1904179 - RNA, 19 nt, Artificial Sequence
  Description of Artificial Sequence: Synthetic oligonucleotide
gcacuaucccggaaacugg

SEQ ID NO: 1904180 - RNA, 19 nt, Artificial Sequence
  Description of Artificial Sequence: Synthetic oligonucleotide
caagggagauucggacccg

SEQ ID NO: 1904181 - RNA, 19 nt, Artificial Sequence
  Description of Artificial Sequence: Synthetic oligonucleotide
guccgcucucgucuaguug

SEQ ID NO: 1904182 - RNA, 19 nt, Artificial Sequence
  Description of Artificial Sequence: Synthetic oligonucleotide
aggucggagucacucgcaa

SEQ ID NO: 1904183 - RNA, 19 nt, Artificial Sequence
  Description of Artificial Sequence: Synthetic oligonucleotide
ggcacacucccguaccaug

SEQ ID NO: 1904184 - RNA, 19 nt, Artificial Sequence
  Description of Artificial Sequence: Synthetic oligonucleotide
cuggaagcgaauggauguc

SEQ ID NO: 1904185 - RNA, 19 nt, Artificial Sequence
  Description of Artificial Sequence: Synthetic oligonucleotide
auaggccauccggugaggu

SEQ ID NO: 1904186 - RNA, 19 nt, Artificial Sequence
  Description of Artificial Sequence: Synthetic oligonucleotide
gugccaaccgcaggucccg

SEQ ID NO: 1904187 - RNA, 19 nt, Artificial Sequence
  Description of Artificial Sequence: Synthetic oligonucleotide
gcccgugggauccagagaa

SEQ ID NO: 1904188 - RNA, 19 nt, Artificial Sequence
  Description of Artificial Sequence: Synthetic oligonucleotide
ggaauauaggccauccggu

SEQ ID NO: 1904189 - RNA, 19 nt, Artificial Sequence
  Description of Artificial Sequence: Synthetic oligonucleotide
cacucgcaagggagauucg

SEQ ID NO: 1904190 - RNA, 19 nt, Artificial Sequence
  Description of Artificial Sequence: Synthetic oligonucleotide
ugacguaagcgugguccac

SEQ ID NO: 1904191 - RNA, 19 nt, Artificial Sequence
  Description of Artificial Sequence: Synthetic oligonucleotide
uacacgcacccgguacugc

SEQ ID NO: 1904192 - RNA, 19 nt, Artificial Sequence
  Description of Artificial Sequence: Synthetic oligonucleotide
caugcacuucaguggucuc

SEQ ID NO: 1904193 - RNA, 19 nt, Artificial Sequence
  Description of Artificial Sequence: Synthetic oligonucleotide
ucacugucggaaggacuac

SEQ ID NO: 1904194 - RNA, 19 nt, Artificial Sequence
  Description of Artificial Sequence: Synthetic oligonucleotide
gauccagagaaagcugagu

SEQ ID NO: 1904195 - RNA, 19 nt, Artificial Sequence
  Description of Artificial Sequence: Synthetic oligonucleotide
ucggaaggacuacccucuc

SEQ ID NO: 1904196 - RNA, 19 nt, Artificial Sequence
  Description of Artificial Sequence: Synthetic oligonucleotide
gucgugcugggcucagcug

SEQ ID NO: 1904197 - RNA, 19 nt, Artificial Sequence
  Description of Artificial Sequence: Synthetic oligonucleotide
acuaucccggaaacuggca

SEQ ID NO: 1904198 - RNA, 19 nt, Artificial Sequence
  Description of Artificial Sequence: Synthetic oligonucleotide
guggggcacacucccguac

SEQ ID NO: 1904199 - RNA, 19 nt, Artificial Sequence
  Description of Artificial Sequence: Synthetic oligonucleotide
ggucggagucacucgcaag

SEQ ID NO: 1904200 - RNA, 19 nt, Artificial Sequence
  Description of Artificial Sequence: Synthetic oligonucleotide
agcccucaauugccuuccg

SEQ ID NO: 1904201 - RNA, 19 nt, Artificial Sequence
  Description of Artificial Sequence: Synthetic oligonucleotide
uucggacccgcuucagcuu

SEQ ID NO: 1904202 - RNA, 19 nt, Artificial Sequence
  Description of Artificial Sequence: Synthetic oligonucleotide
agauucggacccgcuucag

SEQ ID NO: 1904203 - RNA, 19 nt, Artificial Sequence
  Description of Artificial Sequence: Synthetic oligonucleotide
cuacacgcacccgguacug

SEQ ID NO: 1904204 - RNA, 19 nt, Artificial Sequence
  Description of Artificial Sequence: Synthetic oligonucleotide
uaggccauccggugagguu

SEQ ID NO: 1904205 - RNA, 19 nt, Artificial Sequence
  Description of Artificial Sequence: Synthetic oligonucleotide
ucgucuaguugcuguucuu

SEQ ID NO: 1904206 - RNA, 19 nt, Artificial Sequence
  Description of Artificial Sequence: Synthetic oligonucleotide
cacgcacccgguacugcug

SEQ ID NO: 1904207 - RNA, 19 nt, Artificial Sequence
  Description of Artificial Sequence: Synthetic oligonucleotide
gcaugugcugccgccgucg

SEQ ID NO: 1904208 - RNA, 19 nt, Artificial Sequence
  Description of Artificial Sequence: Synthetic oligonucleotide
ccccaguaacgcuacuacc

SEQ ID NO: 1904209 - RNA, 19 nt, Artificial Sequence
  Description of Artificial Sequence: Synthetic oligonucleotide
uggcacuaucccggaaacu

SEQ ID NO: 1904210 - RNA, 19 nt, Artificial Sequence
  Description of Artificial Sequence: Synthetic oligonucleotide
gcccucaauugccuuccgg

SEQ ID NO: 1904211 - RNA, 19 nt, Artificial Sequence
  Description of Artificial Sequence: Synthetic oligonucleotide
aguccgcucucgucuaguu

SEQ ID NO: 1904212 - RNA, 19 nt, Artificial Sequence
  Description of Artificial Sequence: Synthetic oligonucleotide
ugcaggcuuugggcaacag

SEQ ID NO: 1904213 - RNA, 19 nt, Artificial Sequence
  Description of Artificial Sequence: Synthetic oligonucleotide
gucggaaggacuacccucu

SEQ ID NO: 1904214 - RNA, 19 nt, Artificial Sequence
  Description of Artificial Sequence: Synthetic oligonucleotide
cagcuucagguugcugccg

SEQ ID NO: 1904215 - RNA, 19 nt, Artificial Sequence
  Description of Artificial Sequence: Synthetic oligonucleotide
cuacuaccugugagcguuc

SEQ ID NO: 1904216 - RNA, 19 nt, Artificial Sequence
  Description of Artificial Sequence: Synthetic oligonucleotide
cauacggcccuugguccug

SEQ ID NO: 1904217 - RNA, 19 nt, Artificial Sequence
  Description of Artificial Sequence: Synthetic oligonucleotide
cccaguaacgcuacuaccu

SEQ ID NO: 1904218 - RNA, 19 nt, Artificial Sequence
  Description of Artificial Sequence: Synthetic oligonucleotide
gacguaagcgugguccacu

SEQ ID NO: 1904219 - RNA, 19 nt, Artificial Sequence
  Description of Artificial Sequence: Synthetic oligonucleotide
caucacugucggaaggacu

SEQ ID NO: 1904220 - RNA, 19 nt, Artificial Sequence
  Description of Artificial Sequence: Synthetic oligonucleotide
cuuuuacacccugugcugu

SEQ ID NO: 1904221 - RNA, 19 nt, Artificial Sequence
  Description of Artificial Sequence: Synthetic oligonucleotide
aguggggcacacucccgua

SEQ ID NO: 1904222 - RNA, 19 nt, Artificial Sequence
  Description of Artificial Sequence: Synthetic oligonucleotide
cucgucuaguugcuguucu

SEQ ID NO: 1904223 - RNA, 19 nt, Artificial Sequence
  Description of Artificial Sequence: Synthetic oligonucleotide
caaagaaguccgcucucgu

SEQ ID NO: 1904224 - RNA, 19 nt, Artificial Sequence
  Description of Artificial Sequence: Synthetic oligonucleotide
cgaauggaugucucagaac

SEQ ID NO: 1904225 - RNA, 19 nt, Artificial Sequence
  Description of Artificial Sequence: Synthetic oligonucleotide
cccacucuaagaucuccuc

SEQ ID NO: 1904226 - RNA, 19 nt, Artificial Sequence
  Description of Artificial Sequence: Synthetic oligonucleotide
uacccucucgugggaggcc

SEQ ID NO: 1904227 - RNA, 19 nt, Artificial Sequence
  Description of Artificial Sequence: Synthetic oligonucleotide
ugguggcacuaucccggaa

SEQ ID NO: 1904228 - RNA, 19 nt, Artificial Sequence
  Description of Artificial Sequence: Synthetic oligonucleotide
ggaagcgaauggaugucuc

SEQ ID NO: 1904229 - RNA, 19 nt, Artificial Sequence
  Description of Artificial Sequence: Synthetic oligonucleotide
ugccaaccgcaggucccgg

SEQ ID NO: 1904230 - RNA, 19 nt, Artificial Sequence
  Description of Artificial Sequence: Synthetic oligonucleotide
ccugaucugaugguggaga

SEQ ID NO: 1904231 - RNA, 19 nt, Artificial Sequence
  Description of Artificial Sequence: Synthetic oligonucleotide
caguaacgcuacuaccugu

SEQ ID NO: 1904232 - RNA, 19 nt, Artificial Sequence
  Description of Artificial Sequence: Synthetic oligonucleotide
cagcauuagccaggaugac

SEQ ID NO: 1904233 - RNA, 19 nt, Artificial Sequence
  Description of Artificial Sequence: Synthetic oligonucleotide
cuaccugugagcguucgau

SEQ ID NO: 1904234 - RNA, 19 nt, Artificial Sequence
  Description of Artificial Sequence: Synthetic oligonucleotide
ccgugggauccagagaaag

SEQ ID NO: 1904235 - RNA, 19 nt, Artificial Sequence
  Description of Artificial Sequence: Synthetic oligonucleotide
acccucucgugggaggcca

SEQ ID NO: 1904236 - RNA, 19 nt, Artificial Sequence
  Description of Artificial Sequence: Synthetic oligonucleotide
ggugugugucuuaugcaaa

SEQ ID NO: 1904237 - RNA, 19 nt, Artificial Sequence
  Description of Artificial Sequence: Synthetic oligonucleotide
caggucggagucacucgca

SEQ ID NO: 1904238 - RNA, 19 nt, Artificial Sequence
  Description of Artificial Sequence: Synthetic oligonucleotide
cacucccagcagugagaag

SEQ ID NO: 1904239 - RNA, 19 nt, Artificial Sequence
  Description of Artificial Sequence: Synthetic oligonucleotide
gcuacuaccugugagcguu

SEQ ID NO: 1904240 - RNA, 19 nt, Artificial Sequence
  Description of Artificial Sequence: Synthetic oligonucleotide
ggccaugacgggaccgagg

SEQ ID NO: 1904241 - RNA, 19 nt, Artificial Sequence
  Description of Artificial Sequence: Synthetic oligonucleotide
ccggaaacuggcaaggggu

SEQ ID NO: 1904242 - RNA, 19 nt, Artificial Sequence
  Description of Artificial Sequence: Synthetic oligonucleotide
gccugacuuuuacacccug

SEQ ID NO: 1904243 - RNA, 19 nt, Artificial Sequence
  Description of Artificial Sequence: Synthetic oligonucleotide
ccggaaggugcaguugagg

SEQ ID NO: 1904244 - RNA, 19 nt, Artificial Sequence
  Description of Artificial Sequence: Synthetic oligonucleotide
ccagagaaagcugaguccu

SEQ ID NO: 1904245 - RNA, 19 nt, Artificial Sequence
  Description of Artificial Sequence: Synthetic oligonucleotide
cggaaacuggcaaggggug

SEQ ID NO: 1904246 - RNA, 19 nt, Artificial Sequence
  Description of Artificial Sequence: Synthetic oligonucleotide
cauaggagggagggcugca

SEQ ID NO: 1904247 - RNA, 19 nt, Artificial Sequence
  Description of Artificial Sequence: Synthetic oligonucleotide
uugcugccgcuugcagaag

SEQ ID NO: 1904248 - RNA, 19 nt, Artificial Sequence
  Description of Artificial Sequence: Synthetic oligonucleotide
agccaacauacggcccuug

SEQ ID NO: 1904249 - RNA, 19 nt, Artificial Sequence
  Description of Artificial Sequence: Synthetic oligonucleotide
guucugagguagccuccaa

SEQ ID NO: 1904250 - RNA, 19 nt, Artificial Sequence
  Description of Artificial Sequence: Synthetic oligonucleotide
agggagauucggacccgcu

SEQ ID NO: 1904251 - RNA, 19 nt, Artificial Sequence
  Description of Artificial Sequence: Synthetic oligonucleotide
cucucgugggaggccauga

SEQ ID NO: 1904252 - RNA, 19 nt, Artificial Sequence
  Description of Artificial Sequence: Synthetic oligonucleotide
cagaaggaauauaggccau

SEQ ID NO: 1904253 - RNA, 19 nt, Artificial Sequence
  Description of Artificial Sequence: Synthetic oligonucleotide
gcucucgucuaguugcugu

SEQ ID NO: 1904254 - RNA, 19 nt, Artificial Sequence
  Description of Artificial Sequence: Synthetic oligonucleotide
cguucgauggagcccagca

SEQ ID NO: 1904255 - RNA, 19 nt, Artificial Sequence
  Description of Artificial Sequence: Synthetic oligonucleotide
gggacucuacuagagccaa

SEQ ID NO: 1904256 - RNA, 19 nt, Artificial Sequence
  Description of Artificial Sequence: Synthetic oligonucleotide
ggaugacggcaaucaugac

SEQ ID NO: 1904257 - RNA, 19 nt, Artificial Sequence
  Description of Artificial Sequence: Synthetic oligonucleotide
cugucggaaggacuacccu

SEQ ID NO: 1904258 - RNA, 19 nt, Artificial Sequence
  Description of Artificial Sequence: Synthetic oligonucleotide
ccugccgaugcuggugacg

SEQ ID NO: 1904259 - RNA, 19 nt, Artificial Sequence
  Description of Artificial Sequence: Synthetic oligonucleotide
ggcaaucaugacaggcaga

SEQ ID NO: 1904260 - RNA, 19 nt, Artificial Sequence
  Description of Artificial Sequence: Synthetic oligonucleotide
gcaaugccugcugacucca

SEQ ID NO: 1904261 - RNA, 19 nt, Artificial Sequence
  Description of Artificial Sequence: Synthetic oligonucleotide
cagguugcugccgcuugca

SEQ ID NO: 1904262 - RNA, 19 nt, Artificial Sequence
  Description of Artificial Sequence: Synthetic oligonucleotide
gcgcaugcacuucaguggu

SEQ ID NO: 1904263 - RNA, 19 nt, Artificial Sequence
  Description of Artificial Sequence: Synthetic oligonucleotide
cugacuccauguugccugu

SEQ ID NO: 1904264 - RNA, 19 nt, Artificial Sequence
  Description of Artificial Sequence: Synthetic oligonucleotide
ggguggccugacuuuuaca

SEQ ID NO: 1904265 - RNA, 19 nt, Artificial Sequence
  Description of Artificial Sequence: Synthetic oligonucleotide
caguggggcacacucccgu

SEQ ID NO: 1904266 - RNA, 19 nt, Artificial Sequence
  Description of Artificial Sequence: Synthetic oligonucleotide
auacggcccuugguccugu

SEQ ID NO: 1904267 - RNA, 19 nt, Artificial Sequence
  Description of Artificial Sequence: Synthetic oligonucleotide
ccugugagcguucgaugga

SEQ ID NO: 1904268 - RNA, 19 nt, Artificial Sequence
  Description of Artificial Sequence: Synthetic oligonucleotide
gucugcccgugggauccag

SEQ ID NO: 1904269 - RNA, 19 nt, Artificial Sequence
  Description of Artificial Sequence: Synthetic oligonucleotide
cguaagcgugguccacucc

SEQ ID NO: 1904270 - RNA, 19 nt, Artificial Sequence
  Description of Artificial Sequence: Synthetic oligonucleotide
cucucgucuaguugcuguu

SEQ ID NO: 1904271 - RNA, 19 nt, Artificial Sequence
  Description of Artificial Sequence: Synthetic oligonucleotide
ggugcaguugagggcuaca

SEQ ID NO: 1904272 - RNA, 19 nt, Artificial Sequence
  Description of Artificial Sequence: Synthetic oligonucleotide
caauugccuuccggagcuc

SEQ ID NO: 1904273 - RNA, 19 nt, Artificial Sequence
  Description of Artificial Sequence: Synthetic oligonucleotide
ggacuacccucucguggga

SEQ ID NO: 1904274 - RNA, 19 nt, Artificial Sequence
  Description of Artificial Sequence: Synthetic oligonucleotide
gcacccgguacugcuggug

SEQ ID NO: 1904275 - RNA, 19 nt, Artificial Sequence
  Description of Artificial Sequence: Synthetic oligonucleotide
ccaacauacggcccuuggu

SEQ ID NO: 1904276 - RNA, 19 nt, Artificial Sequence
  Description of Artificial Sequence: Synthetic oligonucleotide
ggacucuacuagagccaac

SEQ ID NO: 1904277 - RNA, 19 nt, Artificial Sequence
  Description of Artificial Sequence: Synthetic oligonucleotide
gccgccgucgugcugggcu

SEQ ID NO: 1904278 - RNA, 19 nt, Artificial Sequence
  Description of Artificial Sequence: Synthetic oligonucleotide
agcguucgauggagcccag

SEQ ID NO: 1904279 - RNA, 19 nt, Artificial Sequence
  Description of Artificial Sequence: Synthetic oligonucleotide
gggagauucggacccgcuu

SEQ ID NO: 1904280 - RNA, 19 nt, Artificial Sequence
  Description of Artificial Sequence: Synthetic oligonucleotide
gguggcggccccagcccag

SEQ ID NO: 1904281 - RNA, 19 nt, Artificial Sequence
  Description of Artificial Sequence: Synthetic oligonucleotide
cacacucccguaccaugau

SEQ ID NO: 1904282 - RNA, 19 nt, Artificial Sequence
  Description of Artificial Sequence: Synthetic oligonucleotide
ccggugagguucacuggca

SEQ ID NO: 1904283 - RNA, 19 nt, Artificial Sequence
  Description of Artificial Sequence: Synthetic oligonucleotide
ccaaccgcaggucccggaa

SEQ ID NO: 1904284 - RNA, 19 nt, Artificial Sequence
  Description of Artificial Sequence: Synthetic oligonucleotide
agucugcccgugggaucca

SEQ ID NO: 1904285 - RNA, 19 nt, Artificial Sequence
  Description of Artificial Sequence: Synthetic oligonucleotide
agggguggccugacuuuua

SEQ ID NO: 1904286 - RNA, 19 nt, Artificial Sequence
  Description of Artificial Sequence: Synthetic oligonucleotide
ggucccggaaggugcaguu

SEQ ID NO: 1904287 - RNA, 19 nt, Artificial Sequence
  Description of Artificial Sequence: Synthetic oligonucleotide
gcguucgauggagcccagc

SEQ ID NO: 1904288 - RNA, 19 nt, Artificial Sequence
  Description of Artificial Sequence: Synthetic oligonucleotide
cuuccaggucggagucacu

SEQ ID NO: 1904289 - RNA, 19 nt, Artificial Sequence
  Description of Artificial Sequence: Synthetic oligonucleotide
ccucucgugggaggccaug

SEQ ID NO: 1904290 - RNA, 19 nt, Artificial Sequence
  Description of Artificial Sequence: Synthetic oligonucleotide
cggagucacucgcaaggga

SEQ ID NO: 1904291 - RNA, 19 nt, Artificial Sequence
  Description of Artificial Sequence: Synthetic oligonucleotide
ugccgccgucgugcugggc

SEQ ID NO: 1904292 - RNA, 19 nt, Artificial Sequence
  Description of Artificial Sequence: Synthetic oligonucleotide
caguggucucugugucacu

SEQ ID NO: 1904293 - RNA, 19 nt, Artificial Sequence
  Description of Artificial Sequence: Synthetic oligonucleotide
ccgccgucgugcugggcuc

SEQ ID NO: 1904294 - RNA, 19 nt, Artificial Sequence
  Description of Artificial Sequence: Synthetic oligonucleotide
cccguaccaugauguccuc

SEQ ID NO: 1904295 - RNA, 19 nt, Artificial Sequence
  Description of Artificial Sequence: Synthetic oligonucleotide
caaugccugcugacuccau

SEQ ID NO: 1904296 - RNA, 19 nt, Artificial Sequence
  Description of Artificial Sequence: Synthetic oligonucleotide
ccucucuuuagagcaggcu

SEQ ID NO: 1904297 - RNA, 19 nt, Artificial Sequence
  Description of Artificial Sequence: Synthetic oligonucleotide
ggcaagggguggccugacu

SEQ ID NO: 1904298 - RNA, 19 nt, Artificial Sequence
  Description of Artificial Sequence: Synthetic oligonucleotide
gccgucgugcugggcucag

SEQ ID NO: 1904299 - RNA, 19 nt, Artificial Sequence
  Description of Artificial Sequence: Synthetic oligonucleotide
cgucgugcugggcucagcu

SEQ ID NO: 1904300 - RNA, 19 nt, Artificial Sequence
  Description of Artificial Sequence: Synthetic oligonucleotide
ccucuacacgcacccggua

SEQ ID NO: 1904301 - RNA, 19 nt, Artificial Sequence
  Description of Artificial Sequence: Synthetic oligonucleotide
gcccuugguccugugcagu

SEQ ID NO: 1904302 - RNA, 19 nt, Artificial Sequence
  Description of Artificial Sequence: Synthetic oligonucleotide
ggggcucuccugaucugau

SEQ ID NO: 1904303 - RNA, 19 nt, Artificial Sequence
  Description of Artificial Sequence: Synthetic oligonucleotide
cgcucucgucuaguugcug

SEQ ID NO: 1904304 - RNA, 19 nt, Artificial Sequence
  Description of Artificial Sequence: Synthetic oligonucleotide
ccgucgugcugggcucagc

SEQ ID NO: 1904305 - RNA, 19 nt, Artificial Sequence
  Description of Artificial Sequence: Synthetic oligonucleotide
ccgcucucgucuaguugcu

SEQ ID NO: 1904306 - RNA, 19 nt, Artificial Sequence
  Description of Artificial Sequence: Synthetic oligonucleotide
ccguaccaugauguccucu

SEQ ID NO: 1904307 - RNA, 19 nt, Artificial Sequence
  Description of Artificial Sequence: Synthetic oligonucleotide
cgcuugcagaaggaauaua

SEQ ID NO: 1904308 - RNA, 19 nt, Artificial Sequence
  Description of Artificial Sequence: Synthetic oligonucleotide
cgcuacuaccugugagcgu

SEQ ID NO: 1904309 - RNA, 19 nt, Artificial Sequence
  Description of Artificial Sequence: Synthetic oligonucleotide
cgccgucgugcugggcuca

SEQ ID NO: 1904310 - RNA, 19 nt, Artificial Sequence
  Description of Artificial Sequence: Synthetic oligonucleotide
cccucucgugggaggccau

SEQ ID NO: 1904311 - RNA, 19 nt, Artificial Sequence
  Description of Artificial Sequence: Synthetic oligonucleotide
aaaaguaccagcuuagugu

SEQ ID NO: 1904312 - RNA, 19 nt, Artificial Sequence
  Description of Artificial Sequence: Synthetic oligonucleotide
aaagaguugacaucgcuuc

SEQ ID NO: 1904313 - RNA, 19 nt, Artificial Sequence
  Description of Artificial Sequence: Synthetic oligonucleotide
aauguugaaagugcaaugc

SEQ ID NO: 1904314 - RNA, 19 nt, Artificial Sequence
  Description of Artificial Sequence: Synthetic oligonucleotide
auuuggacaacacaugggc

SEQ ID NO: 1904315 - RNA, 19 nt, Artificial Sequence
  Description of Artificial Sequence: Synthetic oligonucleotide
aaggauauaaaccuguggu

SEQ ID NO: 1904316 - RNA, 19 nt, Artificial Sequence
  Description of Artificial Sequence: Synthetic oligonucleotide
aaacguugccaucaaauac

SEQ ID NO: 1904317 - RNA, 19 nt, Artificial Sequence
  Description of Artificial Sequence: Synthetic oligonucleotide
aaaaccuccaucuaucaug

SEQ ID NO: 1904318 - RNA, 19 nt, Artificial Sequence
  Description of Artificial Sequence: Synthetic oligonucleotide
aacguagcaaaguaguccg

SEQ ID NO: 1904319 - RNA, 19 nt, Artificial Sequence
  Description of Artificial Sequence: Synthetic oligonucleotide
acuugugauguacacaugc

SEQ ID NO: 1904320 - RNA, 19 nt, Artificial Sequence
  Description of Artificial Sequence: Synthetic oligonucleotide
aaacguagcaaaguagucc

SEQ ID NO: 1904321 - RNA, 19 nt, Artificial Sequence
  Description of Artificial Sequence: Synthetic oligonucleotide
aaaguacugguauuuggac

SEQ ID NO: 1904322 - RNA, 19 nt, Artificial Sequence
  Description of Artificial Sequence: Synthetic oligonucleotide
aaaaccuguccauuauccc

SEQ ID NO: 1904323 - RNA, 19 nt, Artificial Sequence
  Description of Artificial Sequence: Synthetic oligonucleotide
aucuaucaugcuuuuagcc

SEQ ID NO: 1904324 - RNA, 19 nt, Artificial Sequence
  Description of Artificial Sequence: Synthetic oligonucleotide
uauccaauggugauaaucu

SEQ ID NO: 1904325 - RNA, 19 nt, Artificial Sequence
  Description of Artificial Sequence: Synthetic oligonucleotide
ucuaucaugcuuuuagccc

SEQ ID NO: 1904326 - RNA, 19 nt, Artificial Sequence
  Description of Artificial Sequence: Synthetic oligonucleotide
aaguaguucacacacagua

SEQ ID NO: 1904327 - RNA, 19 nt, Artificial Sequence
  Description of Artificial Sequence: Synthetic oligonucleotide
gauauuggaacaaggaacc

SEQ ID NO: 1904328 - RNA, 19 nt, Artificial Sequence
  Description of Artificial Sequence: Synthetic oligonucleotide
agaaguaguucacacacag

SEQ ID NO: 1904329 - RNA, 19 nt, Artificial Sequence
  Description of Artificial Sequence: Synthetic oligonucleotide
aaaguaguccgccaccguc

SEQ ID NO: 1904330 - RNA, 19 nt, Artificial Sequence
  Description of Artificial Sequence: Synthetic oligonucleotide
uguucuaaaccaugggagg

SEQ ID NO: 1904331 - RNA, 19 nt, Artificial Sequence
  Description of Artificial Sequence: Synthetic oligonucleotide
cacaaaagaguugacaucg

SEQ ID NO: 1904332 - RNA, 19 nt, Artificial Sequence
  Description of Artificial Sequence: Synthetic oligonucleotide
caaacaugcagaaaccugc

SEQ ID NO: 1904333 - RNA, 19 nt, Artificial Sequence
  Description of Artificial Sequence: Synthetic oligonucleotide
acaaggaaccauaucaugc

SEQ ID NO: 1904334 - RNA, 19 nt, Artificial Sequence
  Description of Artificial Sequence: Synthetic oligonucleotide
gagacagcuuaauuaaggg

SEQ ID NO: 1904335 - RNA, 19 nt, Artificial Sequence
  Description of Artificial Sequence: Synthetic oligonucleotide
cacacaguagaaaaguacc

SEQ ID NO: 1904336 - RNA, 19 nt, Artificial Sequence
  Description of Artificial Sequence: Synthetic oligonucleotide
gaaggauauaaaccugugg

SEQ ID NO: 1904337 - RNA, 19 nt, Artificial Sequence
  Description of Artificial Sequence: Synthetic oligonucleotide
aaaccuccaucuaucaugc

SEQ ID NO: 1904338 - RNA, 19 nt, Artificial Sequence
  Description of Artificial Sequence: Synthetic oligonucleotide
uaauuaagggaguucuucc

SEQ ID NO: 1904339 - RNA, 19 nt, Artificial Sequence
  Description of Artificial Sequence: Synthetic oligonucleotide
aacgguuaucaguaaagug

SEQ ID NO: 1904340 - RNA, 19 nt, Artificial Sequence
  Description of Artificial Sequence: Synthetic oligonucleotide
ugaguaacgguuaucagua

SEQ ID NO: 1904341 - RNA, 19 nt, Artificial Sequence
  Description of Artificial Sequence: Synthetic oligonucleotide
uguuuaacugcuguucugg

SEQ ID NO: 1904342 - RNA, 19 nt, Artificial Sequence
  Description of Artificial Sequence: Synthetic oligonucleotide
aagggauacaugcucaccu

SEQ ID NO: 1904343 - RNA, 19 nt, Artificial Sequence
  Description of Artificial Sequence: Synthetic oligonucleotide
aauaugacuguggagaaaa

SEQ ID NO: 1904344 - RNA, 19 nt, Artificial Sequence
  Description of Artificial Sequence: Synthetic oligonucleotide
gagggaguaacucuggagc

SEQ ID NO: 1904345 - RNA, 19 nt, Artificial Sequence
  Description of Artificial Sequence: Synthetic oligonucleotide
uuuuggaugacaagaugug

SEQ ID NO: 1904346 - RNA, 19 nt, Artificial Sequence
  Description of Artificial Sequence: Synthetic oligonucleotide
aauuaagggaguucuucca

SEQ ID NO: 1904347 - RNA, 19 nt, Artificial Sequence
  Description of Artificial Sequence: Synthetic oligonucleotide
gaaaaguaccagcuuagug

SEQ ID NO: 1904348 - RNA, 19 nt, Artificial Sequence
  Description of Artificial Sequence: Synthetic oligonucleotide
ggaacaaggaaccauauca

SEQ ID NO: 1904349 - RNA, 19 nt, Artificial Sequence
  Description of Artificial Sequence: Synthetic oligonucleotide
aaagaaacauucauaucug

SEQ ID NO: 1904350 - RNA, 19 nt, Artificial Sequence
  Description of Artificial Sequence: Synthetic oligonucleotide
auucauaucugcaaaaccu

SEQ ID NO: 1904351 - RNA, 19 nt, Artificial Sequence
  Description of Artificial Sequence: Synthetic oligonucleotide
aguguucuaaaccauggga

SEQ ID NO: 1904352 - RNA, 19 nt, Artificial Sequence
  Description of Artificial Sequence: Synthetic oligonucleotide
ucaguaaagugacaugggu

SEQ ID NO: 1904353 - RNA, 19 nt, Artificial Sequence
  Description of Artificial Sequence: Synthetic oligonucleotide
aaaaccgccaaugaauccu

SEQ ID NO: 1904354 - RNA, 19 nt, Artificial Sequence
  Description of Artificial Sequence: Synthetic oligonucleotide
uucucaaugagaugagucu

SEQ ID NO: 1904355 - RNA, 19 nt, Artificial Sequence
  Description of Artificial Sequence: Synthetic oligonucleotide
aaagguaagcagugauguc

SEQ ID NO: 1904356 - RNA, 19 nt, Artificial Sequence
  Description of Artificial Sequence: Synthetic oligonucleotide
agugcaaugcuauguaucu

SEQ ID NO: 1904357 - RNA, 19 nt, Artificial Sequence
  Description of Artificial Sequence: Synthetic oligonucleotide
agugacauggguccaugcg

SEQ ID NO: 1904358 - RNA, 19 nt, Artificial Sequence
  Description of Artificial Sequence: Synthetic oligonucleotide
augcuauguaucuggaagg

SEQ ID NO: 1904359 - RNA, 19 nt, Artificial Sequence
  Description of Artificial Sequence: Synthetic oligonucleotide
agggcgaaggauauaaacc

SEQ ID NO: 1904360 - RNA, 19 nt, Artificial Sequence
  Description of Artificial Sequence: Synthetic oligonucleotide
augaauccaaauaugacug

SEQ ID NO: 1904361 - RNA, 19 nt, Artificial Sequence
  Description of Artificial Sequence: Synthetic oligonucleotide
ucauaggagugauagacuc

SEQ ID NO: 1904362 - RNA, 19 nt, Artificial Sequence
  Description of Artificial Sequence: Synthetic oligonucleotide
agcuuaguguucuaaacca

SEQ ID NO: 1904363 - RNA, 19 nt, Artificial Sequence
  Description of Artificial Sequence: Synthetic oligonucleotide
caaggaaccauaucaugcc

SEQ ID NO: 1904364 - RNA, 19 nt, Artificial Sequence
  Description of Artificial Sequence: Synthetic oligonucleotide
aguacugguauuuggacaa

SEQ ID NO: 1904365 - RNA, 19 nt, Artificial Sequence
  Description of Artificial Sequence: Synthetic oligonucleotide
uuaauuaagggaguucuuc

SEQ ID NO: 1904366 - RNA, 19 nt, Artificial Sequence
  Description of Artificial Sequence: Synthetic oligonucleotide
uccgaaaagguaagcagug

SEQ ID NO: 1904367 - RNA, 19 nt, Artificial Sequence
  Description of Artificial Sequence: Synthetic oligonucleotide
cucaguacaaacaugcaga

SEQ ID NO: 1904368 - RNA, 19 nt, Artificial Sequence
  Description of Artificial Sequence: Synthetic oligonucleotide
uaguguucuaaaccauggg

SEQ ID NO: 1904369 - RNA, 19 nt, Artificial Sequence
  Description of Artificial Sequence: Synthetic oligonucleotide
uaucaugccuucaaacaga

SEQ ID NO: 1904370 - RNA, 19 nt, Artificial Sequence
  Description of Artificial Sequence: Synthetic oligonucleotide
caaugaauccaaauaugac

SEQ ID NO: 1904371 - RNA, 19 nt, Artificial Sequence
  Description of Artificial Sequence: Synthetic oligonucleotide
ugcgaacauauaaaacugc

SEQ ID NO: 1904372 - RNA, 19 nt, Artificial Sequence
  Description of Artificial Sequence: Synthetic oligonucleotide
uucauaucugcaaaaccuc

SEQ ID NO: 1904373 - RNA, 19 nt, Artificial Sequence
  Description of Artificial Sequence: Synthetic oligonucleotide
aaaacuugugauguacaca

SEQ ID NO: 1904374 - RNA, 19 nt, Artificial Sequence
  Description of Artificial Sequence: Synthetic oligonucleotide
aacguugccaucaaauacu

SEQ ID NO: 1904375 - RNA, 19 nt, Artificial Sequence
  Description of Artificial Sequence: Synthetic oligonucleotide
acgguuaucaguaaaguga

SEQ ID NO: 1904376 - RNA, 19 nt, Artificial Sequence
  Description of Artificial Sequence: Synthetic oligonucleotide
uugugauguacacaugcac

SEQ ID NO: 1904377 - RNA, 19 nt, Artificial Sequence
  Description of Artificial Sequence: Synthetic oligonucleotide
gacaaucaaaaccugucca

SEQ ID NO: 1904378 - RNA, 19 nt, Artificial Sequence
  Description of Artificial Sequence: Synthetic oligonucleotide
uagcgaaugaggaacugca

SEQ ID NO: 1904379 - RNA, 19 nt, Artificial Sequence
  Description of Artificial Sequence: Synthetic oligonucleotide
aaaacugcaggcgguagug

SEQ ID NO: 1904380 - RNA, 19 nt, Artificial Sequence
  Description of Artificial Sequence: Synthetic oligonucleotide
agcuacaccuucaaggugg

SEQ ID NO: 1904381 - RNA, 19 nt, Artificial Sequence
  Description of Artificial Sequence: Synthetic oligonucleotide
ugaacaaacguagcaaagu

SEQ ID NO: 1904382 - RNA, 19 nt, Artificial Sequence
  Description of Artificial Sequence: Synthetic oligonucleotide
caugcgaacauauaaaacu

SEQ ID NO: 1904383 - RNA, 19 nt, Artificial Sequence
  Description of Artificial Sequence: Synthetic oligonucleotide
auagacucuguauccaaug

SEQ ID NO: 1904384 - RNA, 19 nt, Artificial Sequence
  Description of Artificial Sequence: Synthetic oligonucleotide
uccaaauaugacuguggag

SEQ ID NO: 1904385 - RNA, 19 nt, Artificial Sequence
  Description of Artificial Sequence: Synthetic oligonucleotide
aaccuguccauuaucccac

SEQ ID NO: 1904386 - RNA, 19 nt, Artificial Sequence
  Description of Artificial Sequence: Synthetic oligonucleotide
cugacaaucaaaaccuguc

SEQ ID NO: 1904387 - RNA, 19 nt, Artificial Sequence
  Description of Artificial Sequence: Synthetic oligonucleotide
ucggaaugggccaaucagc

SEQ ID NO: 1904388 - RNA, 19 nt, Artificial Sequence
  Description of Artificial Sequence: Synthetic oligonucleotide
auucggaccccuuauaaaa

SEQ ID NO: 1904389 - RNA, 19 nt, Artificial Sequence
  Description of Artificial Sequence: Synthetic oligonucleotide
acuuugcugggauucggac

SEQ ID NO: 1904390 - RNA, 19 nt, Artificial Sequence
  Description of Artificial Sequence: Synthetic oligonucleotide
guaacgguuaucaguaaag

SEQ ID NO: 1904391 - RNA, 19 nt, Artificial Sequence
  Description of Artificial Sequence: Synthetic oligonucleotide
ggauauaaaccugugguag

SEQ ID NO: 1904392 - RNA, 19 nt, Artificial Sequence
  Description of Artificial Sequence: Synthetic oligonucleotide
gaugacacuugauauugga

SEQ ID NO: 1904393 - RNA, 19 nt, Artificial Sequence
  Description of Artificial Sequence: Synthetic oligonucleotide
uuagcccuaugccagcuca

SEQ ID NO: 1904394 - RNA, 19 nt, Artificial Sequence
  Description of Artificial Sequence: Synthetic oligonucleotide
cagcuuaguguucuaaacc

SEQ ID NO: 1904395 - RNA, 19 nt, Artificial Sequence
  Description of Artificial Sequence: Synthetic oligonucleotide
uccaugcgaacauauaaaa

SEQ ID NO: 1904396 - RNA, 19 nt, Artificial Sequence
  Description of Artificial Sequence: Synthetic oligonucleotide
cugaacaaacguagcaaag

SEQ ID NO: 1904397 - RNA, 19 nt, Artificial Sequence
  Description of Artificial Sequence: Synthetic oligonucleotide
acaaacguagcaaaguagu

SEQ ID NO: 1904398 - RNA, 19 nt, Artificial Sequence
  Description of Artificial Sequence: Synthetic oligonucleotide
aaagcucuuuugaauccac

SEQ ID NO: 1904399 - RNA, 19 nt, Artificial Sequence
  Description of Artificial Sequence: Synthetic oligonucleotide
auggugauaaucucaugga

SEQ ID NO: 1904400 - RNA, 19 nt, Artificial Sequence
  Description of Artificial Sequence: Synthetic oligonucleotide
gaauccaaauaugacugug

SEQ ID NO: 1904401 - RNA, 19 nt, Artificial Sequence
  Description of Artificial Sequence: Synthetic oligonucleotide
gacucuguauccaauggug

SEQ ID NO: 1904402 - RNA, 19 nt, Artificial Sequence
  Description of Artificial Sequence: Synthetic oligonucleotide
guaguucacacacaguaga

SEQ ID NO: 1904403 - RNA, 19 nt, Artificial Sequence
  Description of Artificial Sequence: Synthetic oligonucleotide
uguuucccgucucagcacc

SEQ ID NO: 1904404 - RNA, 19 nt, Artificial Sequence
  Description of Artificial Sequence: Synthetic oligonucleotide
gagggcgaaggauauaaac

SEQ ID NO: 1904405 - RNA, 19 nt, Artificial Sequence
  Description of Artificial Sequence: Synthetic oligonucleotide
acuugauauuggaacaagg

SEQ ID NO: 1904406 - RNA, 19 nt, Artificial Sequence
  Description of Artificial Sequence: Synthetic oligonucleotide
auaggagugauagacucug

SEQ ID NO: 1904407 - RNA, 19 nt, Artificial Sequence
  Description of Artificial Sequence: Synthetic oligonucleotide
uggaagggauacaugcuca

SEQ ID NO: 1904408 - RNA, 19 nt, Artificial Sequence
  Description of Artificial Sequence: Synthetic oligonucleotide
aagaauccgaaaagguaag

SEQ ID NO: 1904409 - RNA, 19 nt, Artificial Sequence
  Description of Artificial Sequence: Synthetic oligonucleotide
caucuaucaugcuuuuagc

SEQ ID NO: 1904410 - RNA, 19 nt, Artificial Sequence
  Description of Artificial Sequence: Synthetic oligonucleotide
agacagcuuaauuaaggga

SEQ ID NO: 1904411 - RNA, 19 nt, Artificial Sequence
  Description of Artificial Sequence: Synthetic oligonucleotide
cucggaaugggccaaucag

SEQ ID NO: 1904412 - RNA, 19 nt, Artificial Sequence
  Description of Artificial Sequence: Synthetic oligonucleotide
uaaaacugcaggcgguagu

SEQ ID NO: 1904413 - RNA, 19 nt, Artificial Sequence
  Description of Artificial Sequence: Synthetic oligonucleotide
uggcaguccauccuuucag

SEQ ID NO: 1904414 - RNA, 19 nt, Artificial Sequence
  Description of Artificial Sequence: Synthetic oligonucleotide
cauucugucacaaaagagu

SEQ ID NO: 1904415 - RNA, 19 nt, Artificial Sequence
  Description of Artificial Sequence: Synthetic oligonucleotide
aacagauuuuggaugacaa

SEQ ID NO: 1904416 - RNA, 19 nt, Artificial Sequence
  Description of Artificial Sequence: Synthetic oligonucleotide
caaaguacugguauuugga

SEQ ID NO: 1904417 - RNA, 19 nt, Artificial Sequence
  Description of Artificial Sequence: Synthetic oligonucleotide
gacugaguaacgguuauca

SEQ ID NO: 1904418 - RNA, 19 nt, Artificial Sequence
  Description of Artificial Sequence: Synthetic oligonucleotide
ucuggaagggauacaugcu

SEQ ID NO: 1904419 - RNA, 19 nt, Artificial Sequence
  Description of Artificial Sequence: Synthetic oligonucleotide
agaauccgaaaagguaagc

SEQ ID NO: 1904420 - RNA, 19 nt, Artificial Sequence
  Description of Artificial Sequence: Synthetic oligonucleotide
ucaaaaccuguccauuauc

SEQ ID NO: 1904421 - RNA, 19 nt, Artificial Sequence
  Description of Artificial Sequence: Synthetic oligonucleotide
agcucaguggaagacuucg

SEQ ID NO: 1904422 - RNA, 19 nt, Artificial Sequence
  Description of Artificial Sequence: Synthetic oligonucleotide
ugagaugagucuucagggu

SEQ ID NO: 1904423 - RNA, 19 nt, Artificial Sequence
  Description of Artificial Sequence: Synthetic oligonucleotide
guaacucuggagcuggaac

SEQ ID NO: 1904424 - RNA, 19 nt, Artificial Sequence
  Description of Artificial Sequence: Synthetic oligonucleotide
gaacaaacguagcaaagua

SEQ ID NO: 1904425 - RNA, 19 nt, Artificial Sequence
  Description of Artificial Sequence: Synthetic oligonucleotide
accaugggaggucauagga

SEQ ID NO: 1904426 - RNA, 19 nt, Artificial Sequence
  Description of Artificial Sequence: Synthetic oligonucleotide
cacaguagaaaaguaccag

SEQ ID NO: 1904427 - RNA, 19 nt, Artificial Sequence
  Description of Artificial Sequence: Synthetic oligonucleotide
ggucauaggagugauagac

SEQ ID NO: 1904428 - RNA, 19 nt, Artificial Sequence
  Description of Artificial Sequence: Synthetic oligonucleotide
aagaguugacaucgcuucu

SEQ ID NO: 1904429 - RNA, 19 nt, Artificial Sequence
  Description of Artificial Sequence: Synthetic oligonucleotide
auuaagggaguucuuccaa

SEQ ID NO: 1904430 - RNA, 19 nt, Artificial Sequence
  Description of Artificial Sequence: Synthetic oligonucleotide
ugugacugaguaacgguua

SEQ ID NO: 1904431 - RNA, 19 nt, Artificial Sequence
  Description of Artificial Sequence: Synthetic oligonucleotide
acugaguaacgguuaucag

SEQ ID NO: 1904432 - RNA, 19 nt, Artificial Sequence
  Description of Artificial Sequence: Synthetic oligonucleotide
uugacaucgcuucuguauu

SEQ ID NO: 1904433 - RNA, 19 nt, Artificial Sequence
  Description of Artificial Sequence: Synthetic oligonucleotide
acauucugucacaaaagag

SEQ ID NO: 1904434 - RNA, 19 nt, Artificial Sequence
  Description of Artificial Sequence: Synthetic oligonucleotide
guauccaauggugauaauc

SEQ ID NO: 1904435 - RNA, 19 nt, Artificial Sequence
  Description of Artificial Sequence: Synthetic oligonucleotide
uauguaucuggaagggaua

SEQ ID NO: 1904436 - RNA, 19 nt, Artificial Sequence
  Description of Artificial Sequence: Synthetic oligonucleotide
augcgaacauauaaaacug

SEQ ID NO: 1904437 - RNA, 19 nt, Artificial Sequence
  Description of Artificial Sequence: Synthetic oligonucleotide
uauuggaacaaggaaccau

SEQ ID NO: 1904438 - RNA, 19 nt, Artificial Sequence
  Description of Artificial Sequence: Synthetic oligonucleotide
cuucuuaggagacagcuua

SEQ ID NO: 1904439 - RNA, 19 nt, Artificial Sequence
  Description of Artificial Sequence: Synthetic oligonucleotide
uucggaccccuuauaaaac

SEQ ID NO: 1904440 - RNA, 19 nt, Artificial Sequence
  Description of Artificial Sequence: Synthetic oligonucleotide
acaaacguugccaucaaau

SEQ ID NO: 1904441 - RNA, 19 nt, Artificial Sequence
  Description of Artificial Sequence: Synthetic oligonucleotide
gcucaguacaaacaugcag

SEQ ID NO: 1904442 - RNA, 19 nt, Artificial Sequence
  Description of Artificial Sequence: Synthetic oligonucleotide
ugauagacucuguauccaa

SEQ ID NO: 1904443 - RNA, 19 nt, Artificial Sequence
  Description of Artificial Sequence: Synthetic oligonucleotide
auguuuaacugcuguucug

SEQ ID NO: 1904444 - RNA, 19 nt, Artificial Sequence
  Description of Artificial Sequence: Synthetic oligonucleotide
ugcaggauuccuuucucaa

SEQ ID NO: 1904445 - RNA, 19 nt, Artificial Sequence
  Description of Artificial Sequence: Synthetic oligonucleotide
uaguucacacacaguagaa

SEQ ID NO: 1904446 - RNA, 19 nt, Artificial Sequence
  Description of Artificial Sequence: Synthetic oligonucleotide
guacaaacaugcagaaacc

SEQ ID NO: 1904447 - RNA, 19 nt, Artificial Sequence
  Description of Artificial Sequence: Synthetic oligonucleotide
caaacguagcaaaguaguc

SEQ ID NO: 1904448 - RNA, 19 nt, Artificial Sequence
  Description of Artificial Sequence: Synthetic oligonucleotide
auaaaccugugguagcgaa

SEQ ID NO: 1904449 - RNA, 19 nt, Artificial Sequence
  Description of Artificial Sequence: Synthetic oligonucleotide
gaaaccugccagguagagg

SEQ ID NO: 1904450 - RNA, 19 nt, Artificial Sequence
  Description of Artificial Sequence: Synthetic oligonucleotide
ugauaaucucauggaagca

SEQ ID NO: 1904451 - RNA, 19 nt, Artificial Sequence
  Description of Artificial Sequence: Synthetic oligonucleotide
uuggcaguccauccuuuca

SEQ ID NO: 1904452 - RNA, 19 nt, Artificial Sequence
  Description of Artificial Sequence: Synthetic oligonucleotide
acaaaagaguugacaucgc

SEQ ID NO: 1904453 - RNA, 19 nt, Artificial Sequence
  Description of Artificial Sequence: Synthetic oligonucleotide
gugguagcgaaugaggaac

SEQ ID NO: 1904454 - RNA, 19 nt, Artificial Sequence
  Description of Artificial Sequence: Synthetic oligonucleotide
ugggcacacaaaguacugg

SEQ ID NO: 1904455 - RNA, 19 nt, Artificial Sequence
  Description of Artificial Sequence: Synthetic oligonucleotide
uggaacaaggaaccauauc

SEQ ID NO: 1904456 - RNA, 19 nt, Artificial Sequence
  Description of Artificial Sequence: Synthetic oligonucleotide
uuuaacugcuguucugguu

SEQ ID NO: 1904457 - RNA, 19 nt, Artificial Sequence
  Description of Artificial Sequence: Synthetic oligonucleotide
ucggaccccuuauaaaacu

SEQ ID NO: 1904458 - RNA, 19 nt, Artificial Sequence
  Description of Artificial Sequence: Synthetic oligonucleotide
caugcucaccuguuucccg

SEQ ID NO: 1904459 - RNA, 19 nt, Artificial Sequence
  Description of Artificial Sequence: Synthetic oligonucleotide
aaggugggcugcaggauuc

SEQ ID NO: 1904460 - RNA, 19 nt, Artificial Sequence
  Description of Artificial Sequence: Synthetic oligonucleotide
uauaaaacugcaggcggua

SEQ ID NO: 1904461 - RNA, 19 nt, Artificial Sequence
  Description of Artificial Sequence: Synthetic oligonucleotide
gcgaugcaaauguugaaag

SEQ ID NO: 1904462 - RNA, 19 nt, Artificial Sequence
  Description of Artificial Sequence: Synthetic oligonucleotide
uggcgaagaagccucggaa

SEQ ID NO: 1904463 - RNA, 19 nt, Artificial Sequence
  Description of Artificial Sequence: Synthetic oligonucleotide
agggauacaugcucaccug

SEQ ID NO: 1904464 - RNA, 19 nt, Artificial Sequence
  Description of Artificial Sequence: Synthetic oligonucleotide
auaaaacugcaggcgguag

SEQ ID NO: 1904465 - RNA, 19 nt, Artificial Sequence
  Description of Artificial Sequence: Synthetic oligonucleotide
guagauguuuaacugcugu

SEQ ID NO: 1904466 - RNA, 19 nt, Artificial Sequence
  Description of Artificial Sequence: Synthetic oligonucleotide
gaaugggccaaucagcgau

SEQ ID NO: 1904467 - RNA, 19 nt, Artificial Sequence
  Description of Artificial Sequence: Synthetic oligonucleotide
cuugugauguacacaugca

SEQ ID NO: 1904468 - RNA, 19 nt, Artificial Sequence
  Description of Artificial Sequence: Synthetic oligonucleotide
gaagggauacaugcucacc

SEQ ID NO: 1904469 - RNA, 19 nt, Artificial Sequence
  Description of Artificial Sequence: Synthetic oligonucleotide
gaugugacugaguaacggu

SEQ ID NO: 1904470 - RNA, 19 nt, Artificial Sequence
  Description of Artificial Sequence: Synthetic oligonucleotide
caucgcuucuguauuccac

SEQ ID NO: 1904471 - RNA, 19 nt, Artificial Sequence
  Description of Artificial Sequence: Synthetic oligonucleotide
ucucaaugagaugagucuu

SEQ ID NO: 1904472 - RNA, 19 nt, Artificial Sequence
  Description of Artificial Sequence: Synthetic oligonucleotide
auucugucacaaaagaguu

SEQ ID NO: 1904473 - RNA, 19 nt, Artificial Sequence
  Description of Artificial Sequence: Synthetic oligonucleotide
aaauaugacuguggagaaa

SEQ ID NO: 1904474 - RNA, 19 nt, Artificial Sequence
  Description of Artificial Sequence: Synthetic oligonucleotide
guagcgaaugaggaacugc

SEQ ID NO: 1904475 - RNA, 19 nt, Artificial Sequence
  Description of Artificial Sequence: Synthetic oligonucleotide
gauucggaccccuuauaaa

SEQ ID NO: 1904476 - RNA, 19 nt, Artificial Sequence
  Description of Artificial Sequence: Synthetic oligonucleotide
gacaucgcuucuguauucc

SEQ ID NO: 1904477 - RNA, 19 nt, Artificial Sequence
  Description of Artificial Sequence: Synthetic oligonucleotide
gcaaugaauccaaauauga

SEQ ID NO: 1904478 - RNA, 19 nt, Artificial Sequence
  Description of Artificial Sequence: Synthetic oligonucleotide
guugacaucgcuucuguau

SEQ ID NO: 1904479 - RNA, 19 nt, Artificial Sequence
  Description of Artificial Sequence: Synthetic oligonucleotide
ggaguaacucuggagcugg

SEQ ID NO: 1904480 - RNA, 19 nt, Artificial Sequence
  Description of Artificial Sequence: Synthetic oligonucleotide
cuauguaucuggaagggau

SEQ ID NO: 1904481 - RNA, 19 nt, Artificial Sequence
  Description of Artificial Sequence: Synthetic oligonucleotide
cuaucaugcuuuuagcccu

SEQ ID NO: 1904482 - RNA, 19 nt, Artificial Sequence
  Description of Artificial Sequence: Synthetic oligonucleotide
accgccuuuaggaauggag

SEQ ID NO: 1904483 - RNA, 19 nt, Artificial Sequence
  Description of Artificial Sequence: Synthetic oligonucleotide
agcgaugcaaauguugaaa

SEQ ID NO: 1904484 - RNA, 19 nt, Artificial Sequence
  Description of Artificial Sequence: Synthetic oligonucleotide
ugguagcgaaugaggaacu

SEQ ID NO: 1904485 - RNA, 19 nt, Artificial Sequence
  Description of Artificial Sequence: Synthetic oligonucleotide
caaauaugacuguggagaa

SEQ ID NO: 1904486 - RNA, 19 nt, Artificial Sequence
  Description of Artificial Sequence: Synthetic oligonucleotide
gauaaucucauggaagcau

SEQ ID NO: 1904487 - RNA, 19 nt, Artificial Sequence
  Description of Artificial Sequence: Synthetic oligonucleotide
uggacaacacaugggcggc

SEQ ID NO: 1904488 - RNA, 19 nt, Artificial Sequence
  Description of Artificial Sequence: Synthetic oligonucleotide
ugggauucggaccccuuau

SEQ ID NO: 1904489 - RNA, 19 nt, Artificial Sequence
  Description of Artificial Sequence: Synthetic oligonucleotide
augcacaaacguugccauc

SEQ ID NO: 1904490 - RNA, 19 nt, Artificial Sequence
  Description of Artificial Sequence: Synthetic oligonucleotide
ucaugcuuuuagcccuaug

SEQ ID NO: 1904491 - RNA, 19 nt, Artificial Sequence
  Description of Artificial Sequence: Synthetic oligonucleotide
augggccaaucagcgaugc

SEQ ID NO: 1904492 - RNA, 19 nt, Artificial Sequence
  Description of Artificial Sequence: Synthetic oligonucleotide
caaacguugccaucaaaua

SEQ ID NO: 1904493 - RNA, 19 nt, Artificial Sequence
  Description of Artificial Sequence: Synthetic oligonucleotide
aggagugauagacucugua

SEQ ID NO: 1904494 - RNA, 19 nt, Artificial Sequence
  Description of Artificial Sequence: Synthetic oligonucleotide
ccgccuuuaggaauggagg

SEQ ID NO: 1904495 - RNA, 19 nt, Artificial Sequence
  Description of Artificial Sequence: Synthetic oligonucleotide
gguccaugcgaacauauaa

SEQ ID NO: 1904496 - RNA, 19 nt, Artificial Sequence
  Description of Artificial Sequence: Synthetic oligonucleotide
guagcaaaguaguccgcca

SEQ ID NO: 1904497 - RNA, 19 nt, Artificial Sequence
  Description of Artificial Sequence: Synthetic oligonucleotide
uggguccaugcgaacauau

SEQ ID NO: 1904498 - RNA, 19 nt, Artificial Sequence
  Description of Artificial Sequence: Synthetic oligonucleotide
aaugggccaaucagcgaug

SEQ ID NO: 1904499 - RNA, 19 nt, Artificial Sequence
  Description of Artificial Sequence: Synthetic oligonucleotide
aaccugugguagcgaauga

SEQ ID NO: 1904500 - RNA, 19 nt, Artificial Sequence
  Description of Artificial Sequence: Synthetic oligonucleotide
acacaaaguacugguauuu

SEQ ID NO: 1904501 - RNA, 19 nt, Artificial Sequence
  Description of Artificial Sequence: Synthetic oligonucleotide
agaaaccugccagguagag

SEQ ID NO: 1904502 - RNA, 19 nt, Artificial Sequence
  Description of Artificial Sequence: Synthetic oligonucleotide
ugacaucgcuucuguauuc

SEQ ID NO: 1904503 - RNA, 19 nt, Artificial Sequence
  Description of Artificial Sequence: Synthetic oligonucleotide
uuuuagcccuaugccagcu

SEQ ID NO: 1904504 - RNA, 19 nt, Artificial Sequence
  Description of Artificial Sequence: Synthetic oligonucleotide
aggacuuugcugggauucg

SEQ ID NO: 1904505 - RNA, 19 nt, Artificial Sequence
  Description of Artificial Sequence: Synthetic oligonucleotide
augcucaccuguuucccgu

SEQ ID NO: 1904506 - RNA, 19 nt, Artificial Sequence
  Description of Artificial Sequence: Synthetic oligonucleotide
acagcuuaauuaagggagu

SEQ ID NO: 1904507 - RNA, 19 nt, Artificial Sequence
  Description of Artificial Sequence: Synthetic oligonucleotide
caccgucucuccauagaag

SEQ ID NO: 1904508 - RNA, 19 nt, Artificial Sequence
  Description of Artificial Sequence: Synthetic oligonucleotide
aguucugagggcucacauu

SEQ ID NO: 1904509 - RNA, 19 nt, Artificial Sequence
  Description of Artificial Sequence: Synthetic oligonucleotide
uuuagcccuaugccagcuc

SEQ ID NO: 1904510 - RNA, 19 nt, Artificial Sequence
  Description of Artificial Sequence: Synthetic oligonucleotide
aaguaccagcuuaguguuc

SEQ ID NO: 1904511 - RNA, 19 nt, Artificial Sequence
  Description of Artificial Sequence: Synthetic oligonucleotide
caauggugauaaucucaug

SEQ ID NO: 1904512 - RNA, 19 nt, Artificial Sequence
  Description of Artificial Sequence: Synthetic oligonucleotide
caugggcggcaaugaaucc

SEQ ID NO: 1904513 - RNA, 19 nt, Artificial Sequence
  Description of Artificial Sequence: Synthetic oligonucleotide
caggcgguaguguuucuuc

SEQ ID NO: 1904514 - RNA, 19 nt, Artificial Sequence
  Description of Artificial Sequence: Synthetic oligonucleotide
ccaugcgaacauauaaaac

SEQ ID NO: 1904515 - RNA, 19 nt, Artificial Sequence
  Description of Artificial Sequence: Synthetic oligonucleotide
ugcagaaaccugccaggua

SEQ ID NO: 1904516 - RNA, 19 nt, Artificial Sequence
  Description of Artificial Sequence: Synthetic oligonucleotide
uucccgucucagcaccgcc

SEQ ID NO: 1904517 - RNA, 19 nt, Artificial Sequence
  Description of Artificial Sequence: Synthetic oligonucleotide
auauuggaacaaggaacca

SEQ ID NO: 1904518 - RNA, 19 nt, Artificial Sequence
  Description of Artificial Sequence: Synthetic oligonucleotide
ccuuuaggaauggagggag

SEQ ID NO: 1904519 - RNA, 19 nt, Artificial Sequence
  Description of Artificial Sequence: Synthetic oligonucleotide
aacuugugauguacacaug

SEQ ID NO: 1904520 - RNA, 19 nt, Artificial Sequence
  Description of Artificial Sequence: Synthetic oligonucleotide
guccaggaaaugguguuug

SEQ ID NO: 1904521 - RNA, 19 nt, Artificial Sequence
  Description of Artificial Sequence: Synthetic oligonucleotide
agcaccgccuuuaggaaug

SEQ ID NO: 1904522 - RNA, 19 nt, Artificial Sequence
  Description of Artificial Sequence: Synthetic oligonucleotide
acaucgcuucuguauucca

SEQ ID NO: 1904523 - RNA, 19 nt, Artificial Sequence
  Description of Artificial Sequence: Synthetic oligonucleotide
uaggagugauagacucugu

SEQ ID NO: 1904524 - RNA, 19 nt, Artificial Sequence
  Description of Artificial Sequence: Synthetic oligonucleotide
gcuuaauuaagggaguucu

SEQ ID NO: 1904525 - RNA, 19 nt, Artificial Sequence
  Description of Artificial Sequence: Synthetic oligonucleotide
ucaccaagcucaguacaaa

SEQ ID NO: 1904526 - RNA, 19 nt, Artificial Sequence
  Description of Artificial Sequence: Synthetic oligonucleotide
aggucauaggagugauaga

SEQ ID NO: 1904527 - RNA, 19 nt, Artificial Sequence
  Description of Artificial Sequence: Synthetic oligonucleotide
gagaugagucuucaggguu

SEQ ID NO: 1904528 - RNA, 19 nt, Artificial Sequence
  Description of Artificial Sequence: Synthetic oligonucleotide
ucccgucucagcaccgccu

SEQ ID NO: 1904529 - RNA, 19 nt, Artificial Sequence
  Description of Artificial Sequence: Synthetic oligonucleotide
acguagcaaaguaguccgc

SEQ ID NO: 1904530 - RNA, 19 nt, Artificial Sequence
  Description of Artificial Sequence: Synthetic oligonucleotide
gggcgaaggauauaaaccu

SEQ ID NO: 1904531 - RNA, 19 nt, Artificial Sequence
  Description of Artificial Sequence: Synthetic oligonucleotide
aggguuuuguagauguuua

SEQ ID NO: 1904532 - RNA, 19 nt, Artificial Sequence
  Description of Artificial Sequence: Synthetic oligonucleotide
uaguccgccaccgucucuc

SEQ ID NO: 1904533 - RNA, 19 nt, Artificial Sequence
  Description of Artificial Sequence: Synthetic oligonucleotide
cgguuaucaguaaagugac

SEQ ID NO: 1904534 - RNA, 19 nt, Artificial Sequence
  Description of Artificial Sequence: Synthetic oligonucleotide
acuggcgaagaagccucgg

SEQ ID NO: 1904535 - RNA, 19 nt, Artificial Sequence
  Description of Artificial Sequence: Synthetic oligonucleotide
acguugccaucaaauacug

SEQ ID NO: 1904536 - RNA, 19 nt, Artificial Sequence
  Description of Artificial Sequence: Synthetic oligonucleotide
gcggcaaugaauccaaaua

SEQ ID NO: 1904537 - RNA, 19 nt, Artificial Sequence
  Description of Artificial Sequence: Synthetic oligonucleotide
uuucccgucucagcaccgc

SEQ ID NO: 1904538 - RNA, 19 nt, Artificial Sequence
  Description of Artificial Sequence: Synthetic oligonucleotide
ggaagggauacaugcucac

SEQ ID NO: 1904539 - RNA, 19 nt, Artificial Sequence
  Description of Artificial Sequence: Synthetic oligonucleotide
aaccgccaaugaauccuuc

SEQ ID NO: 1904540 - RNA, 19 nt, Artificial Sequence
  Description of Artificial Sequence: Synthetic oligonucleotide
accccuuauaaaacuugug

SEQ ID NO: 1904541 - RNA, 19 nt, Artificial Sequence
  Description of Artificial Sequence: Synthetic oligonucleotide
uccuuucagugcagcuaca

SEQ ID NO: 1904542 - RNA, 19 nt, Artificial Sequence
  Description of Artificial Sequence: Synthetic oligonucleotide
aucaugccuucaaacagau

SEQ ID NO: 1904543 - RNA, 19 nt, Artificial Sequence
  Description of Artificial Sequence: Synthetic oligonucleotide
gaguugacaucgcuucugu

SEQ ID NO: 1904544 - RNA, 19 nt, Artificial Sequence
  Description of Artificial Sequence: Synthetic oligonucleotide
guucuaaaccaugggaggu

SEQ ID NO: 1904545 - RNA, 19 nt, Artificial Sequence
  Description of Artificial Sequence: Synthetic oligonucleotide
cagcuacaccuucaaggug

SEQ ID NO: 1904546 - RNA, 19 nt, Artificial Sequence
  Description of Artificial Sequence: Synthetic oligonucleotide
cacuggcgaagaagccucg

SEQ ID NO: 1904547 - RNA, 19 nt, Artificial Sequence
  Description of Artificial Sequence: Synthetic oligonucleotide
gacuuugcugggauucgga

SEQ ID NO: 1904548 - RNA, 19 nt, Artificial Sequence
  Description of Artificial Sequence: Synthetic oligonucleotide
uaccagcuuaguguucuaa

SEQ ID NO: 1904549 - RNA, 19 nt, Artificial Sequence
  Description of Artificial Sequence: Synthetic oligonucleotide
ccuguuucccgucucagca

SEQ ID NO: 1904550 - RNA, 19 nt, Artificial Sequence
  Description of Artificial Sequence: Synthetic oligonucleotide
aaaccgccaaugaauccuu

SEQ ID NO: 1904551 - RNA, 19 nt, Artificial Sequence
  Description of Artificial Sequence: Synthetic oligonucleotide
agguaagcagugaugucau

SEQ ID NO: 1904552 - RNA, 19 nt, Artificial Sequence
  Description of Artificial Sequence: Synthetic oligonucleotide
gguaguguuucuucaccaa

SEQ ID NO: 1904553 - RNA, 19 nt, Artificial Sequence
  Description of Artificial Sequence: Synthetic oligonucleotide
ggaccccuuauaaaacuug

SEQ ID NO: 1904554 - RNA, 19 nt, Artificial Sequence
  Description of Artificial Sequence: Synthetic oligonucleotide
gcagcuacaccuucaaggu

SEQ ID NO: 1904555 - RNA, 19 nt, Artificial Sequence
  Description of Artificial Sequence: Synthetic oligonucleotide
gugcaaugcuauguaucug

SEQ ID NO: 1904556 - RNA, 19 nt, Artificial Sequence
  Description of Artificial Sequence: Synthetic oligonucleotide
aguugacaucgcuucugua

SEQ ID NO: 1904557 - RNA, 19 nt, Artificial Sequence
  Description of Artificial Sequence: Synthetic oligonucleotide
cauaggagugauagacucu

SEQ ID NO: 1904558 - RNA, 19 nt, Artificial Sequence
  Description of Artificial Sequence: Synthetic oligonucleotide
ggagugauagacucuguau

SEQ ID NO: 1904559 - RNA, 19 nt, Artificial Sequence
  Description of Artificial Sequence: Synthetic oligonucleotide
gaccccuuauaaaacuugu

SEQ ID NO: 1904560 - RNA, 19 nt, Artificial Sequence
  Description of Artificial Sequence: Synthetic oligonucleotide
ggcgaaggauauaaaccug

SEQ ID NO: 1904561 - RNA, 19 nt, Artificial Sequence
  Description of Artificial Sequence: Synthetic oligonucleotide
caugcacaaacguugccau

SEQ ID NO: 1904562 - RNA, 19 nt, Artificial Sequence
  Description of Artificial Sequence: Synthetic oligonucleotide
ggacuuugcugggauucgg

SEQ ID NO: 1904563 - RNA, 19 nt, Artificial Sequence
  Description of Artificial Sequence: Synthetic oligonucleotide
uguauccaauggugauaau

SEQ ID NO: 1904564 - RNA, 19 nt, Artificial Sequence
  Description of Artificial Sequence: Synthetic oligonucleotide
aaucagcgaugcaaauguu

SEQ ID NO: 1904565 - RNA, 19 nt, Artificial Sequence
  Description of Artificial Sequence: Synthetic oligonucleotide
cagaaaccugccagguaga

SEQ ID NO: 1904566 - RNA, 19 nt, Artificial Sequence
  Description of Artificial Sequence: Synthetic oligonucleotide
cguagcaaaguaguccgcc

SEQ ID NO: 1904567 - RNA, 19 nt, Artificial Sequence
  Description of Artificial Sequence: Synthetic oligonucleotide
cgaaggauauaaaccugug

SEQ ID NO: 1904568 - RNA, 19 nt, Artificial Sequence
  Description of Artificial Sequence: Synthetic oligonucleotide
cuggcgaagaagccucgga

SEQ ID NO: 1904569 - RNA, 19 nt, Artificial Sequence
  Description of Artificial Sequence: Synthetic oligonucleotide
acaacacaugggcggcaau

SEQ ID NO: 1904570 - RNA, 19 nt, Artificial Sequence
  Description of Artificial Sequence: Synthetic oligonucleotide
gggccaaucagcgaugcaa

SEQ ID NO: 1904571 - RNA, 19 nt, Artificial Sequence
  Description of Artificial Sequence: Synthetic oligonucleotide
gucauaggagugauagacu

SEQ ID NO: 1904572 - RNA, 19 nt, Artificial Sequence
  Description of Artificial Sequence: Synthetic oligonucleotide
gguagcgaaugaggaacug

SEQ ID NO: 1904573 - RNA, 19 nt, Artificial Sequence
  Description of Artificial Sequence: Synthetic oligonucleotide
gcuacaccuucaagguggg

SEQ ID NO: 1904574 - RNA, 19 nt, Artificial Sequence
  Description of Artificial Sequence: Synthetic oligonucleotide
aagccucggaaugggccaa

SEQ ID NO: 1904575 - RNA, 19 nt, Artificial Sequence
  Description of Artificial Sequence: Synthetic oligonucleotide
cccuuauaaaacuugugau

SEQ ID NO: 1904576 - RNA, 19 nt, Artificial Sequence
  Description of Artificial Sequence: Synthetic oligonucleotide
cagcucaguggaagacuuc

SEQ ID NO: 1904577 - RNA, 19 nt, Artificial Sequence
  Description of Artificial Sequence: Synthetic oligonucleotide
agacuucggagcaguucug

SEQ ID NO: 1904578 - RNA, 19 nt, Artificial Sequence
  Description of Artificial Sequence: Synthetic oligonucleotide
gugacugaguaacgguuau

SEQ ID NO: 1904579 - RNA, 19 nt, Artificial Sequence
  Description of Artificial Sequence: Synthetic oligonucleotide
gcccuaugccagcucagug

SEQ ID NO: 1904580 - RNA, 19 nt, Artificial Sequence
  Description of Artificial Sequence: Synthetic oligonucleotide
cagcgaugcaaauguugaa

SEQ ID NO: 1904581 - RNA, 19 nt, Artificial Sequence
  Description of Artificial Sequence: Synthetic oligonucleotide
gacuucggagcaguucugu

SEQ ID NO: 1904582 - RNA, 19 nt, Artificial Sequence
  Description of Artificial Sequence: Synthetic oligonucleotide
ugcugggauucggaccccu

SEQ ID NO: 1904583 - RNA, 19 nt, Artificial Sequence
  Description of Artificial Sequence: Synthetic oligonucleotide
cuuucucaaugagaugagu

SEQ ID NO: 1904584 - RNA, 19 nt, Artificial Sequence
  Description of Artificial Sequence: Synthetic oligonucleotide
gcuauguaucuggaaggga

SEQ ID NO: 1904585 - RNA, 19 nt, Artificial Sequence
  Description of Artificial Sequence: Synthetic oligonucleotide
cacaaacguugccaucaaa

SEQ ID NO: 1904586 - RNA, 19 nt, Artificial Sequence
  Description of Artificial Sequence: Synthetic oligonucleotide
ccaauggugauaaucucau

SEQ ID NO: 1904587 - RNA, 19 nt, Artificial Sequence
  Description of Artificial Sequence: Synthetic oligonucleotide
cugggauucggaccccuua

SEQ ID NO: 1904588 - RNA, 19 nt, Artificial Sequence
  Description of Artificial Sequence: Synthetic oligonucleotide
cuacaccuucaaggugggc

SEQ ID NO: 1904589 - RNA, 19 nt, Artificial Sequence
  Description of Artificial Sequence: Synthetic oligonucleotide
gggauacaugcucaccugu

SEQ ID NO: 1904590 - RNA, 19 nt, Artificial Sequence
  Description of Artificial Sequence: Synthetic oligonucleotide
gguuaucaguaaagugaca

SEQ ID NO: 1904591 - RNA, 19 nt, Artificial Sequence
  Description of Artificial Sequence: Synthetic oligonucleotide
caguacaaacaugcagaaa

SEQ ID NO: 1904592 - RNA, 19 nt, Artificial Sequence
  Description of Artificial Sequence: Synthetic oligonucleotide
gcgaaggauauaaaccugu

SEQ ID NO: 1904593 - RNA, 19 nt, Artificial Sequence
  Description of Artificial Sequence: Synthetic oligonucleotide
guccauccuuucagugcag

SEQ ID NO: 1904594 - RNA, 19 nt, Artificial Sequence
  Description of Artificial Sequence: Synthetic oligonucleotide
agagggcgaaggauauaaa

SEQ ID NO: 1904595 - RNA, 19 nt, Artificial Sequence
  Description of Artificial Sequence: Synthetic oligonucleotide
gccaccgucucuccauaga

SEQ ID NO: 1904596 - RNA, 19 nt, Artificial Sequence
  Description of Artificial Sequence: Synthetic oligonucleotide
ggcggcaaugaauccaaau

SEQ ID NO: 1904597 - RNA, 19 nt, Artificial Sequence
  Description of Artificial Sequence: Synthetic oligonucleotide
guucugguugaagcaccaa

SEQ ID NO: 1904598 - RNA, 19 nt, Artificial Sequence
  Description of Artificial Sequence: Synthetic oligonucleotide
ccuccaucuaucaugcuuu

SEQ ID NO: 1904599 - RNA, 19 nt, Artificial Sequence
  Description of Artificial Sequence: Synthetic oligonucleotide
gggcucacauucugucaca

SEQ ID NO: 1904600 - RNA, 19 nt, Artificial Sequence
  Description of Artificial Sequence: Synthetic oligonucleotide
cgguaguguuucuucacca

SEQ ID NO: 1904601 - RNA, 19 nt, Artificial Sequence
  Description of Artificial Sequence: Synthetic oligonucleotide
ccaccgucucuccauagaa

SEQ ID NO: 1904602 - RNA, 19 nt, Artificial Sequence
  Description of Artificial Sequence: Synthetic oligonucleotide
ggcacacaaaguacuggua

SEQ ID NO: 1904603 - RNA, 19 nt, Artificial Sequence
  Description of Artificial Sequence: Synthetic oligonucleotide
gggauucggaccccuuaua

SEQ ID NO: 1904604 - RNA, 19 nt, Artificial Sequence
  Description of Artificial Sequence: Synthetic oligonucleotide
ccucggaaugggccaauca

SEQ ID NO: 1904605 - RNA, 19 nt, Artificial Sequence
  Description of Artificial Sequence: Synthetic oligonucleotide
cggcaaugaauccaaauau

SEQ ID NO: 1904606 - RNA, 19 nt, Artificial Sequence
  Description of Artificial Sequence: Synthetic oligonucleotide
guagagggcgaaggauaua

SEQ ID NO: 1904607 - RNA, 19 nt, Artificial Sequence
  Description of Artificial Sequence: Synthetic oligonucleotide
cuaaaccaugggaggucau

SEQ ID NO: 1904608 - RNA, 19 nt, Artificial Sequence
  Description of Artificial Sequence: Synthetic oligonucleotide
gcaccgccuuuaggaaugg

SEQ ID NO: 1904609 - RNA, 19 nt, Artificial Sequence
  Description of Artificial Sequence: Synthetic oligonucleotide
ccgaaaagguaagcaguga

SEQ ID NO: 1904610 - RNA, 19 nt, Artificial Sequence
  Description of Artificial Sequence: Synthetic oligonucleotide
cagcuuaauuaagggaguu

SEQ ID NO: 1904611 - RNA, 19 nt, Artificial Sequence
  Description of Artificial Sequence: Synthetic oligonucleotide
ggacaacacaugggcggca

SEQ ID NO: 1904612 - RNA, 19 nt, Artificial Sequence
  Description of Artificial Sequence: Synthetic oligonucleotide
guaguccgccaccgucucu

SEQ ID NO: 1904613 - RNA, 19 nt, Artificial Sequence
  Description of Artificial Sequence: Synthetic oligonucleotide
cuccaucuaucaugcuuuu

SEQ ID NO: 1904614 - RNA, 19 nt, Artificial Sequence
  Description of Artificial Sequence: Synthetic oligonucleotide
agccucggaaugggccaau

SEQ ID NO: 1904615 - RNA, 19 nt, Artificial Sequence
  Description of Artificial Sequence: Synthetic oligonucleotide
cguugccaucaaauacuga

SEQ ID NO: 1904616 - RNA, 19 nt, Artificial Sequence
  Description of Artificial Sequence: Synthetic oligonucleotide
caccgccuuuaggaaugga

SEQ ID NO: 1904617 - RNA, 19 nt, Artificial Sequence
  Description of Artificial Sequence: Synthetic oligonucleotide
gccucggaaugggccaauc

SEQ ID NO: 1904618 - RNA, 19 nt, Artificial Sequence
  Description of Artificial Sequence: Synthetic oligonucleotide
ggaagacuucggagcaguu

SEQ ID NO: 1904619 - RNA, 19 nt, Artificial Sequence
  Description of Artificial Sequence: Synthetic oligonucleotide
cggaccccuuauaaaacuu

SEQ ID NO: 1904620 - RNA, 19 nt, Artificial Sequence
  Description of Artificial Sequence: Synthetic oligonucleotide
cccgucucagcaccgccuu

SEQ ID NO: 1904621 - RNA, 19 nt, Artificial Sequence
  Description of Artificial Sequence: Synthetic oligonucleotide
gcugggauucggaccccuu

SEQ ID NO: 1904622 - RNA, 19 nt, Artificial Sequence
  Description of Artificial Sequence: Synthetic oligonucleotide
ccgccaccgucucuccaua

SEQ ID NO: 1904623 - RNA, 19 nt, Artificial Sequence
  Description of Artificial Sequence: Synthetic oligonucleotide
ccgucucagcaccgccuuu

SEQ ID NO: 1904624 - RNA, 19 nt, Artificial Sequence
  Description of Artificial Sequence: Synthetic oligonucleotide
ugaagaacgaacaugaacc

SEQ ID NO: 1904625 - RNA, 19 nt, Artificial Sequence
  Description of Artificial Sequence: Synthetic oligonucleotide
aaauauaccagcuguacag

SEQ ID NO: 1904626 - RNA, 19 nt, Artificial Sequence
  Description of Artificial Sequence: Synthetic oligonucleotide
uguuuuaaaauuaggauca

SEQ ID NO: 1904627 - RNA, 19 nt, Artificial Sequence
  Description of Artificial Sequence: Synthetic oligonucleotide
uuuaaaauuaggaucaaau

SEQ ID NO: 1904628 - RNA, 19 nt, Artificial Sequence
  Description of Artificial Sequence: Synthetic oligonucleotide
aaaccgaucauagauggcc

SEQ ID NO: 1904629 - RNA, 19 nt, Artificial Sequence
  Description of Artificial Sequence: Synthetic oligonucleotide
uuuugaaucggucaguucu

SEQ ID NO: 1904630 - RNA, 19 nt, Artificial Sequence
  Description of Artificial Sequence: Synthetic oligonucleotide
agagggaugacauucgagc

SEQ ID NO: 1904631 - RNA, 19 nt, Artificial Sequence
  Description of Artificial Sequence: Synthetic oligonucleotide
aaaauuaggaucaaauucu

SEQ ID NO: 1904632 - RNA, 19 nt, Artificial Sequence
  Description of Artificial Sequence: Synthetic oligonucleotide
uuuuacuggaacuacagcu

SEQ ID NO: 1904633 - RNA, 19 nt, Artificial Sequence
  Description of Artificial Sequence: Synthetic oligonucleotide
aauugagucaccagaaugg

SEQ ID NO: 1904634 - RNA, 19 nt, Artificial Sequence
  Description of Artificial Sequence: Synthetic oligonucleotide
acgaacaugaaccacuugg

SEQ ID NO: 1904635 - RNA, 19 nt, Artificial Sequence
  Description of Artificial Sequence: Synthetic oligonucleotide
uuaggagucacucaauccc

SEQ ID NO: 1904636 - RNA, 19 nt, Artificial Sequence
  Description of Artificial Sequence: Synthetic oligonucleotide
uauuugaggucccagacca

SEQ ID NO: 1904637 - RNA, 19 nt, Artificial Sequence
  Description of Artificial Sequence: Synthetic oligonucleotide
uguucaguuaccaagguau

SEQ ID NO: 1904638 - RNA, 19 nt, Artificial Sequence
  Description of Artificial Sequence: Synthetic oligonucleotide
guuguuuagacaaagauga

SEQ ID NO: 1904639 - RNA, 19 nt, Artificial Sequence
  Description of Artificial Sequence: Synthetic oligonucleotide
augacauucgagcaucacc

SEQ ID NO: 1904640 - RNA, 19 nt, Artificial Sequence
  Description of Artificial Sequence: Synthetic oligonucleotide
aucaucaacgucuugagga

SEQ ID NO: 1904641 - RNA, 19 nt, Artificial Sequence
  Description of Artificial Sequence: Synthetic oligonucleotide
aacaugaaccacuugggcu

SEQ ID NO: 1904642 - RNA, 19 nt, Artificial Sequence
  Description of Artificial Sequence: Synthetic oligonucleotide
uuuuguucgcccaaaggcc

SEQ ID NO: 1904643 - RNA, 19 nt, Artificial Sequence
  Description of Artificial Sequence: Synthetic oligonucleotide
agucuuguauuugaggucc

SEQ ID NO: 1904644 - RNA, 19 nt, Artificial Sequence
  Description of Artificial Sequence: Synthetic oligonucleotide
ucgagcaucaccuucaggu

SEQ ID NO: 1904645 - RNA, 19 nt, Artificial Sequence
  Description of Artificial Sequence: Synthetic oligonucleotide
uuuacuggaacuacagcug

SEQ ID NO: 1904646 - RNA, 19 nt, Artificial Sequence
  Description of Artificial Sequence: Synthetic oligonucleotide
ugacauucgagcaucaccu

SEQ ID NO: 1904647 - RNA, 19 nt, Artificial Sequence
  Description of Artificial Sequence: Synthetic oligonucleotide
ugagucaccagaaugggcu

SEQ ID NO: 1904648 - RNA, 19 nt, Artificial Sequence
  Description of Artificial Sequence: Synthetic oligonucleotide
gaauugagucaccagaaug

SEQ ID NO: 1904649 - RNA, 19 nt, Artificial Sequence
  Description of Artificial Sequence: Synthetic oligonucleotide
uuaucuuucgaacugccaa

SEQ ID NO: 1904650 - RNA, 19 nt, Artificial Sequence
  Description of Artificial Sequence: Synthetic oligonucleotide
acaucagccggccaaaccg

SEQ ID NO: 1904651 - RNA, 19 nt, Artificial Sequence
  Description of Artificial Sequence: Synthetic oligonucleotide
ugauuuuggagccccauca

SEQ ID NO: 1904652 - RNA, 19 nt, Artificial Sequence
  Description of Artificial Sequence: Synthetic oligonucleotide
uucaaugaaaauauccuua

SEQ ID NO: 1904653 - RNA, 19 nt, Artificial Sequence
  Description of Artificial Sequence: Synthetic oligonucleotide
ucuaaagauuccacaaagc

SEQ ID NO: 1904654 - RNA, 19 nt, Artificial Sequence
  Description of Artificial Sequence: Synthetic oligonucleotide
uaaagauuccacaaagcuc

SEQ ID NO: 1904655 - RNA, 19 nt, Artificial Sequence
  Description of Artificial Sequence: Synthetic oligonucleotide
auccuuagcuucuucagcg

SEQ ID NO: 1904656 - RNA, 19 nt, Artificial Sequence
  Description of Artificial Sequence: Synthetic oligonucleotide
cuuggguucacgaggaagg

SEQ ID NO: 1904657 - RNA, 19 nt, Artificial Sequence
  Description of Artificial Sequence: Synthetic oligonucleotide
caauguucaguuaccaagg

SEQ ID NO: 1904658 - RNA, 19 nt, Artificial Sequence
  Description of Artificial Sequence: Synthetic oligonucleotide
auauaccagcuguacaggc

SEQ ID NO: 1904659 - RNA, 19 nt, Artificial Sequence
  Description of Artificial Sequence: Synthetic oligonucleotide
uuuuggagccccaucaucu

SEQ ID NO: 1904660 - RNA, 19 nt, Artificial Sequence
  Description of Artificial Sequence: Synthetic oligonucleotide
aaucaucaacgucuugagg

SEQ ID NO: 1904661 - RNA, 19 nt, Artificial Sequence
  Description of Artificial Sequence: Synthetic oligonucleotide
agaccaccaucccagagcc

SEQ ID NO: 1904662 - RNA, 19 nt, Artificial Sequence
  Description of Artificial Sequence: Synthetic oligonucleotide
uguuuagacaaagaugagc

SEQ ID NO: 1904663 - RNA, 19 nt, Artificial Sequence
  Description of Artificial Sequence: Synthetic oligonucleotide
uguauuugaggucccagac

SEQ ID NO: 1904664 - RNA, 19 nt, Artificial Sequence
  Description of Artificial Sequence: Synthetic oligonucleotide
aauauaccagcuguacagg

SEQ ID NO: 1904665 - RNA, 19 nt, Artificial Sequence
  Description of Artificial Sequence: Synthetic oligonucleotide
ugggaauugagucaccaga

SEQ ID NO: 1904666 - RNA, 19 nt, Artificial Sequence
  Description of Artificial Sequence: Synthetic oligonucleotide
guuaccaagguaugaagcc

SEQ ID NO: 1904667 - RNA, 19 nt, Artificial Sequence
  Description of Artificial Sequence: Synthetic oligonucleotide
ucaccaggccugaagaacg

SEQ ID NO: 1904668 - RNA, 19 nt, Artificial Sequence
  Description of Artificial Sequence: Synthetic oligonucleotide
aguuaccaagguaugaagc

SEQ ID NO: 1904669 - RNA, 19 nt, Artificial Sequence
  Description of Artificial Sequence: Synthetic oligonucleotide
uucucuguuuuguacuugg

SEQ ID NO: 1904670 - RNA, 19 nt, Artificial Sequence
  Description of Artificial Sequence: Synthetic oligonucleotide
uuucgaacugccaacugug

SEQ ID NO: 1904671 - RNA, 19 nt, Artificial Sequence
  Description of Artificial Sequence: Synthetic oligonucleotide
acaugaaccacuugggcug

SEQ ID NO: 1904672 - RNA, 19 nt, Artificial Sequence
  Description of Artificial Sequence: Synthetic oligonucleotide
gaaucaucaacgucuugag

SEQ ID NO: 1904673 - RNA, 19 nt, Artificial Sequence
  Description of Artificial Sequence: Synthetic oligonucleotide
aauaaccaauccugcuuuc

SEQ ID NO: 1904674 - RNA, 19 nt, Artificial Sequence
  Description of Artificial Sequence: Synthetic oligonucleotide
uuagacaaagaugagcuuc

SEQ ID NO: 1904675 - RNA, 19 nt, Artificial Sequence
  Description of Artificial Sequence: Synthetic oligonucleotide
auuccacaaagcuccagcg

SEQ ID NO: 1904676 - RNA, 19 nt, Artificial Sequence
  Description of Artificial Sequence: Synthetic oligonucleotide
agccccaucaucuggguac

SEQ ID NO: 1904677 - RNA, 19 nt, Artificial Sequence
  Description of Artificial Sequence: Synthetic oligonucleotide
aggaucaaauucuuuuauc

SEQ ID NO: 1904678 - RNA, 19 nt, Artificial Sequence
  Description of Artificial Sequence: Synthetic oligonucleotide
uaccaagguaugaagccgg

SEQ ID NO: 1904679 - RNA, 19 nt, Artificial Sequence
  Description of Artificial Sequence: Synthetic oligonucleotide
cuuaggagucacucaaucc

SEQ ID NO: 1904680 - RNA, 19 nt, Artificial Sequence
  Description of Artificial Sequence: Synthetic oligonucleotide
uggaacauagggaucaaau

SEQ ID NO: 1904681 - RNA, 19 nt, Artificial Sequence
  Description of Artificial Sequence: Synthetic oligonucleotide
uuaccaagguaugaagccg

SEQ ID NO: 1904682 - RNA, 19 nt, Artificial Sequence
  Description of Artificial Sequence: Synthetic oligonucleotide
aagaacgaacaugaaccac

SEQ ID NO: 1904683 - RNA, 19 nt, Artificial Sequence
  Description of Artificial Sequence: Synthetic oligonucleotide
acauagggaucaaauauac

SEQ ID NO: 1904684 - RNA, 19 nt, Artificial Sequence
  Description of Artificial Sequence: Synthetic oligonucleotide
uauaccagcuguacaggcc

SEQ ID NO: 1904685 - RNA, 19 nt, Artificial Sequence
  Description of Artificial Sequence: Synthetic oligonucleotide
uguccggaaaacaauguuc

SEQ ID NO: 1904686 - RNA, 19 nt, Artificial Sequence
  Description of Artificial Sequence: Synthetic oligonucleotide
aaucccuuaggcaagcuga

SEQ ID NO: 1904687 - RNA, 19 nt, Artificial Sequence
  Description of Artificial Sequence: Synthetic oligonucleotide
ucaaauauaccagcuguac

SEQ ID NO: 1904688 - RNA, 19 nt, Artificial Sequence
  Description of Artificial Sequence: Synthetic oligonucleotide
auuuuggagccccaucauc

SEQ ID NO: 1904689 - RNA, 19 nt, Artificial Sequence
  Description of Artificial Sequence: Synthetic oligonucleotide
aggccagauguauaggacg

SEQ ID NO: 1904690 - RNA, 19 nt, Artificial Sequence
  Description of Artificial Sequence: Synthetic oligonucleotide
uauaggacgcuccagcuuu

SEQ ID NO: 1904691 - RNA, 19 nt, Artificial Sequence
  Description of Artificial Sequence: Synthetic oligonucleotide
aauguucaguuaccaaggu

SEQ ID NO: 1904692 - RNA, 19 nt, Artificial Sequence
  Description of Artificial Sequence: Synthetic oligonucleotide
gaggaaggggucugaaacg

SEQ ID NO: 1904693 - RNA, 19 nt, Artificial Sequence
  Description of Artificial Sequence: Synthetic oligonucleotide
uuuaucuuucgaacugcca

SEQ ID NO: 1904694 - RNA, 19 nt, Artificial Sequence
  Description of Artificial Sequence: Synthetic oligonucleotide
auaaccaauccugcuuucc

SEQ ID NO: 1904695 - RNA, 19 nt, Artificial Sequence
  Description of Artificial Sequence: Synthetic oligonucleotide
cauuuuguucgcccaaagg

SEQ ID NO: 1904696 - RNA, 19 nt, Artificial Sequence
  Description of Artificial Sequence: Synthetic oligonucleotide
ugaggaccaggaaucauca

SEQ ID NO: 1904697 - RNA, 19 nt, Artificial Sequence
  Description of Artificial Sequence: Synthetic oligonucleotide
cuaagcaggacaagccccg

SEQ ID NO: 1904698 - RNA, 19 nt, Artificial Sequence
  Description of Artificial Sequence: Synthetic oligonucleotide
accaauccugcuuuccugg

SEQ ID NO: 1904699 - RNA, 19 nt, Artificial Sequence
  Description of Artificial Sequence: Synthetic oligonucleotide
gaacauagggaucaaauau

SEQ ID NO: 1904700 - RNA, 19 nt, Artificial Sequence
  Description of Artificial Sequence: Synthetic oligonucleotide
gaacugccaacugugaugc

SEQ ID NO: 1904701 - RNA, 19 nt, Artificial Sequence
  Description of Artificial Sequence: Synthetic oligonucleotide
agucacucaaucccuuagg

SEQ ID NO: 1904702 - RNA, 19 nt, Artificial Sequence
  Description of Artificial Sequence: Synthetic oligonucleotide
cuucguacuccucccaugg

SEQ ID NO: 1904703 - RNA, 19 nt, Artificial Sequence
  Description of Artificial Sequence: Synthetic oligonucleotide
acauucgagcaucaccuuc

SEQ ID NO: 1904704 - RNA, 19 nt, Artificial Sequence
  Description of Artificial Sequence: Synthetic oligonucleotide
aaccaauccugcuuuccug

SEQ ID NO: 1904705 - RNA, 19 nt, Artificial Sequence
  Description of Artificial Sequence: Synthetic oligonucleotide
uacaaguugcucugguuca

SEQ ID NO: 1904706 - RNA, 19 nt, Artificial Sequence
  Description of Artificial Sequence: Synthetic oligonucleotide
uuuuguacuuggguucacg

SEQ ID NO: 1904707 - RNA, 19 nt, Artificial Sequence
  Description of Artificial Sequence: Synthetic oligonucleotide
uuguauuugaggucccaga

SEQ ID NO: 1904708 - RNA, 19 nt, Artificial Sequence
  Description of Artificial Sequence: Synthetic oligonucleotide
guacaggccagauguauag

SEQ ID NO: 1904709 - RNA, 19 nt, Artificial Sequence
  Description of Artificial Sequence: Synthetic oligonucleotide
ucuucagcgaagucuuuug

SEQ ID NO: 1904710 - RNA, 19 nt, Artificial Sequence
  Description of Artificial Sequence: Synthetic oligonucleotide
ugucaguccuuccuuugag

SEQ ID NO: 1904711 - RNA, 19 nt, Artificial Sequence
  Description of Artificial Sequence: Synthetic oligonucleotide
caccaagugucuuucaaac

SEQ ID NO: 1904712 - RNA, 19 nt, Artificial Sequence
  Description of Artificial Sequence: Synthetic oligonucleotide
gucugaguuguuuagacaa

SEQ ID NO: 1904713 - RNA, 19 nt, Artificial Sequence
  Description of Artificial Sequence: Synthetic oligonucleotide
uaucuuucgaacugccaac

SEQ ID NO: 1904714 - RNA, 19 nt, Artificial Sequence
  Description of Artificial Sequence: Synthetic oligonucleotide
auugagucaccagaauggg

SEQ ID NO: 1904715 - RNA, 19 nt, Artificial Sequence
  Description of Artificial Sequence: Synthetic oligonucleotide
uuguuuagacaaagaugag

SEQ ID NO: 1904716 - RNA, 19 nt, Artificial Sequence
  Description of Artificial Sequence: Synthetic oligonucleotide
caagugucuuucaaacacc

SEQ ID NO: 1904717 - RNA, 19 nt, Artificial Sequence
  Description of Artificial Sequence: Synthetic oligonucleotide
uaaccaauccugcuuuccu

SEQ ID NO: 1904718 - RNA, 19 nt, Artificial Sequence
  Description of Artificial Sequence: Synthetic oligonucleotide
ucucuguuuuguacuuggg

SEQ ID NO: 1904719 - RNA, 19 nt, Artificial Sequence
  Description of Artificial Sequence: Synthetic oligonucleotide
ucuggguacuccucaguag

SEQ ID NO: 1904720 - RNA, 19 nt, Artificial Sequence
  Description of Artificial Sequence: Synthetic oligonucleotide
gaagaacgaacaugaacca

SEQ ID NO: 1904721 - RNA, 19 nt, Artificial Sequence
  Description of Artificial Sequence: Synthetic oligonucleotide
uggagccccaucaucuggg

SEQ ID NO: 1904722 - RNA, 19 nt, Artificial Sequence
  Description of Artificial Sequence: Synthetic oligonucleotide
agaacgaacaugaaccacu

SEQ ID NO: 1904723 - RNA, 19 nt, Artificial Sequence
  Description of Artificial Sequence: Synthetic oligonucleotide
cuaaagauuccacaaagcu

SEQ ID NO: 1904724 - RNA, 19 nt, Artificial Sequence
  Description of Artificial Sequence: Synthetic oligonucleotide
cuguuuuguacuuggguuc

SEQ ID NO: 1904725 - RNA, 19 nt, Artificial Sequence
  Description of Artificial Sequence: Synthetic oligonucleotide
cugcccauacaucagccgg

SEQ ID NO: 1904726 - RNA, 19 nt, Artificial Sequence
  Description of Artificial Sequence: Synthetic oligonucleotide
caagguaugaagccgguca

SEQ ID NO: 1904727 - RNA, 19 nt, Artificial Sequence
  Description of Artificial Sequence: Synthetic oligonucleotide
ucagcgaagucuuuuguuu

SEQ ID NO: 1904728 - RNA, 19 nt, Artificial Sequence
  Description of Artificial Sequence: Synthetic oligonucleotide
gucacucaaucccuuaggc

SEQ ID NO: 1904729 - RNA, 19 nt, Artificial Sequence
  Description of Artificial Sequence: Synthetic oligonucleotide
cauagggaucaaauauacc

SEQ ID NO: 1904730 - RNA, 19 nt, Artificial Sequence
  Description of Artificial Sequence: Synthetic oligonucleotide
auauggguucaccaagugu

SEQ ID NO: 1904731 - RNA, 19 nt, Artificial Sequence
  Description of Artificial Sequence: Synthetic oligonucleotide
guauuugaggucccagacc

SEQ ID NO: 1904732 - RNA, 19 nt, Artificial Sequence
  Description of Artificial Sequence: Synthetic oligonucleotide
aucaacgucuugaggaugg

SEQ ID NO: 1904733 - RNA, 19 nt, Artificial Sequence
  Description of Artificial Sequence: Synthetic oligonucleotide
gagucacucaaucccuuag

SEQ ID NO: 1904734 - RNA, 19 nt, Artificial Sequence
  Description of Artificial Sequence: Synthetic oligonucleotide
ccaaaccgaucauagaugg

SEQ ID NO: 1904735 - RNA, 19 nt, Artificial Sequence
  Description of Artificial Sequence: Synthetic oligonucleotide
aagucugccgagugugcag

SEQ ID NO: 1904736 - RNA, 19 nt, Artificial Sequence
  Description of Artificial Sequence: Synthetic oligonucleotide
uucaccaagugucuuucaa

SEQ ID NO: 1904737 - RNA, 19 nt, Artificial Sequence
  Description of Artificial Sequence: Synthetic oligonucleotide
cacucaaucccuuaggcaa

SEQ ID NO: 1904738 - RNA, 19 nt, Artificial Sequence
  Description of Artificial Sequence: Synthetic oligonucleotide
ugggccucuccuuuuaucu

SEQ ID NO: 1904739 - RNA, 19 nt, Artificial Sequence
  Description of Artificial Sequence: Synthetic oligonucleotide
caugcauucuccagcuccc

SEQ ID NO: 1904740 - RNA, 19 nt, Artificial Sequence
  Description of Artificial Sequence: Synthetic oligonucleotide
uugagucaccagaaugggc

SEQ ID NO: 1904741 - RNA, 19 nt, Artificial Sequence
  Description of Artificial Sequence: Synthetic oligonucleotide
cagauguauaggacgcucc

SEQ ID NO: 1904742 - RNA, 19 nt, Artificial Sequence
  Description of Artificial Sequence: Synthetic oligonucleotide
agaaugggcugccgagacc

SEQ ID NO: 1904743 - RNA, 19 nt, Artificial Sequence
  Description of Artificial Sequence: Synthetic oligonucleotide
uguuuuguacuuggguuca

SEQ ID NO: 1904744 - RNA, 19 nt, Artificial Sequence
  Description of Artificial Sequence: Synthetic oligonucleotide
uggaacuacagcugggaau

SEQ ID NO: 1904745 - RNA, 19 nt, Artificial Sequence
  Description of Artificial Sequence: Synthetic oligonucleotide
gguaugaagccggucaugg

SEQ ID NO: 1904746 - RNA, 19 nt, Artificial Sequence
  Description of Artificial Sequence: Synthetic oligonucleotide
cauggguucagcugaggac

SEQ ID NO: 1904747 - RNA, 19 nt, Artificial Sequence
  Description of Artificial Sequence: Synthetic oligonucleotide
agauguauaggacgcucca

SEQ ID NO: 1904748 - RNA, 19 nt, Artificial Sequence
  Description of Artificial Sequence: Synthetic oligonucleotide
aagugucuuucaaacacca

SEQ ID NO: 1904749 - RNA, 19 nt, Artificial Sequence
  Description of Artificial Sequence: Synthetic oligonucleotide
aagguaugaagccggucau

SEQ ID NO: 1904750 - RNA, 19 nt, Artificial Sequence
  Description of Artificial Sequence: Synthetic oligonucleotide
ugguucaccaggccugaag

SEQ ID NO: 1904751 - RNA, 19 nt, Artificial Sequence
  Description of Artificial Sequence: Synthetic oligonucleotide
accagaaugggcugccgag

SEQ ID NO: 1904752 - RNA, 19 nt, Artificial Sequence
  Description of Artificial Sequence: Synthetic oligonucleotide
uuuccuggcauguuccaaa

SEQ ID NO: 1904753 - RNA, 19 nt, Artificial Sequence
  Description of Artificial Sequence: Synthetic oligonucleotide
aagaugagcuucaaugaaa

SEQ ID NO: 1904754 - RNA, 19 nt, Artificial Sequence
  Description of Artificial Sequence: Synthetic oligonucleotide
ucuuucgaacugccaacug

SEQ ID NO: 1904755 - RNA, 19 nt, Artificial Sequence
  Description of Artificial Sequence: Synthetic oligonucleotide
caagccccgagguaugggg

SEQ ID NO: 1904756 - RNA, 19 nt, Artificial Sequence
  Description of Artificial Sequence: Synthetic oligonucleotide
gauguauaggacgcuccag

SEQ ID NO: 1904757 - RNA, 19 nt, Artificial Sequence
  Description of Artificial Sequence: Synthetic oligonucleotide
cuggcuaagcaggacaagc

SEQ ID NO: 1904758 - RNA, 19 nt, Artificial Sequence
  Description of Artificial Sequence: Synthetic oligonucleotide
ucaucaacgucuugaggau

SEQ ID NO: 1904759 - RNA, 19 nt, Artificial Sequence
  Description of Artificial Sequence: Synthetic oligonucleotide
uccuuugagagggaugaca

SEQ ID NO: 1904760 - RNA, 19 nt, Artificial Sequence
  Description of Artificial Sequence: Synthetic oligonucleotide
uguacaggccagauguaua

SEQ ID NO: 1904761 - RNA, 19 nt, Artificial Sequence
  Description of Artificial Sequence: Synthetic oligonucleotide
caaauauaccagcuguaca

SEQ ID NO: 1904762 - RNA, 19 nt, Artificial Sequence
  Description of Artificial Sequence: Synthetic oligonucleotide
aacgaacaugaaccacuug

SEQ ID NO: 1904763 - RNA, 19 nt, Artificial Sequence
  Description of Artificial Sequence: Synthetic oligonucleotide
ucugaguuguuuagacaaa

SEQ ID NO: 1904764 - RNA, 19 nt, Artificial Sequence
  Description of Artificial Sequence: Synthetic oligonucleotide
ucuucguacuccucccaug

SEQ ID NO: 1904765 - RNA, 19 nt, Artificial Sequence
  Description of Artificial Sequence: Synthetic oligonucleotide
ggaucaaauucuuuuaucu

SEQ ID NO: 1904766 - RNA, 19 nt, Artificial Sequence
  Description of Artificial Sequence: Synthetic oligonucleotide
ggaucaaauauaccagcug

SEQ ID NO: 1904767 - RNA, 19 nt, Artificial Sequence
  Description of Artificial Sequence: Synthetic oligonucleotide
acaaagcuccagcggacag

SEQ ID NO: 1904768 - RNA, 19 nt, Artificial Sequence
  Description of Artificial Sequence: Synthetic oligonucleotide
acugugaugccacauucuu

SEQ ID NO: 1904769 - RNA, 19 nt, Artificial Sequence
  Description of Artificial Sequence: Synthetic oligonucleotide
uucguacuccucccauggg

SEQ ID NO: 1904770 - RNA, 19 nt, Artificial Sequence
  Description of Artificial Sequence: Synthetic oligonucleotide
uuuggagccccaucaucug

SEQ ID NO: 1904771 - RNA, 19 nt, Artificial Sequence
  Description of Artificial Sequence: Synthetic oligonucleotide
aaagucugccgagugugca

SEQ ID NO: 1904772 - RNA, 19 nt, Artificial Sequence
  Description of Artificial Sequence: Synthetic oligonucleotide
ggaaucaucaacgucuuga

SEQ ID NO: 1904773 - RNA, 19 nt, Artificial Sequence
  Description of Artificial Sequence: Synthetic oligonucleotide
uccggaaaacaauguucag

SEQ ID NO: 1904774 - RNA, 19 nt, Artificial Sequence
  Description of Artificial Sequence: Synthetic oligonucleotide
aaauuaggaucaaauucuu

SEQ ID NO: 1904775 - RNA, 19 nt, Artificial Sequence
  Description of Artificial Sequence: Synthetic oligonucleotide
cucugguucaccaggccug

SEQ ID NO: 1904776 - RNA, 19 nt, Artificial Sequence
  Description of Artificial Sequence: Synthetic oligonucleotide
cuuguauuugaggucccag

SEQ ID NO: 1904777 - RNA, 19 nt, Artificial Sequence
  Description of Artificial Sequence: Synthetic oligonucleotide
cuugggcacgucuuccugc

SEQ ID NO: 1904778 - RNA, 19 nt, Artificial Sequence
  Description of Artificial Sequence: Synthetic oligonucleotide
uucaccaggccugaagaac

SEQ ID NO: 1904779 - RNA, 19 nt, Artificial Sequence
  Description of Artificial Sequence: Synthetic oligonucleotide
ugcccauacaucagccggc

SEQ ID NO: 1904780 - RNA, 19 nt, Artificial Sequence
  Description of Artificial Sequence: Synthetic oligonucleotide
agguggaacauagggauca

SEQ ID NO: 1904781 - RNA, 19 nt, Artificial Sequence
  Description of Artificial Sequence: Synthetic oligonucleotide
uccugcccauacaucagcc

SEQ ID NO: 1904782 - RNA, 19 nt, Artificial Sequence
  Description of Artificial Sequence: Synthetic oligonucleotide
caacugugaugccacauuc

SEQ ID NO: 1904783 - RNA, 19 nt, Artificial Sequence
  Description of Artificial Sequence: Synthetic oligonucleotide
cauucgagcaucaccuuca

SEQ ID NO: 1904784 - RNA, 19 nt, Artificial Sequence
  Description of Artificial Sequence: Synthetic oligonucleotide
auggccaaagucugccgag

SEQ ID NO: 1904785 - RNA, 19 nt, Artificial Sequence
  Description of Artificial Sequence: Synthetic oligonucleotide
uucgaacugccaacuguga

SEQ ID NO: 1904786 - RNA, 19 nt, Artificial Sequence
  Description of Artificial Sequence: Synthetic oligonucleotide
ggacgcuccagcuuuuccg

SEQ ID NO: 1904787 - RNA, 19 nt, Artificial Sequence
  Description of Artificial Sequence: Synthetic oligonucleotide
caguccuuccuuugagagg

SEQ ID NO: 1904788 - RNA, 19 nt, Artificial Sequence
  Description of Artificial Sequence: Synthetic oligonucleotide
agugugcaggcguacggug

SEQ ID NO: 1904789 - RNA, 19 nt, Artificial Sequence
  Description of Artificial Sequence: Synthetic oligonucleotide
ucgaacugccaacugugau

SEQ ID NO: 1904790 - RNA, 19 nt, Artificial Sequence
  Description of Artificial Sequence: Synthetic oligonucleotide
ugugcaggcguacggugac

SEQ ID NO: 1904791 - RNA, 19 nt, Artificial Sequence
  Description of Artificial Sequence: Synthetic oligonucleotide
aacuacagcugggaauuga

SEQ ID NO: 1904792 - RNA, 19 nt, Artificial Sequence
  Description of Artificial Sequence: Synthetic oligonucleotide
gaaucggucaguucucugu

SEQ ID NO: 1904793 - RNA, 19 nt, Artificial Sequence
  Description of Artificial Sequence: Synthetic oligonucleotide
uucagcgaagucuuuuguu

SEQ ID NO: 1904794 - RNA, 19 nt, Artificial Sequence
  Description of Artificial Sequence: Synthetic oligonucleotide
ugaaucggucaguucucug

SEQ ID NO: 1904795 - RNA, 19 nt, Artificial Sequence
  Description of Artificial Sequence: Synthetic oligonucleotide
uugggcacgucuuccugcc

SEQ ID NO: 1904796 - RNA, 19 nt, Artificial Sequence
  Description of Artificial Sequence: Synthetic oligonucleotide
cauauggguucaccaagug

SEQ ID NO: 1904797 - RNA, 19 nt, Artificial Sequence
  Description of Artificial Sequence: Synthetic oligonucleotide
gagagggaugacauucgag

SEQ ID NO: 1904798 - RNA, 19 nt, Artificial Sequence
  Description of Artificial Sequence: Synthetic oligonucleotide
ucggucaguucucuguguc

SEQ ID NO: 1904799 - RNA, 19 nt, Artificial Sequence
  Description of Artificial Sequence: Synthetic oligonucleotide
guccggaaaacaauguuca

SEQ ID NO: 1904800 - RNA, 19 nt, Artificial Sequence
  Description of Artificial Sequence: Synthetic oligonucleotide
aauuaggaucaaauucuuu

SEQ ID NO: 1904801 - RNA, 19 nt, Artificial Sequence
  Description of Artificial Sequence: Synthetic oligonucleotide
augggccucuccuuuuauc

SEQ ID NO: 1904802 - RNA, 19 nt, Artificial Sequence
  Description of Artificial Sequence: Synthetic oligonucleotide
uggguucacgaggaagggg

SEQ ID NO: 1904803 - RNA, 19 nt, Artificial Sequence
  Description of Artificial Sequence: Synthetic oligonucleotide
caaagucugccgagugugc

SEQ ID NO: 1904804 - RNA, 19 nt, Artificial Sequence
  Description of Artificial Sequence: Synthetic oligonucleotide
ucuuggcaugcauucucca

SEQ ID NO: 1904805 - RNA, 19 nt, Artificial Sequence
  Description of Artificial Sequence: Synthetic oligonucleotide
cagucuuguauuugagguc

SEQ ID NO: 1904806 - RNA, 19 nt, Artificial Sequence
  Description of Artificial Sequence: Synthetic oligonucleotide
aggacaagccccgagguau

SEQ ID NO: 1904807 - RNA, 19 nt, Artificial Sequence
  Description of Artificial Sequence: Synthetic oligonucleotide
cuuccugcccauacaucag

SEQ ID NO: 1904808 - RNA, 19 nt, Artificial Sequence
  Description of Artificial Sequence: Synthetic oligonucleotide
caaucccuuaggcaagcug

SEQ ID NO: 1904809 - RNA, 19 nt, Artificial Sequence
  Description of Artificial Sequence: Synthetic oligonucleotide
auucgagcaucaccuucag

SEQ ID NO: 1904810 - RNA, 19 nt, Artificial Sequence
  Description of Artificial Sequence: Synthetic oligonucleotide
cuugggcuggcucuaaaga

SEQ ID NO: 1904811 - RNA, 19 nt, Artificial Sequence
  Description of Artificial Sequence: Synthetic oligonucleotide
ggcuaagcaggacaagccc

SEQ ID NO: 1904812 - RNA, 19 nt, Artificial Sequence
  Description of Artificial Sequence: Synthetic oligonucleotide
aaccgaucauagauggcca

SEQ ID NO: 1904813 - RNA, 19 nt, Artificial Sequence
  Description of Artificial Sequence: Synthetic oligonucleotide
acuggaacuacagcuggga

SEQ ID NO: 1904814 - RNA, 19 nt, Artificial Sequence
  Description of Artificial Sequence: Synthetic oligonucleotide
gcuuaggaggugcccaugg

SEQ ID NO: 1904815 - RNA, 19 nt, Artificial Sequence
  Description of Artificial Sequence: Synthetic oligonucleotide
gagucaccagaaugggcug

SEQ ID NO: 1904816 - RNA, 19 nt, Artificial Sequence
  Description of Artificial Sequence: Synthetic oligonucleotide
cagaaugggcugccgagac

SEQ ID NO: 1904817 - RNA, 19 nt, Artificial Sequence
  Description of Artificial Sequence: Synthetic oligonucleotide
uuaggcaagcugaggcuua

SEQ ID NO: 1904818 - RNA, 19 nt, Artificial Sequence
  Description of Artificial Sequence: Synthetic oligonucleotide
aucuggguacuccucagua

SEQ ID NO: 1904819 - RNA, 19 nt, Artificial Sequence
  Description of Artificial Sequence: Synthetic oligonucleotide
caggcguacggugaccugg

SEQ ID NO: 1904820 - RNA, 19 nt, Artificial Sequence
  Description of Artificial Sequence: Synthetic oligonucleotide
caguucucugugucagucc

SEQ ID NO: 1904821 - RNA, 19 nt, Artificial Sequence
  Description of Artificial Sequence: Synthetic oligonucleotide
ucugccgagugugcaggcg

SEQ ID NO: 1904822 - RNA, 19 nt, Artificial Sequence
  Description of Artificial Sequence: Synthetic oligonucleotide
cccuuaggcaagcugaggc

SEQ ID NO: 1904823 - RNA, 19 nt, Artificial Sequence
  Description of Artificial Sequence: Synthetic oligonucleotide
auguucaguuaccaaggua

SEQ ID NO: 1904824 - RNA, 19 nt, Artificial Sequence
  Description of Artificial Sequence: Synthetic oligonucleotide
ugaccuggccauacaaguu

SEQ ID NO: 1904825 - RNA, 19 nt, Artificial Sequence
  Description of Artificial Sequence: Synthetic oligonucleotide
ucaacgucuugaggauggg

SEQ ID NO: 1904826 - RNA, 19 nt, Artificial Sequence
  Description of Artificial Sequence: Synthetic oligonucleotide
aucuuucgaacugccaacu

SEQ ID NO: 1904827 - RNA, 19 nt, Artificial Sequence
  Description of Artificial Sequence: Synthetic oligonucleotide
cagaccauguccggaaaac

SEQ ID NO: 1904828 - RNA, 19 nt, Artificial Sequence
  Description of Artificial Sequence: Synthetic oligonucleotide
gcugccauuuuguucgccc

SEQ ID NO: 1904829 - RNA, 19 nt, Artificial Sequence
  Description of Artificial Sequence: Synthetic oligonucleotide
gaugacauucgagcaucac

SEQ ID NO: 1904830 - RNA, 19 nt, Artificial Sequence
  Description of Artificial Sequence: Synthetic oligonucleotide
ugccauuuuguucgcccaa

SEQ ID NO: 1904831 - RNA, 19 nt, Artificial Sequence
  Description of Artificial Sequence: Synthetic oligonucleotide
ggaacauagggaucaaaua

SEQ ID NO: 1904832 - RNA, 19 nt, Artificial Sequence
  Description of Artificial Sequence: Synthetic oligonucleotide
cuccuuaggagucacucaa

SEQ ID NO: 1904833 - RNA, 19 nt, Artificial Sequence
  Description of Artificial Sequence: Synthetic oligonucleotide
gaucauagauggccaaagu

SEQ ID NO: 1904834 - RNA, 19 nt, Artificial Sequence
  Description of Artificial Sequence: Synthetic oligonucleotide
agcuccagcggacagucuu

SEQ ID NO: 1904835 - RNA, 19 nt, Artificial Sequence
  Description of Artificial Sequence: Synthetic oligonucleotide
acucaaucccuuaggcaag

SEQ ID NO: 1904836 - RNA, 19 nt, Artificial Sequence
  Description of Artificial Sequence: Synthetic oligonucleotide
gugauuuuggagccccauc

SEQ ID NO: 1904837 - RNA, 19 nt, Artificial Sequence
  Description of Artificial Sequence: Synthetic oligonucleotide
gaccauguccggaaaacaa

SEQ ID NO: 1904838 - RNA, 19 nt, Artificial Sequence
  Description of Artificial Sequence: Synthetic oligonucleotide
ccauguccggaaaacaaug

SEQ ID NO: 1904839 - RNA, 19 nt, Artificial Sequence
  Description of Artificial Sequence: Synthetic oligonucleotide
cacgucuuccugcccauac

SEQ ID NO: 1904840 - RNA, 19 nt, Artificial Sequence
  Description of Artificial Sequence: Synthetic oligonucleotide
cucccauggguucagcuga

SEQ ID NO: 1904841 - RNA, 19 nt, Artificial Sequence
  Description of Artificial Sequence: Synthetic oligonucleotide
uggguacuccucaguaguc

SEQ ID NO: 1904842 - RNA, 19 nt, Artificial Sequence
  Description of Artificial Sequence: Synthetic oligonucleotide
auacaucagccggccaaac

SEQ ID NO: 1904843 - RNA, 19 nt, Artificial Sequence
  Description of Artificial Sequence: Synthetic oligonucleotide
gccugaagaacgaacauga

SEQ ID NO: 1904844 - RNA, 19 nt, Artificial Sequence
  Description of Artificial Sequence: Synthetic oligonucleotide
gacaagccccgagguaugg

SEQ ID NO: 1904845 - RNA, 19 nt, Artificial Sequence
  Description of Artificial Sequence: Synthetic oligonucleotide
agcgaagucuuuuguuuua

SEQ ID NO: 1904846 - RNA, 19 nt, Artificial Sequence
  Description of Artificial Sequence: Synthetic oligonucleotide
caugaaccacuugggcugg

SEQ ID NO: 1904847 - RNA, 19 nt, Artificial Sequence
  Description of Artificial Sequence: Synthetic oligonucleotide
uaccagcuguacaggccag

SEQ ID NO: 1904848 - RNA, 19 nt, Artificial Sequence
  Description of Artificial Sequence: Synthetic oligonucleotide
cuuucgaacugccaacugu

SEQ ID NO: 1904849 - RNA, 19 nt, Artificial Sequence
  Description of Artificial Sequence: Synthetic oligonucleotide
gcuaagcaggacaagcccc

SEQ ID NO: 1904850 - RNA, 19 nt, Artificial Sequence
  Description of Artificial Sequence: Synthetic oligonucleotide
uccuuaggagucacucaau

SEQ ID NO: 1904851 - RNA, 19 nt, Artificial Sequence
  Description of Artificial Sequence: Synthetic oligonucleotide
uccucccauggguucagcu

SEQ ID NO: 1904852 - RNA, 19 nt, Artificial Sequence
  Description of Artificial Sequence: Synthetic oligonucleotide
agaccauguccggaaaaca

SEQ ID NO: 1904853 - RNA, 19 nt, Artificial Sequence
  Description of Artificial Sequence: Synthetic oligonucleotide
cucaaucccuuaggcaagc

SEQ ID NO: 1904854 - RNA, 19 nt, Artificial Sequence
  Description of Artificial Sequence: Synthetic oligonucleotide
ugaagccggucauggucug

SEQ ID NO: 1904855 - RNA, 19 nt, Artificial Sequence
  Description of Artificial Sequence: Synthetic oligonucleotide
guacuuggguucacgagga

SEQ ID NO: 1904856 - RNA, 19 nt, Artificial Sequence
  Description of Artificial Sequence: Synthetic oligonucleotide
ugcaggcguacggugaccu

SEQ ID NO: 1904857 - RNA, 19 nt, Artificial Sequence
  Description of Artificial Sequence: Synthetic oligonucleotide
aucggucaguucucugugu

SEQ ID NO: 1904858 - RNA, 19 nt, Artificial Sequence
  Description of Artificial Sequence: Synthetic oligonucleotide
agauuccacaaagcuccag

SEQ ID NO: 1904859 - RNA, 19 nt, Artificial Sequence
  Description of Artificial Sequence: Synthetic oligonucleotide
accaggcuccuuaggaguc

SEQ ID NO: 1904860 - RNA, 19 nt, Artificial Sequence
  Description of Artificial Sequence: Synthetic oligonucleotide
gucaguccuuccuuugaga

SEQ ID NO: 1904861 - RNA, 19 nt, Artificial Sequence
  Description of Artificial Sequence: Synthetic oligonucleotide
aggaaucaucaacgucuug

SEQ ID NO: 1904862 - RNA, 19 nt, Artificial Sequence
  Description of Artificial Sequence: Synthetic oligonucleotide
ggggaauaaccaauccugc

SEQ ID NO: 1904863 - RNA, 19 nt, Artificial Sequence
  Description of Artificial Sequence: Synthetic oligonucleotide
uaugggccucuccuuuuau

SEQ ID NO: 1904864 - RNA, 19 nt, Artificial Sequence
  Description of Artificial Sequence: Synthetic oligonucleotide
ggccagauguauaggacgc

SEQ ID NO: 1904865 - RNA, 19 nt, Artificial Sequence
  Description of Artificial Sequence: Synthetic oligonucleotide
gccgagaccaccaucccag

SEQ ID NO: 1904866 - RNA, 19 nt, Artificial Sequence
  Description of Artificial Sequence: Synthetic oligonucleotide
cuggccauacaaguugcuc

SEQ ID NO: 1904867 - RNA, 19 nt, Artificial Sequence
  Description of Artificial Sequence: Synthetic oligonucleotide
ccggccaaaccgaucauag

SEQ ID NO: 1904868 - RNA, 19 nt, Artificial Sequence
  Description of Artificial Sequence: Synthetic oligonucleotide
caacgucuugaggaugggc

SEQ ID NO: 1904869 - RNA, 19 nt, Artificial Sequence
  Description of Artificial Sequence: Synthetic oligonucleotide
aggccugaagaacgaacau

SEQ ID NO: 1904870 - RNA, 19 nt, Artificial Sequence
  Description of Artificial Sequence: Synthetic oligonucleotide
acauacuccaggacauccu

SEQ ID NO: 1904871 - RNA, 19 nt, Artificial Sequence
  Description of Artificial Sequence: Synthetic oligonucleotide
aggcguacggugaccuggc

SEQ ID NO: 1904872 - RNA, 19 nt, Artificial Sequence
  Description of Artificial Sequence: Synthetic oligonucleotide
accauguccggaaaacaau

SEQ ID NO: 1904873 - RNA, 19 nt, Artificial Sequence
  Description of Artificial Sequence: Synthetic oligonucleotide
ccuuaggagucacucaauc

SEQ ID NO: 1904874 - RNA, 19 nt, Artificial Sequence
  Description of Artificial Sequence: Synthetic oligonucleotide
accgaucauagauggccaa

SEQ ID NO: 1904875 - RNA, 19 nt, Artificial Sequence
  Description of Artificial Sequence: Synthetic oligonucleotide
caucaacgucuugaggaug

SEQ ID NO: 1904876 - RNA, 19 nt, Artificial Sequence
  Description of Artificial Sequence: Synthetic oligonucleotide
uacggugaccuggccauac

SEQ ID NO: 1904877 - RNA, 19 nt, Artificial Sequence
  Description of Artificial Sequence: Synthetic oligonucleotide
cucuguuuuguacuugggu

SEQ ID NO: 1904878 - RNA, 19 nt, Artificial Sequence
  Description of Artificial Sequence: Synthetic oligonucleotide
auacuccaggacauccuug

SEQ ID NO: 1904879 - RNA, 19 nt, Artificial Sequence
  Description of Artificial Sequence: Synthetic oligonucleotide
aucccuuaggcaagcugag

SEQ ID NO: 1904880 - RNA, 19 nt, Artificial Sequence
  Description of Artificial Sequence: Synthetic oligonucleotide
ggaauaaccaauccugcuu

SEQ ID NO: 1904881 - RNA, 19 nt, Artificial Sequence
  Description of Artificial Sequence: Synthetic oligonucleotide
ugaaccacuugggcuggcu

SEQ ID NO: 1904882 - RNA, 19 nt, Artificial Sequence
  Description of Artificial Sequence: Synthetic oligonucleotide
acgaggaaggggucugaaa

SEQ ID NO: 1904883 - RNA, 19 nt, Artificial Sequence
  Description of Artificial Sequence: Synthetic oligonucleotide
gauuuuggagccccaucau

SEQ ID NO: 1904884 - RNA, 19 nt, Artificial Sequence
  Description of Artificial Sequence: Synthetic oligonucleotide
ucagccggccaaaccgauc

SEQ ID NO: 1904885 - RNA, 19 nt, Artificial Sequence
  Description of Artificial Sequence: Synthetic oligonucleotide
agguaugaagccggucaug

SEQ ID NO: 1904886 - RNA, 19 nt, Artificial Sequence
  Description of Artificial Sequence: Synthetic oligonucleotide
aggggucugaaacggcuuu

SEQ ID NO: 1904887 - RNA, 19 nt, Artificial Sequence
  Description of Artificial Sequence: Synthetic oligonucleotide
cuggguacuccucaguagu

SEQ ID NO: 1904888 - RNA, 19 nt, Artificial Sequence
  Description of Artificial Sequence: Synthetic oligonucleotide
cauguccggaaaacaaugu

SEQ ID NO: 1904889 - RNA, 19 nt, Artificial Sequence
  Description of Artificial Sequence: Synthetic oligonucleotide
gaccaggaaucaucaacgu

SEQ ID NO: 1904890 - RNA, 19 nt, Artificial Sequence
  Description of Artificial Sequence: Synthetic oligonucleotide
auggguucaccaagugucu

SEQ ID NO: 1904891 - RNA, 19 nt, Artificial Sequence
  Description of Artificial Sequence: Synthetic oligonucleotide
ugcuuaggaggugcccaug

SEQ ID NO: 1904892 - RNA, 19 nt, Artificial Sequence
  Description of Artificial Sequence: Synthetic oligonucleotide
gaacuacagcugggaauug

SEQ ID NO: 1904893 - RNA, 19 nt, Artificial Sequence
  Description of Artificial Sequence: Synthetic oligonucleotide
caucagccggccaaaccga

SEQ ID NO: 1904894 - RNA, 19 nt, Artificial Sequence
  Description of Artificial Sequence: Synthetic oligonucleotide
agcggacagucuuguauuu

SEQ ID NO: 1904895 - RNA, 19 nt, Artificial Sequence
  Description of Artificial Sequence: Synthetic oligonucleotide
ggacagucuuguauuugag

SEQ ID NO: 1904896 - RNA, 19 nt, Artificial Sequence
  Description of Artificial Sequence: Synthetic oligonucleotide
ucaaucccuuaggcaagcu

SEQ ID NO: 1904897 - RNA, 19 nt, Artificial Sequence
  Description of Artificial Sequence: Synthetic oligonucleotide
ccugcccauacaucagccg

SEQ ID NO: 1904898 - RNA, 19 nt, Artificial Sequence
  Description of Artificial Sequence: Synthetic oligonucleotide
uacuuggguucacgaggaa

SEQ ID NO: 1904899 - RNA, 19 nt, Artificial Sequence
  Description of Artificial Sequence: Synthetic oligonucleotide
gggaauugagucaccagaa

SEQ ID NO: 1904900 - RNA, 19 nt, Artificial Sequence
  Description of Artificial Sequence: Synthetic oligonucleotide
augaaccacuugggcuggc

SEQ ID NO: 1904901 - RNA, 19 nt, Artificial Sequence
  Description of Artificial Sequence: Synthetic oligonucleotide
gguucaccaagugucuuuc

SEQ ID NO: 1904902 - RNA, 19 nt, Artificial Sequence
  Description of Artificial Sequence: Synthetic oligonucleotide
ccuuccuuugagagggaug

SEQ ID NO: 1904903 - RNA, 19 nt, Artificial Sequence
  Description of Artificial Sequence: Synthetic oligonucleotide
ccggucauggucugaguug

SEQ ID NO: 1904904 - RNA, 19 nt, Artificial Sequence
  Description of Artificial Sequence: Synthetic oligonucleotide
ggccaaagucugccgagug

SEQ ID NO: 1904905 - RNA, 19 nt, Artificial Sequence
  Description of Artificial Sequence: Synthetic oligonucleotide
ugggcacgucuuccugccc

SEQ ID NO: 1904906 - RNA, 19 nt, Artificial Sequence
  Description of Artificial Sequence: Synthetic oligonucleotide
gggaauaaccaauccugcu

SEQ ID NO: 1904907 - RNA, 19 nt, Artificial Sequence
  Description of Artificial Sequence: Synthetic oligonucleotide
gucuuucaaacaccacaua

SEQ ID NO: 1904908 - RNA, 19 nt, Artificial Sequence
  Description of Artificial Sequence: Synthetic oligonucleotide
ggaacuacagcugggaauu

SEQ ID NO: 1904909 - RNA, 19 nt, Artificial Sequence
  Description of Artificial Sequence: Synthetic oligonucleotide
cugccgagaccaccauccc

SEQ ID NO: 1904910 - RNA, 19 nt, Artificial Sequence
  Description of Artificial Sequence: Synthetic oligonucleotide
cuggaacuacagcugggaa

SEQ ID NO: 1904911 - RNA, 19 nt, Artificial Sequence
  Description of Artificial Sequence: Synthetic oligonucleotide
ugccgagugugcaggcgua

SEQ ID NO: 1904912 - RNA, 19 nt, Artificial Sequence
  Description of Artificial Sequence: Synthetic oligonucleotide
cauacaucagccggccaaa

SEQ ID NO: 1904913 - RNA, 19 nt, Artificial Sequence
  Description of Artificial Sequence: Synthetic oligonucleotide
cgaucauagauggccaaag

SEQ ID NO: 1904914 - RNA, 19 nt, Artificial Sequence
  Description of Artificial Sequence: Synthetic oligonucleotide
acggugaccuggccauaca

SEQ ID NO: 1904915 - RNA, 19 nt, Artificial Sequence
  Description of Artificial Sequence: Synthetic oligonucleotide
caccagaaugggcugccga

SEQ ID NO: 1904916 - RNA, 19 nt, Artificial Sequence
  Description of Artificial Sequence: Synthetic oligonucleotide
ccaauccugcuuuccuggc

SEQ ID NO: 1904917 - RNA, 19 nt, Artificial Sequence
  Description of Artificial Sequence: Synthetic oligonucleotide
agacaaagaugagcuucaa

SEQ ID NO: 1904918 - RNA, 19 nt, Artificial Sequence
  Description of Artificial Sequence: Synthetic oligonucleotide
gaggaccaggaaucaucaa

SEQ ID NO: 1904919 - RNA, 19 nt, Artificial Sequence
  Description of Artificial Sequence: Synthetic oligonucleotide
gccauacaaguugcucugg

SEQ ID NO: 1904920 - RNA, 19 nt, Artificial Sequence
  Description of Artificial Sequence: Synthetic oligonucleotide
gggucugaaacggcuuuug

SEQ ID NO: 1904921 - RNA, 19 nt, Artificial Sequence
  Description of Artificial Sequence: Synthetic oligonucleotide
ccagauguauaggacgcuc

SEQ ID NO: 1904922 - RNA, 19 nt, Artificial Sequence
  Description of Artificial Sequence: Synthetic oligonucleotide
cuucagcgaagucuuuugu

SEQ ID NO: 1904923 - RNA, 19 nt, Artificial Sequence
  Description of Artificial Sequence: Synthetic oligonucleotide
ccauacaucagccggccaa

SEQ ID NO: 1904924 - RNA, 19 nt, Artificial Sequence
  Description of Artificial Sequence: Synthetic oligonucleotide
gaacgaacaugaaccacuu

SEQ ID NO: 1904925 - RNA, 19 nt, Artificial Sequence
  Description of Artificial Sequence: Synthetic oligonucleotide
accaagguaugaagccggu

SEQ ID NO: 1904926 - RNA, 19 nt, Artificial Sequence
  Description of Artificial Sequence: Synthetic oligonucleotide
uggguucaccaagugucuu

SEQ ID NO: 1904927 - RNA, 19 nt, Artificial Sequence
  Description of Artificial Sequence: Synthetic oligonucleotide
cgagugugcaggcguacgg

SEQ ID NO: 1904928 - RNA, 19 nt, Artificial Sequence
  Description of Artificial Sequence: Synthetic oligonucleotide
guaugaagccggucauggu

SEQ ID NO: 1904929 - RNA, 19 nt, Artificial Sequence
  Description of Artificial Sequence: Synthetic oligonucleotide
guauaggacgcuccagcuu

SEQ ID NO: 1904930 - RNA, 19 nt, Artificial Sequence
  Description of Artificial Sequence: Synthetic oligonucleotide
ggguucacgaggaaggggu

SEQ ID NO: 1904931 - RNA, 19 nt, Artificial Sequence
  Description of Artificial Sequence: Synthetic oligonucleotide
cgagcaucaccuucaggug

SEQ ID NO: 1904932 - RNA, 19 nt, Artificial Sequence
  Description of Artificial Sequence: Synthetic oligonucleotide
ugaggcuuaugggccucuc

SEQ ID NO: 1904933 - RNA, 19 nt, Artificial Sequence
  Description of Artificial Sequence: Synthetic oligonucleotide
ggaaggggucugaaacggc

SEQ ID NO: 1904934 - RNA, 19 nt, Artificial Sequence
  Description of Artificial Sequence: Synthetic oligonucleotide
ggggcacaaucuuggcaug

SEQ ID NO: 1904935 - RNA, 19 nt, Artificial Sequence
  Description of Artificial Sequence: Synthetic oligonucleotide
agcucccauauggguucac

SEQ ID NO: 1904936 - RNA, 19 nt, Artificial Sequence
  Description of Artificial Sequence: Synthetic oligonucleotide
ggaauugagucaccagaau

SEQ ID NO: 1904937 - RNA, 19 nt, Artificial Sequence
  Description of Artificial Sequence: Synthetic oligonucleotide
caggcuccuuaggagucac

SEQ ID NO: 1904938 - RNA, 19 nt, Artificial Sequence
  Description of Artificial Sequence: Synthetic oligonucleotide
gagugugcaggcguacggu

SEQ ID NO: 1904939 - RNA, 19 nt, Artificial Sequence
  Description of Artificial Sequence: Synthetic oligonucleotide
caccaggccugaagaacga

SEQ ID NO: 1904940 - RNA, 19 nt, Artificial Sequence
  Description of Artificial Sequence: Synthetic oligonucleotide
uaggacgcuccagcuuuuc

SEQ ID NO: 1904941 - RNA, 19 nt, Artificial Sequence
  Description of Artificial Sequence: Synthetic oligonucleotide
ccauggguucagcugagga

SEQ ID NO: 1904942 - RNA, 19 nt, Artificial Sequence
  Description of Artificial Sequence: Synthetic oligonucleotide
uccagcggacagucuugua

SEQ ID NO: 1904943 - RNA, 19 nt, Artificial Sequence
  Description of Artificial Sequence: Synthetic oligonucleotide
ggccucuccuuuuaucucu

SEQ ID NO: 1904944 - RNA, 19 nt, Artificial Sequence
  Description of Artificial Sequence: Synthetic oligonucleotide
gacauucgagcaucaccuu

SEQ ID NO: 1904945 - RNA, 19 nt, Artificial Sequence
  Description of Artificial Sequence: Synthetic oligonucleotide
gcguacggugaccuggcca

SEQ ID NO: 1904946 - RNA, 19 nt, Artificial Sequence
  Description of Artificial Sequence: Synthetic oligonucleotide
ggagucacucaaucccuua

SEQ ID NO: 1904947 - RNA, 19 nt, Artificial Sequence
  Description of Artificial Sequence: Synthetic oligonucleotide
cuuaggcaagcugaggcuu

SEQ ID NO: 1904948 - RNA, 19 nt, Artificial Sequence
  Description of Artificial Sequence: Synthetic oligonucleotide
guucacgaggaaggggucu

SEQ ID NO: 1904949 - RNA, 19 nt, Artificial Sequence
  Description of Artificial Sequence: Synthetic oligonucleotide
cggacagucuuguauuuga

SEQ ID NO: 1904950 - RNA, 19 nt, Artificial Sequence
  Description of Artificial Sequence: Synthetic oligonucleotide
gggccucuccuuuuaucuc

SEQ ID NO: 1904951 - RNA, 19 nt, Artificial Sequence
  Description of Artificial Sequence: Synthetic oligonucleotide
gaagccggucauggucuga

SEQ ID NO: 1904952 - RNA, 19 nt, Artificial Sequence
  Description of Artificial Sequence: Synthetic oligonucleotide
gcuuuccuggcauguucca

SEQ ID NO: 1904953 - RNA, 19 nt, Artificial Sequence
  Description of Artificial Sequence: Synthetic oligonucleotide
gcccauacaucagccggcc

SEQ ID NO: 1904954 - RNA, 19 nt, Artificial Sequence
  Description of Artificial Sequence: Synthetic oligonucleotide
gcggacagucuuguauuug

SEQ ID NO: 1904955 - RNA, 19 nt, Artificial Sequence
  Description of Artificial Sequence: Synthetic oligonucleotide
gagccccaucaucugggua

SEQ ID NO: 1904956 - RNA, 19 nt, Artificial Sequence
  Description of Artificial Sequence: Synthetic oligonucleotide
ggucugaaacggcuuuugu

SEQ ID NO: 1904957 - RNA, 19 nt, Artificial Sequence
  Description of Artificial Sequence: Synthetic oligonucleotide
caggaaucaucaacgucuu

SEQ ID NO: 1904958 - RNA, 19 nt, Artificial Sequence
  Description of Artificial Sequence: Synthetic oligonucleotide
cuuaugggccucuccuuuu

SEQ ID NO: 1904959 - RNA, 19 nt, Artificial Sequence
  Description of Artificial Sequence: Synthetic oligonucleotide
caaucuuggcaugcauucu

SEQ ID NO: 1904960 - RNA, 19 nt, Artificial Sequence
  Description of Artificial Sequence: Synthetic oligonucleotide
cagcgaagucuuuuguuuu

SEQ ID NO: 1904961 - RNA, 19 nt, Artificial Sequence
  Description of Artificial Sequence: Synthetic oligonucleotide
cuguacaggccagauguau

SEQ ID NO: 1904962 - RNA, 19 nt, Artificial Sequence
  Description of Artificial Sequence: Synthetic oligonucleotide
cugugaugccacauucuuu

SEQ ID NO: 1904963 - RNA, 19 nt, Artificial Sequence
  Description of Artificial Sequence: Synthetic oligonucleotide
aggcaagcugaggcuuaug

SEQ ID NO: 1904964 - RNA, 19 nt, Artificial Sequence
  Description of Artificial Sequence: Synthetic oligonucleotide
gcaggacaagccccgaggu

SEQ ID NO: 1904965 - RNA, 19 nt, Artificial Sequence
  Description of Artificial Sequence: Synthetic oligonucleotide
ccgagugugcaggcguacg

SEQ ID NO: 1904966 - RNA, 19 nt, Artificial Sequence
  Description of Artificial Sequence: Synthetic oligonucleotide
gcuccagcggacagucuug

SEQ ID NO: 1904967 - RNA, 19 nt, Artificial Sequence
  Description of Artificial Sequence: Synthetic oligonucleotide
aucagccggccaaaccgau

SEQ ID NO: 1904968 - RNA, 19 nt, Artificial Sequence
  Description of Artificial Sequence: Synthetic oligonucleotide
ccuuagcuucuucagcgaa

SEQ ID NO: 1904969 - RNA, 19 nt, Artificial Sequence
  Description of Artificial Sequence: Synthetic oligonucleotide
caucuggguacuccucagu

SEQ ID NO: 1904970 - RNA, 19 nt, Artificial Sequence
  Description of Artificial Sequence: Synthetic oligonucleotide
cugccgagugugcaggcgu

SEQ ID NO: 1904971 - RNA, 19 nt, Artificial Sequence
  Description of Artificial Sequence: Synthetic oligonucleotide
gguucacgaggaagggguc

SEQ ID NO: 1904972 - RNA, 19 nt, Artificial Sequence
  Description of Artificial Sequence: Synthetic oligonucleotide
ccauauggguucaccaagu

SEQ ID NO: 1904973 - RNA, 19 nt, Artificial Sequence
  Description of Artificial Sequence: Synthetic oligonucleotide
ggaugacauucgagcauca

SEQ ID NO: 1904974 - RNA, 19 nt, Artificial Sequence
  Description of Artificial Sequence: Synthetic oligonucleotide
ccggaaaacaauguucagu

SEQ ID NO: 1904975 - RNA, 19 nt, Artificial Sequence
  Description of Artificial Sequence: Synthetic oligonucleotide
gccaaagucugccgagugu

SEQ ID NO: 1904976 - RNA, 19 nt, Artificial Sequence
  Description of Artificial Sequence: Synthetic oligonucleotide
gcuuaugggccucuccuuu

SEQ ID NO: 1904977 - RNA, 19 nt, Artificial Sequence
  Description of Artificial Sequence: Synthetic oligonucleotide
gcgaagucuuuuguuuuaa

SEQ ID NO: 1904978 - RNA, 19 nt, Artificial Sequence
  Description of Artificial Sequence: Synthetic oligonucleotide
ccuggcuaagcaggacaag

SEQ ID NO: 1904979 - RNA, 19 nt, Artificial Sequence
  Description of Artificial Sequence: Synthetic oligonucleotide
agccggccaaaccgaucau

SEQ ID NO: 1904980 - RNA, 19 nt, Artificial Sequence
  Description of Artificial Sequence: Synthetic oligonucleotide
ccugaagaacgaacaugaa

SEQ ID NO: 1904981 - RNA, 19 nt, Artificial Sequence
  Description of Artificial Sequence: Synthetic oligonucleotide
ccuuaggcaagcugaggcu

SEQ ID NO: 1904982 - RNA, 19 nt, Artificial Sequence
  Description of Artificial Sequence: Synthetic oligonucleotide
ggcguacggugaccuggcc

SEQ ID NO: 1904983 - RNA, 19 nt, Artificial Sequence
  Description of Artificial Sequence: Synthetic oligonucleotide
ccaagguaugaagccgguc

SEQ ID NO: 1904984 - RNA, 19 nt, Artificial Sequence
  Description of Artificial Sequence: Synthetic oligonucleotide
auaggacgcuccagcuuuu

SEQ ID NO: 1904985 - RNA, 19 nt, Artificial Sequence
  Description of Artificial Sequence: Synthetic oligonucleotide
ggcaugcauucuccagcuc

SEQ ID NO: 1904986 - RNA, 19 nt, Artificial Sequence
  Description of Artificial Sequence: Synthetic oligonucleotide
ccagcggacagucuuguau

SEQ ID NO: 1904987 - RNA, 19 nt, Artificial Sequence
  Description of Artificial Sequence: Synthetic oligonucleotide
ggcugccgagaccaccauc

SEQ ID NO: 1904988 - RNA, 19 nt, Artificial Sequence
  Description of Artificial Sequence: Synthetic oligonucleotide
ggcuggcucuaaagauucc

SEQ ID NO: 1904989 - RNA, 19 nt, Artificial Sequence
  Description of Artificial Sequence: Synthetic oligonucleotide
cacuugggcuggcucuaaa

SEQ ID NO: 1904990 - RNA, 19 nt, Artificial Sequence
  Description of Artificial Sequence: Synthetic oligonucleotide
cccuggcuaagcaggacaa

SEQ ID NO: 1904991 - RNA, 19 nt, Artificial Sequence
  Description of Artificial Sequence: Synthetic oligonucleotide
cuccucccauggguucagc

SEQ ID NO: 1904992 - RNA, 19 nt, Artificial Sequence
  Description of Artificial Sequence: Synthetic oligonucleotide
cugcuuaggaggugcccau

SEQ ID NO: 1904993 - RNA, 19 nt, Artificial Sequence
  Description of Artificial Sequence: Synthetic oligonucleotide
ggguucaccaagugucuuu

SEQ ID NO: 1904994 - RNA, 19 nt, Artificial Sequence
  Description of Artificial Sequence: Synthetic oligonucleotide
ggcugccauuuuguucgcc

SEQ ID NO: 1904995 - RNA, 19 nt, Artificial Sequence
  Description of Artificial Sequence: Synthetic oligonucleotide
ggugauuuuggagccccau

SEQ ID NO: 1904996 - RNA, 19 nt, Artificial Sequence
  Description of Artificial Sequence: Synthetic oligonucleotide
ccagaaugggcugccgaga

SEQ ID NO: 1904997 - RNA, 19 nt, Artificial Sequence
  Description of Artificial Sequence: Synthetic oligonucleotide
ccagaccauguccggaaaa

SEQ ID NO: 1904998 - RNA, 19 nt, Artificial Sequence
  Description of Artificial Sequence: Synthetic oligonucleotide
cccauggguucagcugagg

SEQ ID NO: 1904999 - RNA, 19 nt, Artificial Sequence
  Description of Artificial Sequence: Synthetic oligonucleotide
guacuccucaguagucuuu

SEQ ID NO: 1905000 - RNA, 19 nt, Artificial Sequence
  Description of Artificial Sequence: Synthetic oligonucleotide
cguacggugaccuggccau

SEQ ID NO: 1905001 - RNA, 19 nt, Artificial Sequence
  Description of Artificial Sequence: Synthetic oligonucleotide
ggcuuaugggccucuccuu

SEQ ID NO: 1905002 - RNA, 19 nt, Artificial Sequence
  Description of Artificial Sequence: Synthetic oligonucleotide
ccgaucauagauggccaaa

SEQ ID NO: 1905003 - RNA, 19 nt, Artificial Sequence
  Description of Artificial Sequence: Synthetic oligonucleotide
ggagccccaucaucugggu

SEQ ID NO: 1905004 - RNA, 19 nt, Artificial Sequence
  Description of Artificial Sequence: Synthetic oligonucleotide
gccgagugugcaggcguac

SEQ ID NO: 1905005 - RNA, 19 nt, Artificial Sequence
  Description of Artificial Sequence: Synthetic oligonucleotide
cuccagcggacagucuugu

SEQ ID NO: 1905006 - RNA, 19 nt, Artificial Sequence
  Description of Artificial Sequence: Synthetic oligonucleotide
gccagauguauaggacgcu

SEQ ID NO: 1905007 - RNA, 19 nt, Artificial Sequence
  Description of Artificial Sequence: Synthetic oligonucleotide
guacggugaccuggccaua

SEQ ID NO: 1905008 - RNA, 19 nt, Artificial Sequence
  Description of Artificial Sequence: Synthetic oligonucleotide
gccggccaaaccgaucaua

SEQ ID NO: 1905009 - RNA, 19 nt, Artificial Sequence
  Description of Artificial Sequence: Synthetic oligonucleotide
ggcacgucuuccugcccau

SEQ ID NO: 1905010 - RNA, 19 nt, Artificial Sequence
  Description of Artificial Sequence: Synthetic oligonucleotide
ccaggcuccuuaggaguca

SEQ ID NO: 1905011 - RNA, 19 nt, Artificial Sequence
  Description of Artificial Sequence: Synthetic oligonucleotide
cccauacaucagccggcca

SEQ ID NO: 1905012 - RNA, 19 nt, Artificial Sequence
  Description of Artificial Sequence: Synthetic oligonucleotide
cggugaccuggccauacaa

SEQ ID NO: 1905013 - RNA, 19 nt, Artificial Sequence
  Description of Artificial Sequence: Synthetic oligonucleotide
cguacuccucccauggguu

SEQ ID NO: 1905014 - RNA, 19 nt, Artificial Sequence
  Description of Artificial Sequence: Synthetic oligonucleotide
ccgagaccaccaucccaga

SEQ ID NO: 1905015 - RNA, 19 nt, Artificial Sequence
  Description of Artificial Sequence: Synthetic oligonucleotide
cggucauggucugaguugu

SEQ ID NO: 1905016 - RNA, 19 nt, Artificial Sequence
  Description of Artificial Sequence: Synthetic oligonucleotide
ggggucugaaacggcuuuu

SEQ ID NO: 1905017 - RNA, 19 nt, Artificial Sequence
  Description of Artificial Sequence: Synthetic oligonucleotide
gcacgucuuccugcccaua

SEQ ID NO: 1905018 - RNA, 19 nt, Artificial Sequence
  Description of Artificial Sequence: Synthetic oligonucleotide
ggucauggucugaguuguu

SEQ ID NO: 1905019 - RNA, 19 nt, Artificial Sequence
  Description of Artificial Sequence: Synthetic oligonucleotide
ccacuugggcuggcucuaa

SEQ ID NO: 1905020 - RNA, 19 nt, Artificial Sequence
  Description of Artificial Sequence: Synthetic oligonucleotide
ugaagaaucggcauugucg

SEQ ID NO: 1905021 - RNA, 19 nt, Artificial Sequence
  Description of Artificial Sequence: Synthetic oligonucleotide
ugaacuguagguaauacug

SEQ ID NO: 1905022 - RNA, 19 nt, Artificial Sequence
  Description of Artificial Sequence: Synthetic oligonucleotide
aaauucugcacacaguugu

SEQ ID NO: 1905023 - RNA, 19 nt, Artificial Sequence
  Description of Artificial Sequence: Synthetic oligonucleotide
aacuguagguaauacuggg

SEQ ID NO: 1905024 - RNA, 19 nt, Artificial Sequence
  Description of Artificial Sequence: Synthetic oligonucleotide
uucugucaaaauaagagac

SEQ ID NO: 1905025 - RNA, 19 nt, Artificial Sequence
  Description of Artificial Sequence: Synthetic oligonucleotide
gaugacugaauucagauaa

SEQ ID NO: 1905026 - RNA, 19 nt, Artificial Sequence
  Description of Artificial Sequence: Synthetic oligonucleotide
ugaguuuuccugauggcgg

SEQ ID NO: 1905027 - RNA, 19 nt, Artificial Sequence
  Description of Artificial Sequence: Synthetic oligonucleotide
aauaagagacuggaaacuc

SEQ ID NO: 1905028 - RNA, 19 nt, Artificial Sequence
  Description of Artificial Sequence: Synthetic oligonucleotide
uucgaaauucugcacacag

SEQ ID NO: 1905029 - RNA, 19 nt, Artificial Sequence
  Description of Artificial Sequence: Synthetic oligonucleotide
uggacaagcgacaugcccg

SEQ ID NO: 1905030 - RNA, 19 nt, Artificial Sequence
  Description of Artificial Sequence: Synthetic oligonucleotide
uuuucucgaauucuucuag

SEQ ID NO: 1905031 - RNA, 19 nt, Artificial Sequence
  Description of Artificial Sequence: Synthetic oligonucleotide
ucuuggacaagcgacaugc

SEQ ID NO: 1905032 - RNA, 19 nt, Artificial Sequence
  Description of Artificial Sequence: Synthetic oligonucleotide
auggcgaugcuucaaggcc

SEQ ID NO: 1905033 - RNA, 19 nt, Artificial Sequence
  Description of Artificial Sequence: Synthetic oligonucleotide
augcuuguuaccauaagcc

SEQ ID NO: 1905034 - RNA, 19 nt, Artificial Sequence
  Description of Artificial Sequence: Synthetic oligonucleotide
auucuucuagccucaaugg

SEQ ID NO: 1905035 - RNA, 19 nt, Artificial Sequence
  Description of Artificial Sequence: Synthetic oligonucleotide
uguacuuucuuggacaagc

SEQ ID NO: 1905036 - RNA, 19 nt, Artificial Sequence
  Description of Artificial Sequence: Synthetic oligonucleotide
cagaucauagugcacaugc

SEQ ID NO: 1905037 - RNA, 19 nt, Artificial Sequence
  Description of Artificial Sequence: Synthetic oligonucleotide
uggucacuaagcaaagccg

SEQ ID NO: 1905038 - RNA, 19 nt, Artificial Sequence
  Description of Artificial Sequence: Synthetic oligonucleotide
ugcuggauggaccaaagca

SEQ ID NO: 1905039 - RNA, 19 nt, Artificial Sequence
  Description of Artificial Sequence: Synthetic oligonucleotide
uuugccugggcccuguuag

SEQ ID NO: 1905040 - RNA, 19 nt, Artificial Sequence
  Description of Artificial Sequence: Synthetic oligonucleotide
acuaagcaaagccguacgc

SEQ ID NO: 1905041 - RNA, 19 nt, Artificial Sequence
  Description of Artificial Sequence: Synthetic oligonucleotide
agagacuggaaacuccugg

SEQ ID NO: 1905042 - RNA, 19 nt, Artificial Sequence
  Description of Artificial Sequence: Synthetic oligonucleotide
ucuucuagccucaauggcu

SEQ ID NO: 1905043 - RNA, 19 nt, Artificial Sequence
  Description of Artificial Sequence: Synthetic oligonucleotide
gauaauuuugcugcgcuug

SEQ ID NO: 1905044 - RNA, 19 nt, Artificial Sequence
  Description of Artificial Sequence: Synthetic oligonucleotide
guuagcauuggccauagca

SEQ ID NO: 1905045 - RNA, 19 nt, Artificial Sequence
  Description of Artificial Sequence: Synthetic oligonucleotide
uggguuucugucaaaauaa

SEQ ID NO: 1905046 - RNA, 19 nt, Artificial Sequence
  Description of Artificial Sequence: Synthetic oligonucleotide
uaagcaaagccguacgcgc

SEQ ID NO: 1905047 - RNA, 19 nt, Artificial Sequence
  Description of Artificial Sequence: Synthetic oligonucleotide
uuagcuaacucccgguuga

SEQ ID NO: 1905048 - RNA, 19 nt, Artificial Sequence
  Description of Artificial Sequence: Synthetic oligonucleotide
uuugcuucgcucuauugcu

SEQ ID NO: 1905049 - RNA, 19 nt, Artificial Sequence
  Description of Artificial Sequence: Synthetic oligonucleotide
uguuuugacagguuguauc

SEQ ID NO: 1905050 - RNA, 19 nt, Artificial Sequence
  Description of Artificial Sequence: Synthetic oligonucleotide
caugcuuguuaccauaagc

SEQ ID NO: 1905051 - RNA, 19 nt, Artificial Sequence
  Description of Artificial Sequence: Synthetic oligonucleotide
uccauucuugaauugcugc

SEQ ID NO: 1905052 - RNA, 19 nt, Artificial Sequence
  Description of Artificial Sequence: Synthetic oligonucleotide
cuggucacuaagcaaagcc

SEQ ID NO: 1905053 - RNA, 19 nt, Artificial Sequence
  Description of Artificial Sequence: Synthetic oligonucleotide
ugguuuggaucccagaagu

SEQ ID NO: 1905054 - RNA, 19 nt, Artificial Sequence
  Description of Artificial Sequence: Synthetic oligonucleotide
ugcugcuucagccaagcgc

SEQ ID NO: 1905055 - RNA, 19 nt, Artificial Sequence
  Description of Artificial Sequence: Synthetic oligonucleotide
uucagauaauuuugcugcg

SEQ ID NO: 1905056 - RNA, 19 nt, Artificial Sequence
  Description of Artificial Sequence: Synthetic oligonucleotide
auaagagacuggaaacucc

SEQ ID NO: 1905057 - RNA, 19 nt, Artificial Sequence
  Description of Artificial Sequence: Synthetic oligonucleotide
ucuuccaccugguaguuca

SEQ ID NO: 1905058 - RNA, 19 nt, Artificial Sequence
  Description of Artificial Sequence: Synthetic oligonucleotide
uuugacagguuguaucuga

SEQ ID NO: 1905059 - RNA, 19 nt, Artificial Sequence
  Description of Artificial Sequence: Synthetic oligonucleotide
uagaugacugaauucagau

SEQ ID NO: 1905060 - RNA, 19 nt, Artificial Sequence
  Description of Artificial Sequence: Synthetic oligonucleotide
ugugaggucuaacuuguac

SEQ ID NO: 1905061 - RNA, 19 nt, Artificial Sequence
  Description of Artificial Sequence: Synthetic oligonucleotide
uucucgaauucuucuagcc

SEQ ID NO: 1905062 - RNA, 19 nt, Artificial Sequence
  Description of Artificial Sequence: Synthetic oligonucleotide
aauucguguccauucuuga

SEQ ID NO: 1905063 - RNA, 19 nt, Artificial Sequence
  Description of Artificial Sequence: Synthetic oligonucleotide
ucaaauucguguccauucu

SEQ ID NO: 1905064 - RNA, 19 nt, Artificial Sequence
  Description of Artificial Sequence: Synthetic oligonucleotide
uucauggcgaugcuucaag

SEQ ID NO: 1905065 - RNA, 19 nt, Artificial Sequence
  Description of Artificial Sequence: Synthetic oligonucleotide
uuggacaagcgacaugccc

SEQ ID NO: 1905066 - RNA, 19 nt, Artificial Sequence
  Description of Artificial Sequence: Synthetic oligonucleotide
uucuucuagccucaauggc

SEQ ID NO: 1905067 - RNA, 19 nt, Artificial Sequence
  Description of Artificial Sequence: Synthetic oligonucleotide
accauaagccauuucuuug

SEQ ID NO: 1905068 - RNA, 19 nt, Artificial Sequence
  Description of Artificial Sequence: Synthetic oligonucleotide
uggauggaccaaagcaugg

SEQ ID NO: 1905069 - RNA, 19 nt, Artificial Sequence
  Description of Artificial Sequence: Synthetic oligonucleotide
aauccuguacuuucuugga

SEQ ID NO: 1905070 - RNA, 19 nt, Artificial Sequence
  Description of Artificial Sequence: Synthetic oligonucleotide
auagcaguccucauggcgg

SEQ ID NO: 1905071 - RNA, 19 nt, Artificial Sequence
  Description of Artificial Sequence: Synthetic oligonucleotide
aaauucguguccauucuug

SEQ ID NO: 1905072 - RNA, 19 nt, Artificial Sequence
  Description of Artificial Sequence: Synthetic oligonucleotide
agaaucggcauugucguuc

SEQ ID NO: 1905073 - RNA, 19 nt, Artificial Sequence
  Description of Artificial Sequence: Synthetic oligonucleotide
cuaagcaaagccguacgcg

SEQ ID NO: 1905074 - RNA, 19 nt, Artificial Sequence
  Description of Artificial Sequence: Synthetic oligonucleotide
ugcuuguuaccauaagcca

SEQ ID NO: 1905075 - RNA, 19 nt, Artificial Sequence
  Description of Artificial Sequence: Synthetic oligonucleotide
gaacuguagguaauacugg

SEQ ID NO: 1905076 - RNA, 19 nt, Artificial Sequence
  Description of Artificial Sequence: Synthetic oligonucleotide
ugcuuauuugccugggccc

SEQ ID NO: 1905077 - RNA, 19 nt, Artificial Sequence
  Description of Artificial Sequence: Synthetic oligonucleotide
accacccugaguucaacgg

SEQ ID NO: 1905078 - RNA, 19 nt, Artificial Sequence
  Description of Artificial Sequence: Synthetic oligonucleotide
uugaauugcugccuuugcu

SEQ ID NO: 1905079 - RNA, 19 nt, Artificial Sequence
  Description of Artificial Sequence: Synthetic oligonucleotide
uugaacuguagguaauacu

SEQ ID NO: 1905080 - RNA, 19 nt, Artificial Sequence
  Description of Artificial Sequence: Synthetic oligonucleotide
gucaaaauaagagacugga

SEQ ID NO: 1905081 - RNA, 19 nt, Artificial Sequence
  Description of Artificial Sequence: Synthetic oligonucleotide
ucuucgaaauucugcacac

SEQ ID NO: 1905082 - RNA, 19 nt, Artificial Sequence
  Description of Artificial Sequence: Synthetic oligonucleotide
auucgcaggcaugaggccc

SEQ ID NO: 1905083 - RNA, 19 nt, Artificial Sequence
  Description of Artificial Sequence: Synthetic oligonucleotide
uaccagaucauagugcaca

SEQ ID NO: 1905084 - RNA, 19 nt, Artificial Sequence
  Description of Artificial Sequence: Synthetic oligonucleotide
uucguguccauucuugaau

SEQ ID NO: 1905085 - RNA, 19 nt, Artificial Sequence
  Description of Artificial Sequence: Synthetic oligonucleotide
aauagggcaggacccggug

SEQ ID NO: 1905086 - RNA, 19 nt, Artificial Sequence
  Description of Artificial Sequence: Synthetic oligonucleotide
aggacuuuucugcucugcg

SEQ ID NO: 1905087 - RNA, 19 nt, Artificial Sequence
  Description of Artificial Sequence: Synthetic oligonucleotide
uagaucacuggugauuugc

SEQ ID NO: 1905088 - RNA, 19 nt, Artificial Sequence
  Description of Artificial Sequence: Synthetic oligonucleotide
aagggagaugaccacccug

SEQ ID NO: 1905089 - RNA, 19 nt, Artificial Sequence
  Description of Artificial Sequence: Synthetic oligonucleotide
cugcuuauuugccugggcc

SEQ ID NO: 1905090 - RNA, 19 nt, Artificial Sequence
  Description of Artificial Sequence: Synthetic oligonucleotide
agugcacaugcuuguuacc

SEQ ID NO: 1905091 - RNA, 19 nt, Artificial Sequence
  Description of Artificial Sequence: Synthetic oligonucleotide
auccuguacuuucuuggac

SEQ ID NO: 1905092 - RNA, 19 nt, Artificial Sequence
  Description of Artificial Sequence: Synthetic oligonucleotide
uugacagguuguaucugag

SEQ ID NO: 1905093 - RNA, 19 nt, Artificial Sequence
  Description of Artificial Sequence: Synthetic oligonucleotide
aagcaaagccguacgcgcc

SEQ ID NO: 1905094 - RNA, 19 nt, Artificial Sequence
  Description of Artificial Sequence: Synthetic oligonucleotide
caugacucgguuccgcacg

SEQ ID NO: 1905095 - RNA, 19 nt, Artificial Sequence
  Description of Artificial Sequence: Synthetic oligonucleotide
uugucguuguguuucuuga

SEQ ID NO: 1905096 - RNA, 19 nt, Artificial Sequence
  Description of Artificial Sequence: Synthetic oligonucleotide
uuuuccugauggcggcucg

SEQ ID NO: 1905097 - RNA, 19 nt, Artificial Sequence
  Description of Artificial Sequence: Synthetic oligonucleotide
uagugcacaugcuuguuac

SEQ ID NO: 1905098 - RNA, 19 nt, Artificial Sequence
  Description of Artificial Sequence: Synthetic oligonucleotide
gaagaaucggcauugucgu

SEQ ID NO: 1905099 - RNA, 19 nt, Artificial Sequence
  Description of Artificial Sequence: Synthetic oligonucleotide
uucucuagcaucugggcua

SEQ ID NO: 1905100 - RNA, 19 nt, Artificial Sequence
  Description of Artificial Sequence: Synthetic oligonucleotide
acagguuguaucugaguug

SEQ ID NO: 1905101 - RNA, 19 nt, Artificial Sequence
  Description of Artificial Sequence: Synthetic oligonucleotide
aacuccuggaggugguuug

SEQ ID NO: 1905102 - RNA, 19 nt, Artificial Sequence
  Description of Artificial Sequence: Synthetic oligonucleotide
uacuuucuuggacaagcga

SEQ ID NO: 1905103 - RNA, 19 nt, Artificial Sequence
  Description of Artificial Sequence: Synthetic oligonucleotide
ucauggcgaugcuucaagg

SEQ ID NO: 1905104 - RNA, 19 nt, Artificial Sequence
  Description of Artificial Sequence: Synthetic oligonucleotide
agcgacaugcccguucugc

SEQ ID NO: 1905105 - RNA, 19 nt, Artificial Sequence
  Description of Artificial Sequence: Synthetic oligonucleotide
gagaugaccacccugaguu

SEQ ID NO: 1905106 - RNA, 19 nt, Artificial Sequence
  Description of Artificial Sequence: Synthetic oligonucleotide
guguagaugacugaauuca

SEQ ID NO: 1905107 - RNA, 19 nt, Artificial Sequence
  Description of Artificial Sequence: Synthetic oligonucleotide
cuucuagccucaauggcug

SEQ ID NO: 1905108 - RNA, 19 nt, Artificial Sequence
  Description of Artificial Sequence: Synthetic oligonucleotide
cauggcgaugcuucaaggc

SEQ ID NO: 1905109 - RNA, 19 nt, Artificial Sequence
  Description of Artificial Sequence: Synthetic oligonucleotide
uucugcucugcgcuguucc

SEQ ID NO: 1905110 - RNA, 19 nt, Artificial Sequence
  Description of Artificial Sequence: Synthetic oligonucleotide
ucuugaauugcugccuuug

SEQ ID NO: 1905111 - RNA, 19 nt, Artificial Sequence
  Description of Artificial Sequence: Synthetic oligonucleotide
acaagcgacaugcccguuc

SEQ ID NO: 1905112 - RNA, 19 nt, Artificial Sequence
  Description of Artificial Sequence: Synthetic oligonucleotide
ugguguagaugacugaauu

SEQ ID NO: 1905113 - RNA, 19 nt, Artificial Sequence
  Description of Artificial Sequence: Synthetic oligonucleotide
uucgcucuauugcuucccg

SEQ ID NO: 1905114 - RNA, 19 nt, Artificial Sequence
  Description of Artificial Sequence: Synthetic oligonucleotide
cacuaagcaaagccguacg

SEQ ID NO: 1905115 - RNA, 19 nt, Artificial Sequence
  Description of Artificial Sequence: Synthetic oligonucleotide
uuccgcacguugaagaauc

SEQ ID NO: 1905116 - RNA, 19 nt, Artificial Sequence
  Description of Artificial Sequence: Synthetic oligonucleotide
ggugaggagcuugagagcg

SEQ ID NO: 1905117 - RNA, 19 nt, Artificial Sequence
  Description of Artificial Sequence: Synthetic oligonucleotide
uugucguuccuuuucucga

SEQ ID NO: 1905118 - RNA, 19 nt, Artificial Sequence
  Description of Artificial Sequence: Synthetic oligonucleotide
cuugaguuuuccugauggc

SEQ ID NO: 1905119 - RNA, 19 nt, Artificial Sequence
  Description of Artificial Sequence: Synthetic oligonucleotide
cuugucguuguguuucuug

SEQ ID NO: 1905120 - RNA, 19 nt, Artificial Sequence
  Description of Artificial Sequence: Synthetic oligonucleotide
ucagauaauuuugcugcgc

SEQ ID NO: 1905121 - RNA, 19 nt, Artificial Sequence
  Description of Artificial Sequence: Synthetic oligonucleotide
auaauuuugcugcgcuugu

SEQ ID NO: 1905122 - RNA, 19 nt, Artificial Sequence
  Description of Artificial Sequence: Synthetic oligonucleotide
cuugaauugcugccuuugc

SEQ ID NO: 1905123 - RNA, 19 nt, Artificial Sequence
  Description of Artificial Sequence: Synthetic oligonucleotide
aucccagaagucaaauucg

SEQ ID NO: 1905124 - RNA, 19 nt, Artificial Sequence
  Description of Artificial Sequence: Synthetic oligonucleotide
ugggcuaccagaucauagu

SEQ ID NO: 1905125 - RNA, 19 nt, Artificial Sequence
  Description of Artificial Sequence: Synthetic oligonucleotide
cagcaauagggcaggaccc

SEQ ID NO: 1905126 - RNA, 19 nt, Artificial Sequence
  Description of Artificial Sequence: Synthetic oligonucleotide
ugaggauucucugucagua

SEQ ID NO: 1905127 - RNA, 19 nt, Artificial Sequence
  Description of Artificial Sequence: Synthetic oligonucleotide
cuuagcuaacucccgguug

SEQ ID NO: 1905128 - RNA, 19 nt, Artificial Sequence
  Description of Artificial Sequence: Synthetic oligonucleotide
ucgaaauucugcacacagu

SEQ ID NO: 1905129 - RNA, 19 nt, Artificial Sequence
  Description of Artificial Sequence: Synthetic oligonucleotide
gugaggucuaacuuguaca

SEQ ID NO: 1905130 - RNA, 19 nt, Artificial Sequence
  Description of Artificial Sequence: Synthetic oligonucleotide
gaaucggcauugucguucc

SEQ ID NO: 1905131 - RNA, 19 nt, Artificial Sequence
  Description of Artificial Sequence: Synthetic oligonucleotide
ugguuuggcauccccacuc

SEQ ID NO: 1905132 - RNA, 19 nt, Artificial Sequence
  Description of Artificial Sequence: Synthetic oligonucleotide
uuggccauagcaguccuca

SEQ ID NO: 1905133 - RNA, 19 nt, Artificial Sequence
  Description of Artificial Sequence: Synthetic oligonucleotide
augcuggauggaccaaagc

SEQ ID NO: 1905134 - RNA, 19 nt, Artificial Sequence
  Description of Artificial Sequence: Synthetic oligonucleotide
gaguuuuccugauggcggc

SEQ ID NO: 1905135 - RNA, 19 nt, Artificial Sequence
  Description of Artificial Sequence: Synthetic oligonucleotide
gaagucaaauucgugucca

SEQ ID NO: 1905136 - RNA, 19 nt, Artificial Sequence
  Description of Artificial Sequence: Synthetic oligonucleotide
gugguuuggaucccagaag

SEQ ID NO: 1905137 - RNA, 19 nt, Artificial Sequence
  Description of Artificial Sequence: Synthetic oligonucleotide
uaauacugggcaguaggcu

SEQ ID NO: 1905138 - RNA, 19 nt, Artificial Sequence
  Description of Artificial Sequence: Synthetic oligonucleotide
ugcagucaugcccuuccag

SEQ ID NO: 1905139 - RNA, 19 nt, Artificial Sequence
  Description of Artificial Sequence: Synthetic oligonucleotide
uuguaucugaguugcuccu

SEQ ID NO: 1905140 - RNA, 19 nt, Artificial Sequence
  Description of Artificial Sequence: Synthetic oligonucleotide
cugggcuaccagaucauag

SEQ ID NO: 1905141 - RNA, 19 nt, Artificial Sequence
  Description of Artificial Sequence: Synthetic oligonucleotide
uaccauaagccauuucuuu

SEQ ID NO: 1905142 - RNA, 19 nt, Artificial Sequence
  Description of Artificial Sequence: Synthetic oligonucleotide
agcucguguguccacagcu

SEQ ID NO: 1905143 - RNA, 19 nt, Artificial Sequence
  Description of Artificial Sequence: Synthetic oligonucleotide
guaauacugggcaguaggc

SEQ ID NO: 1905144 - RNA, 19 nt, Artificial Sequence
  Description of Artificial Sequence: Synthetic oligonucleotide
gaccacccugaguucaacg

SEQ ID NO: 1905145 - RNA, 19 nt, Artificial Sequence
  Description of Artificial Sequence: Synthetic oligonucleotide
uggaccaaagcauggguuu

SEQ ID NO: 1905146 - RNA, 19 nt, Artificial Sequence
  Description of Artificial Sequence: Synthetic oligonucleotide
ucacuaagcaaagccguac

SEQ ID NO: 1905147 - RNA, 19 nt, Artificial Sequence
  Description of Artificial Sequence: Synthetic oligonucleotide
acuaggacuccuccagucu

SEQ ID NO: 1905148 - RNA, 19 nt, Artificial Sequence
  Description of Artificial Sequence: Synthetic oligonucleotide
uggcgaugcuucaaggccu

SEQ ID NO: 1905149 - RNA, 19 nt, Artificial Sequence
  Description of Artificial Sequence: Synthetic oligonucleotide
cucuucgaaauucugcaca

SEQ ID NO: 1905150 - RNA, 19 nt, Artificial Sequence
  Description of Artificial Sequence: Synthetic oligonucleotide
aguagaucacuggugauuu

SEQ ID NO: 1905151 - RNA, 19 nt, Artificial Sequence
  Description of Artificial Sequence: Synthetic oligonucleotide
aguucaacggcugcuggug

SEQ ID NO: 1905152 - RNA, 19 nt, Artificial Sequence
  Description of Artificial Sequence: Synthetic oligonucleotide
caugcuggauggaccaaag

SEQ ID NO: 1905153 - RNA, 19 nt, Artificial Sequence
  Description of Artificial Sequence: Synthetic oligonucleotide
cuaggacuccuccagucug

SEQ ID NO: 1905154 - RNA, 19 nt, Artificial Sequence
  Description of Artificial Sequence: Synthetic oligonucleotide
ccggugaggagcuugagag

SEQ ID NO: 1905155 - RNA, 19 nt, Artificial Sequence
  Description of Artificial Sequence: Synthetic oligonucleotide
cacacaguuguuucuccug

SEQ ID NO: 1905156 - RNA, 19 nt, Artificial Sequence
  Description of Artificial Sequence: Synthetic oligonucleotide
gacuaggacuccuccaguc

SEQ ID NO: 1905157 - RNA, 19 nt, Artificial Sequence
  Description of Artificial Sequence: Synthetic oligonucleotide
gcuaccagaucauagugca

SEQ ID NO: 1905158 - RNA, 19 nt, Artificial Sequence
  Description of Artificial Sequence: Synthetic oligonucleotide
agcaauagggcaggacccg

SEQ ID NO: 1905159 - RNA, 19 nt, Artificial Sequence
  Description of Artificial Sequence: Synthetic oligonucleotide
guacuuucuuggacaagcg

SEQ ID NO: 1905160 - RNA, 19 nt, Artificial Sequence
  Description of Artificial Sequence: Synthetic oligonucleotide
uucuuggacaagcgacaug

SEQ ID NO: 1905161 - RNA, 19 nt, Artificial Sequence
  Description of Artificial Sequence: Synthetic oligonucleotide
agcgcugggaagccugagg

SEQ ID NO: 1905162 - RNA, 19 nt, Artificial Sequence
  Description of Artificial Sequence: Synthetic oligonucleotide
aagcgccugguuuggcauc

SEQ ID NO: 1905163 - RNA, 19 nt, Artificial Sequence
  Description of Artificial Sequence: Synthetic oligonucleotide
gacucgguuccgcacguug

SEQ ID NO: 1905164 - RNA, 19 nt, Artificial Sequence
  Description of Artificial Sequence: Synthetic oligonucleotide
uccuuagcuaacucccggu

SEQ ID NO: 1905165 - RNA, 19 nt, Artificial Sequence
  Description of Artificial Sequence: Synthetic oligonucleotide
ugacagguuguaucugagu

SEQ ID NO: 1905166 - RNA, 19 nt, Artificial Sequence
  Description of Artificial Sequence: Synthetic oligonucleotide
auugcugccuuugcucccg

SEQ ID NO: 1905167 - RNA, 19 nt, Artificial Sequence
  Description of Artificial Sequence: Synthetic oligonucleotide
agaugacugaauucagaua

SEQ ID NO: 1905168 - RNA, 19 nt, Artificial Sequence
  Description of Artificial Sequence: Synthetic oligonucleotide
gacagguuguaucugaguu

SEQ ID NO: 1905169 - RNA, 19 nt, Artificial Sequence
  Description of Artificial Sequence: Synthetic oligonucleotide
uugguguagaugacugaau

SEQ ID NO: 1905170 - RNA, 19 nt, Artificial Sequence
  Description of Artificial Sequence: Synthetic oligonucleotide
uccgcacguugaagaaucg

SEQ ID NO: 1905171 - RNA, 19 nt, Artificial Sequence
  Description of Artificial Sequence: Synthetic oligonucleotide
cagcuguuuugacagguug

SEQ ID NO: 1905172 - RNA, 19 nt, Artificial Sequence
  Description of Artificial Sequence: Synthetic oligonucleotide
ugacugaauucagauaauu

SEQ ID NO: 1905173 - RNA, 19 nt, Artificial Sequence
  Description of Artificial Sequence: Synthetic oligonucleotide
cuaacucccgguugaagga

SEQ ID NO: 1905174 - RNA, 19 nt, Artificial Sequence
  Description of Artificial Sequence: Synthetic oligonucleotide
uuugcugcgcuuguugcuc

SEQ ID NO: 1905175 - RNA, 19 nt, Artificial Sequence
  Description of Artificial Sequence: Synthetic oligonucleotide
ucguguccauucuugaauu

SEQ ID NO: 1905176 - RNA, 19 nt, Artificial Sequence
  Description of Artificial Sequence: Synthetic oligonucleotide
uaacucccgguugaaggag

SEQ ID NO: 1905177 - RNA, 19 nt, Artificial Sequence
  Description of Artificial Sequence: Synthetic oligonucleotide
ugcgcuuguugcuccuuag

SEQ ID NO: 1905178 - RNA, 19 nt, Artificial Sequence
  Description of Artificial Sequence: Synthetic oligonucleotide
uucgcaggcaugaggcccu

SEQ ID NO: 1905179 - RNA, 19 nt, Artificial Sequence
  Description of Artificial Sequence: Synthetic oligonucleotide
gguguugaacuguagguaa

SEQ ID NO: 1905180 - RNA, 19 nt, Artificial Sequence
  Description of Artificial Sequence: Synthetic oligonucleotide
uguugaacuguagguaaua

SEQ ID NO: 1905181 - RNA, 19 nt, Artificial Sequence
  Description of Artificial Sequence: Synthetic oligonucleotide
auggcggcucgacuaggac

SEQ ID NO: 1905182 - RNA, 19 nt, Artificial Sequence
  Description of Artificial Sequence: Synthetic oligonucleotide
auucguguccauucuugaa

SEQ ID NO: 1905183 - RNA, 19 nt, Artificial Sequence
  Description of Artificial Sequence: Synthetic oligonucleotide
ugcugcuuuuguucauggc

SEQ ID NO: 1905184 - RNA, 19 nt, Artificial Sequence
  Description of Artificial Sequence: Synthetic oligonucleotide
guugguguagaugacugaa

SEQ ID NO: 1905185 - RNA, 19 nt, Artificial Sequence
  Description of Artificial Sequence: Synthetic oligonucleotide
uguugcuccuuagcuaacu

SEQ ID NO: 1905186 - RNA, 19 nt, Artificial Sequence
  Description of Artificial Sequence: Synthetic oligonucleotide
ccaaggaagcacugcaugc

SEQ ID NO: 1905187 - RNA, 19 nt, Artificial Sequence
  Description of Artificial Sequence: Synthetic oligonucleotide
agcgccugguuuggcaucc

SEQ ID NO: 1905188 - RNA, 19 nt, Artificial Sequence
  Description of Artificial Sequence: Synthetic oligonucleotide
ccuuugcucccgaaaaucc

SEQ ID NO: 1905189 - RNA, 19 nt, Artificial Sequence
  Description of Artificial Sequence: Synthetic oligonucleotide
cuuggacaagcgacaugcc

SEQ ID NO: 1905190 - RNA, 19 nt, Artificial Sequence
  Description of Artificial Sequence: Synthetic oligonucleotide
gacaugcccguucugccuc

SEQ ID NO: 1905191 - RNA, 19 nt, Artificial Sequence
  Description of Artificial Sequence: Synthetic oligonucleotide
agcaaagccguacgcgccu

SEQ ID NO: 1905192 - RNA, 19 nt, Artificial Sequence
  Description of Artificial Sequence: Synthetic oligonucleotide
gcugcuaucuccuuggggu

SEQ ID NO: 1905193 - RNA, 19 nt, Artificial Sequence
  Description of Artificial Sequence: Synthetic oligonucleotide
acguugaagaaucggcauu

SEQ ID NO: 1905194 - RNA, 19 nt, Artificial Sequence
  Description of Artificial Sequence: Synthetic oligonucleotide
ugcacaugcuuguuaccau

SEQ ID NO: 1905195 - RNA, 19 nt, Artificial Sequence
  Description of Artificial Sequence: Synthetic oligonucleotide
ucccgguugaaggagccca

SEQ ID NO: 1905196 - RNA, 19 nt, Artificial Sequence
  Description of Artificial Sequence: Synthetic oligonucleotide
agcuaggcgcagcugguca

SEQ ID NO: 1905197 - RNA, 19 nt, Artificial Sequence
  Description of Artificial Sequence: Synthetic oligonucleotide
cagccaagcgccugguuug

SEQ ID NO: 1905198 - RNA, 19 nt, Artificial Sequence
  Description of Artificial Sequence: Synthetic oligonucleotide
cucauggcggcucgacuag

SEQ ID NO: 1905199 - RNA, 19 nt, Artificial Sequence
  Description of Artificial Sequence: Synthetic oligonucleotide
ucggcauugucguuccuuu

SEQ ID NO: 1905200 - RNA, 19 nt, Artificial Sequence
  Description of Artificial Sequence: Synthetic oligonucleotide
guugcuccugcugcauucg

SEQ ID NO: 1905201 - RNA, 19 nt, Artificial Sequence
  Description of Artificial Sequence: Synthetic oligonucleotide
ggauggaccaaagcauggg

SEQ ID NO: 1905202 - RNA, 19 nt, Artificial Sequence
  Description of Artificial Sequence: Synthetic oligonucleotide
auagggcaggacccgguga

SEQ ID NO: 1905203 - RNA, 19 nt, Artificial Sequence
  Description of Artificial Sequence: Synthetic oligonucleotide
ucccgaaaauccuguacuu

SEQ ID NO: 1905204 - RNA, 19 nt, Artificial Sequence
  Description of Artificial Sequence: Synthetic oligonucleotide
ucgcucuauugcuucccgc

SEQ ID NO: 1905205 - RNA, 19 nt, Artificial Sequence
  Description of Artificial Sequence: Synthetic oligonucleotide
uucuagccucaauggcugc

SEQ ID NO: 1905206 - RNA, 19 nt, Artificial Sequence
  Description of Artificial Sequence: Synthetic oligonucleotide
cuaccagaucauagugcac

SEQ ID NO: 1905207 - RNA, 19 nt, Artificial Sequence
  Description of Artificial Sequence: Synthetic oligonucleotide
ggcauugucguuccuuuuc

SEQ ID NO: 1905208 - RNA, 19 nt, Artificial Sequence
  Description of Artificial Sequence: Synthetic oligonucleotide
aagaaucggcauugucguu

SEQ ID NO: 1905209 - RNA, 19 nt, Artificial Sequence
  Description of Artificial Sequence: Synthetic oligonucleotide
uccugauggcggcucgcug

SEQ ID NO: 1905210 - RNA, 19 nt, Artificial Sequence
  Description of Artificial Sequence: Synthetic oligonucleotide
cauugucguuccuuuucuc

SEQ ID NO: 1905211 - RNA, 19 nt, Artificial Sequence
  Description of Artificial Sequence: Synthetic oligonucleotide
gagagcgcugggaagccug

SEQ ID NO: 1905212 - RNA, 19 nt, Artificial Sequence
  Description of Artificial Sequence: Synthetic oligonucleotide
agccguacgcgccuccucu

SEQ ID NO: 1905213 - RNA, 19 nt, Artificial Sequence
  Description of Artificial Sequence: Synthetic oligonucleotide
cagucaugcccuuccagca

SEQ ID NO: 1905214 - RNA, 19 nt, Artificial Sequence
  Description of Artificial Sequence: Synthetic oligonucleotide
cuucgcucuauugcuuccc

SEQ ID NO: 1905215 - RNA, 19 nt, Artificial Sequence
  Description of Artificial Sequence: Synthetic oligonucleotide
guagaucacuggugauuug

SEQ ID NO: 1905216 - RNA, 19 nt, Artificial Sequence
  Description of Artificial Sequence: Synthetic oligonucleotide
ugguaguucagggcaucca

SEQ ID NO: 1905217 - RNA, 19 nt, Artificial Sequence
  Description of Artificial Sequence: Synthetic oligonucleotide
ucucuagcaucugggcuac

SEQ ID NO: 1905218 - RNA, 19 nt, Artificial Sequence
  Description of Artificial Sequence: Synthetic oligonucleotide
agucaugcccuuccagcaa

SEQ ID NO: 1905219 - RNA, 19 nt, Artificial Sequence
  Description of Artificial Sequence: Synthetic oligonucleotide
gggcuaccagaucauagug

SEQ ID NO: 1905220 - RNA, 19 nt, Artificial Sequence
  Description of Artificial Sequence: Synthetic oligonucleotide
uugagagcgcugggaagcc

SEQ ID NO: 1905221 - RNA, 19 nt, Artificial Sequence
  Description of Artificial Sequence: Synthetic oligonucleotide
aaagccguacgcgccuccu

SEQ ID NO: 1905222 - RNA, 19 nt, Artificial Sequence
  Description of Artificial Sequence: Synthetic oligonucleotide
cuguuagcauuggccauag

SEQ ID NO: 1905223 - RNA, 19 nt, Artificial Sequence
  Description of Artificial Sequence: Synthetic oligonucleotide
gucguuguguuucuugagu

SEQ ID NO: 1905224 - RNA, 19 nt, Artificial Sequence
  Description of Artificial Sequence: Synthetic oligonucleotide
gguuucugucaaaauaaga

SEQ ID NO: 1905225 - RNA, 19 nt, Artificial Sequence
  Description of Artificial Sequence: Synthetic oligonucleotide
ccugauggcggcucgcugc

SEQ ID NO: 1905226 - RNA, 19 nt, Artificial Sequence
  Description of Artificial Sequence: Synthetic oligonucleotide
cagcuuccguucuuccacc

SEQ ID NO: 1905227 - RNA, 19 nt, Artificial Sequence
  Description of Artificial Sequence: Synthetic oligonucleotide
agaucacuggugauuugcu

SEQ ID NO: 1905228 - RNA, 19 nt, Artificial Sequence
  Description of Artificial Sequence: Synthetic oligonucleotide
ggcccuguuagcauuggcc

SEQ ID NO: 1905229 - RNA, 19 nt, Artificial Sequence
  Description of Artificial Sequence: Synthetic oligonucleotide
ccguucuuccaccugguag

SEQ ID NO: 1905230 - RNA, 19 nt, Artificial Sequence
  Description of Artificial Sequence: Synthetic oligonucleotide
ucauggcggcucgacuagg

SEQ ID NO: 1905231 - RNA, 19 nt, Artificial Sequence
  Description of Artificial Sequence: Synthetic oligonucleotide
uucuugaauugcugccuuu

SEQ ID NO: 1905232 - RNA, 19 nt, Artificial Sequence
  Description of Artificial Sequence: Synthetic oligonucleotide
cucccgaaaauccuguacu

SEQ ID NO: 1905233 - RNA, 19 nt, Artificial Sequence
  Description of Artificial Sequence: Synthetic oligonucleotide
uguuagcauuggccauagc

SEQ ID NO: 1905234 - RNA, 19 nt, Artificial Sequence
  Description of Artificial Sequence: Synthetic oligonucleotide
uuguugcuccuuagcuaac

SEQ ID NO: 1905235 - RNA, 19 nt, Artificial Sequence
  Description of Artificial Sequence: Synthetic oligonucleotide
uuauuugccugggcccugu

SEQ ID NO: 1905236 - RNA, 19 nt, Artificial Sequence
  Description of Artificial Sequence: Synthetic oligonucleotide
cuuguuaccauaagccauu

SEQ ID NO: 1905237 - RNA, 19 nt, Artificial Sequence
  Description of Artificial Sequence: Synthetic oligonucleotide
ggccauagcaguccucaug

SEQ ID NO: 1905238 - RNA, 19 nt, Artificial Sequence
  Description of Artificial Sequence: Synthetic oligonucleotide
augacucgguuccgcacgu

SEQ ID NO: 1905239 - RNA, 19 nt, Artificial Sequence
  Description of Artificial Sequence: Synthetic oligonucleotide
ggagcuugagagcgcuggg

SEQ ID NO: 1905240 - RNA, 19 nt, Artificial Sequence
  Description of Artificial Sequence: Synthetic oligonucleotide
ggcuaccagaucauagugc

SEQ ID NO: 1905241 - RNA, 19 nt, Artificial Sequence
  Description of Artificial Sequence: Synthetic oligonucleotide
guagguaauacugggcagu

SEQ ID NO: 1905242 - RNA, 19 nt, Artificial Sequence
  Description of Artificial Sequence: Synthetic oligonucleotide
uacgcgccuccucuucucu

SEQ ID NO: 1905243 - RNA, 19 nt, Artificial Sequence
  Description of Artificial Sequence: Synthetic oligonucleotide
caugcccuuccagcaauag

SEQ ID NO: 1905244 - RNA, 19 nt, Artificial Sequence
  Description of Artificial Sequence: Synthetic oligonucleotide
ggguuucugucaaaauaag

SEQ ID NO: 1905245 - RNA, 19 nt, Artificial Sequence
  Description of Artificial Sequence: Synthetic oligonucleotide
gaggucuaacuuguacauc

SEQ ID NO: 1905246 - RNA, 19 nt, Artificial Sequence
  Description of Artificial Sequence: Synthetic oligonucleotide
agcuaacucccgguugaag

SEQ ID NO: 1905247 - RNA, 19 nt, Artificial Sequence
  Description of Artificial Sequence: Synthetic oligonucleotide
gaggugguuuggaucccag

SEQ ID NO: 1905248 - RNA, 19 nt, Artificial Sequence
  Description of Artificial Sequence: Synthetic oligonucleotide
uucaacggcugcugguguu

SEQ ID NO: 1905249 - RNA, 19 nt, Artificial Sequence
  Description of Artificial Sequence: Synthetic oligonucleotide
uccuggaggugguuuggau

SEQ ID NO: 1905250 - RNA, 19 nt, Artificial Sequence
  Description of Artificial Sequence: Synthetic oligonucleotide
cucgacuaggacuccucca

SEQ ID NO: 1905251 - RNA, 19 nt, Artificial Sequence
  Description of Artificial Sequence: Synthetic oligonucleotide
cugccuuugcucccgaaaa

SEQ ID NO: 1905252 - RNA, 19 nt, Artificial Sequence
  Description of Artificial Sequence: Synthetic oligonucleotide
gcuugagagcgcugggaag

SEQ ID NO: 1905253 - RNA, 19 nt, Artificial Sequence
  Description of Artificial Sequence: Synthetic oligonucleotide
guccucuccaaggaagcac

SEQ ID NO: 1905254 - RNA, 19 nt, Artificial Sequence
  Description of Artificial Sequence: Synthetic oligonucleotide
uugcuucgcucuauugcuu

SEQ ID NO: 1905255 - RNA, 19 nt, Artificial Sequence
  Description of Artificial Sequence: Synthetic oligonucleotide
agcuggucacuaagcaaag

SEQ ID NO: 1905256 - RNA, 19 nt, Artificial Sequence
  Description of Artificial Sequence: Synthetic oligonucleotide
cuuccaccugguaguucag

SEQ ID NO: 1905257 - RNA, 19 nt, Artificial Sequence
  Description of Artificial Sequence: Synthetic oligonucleotide
aagcgacaugcccguucug

SEQ ID NO: 1905258 - RNA, 19 nt, Artificial Sequence
  Description of Artificial Sequence: Synthetic oligonucleotide
ugcuucagccaagcgccug

SEQ ID NO: 1905259 - RNA, 19 nt, Artificial Sequence
  Description of Artificial Sequence: Synthetic oligonucleotide
agcccagcccucuucgaaa

SEQ ID NO: 1905260 - RNA, 19 nt, Artificial Sequence
  Description of Artificial Sequence: Synthetic oligonucleotide
cuuugcucccgaaaauccu

SEQ ID NO: 1905261 - RNA, 19 nt, Artificial Sequence
  Description of Artificial Sequence: Synthetic oligonucleotide
gcucccgaaaauccuguac

SEQ ID NO: 1905262 - RNA, 19 nt, Artificial Sequence
  Description of Artificial Sequence: Synthetic oligonucleotide
aaucggcauugucguuccu

SEQ ID NO: 1905263 - RNA, 19 nt, Artificial Sequence
  Description of Artificial Sequence: Synthetic oligonucleotide
caaagccguacgcgccucc

SEQ ID NO: 1905264 - RNA, 19 nt, Artificial Sequence
  Description of Artificial Sequence: Synthetic oligonucleotide
auuggccauagcaguccuc

SEQ ID NO: 1905265 - RNA, 19 nt, Artificial Sequence
  Description of Artificial Sequence: Synthetic oligonucleotide
ccuggaggugguuuggauc

SEQ ID NO: 1905266 - RNA, 19 nt, Artificial Sequence
  Description of Artificial Sequence: Synthetic oligonucleotide
gaguucaacggcugcuggu

SEQ ID NO: 1905267 - RNA, 19 nt, Artificial Sequence
  Description of Artificial Sequence: Synthetic oligonucleotide
cuuauuugccugggcccug

SEQ ID NO: 1905268 - RNA, 19 nt, Artificial Sequence
  Description of Artificial Sequence: Synthetic oligonucleotide
gauggcggcucgcugcucu

SEQ ID NO: 1905269 - RNA, 19 nt, Artificial Sequence
  Description of Artificial Sequence: Synthetic oligonucleotide
cuguacuuucuuggacaag

SEQ ID NO: 1905270 - RNA, 19 nt, Artificial Sequence
  Description of Artificial Sequence: Synthetic oligonucleotide
cauucuugaauugcugccu

SEQ ID NO: 1905271 - RNA, 19 nt, Artificial Sequence
  Description of Artificial Sequence: Synthetic oligonucleotide
gcgacaugcccguucugcc

SEQ ID NO: 1905272 - RNA, 19 nt, Artificial Sequence
  Description of Artificial Sequence: Synthetic oligonucleotide
gcucgacuaggacuccucc

SEQ ID NO: 1905273 - RNA, 19 nt, Artificial Sequence
  Description of Artificial Sequence: Synthetic oligonucleotide
agccaagcgccugguuugg

SEQ ID NO: 1905274 - RNA, 19 nt, Artificial Sequence
  Description of Artificial Sequence: Synthetic oligonucleotide
ccacccugaguucaacggc

SEQ ID NO: 1905275 - RNA, 19 nt, Artificial Sequence
  Description of Artificial Sequence: Synthetic oligonucleotide
agcagcucguguguccaca

SEQ ID NO: 1905276 - RNA, 19 nt, Artificial Sequence
  Description of Artificial Sequence: Synthetic oligonucleotide
gcaauagggcaggacccgg

SEQ ID NO: 1905277 - RNA, 19 nt, Artificial Sequence
  Description of Artificial Sequence: Synthetic oligonucleotide
augacugaauucagauaau

SEQ ID NO: 1905278 - RNA, 19 nt, Artificial Sequence
  Description of Artificial Sequence: Synthetic oligonucleotide
cccagaagucaaauucgug

SEQ ID NO: 1905279 - RNA, 19 nt, Artificial Sequence
  Description of Artificial Sequence: Synthetic oligonucleotide
gagcccagcccucuucgaa

SEQ ID NO: 1905280 - RNA, 19 nt, Artificial Sequence
  Description of Artificial Sequence: Synthetic oligonucleotide
cauggcggcucgacuagga

SEQ ID NO: 1905281 - RNA, 19 nt, Artificial Sequence
  Description of Artificial Sequence: Synthetic oligonucleotide
gcccucuucgaaauucugc

SEQ ID NO: 1905282 - RNA, 19 nt, Artificial Sequence
  Description of Artificial Sequence: Synthetic oligonucleotide
gcuucgcucuauugcuucc

SEQ ID NO: 1905283 - RNA, 19 nt, Artificial Sequence
  Description of Artificial Sequence: Synthetic oligonucleotide
gcacguugaagaaucggca

SEQ ID NO: 1905284 - RNA, 19 nt, Artificial Sequence
  Description of Artificial Sequence: Synthetic oligonucleotide
gcuuguugcuccuuagcua

SEQ ID NO: 1905285 - RNA, 19 nt, Artificial Sequence
  Description of Artificial Sequence: Synthetic oligonucleotide
ccucuucgaaauucugcac

SEQ ID NO: 1905286 - RNA, 19 nt, Artificial Sequence
  Description of Artificial Sequence: Synthetic oligonucleotide
ccauuucuuugcuucgcuc

SEQ ID NO: 1905287 - RNA, 19 nt, Artificial Sequence
  Description of Artificial Sequence: Synthetic oligonucleotide
cagcucguguguccacagc

SEQ ID NO: 1905288 - RNA, 19 nt, Artificial Sequence
  Description of Artificial Sequence: Synthetic oligonucleotide
ggcggcucgacuaggacuc

SEQ ID NO: 1905289 - RNA, 19 nt, Artificial Sequence
  Description of Artificial Sequence: Synthetic oligonucleotide
cuucgaaauucugcacaca

SEQ ID NO: 1905290 - RNA, 19 nt, Artificial Sequence
  Description of Artificial Sequence: Synthetic oligonucleotide
cacguugaagaaucggcau

SEQ ID NO: 1905291 - RNA, 19 nt, Artificial Sequence
  Description of Artificial Sequence: Synthetic oligonucleotide
uaucuccuuggggucuggu

SEQ ID NO: 1905292 - RNA, 19 nt, Artificial Sequence
  Description of Artificial Sequence: Synthetic oligonucleotide
ggucacuaagcaaagccgu

SEQ ID NO: 1905293 - RNA, 19 nt, Artificial Sequence
  Description of Artificial Sequence: Synthetic oligonucleotide
caagcgacaugcccguucu

SEQ ID NO: 1905294 - RNA, 19 nt, Artificial Sequence
  Description of Artificial Sequence: Synthetic oligonucleotide
caaggaagcacugcaugcu

SEQ ID NO: 1905295 - RNA, 19 nt, Artificial Sequence
  Description of Artificial Sequence: Synthetic oligonucleotide
ggugugaggucuaacuugu

SEQ ID NO: 1905296 - RNA, 19 nt, Artificial Sequence
  Description of Artificial Sequence: Synthetic oligonucleotide
gguuccgcacguugaagaa

SEQ ID NO: 1905297 - RNA, 19 nt, Artificial Sequence
  Description of Artificial Sequence: Synthetic oligonucleotide
ggcaguaggcugguuggug

SEQ ID NO: 1905298 - RNA, 19 nt, Artificial Sequence
  Description of Artificial Sequence: Synthetic oligonucleotide
acgcgccuccucuucucug

SEQ ID NO: 1905299 - RNA, 19 nt, Artificial Sequence
  Description of Artificial Sequence: Synthetic oligonucleotide
guaggcugguugguguaga

SEQ ID NO: 1905300 - RNA, 19 nt, Artificial Sequence
  Description of Artificial Sequence: Synthetic oligonucleotide
gucacuaagcaaagccgua

SEQ ID NO: 1905301 - RNA, 19 nt, Artificial Sequence
  Description of Artificial Sequence: Synthetic oligonucleotide
gcuuuuguucauggcgaug

SEQ ID NO: 1905302 - RNA, 19 nt, Artificial Sequence
  Description of Artificial Sequence: Synthetic oligonucleotide
gcgcuuguugcuccuuagc

SEQ ID NO: 1905303 - RNA, 19 nt, Artificial Sequence
  Description of Artificial Sequence: Synthetic oligonucleotide
guacgcgccuccucuucuc

SEQ ID NO: 1905304 - RNA, 19 nt, Artificial Sequence
  Description of Artificial Sequence: Synthetic oligonucleotide
cuccugcagcuguuuugac

SEQ ID NO: 1905305 - RNA, 19 nt, Artificial Sequence
  Description of Artificial Sequence: Synthetic oligonucleotide
uagcuaacucccgguugaa

SEQ ID NO: 1905306 - RNA, 19 nt, Artificial Sequence
  Description of Artificial Sequence: Synthetic oligonucleotide
gaccaaagcauggguuucu

SEQ ID NO: 1905307 - RNA, 19 nt, Artificial Sequence
  Description of Artificial Sequence: Synthetic oligonucleotide
uggccauagcaguccucau

SEQ ID NO: 1905308 - RNA, 19 nt, Artificial Sequence
  Description of Artificial Sequence: Synthetic oligonucleotide
ccaugacucgguuccgcac

SEQ ID NO: 1905309 - RNA, 19 nt, Artificial Sequence
  Description of Artificial Sequence: Synthetic oligonucleotide
auggcggcucgcugcucug

SEQ ID NO: 1905310 - RNA, 19 nt, Artificial Sequence
  Description of Artificial Sequence: Synthetic oligonucleotide
guucauggcgaugcuucaa

SEQ ID NO: 1905311 - RNA, 19 nt, Artificial Sequence
  Description of Artificial Sequence: Synthetic oligonucleotide
uauuugccugggcccuguu

SEQ ID NO: 1905312 - RNA, 19 nt, Artificial Sequence
  Description of Artificial Sequence: Synthetic oligonucleotide
cucgguuccgcacguugaa

SEQ ID NO: 1905313 - RNA, 19 nt, Artificial Sequence
  Description of Artificial Sequence: Synthetic oligonucleotide
gcuaggcgcagcuggucac

SEQ ID NO: 1905314 - RNA, 19 nt, Artificial Sequence
  Description of Artificial Sequence: Synthetic oligonucleotide
gcuuguuaccauaagccau

SEQ ID NO: 1905315 - RNA, 19 nt, Artificial Sequence
  Description of Artificial Sequence: Synthetic oligonucleotide
gcuguuuugacagguugua

SEQ ID NO: 1905316 - RNA, 19 nt, Artificial Sequence
  Description of Artificial Sequence: Synthetic oligonucleotide
gaggagcuugagagcgcug

SEQ ID NO: 1905317 - RNA, 19 nt, Artificial Sequence
  Description of Artificial Sequence: Synthetic oligonucleotide
gacccggugaggagcuuga

SEQ ID NO: 1905318 - RNA, 19 nt, Artificial Sequence
  Description of Artificial Sequence: Synthetic oligonucleotide
guucaacggcugcuggugu

SEQ ID NO: 1905319 - RNA, 19 nt, Artificial Sequence
  Description of Artificial Sequence: Synthetic oligonucleotide
ccauagcaguccucauggc

SEQ ID NO: 1905320 - RNA, 19 nt, Artificial Sequence
  Description of Artificial Sequence: Synthetic oligonucleotide
caaauucguguccauucuu

SEQ ID NO: 1905321 - RNA, 19 nt, Artificial Sequence
  Description of Artificial Sequence: Synthetic oligonucleotide
gcaguaggcugguuggugu

SEQ ID NO: 1905322 - RNA, 19 nt, Artificial Sequence
  Description of Artificial Sequence: Synthetic oligonucleotide
guugaagaaucggcauugu

SEQ ID NO: 1905323 - RNA, 19 nt, Artificial Sequence
  Description of Artificial Sequence: Synthetic oligonucleotide
guccucauggcggcucgac

SEQ ID NO: 1905324 - RNA, 19 nt, Artificial Sequence
  Description of Artificial Sequence: Synthetic oligonucleotide
cugcugguguugaacugua

SEQ ID NO: 1905325 - RNA, 19 nt, Artificial Sequence
  Description of Artificial Sequence: Synthetic oligonucleotide
cccugaguucaacggcugc

SEQ ID NO: 1905326 - RNA, 19 nt, Artificial Sequence
  Description of Artificial Sequence: Synthetic oligonucleotide
ggcgaugcuucaaggccug

SEQ ID NO: 1905327 - RNA, 19 nt, Artificial Sequence
  Description of Artificial Sequence: Synthetic oligonucleotide
ccgcacguugaagaaucgg

SEQ ID NO: 1905328 - RNA, 19 nt, Artificial Sequence
  Description of Artificial Sequence: Synthetic oligonucleotide
caagcgccugguuuggcau

SEQ ID NO: 1905329 - RNA, 19 nt, Artificial Sequence
  Description of Artificial Sequence: Synthetic oligonucleotide
ggacccggugaggagcuug

SEQ ID NO: 1905330 - RNA, 19 nt, Artificial Sequence
  Description of Artificial Sequence: Synthetic oligonucleotide
accugguaguucagggcau

SEQ ID NO: 1905331 - RNA, 19 nt, Artificial Sequence
  Description of Artificial Sequence: Synthetic oligonucleotide
ggacaagcgacaugcccgu

SEQ ID NO: 1905332 - RNA, 19 nt, Artificial Sequence
  Description of Artificial Sequence: Synthetic oligonucleotide
cagcagcucguguguccac

SEQ ID NO: 1905333 - RNA, 19 nt, Artificial Sequence
  Description of Artificial Sequence: Synthetic oligonucleotide
caguagaucacuggugauu

SEQ ID NO: 1905334 - RNA, 19 nt, Artificial Sequence
  Description of Artificial Sequence: Synthetic oligonucleotide
ccucauggcggcucgacua

SEQ ID NO: 1905335 - RNA, 19 nt, Artificial Sequence
  Description of Artificial Sequence: Synthetic oligonucleotide
uaggcgcagcuggucacua

SEQ ID NO: 1905336 - RNA, 19 nt, Artificial Sequence
  Description of Artificial Sequence: Synthetic oligonucleotide
cguucuuccaccugguagu

SEQ ID NO: 1905337 - RNA, 19 nt, Artificial Sequence
  Description of Artificial Sequence: Synthetic oligonucleotide
ccagucuggccaguucagc

SEQ ID NO: 1905338 - RNA, 19 nt, Artificial Sequence
  Description of Artificial Sequence: Synthetic oligonucleotide
cugcagucaugcccuucca

SEQ ID NO: 1905339 - RNA, 19 nt, Artificial Sequence
  Description of Artificial Sequence: Synthetic oligonucleotide
gggcccuguuagcauuggc

SEQ ID NO: 1905340 - RNA, 19 nt, Artificial Sequence
  Description of Artificial Sequence: Synthetic oligonucleotide
cccgguugaaggagcccag

SEQ ID NO: 1905341 - RNA, 19 nt, Artificial Sequence
  Description of Artificial Sequence: Synthetic oligonucleotide
gcuuauuugccugggcccu

SEQ ID NO: 1905342 - RNA, 19 nt, Artificial Sequence
  Description of Artificial Sequence: Synthetic oligonucleotide
ccaagcgccugguuuggca

SEQ ID NO: 1905343 - RNA, 19 nt, Artificial Sequence
  Description of Artificial Sequence: Synthetic oligonucleotide
acccggugaggagcuugag

SEQ ID NO: 1905344 - RNA, 19 nt, Artificial Sequence
  Description of Artificial Sequence: Synthetic oligonucleotide
cagcuaggcgcagcugguc

SEQ ID NO: 1905345 - RNA, 19 nt, Artificial Sequence
  Description of Artificial Sequence: Synthetic oligonucleotide
cugguuuggcauccccacu

SEQ ID NO: 1905346 - RNA, 19 nt, Artificial Sequence
  Description of Artificial Sequence: Synthetic oligonucleotide
gaguugcuccugcugcauu

SEQ ID NO: 1905347 - RNA, 19 nt, Artificial Sequence
  Description of Artificial Sequence: Synthetic oligonucleotide
cugauggcggcucgcugcu

SEQ ID NO: 1905348 - RNA, 19 nt, Artificial Sequence
  Description of Artificial Sequence: Synthetic oligonucleotide
cugcgcuuguugcuccuua

SEQ ID NO: 1905349 - RNA, 19 nt, Artificial Sequence
  Description of Artificial Sequence: Synthetic oligonucleotide
cuguuuugacagguuguau

SEQ ID NO: 1905350 - RNA, 19 nt, Artificial Sequence
  Description of Artificial Sequence: Synthetic oligonucleotide
cuccuggaggugguuugga

SEQ ID NO: 1905351 - RNA, 19 nt, Artificial Sequence
  Description of Artificial Sequence: Synthetic oligonucleotide
caacggcugcugguguuga

SEQ ID NO: 1905352 - RNA, 19 nt, Artificial Sequence
  Description of Artificial Sequence: Synthetic oligonucleotide
ggcucgacuaggacuccuc

SEQ ID NO: 1905353 - RNA, 19 nt, Artificial Sequence
  Description of Artificial Sequence: Synthetic oligonucleotide
cccacucagcuuccaagga

SEQ ID NO: 1905354 - RNA, 19 nt, Artificial Sequence
  Description of Artificial Sequence: Synthetic oligonucleotide
gcggcucgcugcucugcag

SEQ ID NO: 1905355 - RNA, 19 nt, Artificial Sequence
  Description of Artificial Sequence: Synthetic oligonucleotide
gaaggagcccagcccucuu

SEQ ID NO: 1905356 - RNA, 19 nt, Artificial Sequence
  Description of Artificial Sequence: Synthetic oligonucleotide
cucuagcaucugggcuacc

SEQ ID NO: 1905357 - RNA, 19 nt, Artificial Sequence
  Description of Artificial Sequence: Synthetic oligonucleotide
ugacucgguuccgcacguu

SEQ ID NO: 1905358 - RNA, 19 nt, Artificial Sequence
  Description of Artificial Sequence: Synthetic oligonucleotide
ccccaugacucgguuccgc

SEQ ID NO: 1905359 - RNA, 19 nt, Artificial Sequence
  Description of Artificial Sequence: Synthetic oligonucleotide
ccaaagcauggguuucugu

SEQ ID NO: 1905360 - RNA, 19 nt, Artificial Sequence
  Description of Artificial Sequence: Synthetic oligonucleotide
gcucguguguccacagcua

SEQ ID NO: 1905361 - RNA, 19 nt, Artificial Sequence
  Description of Artificial Sequence: Synthetic oligonucleotide
ccguacgcgccuccucuuc

SEQ ID NO: 1905362 - RNA, 19 nt, Artificial Sequence
  Description of Artificial Sequence: Synthetic oligonucleotide
gcaaagccguacgcgccuc

SEQ ID NO: 1905363 - RNA, 19 nt, Artificial Sequence
  Description of Artificial Sequence: Synthetic oligonucleotide
cgccugguuuggcaucccc

SEQ ID NO: 1905364 - RNA, 19 nt, Artificial Sequence
  Description of Artificial Sequence: Synthetic oligonucleotide
cuucagccaagcgccuggu

SEQ ID NO: 1905365 - RNA, 19 nt, Artificial Sequence
  Description of Artificial Sequence: Synthetic oligonucleotide
gccaagcgccugguuuggc

SEQ ID NO: 1905366 - RNA, 19 nt, Artificial Sequence
  Description of Artificial Sequence: Synthetic oligonucleotide
ccuuagcuaacucccgguu

SEQ ID NO: 1905367 - RNA, 19 nt, Artificial Sequence
  Description of Artificial Sequence: Synthetic oligonucleotide
ccacagcuaggcgcagcug

SEQ ID NO: 1905368 - RNA, 19 nt, Artificial Sequence
  Description of Artificial Sequence: Synthetic oligonucleotide
gcccagcccucuucgaaau

SEQ ID NO: 1905369 - RNA, 19 nt, Artificial Sequence
  Description of Artificial Sequence: Synthetic oligonucleotide
gacaagcgacaugcccguu

SEQ ID NO: 1905370 - RNA, 19 nt, Artificial Sequence
  Description of Artificial Sequence: Synthetic oligonucleotide
gcggcucgacuaggacucc

SEQ ID NO: 1905371 - RNA, 19 nt, Artificial Sequence
  Description of Artificial Sequence: Synthetic oligonucleotide
cccgaaaauccuguacuuu

SEQ ID NO: 1905372 - RNA, 19 nt, Artificial Sequence
  Description of Artificial Sequence: Synthetic oligonucleotide
cuauugcuucccgcagcuu

SEQ ID NO: 1905373 - RNA, 19 nt, Artificial Sequence
  Description of Artificial Sequence: Synthetic oligonucleotide
cgacaugcccguucugccu

SEQ ID NO: 1905374 - RNA, 19 nt, Artificial Sequence
  Description of Artificial Sequence: Synthetic oligonucleotide
ccugggcccuguuagcauu

SEQ ID NO: 1905375 - RNA, 19 nt, Artificial Sequence
  Description of Artificial Sequence: Synthetic oligonucleotide
gcgccugguuuggcauccc

SEQ ID NO: 1905376 - RNA, 19 nt, Artificial Sequence
  Description of Artificial Sequence: Synthetic oligonucleotide
cgaauucuucuagccucaa

SEQ ID NO: 1905377 - RNA, 19 nt, Artificial Sequence
  Description of Artificial Sequence: Synthetic oligonucleotide
cguacgcgccuccucuucu

SEQ ID NO: 1905378 - RNA, 19 nt, Artificial Sequence
  Description of Artificial Sequence: Synthetic oligonucleotide
gccguacgcgccuccucuu

SEQ ID NO: 1905379 - RNA, 19 nt, Artificial Sequence
  Description of Artificial Sequence: Synthetic oligonucleotide
cggcauugucguuccuuuu

SEQ ID NO: 1905380 - RNA, 19 nt, Artificial Sequence
  Description of Artificial Sequence: Synthetic oligonucleotide
cccagcccucuucgaaauu

SEQ ID NO: 1905381 - RNA, 19 nt, Artificial Sequence
  Description of Artificial Sequence: Synthetic oligonucleotide
cggcucgacuaggacuccu

SEQ ID NO: 1905382 - RNA, 19 nt, Artificial Sequence
  Description of Artificial Sequence: Synthetic oligonucleotide
uuuugauaugaaaagaucc

SEQ ID NO: 1905383 - RNA, 19 nt, Artificial Sequence
  Description of Artificial Sequence: Synthetic oligonucleotide
aaaacucuuaagcucuggc

SEQ ID NO: 1905384 - RNA, 19 nt, Artificial Sequence
  Description of Artificial Sequence: Synthetic oligonucleotide
aguaucaucauuaaaaucu

SEQ ID NO: 1905385 - RNA, 19 nt, Artificial Sequence
  Description of Artificial Sequence: Synthetic oligonucleotide
caucauuaaaaucucaggg

SEQ ID NO: 1905386 - RNA, 19 nt, Artificial Sequence
  Description of Artificial Sequence: Synthetic oligonucleotide
uucacuuccacaaaggacu

SEQ ID NO: 1905387 - RNA, 19 nt, Artificial Sequence
  Description of Artificial Sequence: Synthetic oligonucleotide
uuugauaugaaaagauccc

SEQ ID NO: 1905388 - RNA, 19 nt, Artificial Sequence
  Description of Artificial Sequence: Synthetic oligonucleotide
aucauuaaaaucucagggg

SEQ ID NO: 1905389 - RNA, 19 nt, Artificial Sequence
  Description of Artificial Sequence: Synthetic oligonucleotide
gauaugaaaagaucccugg

SEQ ID NO: 1905390 - RNA, 19 nt, Artificial Sequence
  Description of Artificial Sequence: Synthetic oligonucleotide
uccucaggcaucaacaugg

SEQ ID NO: 1905391 - RNA, 19 nt, Artificial Sequence
  Description of Artificial Sequence: Synthetic oligonucleotide
ucauuaaaaucucagggga

SEQ ID NO: 1905392 - RNA, 19 nt, Artificial Sequence
  Description of Artificial Sequence: Synthetic oligonucleotide
ugugaauucuuccucaggc

SEQ ID NO: 1905393 - RNA, 19 nt, Artificial Sequence
  Description of Artificial Sequence: Synthetic oligonucleotide
ucuucuauggggaacaaac

SEQ ID NO: 1905394 - RNA, 19 nt, Artificial Sequence
  Description of Artificial Sequence: Synthetic oligonucleotide
acaaaagaaaaguaucauc

SEQ ID NO: 1905395 - RNA, 19 nt, Artificial Sequence
  Description of Artificial Sequence: Synthetic oligonucleotide
caaaagaaaaguaucauca

SEQ ID NO: 1905396 - RNA, 19 nt, Artificial Sequence
  Description of Artificial Sequence: Synthetic oligonucleotide
ucaucauuaaaaucucagg

SEQ ID NO: 1905397 - RNA, 19 nt, Artificial Sequence
  Description of Artificial Sequence: Synthetic oligonucleotide
aaucucaggggauaaaacu

SEQ ID NO: 1905398 - RNA, 19 nt, Artificial Sequence
  Description of Artificial Sequence: Synthetic oligonucleotide
ucaggcaucaacauggcga

SEQ ID NO: 1905399 - RNA, 19 nt, Artificial Sequence
  Description of Artificial Sequence: Synthetic oligonucleotide
aggaagagcacauuagccg

SEQ ID NO: 1905400 - RNA, 19 nt, Artificial Sequence
  Description of Artificial Sequence: Synthetic oligonucleotide
ugccgaaugaagaaaauga

SEQ ID NO: 1905401 - RNA, 19 nt, Artificial Sequence
  Description of Artificial Sequence: Synthetic oligonucleotide
aaggaagagcacauuagcc

SEQ ID NO: 1905402 - RNA, 19 nt, Artificial Sequence
  Description of Artificial Sequence: Synthetic oligonucleotide
acgaaagucucuucuaugg

SEQ ID NO: 1905403 - RNA, 19 nt, Artificial Sequence
  Description of Artificial Sequence: Synthetic oligonucleotide
aacucugccaaggaagagc

SEQ ID NO: 1905404 - RNA, 19 nt, Artificial Sequence
  Description of Artificial Sequence: Synthetic oligonucleotide
auggggaacaaacucugcc

SEQ ID NO: 1905405 - RNA, 19 nt, Artificial Sequence
  Description of Artificial Sequence: Synthetic oligonucleotide
aaagaaaaguaucaucauu

SEQ ID NO: 1905406 - RNA, 19 nt, Artificial Sequence
  Description of Artificial Sequence: Synthetic oligonucleotide
ugauaugaaaagaucccug

SEQ ID NO: 1905407 - RNA, 19 nt, Artificial Sequence
  Description of Artificial Sequence: Synthetic oligonucleotide
aaaagaaaaguaucaucau

SEQ ID NO: 1905408 - RNA, 19 nt, Artificial Sequence
  Description of Artificial Sequence: Synthetic oligonucleotide
uccacaaaggacuugugga

SEQ ID NO: 1905409 - RNA, 19 nt, Artificial Sequence
  Description of Artificial Sequence: Synthetic oligonucleotide
cgaaugaagaaaaugaacg

SEQ ID NO: 1905410 - RNA, 19 nt, Artificial Sequence
  Description of Artificial Sequence: Synthetic oligonucleotide
aaacucuuaagcucuggcu

SEQ ID NO: 1905411 - RNA, 19 nt, Artificial Sequence
  Description of Artificial Sequence: Synthetic oligonucleotide
ggggauaaaacucuuaagc

SEQ ID NO: 1905412 - RNA, 19 nt, Artificial Sequence
  Description of Artificial Sequence: Synthetic oligonucleotide
uuauuggcaaggacaaaag

SEQ ID NO: 1905413 - RNA, 19 nt, Artificial Sequence
  Description of Artificial Sequence: Synthetic oligonucleotide
uuaagcucuggcuuguacc

SEQ ID NO: 1905414 - RNA, 19 nt, Artificial Sequence
  Description of Artificial Sequence: Synthetic oligonucleotide
aagaaaaguaucaucauua

SEQ ID NO: 1905415 - RNA, 19 nt, Artificial Sequence
  Description of Artificial Sequence: Synthetic oligonucleotide
uaugaaaagaucccuggau

SEQ ID NO: 1905416 - RNA, 19 nt, Artificial Sequence
  Description of Artificial Sequence: Synthetic oligonucleotide
uuuauuggcaaggacaaaa

SEQ ID NO: 1905417 - RNA, 19 nt, Artificial Sequence
  Description of Artificial Sequence: Synthetic oligonucleotide
uggguagaggcuuuauugg

SEQ ID NO: 1905418 - RNA, 19 nt, Artificial Sequence
  Description of Artificial Sequence: Synthetic oligonucleotide
aagaaaaugaacggguggu

SEQ ID NO: 1905419 - RNA, 19 nt, Artificial Sequence
  Description of Artificial Sequence: Synthetic oligonucleotide
uuggcaaggacaaaagaaa

SEQ ID NO: 1905420 - RNA, 19 nt, Artificial Sequence
  Description of Artificial Sequence: Synthetic oligonucleotide
aaaucucaggggauaaaac

SEQ ID NO: 1905421 - RNA, 19 nt, Artificial Sequence
  Description of Artificial Sequence: Synthetic oligonucleotide
aaaaugaacggguggucca

SEQ ID NO: 1905422 - RNA, 19 nt, Artificial Sequence
  Description of Artificial Sequence: Synthetic oligonucleotide
uuagccgugggauugugcc

SEQ ID NO: 1905423 - RNA, 19 nt, Artificial Sequence
  Description of Artificial Sequence: Synthetic oligonucleotide
aacucuuaagcucuggcuu

SEQ ID NO: 1905424 - RNA, 19 nt, Artificial Sequence
  Description of Artificial Sequence: Synthetic oligonucleotide
aggacaaaagaaaaguauc

SEQ ID NO: 1905425 - RNA, 19 nt, Artificial Sequence
  Description of Artificial Sequence: Synthetic oligonucleotide
ucaacauggcgaauguagc

SEQ ID NO: 1905426 - RNA, 19 nt, Artificial Sequence
  Description of Artificial Sequence: Synthetic oligonucleotide
guagcaaugccuccugugg

SEQ ID NO: 1905427 - RNA, 19 nt, Artificial Sequence
  Description of Artificial Sequence: Synthetic oligonucleotide
uucuauggggaacaaacuc

SEQ ID NO: 1905428 - RNA, 19 nt, Artificial Sequence
  Description of Artificial Sequence: Synthetic oligonucleotide
aucaacauggcgaauguag

SEQ ID NO: 1905429 - RNA, 19 nt, Artificial Sequence
  Description of Artificial Sequence: Synthetic oligonucleotide
aauguagcaaugccuccug

SEQ ID NO: 1905430 - RNA, 19 nt, Artificial Sequence
  Description of Artificial Sequence: Synthetic oligonucleotide
cuggguagaggcuuuauug

SEQ ID NO: 1905431 - RNA, 19 nt, Artificial Sequence
  Description of Artificial Sequence: Synthetic oligonucleotide
cuggcuuguaccacgaaag

SEQ ID NO: 1905432 - RNA, 19 nt, Artificial Sequence
  Description of Artificial Sequence: Synthetic oligonucleotide
aaugugggagggcuccacg

SEQ ID NO: 1905433 - RNA, 19 nt, Artificial Sequence
  Description of Artificial Sequence: Synthetic oligonucleotide
gaaaaugaacggguggucc

SEQ ID NO: 1905434 - RNA, 19 nt, Artificial Sequence
  Description of Artificial Sequence: Synthetic oligonucleotide
aucaucauuaaaaucucag

SEQ ID NO: 1905435 - RNA, 19 nt, Artificial Sequence
  Description of Artificial Sequence: Synthetic oligonucleotide
acaaacucugccaaggaag

SEQ ID NO: 1905436 - RNA, 19 nt, Artificial Sequence
  Description of Artificial Sequence: Synthetic oligonucleotide
aaaaucucaggggauaaaa

SEQ ID NO: 1905437 - RNA, 19 nt, Artificial Sequence
  Description of Artificial Sequence: Synthetic oligonucleotide
uauuggcaaggacaaaaga

SEQ ID NO: 1905438 - RNA, 19 nt, Artificial Sequence
  Description of Artificial Sequence: Synthetic oligonucleotide
caaggaagagcacauuagc

SEQ ID NO: 1905439 - RNA, 19 nt, Artificial Sequence
  Description of Artificial Sequence: Synthetic oligonucleotide
ugaauucuuccucaggcau

SEQ ID NO: 1905440 - RNA, 19 nt, Artificial Sequence
  Description of Artificial Sequence: Synthetic oligonucleotide
uccacugugaauucuuccu

SEQ ID NO: 1905441 - RNA, 19 nt, Artificial Sequence
  Description of Artificial Sequence: Synthetic oligonucleotide
gauaaaacucuuaagcucu

SEQ ID NO: 1905442 - RNA, 19 nt, Artificial Sequence
  Description of Artificial Sequence: Synthetic oligonucleotide
ucucaggggauaaaacucu

SEQ ID NO: 1905443 - RNA, 19 nt, Artificial Sequence
  Description of Artificial Sequence: Synthetic oligonucleotide
aauucuuccucaggcauca

SEQ ID NO: 1905444 - RNA, 19 nt, Artificial Sequence
  Description of Artificial Sequence: Synthetic oligonucleotide
uugauaugaaaagaucccu

SEQ ID NO: 1905445 - RNA, 19 nt, Artificial Sequence
  Description of Artificial Sequence: Synthetic oligonucleotide
aaaugaacgggugguccac

SEQ ID NO: 1905446 - RNA, 19 nt, Artificial Sequence
  Description of Artificial Sequence: Synthetic oligonucleotide
uaucaucauuaaaaucuca

SEQ ID NO: 1905447 - RNA, 19 nt, Artificial Sequence
  Description of Artificial Sequence: Synthetic oligonucleotide
aaagucucuucuaugggga

SEQ ID NO: 1905448 - RNA, 19 nt, Artificial Sequence
  Description of Artificial Sequence: Synthetic oligonucleotide
uguagcaaugccuccugug

SEQ ID NO: 1905449 - RNA, 19 nt, Artificial Sequence
  Description of Artificial Sequence: Synthetic oligonucleotide
aucucaggggauaaaacuc

SEQ ID NO: 1905450 - RNA, 19 nt, Artificial Sequence
  Description of Artificial Sequence: Synthetic oligonucleotide
auaugaaaagaucccugga

SEQ ID NO: 1905451 - RNA, 19 nt, Artificial Sequence
  Description of Artificial Sequence: Synthetic oligonucleotide
ggauaaaacucuuaagcuc

SEQ ID NO: 1905452 - RNA, 19 nt, Artificial Sequence
  Description of Artificial Sequence: Synthetic oligonucleotide
agcaaugccuccuguggcg

SEQ ID NO: 1905453 - RNA, 19 nt, Artificial Sequence
  Description of Artificial Sequence: Synthetic oligonucleotide
agaaaaguaucaucauuaa

SEQ ID NO: 1905454 - RNA, 19 nt, Artificial Sequence
  Description of Artificial Sequence: Synthetic oligonucleotide
uggggaacaaacucugcca

SEQ ID NO: 1905455 - RNA, 19 nt, Artificial Sequence
  Description of Artificial Sequence: Synthetic oligonucleotide
agaggcuuuauuggcaagg

SEQ ID NO: 1905456 - RNA, 19 nt, Artificial Sequence
  Description of Artificial Sequence: Synthetic oligonucleotide
aggggauaaaacucuuaag

SEQ ID NO: 1905457 - RNA, 19 nt, Artificial Sequence
  Description of Artificial Sequence: Synthetic oligonucleotide
cuauggggaacaaacucug

SEQ ID NO: 1905458 - RNA, 19 nt, Artificial Sequence
  Description of Artificial Sequence: Synthetic oligonucleotide
auuggcaaggacaaaagaa

SEQ ID NO: 1905459 - RNA, 19 nt, Artificial Sequence
  Description of Artificial Sequence: Synthetic oligonucleotide
uucagaaugugggagggcu

SEQ ID NO: 1905460 - RNA, 19 nt, Artificial Sequence
  Description of Artificial Sequence: Synthetic oligonucleotide
auggcgaauguagcaaugc

SEQ ID NO: 1905461 - RNA, 19 nt, Artificial Sequence
  Description of Artificial Sequence: Synthetic oligonucleotide
aaaagaucccuggauccug

SEQ ID NO: 1905462 - RNA, 19 nt, Artificial Sequence
  Description of Artificial Sequence: Synthetic oligonucleotide
ucuggcuuguaccacgaaa

SEQ ID NO: 1905463 - RNA, 19 nt, Artificial Sequence
  Description of Artificial Sequence: Synthetic oligonucleotide
gaaaaguaucaucauuaaa

SEQ ID NO: 1905464 - RNA, 19 nt, Artificial Sequence
  Description of Artificial Sequence: Synthetic oligonucleotide
uaaaacucuuaagcucugg

SEQ ID NO: 1905465 - RNA, 19 nt, Artificial Sequence
  Description of Artificial Sequence: Synthetic oligonucleotide
uaccacgaaagucucuucu

SEQ ID NO: 1905466 - RNA, 19 nt, Artificial Sequence
  Description of Artificial Sequence: Synthetic oligonucleotide
uggcaaggacaaaagaaaa

SEQ ID NO: 1905467 - RNA, 19 nt, Artificial Sequence
  Description of Artificial Sequence: Synthetic oligonucleotide
aagagcacauuagccgugg

SEQ ID NO: 1905468 - RNA, 19 nt, Artificial Sequence
  Description of Artificial Sequence: Synthetic oligonucleotide
acucuuaagcucuggcuug

SEQ ID NO: 1905469 - RNA, 19 nt, Artificial Sequence
  Description of Artificial Sequence: Synthetic oligonucleotide
gagggcuccacguuugccc

SEQ ID NO: 1905470 - RNA, 19 nt, Artificial Sequence
  Description of Artificial Sequence: Synthetic oligonucleotide
uugugccgaaugaagaaaa

SEQ ID NO: 1905471 - RNA, 19 nt, Artificial Sequence
  Description of Artificial Sequence: Synthetic oligonucleotide
uggcgaauguagcaaugcc

SEQ ID NO: 1905472 - RNA, 19 nt, Artificial Sequence
  Description of Artificial Sequence: Synthetic oligonucleotide
agaaaaugaacgggugguc

SEQ ID NO: 1905473 - RNA, 19 nt, Artificial Sequence
  Description of Artificial Sequence: Synthetic oligonucleotide
gauugugccgaaugaagaa

SEQ ID NO: 1905474 - RNA, 19 nt, Artificial Sequence
  Description of Artificial Sequence: Synthetic oligonucleotide
uuaaaaucucaggggauaa

SEQ ID NO: 1905475 - RNA, 19 nt, Artificial Sequence
  Description of Artificial Sequence: Synthetic oligonucleotide
aacauggcgaauguagcaa

SEQ ID NO: 1905476 - RNA, 19 nt, Artificial Sequence
  Description of Artificial Sequence: Synthetic oligonucleotide
aagaucccuggauccugac

SEQ ID NO: 1905477 - RNA, 19 nt, Artificial Sequence
  Description of Artificial Sequence: Synthetic oligonucleotide
agcucuggcuuguaccacg

SEQ ID NO: 1905478 - RNA, 19 nt, Artificial Sequence
  Description of Artificial Sequence: Synthetic oligonucleotide
acaaaggacuuguggauaa

SEQ ID NO: 1905479 - RNA, 19 nt, Artificial Sequence
  Description of Artificial Sequence: Synthetic oligonucleotide
auuaaaaucucaggggaua

SEQ ID NO: 1905480 - RNA, 19 nt, Artificial Sequence
  Description of Artificial Sequence: Synthetic oligonucleotide
gaacgggugguccacugug

SEQ ID NO: 1905481 - RNA, 19 nt, Artificial Sequence
  Description of Artificial Sequence: Synthetic oligonucleotide
aggcuuuauuggcaaggac

SEQ ID NO: 1905482 - RNA, 19 nt, Artificial Sequence
  Description of Artificial Sequence: Synthetic oligonucleotide
uauggggaacaaacucugc

SEQ ID NO: 1905483 - RNA, 19 nt, Artificial Sequence
  Description of Artificial Sequence: Synthetic oligonucleotide
acuuccacaaaggacuugu

SEQ ID NO: 1905484 - RNA, 19 nt, Artificial Sequence
  Description of Artificial Sequence: Synthetic oligonucleotide
aaugccuccuguggcggcg

SEQ ID NO: 1905485 - RNA, 19 nt, Artificial Sequence
  Description of Artificial Sequence: Synthetic oligonucleotide
uucuuccucaggcaucaac

SEQ ID NO: 1905486 - RNA, 19 nt, Artificial Sequence
  Description of Artificial Sequence: Synthetic oligonucleotide
uguaccacgaaagucucuu

SEQ ID NO: 1905487 - RNA, 19 nt, Artificial Sequence
  Description of Artificial Sequence: Synthetic oligonucleotide
agcacauuagccgugggau

SEQ ID NO: 1905488 - RNA, 19 nt, Artificial Sequence
  Description of Artificial Sequence: Synthetic oligonucleotide
cugugaauucuuccucagg

SEQ ID NO: 1905489 - RNA, 19 nt, Artificial Sequence
  Description of Artificial Sequence: Synthetic oligonucleotide
cuuguaccacgaaagucuc

SEQ ID NO: 1905490 - RNA, 19 nt, Artificial Sequence
  Description of Artificial Sequence: Synthetic oligonucleotide
cuuaagcucuggcuuguac

SEQ ID NO: 1905491 - RNA, 19 nt, Artificial Sequence
  Description of Artificial Sequence: Synthetic oligonucleotide
agucucuucuauggggaac

SEQ ID NO: 1905492 - RNA, 19 nt, Artificial Sequence
  Description of Artificial Sequence: Synthetic oligonucleotide
aggacuuguggauaauuuu

SEQ ID NO: 1905493 - RNA, 19 nt, Artificial Sequence
  Description of Artificial Sequence: Synthetic oligonucleotide
cacgaaagucucuucuaug

SEQ ID NO: 1905494 - RNA, 19 nt, Artificial Sequence
  Description of Artificial Sequence: Synthetic oligonucleotide
cacauuagccgugggauug

SEQ ID NO: 1905495 - RNA, 19 nt, Artificial Sequence
  Description of Artificial Sequence: Synthetic oligonucleotide
uguucccuccucauucacu

SEQ ID NO: 1905496 - RNA, 19 nt, Artificial Sequence
  Description of Artificial Sequence: Synthetic oligonucleotide
ucuguucccuccucauuca

SEQ ID NO: 1905497 - RNA, 19 nt, Artificial Sequence
  Description of Artificial Sequence: Synthetic oligonucleotide
gaucccuggauccugacau

SEQ ID NO: 1905498 - RNA, 19 nt, Artificial Sequence
  Description of Artificial Sequence: Synthetic oligonucleotide
aaggacuuguggauaauuu

SEQ ID NO: 1905499 - RNA, 19 nt, Artificial Sequence
  Description of Artificial Sequence: Synthetic oligonucleotide
guaucaucauuaaaaucuc

SEQ ID NO: 1905500 - RNA, 19 nt, Artificial Sequence
  Description of Artificial Sequence: Synthetic oligonucleotide
aaaggacuuguggauaauu

SEQ ID NO: 1905501 - RNA, 19 nt, Artificial Sequence
  Description of Artificial Sequence: Synthetic oligonucleotide
cauucacuuccacaaagga

SEQ ID NO: 1905502 - RNA, 19 nt, Artificial Sequence
  Description of Artificial Sequence: Synthetic oligonucleotide
ggacaaaagaaaaguauca

SEQ ID NO: 1905503 - RNA, 19 nt, Artificial Sequence
  Description of Artificial Sequence: Synthetic oligonucleotide
ccgaaugaagaaaaugaac

SEQ ID NO: 1905504 - RNA, 19 nt, Artificial Sequence
  Description of Artificial Sequence: Synthetic oligonucleotide
uggcuuguaccacgaaagu

SEQ ID NO: 1905505 - RNA, 19 nt, Artificial Sequence
  Description of Artificial Sequence: Synthetic oligonucleotide
ucuggguagaggcuuuauu

SEQ ID NO: 1905506 - RNA, 19 nt, Artificial Sequence
  Description of Artificial Sequence: Synthetic oligonucleotide
cagaaugugggagggcucc

SEQ ID NO: 1905507 - RNA, 19 nt, Artificial Sequence
  Description of Artificial Sequence: Synthetic oligonucleotide
auuagccgugggauugugc

SEQ ID NO: 1905508 - RNA, 19 nt, Artificial Sequence
  Description of Artificial Sequence: Synthetic oligonucleotide
ugugccgaaugaagaaaau

SEQ ID NO: 1905509 - RNA, 19 nt, Artificial Sequence
  Description of Artificial Sequence: Synthetic oligonucleotide
gugaauucuuccucaggca

SEQ ID NO: 1905510 - RNA, 19 nt, Artificial Sequence
  Description of Artificial Sequence: Synthetic oligonucleotide
cauggcgaauguagcaaug

SEQ ID NO: 1905511 - RNA, 19 nt, Artificial Sequence
  Description of Artificial Sequence: Synthetic oligonucleotide
uagccgugggauugugccg

SEQ ID NO: 1905512 - RNA, 19 nt, Artificial Sequence
  Description of Artificial Sequence: Synthetic oligonucleotide
aagucucuucuauggggaa

SEQ ID NO: 1905513 - RNA, 19 nt, Artificial Sequence
  Description of Artificial Sequence: Synthetic oligonucleotide
ccaaggaagagcacauuag

SEQ ID NO: 1905514 - RNA, 19 nt, Artificial Sequence
  Description of Artificial Sequence: Synthetic oligonucleotide
gggauaaaacucuuaagcu

SEQ ID NO: 1905515 - RNA, 19 nt, Artificial Sequence
  Description of Artificial Sequence: Synthetic oligonucleotide
ggcaaggacaaaagaaaag

SEQ ID NO: 1905516 - RNA, 19 nt, Artificial Sequence
  Description of Artificial Sequence: Synthetic oligonucleotide
ucaggggauaaaacucuua

SEQ ID NO: 1905517 - RNA, 19 nt, Artificial Sequence
  Description of Artificial Sequence: Synthetic oligonucleotide
aagcucuggcuuguaccac

SEQ ID NO: 1905518 - RNA, 19 nt, Artificial Sequence
  Description of Artificial Sequence: Synthetic oligonucleotide
gugccgaaugaagaaaaug

SEQ ID NO: 1905519 - RNA, 19 nt, Artificial Sequence
  Description of Artificial Sequence: Synthetic oligonucleotide
uagaggcuuuauuggcaag

SEQ ID NO: 1905520 - RNA, 19 nt, Artificial Sequence
  Description of Artificial Sequence: Synthetic oligonucleotide
ucagaaugugggagggcuc

SEQ ID NO: 1905521 - RNA, 19 nt, Artificial Sequence
  Description of Artificial Sequence: Synthetic oligonucleotide
caacauggcgaauguagca

SEQ ID NO: 1905522 - RNA, 19 nt, Artificial Sequence
  Description of Artificial Sequence: Synthetic oligonucleotide
cucaggcaucaacauggcg

SEQ ID NO: 1905523 - RNA, 19 nt, Artificial Sequence
  Description of Artificial Sequence: Synthetic oligonucleotide
ucccuggauccugacaugc

SEQ ID NO: 1905524 - RNA, 19 nt, Artificial Sequence
  Description of Artificial Sequence: Synthetic oligonucleotide
aaagaucccuggauccuga

SEQ ID NO: 1905525 - RNA, 19 nt, Artificial Sequence
  Description of Artificial Sequence: Synthetic oligonucleotide
ugaacgggugguccacugu

SEQ ID NO: 1905526 - RNA, 19 nt, Artificial Sequence
  Description of Artificial Sequence: Synthetic oligonucleotide
gaauucuuccucaggcauc

SEQ ID NO: 1905527 - RNA, 19 nt, Artificial Sequence
  Description of Artificial Sequence: Synthetic oligonucleotide
caggggauaaaacucuuaa

SEQ ID NO: 1905528 - RNA, 19 nt, Artificial Sequence
  Description of Artificial Sequence: Synthetic oligonucleotide
ugguuucuggguagaggcu

SEQ ID NO: 1905529 - RNA, 19 nt, Artificial Sequence
  Description of Artificial Sequence: Synthetic oligonucleotide
uaaaaucucaggggauaaa

SEQ ID NO: 1905530 - RNA, 19 nt, Artificial Sequence
  Description of Artificial Sequence: Synthetic oligonucleotide
ggguagaggcuuuauuggc

SEQ ID NO: 1905531 - RNA, 19 nt, Artificial Sequence
  Description of Artificial Sequence: Synthetic oligonucleotide
gacaaaagaaaaguaucau

SEQ ID NO: 1905532 - RNA, 19 nt, Artificial Sequence
  Description of Artificial Sequence: Synthetic oligonucleotide
guagaggcuuuauuggcaa

SEQ ID NO: 1905533 - RNA, 19 nt, Artificial Sequence
  Description of Artificial Sequence: Synthetic oligonucleotide
ugggagggcuccacguuug

SEQ ID NO: 1905534 - RNA, 19 nt, Artificial Sequence
  Description of Artificial Sequence: Synthetic oligonucleotide
acucugccaaggaagagca

SEQ ID NO: 1905535 - RNA, 19 nt, Artificial Sequence
  Description of Artificial Sequence: Synthetic oligonucleotide
auugugccgaaugaagaaa

SEQ ID NO: 1905536 - RNA, 19 nt, Artificial Sequence
  Description of Artificial Sequence: Synthetic oligonucleotide
gagcacauuagccguggga

SEQ ID NO: 1905537 - RNA, 19 nt, Artificial Sequence
  Description of Artificial Sequence: Synthetic oligonucleotide
gaagagcacauuagccgug

SEQ ID NO: 1905538 - RNA, 19 nt, Artificial Sequence
  Description of Artificial Sequence: Synthetic oligonucleotide
acauggcgaauguagcaau

SEQ ID NO: 1905539 - RNA, 19 nt, Artificial Sequence
  Description of Artificial Sequence: Synthetic oligonucleotide
agagcacauuagccguggg

SEQ ID NO: 1905540 - RNA, 19 nt, Artificial Sequence
  Description of Artificial Sequence: Synthetic oligonucleotide
aaugaacgggugguccacu

SEQ ID NO: 1905541 - RNA, 19 nt, Artificial Sequence
  Description of Artificial Sequence: Synthetic oligonucleotide
augaacgggugguccacug

SEQ ID NO: 1905542 - RNA, 19 nt, Artificial Sequence
  Description of Artificial Sequence: Synthetic oligonucleotide
ugggauugugccgaaugaa

SEQ ID NO: 1905543 - RNA, 19 nt, Artificial Sequence
  Description of Artificial Sequence: Synthetic oligonucleotide
gggauugugccgaaugaag

SEQ ID NO: 1905544 - RNA, 19 nt, Artificial Sequence
  Description of Artificial Sequence: Synthetic oligonucleotide
agaucccuggauccugaca

SEQ ID NO: 1905545 - RNA, 19 nt, Artificial Sequence
  Description of Artificial Sequence: Synthetic oligonucleotide
augugggagggcuccacgu

SEQ ID NO: 1905546 - RNA, 19 nt, Artificial Sequence
  Description of Artificial Sequence: Synthetic oligonucleotide
uuguaccacgaaagucucu

SEQ ID NO: 1905547 - RNA, 19 nt, Artificial Sequence
  Description of Artificial Sequence: Synthetic oligonucleotide
auaaaacucuuaagcucug

SEQ ID NO: 1905548 - RNA, 19 nt, Artificial Sequence
  Description of Artificial Sequence: Synthetic oligonucleotide
ugguccacugugaauucuu

SEQ ID NO: 1905549 - RNA, 19 nt, Artificial Sequence
  Description of Artificial Sequence: Synthetic oligonucleotide
accacgaaagucucuucua

SEQ ID NO: 1905550 - RNA, 19 nt, Artificial Sequence
  Description of Artificial Sequence: Synthetic oligonucleotide
gaauguagcaaugccuccu

SEQ ID NO: 1905551 - RNA, 19 nt, Artificial Sequence
  Description of Artificial Sequence: Synthetic oligonucleotide
gugggauugugccgaauga

SEQ ID NO: 1905552 - RNA, 19 nt, Artificial Sequence
  Description of Artificial Sequence: Synthetic oligonucleotide
ucacuuccacaaaggacuu

SEQ ID NO: 1905553 - RNA, 19 nt, Artificial Sequence
  Description of Artificial Sequence: Synthetic oligonucleotide
gucucuucuauggggaaca

SEQ ID NO: 1905554 - RNA, 19 nt, Artificial Sequence
  Description of Artificial Sequence: Synthetic oligonucleotide
gaggcuuuauuggcaagga

SEQ ID NO: 1905555 - RNA, 19 nt, Artificial Sequence
  Description of Artificial Sequence: Synthetic oligonucleotide
cuuccacaaaggacuugug

SEQ ID NO: 1905556 - RNA, 19 nt, Artificial Sequence
  Description of Artificial Sequence: Synthetic oligonucleotide
ugugggagggcuccacguu

SEQ ID NO: 1905557 - RNA, 19 nt, Artificial Sequence
  Description of Artificial Sequence: Synthetic oligonucleotide
agggcuccacguuugccca

SEQ ID NO: 1905558 - RNA, 19 nt, Artificial Sequence
  Description of Artificial Sequence: Synthetic oligonucleotide
gaaaagaucccuggauccu

SEQ ID NO: 1905559 - RNA, 19 nt, Artificial Sequence
  Description of Artificial Sequence: Synthetic oligonucleotide
caggcaucaacauggcgaa

SEQ ID NO: 1905560 - RNA, 19 nt, Artificial Sequence
  Description of Artificial Sequence: Synthetic oligonucleotide
gcgaauguagcaaugccuc

SEQ ID NO: 1905561 - RNA, 19 nt, Artificial Sequence
  Description of Artificial Sequence: Synthetic oligonucleotide
gcuuguaccacgaaagucu

SEQ ID NO: 1905562 - RNA, 19 nt, Artificial Sequence
  Description of Artificial Sequence: Synthetic oligonucleotide
auguagcaaugccuccugu

SEQ ID NO: 1905563 - RNA, 19 nt, Artificial Sequence
  Description of Artificial Sequence: Synthetic oligonucleotide
ggaagagcacauuagccgu

SEQ ID NO: 1905564 - RNA, 19 nt, Artificial Sequence
  Description of Artificial Sequence: Synthetic oligonucleotide
ggauugugccgaaugaaga

SEQ ID NO: 1905565 - RNA, 19 nt, Artificial Sequence
  Description of Artificial Sequence: Synthetic oligonucleotide
cauuaaaaucucaggggau

SEQ ID NO: 1905566 - RNA, 19 nt, Artificial Sequence
  Description of Artificial Sequence: Synthetic oligonucleotide
cuucuauggggaacaaacu

SEQ ID NO: 1905567 - RNA, 19 nt, Artificial Sequence
  Description of Artificial Sequence: Synthetic oligonucleotide
uguggcggcggcugccucu

SEQ ID NO: 1905568 - RNA, 19 nt, Artificial Sequence
  Description of Artificial Sequence: Synthetic oligonucleotide
cgaaagucucuucuauggg

SEQ ID NO: 1905569 - RNA, 19 nt, Artificial Sequence
  Description of Artificial Sequence: Synthetic oligonucleotide
aacgggugguccacuguga

SEQ ID NO: 1905570 - RNA, 19 nt, Artificial Sequence
  Description of Artificial Sequence: Synthetic oligonucleotide
aucccuggauccugacaug

SEQ ID NO: 1905571 - RNA, 19 nt, Artificial Sequence
  Description of Artificial Sequence: Synthetic oligonucleotide
gaaugugggagggcuccac

SEQ ID NO: 1905572 - RNA, 19 nt, Artificial Sequence
  Description of Artificial Sequence: Synthetic oligonucleotide
agccgugggauugugccga

SEQ ID NO: 1905573 - RNA, 19 nt, Artificial Sequence
  Description of Artificial Sequence: Synthetic oligonucleotide
ggggaacaaacucugccaa

SEQ ID NO: 1905574 - RNA, 19 nt, Artificial Sequence
  Description of Artificial Sequence: Synthetic oligonucleotide
gccaaggaagagcacauua

SEQ ID NO: 1905575 - RNA, 19 nt, Artificial Sequence
  Description of Artificial Sequence: Synthetic oligonucleotide
guaccacgaaagucucuuc

SEQ ID NO: 1905576 - RNA, 19 nt, Artificial Sequence
  Description of Artificial Sequence: Synthetic oligonucleotide
acgggugguccacugugaa

SEQ ID NO: 1905577 - RNA, 19 nt, Artificial Sequence
  Description of Artificial Sequence: Synthetic oligonucleotide
ggcuuguaccacgaaaguc

SEQ ID NO: 1905578 - RNA, 19 nt, Artificial Sequence
  Description of Artificial Sequence: Synthetic oligonucleotide
acauuagccgugggauugu

SEQ ID NO: 1905579 - RNA, 19 nt, Artificial Sequence
  Description of Artificial Sequence: Synthetic oligonucleotide
cgaauguagcaaugccucc

SEQ ID NO: 1905580 - RNA, 19 nt, Artificial Sequence
  Description of Artificial Sequence: Synthetic oligonucleotide
cacaaaggacuuguggaua

SEQ ID NO: 1905581 - RNA, 19 nt, Artificial Sequence
  Description of Artificial Sequence: Synthetic oligonucleotide
ucucuucuauggggaacaa

SEQ ID NO: 1905582 - RNA, 19 nt, Artificial Sequence
  Description of Artificial Sequence: Synthetic oligonucleotide
cgugggauugugccgaaug

SEQ ID NO: 1905583 - RNA, 19 nt, Artificial Sequence
  Description of Artificial Sequence: Synthetic oligonucleotide
gccgaaugaagaaaaugaa

SEQ ID NO: 1905584 - RNA, 19 nt, Artificial Sequence
  Description of Artificial Sequence: Synthetic oligonucleotide
cauuagccgugggauugug

SEQ ID NO: 1905585 - RNA, 19 nt, Artificial Sequence
  Description of Artificial Sequence: Synthetic oligonucleotide
agaaugugggagggcucca

SEQ ID NO: 1905586 - RNA, 19 nt, Artificial Sequence
  Description of Artificial Sequence: Synthetic oligonucleotide
cucugccaaggaagagcac

SEQ ID NO: 1905587 - RNA, 19 nt, Artificial Sequence
  Description of Artificial Sequence: Synthetic oligonucleotide
cacuuccacaaaggacuug

SEQ ID NO: 1905588 - RNA, 19 nt, Artificial Sequence
  Description of Artificial Sequence: Synthetic oligonucleotide
ggcgaauguagcaaugccu

SEQ ID NO: 1905589 - RNA, 19 nt, Artificial Sequence
  Description of Artificial Sequence: Synthetic oligonucleotide
cuuuauuggcaaggacaaa

SEQ ID NO: 1905590 - RNA, 19 nt, Artificial Sequence
  Description of Artificial Sequence: Synthetic oligonucleotide
ccucaggcaucaacauggc

SEQ ID NO: 1905591 - RNA, 19 nt, Artificial Sequence
  Description of Artificial Sequence: Synthetic oligonucleotide
gcaucaacauggcgaaugu

SEQ ID NO: 1905592 - RNA, 19 nt, Artificial Sequence
  Description of Artificial Sequence: Synthetic oligonucleotide
augccuccuguggcggcgg

SEQ ID NO: 1905593 - RNA, 19 nt, Artificial Sequence
  Description of Artificial Sequence: Synthetic oligonucleotide
cccuggauccugacaugcc

SEQ ID NO: 1905594 - RNA, 19 nt, Artificial Sequence
  Description of Artificial Sequence: Synthetic oligonucleotide
cugccaaggaagagcacau

SEQ ID NO: 1905595 - RNA, 19 nt, Artificial Sequence
  Description of Artificial Sequence: Synthetic oligonucleotide
ugccuccuguggcggcggc

SEQ ID NO: 1905596 - RNA, 19 nt, Artificial Sequence
  Description of Artificial Sequence: Synthetic oligonucleotide
cuccuguggcggcggcugc

SEQ ID NO: 1905597 - RNA, 19 nt, Artificial Sequence
  Description of Artificial Sequence: Synthetic oligonucleotide
cucuucuauggggaacaaa

SEQ ID NO: 1905598 - RNA, 19 nt, Artificial Sequence
  Description of Artificial Sequence: Synthetic oligonucleotide
gguccacugugaauucuuc

SEQ ID NO: 1905599 - RNA, 19 nt, Artificial Sequence
  Description of Artificial Sequence: Synthetic oligonucleotide
ggagggcuccacguuugcc

SEQ ID NO: 1905600 - RNA, 19 nt, Artificial Sequence
  Description of Artificial Sequence: Synthetic oligonucleotide
gggugguccacugugaauu

SEQ ID NO: 1905601 - RNA, 19 nt, Artificial Sequence
  Description of Artificial Sequence: Synthetic oligonucleotide
caucaacauggcgaaugua

SEQ ID NO: 1905602 - RNA, 19 nt, Artificial Sequence
  Description of Artificial Sequence: Synthetic oligonucleotide
gggagggcuccacguuugc

SEQ ID NO: 1905603 - RNA, 19 nt, Artificial Sequence
  Description of Artificial Sequence: Synthetic oligonucleotide
cucaggggauaaaacucuu

SEQ ID NO: 1905604 - RNA, 19 nt, Artificial Sequence
  Description of Artificial Sequence: Synthetic oligonucleotide
ggcggcugccucuguuccc

SEQ ID NO: 1905605 - RNA, 19 nt, Artificial Sequence
  Description of Artificial Sequence: Synthetic oligonucleotide
ccuccucauucacuuccac

SEQ ID NO: 1905606 - RNA, 19 nt, Artificial Sequence
  Description of Artificial Sequence: Synthetic oligonucleotide
gugggagggcuccacguuu

SEQ ID NO: 1905607 - RNA, 19 nt, Artificial Sequence
  Description of Artificial Sequence: Synthetic oligonucleotide
cucuuaagcucuggcuugu

SEQ ID NO: 1905608 - RNA, 19 nt, Artificial Sequence
  Description of Artificial Sequence: Synthetic oligonucleotide
ccacaaaggacuuguggau

SEQ ID NO: 1905609 - RNA, 19 nt, Artificial Sequence
  Description of Artificial Sequence: Synthetic oligonucleotide
gugguccacugugaauucu

SEQ ID NO: 1905610 - RNA, 19 nt, Artificial Sequence
  Description of Artificial Sequence: Synthetic oligonucleotide
gcggcggcugccucuguuc

SEQ ID NO: 1905611 - RNA, 19 nt, Artificial Sequence
  Description of Artificial Sequence: Synthetic oligonucleotide
guuucuggguagaggcuuu

SEQ ID NO: 1905612 - RNA, 19 nt, Artificial Sequence
  Description of Artificial Sequence: Synthetic oligonucleotide
cucuggcuuguaccacgaa

SEQ ID NO: 1905613 - RNA, 19 nt, Artificial Sequence
  Description of Artificial Sequence: Synthetic oligonucleotide
aggcaucaacauggcgaau

SEQ ID NO: 1905614 - RNA, 19 nt, Artificial Sequence
  Description of Artificial Sequence: Synthetic oligonucleotide
gcucuggcuuguaccacga

SEQ ID NO: 1905615 - RNA, 19 nt, Artificial Sequence
  Description of Artificial Sequence: Synthetic oligonucleotide
cuguggcggcggcugccuc

SEQ ID NO: 1905616 - RNA, 19 nt, Artificial Sequence
  Description of Artificial Sequence: Synthetic oligonucleotide
ccacgaaagucucuucuau

SEQ ID NO: 1905617 - RNA, 19 nt, Artificial Sequence
  Description of Artificial Sequence: Synthetic oligonucleotide
cccuccucauucacuucca

SEQ ID NO: 1905618 - RNA, 19 nt, Artificial Sequence
  Description of Artificial Sequence: Synthetic oligonucleotide
caaaggacuuguggauaau

SEQ ID NO: 1905619 - RNA, 19 nt, Artificial Sequence
  Description of Artificial Sequence: Synthetic oligonucleotide
cggcggcugccucuguucc

SEQ ID NO: 1905620 - RNA, 19 nt, Artificial Sequence
  Description of Artificial Sequence: Synthetic oligonucleotide
uggcggcggcugccucugu

SEQ ID NO: 1905621 - RNA, 19 nt, Artificial Sequence
  Description of Artificial Sequence: Synthetic oligonucleotide
gcggcugccucuguucccu

SEQ ID NO: 1905622 - RNA, 19 nt, Artificial Sequence
  Description of Artificial Sequence: Synthetic oligonucleotide
gccgugggauugugccgaa

SEQ ID NO: 1905623 - RNA, 19 nt, Artificial Sequence
  Description of Artificial Sequence: Synthetic oligonucleotide
ggcggcggcugccucuguu

SEQ ID NO: 1905624 - RNA, 19 nt, Artificial Sequence
  Description of Artificial Sequence: Synthetic oligonucleotide
cgggugguccacugugaau

SEQ ID NO: 1905625 - RNA, 19 nt, Artificial Sequence
  Description of Artificial Sequence: Synthetic oligonucleotide
gccuccuguggcggcggcu

SEQ ID NO: 1905626 - RNA, 19 nt, Artificial Sequence
  Description of Artificial Sequence: Synthetic oligonucleotide
ccgugggauugugccgaau

SEQ ID NO: 1905627 - RNA, 19 nt, Artificial Sequence
  Description of Artificial Sequence: Synthetic oligonucleotide
ucaauuuucuucuggaugg

SEQ ID NO: 1905628 - RNA, 19 nt, Artificial Sequence
  Description of Artificial Sequence: Synthetic oligonucleotide
uacugaaacaucauggagg

SEQ ID NO: 1905629 - RNA, 19 nt, Artificial Sequence
  Description of Artificial Sequence: Synthetic oligonucleotide
auaacaucgauguugaucu

SEQ ID NO: 1905630 - RNA, 19 nt, Artificial Sequence
  Description of Artificial Sequence: Synthetic oligonucleotide
acugaaacaucauggaggc

SEQ ID NO: 1905631 - RNA, 19 nt, Artificial Sequence
  Description of Artificial Sequence: Synthetic oligonucleotide
uuuucuguuagcuucacca

SEQ ID NO: 1905632 - RNA, 19 nt, Artificial Sequence
  Description of Artificial Sequence: Synthetic oligonucleotide
ugcuuaaauaggcacaagg

SEQ ID NO: 1905633 - RNA, 19 nt, Artificial Sequence
  Description of Artificial Sequence: Synthetic oligonucleotide
guugauauugucaaggccg

SEQ ID NO: 1905634 - RNA, 19 nt, Artificial Sequence
  Description of Artificial Sequence: Synthetic oligonucleotide
gauguagugagucauguug

SEQ ID NO: 1905635 - RNA, 19 nt, Artificial Sequence
  Description of Artificial Sequence: Synthetic oligonucleotide
aaugauggcgcacacaccu

SEQ ID NO: 1905636 - RNA, 19 nt, Artificial Sequence
  Description of Artificial Sequence: Synthetic oligonucleotide
gucaugaacaugcacaugg

SEQ ID NO: 1905637 - RNA, 19 nt, Artificial Sequence
  Description of Artificial Sequence: Synthetic oligonucleotide
auauugucaaggccgaagc

SEQ ID NO: 1905638 - RNA, 19 nt, Artificial Sequence
  Description of Artificial Sequence: Synthetic oligonucleotide
aaguacugaaacaucaugg

SEQ ID NO: 1905639 - RNA, 19 nt, Artificial Sequence
  Description of Artificial Sequence: Synthetic oligonucleotide
gagauaauacugcaacucg

SEQ ID NO: 1905640 - RNA, 19 nt, Artificial Sequence
  Description of Artificial Sequence: Synthetic oligonucleotide
acuugauaucaucugauuc

SEQ ID NO: 1905641 - RNA, 19 nt, Artificial Sequence
  Description of Artificial Sequence: Synthetic oligonucleotide
cugacuauggucacggugg

SEQ ID NO: 1905642 - RNA, 19 nt, Artificial Sequence
  Description of Artificial Sequence: Synthetic oligonucleotide
ugggugagaguucauagag

SEQ ID NO: 1905643 - RNA, 19 nt, Artificial Sequence
  Description of Artificial Sequence: Synthetic oligonucleotide
agcucugcaagucaugaac

SEQ ID NO: 1905644 - RNA, 19 nt, Artificial Sequence
  Description of Artificial Sequence: Synthetic oligonucleotide
cugcaagucaugaacaugc

SEQ ID NO: 1905645 - RNA, 19 nt, Artificial Sequence
  Description of Artificial Sequence: Synthetic oligonucleotide
ucuucaguuuaucuccccg

SEQ ID NO: 1905646 - RNA, 19 nt, Artificial Sequence
  Description of Artificial Sequence: Synthetic oligonucleotide
ucuguuagcuucaccauca

SEQ ID NO: 1905647 - RNA, 19 nt, Artificial Sequence
  Description of Artificial Sequence: Synthetic oligonucleotide
acuauggucacgguggcgc

SEQ ID NO: 1905648 - RNA, 19 nt, Artificial Sequence
  Description of Artificial Sequence: Synthetic oligonucleotide
uaaauaggcacaaggcaug

SEQ ID NO: 1905649 - RNA, 19 nt, Artificial Sequence
  Description of Artificial Sequence: Synthetic oligonucleotide
uagugagucauguugauau

SEQ ID NO: 1905650 - RNA, 19 nt, Artificial Sequence
  Description of Artificial Sequence: Synthetic oligonucleotide
ugagaguucauagaguaca

SEQ ID NO: 1905651 - RNA, 19 nt, Artificial Sequence
  Description of Artificial Sequence: Synthetic oligonucleotide
uuucauguacacagugggg

SEQ ID NO: 1905652 - RNA, 19 nt, Artificial Sequence
  Description of Artificial Sequence: Synthetic oligonucleotide
caaaguggaaguuuccagc

SEQ ID NO: 1905653 - RNA, 19 nt, Artificial Sequence
  Description of Artificial Sequence: Synthetic oligonucleotide
aguggaaguuuccagccac

SEQ ID NO: 1905654 - RNA, 19 nt, Artificial Sequence
  Description of Artificial Sequence: Synthetic oligonucleotide
ugaacaugcacaugggacu

SEQ ID NO: 1905655 - RNA, 19 nt, Artificial Sequence
  Description of Artificial Sequence: Synthetic oligonucleotide
aagcucgugccgcucagcc

SEQ ID NO: 1905656 - RNA, 19 nt, Artificial Sequence
  Description of Artificial Sequence: Synthetic oligonucleotide
guuugggucaaacacggcc

SEQ ID NO: 1905657 - RNA, 19 nt, Artificial Sequence
  Description of Artificial Sequence: Synthetic oligonucleotide
cucgacuuucccaagcucg

SEQ ID NO: 1905658 - RNA, 19 nt, Artificial Sequence
  Description of Artificial Sequence: Synthetic oligonucleotide
uugaucuucaguuuaucuc

SEQ ID NO: 1905659 - RNA, 19 nt, Artificial Sequence
  Description of Artificial Sequence: Synthetic oligonucleotide
ucgauguugaucuucaguu

SEQ ID NO: 1905660 - RNA, 19 nt, Artificial Sequence
  Description of Artificial Sequence: Synthetic oligonucleotide
acaugggacuguuggaagc

SEQ ID NO: 1905661 - RNA, 19 nt, Artificial Sequence
  Description of Artificial Sequence: Synthetic oligonucleotide
agaguacaaagacuccugg

SEQ ID NO: 1905662 - RNA, 19 nt, Artificial Sequence
  Description of Artificial Sequence: Synthetic oligonucleotide
agucgaugaguccagccac

SEQ ID NO: 1905663 - RNA, 19 nt, Artificial Sequence
  Description of Artificial Sequence: Synthetic oligonucleotide
uucaguuuaucuccccgag

SEQ ID NO: 1905664 - RNA, 19 nt, Artificial Sequence
  Description of Artificial Sequence: Synthetic oligonucleotide
ucaugaacaugcacauggg

SEQ ID NO: 1905665 - RNA, 19 nt, Artificial Sequence
  Description of Artificial Sequence: Synthetic oligonucleotide
caucgaugcuuaaauaggc

SEQ ID NO: 1905666 - RNA, 19 nt, Artificial Sequence
  Description of Artificial Sequence: Synthetic oligonucleotide
uucauguacacagugggga

SEQ ID NO: 1905667 - RNA, 19 nt, Artificial Sequence
  Description of Artificial Sequence: Synthetic oligonucleotide
ugaaacaucauggaggcuu

SEQ ID NO: 1905668 - RNA, 19 nt, Artificial Sequence
  Description of Artificial Sequence: Synthetic oligonucleotide
ugagauaauacugcaacuc

SEQ ID NO: 1905669 - RNA, 19 nt, Artificial Sequence
  Description of Artificial Sequence: Synthetic oligonucleotide
acaucauggaggcuugggg

SEQ ID NO: 1905670 - RNA, 19 nt, Artificial Sequence
  Description of Artificial Sequence: Synthetic oligonucleotide
cucucgucgacacugcucg

SEQ ID NO: 1905671 - RNA, 19 nt, Artificial Sequence
  Description of Artificial Sequence: Synthetic oligonucleotide
auugucaaggccgaagcuc

SEQ ID NO: 1905672 - RNA, 19 nt, Artificial Sequence
  Description of Artificial Sequence: Synthetic oligonucleotide
caugccuccaaugauggcg

SEQ ID NO: 1905673 - RNA, 19 nt, Artificial Sequence
  Description of Artificial Sequence: Synthetic oligonucleotide
guaaacaugccuccaauga

SEQ ID NO: 1905674 - RNA, 19 nt, Artificial Sequence
  Description of Artificial Sequence: Synthetic oligonucleotide
aacaugccuccaaugaugg

SEQ ID NO: 1905675 - RNA, 19 nt, Artificial Sequence
  Description of Artificial Sequence: Synthetic oligonucleotide
gaguuugggucaaacacgg

SEQ ID NO: 1905676 - RNA, 19 nt, Artificial Sequence
  Description of Artificial Sequence: Synthetic oligonucleotide
ggugagauaauacugcaac

SEQ ID NO: 1905677 - RNA, 19 nt, Artificial Sequence
  Description of Artificial Sequence: Synthetic oligonucleotide
uugggauaggcaucgaacu

SEQ ID NO: 1905678 - RNA, 19 nt, Artificial Sequence
  Description of Artificial Sequence: Synthetic oligonucleotide
ucgaugcuuaaauaggcac

SEQ ID NO: 1905679 - RNA, 19 nt, Artificial Sequence
  Description of Artificial Sequence: Synthetic oligonucleotide
aaacaugccuccaaugaug

SEQ ID NO: 1905680 - RNA, 19 nt, Artificial Sequence
  Description of Artificial Sequence: Synthetic oligonucleotide
gugcgggaaaauaacaucg

SEQ ID NO: 1905681 - RNA, 19 nt, Artificial Sequence
  Description of Artificial Sequence: Synthetic oligonucleotide
cuucccuagaucaauuuuc

SEQ ID NO: 1905682 - RNA, 19 nt, Artificial Sequence
  Description of Artificial Sequence: Synthetic oligonucleotide
guacugaaacaucauggag

SEQ ID NO: 1905683 - RNA, 19 nt, Artificial Sequence
  Description of Artificial Sequence: Synthetic oligonucleotide
caugggugagaguucauag

SEQ ID NO: 1905684 - RNA, 19 nt, Artificial Sequence
  Description of Artificial Sequence: Synthetic oligonucleotide
agauaauacugcaacucgg

SEQ ID NO: 1905685 - RNA, 19 nt, Artificial Sequence
  Description of Artificial Sequence: Synthetic oligonucleotide
aucuccccgagacuugucc

SEQ ID NO: 1905686 - RNA, 19 nt, Artificial Sequence
  Description of Artificial Sequence: Synthetic oligonucleotide
accguagcagcucucacag

SEQ ID NO: 1905687 - RNA, 19 nt, Artificial Sequence
  Description of Artificial Sequence: Synthetic oligonucleotide
ugguagaugagcgagucga

SEQ ID NO: 1905688 - RNA, 19 nt, Artificial Sequence
  Description of Artificial Sequence: Synthetic oligonucleotide
uaaacaugccuccaaugau

SEQ ID NO: 1905689 - RNA, 19 nt, Artificial Sequence
  Description of Artificial Sequence: Synthetic oligonucleotide
uugauauugucaaggccga

SEQ ID NO: 1905690 - RNA, 19 nt, Artificial Sequence
  Description of Artificial Sequence: Synthetic oligonucleotide
gauaguccuccccaaauga

SEQ ID NO: 1905691 - RNA, 19 nt, Artificial Sequence
  Description of Artificial Sequence: Synthetic oligonucleotide
acugacuauggucacggug

SEQ ID NO: 1905692 - RNA, 19 nt, Artificial Sequence
  Description of Artificial Sequence: Synthetic oligonucleotide
cucacagcgauugggaucc

SEQ ID NO: 1905693 - RNA, 19 nt, Artificial Sequence
  Description of Artificial Sequence: Synthetic oligonucleotide
uguuacagcacuugauauc

SEQ ID NO: 1905694 - RNA, 19 nt, Artificial Sequence
  Description of Artificial Sequence: Synthetic oligonucleotide
auuggcaaccuucucgugu

SEQ ID NO: 1905695 - RNA, 19 nt, Artificial Sequence
  Description of Artificial Sequence: Synthetic oligonucleotide
gaaggcccagccucgacgg

SEQ ID NO: 1905696 - RNA, 19 nt, Artificial Sequence
  Description of Artificial Sequence: Synthetic oligonucleotide
gggaaaauaacaucgaugu

SEQ ID NO: 1905697 - RNA, 19 nt, Artificial Sequence
  Description of Artificial Sequence: Synthetic oligonucleotide
gucaaacacggccaccucg

SEQ ID NO: 1905698 - RNA, 19 nt, Artificial Sequence
  Description of Artificial Sequence: Synthetic oligonucleotide
agagugguagaugagcgag

SEQ ID NO: 1905699 - RNA, 19 nt, Artificial Sequence
  Description of Artificial Sequence: Synthetic oligonucleotide
uuggggugcagugacauug

SEQ ID NO: 1905700 - RNA, 19 nt, Artificial Sequence
  Description of Artificial Sequence: Synthetic oligonucleotide
agacuuguccacguagagc

SEQ ID NO: 1905701 - RNA, 19 nt, Artificial Sequence
  Description of Artificial Sequence: Synthetic oligonucleotide
ucgguggugagauaauacu

SEQ ID NO: 1905702 - RNA, 19 nt, Artificial Sequence
  Description of Artificial Sequence: Synthetic oligonucleotide
ugugcgggaaaauaacauc

SEQ ID NO: 1905703 - RNA, 19 nt, Artificial Sequence
  Description of Artificial Sequence: Synthetic oligonucleotide
auagaguacaaagacuccu

SEQ ID NO: 1905704 - RNA, 19 nt, Artificial Sequence
  Description of Artificial Sequence: Synthetic oligonucleotide
aguucauagaguacaaaga

SEQ ID NO: 1905705 - RNA, 19 nt, Artificial Sequence
  Description of Artificial Sequence: Synthetic oligonucleotide
uugucaagccguuucuuga

SEQ ID NO: 1905706 - RNA, 19 nt, Artificial Sequence
  Description of Artificial Sequence: Synthetic oligonucleotide
uccggguucuugaaggccc

SEQ ID NO: 1905707 - RNA, 19 nt, Artificial Sequence
  Description of Artificial Sequence: Synthetic oligonucleotide
guuggaagcucuucccagg

SEQ ID NO: 1905708 - RNA, 19 nt, Artificial Sequence
  Description of Artificial Sequence: Synthetic oligonucleotide
aucuucaguuuaucucccc

SEQ ID NO: 1905709 - RNA, 19 nt, Artificial Sequence
  Description of Artificial Sequence: Synthetic oligonucleotide
ugggauaggcaucgaacug

SEQ ID NO: 1905710 - RNA, 19 nt, Artificial Sequence
  Description of Artificial Sequence: Synthetic oligonucleotide
cucgugucuggucacagag

SEQ ID NO: 1905711 - RNA, 19 nt, Artificial Sequence
  Description of Artificial Sequence: Synthetic oligonucleotide
ucaagccguuucuugaaca

SEQ ID NO: 1905712 - RNA, 19 nt, Artificial Sequence
  Description of Artificial Sequence: Synthetic oligonucleotide
gagaaggccacugacuaug

SEQ ID NO: 1905713 - RNA, 19 nt, Artificial Sequence
  Description of Artificial Sequence: Synthetic oligonucleotide
auggcaucgaugcuuaaau

SEQ ID NO: 1905714 - RNA, 19 nt, Artificial Sequence
  Description of Artificial Sequence: Synthetic oligonucleotide
agucuugggauaggcaucg

SEQ ID NO: 1905715 - RNA, 19 nt, Artificial Sequence
  Description of Artificial Sequence: Synthetic oligonucleotide
uuuaucuccccgagacuug

SEQ ID NO: 1905716 - RNA, 19 nt, Artificial Sequence
  Description of Artificial Sequence: Synthetic oligonucleotide
uaggcaucgaacugcuuca

SEQ ID NO: 1905717 - RNA, 19 nt, Artificial Sequence
  Description of Artificial Sequence: Synthetic oligonucleotide
cuugaacagguugugcucc

SEQ ID NO: 1905718 - RNA, 19 nt, Artificial Sequence
  Description of Artificial Sequence: Synthetic oligonucleotide
gagacuuguccacguagag

SEQ ID NO: 1905719 - RNA, 19 nt, Artificial Sequence
  Description of Artificial Sequence: Synthetic oligonucleotide
ugauaucaucugauucugc

SEQ ID NO: 1905720 - RNA, 19 nt, Artificial Sequence
  Description of Artificial Sequence: Synthetic oligonucleotide
cugguuuguccucagcacc

SEQ ID NO: 1905721 - RNA, 19 nt, Artificial Sequence
  Description of Artificial Sequence: Synthetic oligonucleotide
cacguagagcucaggaugc

SEQ ID NO: 1905722 - RNA, 19 nt, Artificial Sequence
  Description of Artificial Sequence: Synthetic oligonucleotide
aguccagccacaguaaaca

SEQ ID NO: 1905723 - RNA, 19 nt, Artificial Sequence
  Description of Artificial Sequence: Synthetic oligonucleotide
ugcgggaaaauaacaucga

SEQ ID NO: 1905724 - RNA, 19 nt, Artificial Sequence
  Description of Artificial Sequence: Synthetic oligonucleotide
agccauacaccuggcagcc

SEQ ID NO: 1905725 - RNA, 19 nt, Artificial Sequence
  Description of Artificial Sequence: Synthetic oligonucleotide
auaguguccggguucuuga

SEQ ID NO: 1905726 - RNA, 19 nt, Artificial Sequence
  Description of Artificial Sequence: Synthetic oligonucleotide
aaguggaaguuuccagcca

SEQ ID NO: 1905727 - RNA, 19 nt, Artificial Sequence
  Description of Artificial Sequence: Synthetic oligonucleotide
cagcgauugggauccaggg

SEQ ID NO: 1905728 - RNA, 19 nt, Artificial Sequence
  Description of Artificial Sequence: Synthetic oligonucleotide
aagccguuucuugaacagg

SEQ ID NO: 1905729 - RNA, 19 nt, Artificial Sequence
  Description of Artificial Sequence: Synthetic oligonucleotide
gaugcuuaaauaggcacaa

SEQ ID NO: 1905730 - RNA, 19 nt, Artificial Sequence
  Description of Artificial Sequence: Synthetic oligonucleotide
ucuucccuagaucaauuuu

SEQ ID NO: 1905731 - RNA, 19 nt, Artificial Sequence
  Description of Artificial Sequence: Synthetic oligonucleotide
gagucgaugaguccagcca

SEQ ID NO: 1905732 - RNA, 19 nt, Artificial Sequence
  Description of Artificial Sequence: Synthetic oligonucleotide
uacagcacuugauaucauc

SEQ ID NO: 1905733 - RNA, 19 nt, Artificial Sequence
  Description of Artificial Sequence: Synthetic oligonucleotide
aaauaggcacaaggcaugu

SEQ ID NO: 1905734 - RNA, 19 nt, Artificial Sequence
  Description of Artificial Sequence: Synthetic oligonucleotide
auaguccuccccaaaugac

SEQ ID NO: 1905735 - RNA, 19 nt, Artificial Sequence
  Description of Artificial Sequence: Synthetic oligonucleotide
ugauggcgcacacaccugu

SEQ ID NO: 1905736 - RNA, 19 nt, Artificial Sequence
  Description of Artificial Sequence: Synthetic oligonucleotide
augagcgagucgaugaguc

SEQ ID NO: 1905737 - RNA, 19 nt, Artificial Sequence
  Description of Artificial Sequence: Synthetic oligonucleotide
ucuugggauaggcaucgaa

SEQ ID NO: 1905738 - RNA, 19 nt, Artificial Sequence
  Description of Artificial Sequence: Synthetic oligonucleotide
cucaggaugcaccucggug

SEQ ID NO: 1905739 - RNA, 19 nt, Artificial Sequence
  Description of Artificial Sequence: Synthetic oligonucleotide
ucgacacugcucgauagug

SEQ ID NO: 1905740 - RNA, 19 nt, Artificial Sequence
  Description of Artificial Sequence: Synthetic oligonucleotide
gaaacaucauggaggcuug

SEQ ID NO: 1905741 - RNA, 19 nt, Artificial Sequence
  Description of Artificial Sequence: Synthetic oligonucleotide
gugagucauguugauauug

SEQ ID NO: 1905742 - RNA, 19 nt, Artificial Sequence
  Description of Artificial Sequence: Synthetic oligonucleotide
cacugcucgauaguguccg

SEQ ID NO: 1905743 - RNA, 19 nt, Artificial Sequence
  Description of Artificial Sequence: Synthetic oligonucleotide
uaacccggaaguccuccag

SEQ ID NO: 1905744 - RNA, 19 nt, Artificial Sequence
  Description of Artificial Sequence: Synthetic oligonucleotide
cuguuccccggccacaucc

SEQ ID NO: 1905745 - RNA, 19 nt, Artificial Sequence
  Description of Artificial Sequence: Synthetic oligonucleotide
accuucucgugucugguca

SEQ ID NO: 1905746 - RNA, 19 nt, Artificial Sequence
  Description of Artificial Sequence: Synthetic oligonucleotide
uuggcaaccuucucguguc

SEQ ID NO: 1905747 - RNA, 19 nt, Artificial Sequence
  Description of Artificial Sequence: Synthetic oligonucleotide
ugggugaaggaccuguguu

SEQ ID NO: 1905748 - RNA, 19 nt, Artificial Sequence
  Description of Artificial Sequence: Synthetic oligonucleotide
ucaaggccgaagcucugca

SEQ ID NO: 1905749 - RNA, 19 nt, Artificial Sequence
  Description of Artificial Sequence: Synthetic oligonucleotide
acguugucuucccuagauc

SEQ ID NO: 1905750 - RNA, 19 nt, Artificial Sequence
  Description of Artificial Sequence: Synthetic oligonucleotide
ugcuugauguagugaguca

SEQ ID NO: 1905751 - RNA, 19 nt, Artificial Sequence
  Description of Artificial Sequence: Synthetic oligonucleotide
ugcaagucaugaacaugca

SEQ ID NO: 1905752 - RNA, 19 nt, Artificial Sequence
  Description of Artificial Sequence: Synthetic oligonucleotide
ugacuauggucacgguggc

SEQ ID NO: 1905753 - RNA, 19 nt, Artificial Sequence
  Description of Artificial Sequence: Synthetic oligonucleotide
augccuccaaugauggcgc

SEQ ID NO: 1905754 - RNA, 19 nt, Artificial Sequence
  Description of Artificial Sequence: Synthetic oligonucleotide
uggcgcacacaccugucag

SEQ ID NO: 1905755 - RNA, 19 nt, Artificial Sequence
  Description of Artificial Sequence: Synthetic oligonucleotide
cccuagaucaauuuucuuc

SEQ ID NO: 1905756 - RNA, 19 nt, Artificial Sequence
  Description of Artificial Sequence: Synthetic oligonucleotide
aguguccggguucuugaag

SEQ ID NO: 1905757 - RNA, 19 nt, Artificial Sequence
  Description of Artificial Sequence: Synthetic oligonucleotide
ucgacuuucccaagcucgu

SEQ ID NO: 1905758 - RNA, 19 nt, Artificial Sequence
  Description of Artificial Sequence: Synthetic oligonucleotide
guagagcucaggaugcacc

SEQ ID NO: 1905759 - RNA, 19 nt, Artificial Sequence
  Description of Artificial Sequence: Synthetic oligonucleotide
acggcgguaugccucccgc

SEQ ID NO: 1905760 - RNA, 19 nt, Artificial Sequence
  Description of Artificial Sequence: Synthetic oligonucleotide
gaagcucugcaagucauga

SEQ ID NO: 1905761 - RNA, 19 nt, Artificial Sequence
  Description of Artificial Sequence: Synthetic oligonucleotide
cacaugggacuguuggaag

SEQ ID NO: 1905762 - RNA, 19 nt, Artificial Sequence
  Description of Artificial Sequence: Synthetic oligonucleotide
uguagugagucauguugau

SEQ ID NO: 1905763 - RNA, 19 nt, Artificial Sequence
  Description of Artificial Sequence: Synthetic oligonucleotide
uccacguagagcucaggau

SEQ ID NO: 1905764 - RNA, 19 nt, Artificial Sequence
  Description of Artificial Sequence: Synthetic oligonucleotide
ugucaagccguuucuugaa

SEQ ID NO: 1905765 - RNA, 19 nt, Artificial Sequence
  Description of Artificial Sequence: Synthetic oligonucleotide
cguagcagcucucacagcg

SEQ ID NO: 1905766 - RNA, 19 nt, Artificial Sequence
  Description of Artificial Sequence: Synthetic oligonucleotide
ggcugaagcccucucgucg

SEQ ID NO: 1905767 - RNA, 19 nt, Artificial Sequence
  Description of Artificial Sequence: Synthetic oligonucleotide
acaugccuccaaugauggc

SEQ ID NO: 1905768 - RNA, 19 nt, Artificial Sequence
  Description of Artificial Sequence: Synthetic oligonucleotide
acagcgauugggauccagg

SEQ ID NO: 1905769 - RNA, 19 nt, Artificial Sequence
  Description of Artificial Sequence: Synthetic oligonucleotide
ugagcgagucgaugagucc

SEQ ID NO: 1905770 - RNA, 19 nt, Artificial Sequence
  Description of Artificial Sequence: Synthetic oligonucleotide
caccuggcagccuucauuc

SEQ ID NO: 1905771 - RNA, 19 nt, Artificial Sequence
  Description of Artificial Sequence: Synthetic oligonucleotide
gcacacaccugucaggaag

SEQ ID NO: 1905772 - RNA, 19 nt, Artificial Sequence
  Description of Artificial Sequence: Synthetic oligonucleotide
agggaguuugggucaaaca

SEQ ID NO: 1905773 - RNA, 19 nt, Artificial Sequence
  Description of Artificial Sequence: Synthetic oligonucleotide
ugcucgauaguguccgggu

SEQ ID NO: 1905774 - RNA, 19 nt, Artificial Sequence
  Description of Artificial Sequence: Synthetic oligonucleotide
cucgauaguguccggguuc

SEQ ID NO: 1905775 - RNA, 19 nt, Artificial Sequence
  Description of Artificial Sequence: Synthetic oligonucleotide
aguuuaucuccccgagacu

SEQ ID NO: 1905776 - RNA, 19 nt, Artificial Sequence
  Description of Artificial Sequence: Synthetic oligonucleotide
cauguacacaguggggacc

SEQ ID NO: 1905777 - RNA, 19 nt, Artificial Sequence
  Description of Artificial Sequence: Synthetic oligonucleotide
auguagugagucauguuga

SEQ ID NO: 1905778 - RNA, 19 nt, Artificial Sequence
  Description of Artificial Sequence: Synthetic oligonucleotide
uugggucaaacacggccac

SEQ ID NO: 1905779 - RNA, 19 nt, Artificial Sequence
  Description of Artificial Sequence: Synthetic oligonucleotide
cuuucccaagcucgugccg

SEQ ID NO: 1905780 - RNA, 19 nt, Artificial Sequence
  Description of Artificial Sequence: Synthetic oligonucleotide
aggucuuaacccggaaguc

SEQ ID NO: 1905781 - RNA, 19 nt, Artificial Sequence
  Description of Artificial Sequence: Synthetic oligonucleotide
agcgauugggauccaggga

SEQ ID NO: 1905782 - RNA, 19 nt, Artificial Sequence
  Description of Artificial Sequence: Synthetic oligonucleotide
aaauaacaucgauguugau

SEQ ID NO: 1905783 - RNA, 19 nt, Artificial Sequence
  Description of Artificial Sequence: Synthetic oligonucleotide
uuaacccggaaguccucca

SEQ ID NO: 1905784 - RNA, 19 nt, Artificial Sequence
  Description of Artificial Sequence: Synthetic oligonucleotide
uguccggguucuugaaggc

SEQ ID NO: 1905785 - RNA, 19 nt, Artificial Sequence
  Description of Artificial Sequence: Synthetic oligonucleotide
ucacagagaacugguuugu

SEQ ID NO: 1905786 - RNA, 19 nt, Artificial Sequence
  Description of Artificial Sequence: Synthetic oligonucleotide
cuucaguuuaucuccccga

SEQ ID NO: 1905787 - RNA, 19 nt, Artificial Sequence
  Description of Artificial Sequence: Synthetic oligonucleotide
uuguccacguagagcucag

SEQ ID NO: 1905788 - RNA, 19 nt, Artificial Sequence
  Description of Artificial Sequence: Synthetic oligonucleotide
gugguagaugagcgagucg

SEQ ID NO: 1905789 - RNA, 19 nt, Artificial Sequence
  Description of Artificial Sequence: Synthetic oligonucleotide
ucuccccgagacuugucca

SEQ ID NO: 1905790 - RNA, 19 nt, Artificial Sequence
  Description of Artificial Sequence: Synthetic oligonucleotide
gagcaugagaaggccacug

SEQ ID NO: 1905791 - RNA, 19 nt, Artificial Sequence
  Description of Artificial Sequence: Synthetic oligonucleotide
ugucuucccuagaucaauu

SEQ ID NO: 1905792 - RNA, 19 nt, Artificial Sequence
  Description of Artificial Sequence: Synthetic oligonucleotide
auggucacgguggcgcccc

SEQ ID NO: 1905793 - RNA, 19 nt, Artificial Sequence
  Description of Artificial Sequence: Synthetic oligonucleotide
ucgaugaguccagccacag

SEQ ID NO: 1905794 - RNA, 19 nt, Artificial Sequence
  Description of Artificial Sequence: Synthetic oligonucleotide
ucgugucuggucacagaga

SEQ ID NO: 1905795 - RNA, 19 nt, Artificial Sequence
  Description of Artificial Sequence: Synthetic oligonucleotide
ggucuuaacccggaagucc

SEQ ID NO: 1905796 - RNA, 19 nt, Artificial Sequence
  Description of Artificial Sequence: Synthetic oligonucleotide
uuaucuccccgagacuugu

SEQ ID NO: 1905797 - RNA, 19 nt, Artificial Sequence
  Description of Artificial Sequence: Synthetic oligonucleotide
ucgauaguguccggguucu

SEQ ID NO: 1905798 - RNA, 19 nt, Artificial Sequence
  Description of Artificial Sequence: Synthetic oligonucleotide
ucgacggcgguaugccucc

SEQ ID NO: 1905799 - RNA, 19 nt, Artificial Sequence
  Description of Artificial Sequence: Synthetic oligonucleotide
ccacguagagcucaggaug

SEQ ID NO: 1905800 - RNA, 19 nt, Artificial Sequence
  Description of Artificial Sequence: Synthetic oligonucleotide
gggauaggcaucgaacugc

SEQ ID NO: 1905801 - RNA, 19 nt, Artificial Sequence
  Description of Artificial Sequence: Synthetic oligonucleotide
ggcacaaggcaugugcggg

SEQ ID NO: 1905802 - RNA, 19 nt, Artificial Sequence
  Description of Artificial Sequence: Synthetic oligonucleotide
auguacacaguggggacca

SEQ ID NO: 1905803 - RNA, 19 nt, Artificial Sequence
  Description of Artificial Sequence: Synthetic oligonucleotide
gcaaccuucucgugucugg

SEQ ID NO: 1905804 - RNA, 19 nt, Artificial Sequence
  Description of Artificial Sequence: Synthetic oligonucleotide
cagccucugagcucacggg

SEQ ID NO: 1905805 - RNA, 19 nt, Artificial Sequence
  Description of Artificial Sequence: Synthetic oligonucleotide
aucgaugcuuaaauaggca

SEQ ID NO: 1905806 - RNA, 19 nt, Artificial Sequence
  Description of Artificial Sequence: Synthetic oligonucleotide
ucaugggugagaguucaua

SEQ ID NO: 1905807 - RNA, 19 nt, Artificial Sequence
  Description of Artificial Sequence: Synthetic oligonucleotide
cuauggucacgguggcgcc

SEQ ID NO: 1905808 - RNA, 19 nt, Artificial Sequence
  Description of Artificial Sequence: Synthetic oligonucleotide
cucgacggcgguaugccuc

SEQ ID NO: 1905809 - RNA, 19 nt, Artificial Sequence
  Description of Artificial Sequence: Synthetic oligonucleotide
ugccuggauaguccucccc

SEQ ID NO: 1905810 - RNA, 19 nt, Artificial Sequence
  Description of Artificial Sequence: Synthetic oligonucleotide
ugauguagugagucauguu

SEQ ID NO: 1905811 - RNA, 19 nt, Artificial Sequence
  Description of Artificial Sequence: Synthetic oligonucleotide
ugagaaggccacugacuau

SEQ ID NO: 1905812 - RNA, 19 nt, Artificial Sequence
  Description of Artificial Sequence: Synthetic oligonucleotide
agccucgacggcgguaugc

SEQ ID NO: 1905813 - RNA, 19 nt, Artificial Sequence
  Description of Artificial Sequence: Synthetic oligonucleotide
gugcuugauguagugaguc

SEQ ID NO: 1905814 - RNA, 19 nt, Artificial Sequence
  Description of Artificial Sequence: Synthetic oligonucleotide
uguuccccggccacaucca

SEQ ID NO: 1905815 - RNA, 19 nt, Artificial Sequence
  Description of Artificial Sequence: Synthetic oligonucleotide
gcaggucuuaacccggaag

SEQ ID NO: 1905816 - RNA, 19 nt, Artificial Sequence
  Description of Artificial Sequence: Synthetic oligonucleotide
ugagcucacggggaugcca

SEQ ID NO: 1905817 - RNA, 19 nt, Artificial Sequence
  Description of Artificial Sequence: Synthetic oligonucleotide
ucucgugucuggucacaga

SEQ ID NO: 1905818 - RNA, 19 nt, Artificial Sequence
  Description of Artificial Sequence: Synthetic oligonucleotide
aaguuuccagccaccuugu

SEQ ID NO: 1905819 - RNA, 19 nt, Artificial Sequence
  Description of Artificial Sequence: Synthetic oligonucleotide
gacuauggucacgguggcg

SEQ ID NO: 1905820 - RNA, 19 nt, Artificial Sequence
  Description of Artificial Sequence: Synthetic oligonucleotide
cgggaaaauaacaucgaug

SEQ ID NO: 1905821 - RNA, 19 nt, Artificial Sequence
  Description of Artificial Sequence: Synthetic oligonucleotide
uccccgagacuuguccacg

SEQ ID NO: 1905822 - RNA, 19 nt, Artificial Sequence
  Description of Artificial Sequence: Synthetic oligonucleotide
ucuuaacccggaaguccuc

SEQ ID NO: 1905823 - RNA, 19 nt, Artificial Sequence
  Description of Artificial Sequence: Synthetic oligonucleotide
augugcgggaaaauaacau

SEQ ID NO: 1905824 - RNA, 19 nt, Artificial Sequence
  Description of Artificial Sequence: Synthetic oligonucleotide
cacggggaugccauccuug

SEQ ID NO: 1905825 - RNA, 19 nt, Artificial Sequence
  Description of Artificial Sequence: Synthetic oligonucleotide
gaguccagccacaguaaac

SEQ ID NO: 1905826 - RNA, 19 nt, Artificial Sequence
  Description of Artificial Sequence: Synthetic oligonucleotide
gucaagccguuucuugaac

SEQ ID NO: 1905827 - RNA, 19 nt, Artificial Sequence
  Description of Artificial Sequence: Synthetic oligonucleotide
gcuguuacagcacuugaua

SEQ ID NO: 1905828 - RNA, 19 nt, Artificial Sequence
  Description of Artificial Sequence: Synthetic oligonucleotide
caccucgacuuucccaagc

SEQ ID NO: 1905829 - RNA, 19 nt, Artificial Sequence
  Description of Artificial Sequence: Synthetic oligonucleotide
caucauggaggcuuggggu

SEQ ID NO: 1905830 - RNA, 19 nt, Artificial Sequence
  Description of Artificial Sequence: Synthetic oligonucleotide
gaugcaccucgguggugag

SEQ ID NO: 1905831 - RNA, 19 nt, Artificial Sequence
  Description of Artificial Sequence: Synthetic oligonucleotide
caugagaaggccacugacu

SEQ ID NO: 1905832 - RNA, 19 nt, Artificial Sequence
  Description of Artificial Sequence: Synthetic oligonucleotide
ccuagaucaauuuucuucu

SEQ ID NO: 1905833 - RNA, 19 nt, Artificial Sequence
  Description of Artificial Sequence: Synthetic oligonucleotide
caggucuuaacccggaagu

SEQ ID NO: 1905834 - RNA, 19 nt, Artificial Sequence
  Description of Artificial Sequence: Synthetic oligonucleotide
uuccccggccacauccaug

SEQ ID NO: 1905835 - RNA, 19 nt, Artificial Sequence
  Description of Artificial Sequence: Synthetic oligonucleotide
agugagucauguugauauu

SEQ ID NO: 1905836 - RNA, 19 nt, Artificial Sequence
  Description of Artificial Sequence: Synthetic oligonucleotide
gacggcgguaugccucccg

SEQ ID NO: 1905837 - RNA, 19 nt, Artificial Sequence
  Description of Artificial Sequence: Synthetic oligonucleotide
acggccaccucgacuuucc

SEQ ID NO: 1905838 - RNA, 19 nt, Artificial Sequence
  Description of Artificial Sequence: Synthetic oligonucleotide
uggcaucgaugcuuaaaua

SEQ ID NO: 1905839 - RNA, 19 nt, Artificial Sequence
  Description of Artificial Sequence: Synthetic oligonucleotide
cuccauggggaccggccgg

SEQ ID NO: 1905840 - RNA, 19 nt, Artificial Sequence
  Description of Artificial Sequence: Synthetic oligonucleotide
aggccgaagcucugcaagu

SEQ ID NO: 1905841 - RNA, 19 nt, Artificial Sequence
  Description of Artificial Sequence: Synthetic oligonucleotide
cugcucgauaguguccggg

SEQ ID NO: 1905842 - RNA, 19 nt, Artificial Sequence
  Description of Artificial Sequence: Synthetic oligonucleotide
uauggucacgguggcgccc

SEQ ID NO: 1905843 - RNA, 19 nt, Artificial Sequence
  Description of Artificial Sequence: Synthetic oligonucleotide
ucgucgacacugcucgaua

SEQ ID NO: 1905844 - RNA, 19 nt, Artificial Sequence
  Description of Artificial Sequence: Synthetic oligonucleotide
caucaugggugagaguuca

SEQ ID NO: 1905845 - RNA, 19 nt, Artificial Sequence
  Description of Artificial Sequence: Synthetic oligonucleotide
uuacagcacuugauaucau

SEQ ID NO: 1905846 - RNA, 19 nt, Artificial Sequence
  Description of Artificial Sequence: Synthetic oligonucleotide
uaugccucccgcacaucuu

SEQ ID NO: 1905847 - RNA, 19 nt, Artificial Sequence
  Description of Artificial Sequence: Synthetic oligonucleotide
ugacuuccaagaagccaua

SEQ ID NO: 1905848 - RNA, 19 nt, Artificial Sequence
  Description of Artificial Sequence: Synthetic oligonucleotide
agaguucauagaguacaaa

SEQ ID NO: 1905849 - RNA, 19 nt, Artificial Sequence
  Description of Artificial Sequence: Synthetic oligonucleotide
cugauucugcaccguagca

SEQ ID NO: 1905850 - RNA, 19 nt, Artificial Sequence
  Description of Artificial Sequence: Synthetic oligonucleotide
gagaguucauagaguacaa

SEQ ID NO: 1905851 - RNA, 19 nt, Artificial Sequence
  Description of Artificial Sequence: Synthetic oligonucleotide
cuccccgagacuuguccac

SEQ ID NO: 1905852 - RNA, 19 nt, Artificial Sequence
  Description of Artificial Sequence: Synthetic oligonucleotide
guacacaguggggaccacc

SEQ ID NO: 1905853 - RNA, 19 nt, Artificial Sequence
  Description of Artificial Sequence: Synthetic oligonucleotide
gugagaguucauagaguac

SEQ ID NO: 1905854 - RNA, 19 nt, Artificial Sequence
  Description of Artificial Sequence: Synthetic oligonucleotide
uggucacagagaacugguu

SEQ ID NO: 1905855 - RNA, 19 nt, Artificial Sequence
  Description of Artificial Sequence: Synthetic oligonucleotide
uguccacguagagcucagg

SEQ ID NO: 1905856 - RNA, 19 nt, Artificial Sequence
  Description of Artificial Sequence: Synthetic oligonucleotide
cguugucuucccuagauca

SEQ ID NO: 1905857 - RNA, 19 nt, Artificial Sequence
  Description of Artificial Sequence: Synthetic oligonucleotide
gcaucgaacugcuucagcu

SEQ ID NO: 1905858 - RNA, 19 nt, Artificial Sequence
  Description of Artificial Sequence: Synthetic oligonucleotide
cauuggcaaccuucucgug

SEQ ID NO: 1905859 - RNA, 19 nt, Artificial Sequence
  Description of Artificial Sequence: Synthetic oligonucleotide
caccguagcagcucucaca

SEQ ID NO: 1905860 - RNA, 19 nt, Artificial Sequence
  Description of Artificial Sequence: Synthetic oligonucleotide
aaggcaugugcgggaaaau

SEQ ID NO: 1905861 - RNA, 19 nt, Artificial Sequence
  Description of Artificial Sequence: Synthetic oligonucleotide
ggcgcacacaccugucagg

SEQ ID NO: 1905862 - RNA, 19 nt, Artificial Sequence
  Description of Artificial Sequence: Synthetic oligonucleotide
cuggucacccagcagccca

SEQ ID NO: 1905863 - RNA, 19 nt, Artificial Sequence
  Description of Artificial Sequence: Synthetic oligonucleotide
auccacuuucauguacaca

SEQ ID NO: 1905864 - RNA, 19 nt, Artificial Sequence
  Description of Artificial Sequence: Synthetic oligonucleotide
agcuguuacagcacuugau

SEQ ID NO: 1905865 - RNA, 19 nt, Artificial Sequence
  Description of Artificial Sequence: Synthetic oligonucleotide
ggcccgagcagagugguag

SEQ ID NO: 1905866 - RNA, 19 nt, Artificial Sequence
  Description of Artificial Sequence: Synthetic oligonucleotide
guaugccucccgcacaucu

SEQ ID NO: 1905867 - RNA, 19 nt, Artificial Sequence
  Description of Artificial Sequence: Synthetic oligonucleotide
cagagugguagaugagcga

SEQ ID NO: 1905868 - RNA, 19 nt, Artificial Sequence
  Description of Artificial Sequence: Synthetic oligonucleotide
uucccaagcucgugccgcu

SEQ ID NO: 1905869 - RNA, 19 nt, Artificial Sequence
  Description of Artificial Sequence: Synthetic oligonucleotide
ggcaaaguggaaguuucca

SEQ ID NO: 1905870 - RNA, 19 nt, Artificial Sequence
  Description of Artificial Sequence: Synthetic oligonucleotide
ucccuagaucaauuuucuu

SEQ ID NO: 1905871 - RNA, 19 nt, Artificial Sequence
  Description of Artificial Sequence: Synthetic oligonucleotide
ugaagcccucucgucgaca

SEQ ID NO: 1905872 - RNA, 19 nt, Artificial Sequence
  Description of Artificial Sequence: Synthetic oligonucleotide
cagggaguuugggucaaac

SEQ ID NO: 1905873 - RNA, 19 nt, Artificial Sequence
  Description of Artificial Sequence: Synthetic oligonucleotide
ugauauugucaaggccgaa

SEQ ID NO: 1905874 - RNA, 19 nt, Artificial Sequence
  Description of Artificial Sequence: Synthetic oligonucleotide
caaagacuccuggcaggcc

SEQ ID NO: 1905875 - RNA, 19 nt, Artificial Sequence
  Description of Artificial Sequence: Synthetic oligonucleotide
gcucgugccgcucagccuc

SEQ ID NO: 1905876 - RNA, 19 nt, Artificial Sequence
  Description of Artificial Sequence: Synthetic oligonucleotide
gcaugugcgggaaaauaac

SEQ ID NO: 1905877 - RNA, 19 nt, Artificial Sequence
  Description of Artificial Sequence: Synthetic oligonucleotide
aagcccucucgucgacacu

SEQ ID NO: 1905878 - RNA, 19 nt, Artificial Sequence
  Description of Artificial Sequence: Synthetic oligonucleotide
ccgagacuuguccacguag

SEQ ID NO: 1905879 - RNA, 19 nt, Artificial Sequence
  Description of Artificial Sequence: Synthetic oligonucleotide
agcucacggggaugccauc

SEQ ID NO: 1905880 - RNA, 19 nt, Artificial Sequence
  Description of Artificial Sequence: Synthetic oligonucleotide
gccaccucgacuuucccaa

SEQ ID NO: 1905881 - RNA, 19 nt, Artificial Sequence
  Description of Artificial Sequence: Synthetic oligonucleotide
ccaaaugacaggugcuuga

SEQ ID NO: 1905882 - RNA, 19 nt, Artificial Sequence
  Description of Artificial Sequence: Synthetic oligonucleotide
cgguggugagauaauacug

SEQ ID NO: 1905883 - RNA, 19 nt, Artificial Sequence
  Description of Artificial Sequence: Synthetic oligonucleotide
ggcgguaugccucccgcac

SEQ ID NO: 1905884 - RNA, 19 nt, Artificial Sequence
  Description of Artificial Sequence: Synthetic oligonucleotide
uaucuccccgagacuuguc

SEQ ID NO: 1905885 - RNA, 19 nt, Artificial Sequence
  Description of Artificial Sequence: Synthetic oligonucleotide
uggcaaccuucucgugucu

SEQ ID NO: 1905886 - RNA, 19 nt, Artificial Sequence
  Description of Artificial Sequence: Synthetic oligonucleotide
agcucgugccgcucagccu

SEQ ID NO: 1905887 - RNA, 19 nt, Artificial Sequence
  Description of Artificial Sequence: Synthetic oligonucleotide
uccauggggaccggccgga

SEQ ID NO: 1905888 - RNA, 19 nt, Artificial Sequence
  Description of Artificial Sequence: Synthetic oligonucleotide
ggcaugugcgggaaaauaa

SEQ ID NO: 1905889 - RNA, 19 nt, Artificial Sequence
  Description of Artificial Sequence: Synthetic oligonucleotide
cauggcaucgaugcuuaaa

SEQ ID NO: 1905890 - RNA, 19 nt, Artificial Sequence
  Description of Artificial Sequence: Synthetic oligonucleotide
cagcuguuacagcacuuga

SEQ ID NO: 1905891 - RNA, 19 nt, Artificial Sequence
  Description of Artificial Sequence: Synthetic oligonucleotide
aggcaugugcgggaaaaua

SEQ ID NO: 1905892 - RNA, 19 nt, Artificial Sequence
  Description of Artificial Sequence: Synthetic oligonucleotide
gaugagcgagucgaugagu

SEQ ID NO: 1905893 - RNA, 19 nt, Artificial Sequence
  Description of Artificial Sequence: Synthetic oligonucleotide
gauggcgcacacaccuguc

SEQ ID NO: 1905894 - RNA, 19 nt, Artificial Sequence
  Description of Artificial Sequence: Synthetic oligonucleotide
gccuggauaguccucccca

SEQ ID NO: 1905895 - RNA, 19 nt, Artificial Sequence
  Description of Artificial Sequence: Synthetic oligonucleotide
auacaccuggcagccuuca

SEQ ID NO: 1905896 - RNA, 19 nt, Artificial Sequence
  Description of Artificial Sequence: Synthetic oligonucleotide
uaacaucgauguugaucuu

SEQ ID NO: 1905897 - RNA, 19 nt, Artificial Sequence
  Description of Artificial Sequence: Synthetic oligonucleotide
cacagagaacugguuuguc

SEQ ID NO: 1905898 - RNA, 19 nt, Artificial Sequence
  Description of Artificial Sequence: Synthetic oligonucleotide
caucugauucugcaccgua

SEQ ID NO: 1905899 - RNA, 19 nt, Artificial Sequence
  Description of Artificial Sequence: Synthetic oligonucleotide
gcugaagcccucucgucga

SEQ ID NO: 1905900 - RNA, 19 nt, Artificial Sequence
  Description of Artificial Sequence: Synthetic oligonucleotide
guagugagucauguugaua

SEQ ID NO: 1905901 - RNA, 19 nt, Artificial Sequence
  Description of Artificial Sequence: Synthetic oligonucleotide
ucucgucgacacugcucga

SEQ ID NO: 1905902 - RNA, 19 nt, Artificial Sequence
  Description of Artificial Sequence: Synthetic oligonucleotide
gucuggucacagagaacug

SEQ ID NO: 1905903 - RNA, 19 nt, Artificial Sequence
  Description of Artificial Sequence: Synthetic oligonucleotide
ggaugcaccucggugguga

SEQ ID NO: 1905904 - RNA, 19 nt, Artificial Sequence
  Description of Artificial Sequence: Synthetic oligonucleotide
cccauccacuuucauguac

SEQ ID NO: 1905905 - RNA, 19 nt, Artificial Sequence
  Description of Artificial Sequence: Synthetic oligonucleotide
cacagcgauugggauccag

SEQ ID NO: 1905906 - RNA, 19 nt, Artificial Sequence
  Description of Artificial Sequence: Synthetic oligonucleotide
acaaggcaugugcgggaaa

SEQ ID NO: 1905907 - RNA, 19 nt, Artificial Sequence
  Description of Artificial Sequence: Synthetic oligonucleotide
augauggcgcacacaccug

SEQ ID NO: 1905908 - RNA, 19 nt, Artificial Sequence
  Description of Artificial Sequence: Synthetic oligonucleotide
ggauccagggaguuugggu

SEQ ID NO: 1905909 - RNA, 19 nt, Artificial Sequence
  Description of Artificial Sequence: Synthetic oligonucleotide
cccgcaggucuuaacccgg

SEQ ID NO: 1905910 - RNA, 19 nt, Artificial Sequence
  Description of Artificial Sequence: Synthetic oligonucleotide
cuccacauccagcugcugu

SEQ ID NO: 1905911 - RNA, 19 nt, Artificial Sequence
  Description of Artificial Sequence: Synthetic oligonucleotide
ugccuccaaugauggcgca

SEQ ID NO: 1905912 - RNA, 19 nt, Artificial Sequence
  Description of Artificial Sequence: Synthetic oligonucleotide
caccucgguggugagauaa

SEQ ID NO: 1905913 - RNA, 19 nt, Artificial Sequence
  Description of Artificial Sequence: Synthetic oligonucleotide
cacacaccugucaggaagu

SEQ ID NO: 1905914 - RNA, 19 nt, Artificial Sequence
  Description of Artificial Sequence: Synthetic oligonucleotide
gucgaugaguccagccaca

SEQ ID NO: 1905915 - RNA, 19 nt, Artificial Sequence
  Description of Artificial Sequence: Synthetic oligonucleotide
caagcucgugccgcucagc

SEQ ID NO: 1905916 - RNA, 19 nt, Artificial Sequence
  Description of Artificial Sequence: Synthetic oligonucleotide
gcucacggggaugccaucc

SEQ ID NO: 1905917 - RNA, 19 nt, Artificial Sequence
  Description of Artificial Sequence: Synthetic oligonucleotide
cuacguugucuucccuaga

SEQ ID NO: 1905918 - RNA, 19 nt, Artificial Sequence
  Description of Artificial Sequence: Synthetic oligonucleotide
cacuugauaucaucugauu

SEQ ID NO: 1905919 - RNA, 19 nt, Artificial Sequence
  Description of Artificial Sequence: Synthetic oligonucleotide
gucgacacugcucgauagu

SEQ ID NO: 1905920 - RNA, 19 nt, Artificial Sequence
  Description of Artificial Sequence: Synthetic oligonucleotide
gcucucacagcgauuggga

SEQ ID NO: 1905921 - RNA, 19 nt, Artificial Sequence
  Description of Artificial Sequence: Synthetic oligonucleotide
cgucgacacugcucgauag

SEQ ID NO: 1905922 - RNA, 19 nt, Artificial Sequence
  Description of Artificial Sequence: Synthetic oligonucleotide
ccaucaugggugagaguuc

SEQ ID NO: 1905923 - RNA, 19 nt, Artificial Sequence
  Description of Artificial Sequence: Synthetic oligonucleotide
cccaaaugacaggugcuug

SEQ ID NO: 1905924 - RNA, 19 nt, Artificial Sequence
  Description of Artificial Sequence: Synthetic oligonucleotide
gccgaagcucugcaaguca

SEQ ID NO: 1905925 - RNA, 19 nt, Artificial Sequence
  Description of Artificial Sequence: Synthetic oligonucleotide
caucgaacugcuucagcuu

SEQ ID NO: 1905926 - RNA, 19 nt, Artificial Sequence
  Description of Artificial Sequence: Synthetic oligonucleotide
caaggccgaagcucugcaa

SEQ ID NO: 1905927 - RNA, 19 nt, Artificial Sequence
  Description of Artificial Sequence: Synthetic oligonucleotide
ggcaaccuucucgugucug

SEQ ID NO: 1905928 - RNA, 19 nt, Artificial Sequence
  Description of Artificial Sequence: Synthetic oligonucleotide
ccucucgucgacacugcuc

SEQ ID NO: 1905929 - RNA, 19 nt, Artificial Sequence
  Description of Artificial Sequence: Synthetic oligonucleotide
cuugaaggcccagccucga

SEQ ID NO: 1905930 - RNA, 19 nt, Artificial Sequence
  Description of Artificial Sequence: Synthetic oligonucleotide
gcacaaggcaugugcggga

SEQ ID NO: 1905931 - RNA, 19 nt, Artificial Sequence
  Description of Artificial Sequence: Synthetic oligonucleotide
ggccaccucgacuuuccca

SEQ ID NO: 1905932 - RNA, 19 nt, Artificial Sequence
  Description of Artificial Sequence: Synthetic oligonucleotide
caaaugacaggugcuugau

SEQ ID NO: 1905933 - RNA, 19 nt, Artificial Sequence
  Description of Artificial Sequence: Synthetic oligonucleotide
ccauuggcaaccuucucgu

SEQ ID NO: 1905934 - RNA, 19 nt, Artificial Sequence
  Description of Artificial Sequence: Synthetic oligonucleotide
ccuucucgugucuggucac

SEQ ID NO: 1905935 - RNA, 19 nt, Artificial Sequence
  Description of Artificial Sequence: Synthetic oligonucleotide
cugagcucacggggaugcc

SEQ ID NO: 1905936 - RNA, 19 nt, Artificial Sequence
  Description of Artificial Sequence: Synthetic oligonucleotide
gcuugauguagugagucau

SEQ ID NO: 1905937 - RNA, 19 nt, Artificial Sequence
  Description of Artificial Sequence: Synthetic oligonucleotide
cucucacagcgauugggau

SEQ ID NO: 1905938 - RNA, 19 nt, Artificial Sequence
  Description of Artificial Sequence: Synthetic oligonucleotide
cacaaggcaugugcgggaa

SEQ ID NO: 1905939 - RNA, 19 nt, Artificial Sequence
  Description of Artificial Sequence: Synthetic oligonucleotide
cgagacuuguccacguaga

SEQ ID NO: 1905940 - RNA, 19 nt, Artificial Sequence
  Description of Artificial Sequence: Synthetic oligonucleotide
gccucgacggcgguaugcc

SEQ ID NO: 1905941 - RNA, 19 nt, Artificial Sequence
  Description of Artificial Sequence: Synthetic oligonucleotide
gcgcacacaccugucagga

SEQ ID NO: 1905942 - RNA, 19 nt, Artificial Sequence
  Description of Artificial Sequence: Synthetic oligonucleotide
ccuccaaugauggcgcaca

SEQ ID NO: 1905943 - RNA, 19 nt, Artificial Sequence
  Description of Artificial Sequence: Synthetic oligonucleotide
gccgcucagccucugagcu

SEQ ID NO: 1905944 - RNA, 19 nt, Artificial Sequence
  Description of Artificial Sequence: Synthetic oligonucleotide
ggccacugacuauggucac

SEQ ID NO: 1905945 - RNA, 19 nt, Artificial Sequence
  Description of Artificial Sequence: Synthetic oligonucleotide
ccucgacuuucccaagcuc

SEQ ID NO: 1905946 - RNA, 19 nt, Artificial Sequence
  Description of Artificial Sequence: Synthetic oligonucleotide
gggugaaggaccuguguuu

SEQ ID NO: 1905947 - RNA, 19 nt, Artificial Sequence
  Description of Artificial Sequence: Synthetic oligonucleotide
aggaugcaccucgguggug

SEQ ID NO: 1905948 - RNA, 19 nt, Artificial Sequence
  Description of Artificial Sequence: Synthetic oligonucleotide
gagcucacggggaugccau

SEQ ID NO: 1905949 - RNA, 19 nt, Artificial Sequence
  Description of Artificial Sequence: Synthetic oligonucleotide
gcgggaaaauaacaucgau

SEQ ID NO: 1905950 - RNA, 19 nt, Artificial Sequence
  Description of Artificial Sequence: Synthetic oligonucleotide
gcaccguagcagcucucac

SEQ ID NO: 1905951 - RNA, 19 nt, Artificial Sequence
  Description of Artificial Sequence: Synthetic oligonucleotide
ccaagcucgugccgcucag

SEQ ID NO: 1905952 - RNA, 19 nt, Artificial Sequence
  Description of Artificial Sequence: Synthetic oligonucleotide
cauggggaccggccggaaa

SEQ ID NO: 1905953 - RNA, 19 nt, Artificial Sequence
  Description of Artificial Sequence: Synthetic oligonucleotide
cagugacauuggugugguc

SEQ ID NO: 1905954 - RNA, 19 nt, Artificial Sequence
  Description of Artificial Sequence: Synthetic oligonucleotide
augcaccucgguggugaga

SEQ ID NO: 1905955 - RNA, 19 nt, Artificial Sequence
  Description of Artificial Sequence: Synthetic oligonucleotide
cugcaccguagcagcucuc

SEQ ID NO: 1905956 - RNA, 19 nt, Artificial Sequence
  Description of Artificial Sequence: Synthetic oligonucleotide
gcacuugauaucaucugau

SEQ ID NO: 1905957 - RNA, 19 nt, Artificial Sequence
  Description of Artificial Sequence: Synthetic oligonucleotide
ggugaaggaccuguguuuu

SEQ ID NO: 1905958 - RNA, 19 nt, Artificial Sequence
  Description of Artificial Sequence: Synthetic oligonucleotide
ccgagcagagugguagaug

SEQ ID NO: 1905959 - RNA, 19 nt, Artificial Sequence
  Description of Artificial Sequence: Synthetic oligonucleotide
uggcccgagcagaguggua

SEQ ID NO: 1905960 - RNA, 19 nt, Artificial Sequence
  Description of Artificial Sequence: Synthetic oligonucleotide
aucaugggugagaguucau

SEQ ID NO: 1905961 - RNA, 19 nt, Artificial Sequence
  Description of Artificial Sequence: Synthetic oligonucleotide
gcgguaugccucccgcaca

SEQ ID NO: 1905962 - RNA, 19 nt, Artificial Sequence
  Description of Artificial Sequence: Synthetic oligonucleotide
cagcgccuccauggggacc

SEQ ID NO: 1905963 - RNA, 19 nt, Artificial Sequence
  Description of Artificial Sequence: Synthetic oligonucleotide
ggguucacaaugccuggau

SEQ ID NO: 1905964 - RNA, 19 nt, Artificial Sequence
  Description of Artificial Sequence: Synthetic oligonucleotide
gggguucacaaugccugga

SEQ ID NO: 1905965 - RNA, 19 nt, Artificial Sequence
  Description of Artificial Sequence: Synthetic oligonucleotide
accucgguggugagauaau

SEQ ID NO: 1905966 - RNA, 19 nt, Artificial Sequence
  Description of Artificial Sequence: Synthetic oligonucleotide
cucacggggaugccauccu

SEQ ID NO: 1905967 - RNA, 19 nt, Artificial Sequence
  Description of Artificial Sequence: Synthetic oligonucleotide
caaccuucucgugucuggu

SEQ ID NO: 1905968 - RNA, 19 nt, Artificial Sequence
  Description of Artificial Sequence: Synthetic oligonucleotide
gccucugagcucacgggga

SEQ ID NO: 1905969 - RNA, 19 nt, Artificial Sequence
  Description of Artificial Sequence: Synthetic oligonucleotide
cguagagcucaggaugcac

SEQ ID NO: 1905970 - RNA, 19 nt, Artificial Sequence
  Description of Artificial Sequence: Synthetic oligonucleotide
ccaccucgacuuucccaag

SEQ ID NO: 1905971 - RNA, 19 nt, Artificial Sequence
  Description of Artificial Sequence: Synthetic oligonucleotide
cccggccacauccauggca

SEQ ID NO: 1905972 - RNA, 19 nt, Artificial Sequence
  Description of Artificial Sequence: Synthetic oligonucleotide
caccugucaggaagugggu

SEQ ID NO: 1905973 - RNA, 19 nt, Artificial Sequence
  Description of Artificial Sequence: Synthetic oligonucleotide
gccuccaaugauggcgcac

SEQ ID NO: 1905974 - RNA, 19 nt, Artificial Sequence
  Description of Artificial Sequence: Synthetic oligonucleotide
gggugagaguucauagagu

SEQ ID NO: 1905975 - RNA, 19 nt, Artificial Sequence
  Description of Artificial Sequence: Synthetic oligonucleotide
ucacagcgauugggaucca

SEQ ID NO: 1905976 - RNA, 19 nt, Artificial Sequence
  Description of Artificial Sequence: Synthetic oligonucleotide
ucgugccgcucagccucug

SEQ ID NO: 1905977 - RNA, 19 nt, Artificial Sequence
  Description of Artificial Sequence: Synthetic oligonucleotide
cucgucgacacugcucgau

SEQ ID NO: 1905978 - RNA, 19 nt, Artificial Sequence
  Description of Artificial Sequence: Synthetic oligonucleotide
gucuugggauaggcaucga

SEQ ID NO: 1905979 - RNA, 19 nt, Artificial Sequence
  Description of Artificial Sequence: Synthetic oligonucleotide
gauaggcaucgaacugcuu

SEQ ID NO: 1905980 - RNA, 19 nt, Artificial Sequence
  Description of Artificial Sequence: Synthetic oligonucleotide
guuccccggccacauccau

SEQ ID NO: 1905981 - RNA, 19 nt, Artificial Sequence
  Description of Artificial Sequence: Synthetic oligonucleotide
cacugacuauggucacggu

SEQ ID NO: 1905982 - RNA, 19 nt, Artificial Sequence
  Description of Artificial Sequence: Synthetic oligonucleotide
gcucgauaguguccggguu

SEQ ID NO: 1905983 - RNA, 19 nt, Artificial Sequence
  Description of Artificial Sequence: Synthetic oligonucleotide
ccggguucuugaaggccca

SEQ ID NO: 1905984 - RNA, 19 nt, Artificial Sequence
  Description of Artificial Sequence: Synthetic oligonucleotide
ccauacaccuggcagccuu

SEQ ID NO: 1905985 - RNA, 19 nt, Artificial Sequence
  Description of Artificial Sequence: Synthetic oligonucleotide
gguaugccucccgcacauc

SEQ ID NO: 1905986 - RNA, 19 nt, Artificial Sequence
  Description of Artificial Sequence: Synthetic oligonucleotide
ccgaagcucugcaagucau

SEQ ID NO: 1905987 - RNA, 19 nt, Artificial Sequence
  Description of Artificial Sequence: Synthetic oligonucleotide
gcccucucgucgacacugc

SEQ ID NO: 1905988 - RNA, 19 nt, Artificial Sequence
  Description of Artificial Sequence: Synthetic oligonucleotide
gcucaggaugcaccucggu

SEQ ID NO: 1905989 - RNA, 19 nt, Artificial Sequence
  Description of Artificial Sequence: Synthetic oligonucleotide
cccgcacaucuucacagcu

SEQ ID NO: 1905990 - RNA, 19 nt, Artificial Sequence
  Description of Artificial Sequence: Synthetic oligonucleotide
ggggugcagugacauuggu

SEQ ID NO: 1905991 - RNA, 19 nt, Artificial Sequence
  Description of Artificial Sequence: Synthetic oligonucleotide
cgacuuucccaagcucgug

SEQ ID NO: 1905992 - RNA, 19 nt, Artificial Sequence
  Description of Artificial Sequence: Synthetic oligonucleotide
ccucgguggugagauaaua

SEQ ID NO: 1905993 - RNA, 19 nt, Artificial Sequence
  Description of Artificial Sequence: Synthetic oligonucleotide
cauccuugucaagccguuu

SEQ ID NO: 1905994 - RNA, 19 nt, Artificial Sequence
  Description of Artificial Sequence: Synthetic oligonucleotide
ccuggcagccuucauucuu

SEQ ID NO: 1905995 - RNA, 19 nt, Artificial Sequence
  Description of Artificial Sequence: Synthetic oligonucleotide
cgauguugaucuucaguuu

SEQ ID NO: 1905996 - RNA, 19 nt, Artificial Sequence
  Description of Artificial Sequence: Synthetic oligonucleotide
cgacacugcucgauagugu

SEQ ID NO: 1905997 - RNA, 19 nt, Artificial Sequence
  Description of Artificial Sequence: Synthetic oligonucleotide
caggggcaaaguggaaguu

SEQ ID NO: 1905998 - RNA, 19 nt, Artificial Sequence
  Description of Artificial Sequence: Synthetic oligonucleotide
cccgagacuuguccacgua

SEQ ID NO: 1905999 - RNA, 19 nt, Artificial Sequence
  Description of Artificial Sequence: Synthetic oligonucleotide
ccagccucgacggcgguau

SEQ ID NO: 1906000 - RNA, 19 nt, Artificial Sequence
  Description of Artificial Sequence: Synthetic oligonucleotide
ccucugagcucacggggau

SEQ ID NO: 1906001 - RNA, 19 nt, Artificial Sequence
  Description of Artificial Sequence: Synthetic oligonucleotide
ccccaaaugacaggugcuu

SEQ ID NO: 1906002 - RNA, 19 nt, Artificial Sequence
  Description of Artificial Sequence: Synthetic oligonucleotide
cccggaaguccuccagagu

SEQ ID NO: 1906003 - RNA, 19 nt, Artificial Sequence
  Description of Artificial Sequence: Synthetic oligonucleotide
gccguuucuugaacagguu

SEQ ID NO: 1906004 - RNA, 19 nt, Artificial Sequence
  Description of Artificial Sequence: Synthetic oligonucleotide
ccccgagacuuguccacgu

SEQ ID NO: 1906005 - RNA, 19 nt, Artificial Sequence
  Description of Artificial Sequence: Synthetic oligonucleotide
gcaccucgguggugagaua

SEQ ID NO: 1906006 - RNA, 19 nt, Artificial Sequence
  Description of Artificial Sequence: Synthetic oligonucleotide
cggcgguaugccucccgca

SEQ ID NO: 1906007 - RNA, 19 nt, Artificial Sequence
  Description of Artificial Sequence: Synthetic oligonucleotide
ccucgacggcgguaugccu

SEQ ID NO: 1906008 - RNA, 19 nt, Artificial Sequence
  Description of Artificial Sequence: Synthetic oligonucleotide
cgguaugccucccgcacau

SEQ ID NO: 1906009 - RNA, 19 nt, Artificial Sequence
  Description of Artificial Sequence: Synthetic oligonucleotide
gcgccuccauggggaccgg

SEQ ID NO: 1906010 - RNA, 19 nt, Artificial Sequence
  Description of Artificial Sequence: Synthetic oligonucleotide
cgugccgcucagccucuga

SEQ ID NO: 1906011 - RNA, 19 nt, Artificial Sequence
  Description of Artificial Sequence: Synthetic oligonucleotide
cccucucgucgacacugcu

SEQ ID NO: 1906012 - RNA, 19 nt, Artificial Sequence
  Description of Artificial Sequence: Synthetic oligonucleotide
cgccuccauggggaccggc

SEQ ID NO: 1906013 - RNA, 19 nt, Artificial Sequence
  Description of Artificial Sequence: Synthetic oligonucleotide
cccgagcagagugguagau

SEQ ID NO: 1906014 - RNA, 19 nt, Artificial Sequence
  Description of Artificial Sequence: Synthetic oligonucleotide
ccagggaguuugggucaaa

SEQ ID NO: 1906015 - RNA, 19 nt, Artificial Sequence
  Description of Artificial Sequence: Synthetic oligonucleotide
cgacggcgguaugccuccc

SEQ ID NO: 1906016 - RNA, 19 nt, Artificial Sequence
  Description of Artificial Sequence: Synthetic oligonucleotide
ccauggggaccggccggaa

SEQ ID NO: 1906017 - RNA, 19 nt, Artificial Sequence
  Description of Artificial Sequence: Synthetic oligonucleotide
aucauaacagcccaaaucc

SEQ ID NO: 1906018 - RNA, 19 nt, Artificial Sequence
  Description of Artificial Sequence: Synthetic oligonucleotide
cuugccaacuguuagaugg

SEQ ID NO: 1906019 - RNA, 19 nt, Artificial Sequence
  Description of Artificial Sequence: Synthetic oligonucleotide
uaaacauccauccauggca

SEQ ID NO: 1906020 - RNA, 19 nt, Artificial Sequence
  Description of Artificial Sequence: Synthetic oligonucleotide
auaaacauccauccauggc

SEQ ID NO: 1906021 - RNA, 19 nt, Artificial Sequence
  Description of Artificial Sequence: Synthetic oligonucleotide
caaauugggacacaggagc

SEQ ID NO: 1906022 - RNA, 19 nt, Artificial Sequence
  Description of Artificial Sequence: Synthetic oligonucleotide
cucuaaaagguccaggucc

SEQ ID NO: 1906023 - RNA, 19 nt, Artificial Sequence
  Description of Artificial Sequence: Synthetic oligonucleotide
cacauuuaucauaacagcc

SEQ ID NO: 1906024 - RNA, 19 nt, Artificial Sequence
  Description of Artificial Sequence: Synthetic oligonucleotide
aucaaauugggacacagga

SEQ ID NO: 1906025 - RNA, 19 nt, Artificial Sequence
  Description of Artificial Sequence: Synthetic oligonucleotide
uuacccaugagcuccaugc

SEQ ID NO: 1906026 - RNA, 19 nt, Artificial Sequence
  Description of Artificial Sequence: Synthetic oligonucleotide
aaugggcacacauuccagg

SEQ ID NO: 1906027 - RNA, 19 nt, Artificial Sequence
  Description of Artificial Sequence: Synthetic oligonucleotide
aggagaguucucuaaaagg

SEQ ID NO: 1906028 - RNA, 19 nt, Artificial Sequence
  Description of Artificial Sequence: Synthetic oligonucleotide
agagauaugaggcuccuug

SEQ ID NO: 1906029 - RNA, 19 nt, Artificial Sequence
  Description of Artificial Sequence: Synthetic oligonucleotide
uguuugaccacauuaccca

SEQ ID NO: 1906030 - RNA, 19 nt, Artificial Sequence
  Description of Artificial Sequence: Synthetic oligonucleotide
ucuggguugaacucuaagc

SEQ ID NO: 1906031 - RNA, 19 nt, Artificial Sequence
  Description of Artificial Sequence: Synthetic oligonucleotide
uguuagauggcagugcuag

SEQ ID NO: 1906032 - RNA, 19 nt, Artificial Sequence
  Description of Artificial Sequence: Synthetic oligonucleotide
agauaugaggcuccuugcc

SEQ ID NO: 1906033 - RNA, 19 nt, Artificial Sequence
  Description of Artificial Sequence: Synthetic oligonucleotide
ucaaauugggacacaggag

SEQ ID NO: 1906034 - RNA, 19 nt, Artificial Sequence
  Description of Artificial Sequence: Synthetic oligonucleotide
uaagcuaguaaguacccug

SEQ ID NO: 1906035 - RNA, 19 nt, Artificial Sequence
  Description of Artificial Sequence: Synthetic oligonucleotide
agaguucucuaaaaggucc

SEQ ID NO: 1906036 - RNA, 19 nt, Artificial Sequence
  Description of Artificial Sequence: Synthetic oligonucleotide
agcuaagcuaguaaguacc

SEQ ID NO: 1906037 - RNA, 19 nt, Artificial Sequence
  Description of Artificial Sequence: Synthetic oligonucleotide
agcuugucacuuucgaggc

SEQ ID NO: 1906038 - RNA, 19 nt, Artificial Sequence
  Description of Artificial Sequence: Synthetic oligonucleotide
uguggcacgggcauaaaca

SEQ ID NO: 1906039 - RNA, 19 nt, Artificial Sequence
  Description of Artificial Sequence: Synthetic oligonucleotide
cuggguugaacucuaagcc

SEQ ID NO: 1906040 - RNA, 19 nt, Artificial Sequence
  Description of Artificial Sequence: Synthetic oligonucleotide
ugaguugguucuaugcucc

SEQ ID NO: 1906041 - RNA, 19 nt, Artificial Sequence
  Description of Artificial Sequence: Synthetic oligonucleotide
aacuguuagauggcagugc

SEQ ID NO: 1906042 - RNA, 19 nt, Artificial Sequence
  Description of Artificial Sequence: Synthetic oligonucleotide
aguuguuugaccacauuac

SEQ ID NO: 1906043 - RNA, 19 nt, Artificial Sequence
  Description of Artificial Sequence: Synthetic oligonucleotide
gaagaugcucacuagccug

SEQ ID NO: 1906044 - RNA, 19 nt, Artificial Sequence
  Description of Artificial Sequence: Synthetic oligonucleotide
uucucuaaaagguccaggu

SEQ ID NO: 1906045 - RNA, 19 nt, Artificial Sequence
  Description of Artificial Sequence: Synthetic oligonucleotide
aaggagagauaugaggcuc

SEQ ID NO: 1906046 - RNA, 19 nt, Artificial Sequence
  Description of Artificial Sequence: Synthetic oligonucleotide
ucacuuucgaggcuuccgg

SEQ ID NO: 1906047 - RNA, 19 nt, Artificial Sequence
  Description of Artificial Sequence: Synthetic oligonucleotide
ucucccacuaagauggggc

SEQ ID NO: 1906048 - RNA, 19 nt, Artificial Sequence
  Description of Artificial Sequence: Synthetic oligonucleotide
auuugcagagguuuggggu

SEQ ID NO: 1906049 - RNA, 19 nt, Artificial Sequence
  Description of Artificial Sequence: Synthetic oligonucleotide
aguaaguacccuguucccc

SEQ ID NO: 1906050 - RNA, 19 nt, Artificial Sequence
  Description of Artificial Sequence: Synthetic oligonucleotide
augggcacacauuccaggc

SEQ ID NO: 1906051 - RNA, 19 nt, Artificial Sequence
  Description of Artificial Sequence: Synthetic oligonucleotide
cauaaacauccauccaugg

SEQ ID NO: 1906052 - RNA, 19 nt, Artificial Sequence
  Description of Artificial Sequence: Synthetic oligonucleotide
uaguuguuugaccacauua

SEQ ID NO: 1906053 - RNA, 19 nt, Artificial Sequence
  Description of Artificial Sequence: Synthetic oligonucleotide
cagaagaugcucacuagcc

SEQ ID NO: 1906054 - RNA, 19 nt, Artificial Sequence
  Description of Artificial Sequence: Synthetic oligonucleotide
ucuaaaagguccagguccu

SEQ ID NO: 1906055 - RNA, 19 nt, Artificial Sequence
  Description of Artificial Sequence: Synthetic oligonucleotide
ugaacucuaagccccgccc

SEQ ID NO: 1906056 - RNA, 19 nt, Artificial Sequence
  Description of Artificial Sequence: Synthetic oligonucleotide
cacauuacccaugagcucc

SEQ ID NO: 1906057 - RNA, 19 nt, Artificial Sequence
  Description of Artificial Sequence: Synthetic oligonucleotide
auagcucuagcccggcggc

SEQ ID NO: 1906058 - RNA, 19 nt, Artificial Sequence
  Description of Artificial Sequence: Synthetic oligonucleotide
guuguuugaccacauuacc

SEQ ID NO: 1906059 - RNA, 19 nt, Artificial Sequence
  Description of Artificial Sequence: Synthetic oligonucleotide
cacgcauagcucuagcccg

SEQ ID NO: 1906060 - RNA, 19 nt, Artificial Sequence
  Description of Artificial Sequence: Synthetic oligonucleotide
ucauaacagcccaaauccc

SEQ ID NO: 1906061 - RNA, 19 nt, Artificial Sequence
  Description of Artificial Sequence: Synthetic oligonucleotide
uuuaucauaacagcccaaa

SEQ ID NO: 1906062 - RNA, 19 nt, Artificial Sequence
  Description of Artificial Sequence: Synthetic oligonucleotide
cuaagauggggccugugag

SEQ ID NO: 1906063 - RNA, 19 nt, Artificial Sequence
  Description of Artificial Sequence: Synthetic oligonucleotide
gguuagcuaagcuaguaag

SEQ ID NO: 1906064 - RNA, 19 nt, Artificial Sequence
  Description of Artificial Sequence: Synthetic oligonucleotide
gacaaaggaucacaggaga

SEQ ID NO: 1906065 - RNA, 19 nt, Artificial Sequence
  Description of Artificial Sequence: Synthetic oligonucleotide
acuguuagauggcagugcu

SEQ ID NO: 1906066 - RNA, 19 nt, Artificial Sequence
  Description of Artificial Sequence: Synthetic oligonucleotide
ugaggaucugcauucggac

SEQ ID NO: 1906067 - RNA, 19 nt, Artificial Sequence
  Description of Artificial Sequence: Synthetic oligonucleotide
uuagcuaagcuaguaagua

SEQ ID NO: 1906068 - RNA, 19 nt, Artificial Sequence
  Description of Artificial Sequence: Synthetic oligonucleotide
gauaugaggcuccuugcca

SEQ ID NO: 1906069 - RNA, 19 nt, Artificial Sequence
  Description of Artificial Sequence: Synthetic oligonucleotide
uuugcagagguuugggguc

SEQ ID NO: 1906070 - RNA, 19 nt, Artificial Sequence
  Description of Artificial Sequence: Synthetic oligonucleotide
gagauaugaggcuccuugc

SEQ ID NO: 1906071 - RNA, 19 nt, Artificial Sequence
  Description of Artificial Sequence: Synthetic oligonucleotide
cauuugcagagguuugggg

SEQ ID NO: 1906072 - RNA, 19 nt, Artificial Sequence
  Description of Artificial Sequence: Synthetic oligonucleotide
accacagcgcugcacaguc

SEQ ID NO: 1906073 - RNA, 19 nt, Artificial Sequence
  Description of Artificial Sequence: Synthetic oligonucleotide
aaaggaucacaggagaguu

SEQ ID NO: 1906074 - RNA, 19 nt, Artificial Sequence
  Description of Artificial Sequence: Synthetic oligonucleotide
acuaagauggggccuguga

SEQ ID NO: 1906075 - RNA, 19 nt, Artificial Sequence
  Description of Artificial Sequence: Synthetic oligonucleotide
uauggcagcccuaucuggu

SEQ ID NO: 1906076 - RNA, 19 nt, Artificial Sequence
  Description of Artificial Sequence: Synthetic oligonucleotide
ugguguugcccaaugggca

SEQ ID NO: 1906077 - RNA, 19 nt, Artificial Sequence
  Description of Artificial Sequence: Synthetic oligonucleotide
acugcucggguacuggauc

SEQ ID NO: 1906078 - RNA, 19 nt, Artificial Sequence
  Description of Artificial Sequence: Synthetic oligonucleotide
gggccugugaggcaaaugg

SEQ ID NO: 1906079 - RNA, 19 nt, Artificial Sequence
  Description of Artificial Sequence: Synthetic oligonucleotide
uuaucauaacagcccaaau

SEQ ID NO: 1906080 - RNA, 19 nt, Artificial Sequence
  Description of Artificial Sequence: Synthetic oligonucleotide
ucucuaaaagguccagguc

SEQ ID NO: 1906081 - RNA, 19 nt, Artificial Sequence
  Description of Artificial Sequence: Synthetic oligonucleotide
ucugguuucacagcacugu

SEQ ID NO: 1906082 - RNA, 19 nt, Artificial Sequence
  Description of Artificial Sequence: Synthetic oligonucleotide
cauuuaucauaacagccca

SEQ ID NO: 1906083 - RNA, 19 nt, Artificial Sequence
  Description of Artificial Sequence: Synthetic oligonucleotide
uugaacucuaagccccgcc

SEQ ID NO: 1906084 - RNA, 19 nt, Artificial Sequence
  Description of Artificial Sequence: Synthetic oligonucleotide
uagcuaagcuaguaaguac

SEQ ID NO: 1906085 - RNA, 19 nt, Artificial Sequence
  Description of Artificial Sequence: Synthetic oligonucleotide
cauaacagcccaaauccca

SEQ ID NO: 1906086 - RNA, 19 nt, Artificial Sequence
  Description of Artificial Sequence: Synthetic oligonucleotide
ggggccaucaaauugggac

SEQ ID NO: 1906087 - RNA, 19 nt, Artificial Sequence
  Description of Artificial Sequence: Synthetic oligonucleotide
cuaugcuccugucuucucc

SEQ ID NO: 1906088 - RNA, 19 nt, Artificial Sequence
  Description of Artificial Sequence: Synthetic oligonucleotide
gaagcugcggcgucugcag

SEQ ID NO: 1906089 - RNA, 19 nt, Artificial Sequence
  Description of Artificial Sequence: Synthetic oligonucleotide
uaguaaguacccuguuccc

SEQ ID NO: 1906090 - RNA, 19 nt, Artificial Sequence
  Description of Artificial Sequence: Synthetic oligonucleotide
aacagcccaaaucccauuu

SEQ ID NO: 1906091 - RNA, 19 nt, Artificial Sequence
  Description of Artificial Sequence: Synthetic oligonucleotide
ugguuagcuaagcuaguaa

SEQ ID NO: 1906092 - RNA, 19 nt, Artificial Sequence
  Description of Artificial Sequence: Synthetic oligonucleotide
guuuggggucuucauagug

SEQ ID NO: 1906093 - RNA, 19 nt, Artificial Sequence
  Description of Artificial Sequence: Synthetic oligonucleotide
acgggcauaaacauccauc

SEQ ID NO: 1906094 - RNA, 19 nt, Artificial Sequence
  Description of Artificial Sequence: Synthetic oligonucleotide
ugggcuggcauguggcacg

SEQ ID NO: 1906095 - RNA, 19 nt, Artificial Sequence
  Description of Artificial Sequence: Synthetic oligonucleotide
auguggcacgggcauaaac

SEQ ID NO: 1906096 - RNA, 19 nt, Artificial Sequence
  Description of Artificial Sequence: Synthetic oligonucleotide
agacaaaggaucacaggag

SEQ ID NO: 1906097 - RNA, 19 nt, Artificial Sequence
  Description of Artificial Sequence: Synthetic oligonucleotide
aggagagauaugaggcucc

SEQ ID NO: 1906098 - RNA, 19 nt, Artificial Sequence
  Description of Artificial Sequence: Synthetic oligonucleotide
ggcacuaguuguuugacca

SEQ ID NO: 1906099 - RNA, 19 nt, Artificial Sequence
  Description of Artificial Sequence: Synthetic oligonucleotide
ugagcuccaugcucagagg

SEQ ID NO: 1906100 - RNA, 19 nt, Artificial Sequence
  Description of Artificial Sequence: Synthetic oligonucleotide
ggagacaaaggaucacagg

SEQ ID NO: 1906101 - RNA, 19 nt, Artificial Sequence
  Description of Artificial Sequence: Synthetic oligonucleotide
cuuccagggacaucucccc

SEQ ID NO: 1906102 - RNA, 19 nt, Artificial Sequence
  Description of Artificial Sequence: Synthetic oligonucleotide
uucuucugguggcuggggc

SEQ ID NO: 1906103 - RNA, 19 nt, Artificial Sequence
  Description of Artificial Sequence: Synthetic oligonucleotide
auaugaggcuccuugccaa

SEQ ID NO: 1906104 - RNA, 19 nt, Artificial Sequence
  Description of Artificial Sequence: Synthetic oligonucleotide
caacggaggaagcugcggc

SEQ ID NO: 1906105 - RNA, 19 nt, Artificial Sequence
  Description of Artificial Sequence: Synthetic oligonucleotide
cagugcuaggagacaaagg

SEQ ID NO: 1906106 - RNA, 19 nt, Artificial Sequence
  Description of Artificial Sequence: Synthetic oligonucleotide
acuuucgaggcuuccggca

SEQ ID NO: 1906107 - RNA, 19 nt, Artificial Sequence
  Description of Artificial Sequence: Synthetic oligonucleotide
aaggaucacaggagaguuc

SEQ ID NO: 1906108 - RNA, 19 nt, Artificial Sequence
  Description of Artificial Sequence: Synthetic oligonucleotide
ugggcacacauuccaggcc

SEQ ID NO: 1906109 - RNA, 19 nt, Artificial Sequence
  Description of Artificial Sequence: Synthetic oligonucleotide
auucggacuugguguugcc

SEQ ID NO: 1906110 - RNA, 19 nt, Artificial Sequence
  Description of Artificial Sequence: Synthetic oligonucleotide
aagcuaguaaguacccugu

SEQ ID NO: 1906111 - RNA, 19 nt, Artificial Sequence
  Description of Artificial Sequence: Synthetic oligonucleotide
ugguucuaugcuccugucu

SEQ ID NO: 1906112 - RNA, 19 nt, Artificial Sequence
  Description of Artificial Sequence: Synthetic oligonucleotide
auagugaggggaagcagag

SEQ ID NO: 1906113 - RNA, 19 nt, Artificial Sequence
  Description of Artificial Sequence: Synthetic oligonucleotide
caaauggcccugcagucug

SEQ ID NO: 1906114 - RNA, 19 nt, Artificial Sequence
  Description of Artificial Sequence: Synthetic oligonucleotide
cagcccguaacagagcggg

SEQ ID NO: 1906115 - RNA, 19 nt, Artificial Sequence
  Description of Artificial Sequence: Synthetic oligonucleotide
ugaggcuccuugccaacug

SEQ ID NO: 1906116 - RNA, 19 nt, Artificial Sequence
  Description of Artificial Sequence: Synthetic oligonucleotide
gagaguucucuaaaagguc

SEQ ID NO: 1906117 - RNA, 19 nt, Artificial Sequence
  Description of Artificial Sequence: Synthetic oligonucleotide
gggcacacauuccaggccg

SEQ ID NO: 1906118 - RNA, 19 nt, Artificial Sequence
  Description of Artificial Sequence: Synthetic oligonucleotide
agccagagccccauggcgc

SEQ ID NO: 1906119 - RNA, 19 nt, Artificial Sequence
  Description of Artificial Sequence: Synthetic oligonucleotide
gggugguuagcuaagcuag

SEQ ID NO: 1906120 - RNA, 19 nt, Artificial Sequence
  Description of Artificial Sequence: Synthetic oligonucleotide
cucccacuaagauggggcc

SEQ ID NO: 1906121 - RNA, 19 nt, Artificial Sequence
  Description of Artificial Sequence: Synthetic oligonucleotide
uugcccaaugggcacacau

SEQ ID NO: 1906122 - RNA, 19 nt, Artificial Sequence
  Description of Artificial Sequence: Synthetic oligonucleotide
ugcaacgugggcagagggu

SEQ ID NO: 1906123 - RNA, 19 nt, Artificial Sequence
  Description of Artificial Sequence: Synthetic oligonucleotide
uccucccagucugaguugg

SEQ ID NO: 1906124 - RNA, 19 nt, Artificial Sequence
  Description of Artificial Sequence: Synthetic oligonucleotide
agccagaagaugcucacua

SEQ ID NO: 1906125 - RNA, 19 nt, Artificial Sequence
  Description of Artificial Sequence: Synthetic oligonucleotide
gucacuuucgaggcuuccg

SEQ ID NO: 1906126 - RNA, 19 nt, Artificial Sequence
  Description of Artificial Sequence: Synthetic oligonucleotide
agcccuaucugguuucaca

SEQ ID NO: 1906127 - RNA, 19 nt, Artificial Sequence
  Description of Artificial Sequence: Synthetic oligonucleotide
cacagcgagcagcaggcgg

SEQ ID NO: 1906128 - RNA, 19 nt, Artificial Sequence
  Description of Artificial Sequence: Synthetic oligonucleotide
ggggucagggcgcugacgg

SEQ ID NO: 1906129 - RNA, 19 nt, Artificial Sequence
  Description of Artificial Sequence: Synthetic oligonucleotide
uuucgaggcuuccggcacc

SEQ ID NO: 1906130 - RNA, 19 nt, Artificial Sequence
  Description of Artificial Sequence: Synthetic oligonucleotide
uuucacagcacugucccuu

SEQ ID NO: 1906131 - RNA, 19 nt, Artificial Sequence
  Description of Artificial Sequence: Synthetic oligonucleotide
uucucccacuaagaugggg

SEQ ID NO: 1906132 - RNA, 19 nt, Artificial Sequence
  Description of Artificial Sequence: Synthetic oligonucleotide
aauggcccugcagucuguc

SEQ ID NO: 1906133 - RNA, 19 nt, Artificial Sequence
  Description of Artificial Sequence: Synthetic oligonucleotide
gugcaacgugggcagaggg

SEQ ID NO: 1906134 - RNA, 19 nt, Artificial Sequence
  Description of Artificial Sequence: Synthetic oligonucleotide
auuacccaugagcuccaug

SEQ ID NO: 1906135 - RNA, 19 nt, Artificial Sequence
  Description of Artificial Sequence: Synthetic oligonucleotide
gucuggguugaacucuaag

SEQ ID NO: 1906136 - RNA, 19 nt, Artificial Sequence
  Description of Artificial Sequence: Synthetic oligonucleotide
gguauggcagcccuaucug

SEQ ID NO: 1906137 - RNA, 19 nt, Artificial Sequence
  Description of Artificial Sequence: Synthetic oligonucleotide
gcccaaaucccauuugcag

SEQ ID NO: 1906138 - RNA, 19 nt, Artificial Sequence
  Description of Artificial Sequence: Synthetic oligonucleotide
cagccagagccccauggcg

SEQ ID NO: 1906139 - RNA, 19 nt, Artificial Sequence
  Description of Artificial Sequence: Synthetic oligonucleotide
cuaucugguuucacagcac

SEQ ID NO: 1906140 - RNA, 19 nt, Artificial Sequence
  Description of Artificial Sequence: Synthetic oligonucleotide
acagcccaaaucccauuug

SEQ ID NO: 1906141 - RNA, 19 nt, Artificial Sequence
  Description of Artificial Sequence: Synthetic oligonucleotide
ugugaggcaaauggcccug

SEQ ID NO: 1906142 - RNA, 19 nt, Artificial Sequence
  Description of Artificial Sequence: Synthetic oligonucleotide
aacucuaagccccgcccuu

SEQ ID NO: 1906143 - RNA, 19 nt, Artificial Sequence
  Description of Artificial Sequence: Synthetic oligonucleotide
gucccagcccguaacagag

SEQ ID NO: 1906144 - RNA, 19 nt, Artificial Sequence
  Description of Artificial Sequence: Synthetic oligonucleotide
acauccauccauggcacca

SEQ ID NO: 1906145 - RNA, 19 nt, Artificial Sequence
  Description of Artificial Sequence: Synthetic oligonucleotide
gacggcgcugggugcaacg

SEQ ID NO: 1906146 - RNA, 19 nt, Artificial Sequence
  Description of Artificial Sequence: Synthetic oligonucleotide
ccagaagaugcucacuagc

SEQ ID NO: 1906147 - RNA, 19 nt, Artificial Sequence
  Description of Artificial Sequence: Synthetic oligonucleotide
uaagccccgcccuuggcaa

SEQ ID NO: 1906148 - RNA, 19 nt, Artificial Sequence
  Description of Artificial Sequence: Synthetic oligonucleotide
cacacauuccaggccgucg

SEQ ID NO: 1906149 - RNA, 19 nt, Artificial Sequence
  Description of Artificial Sequence: Synthetic oligonucleotide
cgggcauaaacauccaucc

SEQ ID NO: 1906150 - RNA, 19 nt, Artificial Sequence
  Description of Artificial Sequence: Synthetic oligonucleotide
uaacagagcggggcugggg

SEQ ID NO: 1906151 - RNA, 19 nt, Artificial Sequence
  Description of Artificial Sequence: Synthetic oligonucleotide
uaugaggcuccuugccaac

SEQ ID NO: 1906152 - RNA, 19 nt, Artificial Sequence
  Description of Artificial Sequence: Synthetic oligonucleotide
uccuugccaacuguuagau

SEQ ID NO: 1906153 - RNA, 19 nt, Artificial Sequence
  Description of Artificial Sequence: Synthetic oligonucleotide
ugcauucggacuugguguu

SEQ ID NO: 1906154 - RNA, 19 nt, Artificial Sequence
  Description of Artificial Sequence: Synthetic oligonucleotide
gcauaaacauccauccaug

SEQ ID NO: 1906155 - RNA, 19 nt, Artificial Sequence
  Description of Artificial Sequence: Synthetic oligonucleotide
gcccuaucugguuucacag

SEQ ID NO: 1906156 - RNA, 19 nt, Artificial Sequence
  Description of Artificial Sequence: Synthetic oligonucleotide
agcucuagcccggcggcgc

SEQ ID NO: 1906157 - RNA, 19 nt, Artificial Sequence
  Description of Artificial Sequence: Synthetic oligonucleotide
ucuaagccccgcccuuggc

SEQ ID NO: 1906158 - RNA, 19 nt, Artificial Sequence
  Description of Artificial Sequence: Synthetic oligonucleotide
gcuccuugccaacuguuag

SEQ ID NO: 1906159 - RNA, 19 nt, Artificial Sequence
  Description of Artificial Sequence: Synthetic oligonucleotide
ugcucagaggcaccaccac

SEQ ID NO: 1906160 - RNA, 19 nt, Artificial Sequence
  Description of Artificial Sequence: Synthetic oligonucleotide
caggccgucgucagggcag

SEQ ID NO: 1906161 - RNA, 19 nt, Artificial Sequence
  Description of Artificial Sequence: Synthetic oligonucleotide
uucggacuugguguugccc

SEQ ID NO: 1906162 - RNA, 19 nt, Artificial Sequence
  Description of Artificial Sequence: Synthetic oligonucleotide
gcuaguaaguacccuguuc

SEQ ID NO: 1906163 - RNA, 19 nt, Artificial Sequence
  Description of Artificial Sequence: Synthetic oligonucleotide
cugcauucggacuuggugu

SEQ ID NO: 1906164 - RNA, 19 nt, Artificial Sequence
  Description of Artificial Sequence: Synthetic oligonucleotide
aagccccgcccuuggcaac

SEQ ID NO: 1906165 - RNA, 19 nt, Artificial Sequence
  Description of Artificial Sequence: Synthetic oligonucleotide
ccacgcauagcucuagccc

SEQ ID NO: 1906166 - RNA, 19 nt, Artificial Sequence
  Description of Artificial Sequence: Synthetic oligonucleotide
auaacagcccaaaucccau

SEQ ID NO: 1906167 - RNA, 19 nt, Artificial Sequence
  Description of Artificial Sequence: Synthetic oligonucleotide
ggagaguucucuaaaaggu

SEQ ID NO: 1906168 - RNA, 19 nt, Artificial Sequence
  Description of Artificial Sequence: Synthetic oligonucleotide
ggcauaaacauccauccau

SEQ ID NO: 1906169 - RNA, 19 nt, Artificial Sequence
  Description of Artificial Sequence: Synthetic oligonucleotide
guuagcuaagcuaguaagu

SEQ ID NO: 1906170 - RNA, 19 nt, Artificial Sequence
  Description of Artificial Sequence: Synthetic oligonucleotide
gagguuuggggucuucaua

SEQ ID NO: 1906171 - RNA, 19 nt, Artificial Sequence
  Description of Artificial Sequence: Synthetic oligonucleotide
cagagucccagcccguaac

SEQ ID NO: 1906172 - RNA, 19 nt, Artificial Sequence
  Description of Artificial Sequence: Synthetic oligonucleotide
cucggguacuggaucauga

SEQ ID NO: 1906173 - RNA, 19 nt, Artificial Sequence
  Description of Artificial Sequence: Synthetic oligonucleotide
caacgugggcagagggucc

SEQ ID NO: 1906174 - RNA, 19 nt, Artificial Sequence
  Description of Artificial Sequence: Synthetic oligonucleotide
cacagucacacagcugggc

SEQ ID NO: 1906175 - RNA, 19 nt, Artificial Sequence
  Description of Artificial Sequence: Synthetic oligonucleotide
guucuaugcuccugucuuc

SEQ ID NO: 1906176 - RNA, 19 nt, Artificial Sequence
  Description of Artificial Sequence: Synthetic oligonucleotide
ugggcacuaguuguuugac

SEQ ID NO: 1906177 - RNA, 19 nt, Artificial Sequence
  Description of Artificial Sequence: Synthetic oligonucleotide
aguugguucuaugcuccug

SEQ ID NO: 1906178 - RNA, 19 nt, Artificial Sequence
  Description of Artificial Sequence: Synthetic oligonucleotide
ccuaucugguuucacagca

SEQ ID NO: 1906179 - RNA, 19 nt, Artificial Sequence
  Description of Artificial Sequence: Synthetic oligonucleotide
uugguucuaugcuccuguc

SEQ ID NO: 1906180 - RNA, 19 nt, Artificial Sequence
  Description of Artificial Sequence: Synthetic oligonucleotide
aacgugggcagaggguccu

SEQ ID NO: 1906181 - RNA, 19 nt, Artificial Sequence
  Description of Artificial Sequence: Synthetic oligonucleotide
cagcugacugcucggguac

SEQ ID NO: 1906182 - RNA, 19 nt, Artificial Sequence
  Description of Artificial Sequence: Synthetic oligonucleotide
gcuaagcuaguaaguaccc

SEQ ID NO: 1906183 - RNA, 19 nt, Artificial Sequence
  Description of Artificial Sequence: Synthetic oligonucleotide
gcuggcauguggcacgggc

SEQ ID NO: 1906184 - RNA, 19 nt, Artificial Sequence
  Description of Artificial Sequence: Synthetic oligonucleotide
ugucacuuucgaggcuucc

SEQ ID NO: 1906185 - RNA, 19 nt, Artificial Sequence
  Description of Artificial Sequence: Synthetic oligonucleotide
uggcacgggcauaaacauc

SEQ ID NO: 1906186 - RNA, 19 nt, Artificial Sequence
  Description of Artificial Sequence: Synthetic oligonucleotide
gaggaucugcauucggacu

SEQ ID NO: 1906187 - RNA, 19 nt, Artificial Sequence
  Description of Artificial Sequence: Synthetic oligonucleotide
ucuaugcuccugucuucuc

SEQ ID NO: 1906188 - RNA, 19 nt, Artificial Sequence
  Description of Artificial Sequence: Synthetic oligonucleotide
gggucuucauagugagggg

SEQ ID NO: 1906189 - RNA, 19 nt, Artificial Sequence
  Description of Artificial Sequence: Synthetic oligonucleotide
gguggugggguauggcagc

SEQ ID NO: 1906190 - RNA, 19 nt, Artificial Sequence
  Description of Artificial Sequence: Synthetic oligonucleotide
cugggcacuaguuguuuga

SEQ ID NO: 1906191 - RNA, 19 nt, Artificial Sequence
  Description of Artificial Sequence: Synthetic oligonucleotide
ccaucaaauugggacacag

SEQ ID NO: 1906192 - RNA, 19 nt, Artificial Sequence
  Description of Artificial Sequence: Synthetic oligonucleotide
uuccucccagucugaguug

SEQ ID NO: 1906193 - RNA, 19 nt, Artificial Sequence
  Description of Artificial Sequence: Synthetic oligonucleotide
auuuaucauaacagcccaa

SEQ ID NO: 1906194 - RNA, 19 nt, Artificial Sequence
  Description of Artificial Sequence: Synthetic oligonucleotide
cuaagccccgcccuuggca

SEQ ID NO: 1906195 - RNA, 19 nt, Artificial Sequence
  Description of Artificial Sequence: Synthetic oligonucleotide
acauuccaggccgucguca

SEQ ID NO: 1906196 - RNA, 19 nt, Artificial Sequence
  Description of Artificial Sequence: Synthetic oligonucleotide
cuccuugccaacuguuaga

SEQ ID NO: 1906197 - RNA, 19 nt, Artificial Sequence
  Description of Artificial Sequence: Synthetic oligonucleotide
gaacucuaagccccgcccu

SEQ ID NO: 1906198 - RNA, 19 nt, Artificial Sequence
  Description of Artificial Sequence: Synthetic oligonucleotide
uugcagagguuuggggucu

SEQ ID NO: 1906199 - RNA, 19 nt, Artificial Sequence
  Description of Artificial Sequence: Synthetic oligonucleotide
cacuaguuguuugaccaca

SEQ ID NO: 1906200 - RNA, 19 nt, Artificial Sequence
  Description of Artificial Sequence: Synthetic oligonucleotide
gggccaucaaauugggaca

SEQ ID NO: 1906201 - RNA, 19 nt, Artificial Sequence
  Description of Artificial Sequence: Synthetic oligonucleotide
cacaggagaguucucuaaa

SEQ ID NO: 1906202 - RNA, 19 nt, Artificial Sequence
  Description of Artificial Sequence: Synthetic oligonucleotide
uucacagcacugucccuuu

SEQ ID NO: 1906203 - RNA, 19 nt, Artificial Sequence
  Description of Artificial Sequence: Synthetic oligonucleotide
cccagcccguaacagagcg

SEQ ID NO: 1906204 - RNA, 19 nt, Artificial Sequence
  Description of Artificial Sequence: Synthetic oligonucleotide
uaacagcccaaaucccauu

SEQ ID NO: 1906205 - RNA, 19 nt, Artificial Sequence
  Description of Artificial Sequence: Synthetic oligonucleotide
ugcggcgucugcagcggca

SEQ ID NO: 1906206 - RNA, 19 nt, Artificial Sequence
  Description of Artificial Sequence: Synthetic oligonucleotide
auggcaccacuuucuucug

SEQ ID NO: 1906207 - RNA, 19 nt, Artificial Sequence
  Description of Artificial Sequence: Synthetic oligonucleotide
ucccacuaagauggggccu

SEQ ID NO: 1906208 - RNA, 19 nt, Artificial Sequence
  Description of Artificial Sequence: Synthetic oligonucleotide
agcagagcagccagaagau

SEQ ID NO: 1906209 - RNA, 19 nt, Artificial Sequence
  Description of Artificial Sequence: Synthetic oligonucleotide
gguugaacucuaagccccg

SEQ ID NO: 1906210 - RNA, 19 nt, Artificial Sequence
  Description of Artificial Sequence: Synthetic oligonucleotide
ucuagcccggcggcgcggg

SEQ ID NO: 1906211 - RNA, 19 nt, Artificial Sequence
  Description of Artificial Sequence: Synthetic oligonucleotide
gcuaggagacaaaggauca

SEQ ID NO: 1906212 - RNA, 19 nt, Artificial Sequence
  Description of Artificial Sequence: Synthetic oligonucleotide
agcccaaaucccauuugca

SEQ ID NO: 1906213 - RNA, 19 nt, Artificial Sequence
  Description of Artificial Sequence: Synthetic oligonucleotide
cccaaaucccauuugcaga

SEQ ID NO: 1906214 - RNA, 19 nt, Artificial Sequence
  Description of Artificial Sequence: Synthetic oligonucleotide
acuaguuguuugaccacau

SEQ ID NO: 1906215 - RNA, 19 nt, Artificial Sequence
  Description of Artificial Sequence: Synthetic oligonucleotide
ccugcagucugucugaaaa

SEQ ID NO: 1906216 - RNA, 19 nt, Artificial Sequence
  Description of Artificial Sequence: Synthetic oligonucleotide
acgcauagcucuagcccgg

SEQ ID NO: 1906217 - RNA, 19 nt, Artificial Sequence
  Description of Artificial Sequence: Synthetic oligonucleotide
ucccagcccguaacagagc

SEQ ID NO: 1906218 - RNA, 19 nt, Artificial Sequence
  Description of Artificial Sequence: Synthetic oligonucleotide
guugaacucuaagccccgc

SEQ ID NO: 1906219 - RNA, 19 nt, Artificial Sequence
  Description of Artificial Sequence: Synthetic oligonucleotide
guaacagagcggggcuggg

SEQ ID NO: 1906220 - RNA, 19 nt, Artificial Sequence
  Description of Artificial Sequence: Synthetic oligonucleotide
gccacgcauagcucuagcc

SEQ ID NO: 1906221 - RNA, 19 nt, Artificial Sequence
  Description of Artificial Sequence: Synthetic oligonucleotide
ucacuagccugggugguua

SEQ ID NO: 1906222 - RNA, 19 nt, Artificial Sequence
  Description of Artificial Sequence: Synthetic oligonucleotide
ggucuucauagugagggga

SEQ ID NO: 1906223 - RNA, 19 nt, Artificial Sequence
  Description of Artificial Sequence: Synthetic oligonucleotide
auccauccauggcaccacu

SEQ ID NO: 1906224 - RNA, 19 nt, Artificial Sequence
  Description of Artificial Sequence: Synthetic oligonucleotide
uagcucuagcccggcggcg

SEQ ID NO: 1906225 - RNA, 19 nt, Artificial Sequence
  Description of Artificial Sequence: Synthetic oligonucleotide
cuggcauguggcacgggca

SEQ ID NO: 1906226 - RNA, 19 nt, Artificial Sequence
  Description of Artificial Sequence: Synthetic oligonucleotide
acucuaagccccgcccuug

SEQ ID NO: 1906227 - RNA, 19 nt, Artificial Sequence
  Description of Artificial Sequence: Synthetic oligonucleotide
caaaggaucacaggagagu

SEQ ID NO: 1906228 - RNA, 19 nt, Artificial Sequence
  Description of Artificial Sequence: Synthetic oligonucleotide
uggcagcccuaucugguuu

SEQ ID NO: 1906229 - RNA, 19 nt, Artificial Sequence
  Description of Artificial Sequence: Synthetic oligonucleotide
caggugucuggguugaacu

SEQ ID NO: 1906230 - RNA, 19 nt, Artificial Sequence
  Description of Artificial Sequence: Synthetic oligonucleotide
ccauuugcagagguuuggg

SEQ ID NO: 1906231 - RNA, 19 nt, Artificial Sequence
  Description of Artificial Sequence: Synthetic oligonucleotide
ugucuggguugaacucuaa

SEQ ID NO: 1906232 - RNA, 19 nt, Artificial Sequence
  Description of Artificial Sequence: Synthetic oligonucleotide
gccagagccccauggcgcg

SEQ ID NO: 1906233 - RNA, 19 nt, Artificial Sequence
  Description of Artificial Sequence: Synthetic oligonucleotide
cugcacagucacacagcug

SEQ ID NO: 1906234 - RNA, 19 nt, Artificial Sequence
  Description of Artificial Sequence: Synthetic oligonucleotide
cugcucggguacuggauca

SEQ ID NO: 1906235 - RNA, 19 nt, Artificial Sequence
  Description of Artificial Sequence: Synthetic oligonucleotide
cccaaugggcacacauucc

SEQ ID NO: 1906236 - RNA, 19 nt, Artificial Sequence
  Description of Artificial Sequence: Synthetic oligonucleotide
gcaacgugggcagaggguc

SEQ ID NO: 1906237 - RNA, 19 nt, Artificial Sequence
  Description of Artificial Sequence: Synthetic oligonucleotide
auggcagcccuaucugguu

SEQ ID NO: 1906238 - RNA, 19 nt, Artificial Sequence
  Description of Artificial Sequence: Synthetic oligonucleotide
agcuccaugcucagaggca

SEQ ID NO: 1906239 - RNA, 19 nt, Artificial Sequence
  Description of Artificial Sequence: Synthetic oligonucleotide
ggugcaacgugggcagagg

SEQ ID NO: 1906240 - RNA, 19 nt, Artificial Sequence
  Description of Artificial Sequence: Synthetic oligonucleotide
gagugggauggaugauguc

SEQ ID NO: 1906241 - RNA, 19 nt, Artificial Sequence
  Description of Artificial Sequence: Synthetic oligonucleotide
ggguauggcagcccuaucu

SEQ ID NO: 1906242 - RNA, 19 nt, Artificial Sequence
  Description of Artificial Sequence: Synthetic oligonucleotide
cccuaucugguuucacagc

SEQ ID NO: 1906243 - RNA, 19 nt, Artificial Sequence
  Description of Artificial Sequence: Synthetic oligonucleotide
cacuagccugggugguuag

SEQ ID NO: 1906244 - RNA, 19 nt, Artificial Sequence
  Description of Artificial Sequence: Synthetic oligonucleotide
gcucauggugcccgcgggg

SEQ ID NO: 1906245 - RNA, 19 nt, Artificial Sequence
  Description of Artificial Sequence: Synthetic oligonucleotide
uagccugggugguuagcua

SEQ ID NO: 1906246 - RNA, 19 nt, Artificial Sequence
  Description of Artificial Sequence: Synthetic oligonucleotide
gccaacuguuagauggcag

SEQ ID NO: 1906247 - RNA, 19 nt, Artificial Sequence
  Description of Artificial Sequence: Synthetic oligonucleotide
gucugucugaaaagcagcu

SEQ ID NO: 1906248 - RNA, 19 nt, Artificial Sequence
  Description of Artificial Sequence: Synthetic oligonucleotide
guggcacgggcauaaacau

SEQ ID NO: 1906249 - RNA, 19 nt, Artificial Sequence
  Description of Artificial Sequence: Synthetic oligonucleotide
gcacuaguuguuugaccac

SEQ ID NO: 1906250 - RNA, 19 nt, Artificial Sequence
  Description of Artificial Sequence: Synthetic oligonucleotide
uccaggccgucgucagggc

SEQ ID NO: 1906251 - RNA, 19 nt, Artificial Sequence
  Description of Artificial Sequence: Synthetic oligonucleotide
gugguuagcuaagcuagua

SEQ ID NO: 1906252 - RNA, 19 nt, Artificial Sequence
  Description of Artificial Sequence: Synthetic oligonucleotide
cacauuccaggccgucguc

SEQ ID NO: 1906253 - RNA, 19 nt, Artificial Sequence
  Description of Artificial Sequence: Synthetic oligonucleotide
acauuacccaugagcucca

SEQ ID NO: 1906254 - RNA, 19 nt, Artificial Sequence
  Description of Artificial Sequence: Synthetic oligonucleotide
gggcauaaacauccaucca

SEQ ID NO: 1906255 - RNA, 19 nt, Artificial Sequence
  Description of Artificial Sequence: Synthetic oligonucleotide
ccccuaaggagagauauga

SEQ ID NO: 1906256 - RNA, 19 nt, Artificial Sequence
  Description of Artificial Sequence: Synthetic oligonucleotide
gggagggugcucccggggc

SEQ ID NO: 1906257 - RNA, 19 nt, Artificial Sequence
  Description of Artificial Sequence: Synthetic oligonucleotide
gcccguaacagagcggggc

SEQ ID NO: 1906258 - RNA, 19 nt, Artificial Sequence
  Description of Artificial Sequence: Synthetic oligonucleotide
ggccaguugcagcagcaca

SEQ ID NO: 1906259 - RNA, 19 nt, Artificial Sequence
  Description of Artificial Sequence: Synthetic oligonucleotide
ggcaacggaggaagcugcg

SEQ ID NO: 1906260 - RNA, 19 nt, Artificial Sequence
  Description of Artificial Sequence: Synthetic oligonucleotide
cagagccccauggcgcggg

SEQ ID NO: 1906261 - RNA, 19 nt, Artificial Sequence
  Description of Artificial Sequence: Synthetic oligonucleotide
ggggagggugcucccgggg

SEQ ID NO: 1906262 - RNA, 19 nt, Artificial Sequence
  Description of Artificial Sequence: Synthetic oligonucleotide
cuuggcaacggaggaagcu

SEQ ID NO: 1906263 - RNA, 19 nt, Artificial Sequence
  Description of Artificial Sequence: Synthetic oligonucleotide
ccacauuacccaugagcuc

SEQ ID NO: 1906264 - RNA, 19 nt, Artificial Sequence
  Description of Artificial Sequence: Synthetic oligonucleotide
gcgcugacggcgcugggug

SEQ ID NO: 1906265 - RNA, 19 nt, Artificial Sequence
  Description of Artificial Sequence: Synthetic oligonucleotide
uggcuggggccaucaaauu

SEQ ID NO: 1906266 - RNA, 19 nt, Artificial Sequence
  Description of Artificial Sequence: Synthetic oligonucleotide
cuaagcuaguaaguacccu

SEQ ID NO: 1906267 - RNA, 19 nt, Artificial Sequence
  Description of Artificial Sequence: Synthetic oligonucleotide
ucagggcgcugacggcgcu

SEQ ID NO: 1906268 - RNA, 19 nt, Artificial Sequence
  Description of Artificial Sequence: Synthetic oligonucleotide
gcgguggugggguauggca

SEQ ID NO: 1906269 - RNA, 19 nt, Artificial Sequence
  Description of Artificial Sequence: Synthetic oligonucleotide
cacaggagccugggugcgg

SEQ ID NO: 1906270 - RNA, 19 nt, Artificial Sequence
  Description of Artificial Sequence: Synthetic oligonucleotide
cuuccggcaccugcaggug

SEQ ID NO: 1906271 - RNA, 19 nt, Artificial Sequence
  Description of Artificial Sequence: Synthetic oligonucleotide
ccaacuguuagauggcagu

SEQ ID NO: 1906272 - RNA, 19 nt, Artificial Sequence
  Description of Artificial Sequence: Synthetic oligonucleotide
cguaacagagcggggcugg

SEQ ID NO: 1906273 - RNA, 19 nt, Artificial Sequence
  Description of Artificial Sequence: Synthetic oligonucleotide
cuagccugggugguuagcu

SEQ ID NO: 1906274 - RNA, 19 nt, Artificial Sequence
  Description of Artificial Sequence: Synthetic oligonucleotide
gaguugguucuaugcuccu

SEQ ID NO: 1906275 - RNA, 19 nt, Artificial Sequence
  Description of Artificial Sequence: Synthetic oligonucleotide
gggugcaacgugggcagag

SEQ ID NO: 1906276 - RNA, 19 nt, Artificial Sequence
  Description of Artificial Sequence: Synthetic oligonucleotide
aucugcauucggacuuggu

SEQ ID NO: 1906277 - RNA, 19 nt, Artificial Sequence
  Description of Artificial Sequence: Synthetic oligonucleotide
ggcagcccuaucugguuuc

SEQ ID NO: 1906278 - RNA, 19 nt, Artificial Sequence
  Description of Artificial Sequence: Synthetic oligonucleotide
cuguuagauggcagugcua

SEQ ID NO: 1906279 - RNA, 19 nt, Artificial Sequence
  Description of Artificial Sequence: Synthetic oligonucleotide
gcuuccggcaccugcaggu

SEQ ID NO: 1906280 - RNA, 19 nt, Artificial Sequence
  Description of Artificial Sequence: Synthetic oligonucleotide
ggcuguguucuuccaggga

SEQ ID NO: 1906281 - RNA, 19 nt, Artificial Sequence
  Description of Artificial Sequence: Synthetic oligonucleotide
caccaccaccuccccuggg

SEQ ID NO: 1906282 - RNA, 19 nt, Artificial Sequence
  Description of Artificial Sequence: Synthetic oligonucleotide
agcccguaacagagcgggg

SEQ ID NO: 1906283 - RNA, 19 nt, Artificial Sequence
  Description of Artificial Sequence: Synthetic oligonucleotide
cccucccgagcccugggcg

SEQ ID NO: 1906284 - RNA, 19 nt, Artificial Sequence
  Description of Artificial Sequence: Synthetic oligonucleotide
ccagcccguaacagagcgg

SEQ ID NO: 1906285 - RNA, 19 nt, Artificial Sequence
  Description of Artificial Sequence: Synthetic oligonucleotide
cugggugguuagcuaagcu

SEQ ID NO: 1906286 - RNA, 19 nt, Artificial Sequence
  Description of Artificial Sequence: Synthetic oligonucleotide
guuucacagcacugucccu

SEQ ID NO: 1906287 - RNA, 19 nt, Artificial Sequence
  Description of Artificial Sequence: Synthetic oligonucleotide
gcucuagcccggcggcgcg

SEQ ID NO: 1906288 - RNA, 19 nt, Artificial Sequence
  Description of Artificial Sequence: Synthetic oligonucleotide
ggagugggauggaugaugu

SEQ ID NO: 1906289 - RNA, 19 nt, Artificial Sequence
  Description of Artificial Sequence: Synthetic oligonucleotide
guguugcccaaugggcaca

SEQ ID NO: 1906290 - RNA, 19 nt, Artificial Sequence
  Description of Artificial Sequence: Synthetic oligonucleotide
accuccccugggcuggcau

SEQ ID NO: 1906291 - RNA, 19 nt, Artificial Sequence
  Description of Artificial Sequence: Synthetic oligonucleotide
agcugggcacuaguuguuu

SEQ ID NO: 1906292 - RNA, 19 nt, Artificial Sequence
  Description of Artificial Sequence: Synthetic oligonucleotide
gccguggggccacgcauag

SEQ ID NO: 1906293 - RNA, 19 nt, Artificial Sequence
  Description of Artificial Sequence: Synthetic oligonucleotide
ggagggugcucccggggca

SEQ ID NO: 1906294 - RNA, 19 nt, Artificial Sequence
  Description of Artificial Sequence: Synthetic oligonucleotide
acggcgcugggugcaacgu

SEQ ID NO: 1906295 - RNA, 19 nt, Artificial Sequence
  Description of Artificial Sequence: Synthetic oligonucleotide
ccuugccaacuguuagaug

SEQ ID NO: 1906296 - RNA, 19 nt, Artificial Sequence
  Description of Artificial Sequence: Synthetic oligonucleotide
cucuagcccggcggcgcgg

SEQ ID NO: 1906297 - RNA, 19 nt, Artificial Sequence
  Description of Artificial Sequence: Synthetic oligonucleotide
agcugacugcucggguacu

SEQ ID NO: 1906298 - RNA, 19 nt, Artificial Sequence
  Description of Artificial Sequence: Synthetic oligonucleotide
gcuggggagggugcucccg

SEQ ID NO: 1906299 - RNA, 19 nt, Artificial Sequence
  Description of Artificial Sequence: Synthetic oligonucleotide
gacccgggcccggcguggg

SEQ ID NO: 1906300 - RNA, 19 nt, Artificial Sequence
  Description of Artificial Sequence: Synthetic oligonucleotide
ccggggcagagucccagcc

SEQ ID NO: 1906301 - RNA, 19 nt, Artificial Sequence
  Description of Artificial Sequence: Synthetic oligonucleotide
ugggugcaacgugggcaga

SEQ ID NO: 1906302 - RNA, 19 nt, Artificial Sequence
  Description of Artificial Sequence: Synthetic oligonucleotide
cuagcccggcggcgcgggg

SEQ ID NO: 1906303 - RNA, 19 nt, Artificial Sequence
  Description of Artificial Sequence: Synthetic oligonucleotide
cugcggcgucugcagcggc

SEQ ID NO: 1906304 - RNA, 19 nt, Artificial Sequence
  Description of Artificial Sequence: Synthetic oligonucleotide
gacugcucggguacuggau

SEQ ID NO: 1906305 - RNA, 19 nt, Artificial Sequence
  Description of Artificial Sequence: Synthetic oligonucleotide
gguuuggggucuucauagu

SEQ ID NO: 1906306 - RNA, 19 nt, Artificial Sequence
  Description of Artificial Sequence: Synthetic oligonucleotide
cagcccuaucugguuucac

SEQ ID NO: 1906307 - RNA, 19 nt, Artificial Sequence
  Description of Artificial Sequence: Synthetic oligonucleotide
gcauucggacuugguguug

SEQ ID NO: 1906308 - RNA, 19 nt, Artificial Sequence
  Description of Artificial Sequence: Synthetic oligonucleotide
gccgucgucagggcagcag

SEQ ID NO: 1906309 - RNA, 19 nt, Artificial Sequence
  Description of Artificial Sequence: Synthetic oligonucleotide
gcucggguacuggaucaug

SEQ ID NO: 1906310 - RNA, 19 nt, Artificial Sequence
  Description of Artificial Sequence: Synthetic oligonucleotide
gggcuggcauguggcacgg

SEQ ID NO: 1906311 - RNA, 19 nt, Artificial Sequence
  Description of Artificial Sequence: Synthetic oligonucleotide
gcgagcagcaggcggcgga

SEQ ID NO: 1906312 - RNA, 19 nt, Artificial Sequence
  Description of Artificial Sequence: Synthetic oligonucleotide
ugacggcgcugggugcaac

SEQ ID NO: 1906313 - RNA, 19 nt, Artificial Sequence
  Description of Artificial Sequence: Synthetic oligonucleotide
gcaaauggcccugcagucu

SEQ ID NO: 1906314 - RNA, 19 nt, Artificial Sequence
  Description of Artificial Sequence: Synthetic oligonucleotide
uggggccugugaggcaaau

SEQ ID NO: 1906315 - RNA, 19 nt, Artificial Sequence
  Description of Artificial Sequence: Synthetic oligonucleotide
ugcagagguuuggggucuu

SEQ ID NO: 1906316 - RNA, 19 nt, Artificial Sequence
  Description of Artificial Sequence: Synthetic oligonucleotide
ucgaggcuuccggcaccug

SEQ ID NO: 1906317 - RNA, 19 nt, Artificial Sequence
  Description of Artificial Sequence: Synthetic oligonucleotide
gcggcgucugcagcggcag

SEQ ID NO: 1906318 - RNA, 19 nt, Artificial Sequence
  Description of Artificial Sequence: Synthetic oligonucleotide
gcugacggcgcugggugca

SEQ ID NO: 1906319 - RNA, 19 nt, Artificial Sequence
  Description of Artificial Sequence: Synthetic oligonucleotide
ggagagauaugaggcuccu

SEQ ID NO: 1906320 - RNA, 19 nt, Artificial Sequence
  Description of Artificial Sequence: Synthetic oligonucleotide
gggccacgcauagcucuag

SEQ ID NO: 1906321 - RNA, 19 nt, Artificial Sequence
  Description of Artificial Sequence: Synthetic oligonucleotide
ggugguuagcuaagcuagu

SEQ ID NO: 1906322 - RNA, 19 nt, Artificial Sequence
  Description of Artificial Sequence: Synthetic oligonucleotide
ccguaacagagcggggcug

SEQ ID NO: 1906323 - RNA, 19 nt, Artificial Sequence
  Description of Artificial Sequence: Synthetic oligonucleotide
ggaucacaggagaguucuc

SEQ ID NO: 1906324 - RNA, 19 nt, Artificial Sequence
  Description of Artificial Sequence: Synthetic oligonucleotide
ccccagcugacugcucggg

SEQ ID NO: 1906325 - RNA, 19 nt, Artificial Sequence
  Description of Artificial Sequence: Synthetic oligonucleotide
ggcagugcuaggagacaaa

SEQ ID NO: 1906326 - RNA, 19 nt, Artificial Sequence
  Description of Artificial Sequence: Synthetic oligonucleotide
gggugcucccggggcagag

SEQ ID NO: 1906327 - RNA, 19 nt, Artificial Sequence
  Description of Artificial Sequence: Synthetic oligonucleotide
gguccugggacagcuuccu

SEQ ID NO: 1906328 - RNA, 19 nt, Artificial Sequence
  Description of Artificial Sequence: Synthetic oligonucleotide
gcacacauuccaggccguc

SEQ ID NO: 1906329 - RNA, 19 nt, Artificial Sequence
  Description of Artificial Sequence: Synthetic oligonucleotide
cauguggcacgggcauaaa

SEQ ID NO: 1906330 - RNA, 19 nt, Artificial Sequence
  Description of Artificial Sequence: Synthetic oligonucleotide
gcagcccuaucugguuuca

SEQ ID NO: 1906331 - RNA, 19 nt, Artificial Sequence
  Description of Artificial Sequence: Synthetic oligonucleotide
cagcugggcacuaguuguu

SEQ ID NO: 1906332 - RNA, 19 nt, Artificial Sequence
  Description of Artificial Sequence: Synthetic oligonucleotide
caccacagcgcugcacagu

SEQ ID NO: 1906333 - RNA, 19 nt, Artificial Sequence
  Description of Artificial Sequence: Synthetic oligonucleotide
ccagagccccauggcgcgg

SEQ ID NO: 1906334 - RNA, 19 nt, Artificial Sequence
  Description of Artificial Sequence: Synthetic oligonucleotide
cgcugggugcaacgugggc

SEQ ID NO: 1906335 - RNA, 19 nt, Artificial Sequence
  Description of Artificial Sequence: Synthetic oligonucleotide
gggccgcgcgccguggggc

SEQ ID NO: 1906336 - RNA, 19 nt, Artificial Sequence
  Description of Artificial Sequence: Synthetic oligonucleotide
cccguaacagagcggggcu

SEQ ID NO: 1906337 - RNA, 19 nt, Artificial Sequence
  Description of Artificial Sequence: Synthetic oligonucleotide
ggcuggcauguggcacggg

SEQ ID NO: 1906338 - RNA, 19 nt, Artificial Sequence
  Description of Artificial Sequence: Synthetic oligonucleotide
gcccuuggcaacggaggaa

SEQ ID NO: 1906339 - RNA, 19 nt, Artificial Sequence
  Description of Artificial Sequence: Synthetic oligonucleotide
cgcauagcucuagcccggc

SEQ ID NO: 1906340 - RNA, 19 nt, Artificial Sequence
  Description of Artificial Sequence: Synthetic oligonucleotide
ccgagcccugggcgcaggc

SEQ ID NO: 1906341 - RNA, 19 nt, Artificial Sequence
  Description of Artificial Sequence: Synthetic oligonucleotide
cuggagugggauggaugau

SEQ ID NO: 1906342 - RNA, 19 nt, Artificial Sequence
  Description of Artificial Sequence: Synthetic oligonucleotide
cgcccuuggcaacggagga

SEQ ID NO: 1906343 - RNA, 19 nt, Artificial Sequence
  Description of Artificial Sequence: Synthetic oligonucleotide
gcucacuagccuggguggu

SEQ ID NO: 1906344 - RNA, 19 nt, Artificial Sequence
  Description of Artificial Sequence: Synthetic oligonucleotide
cgggccaguugcagcagca

SEQ ID NO: 1906345 - RNA, 19 nt, Artificial Sequence
  Description of Artificial Sequence: Synthetic oligonucleotide
cugacggcgcugggugcaa

SEQ ID NO: 1906346 - RNA, 19 nt, Artificial Sequence
  Description of Artificial Sequence: Synthetic oligonucleotide
ggcgcugacggcgcugggu

SEQ ID NO: 1906347 - RNA, 19 nt, Artificial Sequence
  Description of Artificial Sequence: Synthetic oligonucleotide
ggggccacgcauagcucua

SEQ ID NO: 1906348 - RNA, 19 nt, Artificial Sequence
  Description of Artificial Sequence: Synthetic oligonucleotide
cggcgcugggugcaacgug

SEQ ID NO: 1906349 - RNA, 19 nt, Artificial Sequence
  Description of Artificial Sequence: Synthetic oligonucleotide
ggcacacauuccaggccgu

SEQ ID NO: 1906350 - RNA, 19 nt, Artificial Sequence
  Description of Artificial Sequence: Synthetic oligonucleotide
gccccgcccuuggcaacgg

SEQ ID NO: 1906351 - RNA, 19 nt, Artificial Sequence
  Description of Artificial Sequence: Synthetic oligonucleotide
cauuacccaugagcuccau

SEQ ID NO: 1906352 - RNA, 19 nt, Artificial Sequence
  Description of Artificial Sequence: Synthetic oligonucleotide
cccugcagucugucugaaa

SEQ ID NO: 1906353 - RNA, 19 nt, Artificial Sequence
  Description of Artificial Sequence: Synthetic oligonucleotide
gcgccguggggccacgcau

SEQ ID NO: 1906354 - RNA, 19 nt, Artificial Sequence
  Description of Artificial Sequence: Synthetic oligonucleotide
ccguggggccacgcauagc

SEQ ID NO: 1906355 - RNA, 19 nt, Artificial Sequence
  Description of Artificial Sequence: Synthetic oligonucleotide
ggugcucccggggcagagu

SEQ ID NO: 1906356 - RNA, 19 nt, Artificial Sequence
  Description of Artificial Sequence: Synthetic oligonucleotide
ccagucugaguugguucua

SEQ ID NO: 1906357 - RNA, 19 nt, Artificial Sequence
  Description of Artificial Sequence: Synthetic oligonucleotide
cccagcugacugcucgggu

SEQ ID NO: 1906358 - RNA, 19 nt, Artificial Sequence
  Description of Artificial Sequence: Synthetic oligonucleotide
cccgagcccugggcgcagg

SEQ ID NO: 1906359 - RNA, 19 nt, Artificial Sequence
  Description of Artificial Sequence: Synthetic oligonucleotide
gcccugcagucugucugaa

SEQ ID NO: 1906360 - RNA, 19 nt, Artificial Sequence
  Description of Artificial Sequence: Synthetic oligonucleotide
ccucccagucugaguuggu

SEQ ID NO: 1906361 - RNA, 19 nt, Artificial Sequence
  Description of Artificial Sequence: Synthetic oligonucleotide
cgccguggggccacgcaua

SEQ ID NO: 1906362 - RNA, 19 nt, Artificial Sequence
  Description of Artificial Sequence: Synthetic oligonucleotide
ggccgucgucagggcagca

SEQ ID NO: 1906363 - RNA, 19 nt, Artificial Sequence
  Description of Artificial Sequence: Synthetic oligonucleotide
cgcgccguggggccacgca

SEQ ID NO: 1906364 - RNA, 19 nt, Artificial Sequence
  Description of Artificial Sequence: Synthetic oligonucleotide
ccgcgcgccguggggccac

SEQ ID NO: 1906365 - RNA, 19 nt, Artificial Sequence
  Description of Artificial Sequence: Synthetic oligonucleotide
gcgcgccguggggccacgc

SEQ ID NO: 1906366 - RNA, 19 nt, Artificial Sequence
  Description of Artificial Sequence: Synthetic oligonucleotide
gccugggugcgggccaguu

SEQ ID NO: 1906367 - RNA, 19 nt, Artificial Sequence
  Description of Artificial Sequence: Synthetic oligonucleotide
cgcgcgccguggggccacg

SEQ ID NO: 1906368 - RNA, 19 nt, Artificial Sequence
  Description of Artificial Sequence: Synthetic oligonucleotide
uuuauaaaguuuuauagcg

SEQ ID NO: 1906369 - RNA, 19 nt, Artificial Sequence
  Description of Artificial Sequence: Synthetic oligonucleotide
agaauuaucaaucugaaga

SEQ ID NO: 1906370 - RNA, 19 nt, Artificial Sequence
  Description of Artificial Sequence: Synthetic oligonucleotide
uuuccauaaacaaucaugg

SEQ ID NO: 1906371 - RNA, 19 nt, Artificial Sequence
  Description of Artificial Sequence: Synthetic oligonucleotide
aaaauaguauuucaaacug

SEQ ID NO: 1906372 - RNA, 19 nt, Artificial Sequence
  Description of Artificial Sequence: Synthetic oligonucleotide
uuuaguauccccuucagcc

SEQ ID NO: 1906373 - RNA, 19 nt, Artificial Sequence
  Description of Artificial Sequence: Synthetic oligonucleotide
uuaacaacuuuucacaagc

SEQ ID NO: 1906374 - RNA, 19 nt, Artificial Sequence
  Description of Artificial Sequence: Synthetic oligonucleotide
uuugaaaaggggaagagcu

SEQ ID NO: 1906375 - RNA, 19 nt, Artificial Sequence
  Description of Artificial Sequence: Synthetic oligonucleotide
gaggauauuauuuucacug

SEQ ID NO: 1906376 - RNA, 19 nt, Artificial Sequence
  Description of Artificial Sequence: Synthetic oligonucleotide
aaucaauccagcuuaggag

SEQ ID NO: 1906377 - RNA, 19 nt, Artificial Sequence
  Description of Artificial Sequence: Synthetic oligonucleotide
caaucuuguauauaaaagg

SEQ ID NO: 1906378 - RNA, 19 nt, Artificial Sequence
  Description of Artificial Sequence: Synthetic oligonucleotide
uuucuuuugggcauggcgg

SEQ ID NO: 1906379 - RNA, 19 nt, Artificial Sequence
  Description of Artificial Sequence: Synthetic oligonucleotide
auuaucaaucugaagaucc

SEQ ID NO: 1906380 - RNA, 19 nt, Artificial Sequence
  Description of Artificial Sequence: Synthetic oligonucleotide
auauaaaaggaaccgcugc

SEQ ID NO: 1906381 - RNA, 19 nt, Artificial Sequence
  Description of Artificial Sequence: Synthetic oligonucleotide
uuuacaagaacuuccaaac

SEQ ID NO: 1906382 - RNA, 19 nt, Artificial Sequence
  Description of Artificial Sequence: Synthetic oligonucleotide
ucaaccaucaaucaaucca

SEQ ID NO: 1906383 - RNA, 19 nt, Artificial Sequence
  Description of Artificial Sequence: Synthetic oligonucleotide
aguuuuauagcgcugggag

SEQ ID NO: 1906384 - RNA, 19 nt, Artificial Sequence
  Description of Artificial Sequence: Synthetic oligonucleotide
uuuuaagggaguuaagucu

SEQ ID NO: 1906385 - RNA, 19 nt, Artificial Sequence
  Description of Artificial Sequence: Synthetic oligonucleotide
cuuguauauaaaaggaacc

SEQ ID NO: 1906386 - RNA, 19 nt, Artificial Sequence
  Description of Artificial Sequence: Synthetic oligonucleotide
aacaccaggacgucucucc

SEQ ID NO: 1906387 - RNA, 19 nt, Artificial Sequence
  Description of Artificial Sequence: Synthetic oligonucleotide
accaaaaucagaaagccac

SEQ ID NO: 1906388 - RNA, 19 nt, Artificial Sequence
  Description of Artificial Sequence: Synthetic oligonucleotide
uucuaaauugucaaggaaa

SEQ ID NO: 1906389 - RNA, 19 nt, Artificial Sequence
  Description of Artificial Sequence: Synthetic oligonucleotide
cuuuccauaaacaaucaug

SEQ ID NO: 1906390 - RNA, 19 nt, Artificial Sequence
  Description of Artificial Sequence: Synthetic oligonucleotide
uuagcagacaaccuugcag

SEQ ID NO: 1906391 - RNA, 19 nt, Artificial Sequence
  Description of Artificial Sequence: Synthetic oligonucleotide
uaaaguuuuauagcgcugg

SEQ ID NO: 1906392 - RNA, 19 nt, Artificial Sequence
  Description of Artificial Sequence: Synthetic oligonucleotide
aaagccacuauaaaacccg

SEQ ID NO: 1906393 - RNA, 19 nt, Artificial Sequence
  Description of Artificial Sequence: Synthetic oligonucleotide
uucacauuaaggauguugu

SEQ ID NO: 1906394 - RNA, 19 nt, Artificial Sequence
  Description of Artificial Sequence: Synthetic oligonucleotide
uucagauugcccaauagac

SEQ ID NO: 1906395 - RNA, 19 nt, Artificial Sequence
  Description of Artificial Sequence: Synthetic oligonucleotide
uuaaggauguuguuuaaca

SEQ ID NO: 1906396 - RNA, 19 nt, Artificial Sequence
  Description of Artificial Sequence: Synthetic oligonucleotide
uuuuccaucaaccaucaau

SEQ ID NO: 1906397 - RNA, 19 nt, Artificial Sequence
  Description of Artificial Sequence: Synthetic oligonucleotide
aagucuauguugaugguac

SEQ ID NO: 1906398 - RNA, 19 nt, Artificial Sequence
  Description of Artificial Sequence: Synthetic oligonucleotide
uuuccaucaaccaucaauc

SEQ ID NO: 1906399 - RNA, 19 nt, Artificial Sequence
  Description of Artificial Sequence: Synthetic oligonucleotide
ugaagauccacaaucuugu

SEQ ID NO: 1906400 - RNA, 19 nt, Artificial Sequence
  Description of Artificial Sequence: Synthetic oligonucleotide
aguaacaguuuacaagaac

SEQ ID NO: 1906401 - RNA, 19 nt, Artificial Sequence
  Description of Artificial Sequence: Synthetic oligonucleotide
uauauaaaaggaaccgcug

SEQ ID NO: 1906402 - RNA, 19 nt, Artificial Sequence
  Description of Artificial Sequence: Synthetic oligonucleotide
cagaaagccacuauaaaac

SEQ ID NO: 1906403 - RNA, 19 nt, Artificial Sequence
  Description of Artificial Sequence: Synthetic oligonucleotide
aggauauuauuuucacugc

SEQ ID NO: 1906404 - RNA, 19 nt, Artificial Sequence
  Description of Artificial Sequence: Synthetic oligonucleotide
uuuuauagcgcugggagcc

SEQ ID NO: 1906405 - RNA, 19 nt, Artificial Sequence
  Description of Artificial Sequence: Synthetic oligonucleotide
uaaauugucaaggaaagau

SEQ ID NO: 1906406 - RNA, 19 nt, Artificial Sequence
  Description of Artificial Sequence: Synthetic oligonucleotide
uccacaaucuuguauauaa

SEQ ID NO: 1906407 - RNA, 19 nt, Artificial Sequence
  Description of Artificial Sequence: Synthetic oligonucleotide
uuguuagugacacauguuc

SEQ ID NO: 1906408 - RNA, 19 nt, Artificial Sequence
  Description of Artificial Sequence: Synthetic oligonucleotide
aaaguuuuauagcgcuggg

SEQ ID NO: 1906409 - RNA, 19 nt, Artificial Sequence
  Description of Artificial Sequence: Synthetic oligonucleotide
aauuaucaaucugaagauc

SEQ ID NO: 1906410 - RNA, 19 nt, Artificial Sequence
  Description of Artificial Sequence: Synthetic oligonucleotide
uauaaaaggaaccgcugcu

SEQ ID NO: 1906411 - RNA, 19 nt, Artificial Sequence
  Description of Artificial Sequence: Synthetic oligonucleotide
agugacacauguuccuucc

SEQ ID NO: 1906412 - RNA, 19 nt, Artificial Sequence
  Description of Artificial Sequence: Synthetic oligonucleotide
caauagaccagcaaaacca

SEQ ID NO: 1906413 - RNA, 19 nt, Artificial Sequence
  Description of Artificial Sequence: Synthetic oligonucleotide
acaagaacuuccaaacucc

SEQ ID NO: 1906414 - RNA, 19 nt, Artificial Sequence
  Description of Artificial Sequence: Synthetic oligonucleotide
aaacuguacagucaccaga

SEQ ID NO: 1906415 - RNA, 19 nt, Artificial Sequence
  Description of Artificial Sequence: Synthetic oligonucleotide
uguuagugacacauguucc

SEQ ID NO: 1906416 - RNA, 19 nt, Artificial Sequence
  Description of Artificial Sequence: Synthetic oligonucleotide
cuauguugaugguacaggg

SEQ ID NO: 1906417 - RNA, 19 nt, Artificial Sequence
  Description of Artificial Sequence: Synthetic oligonucleotide
uguacagucaccagaagua

SEQ ID NO: 1906418 - RNA, 19 nt, Artificial Sequence
  Description of Artificial Sequence: Synthetic oligonucleotide
uguauauaaaaggaaccgc

SEQ ID NO: 1906419 - RNA, 19 nt, Artificial Sequence
  Description of Artificial Sequence: Synthetic oligonucleotide
aucaugguauuucaggcag

SEQ ID NO: 1906420 - RNA, 19 nt, Artificial Sequence
  Description of Artificial Sequence: Synthetic oligonucleotide
uguuguuuaacaacuuuuc

SEQ ID NO: 1906421 - RNA, 19 nt, Artificial Sequence
  Description of Artificial Sequence: Synthetic oligonucleotide
cuuucuuuugggcauggcg

SEQ ID NO: 1906422 - RNA, 19 nt, Artificial Sequence
  Description of Artificial Sequence: Synthetic oligonucleotide
aacuuucuaaauugucaag

SEQ ID NO: 1906423 - RNA, 19 nt, Artificial Sequence
  Description of Artificial Sequence: Synthetic oligonucleotide
guuagaaccggauuucacc

SEQ ID NO: 1906424 - RNA, 19 nt, Artificial Sequence
  Description of Artificial Sequence: Synthetic oligonucleotide
uguauggacuaccaaaauc

SEQ ID NO: 1906425 - RNA, 19 nt, Artificial Sequence
  Description of Artificial Sequence: Synthetic oligonucleotide
ucuauguugaugguacagg

SEQ ID NO: 1906426 - RNA, 19 nt, Artificial Sequence
  Description of Artificial Sequence: Synthetic oligonucleotide
auaugucaacaccaggacg

SEQ ID NO: 1906427 - RNA, 19 nt, Artificial Sequence
  Description of Artificial Sequence: Synthetic oligonucleotide
aaaucagaaagccacuaua

SEQ ID NO: 1906428 - RNA, 19 nt, Artificial Sequence
  Description of Artificial Sequence: Synthetic oligonucleotide
aaacaaucaugguauuuca

SEQ ID NO: 1906429 - RNA, 19 nt, Artificial Sequence
  Description of Artificial Sequence: Synthetic oligonucleotide
aggucucugguuuuaaggg

SEQ ID NO: 1906430 - RNA, 19 nt, Artificial Sequence
  Description of Artificial Sequence: Synthetic oligonucleotide
gaagagcuuagagugaggg

SEQ ID NO: 1906431 - RNA, 19 nt, Artificial Sequence
  Description of Artificial Sequence: Synthetic oligonucleotide
acauguuccuuccccaccc

SEQ ID NO: 1906432 - RNA, 19 nt, Artificial Sequence
  Description of Artificial Sequence: Synthetic oligonucleotide
ucagauugcccaauagacc

SEQ ID NO: 1906433 - RNA, 19 nt, Artificial Sequence
  Description of Artificial Sequence: Synthetic oligonucleotide
uuucacauuaaggauguug

SEQ ID NO: 1906434 - RNA, 19 nt, Artificial Sequence
  Description of Artificial Sequence: Synthetic oligonucleotide
auuaaagauacuuuccaua

SEQ ID NO: 1906435 - RNA, 19 nt, Artificial Sequence
  Description of Artificial Sequence: Synthetic oligonucleotide
ugaggguugacauuucaca

SEQ ID NO: 1906436 - RNA, 19 nt, Artificial Sequence
  Description of Artificial Sequence: Synthetic oligonucleotide
aaauugucaaggaaagaug

SEQ ID NO: 1906437 - RNA, 19 nt, Artificial Sequence
  Description of Artificial Sequence: Synthetic oligonucleotide
aagggaguuaagucuaugu

SEQ ID NO: 1906438 - RNA, 19 nt, Artificial Sequence
  Description of Artificial Sequence: Synthetic oligonucleotide
acaaucuuguauauaaaag

SEQ ID NO: 1906439 - RNA, 19 nt, Artificial Sequence
  Description of Artificial Sequence: Synthetic oligonucleotide
uuagaaccggauuucaccu

SEQ ID NO: 1906440 - RNA, 19 nt, Artificial Sequence
  Description of Artificial Sequence: Synthetic oligonucleotide
guuauuugcauccuugcca

SEQ ID NO: 1906441 - RNA, 19 nt, Artificial Sequence
  Description of Artificial Sequence: Synthetic oligonucleotide
ugggcagacaaucaguaac

SEQ ID NO: 1906442 - RNA, 19 nt, Artificial Sequence
  Description of Artificial Sequence: Synthetic oligonucleotide
aaugcuuugaaaaggggaa

SEQ ID NO: 1906443 - RNA, 19 nt, Artificial Sequence
  Description of Artificial Sequence: Synthetic oligonucleotide
agauacuuuccauaaacaa

SEQ ID NO: 1906444 - RNA, 19 nt, Artificial Sequence
  Description of Artificial Sequence: Synthetic oligonucleotide
uuucuaaauugucaaggaa

SEQ ID NO: 1906445 - RNA, 19 nt, Artificial Sequence
  Description of Artificial Sequence: Synthetic oligonucleotide
uauggacuaccaaaaucag

SEQ ID NO: 1906446 - RNA, 19 nt, Artificial Sequence
  Description of Artificial Sequence: Synthetic oligonucleotide
cuaccaaaaucagaaagcc

SEQ ID NO: 1906447 - RNA, 19 nt, Artificial Sequence
  Description of Artificial Sequence: Synthetic oligonucleotide
aggaaagauguuuuccauc

SEQ ID NO: 1906448 - RNA, 19 nt, Artificial Sequence
  Description of Artificial Sequence: Synthetic oligonucleotide
guuuuaagggaguuaaguc

SEQ ID NO: 1906449 - RNA, 19 nt, Artificial Sequence
  Description of Artificial Sequence: Synthetic oligonucleotide
guauggacuaccaaaauca

SEQ ID NO: 1906450 - RNA, 19 nt, Artificial Sequence
  Description of Artificial Sequence: Synthetic oligonucleotide
aucaaccaucaaucaaucc

SEQ ID NO: 1906451 - RNA, 19 nt, Artificial Sequence
  Description of Artificial Sequence: Synthetic oligonucleotide
uggaggagcagguuuagca

SEQ ID NO: 1906452 - RNA, 19 nt, Artificial Sequence
  Description of Artificial Sequence: Synthetic oligonucleotide
uuaucaaucugaagaucca

SEQ ID NO: 1906453 - RNA, 19 nt, Artificial Sequence
  Description of Artificial Sequence: Synthetic oligonucleotide
augcacacauuucacuugg

SEQ ID NO: 1906454 - RNA, 19 nt, Artificial Sequence
  Description of Artificial Sequence: Synthetic oligonucleotide
aaacaaugaaguguucugu

SEQ ID NO: 1906455 - RNA, 19 nt, Artificial Sequence
  Description of Artificial Sequence: Synthetic oligonucleotide
auuaaggauguuguuuaac

SEQ ID NO: 1906456 - RNA, 19 nt, Artificial Sequence
  Description of Artificial Sequence: Synthetic oligonucleotide
aacuuuucacaagccgacc

SEQ ID NO: 1906457 - RNA, 19 nt, Artificial Sequence
  Description of Artificial Sequence: Synthetic oligonucleotide
ugacacauguuccuucccc

SEQ ID NO: 1906458 - RNA, 19 nt, Artificial Sequence
  Description of Artificial Sequence: Synthetic oligonucleotide
uauaaaacccggugaaguc

SEQ ID NO: 1906459 - RNA, 19 nt, Artificial Sequence
  Description of Artificial Sequence: Synthetic oligonucleotide
uuuggcgucuccauuuucu

SEQ ID NO: 1906460 - RNA, 19 nt, Artificial Sequence
  Description of Artificial Sequence: Synthetic oligonucleotide
uuagagugaggguugacau

SEQ ID NO: 1906461 - RNA, 19 nt, Artificial Sequence
  Description of Artificial Sequence: Synthetic oligonucleotide
acauuaaggauguuguuua

SEQ ID NO: 1906462 - RNA, 19 nt, Artificial Sequence
  Description of Artificial Sequence: Synthetic oligonucleotide
accuuauccagcuuuauua

SEQ ID NO: 1906463 - RNA, 19 nt, Artificial Sequence
  Description of Artificial Sequence: Synthetic oligonucleotide
aaccuugcagaucuucucu

SEQ ID NO: 1906464 - RNA, 19 nt, Artificial Sequence
  Description of Artificial Sequence: Synthetic oligonucleotide
ugcccaauagaccagcaaa

SEQ ID NO: 1906465 - RNA, 19 nt, Artificial Sequence
  Description of Artificial Sequence: Synthetic oligonucleotide
aaauaguauuucaaacugu

SEQ ID NO: 1906466 - RNA, 19 nt, Artificial Sequence
  Description of Artificial Sequence: Synthetic oligonucleotide
gaaagccacuauaaaaccc

SEQ ID NO: 1906467 - RNA, 19 nt, Artificial Sequence
  Description of Artificial Sequence: Synthetic oligonucleotide
ugcaaaguucagauugccc

SEQ ID NO: 1906468 - RNA, 19 nt, Artificial Sequence
  Description of Artificial Sequence: Synthetic oligonucleotide
uucaccuuggcuuuaucuc

SEQ ID NO: 1906469 - RNA, 19 nt, Artificial Sequence
  Description of Artificial Sequence: Synthetic oligonucleotide
auaaaaggaaccgcugcuc

SEQ ID NO: 1906470 - RNA, 19 nt, Artificial Sequence
  Description of Artificial Sequence: Synthetic oligonucleotide
gacccugacuuucaggcag

SEQ ID NO: 1906471 - RNA, 19 nt, Artificial Sequence
  Description of Artificial Sequence: Synthetic oligonucleotide
auggcggccacauauguca

SEQ ID NO: 1906472 - RNA, 19 nt, Artificial Sequence
  Description of Artificial Sequence: Synthetic oligonucleotide
aguucagauugcccaauag

SEQ ID NO: 1906473 - RNA, 19 nt, Artificial Sequence
  Description of Artificial Sequence: Synthetic oligonucleotide
uaacaacuuuucacaagcc

SEQ ID NO: 1906474 - RNA, 19 nt, Artificial Sequence
  Description of Artificial Sequence: Synthetic oligonucleotide
aaguguucugugugcuaac

SEQ ID NO: 1906475 - RNA, 19 nt, Artificial Sequence
  Description of Artificial Sequence: Synthetic oligonucleotide
agaacuuccaaacucccuu

SEQ ID NO: 1906476 - RNA, 19 nt, Artificial Sequence
  Description of Artificial Sequence: Synthetic oligonucleotide
cauaugucaacaccaggac

SEQ ID NO: 1906477 - RNA, 19 nt, Artificial Sequence
  Description of Artificial Sequence: Synthetic oligonucleotide
uguggcucguccuucaccu

SEQ ID NO: 1906478 - RNA, 19 nt, Artificial Sequence
  Description of Artificial Sequence: Synthetic oligonucleotide
ugaggauauuauuuucacu

SEQ ID NO: 1906479 - RNA, 19 nt, Artificial Sequence
  Description of Artificial Sequence: Synthetic oligonucleotide
acaaugaaguguucugugu

SEQ ID NO: 1906480 - RNA, 19 nt, Artificial Sequence
  Description of Artificial Sequence: Synthetic oligonucleotide
cuuugaaaaggggaagagc

SEQ ID NO: 1906481 - RNA, 19 nt, Artificial Sequence
  Description of Artificial Sequence: Synthetic oligonucleotide
uuaguauccccuucagccu

SEQ ID NO: 1906482 - RNA, 19 nt, Artificial Sequence
  Description of Artificial Sequence: Synthetic oligonucleotide
gggaguuaagucuauguug

SEQ ID NO: 1906483 - RNA, 19 nt, Artificial Sequence
  Description of Artificial Sequence: Synthetic oligonucleotide
aacaaucaugguauuucag

SEQ ID NO: 1906484 - RNA, 19 nt, Artificial Sequence
  Description of Artificial Sequence: Synthetic oligonucleotide
ucaccagaaguacacaguu

SEQ ID NO: 1906485 - RNA, 19 nt, Artificial Sequence
  Description of Artificial Sequence: Synthetic oligonucleotide
ucguccuucaccuuggcuu

SEQ ID NO: 1906486 - RNA, 19 nt, Artificial Sequence
  Description of Artificial Sequence: Synthetic oligonucleotide
ugucaaggaaagauguuuu

SEQ ID NO: 1906487 - RNA, 19 nt, Artificial Sequence
  Description of Artificial Sequence: Synthetic oligonucleotide
caaugcuuugaaaagggga

SEQ ID NO: 1906488 - RNA, 19 nt, Artificial Sequence
  Description of Artificial Sequence: Synthetic oligonucleotide
uuuagcagacaaccuugca

SEQ ID NO: 1906489 - RNA, 19 nt, Artificial Sequence
  Description of Artificial Sequence: Synthetic oligonucleotide
uucuuuugggcauggcggc

SEQ ID NO: 1906490 - RNA, 19 nt, Artificial Sequence
  Description of Artificial Sequence: Synthetic oligonucleotide
acugcaaaguucagauugc

SEQ ID NO: 1906491 - RNA, 19 nt, Artificial Sequence
  Description of Artificial Sequence: Synthetic oligonucleotide
guuuuauagcgcugggagc

SEQ ID NO: 1906492 - RNA, 19 nt, Artificial Sequence
  Description of Artificial Sequence: Synthetic oligonucleotide
acaacuuuucacaagccga

SEQ ID NO: 1906493 - RNA, 19 nt, Artificial Sequence
  Description of Artificial Sequence: Synthetic oligonucleotide
gaauuaucaaucugaagau

SEQ ID NO: 1906494 - RNA, 19 nt, Artificial Sequence
  Description of Artificial Sequence: Synthetic oligonucleotide
uccaacaggucucugguuu

SEQ ID NO: 1906495 - RNA, 19 nt, Artificial Sequence
  Description of Artificial Sequence: Synthetic oligonucleotide
caaacucccuucuuguaug

SEQ ID NO: 1906496 - RNA, 19 nt, Artificial Sequence
  Description of Artificial Sequence: Synthetic oligonucleotide
uacuuuccauaaacaauca

SEQ ID NO: 1906497 - RNA, 19 nt, Artificial Sequence
  Description of Artificial Sequence: Synthetic oligonucleotide
cuuuaguauccccuucagc

SEQ ID NO: 1906498 - RNA, 19 nt, Artificial Sequence
  Description of Artificial Sequence: Synthetic oligonucleotide
caaucaauccagcuuagga

SEQ ID NO: 1906499 - RNA, 19 nt, Artificial Sequence
  Description of Artificial Sequence: Synthetic oligonucleotide
aagagcuuagagugagggu

SEQ ID NO: 1906500 - RNA, 19 nt, Artificial Sequence
  Description of Artificial Sequence: Synthetic oligonucleotide
gcaaaguucagauugccca

SEQ ID NO: 1906501 - RNA, 19 nt, Artificial Sequence
  Description of Artificial Sequence: Synthetic oligonucleotide
agaaguacacaguuaucaa

SEQ ID NO: 1906502 - RNA, 19 nt, Artificial Sequence
  Description of Artificial Sequence: Synthetic oligonucleotide
accgcugcucuuuugagga

SEQ ID NO: 1906503 - RNA, 19 nt, Artificial Sequence
  Description of Artificial Sequence: Synthetic oligonucleotide
aaccggauuucaccucccg

SEQ ID NO: 1906504 - RNA, 19 nt, Artificial Sequence
  Description of Artificial Sequence: Synthetic oligonucleotide
cagcuuaggagacauuuug

SEQ ID NO: 1906505 - RNA, 19 nt, Artificial Sequence
  Description of Artificial Sequence: Synthetic oligonucleotide
agagcuuagagugaggguu

SEQ ID NO: 1906506 - RNA, 19 nt, Artificial Sequence
  Description of Artificial Sequence: Synthetic oligonucleotide
cacauaugucaacaccagg

SEQ ID NO: 1906507 - RNA, 19 nt, Artificial Sequence
  Description of Artificial Sequence: Synthetic oligonucleotide
aacuguacagucaccagaa

SEQ ID NO: 1906508 - RNA, 19 nt, Artificial Sequence
  Description of Artificial Sequence: Synthetic oligonucleotide
auaaaacccggugaagucu

SEQ ID NO: 1906509 - RNA, 19 nt, Artificial Sequence
  Description of Artificial Sequence: Synthetic oligonucleotide
uuuguuagugacacauguu

SEQ ID NO: 1906510 - RNA, 19 nt, Artificial Sequence
  Description of Artificial Sequence: Synthetic oligonucleotide
ucaaucaauccagcuuagg

SEQ ID NO: 1906511 - RNA, 19 nt, Artificial Sequence
  Description of Artificial Sequence: Synthetic oligonucleotide
uuaggcuugggcucuggcu

SEQ ID NO: 1906512 - RNA, 19 nt, Artificial Sequence
  Description of Artificial Sequence: Synthetic oligonucleotide
ccuaagccaaaccuuaucc

SEQ ID NO: 1906513 - RNA, 19 nt, Artificial Sequence
  Description of Artificial Sequence: Synthetic oligonucleotide
cacaaucuuguauauaaaa

SEQ ID NO: 1906514 - RNA, 19 nt, Artificial Sequence
  Description of Artificial Sequence: Synthetic oligonucleotide
uugucaaggaaagauguuu

SEQ ID NO: 1906515 - RNA, 19 nt, Artificial Sequence
  Description of Artificial Sequence: Synthetic oligonucleotide
acuauaaaacccggugaag

SEQ ID NO: 1906516 - RNA, 19 nt, Artificial Sequence
  Description of Artificial Sequence: Synthetic oligonucleotide
gguuccaacaggucucugg

SEQ ID NO: 1906517 - RNA, 19 nt, Artificial Sequence
  Description of Artificial Sequence: Synthetic oligonucleotide
ugccauggcggccacauau

SEQ ID NO: 1906518 - RNA, 19 nt, Artificial Sequence
  Description of Artificial Sequence: Synthetic oligonucleotide
aaguuuuauagcgcuggga

SEQ ID NO: 1906519 - RNA, 19 nt, Artificial Sequence
  Description of Artificial Sequence: Synthetic oligonucleotide
gcagguuuagcagacaacc

SEQ ID NO: 1906520 - RNA, 19 nt, Artificial Sequence
  Description of Artificial Sequence: Synthetic oligonucleotide
ugcuuugaaaaggggaaga

SEQ ID NO: 1906521 - RNA, 19 nt, Artificial Sequence
  Description of Artificial Sequence: Synthetic oligonucleotide
aauagaccagcaaaaccaa

SEQ ID NO: 1906522 - RNA, 19 nt, Artificial Sequence
  Description of Artificial Sequence: Synthetic oligonucleotide
uaucaaucugaagauccac

SEQ ID NO: 1906523 - RNA, 19 nt, Artificial Sequence
  Description of Artificial Sequence: Synthetic oligonucleotide
ugcucuuuugaggauauua

SEQ ID NO: 1906524 - RNA, 19 nt, Artificial Sequence
  Description of Artificial Sequence: Synthetic oligonucleotide
aaccuuauccagcuuuauu

SEQ ID NO: 1906525 - RNA, 19 nt, Artificial Sequence
  Description of Artificial Sequence: Synthetic oligonucleotide
aucagaaagccacuauaaa

SEQ ID NO: 1906526 - RNA, 19 nt, Artificial Sequence
  Description of Artificial Sequence: Synthetic oligonucleotide
uuccauaaacaaucauggu

SEQ ID NO: 1906527 - RNA, 19 nt, Artificial Sequence
  Description of Artificial Sequence: Synthetic oligonucleotide
accgguuagaaccggauuu

SEQ ID NO: 1906528 - RNA, 19 nt, Artificial Sequence
  Description of Artificial Sequence: Synthetic oligonucleotide
agguuuagcagacaaccuu

SEQ ID NO: 1906529 - RNA, 19 nt, Artificial Sequence
  Description of Artificial Sequence: Synthetic oligonucleotide
cuuggguaccuucucuccc

SEQ ID NO: 1906530 - RNA, 19 nt, Artificial Sequence
  Description of Artificial Sequence: Synthetic oligonucleotide
agccaaaccuuauccagcu

SEQ ID NO: 1906531 - RNA, 19 nt, Artificial Sequence
  Description of Artificial Sequence: Synthetic oligonucleotide
uuaagucuauguugauggu

SEQ ID NO: 1906532 - RNA, 19 nt, Artificial Sequence
  Description of Artificial Sequence: Synthetic oligonucleotide
guauauaaaaggaaccgcu

SEQ ID NO: 1906533 - RNA, 19 nt, Artificial Sequence
  Description of Artificial Sequence: Synthetic oligonucleotide
ucuguuuuggcgucuccau

SEQ ID NO: 1906534 - RNA, 19 nt, Artificial Sequence
  Description of Artificial Sequence: Synthetic oligonucleotide
gguuauuugcauccuugcc

SEQ ID NO: 1906535 - RNA, 19 nt, Artificial Sequence
  Description of Artificial Sequence: Synthetic oligonucleotide
uaaaacccggugaagucuu

SEQ ID NO: 1906536 - RNA, 19 nt, Artificial Sequence
  Description of Artificial Sequence: Synthetic oligonucleotide
gccacuauaaaacccggug

SEQ ID NO: 1906537 - RNA, 19 nt, Artificial Sequence
  Description of Artificial Sequence: Synthetic oligonucleotide
caucaaccaucaaucaauc

SEQ ID NO: 1906538 - RNA, 19 nt, Artificial Sequence
  Description of Artificial Sequence: Synthetic oligonucleotide
agaccagcaaaaccaauuu

SEQ ID NO: 1906539 - RNA, 19 nt, Artificial Sequence
  Description of Artificial Sequence: Synthetic oligonucleotide
uccuaagccaaaccuuauc

SEQ ID NO: 1906540 - RNA, 19 nt, Artificial Sequence
  Description of Artificial Sequence: Synthetic oligonucleotide
agggaguuaagucuauguu

SEQ ID NO: 1906541 - RNA, 19 nt, Artificial Sequence
  Description of Artificial Sequence: Synthetic oligonucleotide
aagccacuauaaaacccgg

SEQ ID NO: 1906542 - RNA, 19 nt, Artificial Sequence
  Description of Artificial Sequence: Synthetic oligonucleotide
ccaauagaccagcaaaacc

SEQ ID NO: 1906543 - RNA, 19 nt, Artificial Sequence
  Description of Artificial Sequence: Synthetic oligonucleotide
cuaagccaaaccuuaucca

SEQ ID NO: 1906544 - RNA, 19 nt, Artificial Sequence
  Description of Artificial Sequence: Synthetic oligonucleotide
uaagucuauguugauggua

SEQ ID NO: 1906545 - RNA, 19 nt, Artificial Sequence
  Description of Artificial Sequence: Synthetic oligonucleotide
gacaaucaguaacaguuua

SEQ ID NO: 1906546 - RNA, 19 nt, Artificial Sequence
  Description of Artificial Sequence: Synthetic oligonucleotide
gucuauguugaugguacag

SEQ ID NO: 1906547 - RNA, 19 nt, Artificial Sequence
  Description of Artificial Sequence: Synthetic oligonucleotide
uauagcgcugggagccccg

SEQ ID NO: 1906548 - RNA, 19 nt, Artificial Sequence
  Description of Artificial Sequence: Synthetic oligonucleotide
ucugugugcuaacaacaua

SEQ ID NO: 1906549 - RNA, 19 nt, Artificial Sequence
  Description of Artificial Sequence: Synthetic oligonucleotide
ggaguuaagucuauguuga

SEQ ID NO: 1906550 - RNA, 19 nt, Artificial Sequence
  Description of Artificial Sequence: Synthetic oligonucleotide
aggcagaauuaucaaucug

SEQ ID NO: 1906551 - RNA, 19 nt, Artificial Sequence
  Description of Artificial Sequence: Synthetic oligonucleotide
ucacaagccgacccugacu

SEQ ID NO: 1906552 - RNA, 19 nt, Artificial Sequence
  Description of Artificial Sequence: Synthetic oligonucleotide
cuugcagaucuucucugug

SEQ ID NO: 1906553 - RNA, 19 nt, Artificial Sequence
  Description of Artificial Sequence: Synthetic oligonucleotide
auaaaguuuuauagcgcug

SEQ ID NO: 1906554 - RNA, 19 nt, Artificial Sequence
  Description of Artificial Sequence: Synthetic oligonucleotide
ggcauucugugccauggcg

SEQ ID NO: 1906555 - RNA, 19 nt, Artificial Sequence
  Description of Artificial Sequence: Synthetic oligonucleotide
ggauauuauuuucacugca

SEQ ID NO: 1906556 - RNA, 19 nt, Artificial Sequence
  Description of Artificial Sequence: Synthetic oligonucleotide
uucuuguauggacuaccaa

SEQ ID NO: 1906557 - RNA, 19 nt, Artificial Sequence
  Description of Artificial Sequence: Synthetic oligonucleotide
agcgcugggagccccggac

SEQ ID NO: 1906558 - RNA, 19 nt, Artificial Sequence
  Description of Artificial Sequence: Synthetic oligonucleotide
agugaggguugacauuuca

SEQ ID NO: 1906559 - RNA, 19 nt, Artificial Sequence
  Description of Artificial Sequence: Synthetic oligonucleotide
uugaaaaggggaagagcuu

SEQ ID NO: 1906560 - RNA, 19 nt, Artificial Sequence
  Description of Artificial Sequence: Synthetic oligonucleotide
acaggucucugguuuuaag

SEQ ID NO: 1906561 - RNA, 19 nt, Artificial Sequence
  Description of Artificial Sequence: Synthetic oligonucleotide
gaaccgcugcucuuuugag

SEQ ID NO: 1906562 - RNA, 19 nt, Artificial Sequence
  Description of Artificial Sequence: Synthetic oligonucleotide
aagaacuuccaaacucccu

SEQ ID NO: 1906563 - RNA, 19 nt, Artificial Sequence
  Description of Artificial Sequence: Synthetic oligonucleotide
guucugugugcuaacaaca

SEQ ID NO: 1906564 - RNA, 19 nt, Artificial Sequence
  Description of Artificial Sequence: Synthetic oligonucleotide
uuggguaccuucucucccu

SEQ ID NO: 1906565 - RNA, 19 nt, Artificial Sequence
  Description of Artificial Sequence: Synthetic oligonucleotide
cacuauaaaacccggugaa

SEQ ID NO: 1906566 - RNA, 19 nt, Artificial Sequence
  Description of Artificial Sequence: Synthetic oligonucleotide
cagacaaccuugcagaucu

SEQ ID NO: 1906567 - RNA, 19 nt, Artificial Sequence
  Description of Artificial Sequence: Synthetic oligonucleotide
ucuuuugggcauggcggcg

SEQ ID NO: 1906568 - RNA, 19 nt, Artificial Sequence
  Description of Artificial Sequence: Synthetic oligonucleotide
accaggacgucucuccuga

SEQ ID NO: 1906569 - RNA, 19 nt, Artificial Sequence
  Description of Artificial Sequence: Synthetic oligonucleotide
gguuuagcagacaaccuug

SEQ ID NO: 1906570 - RNA, 19 nt, Artificial Sequence
  Description of Artificial Sequence: Synthetic oligonucleotide
cuuagagugaggguugaca

SEQ ID NO: 1906571 - RNA, 19 nt, Artificial Sequence
  Description of Artificial Sequence: Synthetic oligonucleotide
auaaacaaucaugguauuu

SEQ ID NO: 1906572 - RNA, 19 nt, Artificial Sequence
  Description of Artificial Sequence: Synthetic oligonucleotide
uuugugccuggucuguuuu

SEQ ID NO: 1906573 - RNA, 19 nt, Artificial Sequence
  Description of Artificial Sequence: Synthetic oligonucleotide
uuaagggaguuaagucuau

SEQ ID NO: 1906574 - RNA, 19 nt, Artificial Sequence
  Description of Artificial Sequence: Synthetic oligonucleotide
gagccaagagaaaacuuuc

SEQ ID NO: 1906575 - RNA, 19 nt, Artificial Sequence
  Description of Artificial Sequence: Synthetic oligonucleotide
cacauguuccuuccccacc

SEQ ID NO: 1906576 - RNA, 19 nt, Artificial Sequence
  Description of Artificial Sequence: Synthetic oligonucleotide
guuagugacacauguuccu

SEQ ID NO: 1906577 - RNA, 19 nt, Artificial Sequence
  Description of Artificial Sequence: Synthetic oligonucleotide
aaguucagauugcccaaua

SEQ ID NO: 1906578 - RNA, 19 nt, Artificial Sequence
  Description of Artificial Sequence: Synthetic oligonucleotide
uagugacacauguuccuuc

SEQ ID NO: 1906579 - RNA, 19 nt, Artificial Sequence
  Description of Artificial Sequence: Synthetic oligonucleotide
ucuccuuuaguauccccuu

SEQ ID NO: 1906580 - RNA, 19 nt, Artificial Sequence
  Description of Artificial Sequence: Synthetic oligonucleotide
uggcuuuaucuccuuuagu

SEQ ID NO: 1906581 - RNA, 19 nt, Artificial Sequence
  Description of Artificial Sequence: Synthetic oligonucleotide
ccgacccugacuuucaggc

SEQ ID NO: 1906582 - RNA, 19 nt, Artificial Sequence
  Description of Artificial Sequence: Synthetic oligonucleotide
caaccuugcagaucuucuc

SEQ ID NO: 1906583 - RNA, 19 nt, Artificial Sequence
  Description of Artificial Sequence: Synthetic oligonucleotide
ucaacaccaggacgucucu

SEQ ID NO: 1906584 - RNA, 19 nt, Artificial Sequence
  Description of Artificial Sequence: Synthetic oligonucleotide
uggcgucuccauuuucugc

SEQ ID NO: 1906585 - RNA, 19 nt, Artificial Sequence
  Description of Artificial Sequence: Synthetic oligonucleotide
guuuagcagacaaccuugc

SEQ ID NO: 1906586 - RNA, 19 nt, Artificial Sequence
  Description of Artificial Sequence: Synthetic oligonucleotide
cuuuugggcauggcggcgg

SEQ ID NO: 1906587 - RNA, 19 nt, Artificial Sequence
  Description of Artificial Sequence: Synthetic oligonucleotide
cuucuuguauggacuacca

SEQ ID NO: 1906588 - RNA, 19 nt, Artificial Sequence
  Description of Artificial Sequence: Synthetic oligonucleotide
uaagggaguuaagucuaug

SEQ ID NO: 1906589 - RNA, 19 nt, Artificial Sequence
  Description of Artificial Sequence: Synthetic oligonucleotide
ccccggaccgguuagaacc

SEQ ID NO: 1906590 - RNA, 19 nt, Artificial Sequence
  Description of Artificial Sequence: Synthetic oligonucleotide
ggguuuauaaaguuuuaua

SEQ ID NO: 1906591 - RNA, 19 nt, Artificial Sequence
  Description of Artificial Sequence: Synthetic oligonucleotide
uuuauagcgcugggagccc

SEQ ID NO: 1906592 - RNA, 19 nt, Artificial Sequence
  Description of Artificial Sequence: Synthetic oligonucleotide
ucacauuaaggauguuguu

SEQ ID NO: 1906593 - RNA, 19 nt, Artificial Sequence
  Description of Artificial Sequence: Synthetic oligonucleotide
ggguuauuugcauccuugc

SEQ ID NO: 1906594 - RNA, 19 nt, Artificial Sequence
  Description of Artificial Sequence: Synthetic oligonucleotide
cuauaaaacccggugaagu

SEQ ID NO: 1906595 - RNA, 19 nt, Artificial Sequence
  Description of Artificial Sequence: Synthetic oligonucleotide
aacccggugaagucuucau

SEQ ID NO: 1906596 - RNA, 19 nt, Artificial Sequence
  Description of Artificial Sequence: Synthetic oligonucleotide
uugcccaauagaccagcaa

SEQ ID NO: 1906597 - RNA, 19 nt, Artificial Sequence
  Description of Artificial Sequence: Synthetic oligonucleotide
gagcuuagagugaggguug

SEQ ID NO: 1906598 - RNA, 19 nt, Artificial Sequence
  Description of Artificial Sequence: Synthetic oligonucleotide
acaaccuugcagaucuucu

SEQ ID NO: 1906599 - RNA, 19 nt, Artificial Sequence
  Description of Artificial Sequence: Synthetic oligonucleotide
ggccacauaugucaacacc

SEQ ID NO: 1906600 - RNA, 19 nt, Artificial Sequence
  Description of Artificial Sequence: Synthetic oligonucleotide
ucugguuuuaagggaguua

SEQ ID NO: 1906601 - RNA, 19 nt, Artificial Sequence
  Description of Artificial Sequence: Synthetic oligonucleotide
ugcacacauuucacuuggc

SEQ ID NO: 1906602 - RNA, 19 nt, Artificial Sequence
  Description of Artificial Sequence: Synthetic oligonucleotide
uuuugggcauggcggcggc

SEQ ID NO: 1906603 - RNA, 19 nt, Artificial Sequence
  Description of Artificial Sequence: Synthetic oligonucleotide
uuagugacacauguuccuu

SEQ ID NO: 1906604 - RNA, 19 nt, Artificial Sequence
  Description of Artificial Sequence: Synthetic oligonucleotide
ugugccauggcggccacau

SEQ ID NO: 1906605 - RNA, 19 nt, Artificial Sequence
  Description of Artificial Sequence: Synthetic oligonucleotide
uucucuguggcucguccuu

SEQ ID NO: 1906606 - RNA, 19 nt, Artificial Sequence
  Description of Artificial Sequence: Synthetic oligonucleotide
aaacccggugaagucuuca

SEQ ID NO: 1906607 - RNA, 19 nt, Artificial Sequence
  Description of Artificial Sequence: Synthetic oligonucleotide
uuuugugccuggucuguuu

SEQ ID NO: 1906608 - RNA, 19 nt, Artificial Sequence
  Description of Artificial Sequence: Synthetic oligonucleotide
uuccuaagccaaaccuuau

SEQ ID NO: 1906609 - RNA, 19 nt, Artificial Sequence
  Description of Artificial Sequence: Synthetic oligonucleotide
ucuccugagccaagagaaa

SEQ ID NO: 1906610 - RNA, 19 nt, Artificial Sequence
  Description of Artificial Sequence: Synthetic oligonucleotide
aguguucugugugcuaaca

SEQ ID NO: 1906611 - RNA, 19 nt, Artificial Sequence
  Description of Artificial Sequence: Synthetic oligonucleotide
ccauaaacaaucaugguau

SEQ ID NO: 1906612 - RNA, 19 nt, Artificial Sequence
  Description of Artificial Sequence: Synthetic oligonucleotide
augguauuucaggcaggac

SEQ ID NO: 1906613 - RNA, 19 nt, Artificial Sequence
  Description of Artificial Sequence: Synthetic oligonucleotide
caugggcagacaaucagua

SEQ ID NO: 1906614 - RNA, 19 nt, Artificial Sequence
  Description of Artificial Sequence: Synthetic oligonucleotide
aaaacccggugaagucuuc

SEQ ID NO: 1906615 - RNA, 19 nt, Artificial Sequence
  Description of Artificial Sequence: Synthetic oligonucleotide
ggcgucuccauuuucugca

SEQ ID NO: 1906616 - RNA, 19 nt, Artificial Sequence
  Description of Artificial Sequence: Synthetic oligonucleotide
aucaaucaauccagcuuag

SEQ ID NO: 1906617 - RNA, 19 nt, Artificial Sequence
  Description of Artificial Sequence: Synthetic oligonucleotide
gccagcaucugcuuucccc

SEQ ID NO: 1906618 - RNA, 19 nt, Artificial Sequence
  Description of Artificial Sequence: Synthetic oligonucleotide
agcuuaggagacauuuugu

SEQ ID NO: 1906619 - RNA, 19 nt, Artificial Sequence
  Description of Artificial Sequence: Synthetic oligonucleotide
auggacuaccaaaaucaga

SEQ ID NO: 1906620 - RNA, 19 nt, Artificial Sequence
  Description of Artificial Sequence: Synthetic oligonucleotide
cuaaauugucaaggaaaga

SEQ ID NO: 1906621 - RNA, 19 nt, Artificial Sequence
  Description of Artificial Sequence: Synthetic oligonucleotide
gucaacaccaggacgucuc

SEQ ID NO: 1906622 - RNA, 19 nt, Artificial Sequence
  Description of Artificial Sequence: Synthetic oligonucleotide
uuauagcgcugggagcccc

SEQ ID NO: 1906623 - RNA, 19 nt, Artificial Sequence
  Description of Artificial Sequence: Synthetic oligonucleotide
gguuuuaagggaguuaagu

SEQ ID NO: 1906624 - RNA, 19 nt, Artificial Sequence
  Description of Artificial Sequence: Synthetic oligonucleotide
acaugggcagacaaucagu

SEQ ID NO: 1906625 - RNA, 19 nt, Artificial Sequence
  Description of Artificial Sequence: Synthetic oligonucleotide
cuguggcucguccuucacc

SEQ ID NO: 1906626 - RNA, 19 nt, Artificial Sequence
  Description of Artificial Sequence: Synthetic oligonucleotide
uagagugaggguugacauu

SEQ ID NO: 1906627 - RNA, 19 nt, Artificial Sequence
  Description of Artificial Sequence: Synthetic oligonucleotide
cuguacagucaccagaagu

SEQ ID NO: 1906628 - RNA, 19 nt, Artificial Sequence
  Description of Artificial Sequence: Synthetic oligonucleotide
ggguugacauuucacauua

SEQ ID NO: 1906629 - RNA, 19 nt, Artificial Sequence
  Description of Artificial Sequence: Synthetic oligonucleotide
ucccuucuuguauggacua

SEQ ID NO: 1906630 - RNA, 19 nt, Artificial Sequence
  Description of Artificial Sequence: Synthetic oligonucleotide
cccggugaagucuucauuc

SEQ ID NO: 1906631 - RNA, 19 nt, Artificial Sequence
  Description of Artificial Sequence: Synthetic oligonucleotide
agcagacaaccuugcagau

SEQ ID NO: 1906632 - RNA, 19 nt, Artificial Sequence
  Description of Artificial Sequence: Synthetic oligonucleotide
cauggcggccacauauguc

SEQ ID NO: 1906633 - RNA, 19 nt, Artificial Sequence
  Description of Artificial Sequence: Synthetic oligonucleotide
gucucuccugagccaagag

SEQ ID NO: 1906634 - RNA, 19 nt, Artificial Sequence
  Description of Artificial Sequence: Synthetic oligonucleotide
gugaggguugacauuucac

SEQ ID NO: 1906635 - RNA, 19 nt, Artificial Sequence
  Description of Artificial Sequence: Synthetic oligonucleotide
ggaaccgcugcucuuuuga

SEQ ID NO: 1906636 - RNA, 19 nt, Artificial Sequence
  Description of Artificial Sequence: Synthetic oligonucleotide
aggcaggacaugggcagac

SEQ ID NO: 1906637 - RNA, 19 nt, Artificial Sequence
  Description of Artificial Sequence: Synthetic oligonucleotide
caaaccuuauccagcuuua

SEQ ID NO: 1906638 - RNA, 19 nt, Artificial Sequence
  Description of Artificial Sequence: Synthetic oligonucleotide
caagccgacccugacuuuc

SEQ ID NO: 1906639 - RNA, 19 nt, Artificial Sequence
  Description of Artificial Sequence: Synthetic oligonucleotide
augggcagacaaucaguaa

SEQ ID NO: 1906640 - RNA, 19 nt, Artificial Sequence
  Description of Artificial Sequence: Synthetic oligonucleotide
agauugcccaauagaccag

SEQ ID NO: 1906641 - RNA, 19 nt, Artificial Sequence
  Description of Artificial Sequence: Synthetic oligonucleotide
ccaccccaaaacaaugaag

SEQ ID NO: 1906642 - RNA, 19 nt, Artificial Sequence
  Description of Artificial Sequence: Synthetic oligonucleotide
aaggaaccgcugcucuuuu

SEQ ID NO: 1906643 - RNA, 19 nt, Artificial Sequence
  Description of Artificial Sequence: Synthetic oligonucleotide
cauuaaggauguuguuuaa

SEQ ID NO: 1906644 - RNA, 19 nt, Artificial Sequence
  Description of Artificial Sequence: Synthetic oligonucleotide
ccuucuuguauggacuacc

SEQ ID NO: 1906645 - RNA, 19 nt, Artificial Sequence
  Description of Artificial Sequence: Synthetic oligonucleotide
aacaggucucugguuuuaa

SEQ ID NO: 1906646 - RNA, 19 nt, Artificial Sequence
  Description of Artificial Sequence: Synthetic oligonucleotide
uuggaggagcagguuuagc

SEQ ID NO: 1906647 - RNA, 19 nt, Artificial Sequence
  Description of Artificial Sequence: Synthetic oligonucleotide
gcacacauuucacuuggca

SEQ ID NO: 1906648 - RNA, 19 nt, Artificial Sequence
  Description of Artificial Sequence: Synthetic oligonucleotide
ccggauuucaccucccguc

SEQ ID NO: 1906649 - RNA, 19 nt, Artificial Sequence
  Description of Artificial Sequence: Synthetic oligonucleotide
ugcuaacaacauagacuua

SEQ ID NO: 1906650 - RNA, 19 nt, Artificial Sequence
  Description of Artificial Sequence: Synthetic oligonucleotide
agacaaucaguaacaguuu

SEQ ID NO: 1906651 - RNA, 19 nt, Artificial Sequence
  Description of Artificial Sequence: Synthetic oligonucleotide
ccuuggguaccuucucucc

SEQ ID NO: 1906652 - RNA, 19 nt, Artificial Sequence
  Description of Artificial Sequence: Synthetic oligonucleotide
ccacuauaaaacccgguga

SEQ ID NO: 1906653 - RNA, 19 nt, Artificial Sequence
  Description of Artificial Sequence: Synthetic oligonucleotide
aggaaccgcugcucuuuug

SEQ ID NO: 1906654 - RNA, 19 nt, Artificial Sequence
  Description of Artificial Sequence: Synthetic oligonucleotide
gguuagaaccggauuucac

SEQ ID NO: 1906655 - RNA, 19 nt, Artificial Sequence
  Description of Artificial Sequence: Synthetic oligonucleotide
gaaccggauuucaccuccc

SEQ ID NO: 1906656 - RNA, 19 nt, Artificial Sequence
  Description of Artificial Sequence: Synthetic oligonucleotide
cacauuaaggauguuguuu

SEQ ID NO: 1906657 - RNA, 19 nt, Artificial Sequence
  Description of Artificial Sequence: Synthetic oligonucleotide
caggcagaauuaucaaucu

SEQ ID NO: 1906658 - RNA, 19 nt, Artificial Sequence
  Description of Artificial Sequence: Synthetic oligonucleotide
caguaacaguuuacaagaa

SEQ ID NO: 1906659 - RNA, 19 nt, Artificial Sequence
  Description of Artificial Sequence: Synthetic oligonucleotide
gccaagagaaaacuuucua

SEQ ID NO: 1906660 - RNA, 19 nt, Artificial Sequence
  Description of Artificial Sequence: Synthetic oligonucleotide
guauuucaggcaggacaug

SEQ ID NO: 1906661 - RNA, 19 nt, Artificial Sequence
  Description of Artificial Sequence: Synthetic oligonucleotide
caccaggacgucucuccug

SEQ ID NO: 1906662 - RNA, 19 nt, Artificial Sequence
  Description of Artificial Sequence: Synthetic oligonucleotide
cuccugagccaagagaaaa

SEQ ID NO: 1906663 - RNA, 19 nt, Artificial Sequence
  Description of Artificial Sequence: Synthetic oligonucleotide
auagaccagcaaaaccaau

SEQ ID NO: 1906664 - RNA, 19 nt, Artificial Sequence
  Description of Artificial Sequence: Synthetic oligonucleotide
acauuucacuuggcaucuc

SEQ ID NO: 1906665 - RNA, 19 nt, Artificial Sequence
  Description of Artificial Sequence: Synthetic oligonucleotide
cucccuucuuguauggacu

SEQ ID NO: 1906666 - RNA, 19 nt, Artificial Sequence
  Description of Artificial Sequence: Synthetic oligonucleotide
cggauuucaccucccgucg

SEQ ID NO: 1906667 - RNA, 19 nt, Artificial Sequence
  Description of Artificial Sequence: Synthetic oligonucleotide
ccaucaaccaucaaucaau

SEQ ID NO: 1906668 - RNA, 19 nt, Artificial Sequence
  Description of Artificial Sequence: Synthetic oligonucleotide
ggaagagcuuagagugagg

SEQ ID NO: 1906669 - RNA, 19 nt, Artificial Sequence
  Description of Artificial Sequence: Synthetic oligonucleotide
auugcccaauagaccagca

SEQ ID NO: 1906670 - RNA, 19 nt, Artificial Sequence
  Description of Artificial Sequence: Synthetic oligonucleotide
gggcagacaaucaguaaca

SEQ ID NO: 1906671 - RNA, 19 nt, Artificial Sequence
  Description of Artificial Sequence: Synthetic oligonucleotide
aagccgacccugacuuuca

SEQ ID NO: 1906672 - RNA, 19 nt, Artificial Sequence
  Description of Artificial Sequence: Synthetic oligonucleotide
acccggugaagucuucauu

SEQ ID NO: 1906673 - RNA, 19 nt, Artificial Sequence
  Description of Artificial Sequence: Synthetic oligonucleotide
agccgacccugacuuucag

SEQ ID NO: 1906674 - RNA, 19 nt, Artificial Sequence
  Description of Artificial Sequence: Synthetic oligonucleotide
cccaauagaccagcaaaac

SEQ ID NO: 1906675 - RNA, 19 nt, Artificial Sequence
  Description of Artificial Sequence: Synthetic oligonucleotide
cacaagccgacccugacuu

SEQ ID NO: 1906676 - RNA, 19 nt, Artificial Sequence
  Description of Artificial Sequence: Synthetic oligonucleotide
agccacuauaaaacccggu

SEQ ID NO: 1906677 - RNA, 19 nt, Artificial Sequence
  Description of Artificial Sequence: Synthetic oligonucleotide
gccgacccugacuuucagg

SEQ ID NO: 1906678 - RNA, 19 nt, Artificial Sequence
  Description of Artificial Sequence: Synthetic oligonucleotide
uggcggccacauaugucaa

SEQ ID NO: 1906679 - RNA, 19 nt, Artificial Sequence
  Description of Artificial Sequence: Synthetic oligonucleotide
ucugugccauggcggccac

SEQ ID NO: 1906680 - RNA, 19 nt, Artificial Sequence
  Description of Artificial Sequence: Synthetic oligonucleotide
ccagaaguacacaguuauc

SEQ ID NO: 1906681 - RNA, 19 nt, Artificial Sequence
  Description of Artificial Sequence: Synthetic oligonucleotide
cagguuuagcagacaaccu

SEQ ID NO: 1906682 - RNA, 19 nt, Artificial Sequence
  Description of Artificial Sequence: Synthetic oligonucleotide
acaaggcauucugugccau

SEQ ID NO: 1906683 - RNA, 19 nt, Artificial Sequence
  Description of Artificial Sequence: Synthetic oligonucleotide
auggcggcggcggcggcgg

SEQ ID NO: 1906684 - RNA, 19 nt, Artificial Sequence
  Description of Artificial Sequence: Synthetic oligonucleotide
uggucuguuuuggcgucuc

SEQ ID NO: 1906685 - RNA, 19 nt, Artificial Sequence
  Description of Artificial Sequence: Synthetic oligonucleotide
gaguuaagucuauguugau

SEQ ID NO: 1906686 - RNA, 19 nt, Artificial Sequence
  Description of Artificial Sequence: Synthetic oligonucleotide
ggagccccggaccgguuag

SEQ ID NO: 1906687 - RNA, 19 nt, Artificial Sequence
  Description of Artificial Sequence: Synthetic oligonucleotide
ggucuguuuuggcgucucc

SEQ ID NO: 1906688 - RNA, 19 nt, Artificial Sequence
  Description of Artificial Sequence: Synthetic oligonucleotide
cccggaccgguuagaaccg

SEQ ID NO: 1906689 - RNA, 19 nt, Artificial Sequence
  Description of Artificial Sequence: Synthetic oligonucleotide
gcagacaaucaguaacagu

SEQ ID NO: 1906690 - RNA, 19 nt, Artificial Sequence
  Description of Artificial Sequence: Synthetic oligonucleotide
aggcuugggcucuggcuuu

SEQ ID NO: 1906691 - RNA, 19 nt, Artificial Sequence
  Description of Artificial Sequence: Synthetic oligonucleotide
gaccgguuagaaccggauu

SEQ ID NO: 1906692 - RNA, 19 nt, Artificial Sequence
  Description of Artificial Sequence: Synthetic oligonucleotide
gcccaauagaccagcaaaa

SEQ ID NO: 1906693 - RNA, 19 nt, Artificial Sequence
  Description of Artificial Sequence: Synthetic oligonucleotide
gcucuuuugaggauauuau

SEQ ID NO: 1906694 - RNA, 19 nt, Artificial Sequence
  Description of Artificial Sequence: Synthetic oligonucleotide
gcuuuggaggagcagguuu

SEQ ID NO: 1906695 - RNA, 19 nt, Artificial Sequence
  Description of Artificial Sequence: Synthetic oligonucleotide
gggguuuauaaaguuuuau

SEQ ID NO: 1906696 - RNA, 19 nt, Artificial Sequence
  Description of Artificial Sequence: Synthetic oligonucleotide
ccaaaaucagaaagccacu

SEQ ID NO: 1906697 - RNA, 19 nt, Artificial Sequence
  Description of Artificial Sequence: Synthetic oligonucleotide
ccgguuagaaccggauuuc

SEQ ID NO: 1906698 - RNA, 19 nt, Artificial Sequence
  Description of Artificial Sequence: Synthetic oligonucleotide
acccugacuuucaggcaga

SEQ ID NO: 1906699 - RNA, 19 nt, Artificial Sequence
  Description of Artificial Sequence: Synthetic oligonucleotide
ggacgucucuccugagcca

SEQ ID NO: 1906700 - RNA, 19 nt, Artificial Sequence
  Description of Artificial Sequence: Synthetic oligonucleotide
gccuggucuguuuuggcgu

SEQ ID NO: 1906701 - RNA, 19 nt, Artificial Sequence
  Description of Artificial Sequence: Synthetic oligonucleotide
ccggugaagucuucauuca

SEQ ID NO: 1906702 - RNA, 19 nt, Artificial Sequence
  Description of Artificial Sequence: Synthetic oligonucleotide
ccaaaccuuauccagcuuu

SEQ ID NO: 1906703 - RNA, 19 nt, Artificial Sequence
  Description of Artificial Sequence: Synthetic oligonucleotide
ggggaagagcuuagaguga

SEQ ID NO: 1906704 - RNA, 19 nt, Artificial Sequence
  Description of Artificial Sequence: Synthetic oligonucleotide
gcgcugggagccccggacc

SEQ ID NO: 1906705 - RNA, 19 nt, Artificial Sequence
  Description of Artificial Sequence: Synthetic oligonucleotide
agccccggaccgguuagaa

SEQ ID NO: 1906706 - RNA, 19 nt, Artificial Sequence
  Description of Artificial Sequence: Synthetic oligonucleotide
ccccaccccaaaacaauga

SEQ ID NO: 1906707 - RNA, 19 nt, Artificial Sequence
  Description of Artificial Sequence: Synthetic oligonucleotide
gcuuagagugaggguugac

SEQ ID NO: 1906708 - RNA, 19 nt, Artificial Sequence
  Description of Artificial Sequence: Synthetic oligonucleotide
ggagcagguuuagcagaca

SEQ ID NO: 1906709 - RNA, 19 nt, Artificial Sequence
  Description of Artificial Sequence: Synthetic oligonucleotide
gguugacauuucacauuaa

SEQ ID NO: 1906710 - RNA, 19 nt, Artificial Sequence
  Description of Artificial Sequence: Synthetic oligonucleotide
ggauguuguuuaacaacuu

SEQ ID NO: 1906711 - RNA, 19 nt, Artificial Sequence
  Description of Artificial Sequence: Synthetic oligonucleotide
gccccggaccgguuagaac

SEQ ID NO: 1906712 - RNA, 19 nt, Artificial Sequence
  Description of Artificial Sequence: Synthetic oligonucleotide
ccaggacgucucuccugag

SEQ ID NO: 1906713 - RNA, 19 nt, Artificial Sequence
  Description of Artificial Sequence: Synthetic oligonucleotide
cucugguuuuaagggaguu

SEQ ID NO: 1906714 - RNA, 19 nt, Artificial Sequence
  Description of Artificial Sequence: Synthetic oligonucleotide
gagccccggaccgguuaga

SEQ ID NO: 1906715 - RNA, 19 nt, Artificial Sequence
  Description of Artificial Sequence: Synthetic oligonucleotide
gcugcucuuuugaggauau

SEQ ID NO: 1906716 - RNA, 19 nt, Artificial Sequence
  Description of Artificial Sequence: Synthetic oligonucleotide
auccagcuuaggagacauu

SEQ ID NO: 1906717 - RNA, 19 nt, Artificial Sequence
  Description of Artificial Sequence: Synthetic oligonucleotide
ccggaccgguuagaaccgg

SEQ ID NO: 1906718 - RNA, 19 nt, Artificial Sequence
  Description of Artificial Sequence: Synthetic oligonucleotide
gggagccccggaccgguua

SEQ ID NO: 1906719 - RNA, 19 nt, Artificial Sequence
  Description of Artificial Sequence: Synthetic oligonucleotide
gcggcggcggcggcggcgg

SEQ ID NO: 1906720 - RNA, 19 nt, Artificial Sequence
  Description of Artificial Sequence: Synthetic oligonucleotide
ggaccgguuagaaccggau

SEQ ID NO: 1906721 - RNA, 19 nt, Artificial Sequence
  Description of Artificial Sequence: Synthetic oligonucleotide
ggcggcggcggcggcggcg

SEQ ID NO: 1906722 - RNA, 19 nt, Artificial Sequence
  Description of Artificial Sequence: Synthetic oligonucleotide
uggcggcggcggcggcggc

SEQ ID NO: 1906723 - RNA, 19 nt, Artificial Sequence
  Description of Artificial Sequence: Synthetic oligonucleotide
ggcggcggcggcggcgggg

SEQ ID NO: 1906724 - RNA, 19 nt, Artificial Sequence
  Description of Artificial Sequence: Synthetic oligonucleotide
cgacccugacuuucaggca

SEQ ID NO: 1906725 - RNA, 19 nt, Artificial Sequence
  Description of Artificial Sequence: Synthetic oligonucleotide
cgguuagaaccggauuuca

SEQ ID NO: 1906726 - RNA, 19 nt, Artificial Sequence
  Description of Artificial Sequence: Synthetic oligonucleotide
ccaacaggucucugguuuu

SEQ ID NO: 1906727 - RNA, 19 nt, Artificial Sequence
  Description of Artificial Sequence: Synthetic oligonucleotide
cggaccgguuagaaccgga

SEQ ID NO: 1906728 - RNA, 19 nt, Artificial Sequence
  Description of Artificial Sequence: Synthetic oligonucleotide
gccaaaccuuauccagcuu

SEQ ID NO: 1906729 - RNA, 19 nt, Artificial Sequence
  Description of Artificial Sequence: Synthetic oligonucleotide
ggcuuuggaggagcagguu

SEQ ID NO: 1906730 - RNA, 19 nt, Artificial Sequence
  Description of Artificial Sequence: Synthetic oligonucleotide
ccccuucuuccccuugggu

SEQ ID NO: 1906731 - RNA, 19 nt, Artificial Sequence
  Description of Artificial Sequence: Synthetic oligonucleotide
ccccuucagccuuucuuuu

SEQ ID NO: 1906732 - RNA, 19 nt, Artificial Sequence
  Description of Artificial Sequence: Synthetic oligonucleotide
cccugacuuucaggcagaa

SEQ ID NO: 1906733 - RNA, 19 nt, Artificial Sequence
  Description of Artificial Sequence: Synthetic oligonucleotide
cggcggcggcggcggcggg

SEQ ID NO: 1906734 - RNA, 19 nt, Artificial Sequence
  Description of Artificial Sequence: Synthetic oligonucleotide
cggcggcggcggcggcggc

SEQ ID NO: 1906735 - RNA, 19 nt, Artificial Sequence
  Description of Artificial Sequence: Synthetic oligonucleotide
uguacaacuauuagcgugg

SEQ ID NO: 1906736 - RNA, 19 nt, Artificial Sequence
  Description of Artificial Sequence: Synthetic oligonucleotide
caaaauaccauccuggaug

SEQ ID NO: 1906737 - RNA, 19 nt, Artificial Sequence
  Description of Artificial Sequence: Synthetic oligonucleotide
aaugcuacccaucugugug

SEQ ID NO: 1906738 - RNA, 19 nt, Artificial Sequence
  Description of Artificial Sequence: Synthetic oligonucleotide
aaacagugucuucagcugc

SEQ ID NO: 1906739 - RNA, 19 nt, Artificial Sequence
  Description of Artificial Sequence: Synthetic oligonucleotide
ugugauguuggcaaugcag

SEQ ID NO: 1906740 - RNA, 19 nt, Artificial Sequence
  Description of Artificial Sequence: Synthetic oligonucleotide
uguguguacaacuauuagc

SEQ ID NO: 1906741 - RNA, 19 nt, Artificial Sequence
  Description of Artificial Sequence: Synthetic oligonucleotide
aacucaguugggcuguacc

SEQ ID NO: 1906742 - RNA, 19 nt, Artificial Sequence
  Description of Artificial Sequence: Synthetic oligonucleotide
ggagaaacagcuuuggugg

SEQ ID NO: 1906743 - RNA, 19 nt, Artificial Sequence
  Description of Artificial Sequence: Synthetic oligonucleotide
gaugucagaacaauuuugg

SEQ ID NO: 1906744 - RNA, 19 nt, Artificial Sequence
  Description of Artificial Sequence: Synthetic oligonucleotide
aauaccauccuggaugagg

SEQ ID NO: 1906745 - RNA, 19 nt, Artificial Sequence
  Description of Artificial Sequence: Synthetic oligonucleotide
acaguugacacaugacugc

SEQ ID NO: 1906746 - RNA, 19 nt, Artificial Sequence
  Description of Artificial Sequence: Synthetic oligonucleotide
ugucagaacaauuuuggga

SEQ ID NO: 1906747 - RNA, 19 nt, Artificial Sequence
  Description of Artificial Sequence: Synthetic oligonucleotide
aaaauaccauccuggauga

SEQ ID NO: 1906748 - RNA, 19 nt, Artificial Sequence
  Description of Artificial Sequence: Synthetic oligonucleotide
uuaaccuuguggcauccgg

SEQ ID NO: 1906749 - RNA, 19 nt, Artificial Sequence
  Description of Artificial Sequence: Synthetic oligonucleotide
uccagguacagccagcucc

SEQ ID NO: 1906750 - RNA, 19 nt, Artificial Sequence
  Description of Artificial Sequence: Synthetic oligonucleotide
acugucauacacugaaggg

SEQ ID NO: 1906751 - RNA, 19 nt, Artificial Sequence
  Description of Artificial Sequence: Synthetic oligonucleotide
aaacggggcaaucuggcag

SEQ ID NO: 1906752 - RNA, 19 nt, Artificial Sequence
  Description of Artificial Sequence: Synthetic oligonucleotide
cacaugaacuucaucagcc

SEQ ID NO: 1906753 - RNA, 19 nt, Artificial Sequence
  Description of Artificial Sequence: Synthetic oligonucleotide
auuagcguggcuuucucag

SEQ ID NO: 1906754 - RNA, 19 nt, Artificial Sequence
  Description of Artificial Sequence: Synthetic oligonucleotide
aacggggcaaucuggcagc

SEQ ID NO: 1906755 - RNA, 19 nt, Artificial Sequence
  Description of Artificial Sequence: Synthetic oligonucleotide
ugauaaccaggguaguggg

SEQ ID NO: 1906756 - RNA, 19 nt, Artificial Sequence
  Description of Artificial Sequence: Synthetic oligonucleotide
ucugcaucaaccugcauuc

SEQ ID NO: 1906757 - RNA, 19 nt, Artificial Sequence
  Description of Artificial Sequence: Synthetic oligonucleotide
ucacaguagagcaggagug

SEQ ID NO: 1906758 - RNA, 19 nt, Artificial Sequence
  Description of Artificial Sequence: Synthetic oligonucleotide
aucaccuugagcugggcuc

SEQ ID NO: 1906759 - RNA, 19 nt, Artificial Sequence
  Description of Artificial Sequence: Synthetic oligonucleotide
acagauguugacuggccac

SEQ ID NO: 1906760 - RNA, 19 nt, Artificial Sequence
  Description of Artificial Sequence: Synthetic oligonucleotide
uucaaaauaccauccugga

SEQ ID NO: 1906761 - RNA, 19 nt, Artificial Sequence
  Description of Artificial Sequence: Synthetic oligonucleotide
acacuuucuucacaugaac

SEQ ID NO: 1906762 - RNA, 19 nt, Artificial Sequence
  Description of Artificial Sequence: Synthetic oligonucleotide
uguaccaauuuucucccug

SEQ ID NO: 1906763 - RNA, 19 nt, Artificial Sequence
  Description of Artificial Sequence: Synthetic oligonucleotide
uccacaaugcuacccaucu

SEQ ID NO: 1906764 - RNA, 19 nt, Artificial Sequence
  Description of Artificial Sequence: Synthetic oligonucleotide
uagagcgugccacugaugu

SEQ ID NO: 1906765 - RNA, 19 nt, Artificial Sequence
  Description of Artificial Sequence: Synthetic oligonucleotide
acaauuuugggaugugaug

SEQ ID NO: 1906766 - RNA, 19 nt, Artificial Sequence
  Description of Artificial Sequence: Synthetic oligonucleotide
aauguggagcaguaguuaa

SEQ ID NO: 1906767 - RNA, 19 nt, Artificial Sequence
  Description of Artificial Sequence: Synthetic oligonucleotide
ucacaugaacuucaucagc

SEQ ID NO: 1906768 - RNA, 19 nt, Artificial Sequence
  Description of Artificial Sequence: Synthetic oligonucleotide
guguacaacuauuagcgug

SEQ ID NO: 1906769 - RNA, 19 nt, Artificial Sequence
  Description of Artificial Sequence: Synthetic oligonucleotide
uguccugauaaccagggua

SEQ ID NO: 1906770 - RNA, 19 nt, Artificial Sequence
  Description of Artificial Sequence: Synthetic oligonucleotide
aaugcagcuucuggaaacg

SEQ ID NO: 1906771 - RNA, 19 nt, Artificial Sequence
  Description of Artificial Sequence: Synthetic oligonucleotide
acacaugacugcucuuucc

SEQ ID NO: 1906772 - RNA, 19 nt, Artificial Sequence
  Description of Artificial Sequence: Synthetic oligonucleotide
agagaugacagcaguggcc

SEQ ID NO: 1906773 - RNA, 19 nt, Artificial Sequence
  Description of Artificial Sequence: Synthetic oligonucleotide
uggaaacggggcaaucugg

SEQ ID NO: 1906774 - RNA, 19 nt, Artificial Sequence
  Description of Artificial Sequence: Synthetic oligonucleotide
cugauaaccaggguagugg

SEQ ID NO: 1906775 - RNA, 19 nt, Artificial Sequence
  Description of Artificial Sequence: Synthetic oligonucleotide
augucagaacaauuuuggg

SEQ ID NO: 1906776 - RNA, 19 nt, Artificial Sequence
  Description of Artificial Sequence: Synthetic oligonucleotide
gcaguaguuaaccuugugg

SEQ ID NO: 1906777 - RNA, 19 nt, Artificial Sequence
  Description of Artificial Sequence: Synthetic oligonucleotide
uucaggguggccaacccug

SEQ ID NO: 1906778 - RNA, 19 nt, Artificial Sequence
  Description of Artificial Sequence: Synthetic oligonucleotide
ucccaguuguacuuggugc

SEQ ID NO: 1906779 - RNA, 19 nt, Artificial Sequence
  Description of Artificial Sequence: Synthetic oligonucleotide
ugccauagcuucaaacuca

SEQ ID NO: 1906780 - RNA, 19 nt, Artificial Sequence
  Description of Artificial Sequence: Synthetic oligonucleotide
aaagguagagucaugucau

SEQ ID NO: 1906781 - RNA, 19 nt, Artificial Sequence
  Description of Artificial Sequence: Synthetic oligonucleotide
ggcuguaccaauuuucucc

SEQ ID NO: 1906782 - RNA, 19 nt, Artificial Sequence
  Description of Artificial Sequence: Synthetic oligonucleotide
ugauacaccgaccccgccc

SEQ ID NO: 1906783 - RNA, 19 nt, Artificial Sequence
  Description of Artificial Sequence: Synthetic oligonucleotide
aucaaccugcauucuggcc

SEQ ID NO: 1906784 - RNA, 19 nt, Artificial Sequence
  Description of Artificial Sequence: Synthetic oligonucleotide
acaugacugcucuuuccgc

SEQ ID NO: 1906785 - RNA, 19 nt, Artificial Sequence
  Description of Artificial Sequence: Synthetic oligonucleotide
cacaugacugcucuuuccg

SEQ ID NO: 1906786 - RNA, 19 nt, Artificial Sequence
  Description of Artificial Sequence: Synthetic oligonucleotide
uggaugcucggucaaaggu

SEQ ID NO: 1906787 - RNA, 19 nt, Artificial Sequence
  Description of Artificial Sequence: Synthetic oligonucleotide
ucuguguguacaacuauua

SEQ ID NO: 1906788 - RNA, 19 nt, Artificial Sequence
  Description of Artificial Sequence: Synthetic oligonucleotide
cuuucuccuggccaggugc

SEQ ID NO: 1906789 - RNA, 19 nt, Artificial Sequence
  Description of Artificial Sequence: Synthetic oligonucleotide
uuuccgcucugcaucaacc

SEQ ID NO: 1906790 - RNA, 19 nt, Artificial Sequence
  Description of Artificial Sequence: Synthetic oligonucleotide
aguaguuaaccuuguggca

SEQ ID NO: 1906791 - RNA, 19 nt, Artificial Sequence
  Description of Artificial Sequence: Synthetic oligonucleotide
aacaauuuugggaugugau

SEQ ID NO: 1906792 - RNA, 19 nt, Artificial Sequence
  Description of Artificial Sequence: Synthetic oligonucleotide
acaacuauuagcguggcuu

SEQ ID NO: 1906793 - RNA, 19 nt, Artificial Sequence
  Description of Artificial Sequence: Synthetic oligonucleotide
gaugcucggucaaagguag

SEQ ID NO: 1906794 - RNA, 19 nt, Artificial Sequence
  Description of Artificial Sequence: Synthetic oligonucleotide
ugucaucacaacaggcagc

SEQ ID NO: 1906795 - RNA, 19 nt, Artificial Sequence
  Description of Artificial Sequence: Synthetic oligonucleotide
acugaagggucccaguugu

SEQ ID NO: 1906796 - RNA, 19 nt, Artificial Sequence
  Description of Artificial Sequence: Synthetic oligonucleotide
aagguagagucaugucauc

SEQ ID NO: 1906797 - RNA, 19 nt, Artificial Sequence
  Description of Artificial Sequence: Synthetic oligonucleotide
caugucaucacaacaggca

SEQ ID NO: 1906798 - RNA, 19 nt, Artificial Sequence
  Description of Artificial Sequence: Synthetic oligonucleotide
aguuguacuuggugccacc

SEQ ID NO: 1906799 - RNA, 19 nt, Artificial Sequence
  Description of Artificial Sequence: Synthetic oligonucleotide
ucuuccaguccuuacugcu

SEQ ID NO: 1906800 - RNA, 19 nt, Artificial Sequence
  Description of Artificial Sequence: Synthetic oligonucleotide
cucccugcuugauacaccg

SEQ ID NO: 1906801 - RNA, 19 nt, Artificial Sequence
  Description of Artificial Sequence: Synthetic oligonucleotide
cucggucaaagguagaguc

SEQ ID NO: 1906802 - RNA, 19 nt, Artificial Sequence
  Description of Artificial Sequence: Synthetic oligonucleotide
agccugcucuuguagagcg

SEQ ID NO: 1906803 - RNA, 19 nt, Artificial Sequence
  Description of Artificial Sequence: Synthetic oligonucleotide
gguaggaggagacugagga

SEQ ID NO: 1906804 - RNA, 19 nt, Artificial Sequence
  Description of Artificial Sequence: Synthetic oligonucleotide
cugagcaaggaguugacca

SEQ ID NO: 1906805 - RNA, 19 nt, Artificial Sequence
  Description of Artificial Sequence: Synthetic oligonucleotide
caacaggcagcacagguac

SEQ ID NO: 1906806 - RNA, 19 nt, Artificial Sequence
  Description of Artificial Sequence: Synthetic oligonucleotide
uuuccaguccuugcgcugg

SEQ ID NO: 1906807 - RNA, 19 nt, Artificial Sequence
  Description of Artificial Sequence: Synthetic oligonucleotide
uagagucaugucaucacaa

SEQ ID NO: 1906808 - RNA, 19 nt, Artificial Sequence
  Description of Artificial Sequence: Synthetic oligonucleotide
gucagaacaauuuugggau

SEQ ID NO: 1906809 - RNA, 19 nt, Artificial Sequence
  Description of Artificial Sequence: Synthetic oligonucleotide
caaugcagcuucuggaaac

SEQ ID NO: 1906810 - RNA, 19 nt, Artificial Sequence
  Description of Artificial Sequence: Synthetic oligonucleotide
gagucaugucaucacaaca

SEQ ID NO: 1906811 - RNA, 19 nt, Artificial Sequence
  Description of Artificial Sequence: Synthetic oligonucleotide
uggccuggcucaaacagca

SEQ ID NO: 1906812 - RNA, 19 nt, Artificial Sequence
  Description of Artificial Sequence: Synthetic oligonucleotide
cuugauacaccgaccccgc

SEQ ID NO: 1906813 - RNA, 19 nt, Artificial Sequence
  Description of Artificial Sequence: Synthetic oligonucleotide
accacgguaggagaaacag

SEQ ID NO: 1906814 - RNA, 19 nt, Artificial Sequence
  Description of Artificial Sequence: Synthetic oligonucleotide
ucagaacaauuuugggaug

SEQ ID NO: 1906815 - RNA, 19 nt, Artificial Sequence
  Description of Artificial Sequence: Synthetic oligonucleotide
guaggagaaacagcuuugg

SEQ ID NO: 1906816 - RNA, 19 nt, Artificial Sequence
  Description of Artificial Sequence: Synthetic oligonucleotide
aacuauuagcguggcuuuc

SEQ ID NO: 1906817 - RNA, 19 nt, Artificial Sequence
  Description of Artificial Sequence: Synthetic oligonucleotide
ugauguuccgacagcgcac

SEQ ID NO: 1906818 - RNA, 19 nt, Artificial Sequence
  Description of Artificial Sequence: Synthetic oligonucleotide
guccugauaaccaggguag

SEQ ID NO: 1906819 - RNA, 19 nt, Artificial Sequence
  Description of Artificial Sequence: Synthetic oligonucleotide
uccgacagcgcacuggcaa

SEQ ID NO: 1906820 - RNA, 19 nt, Artificial Sequence
  Description of Artificial Sequence: Synthetic oligonucleotide
guaccaauuuucucccugc

SEQ ID NO: 1906821 - RNA, 19 nt, Artificial Sequence
  Description of Artificial Sequence: Synthetic oligonucleotide
ucggucaaagguagaguca

SEQ ID NO: 1906822 - RNA, 19 nt, Artificial Sequence
  Description of Artificial Sequence: Synthetic oligonucleotide
uagcguggcuuucucagug

SEQ ID NO: 1906823 - RNA, 19 nt, Artificial Sequence
  Description of Artificial Sequence: Synthetic oligonucleotide
uguagagcgugccacugau

SEQ ID NO: 1906824 - RNA, 19 nt, Artificial Sequence
  Description of Artificial Sequence: Synthetic oligonucleotide
cuguguguacaacuauuag

SEQ ID NO: 1906825 - RNA, 19 nt, Artificial Sequence
  Description of Artificial Sequence: Synthetic oligonucleotide
uggcaacucacugucauac

SEQ ID NO: 1906826 - RNA, 19 nt, Artificial Sequence
  Description of Artificial Sequence: Synthetic oligonucleotide
uguuccgacagcgcacugg

SEQ ID NO: 1906827 - RNA, 19 nt, Artificial Sequence
  Description of Artificial Sequence: Synthetic oligonucleotide
ucgaggguggcacagccaa

SEQ ID NO: 1906828 - RNA, 19 nt, Artificial Sequence
  Description of Artificial Sequence: Synthetic oligonucleotide
aggaguugaccaucucuuc

SEQ ID NO: 1906829 - RNA, 19 nt, Artificial Sequence
  Description of Artificial Sequence: Synthetic oligonucleotide
caagccugcucuuguagag

SEQ ID NO: 1906830 - RNA, 19 nt, Artificial Sequence
  Description of Artificial Sequence: Synthetic oligonucleotide
uuacugcuggcucuuccug

SEQ ID NO: 1906831 - RNA, 19 nt, Artificial Sequence
  Description of Artificial Sequence: Synthetic oligonucleotide
agacaucaccuugagcugg

SEQ ID NO: 1906832 - RNA, 19 nt, Artificial Sequence
  Description of Artificial Sequence: Synthetic oligonucleotide
uguguacaacuauuagcgu

SEQ ID NO: 1906833 - RNA, 19 nt, Artificial Sequence
  Description of Artificial Sequence: Synthetic oligonucleotide
uaaccuuguggcauccggu

SEQ ID NO: 1906834 - RNA, 19 nt, Artificial Sequence
  Description of Artificial Sequence: Synthetic oligonucleotide
aguuaaccuuguggcaucc

SEQ ID NO: 1906835 - RNA, 19 nt, Artificial Sequence
  Description of Artificial Sequence: Synthetic oligonucleotide
ugcucggucaaagguagag

SEQ ID NO: 1906836 - RNA, 19 nt, Artificial Sequence
  Description of Artificial Sequence: Synthetic oligonucleotide
gauacaccgaccccgccca

SEQ ID NO: 1906837 - RNA, 19 nt, Artificial Sequence
  Description of Artificial Sequence: Synthetic oligonucleotide
aaggaguugaccaucucuu

SEQ ID NO: 1906838 - RNA, 19 nt, Artificial Sequence
  Description of Artificial Sequence: Synthetic oligonucleotide
ugagcaaggaguugaccau

SEQ ID NO: 1906839 - RNA, 19 nt, Artificial Sequence
  Description of Artificial Sequence: Synthetic oligonucleotide
uaggagaaacagcuuuggu

SEQ ID NO: 1906840 - RNA, 19 nt, Artificial Sequence
  Description of Artificial Sequence: Synthetic oligonucleotide
gcuugauacaccgaccccg

SEQ ID NO: 1906841 - RNA, 19 nt, Artificial Sequence
  Description of Artificial Sequence: Synthetic oligonucleotide
cacugauguuccgacagcg

SEQ ID NO: 1906842 - RNA, 19 nt, Artificial Sequence
  Description of Artificial Sequence: Synthetic oligonucleotide
gguggcacagccaaggcag

SEQ ID NO: 1906843 - RNA, 19 nt, Artificial Sequence
  Description of Artificial Sequence: Synthetic oligonucleotide
acuggccacagacaugcug

SEQ ID NO: 1906844 - RNA, 19 nt, Artificial Sequence
  Description of Artificial Sequence: Synthetic oligonucleotide
uggagcaguaguuaaccuu

SEQ ID NO: 1906845 - RNA, 19 nt, Artificial Sequence
  Description of Artificial Sequence: Synthetic oligonucleotide
acuggcaacucacugucau

SEQ ID NO: 1906846 - RNA, 19 nt, Artificial Sequence
  Description of Artificial Sequence: Synthetic oligonucleotide
acagugacagauguugacu

SEQ ID NO: 1906847 - RNA, 19 nt, Artificial Sequence
  Description of Artificial Sequence: Synthetic oligonucleotide
guuccgacagcgcacuggc

SEQ ID NO: 1906848 - RNA, 19 nt, Artificial Sequence
  Description of Artificial Sequence: Synthetic oligonucleotide
acugauguuccgacagcgc

SEQ ID NO: 1906849 - RNA, 19 nt, Artificial Sequence
  Description of Artificial Sequence: Synthetic oligonucleotide
gaccccgcccaccugagcc

SEQ ID NO: 1906850 - RNA, 19 nt, Artificial Sequence
  Description of Artificial Sequence: Synthetic oligonucleotide
guagagucaugucaucaca

SEQ ID NO: 1906851 - RNA, 19 nt, Artificial Sequence
  Description of Artificial Sequence: Synthetic oligonucleotide
aguccuuacugcuggcucu

SEQ ID NO: 1906852 - RNA, 19 nt, Artificial Sequence
  Description of Artificial Sequence: Synthetic oligonucleotide
uccugccauagcuucaaac

SEQ ID NO: 1906853 - RNA, 19 nt, Artificial Sequence
  Description of Artificial Sequence: Synthetic oligonucleotide
ucugccugcauagcggaug

SEQ ID NO: 1906854 - RNA, 19 nt, Artificial Sequence
  Description of Artificial Sequence: Synthetic oligonucleotide
ggagcaguaguuaaccuug

SEQ ID NO: 1906855 - RNA, 19 nt, Artificial Sequence
  Description of Artificial Sequence: Synthetic oligonucleotide
aaccuuguggcauccggua

SEQ ID NO: 1906856 - RNA, 19 nt, Artificial Sequence
  Description of Artificial Sequence: Synthetic oligonucleotide
caucaaccugcauucuggc

SEQ ID NO: 1906857 - RNA, 19 nt, Artificial Sequence
  Description of Artificial Sequence: Synthetic oligonucleotide
ucuacaguggaugcucggu

SEQ ID NO: 1906858 - RNA, 19 nt, Artificial Sequence
  Description of Artificial Sequence: Synthetic oligonucleotide
cacgguaggagaaacagcu

SEQ ID NO: 1906859 - RNA, 19 nt, Artificial Sequence
  Description of Artificial Sequence: Synthetic oligonucleotide
gacagauguugacuggcca

SEQ ID NO: 1906860 - RNA, 19 nt, Artificial Sequence
  Description of Artificial Sequence: Synthetic oligonucleotide
uccgguacacucacucaug

SEQ ID NO: 1906861 - RNA, 19 nt, Artificial Sequence
  Description of Artificial Sequence: Synthetic oligonucleotide
cugccauagcuucaaacuc

SEQ ID NO: 1906862 - RNA, 19 nt, Artificial Sequence
  Description of Artificial Sequence: Synthetic oligonucleotide
aguggaugcucggucaaag

SEQ ID NO: 1906863 - RNA, 19 nt, Artificial Sequence
  Description of Artificial Sequence: Synthetic oligonucleotide
cuggaaacggggcaaucug

SEQ ID NO: 1906864 - RNA, 19 nt, Artificial Sequence
  Description of Artificial Sequence: Synthetic oligonucleotide
ugggcucucagagaugaca

SEQ ID NO: 1906865 - RNA, 19 nt, Artificial Sequence
  Description of Artificial Sequence: Synthetic oligonucleotide
uacugcuggcucuuccugc

SEQ ID NO: 1906866 - RNA, 19 nt, Artificial Sequence
  Description of Artificial Sequence: Synthetic oligonucleotide
cacaguagagcaggagugg

SEQ ID NO: 1906867 - RNA, 19 nt, Artificial Sequence
  Description of Artificial Sequence: Synthetic oligonucleotide
caaucuggcagcuguccug

SEQ ID NO: 1906868 - RNA, 19 nt, Artificial Sequence
  Description of Artificial Sequence: Synthetic oligonucleotide
guggaugcucggucaaagg

SEQ ID NO: 1906869 - RNA, 19 nt, Artificial Sequence
  Description of Artificial Sequence: Synthetic oligonucleotide
gguacaggaggcagcaugg

SEQ ID NO: 1906870 - RNA, 19 nt, Artificial Sequence
  Description of Artificial Sequence: Synthetic oligonucleotide
cauagcuucaaacucaguu

SEQ ID NO: 1906871 - RNA, 19 nt, Artificial Sequence
  Description of Artificial Sequence: Synthetic oligonucleotide
cacagguacaggaggcagc

SEQ ID NO: 1906872 - RNA, 19 nt, Artificial Sequence
  Description of Artificial Sequence: Synthetic oligonucleotide
cuuccaguccuuacugcug

SEQ ID NO: 1906873 - RNA, 19 nt, Artificial Sequence
  Description of Artificial Sequence: Synthetic oligonucleotide
aaacucaguugggcuguac

SEQ ID NO: 1906874 - RNA, 19 nt, Artificial Sequence
  Description of Artificial Sequence: Synthetic oligonucleotide
ucucccugcuugauacacc

SEQ ID NO: 1906875 - RNA, 19 nt, Artificial Sequence
  Description of Artificial Sequence: Synthetic oligonucleotide
uuguagagcgugccacuga

SEQ ID NO: 1906876 - RNA, 19 nt, Artificial Sequence
  Description of Artificial Sequence: Synthetic oligonucleotide
auccgguacacucacucau

SEQ ID NO: 1906877 - RNA, 19 nt, Artificial Sequence
  Description of Artificial Sequence: Synthetic oligonucleotide
gaacaauuuugggauguga

SEQ ID NO: 1906878 - RNA, 19 nt, Artificial Sequence
  Description of Artificial Sequence: Synthetic oligonucleotide
uugacuggccacagacaug

SEQ ID NO: 1906879 - RNA, 19 nt, Artificial Sequence
  Description of Artificial Sequence: Synthetic oligonucleotide
gguagagucaugucaucac

SEQ ID NO: 1906880 - RNA, 19 nt, Artificial Sequence
  Description of Artificial Sequence: Synthetic oligonucleotide
cugauguuccgacagcgca

SEQ ID NO: 1906881 - RNA, 19 nt, Artificial Sequence
  Description of Artificial Sequence: Synthetic oligonucleotide
uccuugcgcuggcagaaug

SEQ ID NO: 1906882 - RNA, 19 nt, Artificial Sequence
  Description of Artificial Sequence: Synthetic oligonucleotide
gcaucaaccugcauucugg

SEQ ID NO: 1906883 - RNA, 19 nt, Artificial Sequence
  Description of Artificial Sequence: Synthetic oligonucleotide
gagcgugccacugauguuc

SEQ ID NO: 1906884 - RNA, 19 nt, Artificial Sequence
  Description of Artificial Sequence: Synthetic oligonucleotide
acuauuagcguggcuuucu

SEQ ID NO: 1906885 - RNA, 19 nt, Artificial Sequence
  Description of Artificial Sequence: Synthetic oligonucleotide
cucuuguagagcgugccac

SEQ ID NO: 1906886 - RNA, 19 nt, Artificial Sequence
  Description of Artificial Sequence: Synthetic oligonucleotide
cuucccugcaagagcuugc

SEQ ID NO: 1906887 - RNA, 19 nt, Artificial Sequence
  Description of Artificial Sequence: Synthetic oligonucleotide
cucuacaguggaugcucgg

SEQ ID NO: 1906888 - RNA, 19 nt, Artificial Sequence
  Description of Artificial Sequence: Synthetic oligonucleotide
gcaacucacugucauacac

SEQ ID NO: 1906889 - RNA, 19 nt, Artificial Sequence
  Description of Artificial Sequence: Synthetic oligonucleotide
uaguuaaccuuguggcauc

SEQ ID NO: 1906890 - RNA, 19 nt, Artificial Sequence
  Description of Artificial Sequence: Synthetic oligonucleotide
agggaugucagaacaauuu

SEQ ID NO: 1906891 - RNA, 19 nt, Artificial Sequence
  Description of Artificial Sequence: Synthetic oligonucleotide
ucaguugggcuguaccaau

SEQ ID NO: 1906892 - RNA, 19 nt, Artificial Sequence
  Description of Artificial Sequence: Synthetic oligonucleotide
gucccaguuguacuuggug

SEQ ID NO: 1906893 - RNA, 19 nt, Artificial Sequence
  Description of Artificial Sequence: Synthetic oligonucleotide
aggguggccaacccugcag

SEQ ID NO: 1906894 - RNA, 19 nt, Artificial Sequence
  Description of Artificial Sequence: Synthetic oligonucleotide
uggccucuacaguggaugc

SEQ ID NO: 1906895 - RNA, 19 nt, Artificial Sequence
  Description of Artificial Sequence: Synthetic oligonucleotide
uuagcguggcuuucucagu

SEQ ID NO: 1906896 - RNA, 19 nt, Artificial Sequence
  Description of Artificial Sequence: Synthetic oligonucleotide
cuacaguggaugcucgguc

SEQ ID NO: 1906897 - RNA, 19 nt, Artificial Sequence
  Description of Artificial Sequence: Synthetic oligonucleotide
uccccgaucugcagggcug

SEQ ID NO: 1906898 - RNA, 19 nt, Artificial Sequence
  Description of Artificial Sequence: Synthetic oligonucleotide
cacaaugcuacccaucugu

SEQ ID NO: 1906899 - RNA, 19 nt, Artificial Sequence
  Description of Artificial Sequence: Synthetic oligonucleotide
cuccugcaaagacaucacc

SEQ ID NO: 1906900 - RNA, 19 nt, Artificial Sequence
  Description of Artificial Sequence: Synthetic oligonucleotide
caguguucaggcugucccc

SEQ ID NO: 1906901 - RNA, 19 nt, Artificial Sequence
  Description of Artificial Sequence: Synthetic oligonucleotide
guggccucuacaguggaug

SEQ ID NO: 1906902 - RNA, 19 nt, Artificial Sequence
  Description of Artificial Sequence: Synthetic oligonucleotide
uggcuuguucaaacagugu

SEQ ID NO: 1906903 - RNA, 19 nt, Artificial Sequence
  Description of Artificial Sequence: Synthetic oligonucleotide
ugccugcuuggcuuguuca

SEQ ID NO: 1906904 - RNA, 19 nt, Artificial Sequence
  Description of Artificial Sequence: Synthetic oligonucleotide
guugacuggccacagacau

SEQ ID NO: 1906905 - RNA, 19 nt, Artificial Sequence
  Description of Artificial Sequence: Synthetic oligonucleotide
ugagccaagccugcucuug

SEQ ID NO: 1906906 - RNA, 19 nt, Artificial Sequence
  Description of Artificial Sequence: Synthetic oligonucleotide
auuuucucccugcuugaua

SEQ ID NO: 1906907 - RNA, 19 nt, Artificial Sequence
  Description of Artificial Sequence: Synthetic oligonucleotide
gggugagaggugcuguugg

SEQ ID NO: 1906908 - RNA, 19 nt, Artificial Sequence
  Description of Artificial Sequence: Synthetic oligonucleotide
guagugggguucagggugg

SEQ ID NO: 1906909 - RNA, 19 nt, Artificial Sequence
  Description of Artificial Sequence: Synthetic oligonucleotide
auacacugaagggucccag

SEQ ID NO: 1906910 - RNA, 19 nt, Artificial Sequence
  Description of Artificial Sequence: Synthetic oligonucleotide
uugauacaccgaccccgcc

SEQ ID NO: 1906911 - RNA, 19 nt, Artificial Sequence
  Description of Artificial Sequence: Synthetic oligonucleotide
agaacaauuuugggaugug

SEQ ID NO: 1906912 - RNA, 19 nt, Artificial Sequence
  Description of Artificial Sequence: Synthetic oligonucleotide
cuucacaguagagcaggag

SEQ ID NO: 1906913 - RNA, 19 nt, Artificial Sequence
  Description of Artificial Sequence: Synthetic oligonucleotide
ccaguggucuccacaaugc

SEQ ID NO: 1906914 - RNA, 19 nt, Artificial Sequence
  Description of Artificial Sequence: Synthetic oligonucleotide
guaggaggagacugaggac

SEQ ID NO: 1906915 - RNA, 19 nt, Artificial Sequence
  Description of Artificial Sequence: Synthetic oligonucleotide
cuuguagagcgugccacug

SEQ ID NO: 1906916 - RNA, 19 nt, Artificial Sequence
  Description of Artificial Sequence: Synthetic oligonucleotide
cacugcaggggucugccug

SEQ ID NO: 1906917 - RNA, 19 nt, Artificial Sequence
  Description of Artificial Sequence: Synthetic oligonucleotide
uggcauccgguacacucac

SEQ ID NO: 1906918 - RNA, 19 nt, Artificial Sequence
  Description of Artificial Sequence: Synthetic oligonucleotide
ggcuuucucaguguucagg

SEQ ID NO: 1906919 - RNA, 19 nt, Artificial Sequence
  Description of Artificial Sequence: Synthetic oligonucleotide
aguugacacaugacugcuc

SEQ ID NO: 1906920 - RNA, 19 nt, Artificial Sequence
  Description of Artificial Sequence: Synthetic oligonucleotide
aguugggcuguaccaauuu

SEQ ID NO: 1906921 - RNA, 19 nt, Artificial Sequence
  Description of Artificial Sequence: Synthetic oligonucleotide
agcccaguggucuccacaa

SEQ ID NO: 1906922 - RNA, 19 nt, Artificial Sequence
  Description of Artificial Sequence: Synthetic oligonucleotide
ggugagaggugcuguuggg

SEQ ID NO: 1906923 - RNA, 19 nt, Artificial Sequence
  Description of Artificial Sequence: Synthetic oligonucleotide
caaccugcauucuggccug

SEQ ID NO: 1906924 - RNA, 19 nt, Artificial Sequence
  Description of Artificial Sequence: Synthetic oligonucleotide
aaauaccauccuggaugag

SEQ ID NO: 1906925 - RNA, 19 nt, Artificial Sequence
  Description of Artificial Sequence: Synthetic oligonucleotide
cccaguuguacuuggugcc

SEQ ID NO: 1906926 - RNA, 19 nt, Artificial Sequence
  Description of Artificial Sequence: Synthetic oligonucleotide
uucccugcaagagcuugcc

SEQ ID NO: 1906927 - RNA, 19 nt, Artificial Sequence
  Description of Artificial Sequence: Synthetic oligonucleotide
agauguugacuggccacag

SEQ ID NO: 1906928 - RNA, 19 nt, Artificial Sequence
  Description of Artificial Sequence: Synthetic oligonucleotide
cuucaaacucaguugggcu

SEQ ID NO: 1906929 - RNA, 19 nt, Artificial Sequence
  Description of Artificial Sequence: Synthetic oligonucleotide
cuauuagcguggcuuucuc

SEQ ID NO: 1906930 - RNA, 19 nt, Artificial Sequence
  Description of Artificial Sequence: Synthetic oligonucleotide
acaaugcuacccaucugug

SEQ ID NO: 1906931 - RNA, 19 nt, Artificial Sequence
  Description of Artificial Sequence: Synthetic oligonucleotide
augugauguuggcaaugca

SEQ ID NO: 1906932 - RNA, 19 nt, Artificial Sequence
  Description of Artificial Sequence: Synthetic oligonucleotide
cuuuccgcucugcaucaac

SEQ ID NO: 1906933 - RNA, 19 nt, Artificial Sequence
  Description of Artificial Sequence: Synthetic oligonucleotide
augcuacccaucugugugu

SEQ ID NO: 1906934 - RNA, 19 nt, Artificial Sequence
  Description of Artificial Sequence: Synthetic oligonucleotide
gcucuuuccgcucugcauc

SEQ ID NO: 1906935 - RNA, 19 nt, Artificial Sequence
  Description of Artificial Sequence: Synthetic oligonucleotide
cuugcgcuggcagaaugug

SEQ ID NO: 1906936 - RNA, 19 nt, Artificial Sequence
  Description of Artificial Sequence: Synthetic oligonucleotide
caucagccuggacagugac

SEQ ID NO: 1906937 - RNA, 19 nt, Artificial Sequence
  Description of Artificial Sequence: Synthetic oligonucleotide
ucuggcagcuguccugaua

SEQ ID NO: 1906938 - RNA, 19 nt, Artificial Sequence
  Description of Artificial Sequence: Synthetic oligonucleotide
gcuguccccgaucugcagg

SEQ ID NO: 1906939 - RNA, 19 nt, Artificial Sequence
  Description of Artificial Sequence: Synthetic oligonucleotide
cuuggcuuguucaaacagu

SEQ ID NO: 1906940 - RNA, 19 nt, Artificial Sequence
  Description of Artificial Sequence: Synthetic oligonucleotide
guuaaccuuguggcauccg

SEQ ID NO: 1906941 - RNA, 19 nt, Artificial Sequence
  Description of Artificial Sequence: Synthetic oligonucleotide
cuacccaucuguguguaca

SEQ ID NO: 1906942 - RNA, 19 nt, Artificial Sequence
  Description of Artificial Sequence: Synthetic oligonucleotide
cacuuucuucacaugaacu

SEQ ID NO: 1906943 - RNA, 19 nt, Artificial Sequence
  Description of Artificial Sequence: Synthetic oligonucleotide
ugaccacgguaggagaaac

SEQ ID NO: 1906944 - RNA, 19 nt, Artificial Sequence
  Description of Artificial Sequence: Synthetic oligonucleotide
agcgugccacugauguucc

SEQ ID NO: 1906945 - RNA, 19 nt, Artificial Sequence
  Description of Artificial Sequence: Synthetic oligonucleotide
guaguuaaccuuguggcau

SEQ ID NO: 1906946 - RNA, 19 nt, Artificial Sequence
  Description of Artificial Sequence: Synthetic oligonucleotide
ggaaacggggcaaucuggc

SEQ ID NO: 1906947 - RNA, 19 nt, Artificial Sequence
  Description of Artificial Sequence: Synthetic oligonucleotide
cacucauggccucccggcc

SEQ ID NO: 1906948 - RNA, 19 nt, Artificial Sequence
  Description of Artificial Sequence: Synthetic oligonucleotide
gggcccuucagcccagugg

SEQ ID NO: 1906949 - RNA, 19 nt, Artificial Sequence
  Description of Artificial Sequence: Synthetic oligonucleotide
uguucaggcuguccccgau

SEQ ID NO: 1906950 - RNA, 19 nt, Artificial Sequence
  Description of Artificial Sequence: Synthetic oligonucleotide
caucucuuccagguacagc

SEQ ID NO: 1906951 - RNA, 19 nt, Artificial Sequence
  Description of Artificial Sequence: Synthetic oligonucleotide
cagcgcacuggcaacucac

SEQ ID NO: 1906952 - RNA, 19 nt, Artificial Sequence
  Description of Artificial Sequence: Synthetic oligonucleotide
cugucauacacugaagggu

SEQ ID NO: 1906953 - RNA, 19 nt, Artificial Sequence
  Description of Artificial Sequence: Synthetic oligonucleotide
ugccacugauguuccgaca

SEQ ID NO: 1906954 - RNA, 19 nt, Artificial Sequence
  Description of Artificial Sequence: Synthetic oligonucleotide
guacaggaggcagcauggg

SEQ ID NO: 1906955 - RNA, 19 nt, Artificial Sequence
  Description of Artificial Sequence: Synthetic oligonucleotide
ggguggccaacccugcagg

SEQ ID NO: 1906956 - RNA, 19 nt, Artificial Sequence
  Description of Artificial Sequence: Synthetic oligonucleotide
acccaucuguguguacaac

SEQ ID NO: 1906957 - RNA, 19 nt, Artificial Sequence
  Description of Artificial Sequence: Synthetic oligonucleotide
augcagcuucuggaaacgg

SEQ ID NO: 1906958 - RNA, 19 nt, Artificial Sequence
  Description of Artificial Sequence: Synthetic oligonucleotide
guuggcaaugcagcuucug

SEQ ID NO: 1906959 - RNA, 19 nt, Artificial Sequence
  Description of Artificial Sequence: Synthetic oligonucleotide
agcuugccugcuuggcuug

SEQ ID NO: 1906960 - RNA, 19 nt, Artificial Sequence
  Description of Artificial Sequence: Synthetic oligonucleotide
acaccgaccccgcccaccu

SEQ ID NO: 1906961 - RNA, 19 nt, Artificial Sequence
  Description of Artificial Sequence: Synthetic oligonucleotide
ggcagcuguccugauaacc

SEQ ID NO: 1906962 - RNA, 19 nt, Artificial Sequence
  Description of Artificial Sequence: Synthetic oligonucleotide
uggcucuuccugccauagc

SEQ ID NO: 1906963 - RNA, 19 nt, Artificial Sequence
  Description of Artificial Sequence: Synthetic oligonucleotide
ugcuggcucuuccugccau

SEQ ID NO: 1906964 - RNA, 19 nt, Artificial Sequence
  Description of Artificial Sequence: Synthetic oligonucleotide
caugacugcucuuuccgcu

SEQ ID NO: 1906965 - RNA, 19 nt, Artificial Sequence
  Description of Artificial Sequence: Synthetic oligonucleotide
ggucgaggguggcacagcc

SEQ ID NO: 1906966 - RNA, 19 nt, Artificial Sequence
  Description of Artificial Sequence: Synthetic oligonucleotide
ugcauagcggaugcuucuc

SEQ ID NO: 1906967 - RNA, 19 nt, Artificial Sequence
  Description of Artificial Sequence: Synthetic oligonucleotide
acagcgcacuggcaacuca

SEQ ID NO: 1906968 - RNA, 19 nt, Artificial Sequence
  Description of Artificial Sequence: Synthetic oligonucleotide
gaagggaugucagaacaau

SEQ ID NO: 1906969 - RNA, 19 nt, Artificial Sequence
  Description of Artificial Sequence: Synthetic oligonucleotide
ccgguacacucacucaugg

SEQ ID NO: 1906970 - RNA, 19 nt, Artificial Sequence
  Description of Artificial Sequence: Synthetic oligonucleotide
cucuuuccgcucugcauca

SEQ ID NO: 1906971 - RNA, 19 nt, Artificial Sequence
  Description of Artificial Sequence: Synthetic oligonucleotide
uuccaguccuugcgcuggc

SEQ ID NO: 1906972 - RNA, 19 nt, Artificial Sequence
  Description of Artificial Sequence: Synthetic oligonucleotide
cuuacugcuggcucuuccu

SEQ ID NO: 1906973 - RNA, 19 nt, Artificial Sequence
  Description of Artificial Sequence: Synthetic oligonucleotide
uccugauaaccaggguagu

SEQ ID NO: 1906974 - RNA, 19 nt, Artificial Sequence
  Description of Artificial Sequence: Synthetic oligonucleotide
cacaacaggcagcacaggu

SEQ ID NO: 1906975 - RNA, 19 nt, Artificial Sequence
  Description of Artificial Sequence: Synthetic oligonucleotide
aguggucuccacaaugcua

SEQ ID NO: 1906976 - RNA, 19 nt, Artificial Sequence
  Description of Artificial Sequence: Synthetic oligonucleotide
cauccgguacacucacuca

SEQ ID NO: 1906977 - RNA, 19 nt, Artificial Sequence
  Description of Artificial Sequence: Synthetic oligonucleotide
uccgcuguucugacaucuc

SEQ ID NO: 1906978 - RNA, 19 nt, Artificial Sequence
  Description of Artificial Sequence: Synthetic oligonucleotide
gccauagcuucaaacucag

SEQ ID NO: 1906979 - RNA, 19 nt, Artificial Sequence
  Description of Artificial Sequence: Synthetic oligonucleotide
ucccggccacaguugacac

SEQ ID NO: 1906980 - RNA, 19 nt, Artificial Sequence
  Description of Artificial Sequence: Synthetic oligonucleotide
caacucacugucauacacu

SEQ ID NO: 1906981 - RNA, 19 nt, Artificial Sequence
  Description of Artificial Sequence: Synthetic oligonucleotide
cagauguugacuggccaca

SEQ ID NO: 1906982 - RNA, 19 nt, Artificial Sequence
  Description of Artificial Sequence: Synthetic oligonucleotide
uacaccgaccccgcccacc

SEQ ID NO: 1906983 - RNA, 19 nt, Artificial Sequence
  Description of Artificial Sequence: Synthetic oligonucleotide
gauguuccgacagcgcacu

SEQ ID NO: 1906984 - RNA, 19 nt, Artificial Sequence
  Description of Artificial Sequence: Synthetic oligonucleotide
cuucagcccaguggucucc

SEQ ID NO: 1906985 - RNA, 19 nt, Artificial Sequence
  Description of Artificial Sequence: Synthetic oligonucleotide
gcagcuguccugauaacca

SEQ ID NO: 1906986 - RNA, 19 nt, Artificial Sequence
  Description of Artificial Sequence: Synthetic oligonucleotide
gcggaugcuucucuuccag

SEQ ID NO: 1906987 - RNA, 19 nt, Artificial Sequence
  Description of Artificial Sequence: Synthetic oligonucleotide
auacaccgaccccgcccac

SEQ ID NO: 1906988 - RNA, 19 nt, Artificial Sequence
  Description of Artificial Sequence: Synthetic oligonucleotide
ucccugcaagagcuugccu

SEQ ID NO: 1906989 - RNA, 19 nt, Artificial Sequence
  Description of Artificial Sequence: Synthetic oligonucleotide
gaguggccuggcucaaaca

SEQ ID NO: 1906990 - RNA, 19 nt, Artificial Sequence
  Description of Artificial Sequence: Synthetic oligonucleotide
gacugcucuuuccgcucug

SEQ ID NO: 1906991 - RNA, 19 nt, Artificial Sequence
  Description of Artificial Sequence: Synthetic oligonucleotide
caguuguacuuggugccac

SEQ ID NO: 1906992 - RNA, 19 nt, Artificial Sequence
  Description of Artificial Sequence: Synthetic oligonucleotide
ccucuacaguggaugcucg

SEQ ID NO: 1906993 - RNA, 19 nt, Artificial Sequence
  Description of Artificial Sequence: Synthetic oligonucleotide
ccugccauagcuucaaacu

SEQ ID NO: 1906994 - RNA, 19 nt, Artificial Sequence
  Description of Artificial Sequence: Synthetic oligonucleotide
ugggcccuucagcccagug

SEQ ID NO: 1906995 - RNA, 19 nt, Artificial Sequence
  Description of Artificial Sequence: Synthetic oligonucleotide
cccaguggucuccacaaug

SEQ ID NO: 1906996 - RNA, 19 nt, Artificial Sequence
  Description of Artificial Sequence: Synthetic oligonucleotide
ccacgguaggagaaacagc

SEQ ID NO: 1906997 - RNA, 19 nt, Artificial Sequence
  Description of Artificial Sequence: Synthetic oligonucleotide
uuccgacagcgcacuggca

SEQ ID NO: 1906998 - RNA, 19 nt, Artificial Sequence
  Description of Artificial Sequence: Synthetic oligonucleotide
guggcauccgguacacuca

SEQ ID NO: 1906999 - RNA, 19 nt, Artificial Sequence
  Description of Artificial Sequence: Synthetic oligonucleotide
ccuuacugcuggcucuucc

SEQ ID NO: 1907000 - RNA, 19 nt, Artificial Sequence
  Description of Artificial Sequence: Synthetic oligonucleotide
uucuggaaacggggcaauc

SEQ ID NO: 1907001 - RNA, 19 nt, Artificial Sequence
  Description of Artificial Sequence: Synthetic oligonucleotide
cacugaccacgguaggaga

SEQ ID NO: 1907002 - RNA, 19 nt, Artificial Sequence
  Description of Artificial Sequence: Synthetic oligonucleotide
agggucccaguuguacuug

SEQ ID NO: 1907003 - RNA, 19 nt, Artificial Sequence
  Description of Artificial Sequence: Synthetic oligonucleotide
uucuggccugugucacagc

SEQ ID NO: 1907004 - RNA, 19 nt, Artificial Sequence
  Description of Artificial Sequence: Synthetic oligonucleotide
ccugauaaccaggguagug

SEQ ID NO: 1907005 - RNA, 19 nt, Artificial Sequence
  Description of Artificial Sequence: Synthetic oligonucleotide
cauucuggccugugucaca

SEQ ID NO: 1907006 - RNA, 19 nt, Artificial Sequence
  Description of Artificial Sequence: Synthetic oligonucleotide
gacugaggaccugggguga

SEQ ID NO: 1907007 - RNA, 19 nt, Artificial Sequence
  Description of Artificial Sequence: Synthetic oligonucleotide
agagcgugccacugauguu

SEQ ID NO: 1907008 - RNA, 19 nt, Artificial Sequence
  Description of Artificial Sequence: Synthetic oligonucleotide
ugcuacccaucugugugua

SEQ ID NO: 1907009 - RNA, 19 nt, Artificial Sequence
  Description of Artificial Sequence: Synthetic oligonucleotide
ggugccagugggguaggag

SEQ ID NO: 1907010 - RNA, 19 nt, Artificial Sequence
  Description of Artificial Sequence: Synthetic oligonucleotide
ggucugccugcauagcgga

SEQ ID NO: 1907011 - RNA, 19 nt, Artificial Sequence
  Description of Artificial Sequence: Synthetic oligonucleotide
gaccacgguaggagaaaca

SEQ ID NO: 1907012 - RNA, 19 nt, Artificial Sequence
  Description of Artificial Sequence: Synthetic oligonucleotide
guagagcgugccacugaug

SEQ ID NO: 1907013 - RNA, 19 nt, Artificial Sequence
  Description of Artificial Sequence: Synthetic oligonucleotide
ggugcuguugggcccuuca

SEQ ID NO: 1907014 - RNA, 19 nt, Artificial Sequence
  Description of Artificial Sequence: Synthetic oligonucleotide
ggcucaaacagcaacuuuu

SEQ ID NO: 1907015 - RNA, 19 nt, Artificial Sequence
  Description of Artificial Sequence: Synthetic oligonucleotide
uggcagcuguccugauaac

SEQ ID NO: 1907016 - RNA, 19 nt, Artificial Sequence
  Description of Artificial Sequence: Synthetic oligonucleotide
auguuccgacagcgcacug

SEQ ID NO: 1907017 - RNA, 19 nt, Artificial Sequence
  Description of Artificial Sequence: Synthetic oligonucleotide
caacuauuagcguggcuuu

SEQ ID NO: 1907018 - RNA, 19 nt, Artificial Sequence
  Description of Artificial Sequence: Synthetic oligonucleotide
gcaaugcagcuucuggaaa

SEQ ID NO: 1907019 - RNA, 19 nt, Artificial Sequence
  Description of Artificial Sequence: Synthetic oligonucleotide
gacagcgcacuggcaacuc

SEQ ID NO: 1907020 - RNA, 19 nt, Artificial Sequence
  Description of Artificial Sequence: Synthetic oligonucleotide
ggaugcucggucaaaggua

SEQ ID NO: 1907021 - RNA, 19 nt, Artificial Sequence
  Description of Artificial Sequence: Synthetic oligonucleotide
cucccggccacaguugaca

SEQ ID NO: 1907022 - RNA, 19 nt, Artificial Sequence
  Description of Artificial Sequence: Synthetic oligonucleotide
gcugagcaaggaguugacc

SEQ ID NO: 1907023 - RNA, 19 nt, Artificial Sequence
  Description of Artificial Sequence: Synthetic oligonucleotide
ggcccuucagcccaguggu

SEQ ID NO: 1907024 - RNA, 19 nt, Artificial Sequence
  Description of Artificial Sequence: Synthetic oligonucleotide
guucaggguggccaacccu

SEQ ID NO: 1907025 - RNA, 19 nt, Artificial Sequence
  Description of Artificial Sequence: Synthetic oligonucleotide
ggguucaaaauaccauccu

SEQ ID NO: 1907026 - RNA, 19 nt, Artificial Sequence
  Description of Artificial Sequence: Synthetic oligonucleotide
gcgcacuggcaacucacug

SEQ ID NO: 1907027 - RNA, 19 nt, Artificial Sequence
  Description of Artificial Sequence: Synthetic oligonucleotide
cugcauagcggaugcuucu

SEQ ID NO: 1907028 - RNA, 19 nt, Artificial Sequence
  Description of Artificial Sequence: Synthetic oligonucleotide
ggcaacucacugucauaca

SEQ ID NO: 1907029 - RNA, 19 nt, Artificial Sequence
  Description of Artificial Sequence: Synthetic oligonucleotide
accccgcccaccugagcca

SEQ ID NO: 1907030 - RNA, 19 nt, Artificial Sequence
  Description of Artificial Sequence: Synthetic oligonucleotide
gcugugcugagcaaggagu

SEQ ID NO: 1907031 - RNA, 19 nt, Artificial Sequence
  Description of Artificial Sequence: Synthetic oligonucleotide
agcgcacuggcaacucacu

SEQ ID NO: 1907032 - RNA, 19 nt, Artificial Sequence
  Description of Artificial Sequence: Synthetic oligonucleotide
ccaucuguguguacaacua

SEQ ID NO: 1907033 - RNA, 19 nt, Artificial Sequence
  Description of Artificial Sequence: Synthetic oligonucleotide
cagcccacugaccacggua

SEQ ID NO: 1907034 - RNA, 19 nt, Artificial Sequence
  Description of Artificial Sequence: Synthetic oligonucleotide
gccacaguugacacaugac

SEQ ID NO: 1907035 - RNA, 19 nt, Artificial Sequence
  Description of Artificial Sequence: Synthetic oligonucleotide
gggaugucagaacaauuuu

SEQ ID NO: 1907036 - RNA, 19 nt, Artificial Sequence
  Description of Artificial Sequence: Synthetic oligonucleotide
gcucuuguagagcgugcca

SEQ ID NO: 1907037 - RNA, 19 nt, Artificial Sequence
  Description of Artificial Sequence: Synthetic oligonucleotide
guguucaggcuguccccga

SEQ ID NO: 1907038 - RNA, 19 nt, Artificial Sequence
  Description of Artificial Sequence: Synthetic oligonucleotide
ggucaaagguagagucaug

SEQ ID NO: 1907039 - RNA, 19 nt, Artificial Sequence
  Description of Artificial Sequence: Synthetic oligonucleotide
ccaagccugcucuuguaga

SEQ ID NO: 1907040 - RNA, 19 nt, Artificial Sequence
  Description of Artificial Sequence: Synthetic oligonucleotide
auggccucccggccacagu

SEQ ID NO: 1907041 - RNA, 19 nt, Artificial Sequence
  Description of Artificial Sequence: Synthetic oligonucleotide
ucuuuccgcucugcaucaa

SEQ ID NO: 1907042 - RNA, 19 nt, Artificial Sequence
  Description of Artificial Sequence: Synthetic oligonucleotide
ggggugagaggugcuguug

SEQ ID NO: 1907043 - RNA, 19 nt, Artificial Sequence
  Description of Artificial Sequence: Synthetic oligonucleotide
gcuccugcaaagacaucac

SEQ ID NO: 1907044 - RNA, 19 nt, Artificial Sequence
  Description of Artificial Sequence: Synthetic oligonucleotide
gcccacugaccacgguagg

SEQ ID NO: 1907045 - RNA, 19 nt, Artificial Sequence
  Description of Artificial Sequence: Synthetic oligonucleotide
cugaccacgguaggagaaa

SEQ ID NO: 1907046 - RNA, 19 nt, Artificial Sequence
  Description of Artificial Sequence: Synthetic oligonucleotide
gaucugcagggcuguccua

SEQ ID NO: 1907047 - RNA, 19 nt, Artificial Sequence
  Description of Artificial Sequence: Synthetic oligonucleotide
ggggucgaggguggcacag

SEQ ID NO: 1907048 - RNA, 19 nt, Artificial Sequence
  Description of Artificial Sequence: Synthetic oligonucleotide
ccgacagcgcacuggcaac

SEQ ID NO: 1907049 - RNA, 19 nt, Artificial Sequence
  Description of Artificial Sequence: Synthetic oligonucleotide
uggcuccugcaaagacauc

SEQ ID NO: 1907050 - RNA, 19 nt, Artificial Sequence
  Description of Artificial Sequence: Synthetic oligonucleotide
caguggccucuacagugga

SEQ ID NO: 1907051 - RNA, 19 nt, Artificial Sequence
  Description of Artificial Sequence: Synthetic oligonucleotide
cauagcggaugcuucucuu

SEQ ID NO: 1907052 - RNA, 19 nt, Artificial Sequence
  Description of Artificial Sequence: Synthetic oligonucleotide
uccuuacugcuggcucuuc

SEQ ID NO: 1907053 - RNA, 19 nt, Artificial Sequence
  Description of Artificial Sequence: Synthetic oligonucleotide
ccacaaugcuacccaucug

SEQ ID NO: 1907054 - RNA, 19 nt, Artificial Sequence
  Description of Artificial Sequence: Synthetic oligonucleotide
ggcagaauguggagcagua

SEQ ID NO: 1907055 - RNA, 19 nt, Artificial Sequence
  Description of Artificial Sequence: Synthetic oligonucleotide
gagcaguaguuaaccuugu

SEQ ID NO: 1907056 - RNA, 19 nt, Artificial Sequence
  Description of Artificial Sequence: Synthetic oligonucleotide
cgguacacucacucauggc

SEQ ID NO: 1907057 - RNA, 19 nt, Artificial Sequence
  Description of Artificial Sequence: Synthetic oligonucleotide
acgguaggagaaacagcuu

SEQ ID NO: 1907058 - RNA, 19 nt, Artificial Sequence
  Description of Artificial Sequence: Synthetic oligonucleotide
caguggucuccacaaugcu

SEQ ID NO: 1907059 - RNA, 19 nt, Artificial Sequence
  Description of Artificial Sequence: Synthetic oligonucleotide
ccuucagcccaguggucuc

SEQ ID NO: 1907060 - RNA, 19 nt, Artificial Sequence
  Description of Artificial Sequence: Synthetic oligonucleotide
ccgaucugcagggcugucc

SEQ ID NO: 1907061 - RNA, 19 nt, Artificial Sequence
  Description of Artificial Sequence: Synthetic oligonucleotide
cuccgcuguucugacaucu

SEQ ID NO: 1907062 - RNA, 19 nt, Artificial Sequence
  Description of Artificial Sequence: Synthetic oligonucleotide
gucgaggguggcacagcca

SEQ ID NO: 1907063 - RNA, 19 nt, Artificial Sequence
  Description of Artificial Sequence: Synthetic oligonucleotide
guccccgaucugcagggcu

SEQ ID NO: 1907064 - RNA, 19 nt, Artificial Sequence
  Description of Artificial Sequence: Synthetic oligonucleotide
gcuacccaucuguguguac

SEQ ID NO: 1907065 - RNA, 19 nt, Artificial Sequence
  Description of Artificial Sequence: Synthetic oligonucleotide
gccugcuuggcuuguucaa

SEQ ID NO: 1907066 - RNA, 19 nt, Artificial Sequence
  Description of Artificial Sequence: Synthetic oligonucleotide
acggggcaaucuggcagcu

SEQ ID NO: 1907067 - RNA, 19 nt, Artificial Sequence
  Description of Artificial Sequence: Synthetic oligonucleotide
ugccugcauagcggaugcu

SEQ ID NO: 1907068 - RNA, 19 nt, Artificial Sequence
  Description of Artificial Sequence: Synthetic oligonucleotide
cugaagggucccaguugua

SEQ ID NO: 1907069 - RNA, 19 nt, Artificial Sequence
  Description of Artificial Sequence: Synthetic oligonucleotide
cuguaccaauuuucucccu

SEQ ID NO: 1907070 - RNA, 19 nt, Artificial Sequence
  Description of Artificial Sequence: Synthetic oligonucleotide
gcauagcggaugcuucucu

SEQ ID NO: 1907071 - RNA, 19 nt, Artificial Sequence
  Description of Artificial Sequence: Synthetic oligonucleotide
ccugagccaagccugcucu

SEQ ID NO: 1907072 - RNA, 19 nt, Artificial Sequence
  Description of Artificial Sequence: Synthetic oligonucleotide
gcgugccacugauguuccg

SEQ ID NO: 1907073 - RNA, 19 nt, Artificial Sequence
  Description of Artificial Sequence: Synthetic oligonucleotide
cuguccugauaaccagggu

SEQ ID NO: 1907074 - RNA, 19 nt, Artificial Sequence
  Description of Artificial Sequence: Synthetic oligonucleotide
augcucggucaaagguaga

SEQ ID NO: 1907075 - RNA, 19 nt, Artificial Sequence
  Description of Artificial Sequence: Synthetic oligonucleotide
cugaggaccuggggugaga

SEQ ID NO: 1907076 - RNA, 19 nt, Artificial Sequence
  Description of Artificial Sequence: Synthetic oligonucleotide
gugucacagcagcuucccu

SEQ ID NO: 1907077 - RNA, 19 nt, Artificial Sequence
  Description of Artificial Sequence: Synthetic oligonucleotide
gccucccggccacaguuga

SEQ ID NO: 1907078 - RNA, 19 nt, Artificial Sequence
  Description of Artificial Sequence: Synthetic oligonucleotide
ccaguuguacuuggugcca

SEQ ID NO: 1907079 - RNA, 19 nt, Artificial Sequence
  Description of Artificial Sequence: Synthetic oligonucleotide
aggaguggccuggcucaaa

SEQ ID NO: 1907080 - RNA, 19 nt, Artificial Sequence
  Description of Artificial Sequence: Synthetic oligonucleotide
cagcaguggccucuacagu

SEQ ID NO: 1907081 - RNA, 19 nt, Artificial Sequence
  Description of Artificial Sequence: Synthetic oligonucleotide
caguggaugcucggucaaa

SEQ ID NO: 1907082 - RNA, 19 nt, Artificial Sequence
  Description of Artificial Sequence: Synthetic oligonucleotide
gggucgaggguggcacagc

SEQ ID NO: 1907083 - RNA, 19 nt, Artificial Sequence
  Description of Artificial Sequence: Synthetic oligonucleotide
uugggcccuucagcccagu

SEQ ID NO: 1907084 - RNA, 19 nt, Artificial Sequence
  Description of Artificial Sequence: Synthetic oligonucleotide
cccacugaccacgguagga

SEQ ID NO: 1907085 - RNA, 19 nt, Artificial Sequence
  Description of Artificial Sequence: Synthetic oligonucleotide
ccgcccaccugagccaagc

SEQ ID NO: 1907086 - RNA, 19 nt, Artificial Sequence
  Description of Artificial Sequence: Synthetic oligonucleotide
aggugccagugggguagga

SEQ ID NO: 1907087 - RNA, 19 nt, Artificial Sequence
  Description of Artificial Sequence: Synthetic oligonucleotide
ccuugcgcuggcagaaugu

SEQ ID NO: 1907088 - RNA, 19 nt, Artificial Sequence
  Description of Artificial Sequence: Synthetic oligonucleotide
gggcaaucuggcagcuguc

SEQ ID NO: 1907089 - RNA, 19 nt, Artificial Sequence
  Description of Artificial Sequence: Synthetic oligonucleotide
caccuugagcugggcucuc

SEQ ID NO: 1907090 - RNA, 19 nt, Artificial Sequence
  Description of Artificial Sequence: Synthetic oligonucleotide
gcuccgcuguucugacauc

SEQ ID NO: 1907091 - RNA, 19 nt, Artificial Sequence
  Description of Artificial Sequence: Synthetic oligonucleotide
ccucccggccacaguugac

SEQ ID NO: 1907092 - RNA, 19 nt, Artificial Sequence
  Description of Artificial Sequence: Synthetic oligonucleotide
cgcacuggcaacucacugu

SEQ ID NO: 1907093 - RNA, 19 nt, Artificial Sequence
  Description of Artificial Sequence: Synthetic oligonucleotide
ccugcauucuggccugugu

SEQ ID NO: 1907094 - RNA, 19 nt, Artificial Sequence
  Description of Artificial Sequence: Synthetic oligonucleotide
ggccucccggccacaguug

SEQ ID NO: 1907095 - RNA, 19 nt, Artificial Sequence
  Description of Artificial Sequence: Synthetic oligonucleotide
cgguaggagaaacagcuuu

SEQ ID NO: 1907096 - RNA, 19 nt, Artificial Sequence
  Description of Artificial Sequence: Synthetic oligonucleotide
guccuuacugcuggcucuu

SEQ ID NO: 1907097 - RNA, 19 nt, Artificial Sequence
  Description of Artificial Sequence: Synthetic oligonucleotide
cgaucugcagggcuguccu

SEQ ID NO: 1907098 - RNA, 19 nt, Artificial Sequence
  Description of Artificial Sequence: Synthetic oligonucleotide
cugcaagagcuugccugcu

SEQ ID NO: 1907099 - RNA, 19 nt, Artificial Sequence
  Description of Artificial Sequence: Synthetic oligonucleotide
gccugcauagcggaugcuu

SEQ ID NO: 1907100 - RNA, 19 nt, Artificial Sequence
  Description of Artificial Sequence: Synthetic oligonucleotide
caggaguggccuggcucaa

SEQ ID NO: 1907101 - RNA, 19 nt, Artificial Sequence
  Description of Artificial Sequence: Synthetic oligonucleotide
ggucccaguuguacuuggu

SEQ ID NO: 1907102 - RNA, 19 nt, Artificial Sequence
  Description of Artificial Sequence: Synthetic oligonucleotide
cccggccacaguugacaca

SEQ ID NO: 1907103 - RNA, 19 nt, Artificial Sequence
  Description of Artificial Sequence: Synthetic oligonucleotide
gucugccugcauagcggau

SEQ ID NO: 1907104 - RNA, 19 nt, Artificial Sequence
  Description of Artificial Sequence: Synthetic oligonucleotide
ccauagcuucaaacucagu

SEQ ID NO: 1907105 - RNA, 19 nt, Artificial Sequence
  Description of Artificial Sequence: Synthetic oligonucleotide
cuugccugcuuggcuuguu

SEQ ID NO: 1907106 - RNA, 19 nt, Artificial Sequence
  Description of Artificial Sequence: Synthetic oligonucleotide
cccgcccaccugagccaag

SEQ ID NO: 1907107 - RNA, 19 nt, Artificial Sequence
  Description of Artificial Sequence: Synthetic oligonucleotide
gcacugcaggggucugccu

SEQ ID NO: 1907108 - RNA, 19 nt, Artificial Sequence
  Description of Artificial Sequence: Synthetic oligonucleotide
ggcauccgguacacucacu

SEQ ID NO: 1907109 - RNA, 19 nt, Artificial Sequence
  Description of Artificial Sequence: Synthetic oligonucleotide
gcccaguggucuccacaau

SEQ ID NO: 1907110 - RNA, 19 nt, Artificial Sequence
  Description of Artificial Sequence: Synthetic oligonucleotide
cccgaucugcagggcuguc

SEQ ID NO: 1907111 - RNA, 19 nt, Artificial Sequence
  Description of Artificial Sequence: Synthetic oligonucleotide
gccugcucuuguagagcgu

SEQ ID NO: 1907112 - RNA, 19 nt, Artificial Sequence
  Description of Artificial Sequence: Synthetic oligonucleotide
gcucugcaucaaccugcau

SEQ ID NO: 1907113 - RNA, 19 nt, Artificial Sequence
  Description of Artificial Sequence: Synthetic oligonucleotide
cggggcaaucuggcagcug

SEQ ID NO: 1907114 - RNA, 19 nt, Artificial Sequence
  Description of Artificial Sequence: Synthetic oligonucleotide
gaggugcuguugggcccuu

SEQ ID NO: 1907115 - RNA, 19 nt, Artificial Sequence
  Description of Artificial Sequence: Synthetic oligonucleotide
caccugccucuugcacugu

SEQ ID NO: 1907116 - RNA, 19 nt, Artificial Sequence
  Description of Artificial Sequence: Synthetic oligonucleotide
cgacagcgcacuggcaacu

SEQ ID NO: 1907117 - RNA, 19 nt, Artificial Sequence
  Description of Artificial Sequence: Synthetic oligonucleotide
ccccgaucugcagggcugu

SEQ ID NO: 1907118 - RNA, 19 nt, Artificial Sequence
  Description of Artificial Sequence: Synthetic oligonucleotide
uaauguuuagcuaauaggg

SEQ ID NO: 1907119 - RNA, 19 nt, Artificial Sequence
  Description of Artificial Sequence: Synthetic oligonucleotide
uuuaaaaccgugcagaacu

SEQ ID NO: 1907120 - RNA, 19 nt, Artificial Sequence
  Description of Artificial Sequence: Synthetic oligonucleotide
aagauuuuccuucacaaag

SEQ ID NO: 1907121 - RNA, 19 nt, Artificial Sequence
  Description of Artificial Sequence: Synthetic oligonucleotide
ucacaaaguagucugacug

SEQ ID NO: 1907122 - RNA, 19 nt, Artificial Sequence
  Description of Artificial Sequence: Synthetic oligonucleotide
auacaguugagucaaguuc

SEQ ID NO: 1907123 - RNA, 19 nt, Artificial Sequence
  Description of Artificial Sequence: Synthetic oligonucleotide
aaaggaaucuuccagccgu

SEQ ID NO: 1907124 - RNA, 19 nt, Artificial Sequence
  Description of Artificial Sequence: Synthetic oligonucleotide
aguuagaaggauucacucc

SEQ ID NO: 1907125 - RNA, 19 nt, Artificial Sequence
  Description of Artificial Sequence: Synthetic oligonucleotide
ucuuucucgaagaaggacc

SEQ ID NO: 1907126 - RNA, 19 nt, Artificial Sequence
  Description of Artificial Sequence: Synthetic oligonucleotide
aucauaggcaaucaugggg

SEQ ID NO: 1907127 - RNA, 19 nt, Artificial Sequence
  Description of Artificial Sequence: Synthetic oligonucleotide
aauacagugucuucuuuug

SEQ ID NO: 1907128 - RNA, 19 nt, Artificial Sequence
  Description of Artificial Sequence: Synthetic oligonucleotide
gauucacuccuuuaaaacc

SEQ ID NO: 1907129 - RNA, 19 nt, Artificial Sequence
  Description of Artificial Sequence: Synthetic oligonucleotide
acaagcaccaccuggcgcc

SEQ ID NO: 1907130 - RNA, 19 nt, Artificial Sequence
  Description of Artificial Sequence: Synthetic oligonucleotide
ucugguaauguuuagcuaa

SEQ ID NO: 1907131 - RNA, 19 nt, Artificial Sequence
  Description of Artificial Sequence: Synthetic oligonucleotide
aagacaggagcugacuugc

SEQ ID NO: 1907132 - RNA, 19 nt, Artificial Sequence
  Description of Artificial Sequence: Synthetic oligonucleotide
ucugcauacaagcaccacc

SEQ ID NO: 1907133 - RNA, 19 nt, Artificial Sequence
  Description of Artificial Sequence: Synthetic oligonucleotide
aguccuuuuccccacugcc

SEQ ID NO: 1907134 - RNA, 19 nt, Artificial Sequence
  Description of Artificial Sequence: Synthetic oligonucleotide
aaaaccgugcagaacuccc

SEQ ID NO: 1907135 - RNA, 19 nt, Artificial Sequence
  Description of Artificial Sequence: Synthetic oligonucleotide
acugacucgccacugugcc

SEQ ID NO: 1907136 - RNA, 19 nt, Artificial Sequence
  Description of Artificial Sequence: Synthetic oligonucleotide
ucgaagaaggaccagugcu

SEQ ID NO: 1907137 - RNA, 19 nt, Artificial Sequence
  Description of Artificial Sequence: Synthetic oligonucleotide
acauggcucgcauagcggc

SEQ ID NO: 1907138 - RNA, 19 nt, Artificial Sequence
  Description of Artificial Sequence: Synthetic oligonucleotide
aauacaguugagucaaguu

SEQ ID NO: 1907139 - RNA, 19 nt, Artificial Sequence
  Description of Artificial Sequence: Synthetic oligonucleotide
ugacgcaaggcuuccaagg

SEQ ID NO: 1907140 - RNA, 19 nt, Artificial Sequence
  Description of Artificial Sequence: Synthetic oligonucleotide
cucauaguuagaaggauuc

SEQ ID NO: 1907141 - RNA, 19 nt, Artificial Sequence
  Description of Artificial Sequence: Synthetic oligonucleotide
cauugaaguaccccaaggc

SEQ ID NO: 1907142 - RNA, 19 nt, Artificial Sequence
  Description of Artificial Sequence: Synthetic oligonucleotide
cuaauagggaauacaguug

SEQ ID NO: 1907143 - RNA, 19 nt, Artificial Sequence
  Description of Artificial Sequence: Synthetic oligonucleotide
aguucugguaauguuuagc

SEQ ID NO: 1907144 - RNA, 19 nt, Artificial Sequence
  Description of Artificial Sequence: Synthetic oligonucleotide
uuccaagguagccuguggg

SEQ ID NO: 1907145 - RNA, 19 nt, Artificial Sequence
  Description of Artificial Sequence: Synthetic oligonucleotide
uccuuuaaaaccgugcaga

SEQ ID NO: 1907146 - RNA, 19 nt, Artificial Sequence
  Description of Artificial Sequence: Synthetic oligonucleotide
gguaauguuuagcuaauag

SEQ ID NO: 1907147 - RNA, 19 nt, Artificial Sequence
  Description of Artificial Sequence: Synthetic oligonucleotide
aaggacuccgggaagacag

SEQ ID NO: 1907148 - RNA, 19 nt, Artificial Sequence
  Description of Artificial Sequence: Synthetic oligonucleotide
gaaaggaaucuuccagccg

SEQ ID NO: 1907149 - RNA, 19 nt, Artificial Sequence
  Description of Artificial Sequence: Synthetic oligonucleotide
aauguuuagcuaauaggga

SEQ ID NO: 1907150 - RNA, 19 nt, Artificial Sequence
  Description of Artificial Sequence: Synthetic oligonucleotide
uguaucuucuccccauccc

SEQ ID NO: 1907151 - RNA, 19 nt, Artificial Sequence
  Description of Artificial Sequence: Synthetic oligonucleotide
guaucuucuccccaucccg

SEQ ID NO: 1907152 - RNA, 19 nt, Artificial Sequence
  Description of Artificial Sequence: Synthetic oligonucleotide
cucaacccgaugcacaugg

SEQ ID NO: 1907153 - RNA, 19 nt, Artificial Sequence
  Description of Artificial Sequence: Synthetic oligonucleotide
uguugguguaucuucuccc

SEQ ID NO: 1907154 - RNA, 19 nt, Artificial Sequence
  Description of Artificial Sequence: Synthetic oligonucleotide
cacaaaguagucugacugg

SEQ ID NO: 1907155 - RNA, 19 nt, Artificial Sequence
  Description of Artificial Sequence: Synthetic oligonucleotide
aaugcucacuuggaucagc

SEQ ID NO: 1907156 - RNA, 19 nt, Artificial Sequence
  Description of Artificial Sequence: Synthetic oligonucleotide
accgugucaucacugacuc

SEQ ID NO: 1907157 - RNA, 19 nt, Artificial Sequence
  Description of Artificial Sequence: Synthetic oligonucleotide
acauaccucuccaucagcc

SEQ ID NO: 1907158 - RNA, 19 nt, Artificial Sequence
  Description of Artificial Sequence: Synthetic oligonucleotide
gaagacaggagcugacuug

SEQ ID NO: 1907159 - RNA, 19 nt, Artificial Sequence
  Description of Artificial Sequence: Synthetic oligonucleotide
ucucgaagaaggaccagug

SEQ ID NO: 1907160 - RNA, 19 nt, Artificial Sequence
  Description of Artificial Sequence: Synthetic oligonucleotide
uaguuagaaggauucacuc

SEQ ID NO: 1907161 - RNA, 19 nt, Artificial Sequence
  Description of Artificial Sequence: Synthetic oligonucleotide
ugccauucacagcauacgc

SEQ ID NO: 1907162 - RNA, 19 nt, Artificial Sequence
  Description of Artificial Sequence: Synthetic oligonucleotide
augcacauggcucgcauag

SEQ ID NO: 1907163 - RNA, 19 nt, Artificial Sequence
  Description of Artificial Sequence: Synthetic oligonucleotide
uguggaaucgcugucucca

SEQ ID NO: 1907164 - RNA, 19 nt, Artificial Sequence
  Description of Artificial Sequence: Synthetic oligonucleotide
uuuugacccaagagaauac

SEQ ID NO: 1907165 - RNA, 19 nt, Artificial Sequence
  Description of Artificial Sequence: Synthetic oligonucleotide
cauaguuagaaggauucac

SEQ ID NO: 1907166 - RNA, 19 nt, Artificial Sequence
  Description of Artificial Sequence: Synthetic oligonucleotide
uugucagcuuccacgagug

SEQ ID NO: 1907167 - RNA, 19 nt, Artificial Sequence
  Description of Artificial Sequence: Synthetic oligonucleotide
uccacuacugccaccccag

SEQ ID NO: 1907168 - RNA, 19 nt, Artificial Sequence
  Description of Artificial Sequence: Synthetic oligonucleotide
aacccgaugcacauggcuc

SEQ ID NO: 1907169 - RNA, 19 nt, Artificial Sequence
  Description of Artificial Sequence: Synthetic oligonucleotide
gcaucauaggcaaucaugg

SEQ ID NO: 1907170 - RNA, 19 nt, Artificial Sequence
  Description of Artificial Sequence: Synthetic oligonucleotide
uccaggaauccccugcacc

SEQ ID NO: 1907171 - RNA, 19 nt, Artificial Sequence
  Description of Artificial Sequence: Synthetic oligonucleotide
aaaccgugcagaacucccc

SEQ ID NO: 1907172 - RNA, 19 nt, Artificial Sequence
  Description of Artificial Sequence: Synthetic oligonucleotide
cacugugccacgucuacgg

SEQ ID NO: 1907173 - RNA, 19 nt, Artificial Sequence
  Description of Artificial Sequence: Synthetic oligonucleotide
ugagggaaccucaacccga

SEQ ID NO: 1907174 - RNA, 19 nt, Artificial Sequence
  Description of Artificial Sequence: Synthetic oligonucleotide
ucuacggcuuccaagucuc

SEQ ID NO: 1907175 - RNA, 19 nt, Artificial Sequence
  Description of Artificial Sequence: Synthetic oligonucleotide
ugcaguucugguaauguuu

SEQ ID NO: 1907176 - RNA, 19 nt, Artificial Sequence
  Description of Artificial Sequence: Synthetic oligonucleotide
acgucuacggcuuccaagu

SEQ ID NO: 1907177 - RNA, 19 nt, Artificial Sequence
  Description of Artificial Sequence: Synthetic oligonucleotide
ugaaguaccccaaggcauc

SEQ ID NO: 1907178 - RNA, 19 nt, Artificial Sequence
  Description of Artificial Sequence: Synthetic oligonucleotide
ucccaugcaguucugguaa

SEQ ID NO: 1907179 - RNA, 19 nt, Artificial Sequence
  Description of Artificial Sequence: Synthetic oligonucleotide
cacuccuuuaaaaccgugc

SEQ ID NO: 1907180 - RNA, 19 nt, Artificial Sequence
  Description of Artificial Sequence: Synthetic oligonucleotide
agcguguccagcuggcugg

SEQ ID NO: 1907181 - RNA, 19 nt, Artificial Sequence
  Description of Artificial Sequence: Synthetic oligonucleotide
guagccaggugcaucaccg

SEQ ID NO: 1907182 - RNA, 19 nt, Artificial Sequence
  Description of Artificial Sequence: Synthetic oligonucleotide
caucauaggcaaucauggg

SEQ ID NO: 1907183 - RNA, 19 nt, Artificial Sequence
  Description of Artificial Sequence: Synthetic oligonucleotide
uugagucaaguucuggaau

SEQ ID NO: 1907184 - RNA, 19 nt, Artificial Sequence
  Description of Artificial Sequence: Synthetic oligonucleotide
uccaucaguccuuuucccc

SEQ ID NO: 1907185 - RNA, 19 nt, Artificial Sequence
  Description of Artificial Sequence: Synthetic oligonucleotide
acuuggaucagcgugucca

SEQ ID NO: 1907186 - RNA, 19 nt, Artificial Sequence
  Description of Artificial Sequence: Synthetic oligonucleotide
cugugugcaaguuccuucc

SEQ ID NO: 1907187 - RNA, 19 nt, Artificial Sequence
  Description of Artificial Sequence: Synthetic oligonucleotide
ucucauaguuagaaggauu

SEQ ID NO: 1907188 - RNA, 19 nt, Artificial Sequence
  Description of Artificial Sequence: Synthetic oligonucleotide
ucugugugcaaguuccuuc

SEQ ID NO: 1907189 - RNA, 19 nt, Artificial Sequence
  Description of Artificial Sequence: Synthetic oligonucleotide
auggcggccacauaccucu

SEQ ID NO: 1907190 - RNA, 19 nt, Artificial Sequence
  Description of Artificial Sequence: Synthetic oligonucleotide
auaguuagaaggauucacu

SEQ ID NO: 1907191 - RNA, 19 nt, Artificial Sequence
  Description of Artificial Sequence: Synthetic oligonucleotide
cuucuccccaucccgaagg

SEQ ID NO: 1907192 - RNA, 19 nt, Artificial Sequence
  Description of Artificial Sequence: Synthetic oligonucleotide
ugagucaaguucuggaauu

SEQ ID NO: 1907193 - RNA, 19 nt, Artificial Sequence
  Description of Artificial Sequence: Synthetic oligonucleotide
cuucucauaguuagaagga

SEQ ID NO: 1907194 - RNA, 19 nt, Artificial Sequence
  Description of Artificial Sequence: Synthetic oligonucleotide
uacaagcaccaccuggcgc

SEQ ID NO: 1907195 - RNA, 19 nt, Artificial Sequence
  Description of Artificial Sequence: Synthetic oligonucleotide
augucucccaugcaguucu

SEQ ID NO: 1907196 - RNA, 19 nt, Artificial Sequence
  Description of Artificial Sequence: Synthetic oligonucleotide
cucagggagauauagagcu

SEQ ID NO: 1907197 - RNA, 19 nt, Artificial Sequence
  Description of Artificial Sequence: Synthetic oligonucleotide
acccgaugcacauggcucg

SEQ ID NO: 1907198 - RNA, 19 nt, Artificial Sequence
  Description of Artificial Sequence: Synthetic oligonucleotide
gccagaguagcucagggag

SEQ ID NO: 1907199 - RNA, 19 nt, Artificial Sequence
  Description of Artificial Sequence: Synthetic oligonucleotide
auccgaaauuccucgaagu

SEQ ID NO: 1907200 - RNA, 19 nt, Artificial Sequence
  Description of Artificial Sequence: Synthetic oligonucleotide
gcauacaagcaccaccugg

SEQ ID NO: 1907201 - RNA, 19 nt, Artificial Sequence
  Description of Artificial Sequence: Synthetic oligonucleotide
uuaaaaccgugcagaacuc

SEQ ID NO: 1907202 - RNA, 19 nt, Artificial Sequence
  Description of Artificial Sequence: Synthetic oligonucleotide
auagggaauacaguugagu

SEQ ID NO: 1907203 - RNA, 19 nt, Artificial Sequence
  Description of Artificial Sequence: Synthetic oligonucleotide
aggauucacuccuuuaaaa

SEQ ID NO: 1907204 - RNA, 19 nt, Artificial Sequence
  Description of Artificial Sequence: Synthetic oligonucleotide
ggaaucgcugucuccaccg

SEQ ID NO: 1907205 - RNA, 19 nt, Artificial Sequence
  Description of Artificial Sequence: Synthetic oligonucleotide
gugagggaaccucaacccg

SEQ ID NO: 1907206 - RNA, 19 nt, Artificial Sequence
  Description of Artificial Sequence: Synthetic oligonucleotide
uccaugucucccaugcagu

SEQ ID NO: 1907207 - RNA, 19 nt, Artificial Sequence
  Description of Artificial Sequence: Synthetic oligonucleotide
cuguugguguaucuucucc

SEQ ID NO: 1907208 - RNA, 19 nt, Artificial Sequence
  Description of Artificial Sequence: Synthetic oligonucleotide
ggcgguuugccauucacag

SEQ ID NO: 1907209 - RNA, 19 nt, Artificial Sequence
  Description of Artificial Sequence: Synthetic oligonucleotide
cgaaauuccucgaaguucc

SEQ ID NO: 1907210 - RNA, 19 nt, Artificial Sequence
  Description of Artificial Sequence: Synthetic oligonucleotide
uaaaaccgugcagaacucc

SEQ ID NO: 1907211 - RNA, 19 nt, Artificial Sequence
  Description of Artificial Sequence: Synthetic oligonucleotide
aaccgugcagaacucccca

SEQ ID NO: 1907212 - RNA, 19 nt, Artificial Sequence
  Description of Artificial Sequence: Synthetic oligonucleotide
uucuuucucgaagaaggac

SEQ ID NO: 1907213 - RNA, 19 nt, Artificial Sequence
  Description of Artificial Sequence: Synthetic oligonucleotide
uccgaaauuccucgaaguu

SEQ ID NO: 1907214 - RNA, 19 nt, Artificial Sequence
  Description of Artificial Sequence: Synthetic oligonucleotide
guucugguaauguuuagcu

SEQ ID NO: 1907215 - RNA, 19 nt, Artificial Sequence
  Description of Artificial Sequence: Synthetic oligonucleotide
uucacuccuuuaaaaccgu

SEQ ID NO: 1907216 - RNA, 19 nt, Artificial Sequence
  Description of Artificial Sequence: Synthetic oligonucleotide
acugugccacgucuacggc

SEQ ID NO: 1907217 - RNA, 19 nt, Artificial Sequence
  Description of Artificial Sequence: Synthetic oligonucleotide
ucauaguuagaaggauuca

SEQ ID NO: 1907218 - RNA, 19 nt, Artificial Sequence
  Description of Artificial Sequence: Synthetic oligonucleotide
cucauggcauucugcauac

SEQ ID NO: 1907219 - RNA, 19 nt, Artificial Sequence
  Description of Artificial Sequence: Synthetic oligonucleotide
gggaaccucaacccgaugc

SEQ ID NO: 1907220 - RNA, 19 nt, Artificial Sequence
  Description of Artificial Sequence: Synthetic oligonucleotide
aaccccacucucucccuag

SEQ ID NO: 1907221 - RNA, 19 nt, Artificial Sequence
  Description of Artificial Sequence: Synthetic oligonucleotide
guugagucaaguucuggaa

SEQ ID NO: 1907222 - RNA, 19 nt, Artificial Sequence
  Description of Artificial Sequence: Synthetic oligonucleotide
ugucaucacugacucgcca

SEQ ID NO: 1907223 - RNA, 19 nt, Artificial Sequence
  Description of Artificial Sequence: Synthetic oligonucleotide
ucuuuugacccaagagaau

SEQ ID NO: 1907224 - RNA, 19 nt, Artificial Sequence
  Description of Artificial Sequence: Synthetic oligonucleotide
cacgucuacggcuuccaag

SEQ ID NO: 1907225 - RNA, 19 nt, Artificial Sequence
  Description of Artificial Sequence: Synthetic oligonucleotide
uggaaucgcugucuccacc

SEQ ID NO: 1907226 - RNA, 19 nt, Artificial Sequence
  Description of Artificial Sequence: Synthetic oligonucleotide
cucgaagaaggaccagugc

SEQ ID NO: 1907227 - RNA, 19 nt, Artificial Sequence
  Description of Artificial Sequence: Synthetic oligonucleotide
cagccgucggccuuauugg

SEQ ID NO: 1907228 - RNA, 19 nt, Artificial Sequence
  Description of Artificial Sequence: Synthetic oligonucleotide
cuucacaaaguagucugac

SEQ ID NO: 1907229 - RNA, 19 nt, Artificial Sequence
  Description of Artificial Sequence: Synthetic oligonucleotide
uccacgagugccucugcug

SEQ ID NO: 1907230 - RNA, 19 nt, Artificial Sequence
  Description of Artificial Sequence: Synthetic oligonucleotide
ugugccacgucuacggcuu

SEQ ID NO: 1907231 - RNA, 19 nt, Artificial Sequence
  Description of Artificial Sequence: Synthetic oligonucleotide
gcucacuuggaucagcgug

SEQ ID NO: 1907232 - RNA, 19 nt, Artificial Sequence
  Description of Artificial Sequence: Synthetic oligonucleotide
cacaccgaaggacuccggg

SEQ ID NO: 1907233 - RNA, 19 nt, Artificial Sequence
  Description of Artificial Sequence: Synthetic oligonucleotide
cacauggcucgcauagcgg

SEQ ID NO: 1907234 - RNA, 19 nt, Artificial Sequence
  Description of Artificial Sequence: Synthetic oligonucleotide
aauggccgcuguggaaucg

SEQ ID NO: 1907235 - RNA, 19 nt, Artificial Sequence
  Description of Artificial Sequence: Synthetic oligonucleotide
gcacauggcucgcauagcg

SEQ ID NO: 1907236 - RNA, 19 nt, Artificial Sequence
  Description of Artificial Sequence: Synthetic oligonucleotide
caaaguagucugacuggac

SEQ ID NO: 1907237 - RNA, 19 nt, Artificial Sequence
  Description of Artificial Sequence: Synthetic oligonucleotide
ucgcauagcggccccgcag

SEQ ID NO: 1907238 - RNA, 19 nt, Artificial Sequence
  Description of Artificial Sequence: Synthetic oligonucleotide
ugacucgccacugugccac

SEQ ID NO: 1907239 - RNA, 19 nt, Artificial Sequence
  Description of Artificial Sequence: Synthetic oligonucleotide
gggugagggaaccucaacc

SEQ ID NO: 1907240 - RNA, 19 nt, Artificial Sequence
  Description of Artificial Sequence: Synthetic oligonucleotide
auacagugucuucuuuuga

SEQ ID NO: 1907241 - RNA, 19 nt, Artificial Sequence
  Description of Artificial Sequence: Synthetic oligonucleotide
cuuuugacccaagagaaua

SEQ ID NO: 1907242 - RNA, 19 nt, Artificial Sequence
  Description of Artificial Sequence: Synthetic oligonucleotide
aucaccgugucaucacuga

SEQ ID NO: 1907243 - RNA, 19 nt, Artificial Sequence
  Description of Artificial Sequence: Synthetic oligonucleotide
uucucauaguuagaaggau

SEQ ID NO: 1907244 - RNA, 19 nt, Artificial Sequence
  Description of Artificial Sequence: Synthetic oligonucleotide
uucugguaauguuuagcua

SEQ ID NO: 1907245 - RNA, 19 nt, Artificial Sequence
  Description of Artificial Sequence: Synthetic oligonucleotide
ggcaucauaggcaaucaug

SEQ ID NO: 1907246 - RNA, 19 nt, Artificial Sequence
  Description of Artificial Sequence: Synthetic oligonucleotide
auuugucagcuuccacgag

SEQ ID NO: 1907247 - RNA, 19 nt, Artificial Sequence
  Description of Artificial Sequence: Synthetic oligonucleotide
uggcgguuugccauucaca

SEQ ID NO: 1907248 - RNA, 19 nt, Artificial Sequence
  Description of Artificial Sequence: Synthetic oligonucleotide
gauauagagcugaucacgu

SEQ ID NO: 1907249 - RNA, 19 nt, Artificial Sequence
  Description of Artificial Sequence: Synthetic oligonucleotide
aaggaaucuuccagccguc

SEQ ID NO: 1907250 - RNA, 19 nt, Artificial Sequence
  Description of Artificial Sequence: Synthetic oligonucleotide
gcuaauagggaauacaguu

SEQ ID NO: 1907251 - RNA, 19 nt, Artificial Sequence
  Description of Artificial Sequence: Synthetic oligonucleotide
auggcucgcauagcggccc

SEQ ID NO: 1907252 - RNA, 19 nt, Artificial Sequence
  Description of Artificial Sequence: Synthetic oligonucleotide
ugcauacaagcaccaccug

SEQ ID NO: 1907253 - RNA, 19 nt, Artificial Sequence
  Description of Artificial Sequence: Synthetic oligonucleotide
agaaggauucacuccuuua

SEQ ID NO: 1907254 - RNA, 19 nt, Artificial Sequence
  Description of Artificial Sequence: Synthetic oligonucleotide
ggaaucuuccagccgucgg

SEQ ID NO: 1907255 - RNA, 19 nt, Artificial Sequence
  Description of Artificial Sequence: Synthetic oligonucleotide
gccuuauugggcuccagcc

SEQ ID NO: 1907256 - RNA, 19 nt, Artificial Sequence
  Description of Artificial Sequence: Synthetic oligonucleotide
cuccaucaguccuuuuccc

SEQ ID NO: 1907257 - RNA, 19 nt, Artificial Sequence
  Description of Artificial Sequence: Synthetic oligonucleotide
caagguagccuguggggug

SEQ ID NO: 1907258 - RNA, 19 nt, Artificial Sequence
  Description of Artificial Sequence: Synthetic oligonucleotide
ugugugcaaguuccuucca

SEQ ID NO: 1907259 - RNA, 19 nt, Artificial Sequence
  Description of Artificial Sequence: Synthetic oligonucleotide
ucacguuccuucacaccga

SEQ ID NO: 1907260 - RNA, 19 nt, Artificial Sequence
  Description of Artificial Sequence: Synthetic oligonucleotide
uggugggucauccggccac

SEQ ID NO: 1907261 - RNA, 19 nt, Artificial Sequence
  Description of Artificial Sequence: Synthetic oligonucleotide
ucacagcauacgcuguaaa

SEQ ID NO: 1907262 - RNA, 19 nt, Artificial Sequence
  Description of Artificial Sequence: Synthetic oligonucleotide
ugguguaucuucuccccau

SEQ ID NO: 1907263 - RNA, 19 nt, Artificial Sequence
  Description of Artificial Sequence: Synthetic oligonucleotide
ugcuacaggcggucuuggg

SEQ ID NO: 1907264 - RNA, 19 nt, Artificial Sequence
  Description of Artificial Sequence: Synthetic oligonucleotide
guagccugugggguggugg

SEQ ID NO: 1907265 - RNA, 19 nt, Artificial Sequence
  Description of Artificial Sequence: Synthetic oligonucleotide
aaccucaacccgaugcaca

SEQ ID NO: 1907266 - RNA, 19 nt, Artificial Sequence
  Description of Artificial Sequence: Synthetic oligonucleotide
acaccgaaggacuccggga

SEQ ID NO: 1907267 - RNA, 19 nt, Artificial Sequence
  Description of Artificial Sequence: Synthetic oligonucleotide
cauggcucgcauagcggcc

SEQ ID NO: 1907268 - RNA, 19 nt, Artificial Sequence
  Description of Artificial Sequence: Synthetic oligonucleotide
gaacucccacuucccauug

SEQ ID NO: 1907269 - RNA, 19 nt, Artificial Sequence
  Description of Artificial Sequence: Synthetic oligonucleotide
cacuacugccaccccagcc

SEQ ID NO: 1907270 - RNA, 19 nt, Artificial Sequence
  Description of Artificial Sequence: Synthetic oligonucleotide
accgugcagaacuccccac

SEQ ID NO: 1907271 - RNA, 19 nt, Artificial Sequence
  Description of Artificial Sequence: Synthetic oligonucleotide
ccauugaaguaccccaagg

SEQ ID NO: 1907272 - RNA, 19 nt, Artificial Sequence
  Description of Artificial Sequence: Synthetic oligonucleotide
agucugacuggacaaugua

SEQ ID NO: 1907273 - RNA, 19 nt, Artificial Sequence
  Description of Artificial Sequence: Synthetic oligonucleotide
acuugccauccgaaauucc

SEQ ID NO: 1907274 - RNA, 19 nt, Artificial Sequence
  Description of Artificial Sequence: Synthetic oligonucleotide
acggcuuccaagucuccca

SEQ ID NO: 1907275 - RNA, 19 nt, Artificial Sequence
  Description of Artificial Sequence: Synthetic oligonucleotide
aagagaauacagagcccgu

SEQ ID NO: 1907276 - RNA, 19 nt, Artificial Sequence
  Description of Artificial Sequence: Synthetic oligonucleotide
uuuccccacugccguggcg

SEQ ID NO: 1907277 - RNA, 19 nt, Artificial Sequence
  Description of Artificial Sequence: Synthetic oligonucleotide
acucccacuucccauugaa

SEQ ID NO: 1907278 - RNA, 19 nt, Artificial Sequence
  Description of Artificial Sequence: Synthetic oligonucleotide
guuccuucacaccgaagga

SEQ ID NO: 1907279 - RNA, 19 nt, Artificial Sequence
  Description of Artificial Sequence: Synthetic oligonucleotide
agccgucggccuuauuggg

SEQ ID NO: 1907280 - RNA, 19 nt, Artificial Sequence
  Description of Artificial Sequence: Synthetic oligonucleotide
aucacugacucgccacugu

SEQ ID NO: 1907281 - RNA, 19 nt, Artificial Sequence
  Description of Artificial Sequence: Synthetic oligonucleotide
ucacaccgaaggacuccgg

SEQ ID NO: 1907282 - RNA, 19 nt, Artificial Sequence
  Description of Artificial Sequence: Synthetic oligonucleotide
auauagagcugaucacguu

SEQ ID NO: 1907283 - RNA, 19 nt, Artificial Sequence
  Description of Artificial Sequence: Synthetic oligonucleotide
cacucagcaccauggcggc

SEQ ID NO: 1907284 - RNA, 19 nt, Artificial Sequence
  Description of Artificial Sequence: Synthetic oligonucleotide
cugcauacaagcaccaccu

SEQ ID NO: 1907285 - RNA, 19 nt, Artificial Sequence
  Description of Artificial Sequence: Synthetic oligonucleotide
gggaauacaguugagucaa

SEQ ID NO: 1907286 - RNA, 19 nt, Artificial Sequence
  Description of Artificial Sequence: Synthetic oligonucleotide
cugaucacguuccuucaca

SEQ ID NO: 1907287 - RNA, 19 nt, Artificial Sequence
  Description of Artificial Sequence: Synthetic oligonucleotide
cgugucaucacugacucgc

SEQ ID NO: 1907288 - RNA, 19 nt, Artificial Sequence
  Description of Artificial Sequence: Synthetic oligonucleotide
agccagaguagcucaggga

SEQ ID NO: 1907289 - RNA, 19 nt, Artificial Sequence
  Description of Artificial Sequence: Synthetic oligonucleotide
cucucaaugcucacuugga

SEQ ID NO: 1907290 - RNA, 19 nt, Artificial Sequence
  Description of Artificial Sequence: Synthetic oligonucleotide
aucguguccacuacugcca

SEQ ID NO: 1907291 - RNA, 19 nt, Artificial Sequence
  Description of Artificial Sequence: Synthetic oligonucleotide
ucgccacugugccacgucu

SEQ ID NO: 1907292 - RNA, 19 nt, Artificial Sequence
  Description of Artificial Sequence: Synthetic oligonucleotide
uuucucgaagaaggaccag

SEQ ID NO: 1907293 - RNA, 19 nt, Artificial Sequence
  Description of Artificial Sequence: Synthetic oligonucleotide
ucaacccgaugcacauggc

SEQ ID NO: 1907294 - RNA, 19 nt, Artificial Sequence
  Description of Artificial Sequence: Synthetic oligonucleotide
ugucagcuuccacgagugc

SEQ ID NO: 1907295 - RNA, 19 nt, Artificial Sequence
  Description of Artificial Sequence: Synthetic oligonucleotide
cuguggaaucgcugucucc

SEQ ID NO: 1907296 - RNA, 19 nt, Artificial Sequence
  Description of Artificial Sequence: Synthetic oligonucleotide
ucguguccacuacugccac

SEQ ID NO: 1907297 - RNA, 19 nt, Artificial Sequence
  Description of Artificial Sequence: Synthetic oligonucleotide
gugcaaguuccuuccagga

SEQ ID NO: 1907298 - RNA, 19 nt, Artificial Sequence
  Description of Artificial Sequence: Synthetic oligonucleotide
caguugagucaaguucugg

SEQ ID NO: 1907299 - RNA, 19 nt, Artificial Sequence
  Description of Artificial Sequence: Synthetic oligonucleotide
aacucccacuucccauuga

SEQ ID NO: 1907300 - RNA, 19 nt, Artificial Sequence
  Description of Artificial Sequence: Synthetic oligonucleotide
ugguagcaccuccaucagu

SEQ ID NO: 1907301 - RNA, 19 nt, Artificial Sequence
  Description of Artificial Sequence: Synthetic oligonucleotide
cacagcauacgcuguaaaa

SEQ ID NO: 1907302 - RNA, 19 nt, Artificial Sequence
  Description of Artificial Sequence: Synthetic oligonucleotide
uucacagcauacgcuguaa

SEQ ID NO: 1907303 - RNA, 19 nt, Artificial Sequence
  Description of Artificial Sequence: Synthetic oligonucleotide
caguccuuuuccccacugc

SEQ ID NO: 1907304 - RNA, 19 nt, Artificial Sequence
  Description of Artificial Sequence: Synthetic oligonucleotide
ccagugcugaagauuuucc

SEQ ID NO: 1907305 - RNA, 19 nt, Artificial Sequence
  Description of Artificial Sequence: Synthetic oligonucleotide
caguucugguaauguuuag

SEQ ID NO: 1907306 - RNA, 19 nt, Artificial Sequence
  Description of Artificial Sequence: Synthetic oligonucleotide
ccagccgucggccuuauug

SEQ ID NO: 1907307 - RNA, 19 nt, Artificial Sequence
  Description of Artificial Sequence: Synthetic oligonucleotide
ugggucauccggccacucu

SEQ ID NO: 1907308 - RNA, 19 nt, Artificial Sequence
  Description of Artificial Sequence: Synthetic oligonucleotide
gaaccucaacccgaugcac

SEQ ID NO: 1907309 - RNA, 19 nt, Artificial Sequence
  Description of Artificial Sequence: Synthetic oligonucleotide
uccggccacucucaaugcu

SEQ ID NO: 1907310 - RNA, 19 nt, Artificial Sequence
  Description of Artificial Sequence: Synthetic oligonucleotide
guuuagcuaauagggaaua

SEQ ID NO: 1907311 - RNA, 19 nt, Artificial Sequence
  Description of Artificial Sequence: Synthetic oligonucleotide
gacuccgggaagacaggag

SEQ ID NO: 1907312 - RNA, 19 nt, Artificial Sequence
  Description of Artificial Sequence: Synthetic oligonucleotide
ugccguggcgguuugccau

SEQ ID NO: 1907313 - RNA, 19 nt, Artificial Sequence
  Description of Artificial Sequence: Synthetic oligonucleotide
ggaaccucaacccgaugca

SEQ ID NO: 1907314 - RNA, 19 nt, Artificial Sequence
  Description of Artificial Sequence: Synthetic oligonucleotide
gacgcaaggcuuccaaggu

SEQ ID NO: 1907315 - RNA, 19 nt, Artificial Sequence
  Description of Artificial Sequence: Synthetic oligonucleotide
ugcucacuuggaucagcgu

SEQ ID NO: 1907316 - RNA, 19 nt, Artificial Sequence
  Description of Artificial Sequence: Synthetic oligonucleotide
uucugcauacaagcaccac

SEQ ID NO: 1907317 - RNA, 19 nt, Artificial Sequence
  Description of Artificial Sequence: Synthetic oligonucleotide
cucacuuggaucagcgugu

SEQ ID NO: 1907318 - RNA, 19 nt, Artificial Sequence
  Description of Artificial Sequence: Synthetic oligonucleotide
guggcgguuugccauucac

SEQ ID NO: 1907319 - RNA, 19 nt, Artificial Sequence
  Description of Artificial Sequence: Synthetic oligonucleotide
gccgcacucagcaccaugg

SEQ ID NO: 1907320 - RNA, 19 nt, Artificial Sequence
  Description of Artificial Sequence: Synthetic oligonucleotide
cauggcggccacauaccuc

SEQ ID NO: 1907321 - RNA, 19 nt, Artificial Sequence
  Description of Artificial Sequence: Synthetic oligonucleotide
acaguugagucaaguucug

SEQ ID NO: 1907322 - RNA, 19 nt, Artificial Sequence
  Description of Artificial Sequence: Synthetic oligonucleotide
cagcguguccagcuggcug

SEQ ID NO: 1907323 - RNA, 19 nt, Artificial Sequence
  Description of Artificial Sequence: Synthetic oligonucleotide
ggccuuauugggcuccagc

SEQ ID NO: 1907324 - RNA, 19 nt, Artificial Sequence
  Description of Artificial Sequence: Synthetic oligonucleotide
agcaccauggcggccacau

SEQ ID NO: 1907325 - RNA, 19 nt, Artificial Sequence
  Description of Artificial Sequence: Synthetic oligonucleotide
cgaagaaggaccagugcug

SEQ ID NO: 1907326 - RNA, 19 nt, Artificial Sequence
  Description of Artificial Sequence: Synthetic oligonucleotide
gguggugggucauccggcc

SEQ ID NO: 1907327 - RNA, 19 nt, Artificial Sequence
  Description of Artificial Sequence: Synthetic oligonucleotide
ucgaaguuccagguacuuu

SEQ ID NO: 1907328 - RNA, 19 nt, Artificial Sequence
  Description of Artificial Sequence: Synthetic oligonucleotide
aaggcucugugugcaaguu

SEQ ID NO: 1907329 - RNA, 19 nt, Artificial Sequence
  Description of Artificial Sequence: Synthetic oligonucleotide
agggcaucauaggcaauca

SEQ ID NO: 1907330 - RNA, 19 nt, Artificial Sequence
  Description of Artificial Sequence: Synthetic oligonucleotide
caugucucccaugcaguuc

SEQ ID NO: 1907331 - RNA, 19 nt, Artificial Sequence
  Description of Artificial Sequence: Synthetic oligonucleotide
ugguaauguuuagcuaaua

SEQ ID NO: 1907332 - RNA, 19 nt, Artificial Sequence
  Description of Artificial Sequence: Synthetic oligonucleotide
gaaggacuccgggaagaca

SEQ ID NO: 1907333 - RNA, 19 nt, Artificial Sequence
  Description of Artificial Sequence: Synthetic oligonucleotide
cucgcggcuguugaaagga

SEQ ID NO: 1907334 - RNA, 19 nt, Artificial Sequence
  Description of Artificial Sequence: Synthetic oligonucleotide
ccgaaauuccucgaaguuc

SEQ ID NO: 1907335 - RNA, 19 nt, Artificial Sequence
  Description of Artificial Sequence: Synthetic oligonucleotide
cagcuucucauaguuagaa

SEQ ID NO: 1907336 - RNA, 19 nt, Artificial Sequence
  Description of Artificial Sequence: Synthetic oligonucleotide
ucauccggccacucucaau

SEQ ID NO: 1907337 - RNA, 19 nt, Artificial Sequence
  Description of Artificial Sequence: Synthetic oligonucleotide
guggaaucgcugucuccac

SEQ ID NO: 1907338 - RNA, 19 nt, Artificial Sequence
  Description of Artificial Sequence: Synthetic oligonucleotide
gucuacggcuuccaagucu

SEQ ID NO: 1907339 - RNA, 19 nt, Artificial Sequence
  Description of Artificial Sequence: Synthetic oligonucleotide
acgcaaggcuuccaaggua

SEQ ID NO: 1907340 - RNA, 19 nt, Artificial Sequence
  Description of Artificial Sequence: Synthetic oligonucleotide
agccgcacucagcaccaug

SEQ ID NO: 1907341 - RNA, 19 nt, Artificial Sequence
  Description of Artificial Sequence: Synthetic oligonucleotide
cuacggcuuccaagucucc

SEQ ID NO: 1907342 - RNA, 19 nt, Artificial Sequence
  Description of Artificial Sequence: Synthetic oligonucleotide
ugucucccaugcaguucug

SEQ ID NO: 1907343 - RNA, 19 nt, Artificial Sequence
  Description of Artificial Sequence: Synthetic oligonucleotide
uagccaggugcaucaccgu

SEQ ID NO: 1907344 - RNA, 19 nt, Artificial Sequence
  Description of Artificial Sequence: Synthetic oligonucleotide
caauggccgcuguggaauc

SEQ ID NO: 1907345 - RNA, 19 nt, Artificial Sequence
  Description of Artificial Sequence: Synthetic oligonucleotide
cugacuugccauccgaaau

SEQ ID NO: 1907346 - RNA, 19 nt, Artificial Sequence
  Description of Artificial Sequence: Synthetic oligonucleotide
cuuccacgagugccucugc

SEQ ID NO: 1907347 - RNA, 19 nt, Artificial Sequence
  Description of Artificial Sequence: Synthetic oligonucleotide
gacucgccacugugccacg

SEQ ID NO: 1907348 - RNA, 19 nt, Artificial Sequence
  Description of Artificial Sequence: Synthetic oligonucleotide
gggucauccggccacucuc

SEQ ID NO: 1907349 - RNA, 19 nt, Artificial Sequence
  Description of Artificial Sequence: Synthetic oligonucleotide
cacuuggaucagcgugucc

SEQ ID NO: 1907350 - RNA, 19 nt, Artificial Sequence
  Description of Artificial Sequence: Synthetic oligonucleotide
ccacuucccauugaaguac

SEQ ID NO: 1907351 - RNA, 19 nt, Artificial Sequence
  Description of Artificial Sequence: Synthetic oligonucleotide
aggacuccgggaagacagg

SEQ ID NO: 1907352 - RNA, 19 nt, Artificial Sequence
  Description of Artificial Sequence: Synthetic oligonucleotide
ugccacgucuacggcuucc

SEQ ID NO: 1907353 - RNA, 19 nt, Artificial Sequence
  Description of Artificial Sequence: Synthetic oligonucleotide
gugcaucaccgugucauca

SEQ ID NO: 1907354 - RNA, 19 nt, Artificial Sequence
  Description of Artificial Sequence: Synthetic oligonucleotide
gugucaucacugacucgcc

SEQ ID NO: 1907355 - RNA, 19 nt, Artificial Sequence
  Description of Artificial Sequence: Synthetic oligonucleotide
cccauugaaguaccccaag

SEQ ID NO: 1907356 - RNA, 19 nt, Artificial Sequence
  Description of Artificial Sequence: Synthetic oligonucleotide
uggcgcccggccauccaug

SEQ ID NO: 1907357 - RNA, 19 nt, Artificial Sequence
  Description of Artificial Sequence: Synthetic oligonucleotide
acccaugcugagcuugcua

SEQ ID NO: 1907358 - RNA, 19 nt, Artificial Sequence
  Description of Artificial Sequence: Synthetic oligonucleotide
caccgugucaucacugacu

SEQ ID NO: 1907359 - RNA, 19 nt, Artificial Sequence
  Description of Artificial Sequence: Synthetic oligonucleotide
ucgcggcuguugaaaggaa

SEQ ID NO: 1907360 - RNA, 19 nt, Artificial Sequence
  Description of Artificial Sequence: Synthetic oligonucleotide
agggaaccucaacccgaug

SEQ ID NO: 1907361 - RNA, 19 nt, Artificial Sequence
  Description of Artificial Sequence: Synthetic oligonucleotide
uggccgcuguggaaucgcu

SEQ ID NO: 1907362 - RNA, 19 nt, Artificial Sequence
  Description of Artificial Sequence: Synthetic oligonucleotide
ccaucccgaaggaacuccc

SEQ ID NO: 1907363 - RNA, 19 nt, Artificial Sequence
  Description of Artificial Sequence: Synthetic oligonucleotide
caucccgaaggaacuccca

SEQ ID NO: 1907364 - RNA, 19 nt, Artificial Sequence
  Description of Artificial Sequence: Synthetic oligonucleotide
ucagcguguccagcuggcu

SEQ ID NO: 1907365 - RNA, 19 nt, Artificial Sequence
  Description of Artificial Sequence: Synthetic oligonucleotide
cccaaggcaucuccagccg

SEQ ID NO: 1907366 - RNA, 19 nt, Artificial Sequence
  Description of Artificial Sequence: Synthetic oligonucleotide
cugguaauguuuagcuaau

SEQ ID NO: 1907367 - RNA, 19 nt, Artificial Sequence
  Description of Artificial Sequence: Synthetic oligonucleotide
caacccgaugcacauggcu

SEQ ID NO: 1907368 - RNA, 19 nt, Artificial Sequence
  Description of Artificial Sequence: Synthetic oligonucleotide
ccaaggcaucuccagccgc

SEQ ID NO: 1907369 - RNA, 19 nt, Artificial Sequence
  Description of Artificial Sequence: Synthetic oligonucleotide
caagcaccaccuggcgccc

SEQ ID NO: 1907370 - RNA, 19 nt, Artificial Sequence
  Description of Artificial Sequence: Synthetic oligonucleotide
gcaguucugguaauguuua

SEQ ID NO: 1907371 - RNA, 19 nt, Artificial Sequence
  Description of Artificial Sequence: Synthetic oligonucleotide
gcggcuguugaaaggaauc

SEQ ID NO: 1907372 - RNA, 19 nt, Artificial Sequence
  Description of Artificial Sequence: Synthetic oligonucleotide
cucgccacugugccacguc

SEQ ID NO: 1907373 - RNA, 19 nt, Artificial Sequence
  Description of Artificial Sequence: Synthetic oligonucleotide
gccacugugccacgucuac

SEQ ID NO: 1907374 - RNA, 19 nt, Artificial Sequence
  Description of Artificial Sequence: Synthetic oligonucleotide
gaaguaccccaaggcaucu

SEQ ID NO: 1907375 - RNA, 19 nt, Artificial Sequence
  Description of Artificial Sequence: Synthetic oligonucleotide
ccucgcggcuguugaaagg

SEQ ID NO: 1907376 - RNA, 19 nt, Artificial Sequence
  Description of Artificial Sequence: Synthetic oligonucleotide
ggugcaucaccgugucauc

SEQ ID NO: 1907377 - RNA, 19 nt, Artificial Sequence
  Description of Artificial Sequence: Synthetic oligonucleotide
gaaucgcugucuccaccgu

SEQ ID NO: 1907378 - RNA, 19 nt, Artificial Sequence
  Description of Artificial Sequence: Synthetic oligonucleotide
agcugacuugccauccgaa

SEQ ID NO: 1907379 - RNA, 19 nt, Artificial Sequence
  Description of Artificial Sequence: Synthetic oligonucleotide
gcugacgcaaggcuuccaa

SEQ ID NO: 1907380 - RNA, 19 nt, Artificial Sequence
  Description of Artificial Sequence: Synthetic oligonucleotide
accuggcgcccggccaucc

SEQ ID NO: 1907381 - RNA, 19 nt, Artificial Sequence
  Description of Artificial Sequence: Synthetic oligonucleotide
ggaauacaguugagucaag

SEQ ID NO: 1907382 - RNA, 19 nt, Artificial Sequence
  Description of Artificial Sequence: Synthetic oligonucleotide
cugacucgccacugugcca

SEQ ID NO: 1907383 - RNA, 19 nt, Artificial Sequence
  Description of Artificial Sequence: Synthetic oligonucleotide
caaauacagugucuucuuu

SEQ ID NO: 1907384 - RNA, 19 nt, Artificial Sequence
  Description of Artificial Sequence: Synthetic oligonucleotide
ggggcaucguguccacuac

SEQ ID NO: 1907385 - RNA, 19 nt, Artificial Sequence
  Description of Artificial Sequence: Synthetic oligonucleotide
guggugggucauccggcca

SEQ ID NO: 1907386 - RNA, 19 nt, Artificial Sequence
  Description of Artificial Sequence: Synthetic oligonucleotide
cugugccacgucuacggcu

SEQ ID NO: 1907387 - RNA, 19 nt, Artificial Sequence
  Description of Artificial Sequence: Synthetic oligonucleotide
ggggugagggaaccucaac

SEQ ID NO: 1907388 - RNA, 19 nt, Artificial Sequence
  Description of Artificial Sequence: Synthetic oligonucleotide
ccggccacucucaaugcuc

SEQ ID NO: 1907389 - RNA, 19 nt, Artificial Sequence
  Description of Artificial Sequence: Synthetic oligonucleotide
aguagcucagggagauaua

SEQ ID NO: 1907390 - RNA, 19 nt, Artificial Sequence
  Description of Artificial Sequence: Synthetic oligonucleotide
ggaccagugcugaagauuu

SEQ ID NO: 1907391 - RNA, 19 nt, Artificial Sequence
  Description of Artificial Sequence: Synthetic oligonucleotide
acccucgcggcuguugaaa

SEQ ID NO: 1907392 - RNA, 19 nt, Artificial Sequence
  Description of Artificial Sequence: Synthetic oligonucleotide
cuccagccgcacucagcac

SEQ ID NO: 1907393 - RNA, 19 nt, Artificial Sequence
  Description of Artificial Sequence: Synthetic oligonucleotide
agcuugcuacaggcggucu

SEQ ID NO: 1907394 - RNA, 19 nt, Artificial Sequence
  Description of Artificial Sequence: Synthetic oligonucleotide
cccaucccgaaggaacucc

SEQ ID NO: 1907395 - RNA, 19 nt, Artificial Sequence
  Description of Artificial Sequence: Synthetic oligonucleotide
gccgcuguggaaucgcugu

SEQ ID NO: 1907396 - RNA, 19 nt, Artificial Sequence
  Description of Artificial Sequence: Synthetic oligonucleotide
cccucgcggcuguugaaag

SEQ ID NO: 1907397 - RNA, 19 nt, Artificial Sequence
  Description of Artificial Sequence: Synthetic oligonucleotide
ggaacucccacuucccauu

SEQ ID NO: 1907398 - RNA, 19 nt, Artificial Sequence
  Description of Artificial Sequence: Synthetic oligonucleotide
cccacuucccauugaagua

SEQ ID NO: 1907399 - RNA, 19 nt, Artificial Sequence
  Description of Artificial Sequence: Synthetic oligonucleotide
gucauccggccacucucaa

SEQ ID NO: 1907400 - RNA, 19 nt, Artificial Sequence
  Description of Artificial Sequence: Synthetic oligonucleotide
cugccguggcgguuugcca

SEQ ID NO: 1907401 - RNA, 19 nt, Artificial Sequence
  Description of Artificial Sequence: Synthetic oligonucleotide
gccgucggccuuauugggc

SEQ ID NO: 1907402 - RNA, 19 nt, Artificial Sequence
  Description of Artificial Sequence: Synthetic oligonucleotide
ccacugugccacgucuacg

SEQ ID NO: 1907403 - RNA, 19 nt, Artificial Sequence
  Description of Artificial Sequence: Synthetic oligonucleotide
cccacccaugcugagcuug

SEQ ID NO: 1907404 - RNA, 19 nt, Artificial Sequence
  Description of Artificial Sequence: Synthetic oligonucleotide
gagggaaccucaacccgau

SEQ ID NO: 1907405 - RNA, 19 nt, Artificial Sequence
  Description of Artificial Sequence: Synthetic oligonucleotide
ggacuccgggaagacagga

SEQ ID NO: 1907406 - RNA, 19 nt, Artificial Sequence
  Description of Artificial Sequence: Synthetic oligonucleotide
cucgcauagcggccccgca

SEQ ID NO: 1907407 - RNA, 19 nt, Artificial Sequence
  Description of Artificial Sequence: Synthetic oligonucleotide
ggucauccggccacucuca

SEQ ID NO: 1907408 - RNA, 19 nt, Artificial Sequence
  Description of Artificial Sequence: Synthetic oligonucleotide
gcaauggccgcuguggaau

SEQ ID NO: 1907409 - RNA, 19 nt, Artificial Sequence
  Description of Artificial Sequence: Synthetic oligonucleotide
gcaaggcuuccaagguagc

SEQ ID NO: 1907410 - RNA, 19 nt, Artificial Sequence
  Description of Artificial Sequence: Synthetic oligonucleotide
acucgccacugugccacgu

SEQ ID NO: 1907411 - RNA, 19 nt, Artificial Sequence
  Description of Artificial Sequence: Synthetic oligonucleotide
ccgugucaucacugacucg

SEQ ID NO: 1907412 - RNA, 19 nt, Artificial Sequence
  Description of Artificial Sequence: Synthetic oligonucleotide
ccauccgaaauuccucgaa

SEQ ID NO: 1907413 - RNA, 19 nt, Artificial Sequence
  Description of Artificial Sequence: Synthetic oligonucleotide
ccuuauugggcuccagccu

SEQ ID NO: 1907414 - RNA, 19 nt, Artificial Sequence
  Description of Artificial Sequence: Synthetic oligonucleotide
ccgcacucagcaccauggc

SEQ ID NO: 1907415 - RNA, 19 nt, Artificial Sequence
  Description of Artificial Sequence: Synthetic oligonucleotide
ccgaaggaacucccacuuc

SEQ ID NO: 1907416 - RNA, 19 nt, Artificial Sequence
  Description of Artificial Sequence: Synthetic oligonucleotide
uggcggccacauaccucuc

SEQ ID NO: 1907417 - RNA, 19 nt, Artificial Sequence
  Description of Artificial Sequence: Synthetic oligonucleotide
cacgagugccucugcugua

SEQ ID NO: 1907418 - RNA, 19 nt, Artificial Sequence
  Description of Artificial Sequence: Synthetic oligonucleotide
gcucgcauagcggccccgc

SEQ ID NO: 1907419 - RNA, 19 nt, Artificial Sequence
  Description of Artificial Sequence: Synthetic oligonucleotide
ccagccgcacucagcacca

SEQ ID NO: 1907420 - RNA, 19 nt, Artificial Sequence
  Description of Artificial Sequence: Synthetic oligonucleotide
cccauucuuucucgaagaa

SEQ ID NO: 1907421 - RNA, 19 nt, Artificial Sequence
  Description of Artificial Sequence: Synthetic oligonucleotide
gggaagacaggagcugacu

SEQ ID NO: 1907422 - RNA, 19 nt, Artificial Sequence
  Description of Artificial Sequence: Synthetic oligonucleotide
ggccgcuguggaaucgcug

SEQ ID NO: 1907423 - RNA, 19 nt, Artificial Sequence
  Description of Artificial Sequence: Synthetic oligonucleotide
cagguacuuuucccauucu

SEQ ID NO: 1907424 - RNA, 19 nt, Artificial Sequence
  Description of Artificial Sequence: Synthetic oligonucleotide
cuuccagccgucggccuua

SEQ ID NO: 1907425 - RNA, 19 nt, Artificial Sequence
  Description of Artificial Sequence: Synthetic oligonucleotide
ucucucccuaggggccaaa

SEQ ID NO: 1907426 - RNA, 19 nt, Artificial Sequence
  Description of Artificial Sequence: Synthetic oligonucleotide
ccacgagugccucugcugu

SEQ ID NO: 1907427 - RNA, 19 nt, Artificial Sequence
  Description of Artificial Sequence: Synthetic oligonucleotide
gccacucucaaugcucacu

SEQ ID NO: 1907428 - RNA, 19 nt, Artificial Sequence
  Description of Artificial Sequence: Synthetic oligonucleotide
cccgaugcacauggcucgc

SEQ ID NO: 1907429 - RNA, 19 nt, Artificial Sequence
  Description of Artificial Sequence: Synthetic oligonucleotide
gugggucauccggccacuc

SEQ ID NO: 1907430 - RNA, 19 nt, Artificial Sequence
  Description of Artificial Sequence: Synthetic oligonucleotide
gccacgucuacggcuucca

SEQ ID NO: 1907431 - RNA, 19 nt, Artificial Sequence
  Description of Artificial Sequence: Synthetic oligonucleotide
ccgggaagacaggagcuga

SEQ ID NO: 1907432 - RNA, 19 nt, Artificial Sequence
  Description of Artificial Sequence: Synthetic oligonucleotide
ccuaggggccaaauacagu

SEQ ID NO: 1907433 - RNA, 19 nt, Artificial Sequence
  Description of Artificial Sequence: Synthetic oligonucleotide
gccacccucgcggcuguug

SEQ ID NO: 1907434 - RNA, 19 nt, Artificial Sequence
  Description of Artificial Sequence: Synthetic oligonucleotide
gggcaucguguccacuacu

SEQ ID NO: 1907435 - RNA, 19 nt, Artificial Sequence
  Description of Artificial Sequence: Synthetic oligonucleotide
ccacccucgcggcuguuga

SEQ ID NO: 1907436 - RNA, 19 nt, Artificial Sequence
  Description of Artificial Sequence: Synthetic oligonucleotide
cggccacucucaaugcuca

SEQ ID NO: 1907437 - RNA, 19 nt, Artificial Sequence
  Description of Artificial Sequence: Synthetic oligonucleotide
ccgcuguggaaucgcuguc

SEQ ID NO: 1907438 - RNA, 19 nt, Artificial Sequence
  Description of Artificial Sequence: Synthetic oligonucleotide
ccgucggccuuauugggcu

SEQ ID NO: 1907439 - RNA, 19 nt, Artificial Sequence
  Description of Artificial Sequence: Synthetic oligonucleotide
cacccucgcggcuguugaa

SEQ ID NO: 1907440 - RNA, 19 nt, Artificial Sequence
  Description of Artificial Sequence: Synthetic oligonucleotide
agagcccgugcugccucuu

SEQ ID NO: 1907441 - RNA, 19 nt, Artificial Sequence
  Description of Artificial Sequence: Synthetic oligonucleotide
cgucuacggcuuccaaguc

SEQ ID NO: 1907442 - RNA, 19 nt, Artificial Sequence
  Description of Artificial Sequence: Synthetic oligonucleotide
cccgaaggaacucccacuu

SEQ ID NO: 1907443 - RNA, 19 nt, Artificial Sequence
  Description of Artificial Sequence: Synthetic oligonucleotide
ccucgaaguuccagguacu

SEQ ID NO: 1907444 - RNA, 19 nt, Artificial Sequence
  Description of Artificial Sequence: Synthetic oligonucleotide
cccggccauccaugucucc

SEQ ID NO: 1907445 - RNA, 19 nt, Artificial Sequence
  Description of Artificial Sequence: Synthetic oligonucleotide
cuggcgcccggccauccau

SEQ ID NO: 1907446 - RNA, 19 nt, Artificial Sequence
  Description of Artificial Sequence: Synthetic oligonucleotide
caccuggcgcccggccauc

SEQ ID NO: 1907447 - RNA, 19 nt, Artificial Sequence
  Description of Artificial Sequence: Synthetic oligonucleotide
ccaugucucccaugcaguu

SEQ ID NO: 1907448 - RNA, 19 nt, Artificial Sequence
  Description of Artificial Sequence: Synthetic oligonucleotide
ggugggucauccggccacu

SEQ ID NO: 1907449 - RNA, 19 nt, Artificial Sequence
  Description of Artificial Sequence: Synthetic oligonucleotide
cucucccuaggggccaaau

SEQ ID NO: 1907450 - RNA, 19 nt, Artificial Sequence
  Description of Artificial Sequence: Synthetic oligonucleotide
ccacugccguggcgguuug

SEQ ID NO: 1907451 - RNA, 19 nt, Artificial Sequence
  Description of Artificial Sequence: Synthetic oligonucleotide
gcucugugugcaaguuccu

SEQ ID NO: 1907452 - RNA, 19 nt, Artificial Sequence
  Description of Artificial Sequence: Synthetic oligonucleotide
ccacgucuacggcuuccaa

SEQ ID NO: 1907453 - RNA, 19 nt, Artificial Sequence
  Description of Artificial Sequence: Synthetic oligonucleotide
gcgcccggccauccauguc

SEQ ID NO: 1907454 - RNA, 19 nt, Artificial Sequence
  Description of Artificial Sequence: Synthetic oligonucleotide
gcaccauggcggccacaua

SEQ ID NO: 1907455 - RNA, 19 nt, Artificial Sequence
  Description of Artificial Sequence: Synthetic oligonucleotide
gccccgcagccacccucgc

SEQ ID NO: 1907456 - RNA, 19 nt, Artificial Sequence
  Description of Artificial Sequence: Synthetic oligonucleotide
ccguggcgguuugccauuc

SEQ ID NO: 1907457 - RNA, 19 nt, Artificial Sequence
  Description of Artificial Sequence: Synthetic oligonucleotide
cugccaccccagccagagu

SEQ ID NO: 1907458 - RNA, 19 nt, Artificial Sequence
  Description of Artificial Sequence: Synthetic oligonucleotide
cgcggcuguugaaaggaau

SEQ ID NO: 1907459 - RNA, 19 nt, Artificial Sequence
  Description of Artificial Sequence: Synthetic oligonucleotide
cgcuguggaaucgcugucu

SEQ ID NO: 1907460 - RNA, 19 nt, Artificial Sequence
  Description of Artificial Sequence: Synthetic oligonucleotide
ggagggcaucauaggcaau

SEQ ID NO: 1907461 - RNA, 19 nt, Artificial Sequence
  Description of Artificial Sequence: Synthetic oligonucleotide
cguggcgguuugccauuca

SEQ ID NO: 1907462 - RNA, 19 nt, Artificial Sequence
  Description of Artificial Sequence: Synthetic oligonucleotide
cggccuuauugggcuccag

SEQ ID NO: 1907463 - RNA, 19 nt, Artificial Sequence
  Description of Artificial Sequence: Synthetic oligonucleotide
ccaccuggcgcccggccau

SEQ ID NO: 1907464 - RNA, 19 nt, Artificial Sequence
  Description of Artificial Sequence: Synthetic oligonucleotide
cccacugccguggcgguuu

SEQ ID NO: 1907465 - RNA, 19 nt, Artificial Sequence
  Description of Artificial Sequence: Synthetic oligonucleotide
cggccacauaccucuccau

SEQ ID NO: 1907466 - RNA, 19 nt, Artificial Sequence
  Description of Artificial Sequence: Synthetic oligonucleotide
cagccgcacucagcaccau

SEQ ID NO: 1907467 - RNA, 19 nt, Artificial Sequence
  Description of Artificial Sequence: Synthetic oligonucleotide
ccccacccaugcugagcuu

SEQ ID NO: 1907468 - RNA, 19 nt, Artificial Sequence
  Description of Artificial Sequence: Synthetic oligonucleotide
ccccacugccguggcgguu

SEQ ID NO: 1907469 - RNA, 19 nt, Artificial Sequence
  Description of Artificial Sequence: Synthetic oligonucleotide
ucuagaaucagauaaacuc

SEQ ID NO: 1907470 - RNA, 19 nt, Artificial Sequence
  Description of Artificial Sequence: Synthetic oligonucleotide
uugaaugacaguacgauag

SEQ ID NO: 1907471 - RNA, 19 nt, Artificial Sequence
  Description of Artificial Sequence: Synthetic oligonucleotide
aucagauaaacucuggugg

SEQ ID NO: 1907472 - RNA, 19 nt, Artificial Sequence
  Description of Artificial Sequence: Synthetic oligonucleotide
aaugaacuugcuuugcuuc

SEQ ID NO: 1907473 - RNA, 19 nt, Artificial Sequence
  Description of Artificial Sequence: Synthetic oligonucleotide
gaggaauuagcuuugaccc

SEQ ID NO: 1907474 - RNA, 19 nt, Artificial Sequence
  Description of Artificial Sequence: Synthetic oligonucleotide
augacaguacgauagagcg

SEQ ID NO: 1907475 - RNA, 19 nt, Artificial Sequence
  Description of Artificial Sequence: Synthetic oligonucleotide
aacucaacccgugauaucc

SEQ ID NO: 1907476 - RNA, 19 nt, Artificial Sequence
  Description of Artificial Sequence: Synthetic oligonucleotide
uuagcuuugacccagggau

SEQ ID NO: 1907477 - RNA, 19 nt, Artificial Sequence
  Description of Artificial Sequence: Synthetic oligonucleotide
aaucagauaaacucuggug

SEQ ID NO: 1907478 - RNA, 19 nt, Artificial Sequence
  Description of Artificial Sequence: Synthetic oligonucleotide
aagguuuugaggaauuagc

SEQ ID NO: 1907479 - RNA, 19 nt, Artificial Sequence
  Description of Artificial Sequence: Synthetic oligonucleotide
aaugacaguacgauagagc

SEQ ID NO: 1907480 - RNA, 19 nt, Artificial Sequence
  Description of Artificial Sequence: Synthetic oligonucleotide
ugaggaauuagcuuugacc

SEQ ID NO: 1907481 - RNA, 19 nt, Artificial Sequence
  Description of Artificial Sequence: Synthetic oligonucleotide
aacuccgugauguauguag

SEQ ID NO: 1907482 - RNA, 19 nt, Artificial Sequence
  Description of Artificial Sequence: Synthetic oligonucleotide
ucuucaacuccccauuugg

SEQ ID NO: 1907483 - RNA, 19 nt, Artificial Sequence
  Description of Artificial Sequence: Synthetic oligonucleotide
cauggaaauagccauacag

SEQ ID NO: 1907484 - RNA, 19 nt, Artificial Sequence
  Description of Artificial Sequence: Synthetic oligonucleotide
uuaacagucuugaaaugag

SEQ ID NO: 1907485 - RNA, 19 nt, Artificial Sequence
  Description of Artificial Sequence: Synthetic oligonucleotide
caaauagacauuuccaaac

SEQ ID NO: 1907486 - RNA, 19 nt, Artificial Sequence
  Description of Artificial Sequence: Synthetic oligonucleotide
aacgcugacagcuggcaac

SEQ ID NO: 1907487 - RNA, 19 nt, Artificial Sequence
  Description of Artificial Sequence: Synthetic oligonucleotide
guauucuagaaucagauaa

SEQ ID NO: 1907488 - RNA, 19 nt, Artificial Sequence
  Description of Artificial Sequence: Synthetic oligonucleotide
auagacagucccgagaggc

SEQ ID NO: 1907489 - RNA, 19 nt, Artificial Sequence
  Description of Artificial Sequence: Synthetic oligonucleotide
acuaagcugggauacuggc

SEQ ID NO: 1907490 - RNA, 19 nt, Artificial Sequence
  Description of Artificial Sequence: Synthetic oligonucleotide
gaauuauuuccagaguccg

SEQ ID NO: 1907491 - RNA, 19 nt, Artificial Sequence
  Description of Artificial Sequence: Synthetic oligonucleotide
agaauuauuuccagagucc

SEQ ID NO: 1907492 - RNA, 19 nt, Artificial Sequence
  Description of Artificial Sequence: Synthetic oligonucleotide
aguacgauagagcguuugc

SEQ ID NO: 1907493 - RNA, 19 nt, Artificial Sequence
  Description of Artificial Sequence: Synthetic oligonucleotide
ugcuuuaacagucuugaaa

SEQ ID NO: 1907494 - RNA, 19 nt, Artificial Sequence
  Description of Artificial Sequence: Synthetic oligonucleotide
uguucugagggcaacgaug

SEQ ID NO: 1907495 - RNA, 19 nt, Artificial Sequence
  Description of Artificial Sequence: Synthetic oligonucleotide
ugcguuuuaaacagcaccu

SEQ ID NO: 1907496 - RNA, 19 nt, Artificial Sequence
  Description of Artificial Sequence: Synthetic oligonucleotide
aaugacucucuuugaauga

SEQ ID NO: 1907497 - RNA, 19 nt, Artificial Sequence
  Description of Artificial Sequence: Synthetic oligonucleotide
ugugcuuuaacagucuuga

SEQ ID NO: 1907498 - RNA, 19 nt, Artificial Sequence
  Description of Artificial Sequence: Synthetic oligonucleotide
cuucucaucaugcauccgg

SEQ ID NO: 1907499 - RNA, 19 nt, Artificial Sequence
  Description of Artificial Sequence: Synthetic oligonucleotide
uaacagucuugaaaugagg

SEQ ID NO: 1907500 - RNA, 19 nt, Artificial Sequence
  Description of Artificial Sequence: Synthetic oligonucleotide
aauuagcuuugacccaggg

SEQ ID NO: 1907501 - RNA, 19 nt, Artificial Sequence
  Description of Artificial Sequence: Synthetic oligonucleotide
ucuauagacagucccgaga

SEQ ID NO: 1907502 - RNA, 19 nt, Artificial Sequence
  Description of Artificial Sequence: Synthetic oligonucleotide
agggcaacgaugauggucc

SEQ ID NO: 1907503 - RNA, 19 nt, Artificial Sequence
  Description of Artificial Sequence: Synthetic oligonucleotide
uuugccaacuccgugaugu

SEQ ID NO: 1907504 - RNA, 19 nt, Artificial Sequence
  Description of Artificial Sequence: Synthetic oligonucleotide
uggagcucucuauagacag

SEQ ID NO: 1907505 - RNA, 19 nt, Artificial Sequence
  Description of Artificial Sequence: Synthetic oligonucleotide
uucccuaagaugauguacu

SEQ ID NO: 1907506 - RNA, 19 nt, Artificial Sequence
  Description of Artificial Sequence: Synthetic oligonucleotide
ucagauaaacucugguggc

SEQ ID NO: 1907507 - RNA, 19 nt, Artificial Sequence
  Description of Artificial Sequence: Synthetic oligonucleotide
cagaauuauuuccagaguc

SEQ ID NO: 1907508 - RNA, 19 nt, Artificial Sequence
  Description of Artificial Sequence: Synthetic oligonucleotide
ugauguauguagcuguccu

SEQ ID NO: 1907509 - RNA, 19 nt, Artificial Sequence
  Description of Artificial Sequence: Synthetic oligonucleotide
acagucuugaaaugagguc

SEQ ID NO: 1907510 - RNA, 19 nt, Artificial Sequence
  Description of Artificial Sequence: Synthetic oligonucleotide
ucucccuugccaaauagac

SEQ ID NO: 1907511 - RNA, 19 nt, Artificial Sequence
  Description of Artificial Sequence: Synthetic oligonucleotide
cugugaaugacucucuuug

SEQ ID NO: 1907512 - RNA, 19 nt, Artificial Sequence
  Description of Artificial Sequence: Synthetic oligonucleotide
ugccaaauagacauuucca

SEQ ID NO: 1907513 - RNA, 19 nt, Artificial Sequence
  Description of Artificial Sequence: Synthetic oligonucleotide
ggaaugugaacucaacccg

SEQ ID NO: 1907514 - RNA, 19 nt, Artificial Sequence
  Description of Artificial Sequence: Synthetic oligonucleotide
uauucuagaaucagauaaa

SEQ ID NO: 1907515 - RNA, 19 nt, Artificial Sequence
  Description of Artificial Sequence: Synthetic oligonucleotide
cagucuugaaaugaggucc

SEQ ID NO: 1907516 - RNA, 19 nt, Artificial Sequence
  Description of Artificial Sequence: Synthetic oligonucleotide
uucaacuccccauuuggcc

SEQ ID NO: 1907517 - RNA, 19 nt, Artificial Sequence
  Description of Artificial Sequence: Synthetic oligonucleotide
ugaguugugcuuuaacagu

SEQ ID NO: 1907518 - RNA, 19 nt, Artificial Sequence
  Description of Artificial Sequence: Synthetic oligonucleotide
cugcguuuuaaacagcacc

SEQ ID NO: 1907519 - RNA, 19 nt, Artificial Sequence
  Description of Artificial Sequence: Synthetic oligonucleotide
cucuuugaaugacaguacg

SEQ ID NO: 1907520 - RNA, 19 nt, Artificial Sequence
  Description of Artificial Sequence: Synthetic oligonucleotide
aggcaucccaaccaggaac

SEQ ID NO: 1907521 - RNA, 19 nt, Artificial Sequence
  Description of Artificial Sequence: Synthetic oligonucleotide
ugaaaugaggucccuggcu

SEQ ID NO: 1907522 - RNA, 19 nt, Artificial Sequence
  Description of Artificial Sequence: Synthetic oligonucleotide
uccagcugcguuuuaaaca

SEQ ID NO: 1907523 - RNA, 19 nt, Artificial Sequence
  Description of Artificial Sequence: Synthetic oligonucleotide
uucuagaaucagauaaacu

SEQ ID NO: 1907524 - RNA, 19 nt, Artificial Sequence
  Description of Artificial Sequence: Synthetic oligonucleotide
uacgauagagcguuugcca

SEQ ID NO: 1907525 - RNA, 19 nt, Artificial Sequence
  Description of Artificial Sequence: Synthetic oligonucleotide
uuagccucugacuugaguu

SEQ ID NO: 1907526 - RNA, 19 nt, Artificial Sequence
  Description of Artificial Sequence: Synthetic oligonucleotide
uaaacagcaccuucagggc

SEQ ID NO: 1907527 - RNA, 19 nt, Artificial Sequence
  Description of Artificial Sequence: Synthetic oligonucleotide
aggcgcguauucuagaauc

SEQ ID NO: 1907528 - RNA, 19 nt, Artificial Sequence
  Description of Artificial Sequence: Synthetic oligonucleotide
gggaaugugaacucaaccc

SEQ ID NO: 1907529 - RNA, 19 nt, Artificial Sequence
  Description of Artificial Sequence: Synthetic oligonucleotide
auuauuuccagaguccgca

SEQ ID NO: 1907530 - RNA, 19 nt, Artificial Sequence
  Description of Artificial Sequence: Synthetic oligonucleotide
gaagguuuugaggaauuag

SEQ ID NO: 1907531 - RNA, 19 nt, Artificial Sequence
  Description of Artificial Sequence: Synthetic oligonucleotide
acuugaguugugcuuuaac

SEQ ID NO: 1907532 - RNA, 19 nt, Artificial Sequence
  Description of Artificial Sequence: Synthetic oligonucleotide
gauggggcguuucucacag

SEQ ID NO: 1907533 - RNA, 19 nt, Artificial Sequence
  Description of Artificial Sequence: Synthetic oligonucleotide
uuucuggagcucucuauag

SEQ ID NO: 1907534 - RNA, 19 nt, Artificial Sequence
  Description of Artificial Sequence: Synthetic oligonucleotide
augauguacuaguuagcuc

SEQ ID NO: 1907535 - RNA, 19 nt, Artificial Sequence
  Description of Artificial Sequence: Synthetic oligonucleotide
uuuccaaacuuuccuuuac

SEQ ID NO: 1907536 - RNA, 19 nt, Artificial Sequence
  Description of Artificial Sequence: Synthetic oligonucleotide
guuucucacagcugcacag

SEQ ID NO: 1907537 - RNA, 19 nt, Artificial Sequence
  Description of Artificial Sequence: Synthetic oligonucleotide
cuugugaagggacacggug

SEQ ID NO: 1907538 - RNA, 19 nt, Artificial Sequence
  Description of Artificial Sequence: Synthetic oligonucleotide
uuccuuuacccagugggcg

SEQ ID NO: 1907539 - RNA, 19 nt, Artificial Sequence
  Description of Artificial Sequence: Synthetic oligonucleotide
uaguguuagccucugacuu

SEQ ID NO: 1907540 - RNA, 19 nt, Artificial Sequence
  Description of Artificial Sequence: Synthetic oligonucleotide
ugcccgaucguuuucagaa

SEQ ID NO: 1907541 - RNA, 19 nt, Artificial Sequence
  Description of Artificial Sequence: Synthetic oligonucleotide
ugaaugacaguacgauaga

SEQ ID NO: 1907542 - RNA, 19 nt, Artificial Sequence
  Description of Artificial Sequence: Synthetic oligonucleotide
auagccauacagccugagg

SEQ ID NO: 1907543 - RNA, 19 nt, Artificial Sequence
  Description of Artificial Sequence: Synthetic oligonucleotide
ucguuuucagaauuauuuc

SEQ ID NO: 1907544 - RNA, 19 nt, Artificial Sequence
  Description of Artificial Sequence: Synthetic oligonucleotide
ucucuuugaaugacaguac

SEQ ID NO: 1907545 - RNA, 19 nt, Artificial Sequence
  Description of Artificial Sequence: Synthetic oligonucleotide
uauagacagucccgagagg

SEQ ID NO: 1907546 - RNA, 19 nt, Artificial Sequence
  Description of Artificial Sequence: Synthetic oligonucleotide
ucugcuuugaugcccgauc

SEQ ID NO: 1907547 - RNA, 19 nt, Artificial Sequence
  Description of Artificial Sequence: Synthetic oligonucleotide
uagagcguuugccaacucc

SEQ ID NO: 1907548 - RNA, 19 nt, Artificial Sequence
  Description of Artificial Sequence: Synthetic oligonucleotide
uguaucuccaccucccguc

SEQ ID NO: 1907549 - RNA, 19 nt, Artificial Sequence
  Description of Artificial Sequence: Synthetic oligonucleotide
uagacagucccgagaggcg

SEQ ID NO: 1907550 - RNA, 19 nt, Artificial Sequence
  Description of Artificial Sequence: Synthetic oligonucleotide
uugugcuuuaacagucuug

SEQ ID NO: 1907551 - RNA, 19 nt, Artificial Sequence
  Description of Artificial Sequence: Synthetic oligonucleotide
agggccagaaugaacuugc

SEQ ID NO: 1907552 - RNA, 19 nt, Artificial Sequence
  Description of Artificial Sequence: Synthetic oligonucleotide
agaaugaacuugcuuugcu

SEQ ID NO: 1907553 - RNA, 19 nt, Artificial Sequence
  Description of Artificial Sequence: Synthetic oligonucleotide
guacuaguuagcucuuugc

SEQ ID NO: 1907554 - RNA, 19 nt, Artificial Sequence
  Description of Artificial Sequence: Synthetic oligonucleotide
ugugaacucaacccgugau

SEQ ID NO: 1907555 - RNA, 19 nt, Artificial Sequence
  Description of Artificial Sequence: Synthetic oligonucleotide
agagcguuugccaacuccg

SEQ ID NO: 1907556 - RNA, 19 nt, Artificial Sequence
  Description of Artificial Sequence: Synthetic oligonucleotide
agucuugaaaugagguccc

SEQ ID NO: 1907557 - RNA, 19 nt, Artificial Sequence
  Description of Artificial Sequence: Synthetic oligonucleotide
uucuaccccagccuucucc

SEQ ID NO: 1907558 - RNA, 19 nt, Artificial Sequence
  Description of Artificial Sequence: Synthetic oligonucleotide
aagucuuccagaguccacu

SEQ ID NO: 1907559 - RNA, 19 nt, Artificial Sequence
  Description of Artificial Sequence: Synthetic oligonucleotide
ugggugugugccucgaaag

SEQ ID NO: 1907560 - RNA, 19 nt, Artificial Sequence
  Description of Artificial Sequence: Synthetic oligonucleotide
ugugaaugacucucuuuga

SEQ ID NO: 1907561 - RNA, 19 nt, Artificial Sequence
  Description of Artificial Sequence: Synthetic oligonucleotide
ucugugcuugugaagggac

SEQ ID NO: 1907562 - RNA, 19 nt, Artificial Sequence
  Description of Artificial Sequence: Synthetic oligonucleotide
ugaacucaacccgugauau

SEQ ID NO: 1907563 - RNA, 19 nt, Artificial Sequence
  Description of Artificial Sequence: Synthetic oligonucleotide
aguguuagccucugacuug

SEQ ID NO: 1907564 - RNA, 19 nt, Artificial Sequence
  Description of Artificial Sequence: Synthetic oligonucleotide
augacucucuuugaaugac

SEQ ID NO: 1907565 - RNA, 19 nt, Artificial Sequence
  Description of Artificial Sequence: Synthetic oligonucleotide
uucuguaggucuccuggug

SEQ ID NO: 1907566 - RNA, 19 nt, Artificial Sequence
  Description of Artificial Sequence: Synthetic oligonucleotide
ugggcggccaaugucaaag

SEQ ID NO: 1907567 - RNA, 19 nt, Artificial Sequence
  Description of Artificial Sequence: Synthetic oligonucleotide
cugcuuugaugcccgaucg

SEQ ID NO: 1907568 - RNA, 19 nt, Artificial Sequence
  Description of Artificial Sequence: Synthetic oligonucleotide
acuaguuagcucuuugcuu

SEQ ID NO: 1907569 - RNA, 19 nt, Artificial Sequence
  Description of Artificial Sequence: Synthetic oligonucleotide
aaugugaacucaacccgug

SEQ ID NO: 1907570 - RNA, 19 nt, Artificial Sequence
  Description of Artificial Sequence: Synthetic oligonucleotide
ucucuauagacagucccga

SEQ ID NO: 1907571 - RNA, 19 nt, Artificial Sequence
  Description of Artificial Sequence: Synthetic oligonucleotide
aacuuuccuuuacccagug

SEQ ID NO: 1907572 - RNA, 19 nt, Artificial Sequence
  Description of Artificial Sequence: Synthetic oligonucleotide
cuucaacuccccauuuggc

SEQ ID NO: 1907573 - RNA, 19 nt, Artificial Sequence
  Description of Artificial Sequence: Synthetic oligonucleotide
ucugacuugaguugugcuu

SEQ ID NO: 1907574 - RNA, 19 nt, Artificial Sequence
  Description of Artificial Sequence: Synthetic oligonucleotide
agaaucagauaaacucugg

SEQ ID NO: 1907575 - RNA, 19 nt, Artificial Sequence
  Description of Artificial Sequence: Synthetic oligonucleotide
uucuggagcucucuauaga

SEQ ID NO: 1907576 - RNA, 19 nt, Artificial Sequence
  Description of Artificial Sequence: Synthetic oligonucleotide
auguauguagcuguccucu

SEQ ID NO: 1907577 - RNA, 19 nt, Artificial Sequence
  Description of Artificial Sequence: Synthetic oligonucleotide
uucugcuaguguuagccuc

SEQ ID NO: 1907578 - RNA, 19 nt, Artificial Sequence
  Description of Artificial Sequence: Synthetic oligonucleotide
acuguaucuccaccucccg

SEQ ID NO: 1907579 - RNA, 19 nt, Artificial Sequence
  Description of Artificial Sequence: Synthetic oligonucleotide
ucagggaaugugaacucaa

SEQ ID NO: 1907580 - RNA, 19 nt, Artificial Sequence
  Description of Artificial Sequence: Synthetic oligonucleotide
gaugauguacuaguuagcu

SEQ ID NO: 1907581 - RNA, 19 nt, Artificial Sequence
  Description of Artificial Sequence: Synthetic oligonucleotide
cacuaagcugggauacugg

SEQ ID NO: 1907582 - RNA, 19 nt, Artificial Sequence
  Description of Artificial Sequence: Synthetic oligonucleotide
ucacuaagcugggauacug

SEQ ID NO: 1907583 - RNA, 19 nt, Artificial Sequence
  Description of Artificial Sequence: Synthetic oligonucleotide
gaacuugcuuugcuucucc

SEQ ID NO: 1907584 - RNA, 19 nt, Artificial Sequence
  Description of Artificial Sequence: Synthetic oligonucleotide
gguggcgucauggaaauag

SEQ ID NO: 1907585 - RNA, 19 nt, Artificial Sequence
  Description of Artificial Sequence: Synthetic oligonucleotide
ugacucucuuugaaugaca

SEQ ID NO: 1907586 - RNA, 19 nt, Artificial Sequence
  Description of Artificial Sequence: Synthetic oligonucleotide
gauguauguagcuguccuc

SEQ ID NO: 1907587 - RNA, 19 nt, Artificial Sequence
  Description of Artificial Sequence: Synthetic oligonucleotide
cucucuuugaaugacagua

SEQ ID NO: 1907588 - RNA, 19 nt, Artificial Sequence
  Description of Artificial Sequence: Synthetic oligonucleotide
uuugaugcccgaucguuuu

SEQ ID NO: 1907589 - RNA, 19 nt, Artificial Sequence
  Description of Artificial Sequence: Synthetic oligonucleotide
aauagccauacagccugag

SEQ ID NO: 1907590 - RNA, 19 nt, Artificial Sequence
  Description of Artificial Sequence: Synthetic oligonucleotide
cagccgaagguuuugagga

SEQ ID NO: 1907591 - RNA, 19 nt, Artificial Sequence
  Description of Artificial Sequence: Synthetic oligonucleotide
ugcucaaggacuucugcua

SEQ ID NO: 1907592 - RNA, 19 nt, Artificial Sequence
  Description of Artificial Sequence: Synthetic oligonucleotide
ugguguucuaccccagccu

SEQ ID NO: 1907593 - RNA, 19 nt, Artificial Sequence
  Description of Artificial Sequence: Synthetic oligonucleotide
gucacaaagucagggaaug

SEQ ID NO: 1907594 - RNA, 19 nt, Artificial Sequence
  Description of Artificial Sequence: Synthetic oligonucleotide
uggaugcacggccagggac

SEQ ID NO: 1907595 - RNA, 19 nt, Artificial Sequence
  Description of Artificial Sequence: Synthetic oligonucleotide
cugguguucuaccccagcc

SEQ ID NO: 1907596 - RNA, 19 nt, Artificial Sequence
  Description of Artificial Sequence: Synthetic oligonucleotide
acuccgugauguauguagc

SEQ ID NO: 1907597 - RNA, 19 nt, Artificial Sequence
  Description of Artificial Sequence: Synthetic oligonucleotide
gaaucagauaaacucuggu

SEQ ID NO: 1907598 - RNA, 19 nt, Artificial Sequence
  Description of Artificial Sequence: Synthetic oligonucleotide
cagauaaacucugguggcg

SEQ ID NO: 1907599 - RNA, 19 nt, Artificial Sequence
  Description of Artificial Sequence: Synthetic oligonucleotide
ggaauuagcuuugacccag

SEQ ID NO: 1907600 - RNA, 19 nt, Artificial Sequence
  Description of Artificial Sequence: Synthetic oligonucleotide
gaguugugcuuuaacaguc

SEQ ID NO: 1907601 - RNA, 19 nt, Artificial Sequence
  Description of Artificial Sequence: Synthetic oligonucleotide
agguuuugaggaauuagcu

SEQ ID NO: 1907602 - RNA, 19 nt, Artificial Sequence
  Description of Artificial Sequence: Synthetic oligonucleotide
ugugcuugugaagggacac

SEQ ID NO: 1907603 - RNA, 19 nt, Artificial Sequence
  Description of Artificial Sequence: Synthetic oligonucleotide
aggaauuagcuuugaccca

SEQ ID NO: 1907604 - RNA, 19 nt, Artificial Sequence
  Description of Artificial Sequence: Synthetic oligonucleotide
ugcuuugcuucucccuugc

SEQ ID NO: 1907605 - RNA, 19 nt, Artificial Sequence
  Description of Artificial Sequence: Synthetic oligonucleotide
ggcucccucagucacaaag

SEQ ID NO: 1907606 - RNA, 19 nt, Artificial Sequence
  Description of Artificial Sequence: Synthetic oligonucleotide
auauccuucuguaggucuc

SEQ ID NO: 1907607 - RNA, 19 nt, Artificial Sequence
  Description of Artificial Sequence: Synthetic oligonucleotide
aguuucuggagcucucuau

SEQ ID NO: 1907608 - RNA, 19 nt, Artificial Sequence
  Description of Artificial Sequence: Synthetic oligonucleotide
guacgauagagcguuugcc

SEQ ID NO: 1907609 - RNA, 19 nt, Artificial Sequence
  Description of Artificial Sequence: Synthetic oligonucleotide
agauucccuaagaugaugu

SEQ ID NO: 1907610 - RNA, 19 nt, Artificial Sequence
  Description of Artificial Sequence: Synthetic oligonucleotide
cuucucccuugccaaauag

SEQ ID NO: 1907611 - RNA, 19 nt, Artificial Sequence
  Description of Artificial Sequence: Synthetic oligonucleotide
gaaggugggacuguaucuc

SEQ ID NO: 1907612 - RNA, 19 nt, Artificial Sequence
  Description of Artificial Sequence: Synthetic oligonucleotide
gauacuggccgaggaacgc

SEQ ID NO: 1907613 - RNA, 19 nt, Artificial Sequence
  Description of Artificial Sequence: Synthetic oligonucleotide
gauaaacucugguggcguc

SEQ ID NO: 1907614 - RNA, 19 nt, Artificial Sequence
  Description of Artificial Sequence: Synthetic oligonucleotide
acgauagagcguuugccaa

SEQ ID NO: 1907615 - RNA, 19 nt, Artificial Sequence
  Description of Artificial Sequence: Synthetic oligonucleotide
cucuauagacagucccgag

SEQ ID NO: 1907616 - RNA, 19 nt, Artificial Sequence
  Description of Artificial Sequence: Synthetic oligonucleotide
cuugccaaauagacauuuc

SEQ ID NO: 1907617 - RNA, 19 nt, Artificial Sequence
  Description of Artificial Sequence: Synthetic oligonucleotide
uccgcaggguguucugagg

SEQ ID NO: 1907618 - RNA, 19 nt, Artificial Sequence
  Description of Artificial Sequence: Synthetic oligonucleotide
ucaacccgugauauccuuc

SEQ ID NO: 1907619 - RNA, 19 nt, Artificial Sequence
  Description of Artificial Sequence: Synthetic oligonucleotide
uccccauuuggcccaagaa

SEQ ID NO: 1907620 - RNA, 19 nt, Artificial Sequence
  Description of Artificial Sequence: Synthetic oligonucleotide
gugaaugacucucuuugaa

SEQ ID NO: 1907621 - RNA, 19 nt, Artificial Sequence
  Description of Artificial Sequence: Synthetic oligonucleotide
guucugagggcaacgauga

SEQ ID NO: 1907622 - RNA, 19 nt, Artificial Sequence
  Description of Artificial Sequence: Synthetic oligonucleotide
agcguuugccaacuccgug

SEQ ID NO: 1907623 - RNA, 19 nt, Artificial Sequence
  Description of Artificial Sequence: Synthetic oligonucleotide
ucgggcggcagguagucca

SEQ ID NO: 1907624 - RNA, 19 nt, Artificial Sequence
  Description of Artificial Sequence: Synthetic oligonucleotide
ugcgaucuucaacucccca

SEQ ID NO: 1907625 - RNA, 19 nt, Artificial Sequence
  Description of Artificial Sequence: Synthetic oligonucleotide
uuugaggaauuagcuuuga

SEQ ID NO: 1907626 - RNA, 19 nt, Artificial Sequence
  Description of Artificial Sequence: Synthetic oligonucleotide
cucgaaaggaggcauccca

SEQ ID NO: 1907627 - RNA, 19 nt, Artificial Sequence
  Description of Artificial Sequence: Synthetic oligonucleotide
uauccuucuguaggucucc

SEQ ID NO: 1907628 - RNA, 19 nt, Artificial Sequence
  Description of Artificial Sequence: Synthetic oligonucleotide
ugcauccggccuucaauca

SEQ ID NO: 1907629 - RNA, 19 nt, Artificial Sequence
  Description of Artificial Sequence: Synthetic oligonucleotide
ugggauacuggccgaggaa

SEQ ID NO: 1907630 - RNA, 19 nt, Artificial Sequence
  Description of Artificial Sequence: Synthetic oligonucleotide
gaugcccgaucguuuucag

SEQ ID NO: 1907631 - RNA, 19 nt, Artificial Sequence
  Description of Artificial Sequence: Synthetic oligonucleotide
uuggggugccgaagguggg

SEQ ID NO: 1907632 - RNA, 19 nt, Artificial Sequence
  Description of Artificial Sequence: Synthetic oligonucleotide
ugauggggcguuucucaca

SEQ ID NO: 1907633 - RNA, 19 nt, Artificial Sequence
  Description of Artificial Sequence: Synthetic oligonucleotide
uucugugcuugugaaggga

SEQ ID NO: 1907634 - RNA, 19 nt, Artificial Sequence
  Description of Artificial Sequence: Synthetic oligonucleotide
cuccagcugcguuuuaaac

SEQ ID NO: 1907635 - RNA, 19 nt, Artificial Sequence
  Description of Artificial Sequence: Synthetic oligonucleotide
gacaguacgauagagcguu

SEQ ID NO: 1907636 - RNA, 19 nt, Artificial Sequence
  Description of Artificial Sequence: Synthetic oligonucleotide
uguccucugcucgucaaac

SEQ ID NO: 1907637 - RNA, 19 nt, Artificial Sequence
  Description of Artificial Sequence: Synthetic oligonucleotide
ugaugcccgaucguuuuca

SEQ ID NO: 1907638 - RNA, 19 nt, Artificial Sequence
  Description of Artificial Sequence: Synthetic oligonucleotide
agaggcgcguauucuagaa

SEQ ID NO: 1907639 - RNA, 19 nt, Artificial Sequence
  Description of Artificial Sequence: Synthetic oligonucleotide
caaagucagggaaugugaa

SEQ ID NO: 1907640 - RNA, 19 nt, Artificial Sequence
  Description of Artificial Sequence: Synthetic oligonucleotide
gccaaauagacauuuccaa

SEQ ID NO: 1907641 - RNA, 19 nt, Artificial Sequence
  Description of Artificial Sequence: Synthetic oligonucleotide
augugaacucaacccguga

SEQ ID NO: 1907642 - RNA, 19 nt, Artificial Sequence
  Description of Artificial Sequence: Synthetic oligonucleotide
cagggaaugugaacucaac

SEQ ID NO: 1907643 - RNA, 19 nt, Artificial Sequence
  Description of Artificial Sequence: Synthetic oligonucleotide
ccagccgaagguuuugagg

SEQ ID NO: 1907644 - RNA, 19 nt, Artificial Sequence
  Description of Artificial Sequence: Synthetic oligonucleotide
gggugugugccucgaaagg

SEQ ID NO: 1907645 - RNA, 19 nt, Artificial Sequence
  Description of Artificial Sequence: Synthetic oligonucleotide
ugcuuugaugcccgaucgu

SEQ ID NO: 1907646 - RNA, 19 nt, Artificial Sequence
  Description of Artificial Sequence: Synthetic oligonucleotide
agcugcguuuuaaacagca

SEQ ID NO: 1907647 - RNA, 19 nt, Artificial Sequence
  Description of Artificial Sequence: Synthetic oligonucleotide
ggccgaggaacgcugacag

SEQ ID NO: 1907648 - RNA, 19 nt, Artificial Sequence
  Description of Artificial Sequence: Synthetic oligonucleotide
gcucaaggacuucugcuag

SEQ ID NO: 1907649 - RNA, 19 nt, Artificial Sequence
  Description of Artificial Sequence: Synthetic oligonucleotide
auagagcguuugccaacuc

SEQ ID NO: 1907650 - RNA, 19 nt, Artificial Sequence
  Description of Artificial Sequence: Synthetic oligonucleotide
gugugugccucgaaaggag

SEQ ID NO: 1907651 - RNA, 19 nt, Artificial Sequence
  Description of Artificial Sequence: Synthetic oligonucleotide
cauccggccuucaaucauc

SEQ ID NO: 1907652 - RNA, 19 nt, Artificial Sequence
  Description of Artificial Sequence: Synthetic oligonucleotide
cagucacaaagucagggaa

SEQ ID NO: 1907653 - RNA, 19 nt, Artificial Sequence
  Description of Artificial Sequence: Synthetic oligonucleotide
ccccauuuggcccaagaag

SEQ ID NO: 1907654 - RNA, 19 nt, Artificial Sequence
  Description of Artificial Sequence: Synthetic oligonucleotide
gugauguauguagcugucc

SEQ ID NO: 1907655 - RNA, 19 nt, Artificial Sequence
  Description of Artificial Sequence: Synthetic oligonucleotide
aggaacgcugacagcuggc

SEQ ID NO: 1907656 - RNA, 19 nt, Artificial Sequence
  Description of Artificial Sequence: Synthetic oligonucleotide
cuaguguuagccucugacu

SEQ ID NO: 1907657 - RNA, 19 nt, Artificial Sequence
  Description of Artificial Sequence: Synthetic oligonucleotide
ggauacuggccgaggaacg

SEQ ID NO: 1907658 - RNA, 19 nt, Artificial Sequence
  Description of Artificial Sequence: Synthetic oligonucleotide
aaacucugguggcgucaug

SEQ ID NO: 1907659 - RNA, 19 nt, Artificial Sequence
  Description of Artificial Sequence: Synthetic oligonucleotide
gauucccuaagaugaugua

SEQ ID NO: 1907660 - RNA, 19 nt, Artificial Sequence
  Description of Artificial Sequence: Synthetic oligonucleotide
ucccuaagaugauguacua

SEQ ID NO: 1907661 - RNA, 19 nt, Artificial Sequence
  Description of Artificial Sequence: Synthetic oligonucleotide
cagugggcggccaauguca

SEQ ID NO: 1907662 - RNA, 19 nt, Artificial Sequence
  Description of Artificial Sequence: Synthetic oligonucleotide
gaacucaacccgugauauc

SEQ ID NO: 1907663 - RNA, 19 nt, Artificial Sequence
  Description of Artificial Sequence: Synthetic oligonucleotide
ccuaagaugauguacuagu

SEQ ID NO: 1907664 - RNA, 19 nt, Artificial Sequence
  Description of Artificial Sequence: Synthetic oligonucleotide
ggucacuaagcugggauac

SEQ ID NO: 1907665 - RNA, 19 nt, Artificial Sequence
  Description of Artificial Sequence: Synthetic oligonucleotide
gaaugugaacucaacccgu

SEQ ID NO: 1907666 - RNA, 19 nt, Artificial Sequence
  Description of Artificial Sequence: Synthetic oligonucleotide
cagauucccuaagaugaug

SEQ ID NO: 1907667 - RNA, 19 nt, Artificial Sequence
  Description of Artificial Sequence: Synthetic oligonucleotide
cuccgcaggguguucugag

SEQ ID NO: 1907668 - RNA, 19 nt, Artificial Sequence
  Description of Artificial Sequence: Synthetic oligonucleotide
gucuuccagaguccacugc

SEQ ID NO: 1907669 - RNA, 19 nt, Artificial Sequence
  Description of Artificial Sequence: Synthetic oligonucleotide
gauagagcguuugccaacu

SEQ ID NO: 1907670 - RNA, 19 nt, Artificial Sequence
  Description of Artificial Sequence: Synthetic oligonucleotide
caccucccgucgaagcugg

SEQ ID NO: 1907671 - RNA, 19 nt, Artificial Sequence
  Description of Artificial Sequence: Synthetic oligonucleotide
aguugugcuuuaacagucu

SEQ ID NO: 1907672 - RNA, 19 nt, Artificial Sequence
  Description of Artificial Sequence: Synthetic oligonucleotide
cuuugacccagggaugcuc

SEQ ID NO: 1907673 - RNA, 19 nt, Artificial Sequence
  Description of Artificial Sequence: Synthetic oligonucleotide
agaggccaggguuccagau

SEQ ID NO: 1907674 - RNA, 19 nt, Artificial Sequence
  Description of Artificial Sequence: Synthetic oligonucleotide
cucccuugccaaauagaca

SEQ ID NO: 1907675 - RNA, 19 nt, Artificial Sequence
  Description of Artificial Sequence: Synthetic oligonucleotide
caguacgauagagcguuug

SEQ ID NO: 1907676 - RNA, 19 nt, Artificial Sequence
  Description of Artificial Sequence: Synthetic oligonucleotide
guguuagccucugacuuga

SEQ ID NO: 1907677 - RNA, 19 nt, Artificial Sequence
  Description of Artificial Sequence: Synthetic oligonucleotide
ucccgagaggcgcguauuc

SEQ ID NO: 1907678 - RNA, 19 nt, Artificial Sequence
  Description of Artificial Sequence: Synthetic oligonucleotide
gagaggcgcguauucuaga

SEQ ID NO: 1907679 - RNA, 19 nt, Artificial Sequence
  Description of Artificial Sequence: Synthetic oligonucleotide
caggguuccagauucccua

SEQ ID NO: 1907680 - RNA, 19 nt, Artificial Sequence
  Description of Artificial Sequence: Synthetic oligonucleotide
gggauacuggccgaggaac

SEQ ID NO: 1907681 - RNA, 19 nt, Artificial Sequence
  Description of Artificial Sequence: Synthetic oligonucleotide
cugcgaucuucaacucccc

SEQ ID NO: 1907682 - RNA, 19 nt, Artificial Sequence
  Description of Artificial Sequence: Synthetic oligonucleotide
uuggccagccgaagguuuu

SEQ ID NO: 1907683 - RNA, 19 nt, Artificial Sequence
  Description of Artificial Sequence: Synthetic oligonucleotide
ugacuugaguugugcuuua

SEQ ID NO: 1907684 - RNA, 19 nt, Artificial Sequence
  Description of Artificial Sequence: Synthetic oligonucleotide
cucaucaugcauccggccu

SEQ ID NO: 1907685 - RNA, 19 nt, Artificial Sequence
  Description of Artificial Sequence: Synthetic oligonucleotide
auggggcguuucucacagc

SEQ ID NO: 1907686 - RNA, 19 nt, Artificial Sequence
  Description of Artificial Sequence: Synthetic oligonucleotide
aggguuccagauucccuaa

SEQ ID NO: 1907687 - RNA, 19 nt, Artificial Sequence
  Description of Artificial Sequence: Synthetic oligonucleotide
ugccucgaaaggaggcauc

SEQ ID NO: 1907688 - RNA, 19 nt, Artificial Sequence
  Description of Artificial Sequence: Synthetic oligonucleotide
agccucugacuugaguugu

SEQ ID NO: 1907689 - RNA, 19 nt, Artificial Sequence
  Description of Artificial Sequence: Synthetic oligonucleotide
ggacuucugcuaguguuag

SEQ ID NO: 1907690 - RNA, 19 nt, Artificial Sequence
  Description of Artificial Sequence: Synthetic oligonucleotide
auacagccugaggauguug

SEQ ID NO: 1907691 - RNA, 19 nt, Artificial Sequence
  Description of Artificial Sequence: Synthetic oligonucleotide
uaguuagcucuuugcuuuu

SEQ ID NO: 1907692 - RNA, 19 nt, Artificial Sequence
  Description of Artificial Sequence: Synthetic oligonucleotide
guggcgucauggaaauagc

SEQ ID NO: 1907693 - RNA, 19 nt, Artificial Sequence
  Description of Artificial Sequence: Synthetic oligonucleotide
cuaagaugauguacuaguu

SEQ ID NO: 1907694 - RNA, 19 nt, Artificial Sequence
  Description of Artificial Sequence: Synthetic oligonucleotide
gaacgcugacagcuggcaa

SEQ ID NO: 1907695 - RNA, 19 nt, Artificial Sequence
  Description of Artificial Sequence: Synthetic oligonucleotide
gcaacgaugauggucccca

SEQ ID NO: 1907696 - RNA, 19 nt, Artificial Sequence
  Description of Artificial Sequence: Synthetic oligonucleotide
cugugcuugugaagggaca

SEQ ID NO: 1907697 - RNA, 19 nt, Artificial Sequence
  Description of Artificial Sequence: Synthetic oligonucleotide
caacugcuuuggcacuggc

SEQ ID NO: 1907698 - RNA, 19 nt, Artificial Sequence
  Description of Artificial Sequence: Synthetic oligonucleotide
gcguuugccaacuccguga

SEQ ID NO: 1907699 - RNA, 19 nt, Artificial Sequence
  Description of Artificial Sequence: Synthetic oligonucleotide
gugggugugugccucgaaa

SEQ ID NO: 1907700 - RNA, 19 nt, Artificial Sequence
  Description of Artificial Sequence: Synthetic oligonucleotide
caacgaugaugguccccag

SEQ ID NO: 1907701 - RNA, 19 nt, Artificial Sequence
  Description of Artificial Sequence: Synthetic oligonucleotide
cugacagcuggcaacugcu

SEQ ID NO: 1907702 - RNA, 19 nt, Artificial Sequence
  Description of Artificial Sequence: Synthetic oligonucleotide
ucucuugauggggcguuuc

SEQ ID NO: 1907703 - RNA, 19 nt, Artificial Sequence
  Description of Artificial Sequence: Synthetic oligonucleotide
aucuccaccucccgucgaa

SEQ ID NO: 1907704 - RNA, 19 nt, Artificial Sequence
  Description of Artificial Sequence: Synthetic oligonucleotide
gaggcaucccaaccaggaa

SEQ ID NO: 1907705 - RNA, 19 nt, Artificial Sequence
  Description of Artificial Sequence: Synthetic oligonucleotide
ggugugugccucgaaagga

SEQ ID NO: 1907706 - RNA, 19 nt, Artificial Sequence
  Description of Artificial Sequence: Synthetic oligonucleotide
ugccaacuccgugauguau

SEQ ID NO: 1907707 - RNA, 19 nt, Artificial Sequence
  Description of Artificial Sequence: Synthetic oligonucleotide
aggaggcaucccaaccagg

SEQ ID NO: 1907708 - RNA, 19 nt, Artificial Sequence
  Description of Artificial Sequence: Synthetic oligonucleotide
ucccuggcucccucaguca

SEQ ID NO: 1907709 - RNA, 19 nt, Artificial Sequence
  Description of Artificial Sequence: Synthetic oligonucleotide
gccaacuccgugauguaug

SEQ ID NO: 1907710 - RNA, 19 nt, Artificial Sequence
  Description of Artificial Sequence: Synthetic oligonucleotide
aggacuucugcuaguguua

SEQ ID NO: 1907711 - RNA, 19 nt, Artificial Sequence
  Description of Artificial Sequence: Synthetic oligonucleotide
gguuuugaggaauuagcuu

SEQ ID NO: 1907712 - RNA, 19 nt, Artificial Sequence
  Description of Artificial Sequence: Synthetic oligonucleotide
acgcugacagcuggcaacu

SEQ ID NO: 1907713 - RNA, 19 nt, Artificial Sequence
  Description of Artificial Sequence: Synthetic oligonucleotide
agccgaagguuuugaggaa

SEQ ID NO: 1907714 - RNA, 19 nt, Artificial Sequence
  Description of Artificial Sequence: Synthetic oligonucleotide
cagcugcguuuuaaacagc

SEQ ID NO: 1907715 - RNA, 19 nt, Artificial Sequence
  Description of Artificial Sequence: Synthetic oligonucleotide
ugaugguccccaggucucu

SEQ ID NO: 1907716 - RNA, 19 nt, Artificial Sequence
  Description of Artificial Sequence: Synthetic oligonucleotide
ggaggcaucccaaccagga

SEQ ID NO: 1907717 - RNA, 19 nt, Artificial Sequence
  Description of Artificial Sequence: Synthetic oligonucleotide
ugcuccgcaggguguucug

SEQ ID NO: 1907718 - RNA, 19 nt, Artificial Sequence
  Description of Artificial Sequence: Synthetic oligonucleotide
uccagagguccaccuucuc

SEQ ID NO: 1907719 - RNA, 19 nt, Artificial Sequence
  Description of Artificial Sequence: Synthetic oligonucleotide
guuagccucugacuugagu

SEQ ID NO: 1907720 - RNA, 19 nt, Artificial Sequence
  Description of Artificial Sequence: Synthetic oligonucleotide
guuugccaacuccgugaug

SEQ ID NO: 1907721 - RNA, 19 nt, Artificial Sequence
  Description of Artificial Sequence: Synthetic oligonucleotide
caucccaaccaggaacuca

SEQ ID NO: 1907722 - RNA, 19 nt, Artificial Sequence
  Description of Artificial Sequence: Synthetic oligonucleotide
ccgaaggugggacuguauc

SEQ ID NO: 1907723 - RNA, 19 nt, Artificial Sequence
  Description of Artificial Sequence: Synthetic oligonucleotide
ccgugauauccuucuguag

SEQ ID NO: 1907724 - RNA, 19 nt, Artificial Sequence
  Description of Artificial Sequence: Synthetic oligonucleotide
ggaaauagccauacagccu

SEQ ID NO: 1907725 - RNA, 19 nt, Artificial Sequence
  Description of Artificial Sequence: Synthetic oligonucleotide
acucaacccgugauauccu

SEQ ID NO: 1907726 - RNA, 19 nt, Artificial Sequence
  Description of Artificial Sequence: Synthetic oligonucleotide
cccuaagaugauguacuag

SEQ ID NO: 1907727 - RNA, 19 nt, Artificial Sequence
  Description of Artificial Sequence: Synthetic oligonucleotide
caugcauccggccuucaau

SEQ ID NO: 1907728 - RNA, 19 nt, Artificial Sequence
  Description of Artificial Sequence: Synthetic oligonucleotide
caucaugcauccggccuuc

SEQ ID NO: 1907729 - RNA, 19 nt, Artificial Sequence
  Description of Artificial Sequence: Synthetic oligonucleotide
gccucgaaaggaggcaucc

SEQ ID NO: 1907730 - RNA, 19 nt, Artificial Sequence
  Description of Artificial Sequence: Synthetic oligonucleotide
gaucguuuucagaauuauu

SEQ ID NO: 1907731 - RNA, 19 nt, Artificial Sequence
  Description of Artificial Sequence: Synthetic oligonucleotide
cuggccgaggaacgcugac

SEQ ID NO: 1907732 - RNA, 19 nt, Artificial Sequence
  Description of Artificial Sequence: Synthetic oligonucleotide
gguguucugagggcaacga

SEQ ID NO: 1907733 - RNA, 19 nt, Artificial Sequence
  Description of Artificial Sequence: Synthetic oligonucleotide
gcgcguauucuagaaucag

SEQ ID NO: 1907734 - RNA, 19 nt, Artificial Sequence
  Description of Artificial Sequence: Synthetic oligonucleotide
cucccgucgaagcuggugu

SEQ ID NO: 1907735 - RNA, 19 nt, Artificial Sequence
  Description of Artificial Sequence: Synthetic oligonucleotide
gaguccgcaggugaugccu

SEQ ID NO: 1907736 - RNA, 19 nt, Artificial Sequence
  Description of Artificial Sequence: Synthetic oligonucleotide
cuucugcuaguguuagccu

SEQ ID NO: 1907737 - RNA, 19 nt, Artificial Sequence
  Description of Artificial Sequence: Synthetic oligonucleotide
cucugacuugaguugugcu

SEQ ID NO: 1907738 - RNA, 19 nt, Artificial Sequence
  Description of Artificial Sequence: Synthetic oligonucleotide
cgagaggcgcguauucuag

SEQ ID NO: 1907739 - RNA, 19 nt, Artificial Sequence
  Description of Artificial Sequence: Synthetic oligonucleotide
gccagccgaagguuuugag

SEQ ID NO: 1907740 - RNA, 19 nt, Artificial Sequence
  Description of Artificial Sequence: Synthetic oligonucleotide
cuuugaugcccgaucguuu

SEQ ID NO: 1907741 - RNA, 19 nt, Artificial Sequence
  Description of Artificial Sequence: Synthetic oligonucleotide
ggcaacugcuuuggcacug

SEQ ID NO: 1907742 - RNA, 19 nt, Artificial Sequence
  Description of Artificial Sequence: Synthetic oligonucleotide
gcaggugaugccugcucac

SEQ ID NO: 1907743 - RNA, 19 nt, Artificial Sequence
  Description of Artificial Sequence: Synthetic oligonucleotide
ggcggccaaugucaaaguc

SEQ ID NO: 1907744 - RNA, 19 nt, Artificial Sequence
  Description of Artificial Sequence: Synthetic oligonucleotide
ucccaaccaggaacucaua

SEQ ID NO: 1907745 - RNA, 19 nt, Artificial Sequence
  Description of Artificial Sequence: Synthetic oligonucleotide
auccggccuucaaucaucu

SEQ ID NO: 1907746 - RNA, 19 nt, Artificial Sequence
  Description of Artificial Sequence: Synthetic oligonucleotide
gcguauucuagaaucagau

SEQ ID NO: 1907747 - RNA, 19 nt, Artificial Sequence
  Description of Artificial Sequence: Synthetic oligonucleotide
ccucugacuugaguugugc

SEQ ID NO: 1907748 - RNA, 19 nt, Artificial Sequence
  Description of Artificial Sequence: Synthetic oligonucleotide
cgauagagcguuugccaac

SEQ ID NO: 1907749 - RNA, 19 nt, Artificial Sequence
  Description of Artificial Sequence: Synthetic oligonucleotide
ucccgucgaagcugguguu

SEQ ID NO: 1907750 - RNA, 19 nt, Artificial Sequence
  Description of Artificial Sequence: Synthetic oligonucleotide
ggaacgcugacagcuggca

SEQ ID NO: 1907751 - RNA, 19 nt, Artificial Sequence
  Description of Artificial Sequence: Synthetic oligonucleotide
gacuugaguugugcuuuaa

SEQ ID NO: 1907752 - RNA, 19 nt, Artificial Sequence
  Description of Artificial Sequence: Synthetic oligonucleotide
guguucuaccccagccuuc

SEQ ID NO: 1907753 - RNA, 19 nt, Artificial Sequence
  Description of Artificial Sequence: Synthetic oligonucleotide
gcugcguuuuaaacagcac

SEQ ID NO: 1907754 - RNA, 19 nt, Artificial Sequence
  Description of Artificial Sequence: Synthetic oligonucleotide
uggugggugugugccucga

SEQ ID NO: 1907755 - RNA, 19 nt, Artificial Sequence
  Description of Artificial Sequence: Synthetic oligonucleotide
gggucacuaagcugggaua

SEQ ID NO: 1907756 - RNA, 19 nt, Artificial Sequence
  Description of Artificial Sequence: Synthetic oligonucleotide
ggcgcguauucuagaauca

SEQ ID NO: 1907757 - RNA, 19 nt, Artificial Sequence
  Description of Artificial Sequence: Synthetic oligonucleotide
gaggcgcguauucuagaau

SEQ ID NO: 1907758 - RNA, 19 nt, Artificial Sequence
  Description of Artificial Sequence: Synthetic oligonucleotide
ggggucacuaagcugggau

SEQ ID NO: 1907759 - RNA, 19 nt, Artificial Sequence
  Description of Artificial Sequence: Synthetic oligonucleotide
gguguucuaccccagccuu

SEQ ID NO: 1907760 - RNA, 19 nt, Artificial Sequence
  Description of Artificial Sequence: Synthetic oligonucleotide
uccccaggucucucuugau

SEQ ID NO: 1907761 - RNA, 19 nt, Artificial Sequence
  Description of Artificial Sequence: Synthetic oligonucleotide
ggcaacgaugauggucccc

SEQ ID NO: 1907762 - RNA, 19 nt, Artificial Sequence
  Description of Artificial Sequence: Synthetic oligonucleotide
ugccgaaggugggacugua

SEQ ID NO: 1907763 - RNA, 19 nt, Artificial Sequence
  Description of Artificial Sequence: Synthetic oligonucleotide
cugguggcgucauggaaau

SEQ ID NO: 1907764 - RNA, 19 nt, Artificial Sequence
  Description of Artificial Sequence: Synthetic oligonucleotide
gaggccaggguuccagauu

SEQ ID NO: 1907765 - RNA, 19 nt, Artificial Sequence
  Description of Artificial Sequence: Synthetic oligonucleotide
acagucccgagaggcgcgu

SEQ ID NO: 1907766 - RNA, 19 nt, Artificial Sequence
  Description of Artificial Sequence: Synthetic oligonucleotide
uacccagugggcggccaau

SEQ ID NO: 1907767 - RNA, 19 nt, Artificial Sequence
  Description of Artificial Sequence: Synthetic oligonucleotide
gcgaucuucaacuccccau

SEQ ID NO: 1907768 - RNA, 19 nt, Artificial Sequence
  Description of Artificial Sequence: Synthetic oligonucleotide
gcuucugaccugagacagc

SEQ ID NO: 1907769 - RNA, 19 nt, Artificial Sequence
  Description of Artificial Sequence: Synthetic oligonucleotide
guguucugagggcaacgau

SEQ ID NO: 1907770 - RNA, 19 nt, Artificial Sequence
  Description of Artificial Sequence: Synthetic oligonucleotide
gcguuucucacagcugcac

SEQ ID NO: 1907771 - RNA, 19 nt, Artificial Sequence
  Description of Artificial Sequence: Synthetic oligonucleotide
ggcaucccaaccaggaacu

SEQ ID NO: 1907772 - RNA, 19 nt, Artificial Sequence
  Description of Artificial Sequence: Synthetic oligonucleotide
caaggacuucugcuagugu

SEQ ID NO: 1907773 - RNA, 19 nt, Artificial Sequence
  Description of Artificial Sequence: Synthetic oligonucleotide
cgcguauucuagaaucaga

SEQ ID NO: 1907774 - RNA, 19 nt, Artificial Sequence
  Description of Artificial Sequence: Synthetic oligonucleotide
cuguccucugcucgucaaa

SEQ ID NO: 1907775 - RNA, 19 nt, Artificial Sequence
  Description of Artificial Sequence: Synthetic oligonucleotide
gcggccaaugucaaagucu

SEQ ID NO: 1907776 - RNA, 19 nt, Artificial Sequence
  Description of Artificial Sequence: Synthetic oligonucleotide
guucuaccccagccuucuc

SEQ ID NO: 1907777 - RNA, 19 nt, Artificial Sequence
  Description of Artificial Sequence: Synthetic oligonucleotide
gagcguuugccaacuccgu

SEQ ID NO: 1907778 - RNA, 19 nt, Artificial Sequence
  Description of Artificial Sequence: Synthetic oligonucleotide
cagugugguucuccuggaa

SEQ ID NO: 1907779 - RNA, 19 nt, Artificial Sequence
  Description of Artificial Sequence: Synthetic oligonucleotide
ggaugcacggccagggacu

SEQ ID NO: 1907780 - RNA, 19 nt, Artificial Sequence
  Description of Artificial Sequence: Synthetic oligonucleotide
augcacggccagggacugg

SEQ ID NO: 1907781 - RNA, 19 nt, Artificial Sequence
  Description of Artificial Sequence: Synthetic oligonucleotide
gucacuaagcugggauacu

SEQ ID NO: 1907782 - RNA, 19 nt, Artificial Sequence
  Description of Artificial Sequence: Synthetic oligonucleotide
ccucgaaaggaggcauccc

SEQ ID NO: 1907783 - RNA, 19 nt, Artificial Sequence
  Description of Artificial Sequence: Synthetic oligonucleotide
ccgaggaacgcugacagcu

SEQ ID NO: 1907784 - RNA, 19 nt, Artificial Sequence
  Description of Artificial Sequence: Synthetic oligonucleotide
gugaagggacacgguggga

SEQ ID NO: 1907785 - RNA, 19 nt, Artificial Sequence
  Description of Artificial Sequence: Synthetic oligonucleotide
cguauucuagaaucagaua

SEQ ID NO: 1907786 - RNA, 19 nt, Artificial Sequence
  Description of Artificial Sequence: Synthetic oligonucleotide
gggcaacgaugaugguccc

SEQ ID NO: 1907787 - RNA, 19 nt, Artificial Sequence
  Description of Artificial Sequence: Synthetic oligonucleotide
ccagaguccgcaggugaug

SEQ ID NO: 1907788 - RNA, 19 nt, Artificial Sequence
  Description of Artificial Sequence: Synthetic oligonucleotide
gcuguccucugcucgucaa

SEQ ID NO: 1907789 - RNA, 19 nt, Artificial Sequence
  Description of Artificial Sequence: Synthetic oligonucleotide
cucaacccgugauauccuu

SEQ ID NO: 1907790 - RNA, 19 nt, Artificial Sequence
  Description of Artificial Sequence: Synthetic oligonucleotide
cguuucucacagcugcaca

SEQ ID NO: 1907791 - RNA, 19 nt, Artificial Sequence
  Description of Artificial Sequence: Synthetic oligonucleotide
ccgaucguuuucagaauua

SEQ ID NO: 1907792 - RNA, 19 nt, Artificial Sequence
  Description of Artificial Sequence: Synthetic oligonucleotide
ccaccucccgucgaagcug

SEQ ID NO: 1907793 - RNA, 19 nt, Artificial Sequence
  Description of Artificial Sequence: Synthetic oligonucleotide
gucucucuugauggggcgu

SEQ ID NO: 1907794 - RNA, 19 nt, Artificial Sequence
  Description of Artificial Sequence: Synthetic oligonucleotide
gcuucucccuugccaaaua

SEQ ID NO: 1907795 - RNA, 19 nt, Artificial Sequence
  Description of Artificial Sequence: Synthetic oligonucleotide
cucgucaaacuuggagagu

SEQ ID NO: 1907796 - RNA, 19 nt, Artificial Sequence
  Description of Artificial Sequence: Synthetic oligonucleotide
gcucccucagucacaaagu

SEQ ID NO: 1907797 - RNA, 19 nt, Artificial Sequence
  Description of Artificial Sequence: Synthetic oligonucleotide
ccaacuccgugauguaugu

SEQ ID NO: 1907798 - RNA, 19 nt, Artificial Sequence
  Description of Artificial Sequence: Synthetic oligonucleotide
acaguacgauagagcguuu

SEQ ID NO: 1907799 - RNA, 19 nt, Artificial Sequence
  Description of Artificial Sequence: Synthetic oligonucleotide
gugggcggccaaugucaaa

SEQ ID NO: 1907800 - RNA, 19 nt, Artificial Sequence
  Description of Artificial Sequence: Synthetic oligonucleotide
gugccucgaaaggaggcau

SEQ ID NO: 1907801 - RNA, 19 nt, Artificial Sequence
  Description of Artificial Sequence: Synthetic oligonucleotide
ccucccgucgaagcuggug

SEQ ID NO: 1907802 - RNA, 19 nt, Artificial Sequence
  Description of Artificial Sequence: Synthetic oligonucleotide
ccgagaggcgcguauucua

SEQ ID NO: 1907803 - RNA, 19 nt, Artificial Sequence
  Description of Artificial Sequence: Synthetic oligonucleotide
ugguggcgucauggaaaua

SEQ ID NO: 1907804 - RNA, 19 nt, Artificial Sequence
  Description of Artificial Sequence: Synthetic oligonucleotide
ggccaaugucaaagucuuc

SEQ ID NO: 1907805 - RNA, 19 nt, Artificial Sequence
  Description of Artificial Sequence: Synthetic oligonucleotide
ccuugccaaauagacauuu

SEQ ID NO: 1907806 - RNA, 19 nt, Artificial Sequence
  Description of Artificial Sequence: Synthetic oligonucleotide
gccgaagguuuugaggaau

SEQ ID NO: 1907807 - RNA, 19 nt, Artificial Sequence
  Description of Artificial Sequence: Synthetic oligonucleotide
caacuccgugauguaugua

SEQ ID NO: 1907808 - RNA, 19 nt, Artificial Sequence
  Description of Artificial Sequence: Synthetic oligonucleotide
cccgucgaagcugguguuc

SEQ ID NO: 1907809 - RNA, 19 nt, Artificial Sequence
  Description of Artificial Sequence: Synthetic oligonucleotide
cccgaucguuuucagaauu

SEQ ID NO: 1907810 - RNA, 19 nt, Artificial Sequence
  Description of Artificial Sequence: Synthetic oligonucleotide
gcccaagaagcagguucuc

SEQ ID NO: 1907811 - RNA, 19 nt, Artificial Sequence
  Description of Artificial Sequence: Synthetic oligonucleotide
gggcggccaaugucaaagu

SEQ ID NO: 1907812 - RNA, 19 nt, Artificial Sequence
  Description of Artificial Sequence: Synthetic oligonucleotide
cggccaaugucaaagucuu

SEQ ID NO: 1907813 - RNA, 19 nt, Artificial Sequence
  Description of Artificial Sequence: Synthetic oligonucleotide
gugccgaaggugggacugu

SEQ ID NO: 1907814 - RNA, 19 nt, Artificial Sequence
  Description of Artificial Sequence: Synthetic oligonucleotide
gcccgaucguuuucagaau

SEQ ID NO: 1907815 - RNA, 19 nt, Artificial Sequence
  Description of Artificial Sequence: Synthetic oligonucleotide
ccgaagguuuugaggaauu

SEQ ID NO: 1907816 - RNA, 19 nt, Artificial Sequence
  Description of Artificial Sequence: Synthetic oligonucleotide
ggucccuggcucccucagu

SEQ ID NO: 1907817 - RNA, 19 nt, Artificial Sequence
  Description of Artificial Sequence: Synthetic oligonucleotide
gcuuugacccagggaugcu

SEQ ID NO: 1907818 - RNA, 19 nt, Artificial Sequence
  Description of Artificial Sequence: Synthetic oligonucleotide
gucccgagaggcgcguauu

SEQ ID NO: 1907819 - RNA, 19 nt, Artificial Sequence
  Description of Artificial Sequence: Synthetic oligonucleotide
gcugcuccgcaggguguuc

SEQ ID NO: 1907820 - RNA, 19 nt, Artificial Sequence
  Description of Artificial Sequence: Synthetic oligonucleotide
cgaucguuuucagaauuau

SEQ ID NO: 1907821 - RNA, 19 nt, Artificial Sequence
  Description of Artificial Sequence: Synthetic oligonucleotide
gccacacagugugguucuc

SEQ ID NO: 1907822 - RNA, 19 nt, Artificial Sequence
  Description of Artificial Sequence: Synthetic oligonucleotide
accucccgucgaagcuggu

SEQ ID NO: 1907823 - RNA, 19 nt, Artificial Sequence
  Description of Artificial Sequence: Synthetic oligonucleotide
gggccagaaugaacuugcu

SEQ ID NO: 1907824 - RNA, 19 nt, Artificial Sequence
  Description of Artificial Sequence: Synthetic oligonucleotide
ccgucgaagcugguguucu

SEQ ID NO: 1907825 - RNA, 19 nt, Artificial Sequence
  Description of Artificial Sequence: Synthetic oligonucleotide
cccgagaggcgcguauucu

SEQ ID NO: 1907826 - RNA, 19 nt, Artificial Sequence
  Description of Artificial Sequence: Synthetic oligonucleotide
cagucccgagaggcgcgua

SEQ ID NO: 1907827 - RNA, 19 nt, Artificial Sequence
  Description of Artificial Sequence: Synthetic oligonucleotide
cgcugacagcuggcaacug

SEQ ID NO: 1907828 - RNA, 19 nt, Artificial Sequence
  Description of Artificial Sequence: Synthetic oligonucleotide
gccgaaggugggacuguau

SEQ ID NO: 1907829 - RNA, 19 nt, Artificial Sequence
  Description of Artificial Sequence: Synthetic oligonucleotide
cgucaaacuuggagaguuu

SEQ ID NO: 1907830 - RNA, 19 nt, Artificial Sequence
  Description of Artificial Sequence: Synthetic oligonucleotide
cccuugccaaauagacauu

SEQ ID NO: 1907831 - RNA, 19 nt, Artificial Sequence
  Description of Artificial Sequence: Synthetic oligonucleotide
gcacggccagggacuggcu

SEQ ID NO: 1907832 - RNA, 19 nt, Artificial Sequence
  Description of Artificial Sequence: Synthetic oligonucleotide
auuaucaaaacuuccaagg

SEQ ID NO: 1907833 - RNA, 19 nt, Artificial Sequence
  Description of Artificial Sequence: Synthetic oligonucleotide
aaugauucggaaaaggccc

SEQ ID NO: 1907834 - RNA, 19 nt, Artificial Sequence
  Description of Artificial Sequence: Synthetic oligonucleotide
aaacuuuccugacagagac

SEQ ID NO: 1907835 - RNA, 19 nt, Artificial Sequence
  Description of Artificial Sequence: Synthetic oligonucleotide
auagucuugagacacaucg

SEQ ID NO: 1907836 - RNA, 19 nt, Artificial Sequence
  Description of Artificial Sequence: Synthetic oligonucleotide
acaguaauauuguagagac

SEQ ID NO: 1907837 - RNA, 19 nt, Artificial Sequence
  Description of Artificial Sequence: Synthetic oligonucleotide
aacuauuaaaauuuccuug

SEQ ID NO: 1907838 - RNA, 19 nt, Artificial Sequence
  Description of Artificial Sequence: Synthetic oligonucleotide
uuuaucauuaauagaaugu

SEQ ID NO: 1907839 - RNA, 19 nt, Artificial Sequence
  Description of Artificial Sequence: Synthetic oligonucleotide
uauauuaucaaaacuucca

SEQ ID NO: 1907840 - RNA, 19 nt, Artificial Sequence
  Description of Artificial Sequence: Synthetic oligonucleotide
uuaacaguaauauuguaga

SEQ ID NO: 1907841 - RNA, 19 nt, Artificial Sequence
  Description of Artificial Sequence: Synthetic oligonucleotide
uugguuauagucuugagac

SEQ ID NO: 1907842 - RNA, 19 nt, Artificial Sequence
  Description of Artificial Sequence: Synthetic oligonucleotide
aaugcuccuuguuuaaagc

SEQ ID NO: 1907843 - RNA, 19 nt, Artificial Sequence
  Description of Artificial Sequence: Synthetic oligonucleotide
uguuuaaagcacucgauag

SEQ ID NO: 1907844 - RNA, 19 nt, Artificial Sequence
  Description of Artificial Sequence: Synthetic oligonucleotide
aguguuaacaguaauauug

SEQ ID NO: 1907845 - RNA, 19 nt, Artificial Sequence
  Description of Artificial Sequence: Synthetic oligonucleotide
uccaagguaaaacaaagca

SEQ ID NO: 1907846 - RNA, 19 nt, Artificial Sequence
  Description of Artificial Sequence: Synthetic oligonucleotide
agacgaaugaacucugucc

SEQ ID NO: 1907847 - RNA, 19 nt, Artificial Sequence
  Description of Artificial Sequence: Synthetic oligonucleotide
aaacaaagcaaugauucgg

SEQ ID NO: 1907848 - RNA, 19 nt, Artificial Sequence
  Description of Artificial Sequence: Synthetic oligonucleotide
ugagauacaaagcaccacc

SEQ ID NO: 1907849 - RNA, 19 nt, Artificial Sequence
  Description of Artificial Sequence: Synthetic oligonucleotide
acaguuaaccagcaugucc

SEQ ID NO: 1907850 - RNA, 19 nt, Artificial Sequence
  Description of Artificial Sequence: Synthetic oligonucleotide
aguaauauuguagagacga

SEQ ID NO: 1907851 - RNA, 19 nt, Artificial Sequence
  Description of Artificial Sequence: Synthetic oligonucleotide
aagaguauuggguccaauc

SEQ ID NO: 1907852 - RNA, 19 nt, Artificial Sequence
  Description of Artificial Sequence: Synthetic oligonucleotide
ucgacugagauacaaagca

SEQ ID NO: 1907853 - RNA, 19 nt, Artificial Sequence
  Description of Artificial Sequence: Synthetic oligonucleotide
uagucuuuuguccaagggg

SEQ ID NO: 1907854 - RNA, 19 nt, Artificial Sequence
  Description of Artificial Sequence: Synthetic oligonucleotide
gauagcaacgcacuuuccg

SEQ ID NO: 1907855 - RNA, 19 nt, Artificial Sequence
  Description of Artificial Sequence: Synthetic oligonucleotide
acuauuaaaauuuccuugu

SEQ ID NO: 1907856 - RNA, 19 nt, Artificial Sequence
  Description of Artificial Sequence: Synthetic oligonucleotide
aauauuguagagacgaaug

SEQ ID NO: 1907857 - RNA, 19 nt, Artificial Sequence
  Description of Artificial Sequence: Synthetic oligonucleotide
gacacaucgacugagauac

SEQ ID NO: 1907858 - RNA, 19 nt, Artificial Sequence
  Description of Artificial Sequence: Synthetic oligonucleotide
agugauggaagucacuggg

SEQ ID NO: 1907859 - RNA, 19 nt, Artificial Sequence
  Description of Artificial Sequence: Synthetic oligonucleotide
aauuuaugcucauuaauuu

SEQ ID NO: 1907860 - RNA, 19 nt, Artificial Sequence
  Description of Artificial Sequence: Synthetic oligonucleotide
ucuugagacacaucgacug

SEQ ID NO: 1907861 - RNA, 19 nt, Artificial Sequence
  Description of Artificial Sequence: Synthetic oligonucleotide
caccauauaaagaagcagc

SEQ ID NO: 1907862 - RNA, 19 nt, Artificial Sequence
  Description of Artificial Sequence: Synthetic oligonucleotide
accuguuuaucauuaauag

SEQ ID NO: 1907863 - RNA, 19 nt, Artificial Sequence
  Description of Artificial Sequence: Synthetic oligonucleotide
cuguuuaucauuaauagaa

SEQ ID NO: 1907864 - RNA, 19 nt, Artificial Sequence
  Description of Artificial Sequence: Synthetic oligonucleotide
uugacaauuuguuuggcca

SEQ ID NO: 1907865 - RNA, 19 nt, Artificial Sequence
  Description of Artificial Sequence: Synthetic oligonucleotide
guuaacaguaauauuguag

SEQ ID NO: 1907866 - RNA, 19 nt, Artificial Sequence
  Description of Artificial Sequence: Synthetic oligonucleotide
acuaacuucaaguucuuca

SEQ ID NO: 1907867 - RNA, 19 nt, Artificial Sequence
  Description of Artificial Sequence: Synthetic oligonucleotide
aaguccaaggccgaaaauc

SEQ ID NO: 1907868 - RNA, 19 nt, Artificial Sequence
  Description of Artificial Sequence: Synthetic oligonucleotide
caaugauucggaaaaggcc

SEQ ID NO: 1907869 - RNA, 19 nt, Artificial Sequence
  Description of Artificial Sequence: Synthetic oligonucleotide
ucaaacuuuccugacagag

SEQ ID NO: 1907870 - RNA, 19 nt, Artificial Sequence
  Description of Artificial Sequence: Synthetic oligonucleotide
caagacacaaaguccaagg

SEQ ID NO: 1907871 - RNA, 19 nt, Artificial Sequence
  Description of Artificial Sequence: Synthetic oligonucleotide
aggggcaagaauuaggcag

SEQ ID NO: 1907872 - RNA, 19 nt, Artificial Sequence
  Description of Artificial Sequence: Synthetic oligonucleotide
uuugucuacaguuucgggu

SEQ ID NO: 1907873 - RNA, 19 nt, Artificial Sequence
  Description of Artificial Sequence: Synthetic oligonucleotide
uuuaaagcacucgauagca

SEQ ID NO: 1907874 - RNA, 19 nt, Artificial Sequence
  Description of Artificial Sequence: Synthetic oligonucleotide
uuacucaaaagcacuaacu

SEQ ID NO: 1907875 - RNA, 19 nt, Artificial Sequence
  Description of Artificial Sequence: Synthetic oligonucleotide
acuauauuaucaaaacuuc

SEQ ID NO: 1907876 - RNA, 19 nt, Artificial Sequence
  Description of Artificial Sequence: Synthetic oligonucleotide
guuuaucauuaauagaaug

SEQ ID NO: 1907877 - RNA, 19 nt, Artificial Sequence
  Description of Artificial Sequence: Synthetic oligonucleotide
uuaucaaaacuuccaaggu

SEQ ID NO: 1907878 - RNA, 19 nt, Artificial Sequence
  Description of Artificial Sequence: Synthetic oligonucleotide
aagcacuaacuucaaguuc

SEQ ID NO: 1907879 - RNA, 19 nt, Artificial Sequence
  Description of Artificial Sequence: Synthetic oligonucleotide
aacaguaauauuguagaga

SEQ ID NO: 1907880 - RNA, 19 nt, Artificial Sequence
  Description of Artificial Sequence: Synthetic oligonucleotide
uuuccgaugccacuggacc

SEQ ID NO: 1907881 - RNA, 19 nt, Artificial Sequence
  Description of Artificial Sequence: Synthetic oligonucleotide
uauaaaugcuccuuguuua

SEQ ID NO: 1907882 - RNA, 19 nt, Artificial Sequence
  Description of Artificial Sequence: Synthetic oligonucleotide
auuguagagacgaaugaac

SEQ ID NO: 1907883 - RNA, 19 nt, Artificial Sequence
  Description of Artificial Sequence: Synthetic oligonucleotide
auuagcagcaagcuguuca

SEQ ID NO: 1907884 - RNA, 19 nt, Artificial Sequence
  Description of Artificial Sequence: Synthetic oligonucleotide
aaucgaguuccauuagcag

SEQ ID NO: 1907885 - RNA, 19 nt, Artificial Sequence
  Description of Artificial Sequence: Synthetic oligonucleotide
aaagcacuaacuucaaguu

SEQ ID NO: 1907886 - RNA, 19 nt, Artificial Sequence
  Description of Artificial Sequence: Synthetic oligonucleotide
auuucgugcaaccagaguu

SEQ ID NO: 1907887 - RNA, 19 nt, Artificial Sequence
  Description of Artificial Sequence: Synthetic oligonucleotide
aguuccauuagcagcaagc

SEQ ID NO: 1907888 - RNA, 19 nt, Artificial Sequence
  Description of Artificial Sequence: Synthetic oligonucleotide
agaauuaggcaguuuuguc

SEQ ID NO: 1907889 - RNA, 19 nt, Artificial Sequence
  Description of Artificial Sequence: Synthetic oligonucleotide
uuguauggcaucuuugaca

SEQ ID NO: 1907890 - RNA, 19 nt, Artificial Sequence
  Description of Artificial Sequence: Synthetic oligonucleotide
caaccagaguuauaaaugc

SEQ ID NO: 1907891 - RNA, 19 nt, Artificial Sequence
  Description of Artificial Sequence: Synthetic oligonucleotide
uuugacaauuuguuuggcc

SEQ ID NO: 1907892 - RNA, 19 nt, Artificial Sequence
  Description of Artificial Sequence: Synthetic oligonucleotide
ucgaguuccauuagcagca

SEQ ID NO: 1907893 - RNA, 19 nt, Artificial Sequence
  Description of Artificial Sequence: Synthetic oligonucleotide
ucuugugccugcuuuauga

SEQ ID NO: 1907894 - RNA, 19 nt, Artificial Sequence
  Description of Artificial Sequence: Synthetic oligonucleotide
ugauggaagucacuggggc

SEQ ID NO: 1907895 - RNA, 19 nt, Artificial Sequence
  Description of Artificial Sequence: Synthetic oligonucleotide
uuguagagacgaaugaacu

SEQ ID NO: 1907896 - RNA, 19 nt, Artificial Sequence
  Description of Artificial Sequence: Synthetic oligonucleotide
uggaacuauuaaaauuucc

SEQ ID NO: 1907897 - RNA, 19 nt, Artificial Sequence
  Description of Artificial Sequence: Synthetic oligonucleotide
auucggaaaaggcccaugg

SEQ ID NO: 1907898 - RNA, 19 nt, Artificial Sequence
  Description of Artificial Sequence: Synthetic oligonucleotide
gauuucugaagaguauugg

SEQ ID NO: 1907899 - RNA, 19 nt, Artificial Sequence
  Description of Artificial Sequence: Synthetic oligonucleotide
agaguauuggguccaaucu

SEQ ID NO: 1907900 - RNA, 19 nt, Artificial Sequence
  Description of Artificial Sequence: Synthetic oligonucleotide
caucgacugagauacaaag

SEQ ID NO: 1907901 - RNA, 19 nt, Artificial Sequence
  Description of Artificial Sequence: Synthetic oligonucleotide
uauagucuuuuguccaagg

SEQ ID NO: 1907902 - RNA, 19 nt, Artificial Sequence
  Description of Artificial Sequence: Synthetic oligonucleotide
aggccgaaaaucgaguucc

SEQ ID NO: 1907903 - RNA, 19 nt, Artificial Sequence
  Description of Artificial Sequence: Synthetic oligonucleotide
ucaauuucuuucuucgccu

SEQ ID NO: 1907904 - RNA, 19 nt, Artificial Sequence
  Description of Artificial Sequence: Synthetic oligonucleotide
aaggccgaaaaucgaguuc

SEQ ID NO: 1907905 - RNA, 19 nt, Artificial Sequence
  Description of Artificial Sequence: Synthetic oligonucleotide
uaacaguaauauuguagag

SEQ ID NO: 1907906 - RNA, 19 nt, Artificial Sequence
  Description of Artificial Sequence: Synthetic oligonucleotide
aauuuccuuguauggcauc

SEQ ID NO: 1907907 - RNA, 19 nt, Artificial Sequence
  Description of Artificial Sequence: Synthetic oligonucleotide
aagaauuaggcaguuuugu

SEQ ID NO: 1907908 - RNA, 19 nt, Artificial Sequence
  Description of Artificial Sequence: Synthetic oligonucleotide
uaucaaaacuuccaaggua

SEQ ID NO: 1907909 - RNA, 19 nt, Artificial Sequence
  Description of Artificial Sequence: Synthetic oligonucleotide
uaaagcacucgauagcaac

SEQ ID NO: 1907910 - RNA, 19 nt, Artificial Sequence
  Description of Artificial Sequence: Synthetic oligonucleotide
guuuaaagcacucgauagc

SEQ ID NO: 1907911 - RNA, 19 nt, Artificial Sequence
  Description of Artificial Sequence: Synthetic oligonucleotide
auauuaucaaaacuuccaa

SEQ ID NO: 1907912 - RNA, 19 nt, Artificial Sequence
  Description of Artificial Sequence: Synthetic oligonucleotide
uccaaggccgaaaaucgag

SEQ ID NO: 1907913 - RNA, 19 nt, Artificial Sequence
  Description of Artificial Sequence: Synthetic oligonucleotide
uguucaaaucacuggauau

SEQ ID NO: 1907914 - RNA, 19 nt, Artificial Sequence
  Description of Artificial Sequence: Synthetic oligonucleotide
uugcauaguguuaacagua

SEQ ID NO: 1907915 - RNA, 19 nt, Artificial Sequence
  Description of Artificial Sequence: Synthetic oligonucleotide
ucuucaaacuuuccugaca

SEQ ID NO: 1907916 - RNA, 19 nt, Artificial Sequence
  Description of Artificial Sequence: Synthetic oligonucleotide
aacucugucccuucacuug

SEQ ID NO: 1907917 - RNA, 19 nt, Artificial Sequence
  Description of Artificial Sequence: Synthetic oligonucleotide
uuguuuaaagcacucgaua

SEQ ID NO: 1907918 - RNA, 19 nt, Artificial Sequence
  Description of Artificial Sequence: Synthetic oligonucleotide
gacugagauacaaagcacc

SEQ ID NO: 1907919 - RNA, 19 nt, Artificial Sequence
  Description of Artificial Sequence: Synthetic oligonucleotide
aguuauaaaugcuccuugu

SEQ ID NO: 1907920 - RNA, 19 nt, Artificial Sequence
  Description of Artificial Sequence: Synthetic oligonucleotide
aaaucacuggauauagucu

SEQ ID NO: 1907921 - RNA, 19 nt, Artificial Sequence
  Description of Artificial Sequence: Synthetic oligonucleotide
caagcuguucaaaucacug

SEQ ID NO: 1907922 - RNA, 19 nt, Artificial Sequence
  Description of Artificial Sequence: Synthetic oligonucleotide
uguuuaucauuaauagaau

SEQ ID NO: 1907923 - RNA, 19 nt, Artificial Sequence
  Description of Artificial Sequence: Synthetic oligonucleotide
ugcaaccagaguuauaaau

SEQ ID NO: 1907924 - RNA, 19 nt, Artificial Sequence
  Description of Artificial Sequence: Synthetic oligonucleotide
agcuguucaaaucacugga

SEQ ID NO: 1907925 - RNA, 19 nt, Artificial Sequence
  Description of Artificial Sequence: Synthetic oligonucleotide
agcauguacccaucugagc

SEQ ID NO: 1907926 - RNA, 19 nt, Artificial Sequence
  Description of Artificial Sequence: Synthetic oligonucleotide
gaaaaucgaguuccauuag

SEQ ID NO: 1907927 - RNA, 19 nt, Artificial Sequence
  Description of Artificial Sequence: Synthetic oligonucleotide
uacaguuucggguuuugcu

SEQ ID NO: 1907928 - RNA, 19 nt, Artificial Sequence
  Description of Artificial Sequence: Synthetic oligonucleotide
uuucaauuucuuucuucgc

SEQ ID NO: 1907929 - RNA, 19 nt, Artificial Sequence
  Description of Artificial Sequence: Synthetic oligonucleotide
aguccaaggccgaaaaucg

SEQ ID NO: 1907930 - RNA, 19 nt, Artificial Sequence
  Description of Artificial Sequence: Synthetic oligonucleotide
ucgauagcaacgcacuuuc

SEQ ID NO: 1907931 - RNA, 19 nt, Artificial Sequence
  Description of Artificial Sequence: Synthetic oligonucleotide
accagaguuauaaaugcuc

SEQ ID NO: 1907932 - RNA, 19 nt, Artificial Sequence
  Description of Artificial Sequence: Synthetic oligonucleotide
uguagagacgaaugaacuc

SEQ ID NO: 1907933 - RNA, 19 nt, Artificial Sequence
  Description of Artificial Sequence: Synthetic oligonucleotide
agguaauuuaugcucauua

SEQ ID NO: 1907934 - RNA, 19 nt, Artificial Sequence
  Description of Artificial Sequence: Synthetic oligonucleotide
aaaaggcccauggugacca

SEQ ID NO: 1907935 - RNA, 19 nt, Artificial Sequence
  Description of Artificial Sequence: Synthetic oligonucleotide
aacaaagcaaugauucgga

SEQ ID NO: 1907936 - RNA, 19 nt, Artificial Sequence
  Description of Artificial Sequence: Synthetic oligonucleotide
uccugugaccacuacgugc

SEQ ID NO: 1907937 - RNA, 19 nt, Artificial Sequence
  Description of Artificial Sequence: Synthetic oligonucleotide
uuaugcucauuaauuuacu

SEQ ID NO: 1907938 - RNA, 19 nt, Artificial Sequence
  Description of Artificial Sequence: Synthetic oligonucleotide
gcauguacccaucugagcc

SEQ ID NO: 1907939 - RNA, 19 nt, Artificial Sequence
  Description of Artificial Sequence: Synthetic oligonucleotide
auagcaacgcacuuuccga

SEQ ID NO: 1907940 - RNA, 19 nt, Artificial Sequence
  Description of Artificial Sequence: Synthetic oligonucleotide
auauuugcauaguguuaac

SEQ ID NO: 1907941 - RNA, 19 nt, Artificial Sequence
  Description of Artificial Sequence: Synthetic oligonucleotide
caagaauuaggcaguuuug

SEQ ID NO: 1907942 - RNA, 19 nt, Artificial Sequence
  Description of Artificial Sequence: Synthetic oligonucleotide
ucauuucgugcaaccagag

SEQ ID NO: 1907943 - RNA, 19 nt, Artificial Sequence
  Description of Artificial Sequence: Synthetic oligonucleotide
auauaaagaagcagcacga

SEQ ID NO: 1907944 - RNA, 19 nt, Artificial Sequence
  Description of Artificial Sequence: Synthetic oligonucleotide
guuuugucuacaguuucgg

SEQ ID NO: 1907945 - RNA, 19 nt, Artificial Sequence
  Description of Artificial Sequence: Synthetic oligonucleotide
uauuguagagacgaaugaa

SEQ ID NO: 1907946 - RNA, 19 nt, Artificial Sequence
  Description of Artificial Sequence: Synthetic oligonucleotide
gauggaagucacuggggcc

SEQ ID NO: 1907947 - RNA, 19 nt, Artificial Sequence
  Description of Artificial Sequence: Synthetic oligonucleotide
uacccaucugagccaaugg

SEQ ID NO: 1907948 - RNA, 19 nt, Artificial Sequence
  Description of Artificial Sequence: Synthetic oligonucleotide
uauuugcauaguguuaaca

SEQ ID NO: 1907949 - RNA, 19 nt, Artificial Sequence
  Description of Artificial Sequence: Synthetic oligonucleotide
uaugcucauuaauuuacuc

SEQ ID NO: 1907950 - RNA, 19 nt, Artificial Sequence
  Description of Artificial Sequence: Synthetic oligonucleotide
aucaaaacuuccaagguaa

SEQ ID NO: 1907951 - RNA, 19 nt, Artificial Sequence
  Description of Artificial Sequence: Synthetic oligonucleotide
ucuccacuugguuauaguc

SEQ ID NO: 1907952 - RNA, 19 nt, Artificial Sequence
  Description of Artificial Sequence: Synthetic oligonucleotide
agaagcagcacgaaggcca

SEQ ID NO: 1907953 - RNA, 19 nt, Artificial Sequence
  Description of Artificial Sequence: Synthetic oligonucleotide
acauucuccacuugguuau

SEQ ID NO: 1907954 - RNA, 19 nt, Artificial Sequence
  Description of Artificial Sequence: Synthetic oligonucleotide
gaacuauauuaucaaaacu

SEQ ID NO: 1907955 - RNA, 19 nt, Artificial Sequence
  Description of Artificial Sequence: Synthetic oligonucleotide
ugagccaauggaacuauua

SEQ ID NO: 1907956 - RNA, 19 nt, Artificial Sequence
  Description of Artificial Sequence: Synthetic oligonucleotide
uugucuacaguuucggguu

SEQ ID NO: 1907957 - RNA, 19 nt, Artificial Sequence
  Description of Artificial Sequence: Synthetic oligonucleotide
uguuuggccauggugguga

SEQ ID NO: 1907958 - RNA, 19 nt, Artificial Sequence
  Description of Artificial Sequence: Synthetic oligonucleotide
aagucacuggggccauccc

SEQ ID NO: 1907959 - RNA, 19 nt, Artificial Sequence
  Description of Artificial Sequence: Synthetic oligonucleotide
aguuaaccagcauguccac

SEQ ID NO: 1907960 - RNA, 19 nt, Artificial Sequence
  Description of Artificial Sequence: Synthetic oligonucleotide
gaguauuggguccaaucuc

SEQ ID NO: 1907961 - RNA, 19 nt, Artificial Sequence
  Description of Artificial Sequence: Synthetic oligonucleotide
aauuuacucaaaagcacua

SEQ ID NO: 1907962 - RNA, 19 nt, Artificial Sequence
  Description of Artificial Sequence: Synthetic oligonucleotide
gacagguucucuguguagc

SEQ ID NO: 1907963 - RNA, 19 nt, Artificial Sequence
  Description of Artificial Sequence: Synthetic oligonucleotide
uuuaccaugcagcggcgaa

SEQ ID NO: 1907964 - RNA, 19 nt, Artificial Sequence
  Description of Artificial Sequence: Synthetic oligonucleotide
ugcauaguguuaacaguaa

SEQ ID NO: 1907965 - RNA, 19 nt, Artificial Sequence
  Description of Artificial Sequence: Synthetic oligonucleotide
aaagcaccaccuguuuauc

SEQ ID NO: 1907966 - RNA, 19 nt, Artificial Sequence
  Description of Artificial Sequence: Synthetic oligonucleotide
uuucgugcaaccagaguua

SEQ ID NO: 1907967 - RNA, 19 nt, Artificial Sequence
  Description of Artificial Sequence: Synthetic oligonucleotide
acaauuuguuuggccaugg

SEQ ID NO: 1907968 - RNA, 19 nt, Artificial Sequence
  Description of Artificial Sequence: Synthetic oligonucleotide
cauaguguuaacaguaaua

SEQ ID NO: 1907969 - RNA, 19 nt, Artificial Sequence
  Description of Artificial Sequence: Synthetic oligonucleotide
ucaaaucacuggauauagu

SEQ ID NO: 1907970 - RNA, 19 nt, Artificial Sequence
  Description of Artificial Sequence: Synthetic oligonucleotide
cuuguauggcaucuuugac

SEQ ID NO: 1907971 - RNA, 19 nt, Artificial Sequence
  Description of Artificial Sequence: Synthetic oligonucleotide
aguauuggguccaaucuca

SEQ ID NO: 1907972 - RNA, 19 nt, Artificial Sequence
  Description of Artificial Sequence: Synthetic oligonucleotide
acaguuucggguuuugcuu

SEQ ID NO: 1907973 - RNA, 19 nt, Artificial Sequence
  Description of Artificial Sequence: Synthetic oligonucleotide
gauauagucuuuuguccaa

SEQ ID NO: 1907974 - RNA, 19 nt, Artificial Sequence
  Description of Artificial Sequence: Synthetic oligonucleotide
ccugugaccacuacgugcg

SEQ ID NO: 1907975 - RNA, 19 nt, Artificial Sequence
  Description of Artificial Sequence: Synthetic oligonucleotide
agccaauggaacuauuaaa

SEQ ID NO: 1907976 - RNA, 19 nt, Artificial Sequence
  Description of Artificial Sequence: Synthetic oligonucleotide
caguaauauuguagagacg

SEQ ID NO: 1907977 - RNA, 19 nt, Artificial Sequence
  Description of Artificial Sequence: Synthetic oligonucleotide
augcuccuuguuuaaagca

SEQ ID NO: 1907978 - RNA, 19 nt, Artificial Sequence
  Description of Artificial Sequence: Synthetic oligonucleotide
uguuaacaguaauauugua

SEQ ID NO: 1907979 - RNA, 19 nt, Artificial Sequence
  Description of Artificial Sequence: Synthetic oligonucleotide
aaggggcaagaauuaggca

SEQ ID NO: 1907980 - RNA, 19 nt, Artificial Sequence
  Description of Artificial Sequence: Synthetic oligonucleotide
ugacaauuuguuuggccau

SEQ ID NO: 1907981 - RNA, 19 nt, Artificial Sequence
  Description of Artificial Sequence: Synthetic oligonucleotide
uuaaagcacucgauagcaa

SEQ ID NO: 1907982 - RNA, 19 nt, Artificial Sequence
  Description of Artificial Sequence: Synthetic oligonucleotide
accauauaaagaagcagca

SEQ ID NO: 1907983 - RNA, 19 nt, Artificial Sequence
  Description of Artificial Sequence: Synthetic oligonucleotide
accaaaugguguccugguc

SEQ ID NO: 1907984 - RNA, 19 nt, Artificial Sequence
  Description of Artificial Sequence: Synthetic oligonucleotide
aagcaccaccuguuuauca

SEQ ID NO: 1907985 - RNA, 19 nt, Artificial Sequence
  Description of Artificial Sequence: Synthetic oligonucleotide
ugugaccacuacgugcgcg

SEQ ID NO: 1907986 - RNA, 19 nt, Artificial Sequence
  Description of Artificial Sequence: Synthetic oligonucleotide
ugguuauagucuugagaca

SEQ ID NO: 1907987 - RNA, 19 nt, Artificial Sequence
  Description of Artificial Sequence: Synthetic oligonucleotide
agcggcgaacuauauuauc

SEQ ID NO: 1907988 - RNA, 19 nt, Artificial Sequence
  Description of Artificial Sequence: Synthetic oligonucleotide
gaacuauuaaaauuuccuu

SEQ ID NO: 1907989 - RNA, 19 nt, Artificial Sequence
  Description of Artificial Sequence: Synthetic oligonucleotide
uuucuucgccugcagcagc

SEQ ID NO: 1907990 - RNA, 19 nt, Artificial Sequence
  Description of Artificial Sequence: Synthetic oligonucleotide
uucggaaaaggcccauggu

SEQ ID NO: 1907991 - RNA, 19 nt, Artificial Sequence
  Description of Artificial Sequence: Synthetic oligonucleotide
acuggacccuccugugacc

SEQ ID NO: 1907992 - RNA, 19 nt, Artificial Sequence
  Description of Artificial Sequence: Synthetic oligonucleotide
uuguccaaggggcaagaau

SEQ ID NO: 1907993 - RNA, 19 nt, Artificial Sequence
  Description of Artificial Sequence: Synthetic oligonucleotide
uauuggguccaaucucaca

SEQ ID NO: 1907994 - RNA, 19 nt, Artificial Sequence
  Description of Artificial Sequence: Synthetic oligonucleotide
ggauauagucuuuugucca

SEQ ID NO: 1907995 - RNA, 19 nt, Artificial Sequence
  Description of Artificial Sequence: Synthetic oligonucleotide
uccaaucucacacguucaa

SEQ ID NO: 1907996 - RNA, 19 nt, Artificial Sequence
  Description of Artificial Sequence: Synthetic oligonucleotide
auuuccuuguauggcaucu

SEQ ID NO: 1907997 - RNA, 19 nt, Artificial Sequence
  Description of Artificial Sequence: Synthetic oligonucleotide
cuuuaugacauucuccacu

SEQ ID NO: 1907998 - RNA, 19 nt, Artificial Sequence
  Description of Artificial Sequence: Synthetic oligonucleotide
uuccugacagagacguccc

SEQ ID NO: 1907999 - RNA, 19 nt, Artificial Sequence
  Description of Artificial Sequence: Synthetic oligonucleotide
cagugauggaagucacugg

SEQ ID NO: 1908000 - RNA, 19 nt, Artificial Sequence
  Description of Artificial Sequence: Synthetic oligonucleotide
cagcauguacccaucugag

SEQ ID NO: 1908001 - RNA, 19 nt, Artificial Sequence
  Description of Artificial Sequence: Synthetic oligonucleotide
acaagacacaaaguccaag

SEQ ID NO: 1908002 - RNA, 19 nt, Artificial Sequence
  Description of Artificial Sequence: Synthetic oligonucleotide
gagccaauggaacuauuaa

SEQ ID NO: 1908003 - RNA, 19 nt, Artificial Sequence
  Description of Artificial Sequence: Synthetic oligonucleotide
cugguccauauuugcauag

SEQ ID NO: 1908004 - RNA, 19 nt, Artificial Sequence
  Description of Artificial Sequence: Synthetic oligonucleotide
aaaguccaaggccgaaaau

SEQ ID NO: 1908005 - RNA, 19 nt, Artificial Sequence
  Description of Artificial Sequence: Synthetic oligonucleotide
ucguagacagguucucugu

SEQ ID NO: 1908006 - RNA, 19 nt, Artificial Sequence
  Description of Artificial Sequence: Synthetic oligonucleotide
cgaacuauauuaucaaaac

SEQ ID NO: 1908007 - RNA, 19 nt, Artificial Sequence
  Description of Artificial Sequence: Synthetic oligonucleotide
aagcaaugauucggaaaag

SEQ ID NO: 1908008 - RNA, 19 nt, Artificial Sequence
  Description of Artificial Sequence: Synthetic oligonucleotide
auauagucuuuuguccaag

SEQ ID NO: 1908009 - RNA, 19 nt, Artificial Sequence
  Description of Artificial Sequence: Synthetic oligonucleotide
cuucagugauggaagucac

SEQ ID NO: 1908010 - RNA, 19 nt, Artificial Sequence
  Description of Artificial Sequence: Synthetic oligonucleotide
caaaagcacuaacuucaag

SEQ ID NO: 1908011 - RNA, 19 nt, Artificial Sequence
  Description of Artificial Sequence: Synthetic oligonucleotide
uuaugacauucuccacuug

SEQ ID NO: 1908012 - RNA, 19 nt, Artificial Sequence
  Description of Artificial Sequence: Synthetic oligonucleotide
cugccugcuggguacacgc

SEQ ID NO: 1908013 - RNA, 19 nt, Artificial Sequence
  Description of Artificial Sequence: Synthetic oligonucleotide
aaauuuccuuguauggcau

SEQ ID NO: 1908014 - RNA, 19 nt, Artificial Sequence
  Description of Artificial Sequence: Synthetic oligonucleotide
cucauuucgugcaaccaga

SEQ ID NO: 1908015 - RNA, 19 nt, Artificial Sequence
  Description of Artificial Sequence: Synthetic oligonucleotide
uagacagguucucugugua

SEQ ID NO: 1908016 - RNA, 19 nt, Artificial Sequence
  Description of Artificial Sequence: Synthetic oligonucleotide
gacaauuuguuuggccaug

SEQ ID NO: 1908017 - RNA, 19 nt, Artificial Sequence
  Description of Artificial Sequence: Synthetic oligonucleotide
gcaaugauucggaaaaggc

SEQ ID NO: 1908018 - RNA, 19 nt, Artificial Sequence
  Description of Artificial Sequence: Synthetic oligonucleotide
agcaagcuguucaaaucac

SEQ ID NO: 1908019 - RNA, 19 nt, Artificial Sequence
  Description of Artificial Sequence: Synthetic oligonucleotide
gcggcgacaccauauaaag

SEQ ID NO: 1908020 - RNA, 19 nt, Artificial Sequence
  Description of Artificial Sequence: Synthetic oligonucleotide
agacagguucucuguguag

SEQ ID NO: 1908021 - RNA, 19 nt, Artificial Sequence
  Description of Artificial Sequence: Synthetic oligonucleotide
cuugugccugcuuuaugac

SEQ ID NO: 1908022 - RNA, 19 nt, Artificial Sequence
  Description of Artificial Sequence: Synthetic oligonucleotide
uauagucuugagacacauc

SEQ ID NO: 1908023 - RNA, 19 nt, Artificial Sequence
  Description of Artificial Sequence: Synthetic oligonucleotide
uccccgcacaguuaaccag

SEQ ID NO: 1908024 - RNA, 19 nt, Artificial Sequence
  Description of Artificial Sequence: Synthetic oligonucleotide
guagagacgaaugaacucu

SEQ ID NO: 1908025 - RNA, 19 nt, Artificial Sequence
  Description of Artificial Sequence: Synthetic oligonucleotide
cuuuccgaugccacuggac

SEQ ID NO: 1908026 - RNA, 19 nt, Artificial Sequence
  Description of Artificial Sequence: Synthetic oligonucleotide
agcaccaccuguuuaucau

SEQ ID NO: 1908027 - RNA, 19 nt, Artificial Sequence
  Description of Artificial Sequence: Synthetic oligonucleotide
accagcauguccacaggac

SEQ ID NO: 1908028 - RNA, 19 nt, Artificial Sequence
  Description of Artificial Sequence: Synthetic oligonucleotide
gguaauuuaugcucauuaa

SEQ ID NO: 1908029 - RNA, 19 nt, Artificial Sequence
  Description of Artificial Sequence: Synthetic oligonucleotide
gguccauauuugcauagug

SEQ ID NO: 1908030 - RNA, 19 nt, Artificial Sequence
  Description of Artificial Sequence: Synthetic oligonucleotide
gguaaaacaaagcaaugau

SEQ ID NO: 1908031 - RNA, 19 nt, Artificial Sequence
  Description of Artificial Sequence: Synthetic oligonucleotide
agucacuggggccauccca

SEQ ID NO: 1908032 - RNA, 19 nt, Artificial Sequence
  Description of Artificial Sequence: Synthetic oligonucleotide
cacgaaggccacgaggccg

SEQ ID NO: 1908033 - RNA, 19 nt, Artificial Sequence
  Description of Artificial Sequence: Synthetic oligonucleotide
uucuucgccugcagcagcu

SEQ ID NO: 1908034 - RNA, 19 nt, Artificial Sequence
  Description of Artificial Sequence: Synthetic oligonucleotide
gugauggaagucacugggg

SEQ ID NO: 1908035 - RNA, 19 nt, Artificial Sequence
  Description of Artificial Sequence: Synthetic oligonucleotide
agcaacgcacuuuccgaug

SEQ ID NO: 1908036 - RNA, 19 nt, Artificial Sequence
  Description of Artificial Sequence: Synthetic oligonucleotide
ucccuucacuugcagccag

SEQ ID NO: 1908037 - RNA, 19 nt, Artificial Sequence
  Description of Artificial Sequence: Synthetic oligonucleotide
agacacaucgacugagaua

SEQ ID NO: 1908038 - RNA, 19 nt, Artificial Sequence
  Description of Artificial Sequence: Synthetic oligonucleotide
gugaccacuacgugcgcgc

SEQ ID NO: 1908039 - RNA, 19 nt, Artificial Sequence
  Description of Artificial Sequence: Synthetic oligonucleotide
gaaaaggcccauggugacc

SEQ ID NO: 1908040 - RNA, 19 nt, Artificial Sequence
  Description of Artificial Sequence: Synthetic oligonucleotide
acuacgugcgcgccgggca

SEQ ID NO: 1908041 - RNA, 19 nt, Artificial Sequence
  Description of Artificial Sequence: Synthetic oligonucleotide
caccuguuuaucauuaaua

SEQ ID NO: 1908042 - RNA, 19 nt, Artificial Sequence
  Description of Artificial Sequence: Synthetic oligonucleotide
aacgcacuuuccgaugcca

SEQ ID NO: 1908043 - RNA, 19 nt, Artificial Sequence
  Description of Artificial Sequence: Synthetic oligonucleotide
cuuucuucgccugcagcag

SEQ ID NO: 1908044 - RNA, 19 nt, Artificial Sequence
  Description of Artificial Sequence: Synthetic oligonucleotide
caaaugguguccuggucca

SEQ ID NO: 1908045 - RNA, 19 nt, Artificial Sequence
  Description of Artificial Sequence: Synthetic oligonucleotide
guacacgcugcccagguaa

SEQ ID NO: 1908046 - RNA, 19 nt, Artificial Sequence
  Description of Artificial Sequence: Synthetic oligonucleotide
accacuacgugcgcgccgg

SEQ ID NO: 1908047 - RNA, 19 nt, Artificial Sequence
  Description of Artificial Sequence: Synthetic oligonucleotide
acaaagcaccaccuguuua

SEQ ID NO: 1908048 - RNA, 19 nt, Artificial Sequence
  Description of Artificial Sequence: Synthetic oligonucleotide
cacuggacccuccugugac

SEQ ID NO: 1908049 - RNA, 19 nt, Artificial Sequence
  Description of Artificial Sequence: Synthetic oligonucleotide
uaaaugcuccuuguuuaaa

SEQ ID NO: 1908050 - RNA, 19 nt, Artificial Sequence
  Description of Artificial Sequence: Synthetic oligonucleotide
gcagcggcgaacuauauua

SEQ ID NO: 1908051 - RNA, 19 nt, Artificial Sequence
  Description of Artificial Sequence: Synthetic oligonucleotide
ugagcggcgacaccauaua

SEQ ID NO: 1908052 - RNA, 19 nt, Artificial Sequence
  Description of Artificial Sequence: Synthetic oligonucleotide
uagcaacgcacuuuccgau

SEQ ID NO: 1908053 - RNA, 19 nt, Artificial Sequence
  Description of Artificial Sequence: Synthetic oligonucleotide
cgacaccauauaaagaagc

SEQ ID NO: 1908054 - RNA, 19 nt, Artificial Sequence
  Description of Artificial Sequence: Synthetic oligonucleotide
cugaugagcggcgacacca

SEQ ID NO: 1908055 - RNA, 19 nt, Artificial Sequence
  Description of Artificial Sequence: Synthetic oligonucleotide
uaccaugcagcggcgaacu

SEQ ID NO: 1908056 - RNA, 19 nt, Artificial Sequence
  Description of Artificial Sequence: Synthetic oligonucleotide
gcucccagaaaaccaaaug

SEQ ID NO: 1908057 - RNA, 19 nt, Artificial Sequence
  Description of Artificial Sequence: Synthetic oligonucleotide
gauucggaaaaggcccaug

SEQ ID NO: 1908058 - RNA, 19 nt, Artificial Sequence
  Description of Artificial Sequence: Synthetic oligonucleotide
gaccacuacgugcgcgccg

SEQ ID NO: 1908059 - RNA, 19 nt, Artificial Sequence
  Description of Artificial Sequence: Synthetic oligonucleotide
cacuuuccgaugccacugg

SEQ ID NO: 1908060 - RNA, 19 nt, Artificial Sequence
  Description of Artificial Sequence: Synthetic oligonucleotide
ccucauuucgugcaaccag

SEQ ID NO: 1908061 - RNA, 19 nt, Artificial Sequence
  Description of Artificial Sequence: Synthetic oligonucleotide
aacaagacacaaaguccaa

SEQ ID NO: 1908062 - RNA, 19 nt, Artificial Sequence
  Description of Artificial Sequence: Synthetic oligonucleotide
guacccaucugagccaaug

SEQ ID NO: 1908063 - RNA, 19 nt, Artificial Sequence
  Description of Artificial Sequence: Synthetic oligonucleotide
caaaguccaaggccgaaaa

SEQ ID NO: 1908064 - RNA, 19 nt, Artificial Sequence
  Description of Artificial Sequence: Synthetic oligonucleotide
uuaccaugcagcggcgaac

SEQ ID NO: 1908065 - RNA, 19 nt, Artificial Sequence
  Description of Artificial Sequence: Synthetic oligonucleotide
cauguacccaucugagcca

SEQ ID NO: 1908066 - RNA, 19 nt, Artificial Sequence
  Description of Artificial Sequence: Synthetic oligonucleotide
cuuguuuaaagcacucgau

SEQ ID NO: 1908067 - RNA, 19 nt, Artificial Sequence
  Description of Artificial Sequence: Synthetic oligonucleotide
uuguccucauuucgugcaa

SEQ ID NO: 1908068 - RNA, 19 nt, Artificial Sequence
  Description of Artificial Sequence: Synthetic oligonucleotide
gcaacgcacuuuccgaugc

SEQ ID NO: 1908069 - RNA, 19 nt, Artificial Sequence
  Description of Artificial Sequence: Synthetic oligonucleotide
gacguccccgcacaguuaa

SEQ ID NO: 1908070 - RNA, 19 nt, Artificial Sequence
  Description of Artificial Sequence: Synthetic oligonucleotide
gaggacagcauguacccau

SEQ ID NO: 1908071 - RNA, 19 nt, Artificial Sequence
  Description of Artificial Sequence: Synthetic oligonucleotide
guuauaaaugcuccuuguu

SEQ ID NO: 1908072 - RNA, 19 nt, Artificial Sequence
  Description of Artificial Sequence: Synthetic oligonucleotide
ggaaaaggcccauggugac

SEQ ID NO: 1908073 - RNA, 19 nt, Artificial Sequence
  Description of Artificial Sequence: Synthetic oligonucleotide
uccgaugccacuggacccu

SEQ ID NO: 1908074 - RNA, 19 nt, Artificial Sequence
  Description of Artificial Sequence: Synthetic oligonucleotide
acgaaggccacgaggccgg

SEQ ID NO: 1908075 - RNA, 19 nt, Artificial Sequence
  Description of Artificial Sequence: Synthetic oligonucleotide
agcagcacgaaggccacga

SEQ ID NO: 1908076 - RNA, 19 nt, Artificial Sequence
  Description of Artificial Sequence: Synthetic oligonucleotide
ccuuguuuaaagcacucga

SEQ ID NO: 1908077 - RNA, 19 nt, Artificial Sequence
  Description of Artificial Sequence: Synthetic oligonucleotide
guguuaacaguaauauugu

SEQ ID NO: 1908078 - RNA, 19 nt, Artificial Sequence
  Description of Artificial Sequence: Synthetic oligonucleotide
cuggaguccuucagugaug

SEQ ID NO: 1908079 - RNA, 19 nt, Artificial Sequence
  Description of Artificial Sequence: Synthetic oligonucleotide
agcacucgauagcaacgca

SEQ ID NO: 1908080 - RNA, 19 nt, Artificial Sequence
  Description of Artificial Sequence: Synthetic oligonucleotide
ccugcuuuaugacauucuc

SEQ ID NO: 1908081 - RNA, 19 nt, Artificial Sequence
  Description of Artificial Sequence: Synthetic oligonucleotide
gcgaacuauauuaucaaaa

SEQ ID NO: 1908082 - RNA, 19 nt, Artificial Sequence
  Description of Artificial Sequence: Synthetic oligonucleotide
ugguccauauuugcauagu

SEQ ID NO: 1908083 - RNA, 19 nt, Artificial Sequence
  Description of Artificial Sequence: Synthetic oligonucleotide
ugcagcggcgaacuauauu

SEQ ID NO: 1908084 - RNA, 19 nt, Artificial Sequence
  Description of Artificial Sequence: Synthetic oligonucleotide
ccuuguauggcaucuuuga

SEQ ID NO: 1908085 - RNA, 19 nt, Artificial Sequence
  Description of Artificial Sequence: Synthetic oligonucleotide
ugucuacaguuucggguuu

SEQ ID NO: 1908086 - RNA, 19 nt, Artificial Sequence
  Description of Artificial Sequence: Synthetic oligonucleotide
ccuguuuaucauuaauaga

SEQ ID NO: 1908087 - RNA, 19 nt, Artificial Sequence
  Description of Artificial Sequence: Synthetic oligonucleotide
acgcccggcucccagaaaa

SEQ ID NO: 1908088 - RNA, 19 nt, Artificial Sequence
  Description of Artificial Sequence: Synthetic oligonucleotide
acgcacuuuccgaugccac

SEQ ID NO: 1908089 - RNA, 19 nt, Artificial Sequence
  Description of Artificial Sequence: Synthetic oligonucleotide
gaagcagcacgaaggccac

SEQ ID NO: 1908090 - RNA, 19 nt, Artificial Sequence
  Description of Artificial Sequence: Synthetic oligonucleotide
gcuuguccucauuucgugc

SEQ ID NO: 1908091 - RNA, 19 nt, Artificial Sequence
  Description of Artificial Sequence: Synthetic oligonucleotide
ucucuugugccugcuuuau

SEQ ID NO: 1908092 - RNA, 19 nt, Artificial Sequence
  Description of Artificial Sequence: Synthetic oligonucleotide
acugccugcuggguacacg

SEQ ID NO: 1908093 - RNA, 19 nt, Artificial Sequence
  Description of Artificial Sequence: Synthetic oligonucleotide
cagggaggacagcauguac

SEQ ID NO: 1908094 - RNA, 19 nt, Artificial Sequence
  Description of Artificial Sequence: Synthetic oligonucleotide
caugcagcggcgaacuaua

SEQ ID NO: 1908095 - RNA, 19 nt, Artificial Sequence
  Description of Artificial Sequence: Synthetic oligonucleotide
cugaagaguauugggucca

SEQ ID NO: 1908096 - RNA, 19 nt, Artificial Sequence
  Description of Artificial Sequence: Synthetic oligonucleotide
uggguacacgcugcccagg

SEQ ID NO: 1908097 - RNA, 19 nt, Artificial Sequence
  Description of Artificial Sequence: Synthetic oligonucleotide
aucugagccaauggaacua

SEQ ID NO: 1908098 - RNA, 19 nt, Artificial Sequence
  Description of Artificial Sequence: Synthetic oligonucleotide
uucgugcaaccagaguuau

SEQ ID NO: 1908099 - RNA, 19 nt, Artificial Sequence
  Description of Artificial Sequence: Synthetic oligonucleotide
caacgcacuuuccgaugcc

SEQ ID NO: 1908100 - RNA, 19 nt, Artificial Sequence
  Description of Artificial Sequence: Synthetic oligonucleotide
cgaaaaucgaguuccauua

SEQ ID NO: 1908101 - RNA, 19 nt, Artificial Sequence
  Description of Artificial Sequence: Synthetic oligonucleotide
acucgauagcaacgcacuu

SEQ ID NO: 1908102 - RNA, 19 nt, Artificial Sequence
  Description of Artificial Sequence: Synthetic oligonucleotide
ccauauaaagaagcagcac

SEQ ID NO: 1908103 - RNA, 19 nt, Artificial Sequence
  Description of Artificial Sequence: Synthetic oligonucleotide
cucuugugccugcuuuaug

SEQ ID NO: 1908104 - RNA, 19 nt, Artificial Sequence
  Description of Artificial Sequence: Synthetic oligonucleotide
cacucgauagcaacgcacu

SEQ ID NO: 1908105 - RNA, 19 nt, Artificial Sequence
  Description of Artificial Sequence: Synthetic oligonucleotide
uuuguccaaggggcaagaa

SEQ ID NO: 1908106 - RNA, 19 nt, Artificial Sequence
  Description of Artificial Sequence: Synthetic oligonucleotide
gcuuuaugacauucuccac

SEQ ID NO: 1908107 - RNA, 19 nt, Artificial Sequence
  Description of Artificial Sequence: Synthetic oligonucleotide
cuacgugcgcgccgggcag

SEQ ID NO: 1908108 - RNA, 19 nt, Artificial Sequence
  Description of Artificial Sequence: Synthetic oligonucleotide
gccaugguggugaucacug

SEQ ID NO: 1908109 - RNA, 19 nt, Artificial Sequence
  Description of Artificial Sequence: Synthetic oligonucleotide
gguggugaucacugccugc

SEQ ID NO: 1908110 - RNA, 19 nt, Artificial Sequence
  Description of Artificial Sequence: Synthetic oligonucleotide
ccugacagagacguccccg

SEQ ID NO: 1908111 - RNA, 19 nt, Artificial Sequence
  Description of Artificial Sequence: Synthetic oligonucleotide
acaucgacugagauacaaa

SEQ ID NO: 1908112 - RNA, 19 nt, Artificial Sequence
  Description of Artificial Sequence: Synthetic oligonucleotide
accaccuguuuaucauuaa

SEQ ID NO: 1908113 - RNA, 19 nt, Artificial Sequence
  Description of Artificial Sequence: Synthetic oligonucleotide
ugaccacuacgugcgcgcc

SEQ ID NO: 1908114 - RNA, 19 nt, Artificial Sequence
  Description of Artificial Sequence: Synthetic oligonucleotide
ugaagaguauuggguccaa

SEQ ID NO: 1908115 - RNA, 19 nt, Artificial Sequence
  Description of Artificial Sequence: Synthetic oligonucleotide
guuaaccagcauguccaca

SEQ ID NO: 1908116 - RNA, 19 nt, Artificial Sequence
  Description of Artificial Sequence: Synthetic oligonucleotide
guauuggguccaaucucac

SEQ ID NO: 1908117 - RNA, 19 nt, Artificial Sequence
  Description of Artificial Sequence: Synthetic oligonucleotide
gaacucugucccuucacuu

SEQ ID NO: 1908118 - RNA, 19 nt, Artificial Sequence
  Description of Artificial Sequence: Synthetic oligonucleotide
cacaucgacugagauacaa

SEQ ID NO: 1908119 - RNA, 19 nt, Artificial Sequence
  Description of Artificial Sequence: Synthetic oligonucleotide
agcggcgacaccauauaaa

SEQ ID NO: 1908120 - RNA, 19 nt, Artificial Sequence
  Description of Artificial Sequence: Synthetic oligonucleotide
cuccugugaccacuacgug

SEQ ID NO: 1908121 - RNA, 19 nt, Artificial Sequence
  Description of Artificial Sequence: Synthetic oligonucleotide
guccccgcacaguuaacca

SEQ ID NO: 1908122 - RNA, 19 nt, Artificial Sequence
  Description of Artificial Sequence: Synthetic oligonucleotide
gagacguccccgcacaguu

SEQ ID NO: 1908123 - RNA, 19 nt, Artificial Sequence
  Description of Artificial Sequence: Synthetic oligonucleotide
ccuucagugauggaaguca

SEQ ID NO: 1908124 - RNA, 19 nt, Artificial Sequence
  Description of Artificial Sequence: Synthetic oligonucleotide
ggcgaacuauauuaucaaa

SEQ ID NO: 1908125 - RNA, 19 nt, Artificial Sequence
  Description of Artificial Sequence: Synthetic oligonucleotide
augagcggcgacaccauau

SEQ ID NO: 1908126 - RNA, 19 nt, Artificial Sequence
  Description of Artificial Sequence: Synthetic oligonucleotide
gcgacaccauauaaagaag

SEQ ID NO: 1908127 - RNA, 19 nt, Artificial Sequence
  Description of Artificial Sequence: Synthetic oligonucleotide
gaaggccacgaggccggcg

SEQ ID NO: 1908128 - RNA, 19 nt, Artificial Sequence
  Description of Artificial Sequence: Synthetic oligonucleotide
ugcuggguacacgcugccc

SEQ ID NO: 1908129 - RNA, 19 nt, Artificial Sequence
  Description of Artificial Sequence: Synthetic oligonucleotide
ccccgcacaguuaaccagc

SEQ ID NO: 1908130 - RNA, 19 nt, Artificial Sequence
  Description of Artificial Sequence: Synthetic oligonucleotide
gcacuuuccgaugccacug

SEQ ID NO: 1908131 - RNA, 19 nt, Artificial Sequence
  Description of Artificial Sequence: Synthetic oligonucleotide
cccagguaauuuaugcuca

SEQ ID NO: 1908132 - RNA, 19 nt, Artificial Sequence
  Description of Artificial Sequence: Synthetic oligonucleotide
caccaccuguuuaucauua

SEQ ID NO: 1908133 - RNA, 19 nt, Artificial Sequence
  Description of Artificial Sequence: Synthetic oligonucleotide
agagacguccccgcacagu

SEQ ID NO: 1908134 - RNA, 19 nt, Artificial Sequence
  Description of Artificial Sequence: Synthetic oligonucleotide
ugccugcuggguacacgcu

SEQ ID NO: 1908135 - RNA, 19 nt, Artificial Sequence
  Description of Artificial Sequence: Synthetic oligonucleotide
cugcuggguacacgcugcc

SEQ ID NO: 1908136 - RNA, 19 nt, Artificial Sequence
  Description of Artificial Sequence: Synthetic oligonucleotide
auguacccaucugagccaa

SEQ ID NO: 1908137 - RNA, 19 nt, Artificial Sequence
  Description of Artificial Sequence: Synthetic oligonucleotide
ggcaucuuugacaauuugu

SEQ ID NO: 1908138 - RNA, 19 nt, Artificial Sequence
  Description of Artificial Sequence: Synthetic oligonucleotide
gugcgcgccgggcagcgcc

SEQ ID NO: 1908139 - RNA, 19 nt, Artificial Sequence
  Description of Artificial Sequence: Synthetic oligonucleotide
gagcggcgacaccauauaa

SEQ ID NO: 1908140 - RNA, 19 nt, Artificial Sequence
  Description of Artificial Sequence: Synthetic oligonucleotide
gcacucgauagcaacgcac

SEQ ID NO: 1908141 - RNA, 19 nt, Artificial Sequence
  Description of Artificial Sequence: Synthetic oligonucleotide
cgacugagauacaaagcac

SEQ ID NO: 1908142 - RNA, 19 nt, Artificial Sequence
  Description of Artificial Sequence: Synthetic oligonucleotide
cgugcaaccagaguuauaa

SEQ ID NO: 1908143 - RNA, 19 nt, Artificial Sequence
  Description of Artificial Sequence: Synthetic oligonucleotide
gguguccugguccauauuu

SEQ ID NO: 1908144 - RNA, 19 nt, Artificial Sequence
  Description of Artificial Sequence: Synthetic oligonucleotide
cagagacguccccgcacag

SEQ ID NO: 1908145 - RNA, 19 nt, Artificial Sequence
  Description of Artificial Sequence: Synthetic oligonucleotide
gaugagcggcgacaccaua

SEQ ID NO: 1908146 - RNA, 19 nt, Artificial Sequence
  Description of Artificial Sequence: Synthetic oligonucleotide
gcaucuuugacaauuuguu

SEQ ID NO: 1908147 - RNA, 19 nt, Artificial Sequence
  Description of Artificial Sequence: Synthetic oligonucleotide
acgcugcccagguaauuua

SEQ ID NO: 1908148 - RNA, 19 nt, Artificial Sequence
  Description of Artificial Sequence: Synthetic oligonucleotide
cacuacgugcgcgccgggc

SEQ ID NO: 1908149 - RNA, 19 nt, Artificial Sequence
  Description of Artificial Sequence: Synthetic oligonucleotide
cugugaccacuacgugcgc

SEQ ID NO: 1908150 - RNA, 19 nt, Artificial Sequence
  Description of Artificial Sequence: Synthetic oligonucleotide
uguacccaucugagccaau

SEQ ID NO: 1908151 - RNA, 19 nt, Artificial Sequence
  Description of Artificial Sequence: Synthetic oligonucleotide
cauuagcagcaagcuguuc

SEQ ID NO: 1908152 - RNA, 19 nt, Artificial Sequence
  Description of Artificial Sequence: Synthetic oligonucleotide
gcuggaguccuucagugau

SEQ ID NO: 1908153 - RNA, 19 nt, Artificial Sequence
  Description of Artificial Sequence: Synthetic oligonucleotide
cagauuucugaagaguauu

SEQ ID NO: 1908154 - RNA, 19 nt, Artificial Sequence
  Description of Artificial Sequence: Synthetic oligonucleotide
aacgcccggcucccagaaa

SEQ ID NO: 1908155 - RNA, 19 nt, Artificial Sequence
  Description of Artificial Sequence: Synthetic oligonucleotide
guccaaggccgaaaaucga

SEQ ID NO: 1908156 - RNA, 19 nt, Artificial Sequence
  Description of Artificial Sequence: Synthetic oligonucleotide
cccaucugagccaauggaa

SEQ ID NO: 1908157 - RNA, 19 nt, Artificial Sequence
  Description of Artificial Sequence: Synthetic oligonucleotide
cuuuaccaugcagcggcga

SEQ ID NO: 1908158 - RNA, 19 nt, Artificial Sequence
  Description of Artificial Sequence: Synthetic oligonucleotide
uggacccuccugugaccac

SEQ ID NO: 1908159 - RNA, 19 nt, Artificial Sequence
  Description of Artificial Sequence: Synthetic oligonucleotide
cuggacccuccugugacca

SEQ ID NO: 1908160 - RNA, 19 nt, Artificial Sequence
  Description of Artificial Sequence: Synthetic oligonucleotide
cauuucgugcaaccagagu

SEQ ID NO: 1908161 - RNA, 19 nt, Artificial Sequence
  Description of Artificial Sequence: Synthetic oligonucleotide
caaggccgaaaaucgaguu

SEQ ID NO: 1908162 - RNA, 19 nt, Artificial Sequence
  Description of Artificial Sequence: Synthetic oligonucleotide
gcugaugagcggcgacacc

SEQ ID NO: 1908163 - RNA, 19 nt, Artificial Sequence
  Description of Artificial Sequence: Synthetic oligonucleotide
ugguguccugguccauauu

SEQ ID NO: 1908164 - RNA, 19 nt, Artificial Sequence
  Description of Artificial Sequence: Synthetic oligonucleotide
gcugcccagguaauuuaug

SEQ ID NO: 1908165 - RNA, 19 nt, Artificial Sequence
  Description of Artificial Sequence: Synthetic oligonucleotide
uacgugcgcgccgggcagc

SEQ ID NO: 1908166 - RNA, 19 nt, Artificial Sequence
  Description of Artificial Sequence: Synthetic oligonucleotide
caguuucggguuuugcuuu

SEQ ID NO: 1908167 - RNA, 19 nt, Artificial Sequence
  Description of Artificial Sequence: Synthetic oligonucleotide
gccaucccacaggucaggg

SEQ ID NO: 1908168 - RNA, 19 nt, Artificial Sequence
  Description of Artificial Sequence: Synthetic oligonucleotide
cacgaggccggcggcggcc

SEQ ID NO: 1908169 - RNA, 19 nt, Artificial Sequence
  Description of Artificial Sequence: Synthetic oligonucleotide
acgugcgcgccgggcagcg

SEQ ID NO: 1908170 - RNA, 19 nt, Artificial Sequence
  Description of Artificial Sequence: Synthetic oligonucleotide
gucccuucacuugcagcca

SEQ ID NO: 1908171 - RNA, 19 nt, Artificial Sequence
  Description of Artificial Sequence: Synthetic oligonucleotide
caauuuguuuggccauggu

SEQ ID NO: 1908172 - RNA, 19 nt, Artificial Sequence
  Description of Artificial Sequence: Synthetic oligonucleotide
cucgauagcaacgcacuuu

SEQ ID NO: 1908173 - RNA, 19 nt, Artificial Sequence
  Description of Artificial Sequence: Synthetic oligonucleotide
ggccaucccacaggucagg

SEQ ID NO: 1908174 - RNA, 19 nt, Artificial Sequence
  Description of Artificial Sequence: Synthetic oligonucleotide
gaagaguauuggguccaau

SEQ ID NO: 1908175 - RNA, 19 nt, Artificial Sequence
  Description of Artificial Sequence: Synthetic oligonucleotide
cacaaaguccaaggccgaa

SEQ ID NO: 1908176 - RNA, 19 nt, Artificial Sequence
  Description of Artificial Sequence: Synthetic oligonucleotide
cccggcucccagaaaacca

SEQ ID NO: 1908177 - RNA, 19 nt, Artificial Sequence
  Description of Artificial Sequence: Synthetic oligonucleotide
gcuccuuguuuaaagcacu

SEQ ID NO: 1908178 - RNA, 19 nt, Artificial Sequence
  Description of Artificial Sequence: Synthetic oligonucleotide
cguccccgcacaguuaacc

SEQ ID NO: 1908179 - RNA, 19 nt, Artificial Sequence
  Description of Artificial Sequence: Synthetic oligonucleotide
cgauagcaacgcacuuucc

SEQ ID NO: 1908180 - RNA, 19 nt, Artificial Sequence
  Description of Artificial Sequence: Synthetic oligonucleotide
acguccccgcacaguuaac

SEQ ID NO: 1908181 - RNA, 19 nt, Artificial Sequence
  Description of Artificial Sequence: Synthetic oligonucleotide
ucuucgccugcagcagcuu

SEQ ID NO: 1908182 - RNA, 19 nt, Artificial Sequence
  Description of Artificial Sequence: Synthetic oligonucleotide
caacgcccggcucccagaa

SEQ ID NO: 1908183 - RNA, 19 nt, Artificial Sequence
  Description of Artificial Sequence: Synthetic oligonucleotide
ccugguccauauuugcaua

SEQ ID NO: 1908184 - RNA, 19 nt, Artificial Sequence
  Description of Artificial Sequence: Synthetic oligonucleotide
accaugcagcggcgaacua

SEQ ID NO: 1908185 - RNA, 19 nt, Artificial Sequence
  Description of Artificial Sequence: Synthetic oligonucleotide
gcccggcucccagaaaacc

SEQ ID NO: 1908186 - RNA, 19 nt, Artificial Sequence
  Description of Artificial Sequence: Synthetic oligonucleotide
ggacagcauguacccaucu

SEQ ID NO: 1908187 - RNA, 19 nt, Artificial Sequence
  Description of Artificial Sequence: Synthetic oligonucleotide
ggccacgaggccggcggcg

SEQ ID NO: 1908188 - RNA, 19 nt, Artificial Sequence
  Description of Artificial Sequence: Synthetic oligonucleotide
ccaaggccgaaaaucgagu

SEQ ID NO: 1908189 - RNA, 19 nt, Artificial Sequence
  Description of Artificial Sequence: Synthetic oligonucleotide
acacaucgacugagauaca

SEQ ID NO: 1908190 - RNA, 19 nt, Artificial Sequence
  Description of Artificial Sequence: Synthetic oligonucleotide
ccggcucccagaaaaccaa

SEQ ID NO: 1908191 - RNA, 19 nt, Artificial Sequence
  Description of Artificial Sequence: Synthetic oligonucleotide
ggguacacgcugcccaggu

SEQ ID NO: 1908192 - RNA, 19 nt, Artificial Sequence
  Description of Artificial Sequence: Synthetic oligonucleotide
cggcgaacuauauuaucaa

SEQ ID NO: 1908193 - RNA, 19 nt, Artificial Sequence
  Description of Artificial Sequence: Synthetic oligonucleotide
gacccuccugugaccacua

SEQ ID NO: 1908194 - RNA, 19 nt, Artificial Sequence
  Description of Artificial Sequence: Synthetic oligonucleotide
cagcggcgaacuauauuau

SEQ ID NO: 1908195 - RNA, 19 nt, Artificial Sequence
  Description of Artificial Sequence: Synthetic oligonucleotide
ccaaucucacacguucaaa

SEQ ID NO: 1908196 - RNA, 19 nt, Artificial Sequence
  Description of Artificial Sequence: Synthetic oligonucleotide
augcagcggcgaacuauau

SEQ ID NO: 1908197 - RNA, 19 nt, Artificial Sequence
  Description of Artificial Sequence: Synthetic oligonucleotide
gguacacgcugcccaggua

SEQ ID NO: 1908198 - RNA, 19 nt, Artificial Sequence
  Description of Artificial Sequence: Synthetic oligonucleotide
ggaguccuucagugaugga

SEQ ID NO: 1908199 - RNA, 19 nt, Artificial Sequence
  Description of Artificial Sequence: Synthetic oligonucleotide
cacgcugcccagguaauuu

SEQ ID NO: 1908200 - RNA, 19 nt, Artificial Sequence
  Description of Artificial Sequence: Synthetic oligonucleotide
agacguccccgcacaguua

SEQ ID NO: 1908201 - RNA, 19 nt, Artificial Sequence
  Description of Artificial Sequence: Synthetic oligonucleotide
cccgcacaguuaaccagca

SEQ ID NO: 1908202 - RNA, 19 nt, Artificial Sequence
  Description of Artificial Sequence: Synthetic oligonucleotide
ccaccuguuuaucauuaau

SEQ ID NO: 1908203 - RNA, 19 nt, Artificial Sequence
  Description of Artificial Sequence: Synthetic oligonucleotide
cagguaauuuaugcucauu

SEQ ID NO: 1908204 - RNA, 19 nt, Artificial Sequence
  Description of Artificial Sequence: Synthetic oligonucleotide
ggccgaaaaucgaguucca

SEQ ID NO: 1908205 - RNA, 19 nt, Artificial Sequence
  Description of Artificial Sequence: Synthetic oligonucleotide
guuuggccaugguggugau

SEQ ID NO: 1908206 - RNA, 19 nt, Artificial Sequence
  Description of Artificial Sequence: Synthetic oligonucleotide
gucuacaguuucggguuuu

SEQ ID NO: 1908207 - RNA, 19 nt, Artificial Sequence
  Description of Artificial Sequence: Synthetic oligonucleotide
gccugcuuuaugacauucu

SEQ ID NO: 1908208 - RNA, 19 nt, Artificial Sequence
  Description of Artificial Sequence: Synthetic oligonucleotide
ggccaugguggugaucacu

SEQ ID NO: 1908209 - RNA, 19 nt, Artificial Sequence
  Description of Artificial Sequence: Synthetic oligonucleotide
ggcucccagaaaaccaaau

SEQ ID NO: 1908210 - RNA, 19 nt, Artificial Sequence
  Description of Artificial Sequence: Synthetic oligonucleotide
cggcgacaccauauaaaga

SEQ ID NO: 1908211 - RNA, 19 nt, Artificial Sequence
  Description of Artificial Sequence: Synthetic oligonucleotide
ccaacgcccggcucccaga

SEQ ID NO: 1908212 - RNA, 19 nt, Artificial Sequence
  Description of Artificial Sequence: Synthetic oligonucleotide
cgaugccacuggacccucc

SEQ ID NO: 1908213 - RNA, 19 nt, Artificial Sequence
  Description of Artificial Sequence: Synthetic oligonucleotide
gugccugcuuuaugacauu

SEQ ID NO: 1908214 - RNA, 19 nt, Artificial Sequence
  Description of Artificial Sequence: Synthetic oligonucleotide
ggaagucacuggggccauc

SEQ ID NO: 1908215 - RNA, 19 nt, Artificial Sequence
  Description of Artificial Sequence: Synthetic oligonucleotide
gcgccaggggcuuggggcu

SEQ ID NO: 1908216 - RNA, 19 nt, Artificial Sequence
  Description of Artificial Sequence: Synthetic oligonucleotide
ccacuacgugcgcgccggg

SEQ ID NO: 1908217 - RNA, 19 nt, Artificial Sequence
  Description of Artificial Sequence: Synthetic oligonucleotide
gccgaaaaucgaguuccau

SEQ ID NO: 1908218 - RNA, 19 nt, Artificial Sequence
  Description of Artificial Sequence: Synthetic oligonucleotide
ccacgaggccggcggcggc

SEQ ID NO: 1908219 - RNA, 19 nt, Artificial Sequence
  Description of Artificial Sequence: Synthetic oligonucleotide
ccgaugccacuggacccuc

SEQ ID NO: 1908220 - RNA, 19 nt, Artificial Sequence
  Description of Artificial Sequence: Synthetic oligonucleotide
ggguccaaucucacacguu

SEQ ID NO: 1908221 - RNA, 19 nt, Artificial Sequence
  Description of Artificial Sequence: Synthetic oligonucleotide
cgcugcccagguaauuuau

SEQ ID NO: 1908222 - RNA, 19 nt, Artificial Sequence
  Description of Artificial Sequence: Synthetic oligonucleotide
ccgcacaguuaaccagcau

SEQ ID NO: 1908223 - RNA, 19 nt, Artificial Sequence
  Description of Artificial Sequence: Synthetic oligonucleotide
cgugcgcgccgggcagcgc

SEQ ID NO: 1908224 - RNA, 19 nt, Artificial Sequence
  Description of Artificial Sequence: Synthetic oligonucleotide
uuucauaaagaucugauug

SEQ ID NO: 1908225 - RNA, 19 nt, Artificial Sequence
  Description of Artificial Sequence: Synthetic oligonucleotide
aauaaacagaacuacaggu

SEQ ID NO: 1908226 - RNA, 19 nt, Artificial Sequence
  Description of Artificial Sequence: Synthetic oligonucleotide
ucaugagaaaucuagguag

SEQ ID NO: 1908227 - RNA, 19 nt, Artificial Sequence
  Description of Artificial Sequence: Synthetic oligonucleotide
uauuuuauuuucuugcggc

SEQ ID NO: 1908228 - RNA, 19 nt, Artificial Sequence
  Description of Artificial Sequence: Synthetic oligonucleotide
uuuucauuuccacugacca

SEQ ID NO: 1908229 - RNA, 19 nt, Artificial Sequence
  Description of Artificial Sequence: Synthetic oligonucleotide
uuauuuuauuuucuugcgg

SEQ ID NO: 1908230 - RNA, 19 nt, Artificial Sequence
  Description of Artificial Sequence: Synthetic oligonucleotide
uaaacagaacuacaggugc

SEQ ID NO: 1908231 - RNA, 19 nt, Artificial Sequence
  Description of Artificial Sequence: Synthetic oligonucleotide
aaaucaaacgcuacccucc

SEQ ID NO: 1908232 - RNA, 19 nt, Artificial Sequence
  Description of Artificial Sequence: Synthetic oligonucleotide
uuucucgucguucacauug

SEQ ID NO: 1908233 - RNA, 19 nt, Artificial Sequence
  Description of Artificial Sequence: Synthetic oligonucleotide
guauauuagauauuucccc

SEQ ID NO: 1908234 - RNA, 19 nt, Artificial Sequence
  Description of Artificial Sequence: Synthetic oligonucleotide
auguggacaagcuaagugg

SEQ ID NO: 1908235 - RNA, 19 nt, Artificial Sequence
  Description of Artificial Sequence: Synthetic oligonucleotide
uauauuagauauuucccca

SEQ ID NO: 1908236 - RNA, 19 nt, Artificial Sequence
  Description of Artificial Sequence: Synthetic oligonucleotide
auacuauuuggauucuccc

SEQ ID NO: 1908237 - RNA, 19 nt, Artificial Sequence
  Description of Artificial Sequence: Synthetic oligonucleotide
aaucaaacgcuacccuccc

SEQ ID NO: 1908238 - RNA, 19 nt, Artificial Sequence
  Description of Artificial Sequence: Synthetic oligonucleotide
uucauaaagaucugauugc

SEQ ID NO: 1908239 - RNA, 19 nt, Artificial Sequence
  Description of Artificial Sequence: Synthetic oligonucleotide
uguggacaagcuaaguggg

SEQ ID NO: 1908240 - RNA, 19 nt, Artificial Sequence
  Description of Artificial Sequence: Synthetic oligonucleotide
uugacugaagguauauuag

SEQ ID NO: 1908241 - RNA, 19 nt, Artificial Sequence
  Description of Artificial Sequence: Synthetic oligonucleotide
auuuggauucuccccaccc

SEQ ID NO: 1908242 - RNA, 19 nt, Artificial Sequence
  Description of Artificial Sequence: Synthetic oligonucleotide
auuuuauuuucuugcggcg

SEQ ID NO: 1908243 - RNA, 19 nt, Artificial Sequence
  Description of Artificial Sequence: Synthetic oligonucleotide
uggucaaguugacugaagg

SEQ ID NO: 1908244 - RNA, 19 nt, Artificial Sequence
  Description of Artificial Sequence: Synthetic oligonucleotide
ugugggcaaaaucaaacgc

SEQ ID NO: 1908245 - RNA, 19 nt, Artificial Sequence
  Description of Artificial Sequence: Synthetic oligonucleotide
aagaauggaggguuggugu

SEQ ID NO: 1908246 - RNA, 19 nt, Artificial Sequence
  Description of Artificial Sequence: Synthetic oligonucleotide
cucgucaugagaaaucuag

SEQ ID NO: 1908247 - RNA, 19 nt, Artificial Sequence
  Description of Artificial Sequence: Synthetic oligonucleotide
uuggugucgagauacaugu

SEQ ID NO: 1908248 - RNA, 19 nt, Artificial Sequence
  Description of Artificial Sequence: Synthetic oligonucleotide
acggacaugcauuaacucg

SEQ ID NO: 1908249 - RNA, 19 nt, Artificial Sequence
  Description of Artificial Sequence: Synthetic oligonucleotide
uagauauuuccccacaaaa

SEQ ID NO: 1908250 - RNA, 19 nt, Artificial Sequence
  Description of Artificial Sequence: Synthetic oligonucleotide
acuacaggugcacccaacc

SEQ ID NO: 1908251 - RNA, 19 nt, Artificial Sequence
  Description of Artificial Sequence: Synthetic oligonucleotide
ucgucguucacauuguagc

SEQ ID NO: 1908252 - RNA, 19 nt, Artificial Sequence
  Description of Artificial Sequence: Synthetic oligonucleotide
ucagguacaaacgauguac

SEQ ID NO: 1908253 - RNA, 19 nt, Artificial Sequence
  Description of Artificial Sequence: Synthetic oligonucleotide
gaucugauugccuuggcac

SEQ ID NO: 1908254 - RNA, 19 nt, Artificial Sequence
  Description of Artificial Sequence: Synthetic oligonucleotide
ugaucucuaaacuccagga

SEQ ID NO: 1908255 - RNA, 19 nt, Artificial Sequence
  Description of Artificial Sequence: Synthetic oligonucleotide
uuuagagucugaagccggg

SEQ ID NO: 1908256 - RNA, 19 nt, Artificial Sequence
  Description of Artificial Sequence: Synthetic oligonucleotide
ugaccaauaaacagaacua

SEQ ID NO: 1908257 - RNA, 19 nt, Artificial Sequence
  Description of Artificial Sequence: Synthetic oligonucleotide
caugagaaaucuagguagg

SEQ ID NO: 1908258 - RNA, 19 nt, Artificial Sequence
  Description of Artificial Sequence: Synthetic oligonucleotide
ucauaaagaucugauugcc

SEQ ID NO: 1908259 - RNA, 19 nt, Artificial Sequence
  Description of Artificial Sequence: Synthetic oligonucleotide
aacgauguacuuucagaca

SEQ ID NO: 1908260 - RNA, 19 nt, Artificial Sequence
  Description of Artificial Sequence: Synthetic oligonucleotide
ucgucaugagaaaucuagg

SEQ ID NO: 1908261 - RNA, 19 nt, Artificial Sequence
  Description of Artificial Sequence: Synthetic oligonucleotide
ucaaacgcuacccucccca

SEQ ID NO: 1908262 - RNA, 19 nt, Artificial Sequence
  Description of Artificial Sequence: Synthetic oligonucleotide
ucaaguugacugaagguau

SEQ ID NO: 1908263 - RNA, 19 nt, Artificial Sequence
  Description of Artificial Sequence: Synthetic oligonucleotide
ggugucgagauacaugugg

SEQ ID NO: 1908264 - RNA, 19 nt, Artificial Sequence
  Description of Artificial Sequence: Synthetic oligonucleotide
ugacugaagguauauuaga

SEQ ID NO: 1908265 - RNA, 19 nt, Artificial Sequence
  Description of Artificial Sequence: Synthetic oligonucleotide
uuagauauuuccccacaaa

SEQ ID NO: 1908266 - RNA, 19 nt, Artificial Sequence
  Description of Artificial Sequence: Synthetic oligonucleotide
aacgcuacccuccccagcu

SEQ ID NO: 1908267 - RNA, 19 nt, Artificial Sequence
  Description of Artificial Sequence: Synthetic oligonucleotide
accacggacaugcauuaac

SEQ ID NO: 1908268 - RNA, 19 nt, Artificial Sequence
  Description of Artificial Sequence: Synthetic oligonucleotide
uaaagaucugauugccuug

SEQ ID NO: 1908269 - RNA, 19 nt, Artificial Sequence
  Description of Artificial Sequence: Synthetic oligonucleotide
gacagugaucucuaaacuc

SEQ ID NO: 1908270 - RNA, 19 nt, Artificial Sequence
  Description of Artificial Sequence: Synthetic oligonucleotide
aggguuggugucgagauac

SEQ ID NO: 1908271 - RNA, 19 nt, Artificial Sequence
  Description of Artificial Sequence: Synthetic oligonucleotide
auaaacagaacuacaggug

SEQ ID NO: 1908272 - RNA, 19 nt, Artificial Sequence
  Description of Artificial Sequence: Synthetic oligonucleotide
uuuggauucuccccacccc

SEQ ID NO: 1908273 - RNA, 19 nt, Artificial Sequence
  Description of Artificial Sequence: Synthetic oligonucleotide
gugaucucuaaacuccagg

SEQ ID NO: 1908274 - RNA, 19 nt, Artificial Sequence
  Description of Artificial Sequence: Synthetic oligonucleotide
aaauacuauuuggauucuc

SEQ ID NO: 1908275 - RNA, 19 nt, Artificial Sequence
  Description of Artificial Sequence: Synthetic oligonucleotide
cugugggcaaaaucaaacg

SEQ ID NO: 1908276 - RNA, 19 nt, Artificial Sequence
  Description of Artificial Sequence: Synthetic oligonucleotide
cauguggacaagcuaagug

SEQ ID NO: 1908277 - RNA, 19 nt, Artificial Sequence
  Description of Artificial Sequence: Synthetic oligonucleotide
uucauuuccacugaccaau

SEQ ID NO: 1908278 - RNA, 19 nt, Artificial Sequence
  Description of Artificial Sequence: Synthetic oligonucleotide
gguauauuagauauuuccc

SEQ ID NO: 1908279 - RNA, 19 nt, Artificial Sequence
  Description of Artificial Sequence: Synthetic oligonucleotide
ugcauuaacucgucaugag

SEQ ID NO: 1908280 - RNA, 19 nt, Artificial Sequence
  Description of Artificial Sequence: Synthetic oligonucleotide
uacaggugcacccaaccac

SEQ ID NO: 1908281 - RNA, 19 nt, Artificial Sequence
  Description of Artificial Sequence: Synthetic oligonucleotide
uggaguucggcuucgggug

SEQ ID NO: 1908282 - RNA, 19 nt, Artificial Sequence
  Description of Artificial Sequence: Synthetic oligonucleotide
uccucuuauuuuauuauuu

SEQ ID NO: 1908283 - RNA, 19 nt, Artificial Sequence
  Description of Artificial Sequence: Synthetic oligonucleotide
aaucuagguaggcuaagua

SEQ ID NO: 1908284 - RNA, 19 nt, Artificial Sequence
  Description of Artificial Sequence: Synthetic oligonucleotide
ggaggagcgaguuggagcg

SEQ ID NO: 1908285 - RNA, 19 nt, Artificial Sequence
  Description of Artificial Sequence: Synthetic oligonucleotide
auguuuguuacucccaaaa

SEQ ID NO: 1908286 - RNA, 19 nt, Artificial Sequence
  Description of Artificial Sequence: Synthetic oligonucleotide
ucgagauacauguggacaa

SEQ ID NO: 1908287 - RNA, 19 nt, Artificial Sequence
  Description of Artificial Sequence: Synthetic oligonucleotide
aacucgucaugagaaaucu

SEQ ID NO: 1908288 - RNA, 19 nt, Artificial Sequence
  Description of Artificial Sequence: Synthetic oligonucleotide
gaucucuaaacuccaggac

SEQ ID NO: 1908289 - RNA, 19 nt, Artificial Sequence
  Description of Artificial Sequence: Synthetic oligonucleotide
guugacugaagguauauua

SEQ ID NO: 1908290 - RNA, 19 nt, Artificial Sequence
  Description of Artificial Sequence: Synthetic oligonucleotide
aucuagguaggcuaaguau

SEQ ID NO: 1908291 - RNA, 19 nt, Artificial Sequence
  Description of Artificial Sequence: Synthetic oligonucleotide
augagaaaucuagguaggc

SEQ ID NO: 1908292 - RNA, 19 nt, Artificial Sequence
  Description of Artificial Sequence: Synthetic oligonucleotide
gaccaauaaacagaacuac

SEQ ID NO: 1908293 - RNA, 19 nt, Artificial Sequence
  Description of Artificial Sequence: Synthetic oligonucleotide
gucuccuuggacgagggcg

SEQ ID NO: 1908294 - RNA, 19 nt, Artificial Sequence
  Description of Artificial Sequence: Synthetic oligonucleotide
ugagaaaucuagguaggcu

SEQ ID NO: 1908295 - RNA, 19 nt, Artificial Sequence
  Description of Artificial Sequence: Synthetic oligonucleotide
ucgcuuuucgccucggggc

SEQ ID NO: 1908296 - RNA, 19 nt, Artificial Sequence
  Description of Artificial Sequence: Synthetic oligonucleotide
uagagucugaagccggggc

SEQ ID NO: 1908297 - RNA, 19 nt, Artificial Sequence
  Description of Artificial Sequence: Synthetic oligonucleotide
acaugcauuaacucgucau

SEQ ID NO: 1908298 - RNA, 19 nt, Artificial Sequence
  Description of Artificial Sequence: Synthetic oligonucleotide
agacagugaucucuaaacu

SEQ ID NO: 1908299 - RNA, 19 nt, Artificial Sequence
  Description of Artificial Sequence: Synthetic oligonucleotide
aguaugaugagagaauguu

SEQ ID NO: 1908300 - RNA, 19 nt, Artificial Sequence
  Description of Artificial Sequence: Synthetic oligonucleotide
uaggcuaaguaugaugaga

SEQ ID NO: 1908301 - RNA, 19 nt, Artificial Sequence
  Description of Artificial Sequence: Synthetic oligonucleotide
aauguuuguuacucccaaa

SEQ ID NO: 1908302 - RNA, 19 nt, Artificial Sequence
  Description of Artificial Sequence: Synthetic oligonucleotide
auuagauauuuccccacaa

SEQ ID NO: 1908303 - RNA, 19 nt, Artificial Sequence
  Description of Artificial Sequence: Synthetic oligonucleotide
aaaucuagguaggcuaagu

SEQ ID NO: 1908304 - RNA, 19 nt, Artificial Sequence
  Description of Artificial Sequence: Synthetic oligonucleotide
ugagagaauguuuguuacu

SEQ ID NO: 1908305 - RNA, 19 nt, Artificial Sequence
  Description of Artificial Sequence: Synthetic oligonucleotide
aagcuaagugggcuccguc

SEQ ID NO: 1908306 - RNA, 19 nt, Artificial Sequence
  Description of Artificial Sequence: Synthetic oligonucleotide
aggcuaaguaugaugagag

SEQ ID NO: 1908307 - RNA, 19 nt, Artificial Sequence
  Description of Artificial Sequence: Synthetic oligonucleotide
cauggcaggaaagauguug

SEQ ID NO: 1908308 - RNA, 19 nt, Artificial Sequence
  Description of Artificial Sequence: Synthetic oligonucleotide
agguaggcuaaguaugaug

SEQ ID NO: 1908309 - RNA, 19 nt, Artificial Sequence
  Description of Artificial Sequence: Synthetic oligonucleotide
acauccucuuauuuuauua

SEQ ID NO: 1908310 - RNA, 19 nt, Artificial Sequence
  Description of Artificial Sequence: Synthetic oligonucleotide
cagcgguucagguacaaac

SEQ ID NO: 1908311 - RNA, 19 nt, Artificial Sequence
  Description of Artificial Sequence: Synthetic oligonucleotide
cugaaaguuggcauucauc

SEQ ID NO: 1908312 - RNA, 19 nt, Artificial Sequence
  Description of Artificial Sequence: Synthetic oligonucleotide
uuaacucgucaugagaaau

SEQ ID NO: 1908313 - RNA, 19 nt, Artificial Sequence
  Description of Artificial Sequence: Synthetic oligonucleotide
uuggccgcggaacugggug

SEQ ID NO: 1908314 - RNA, 19 nt, Artificial Sequence
  Description of Artificial Sequence: Synthetic oligonucleotide
uauuuggauucuccccacc

SEQ ID NO: 1908315 - RNA, 19 nt, Artificial Sequence
  Description of Artificial Sequence: Synthetic oligonucleotide
gauacauguggacaagcua

SEQ ID NO: 1908316 - RNA, 19 nt, Artificial Sequence
  Description of Artificial Sequence: Synthetic oligonucleotide
gaauggaggguuggugucg

SEQ ID NO: 1908317 - RNA, 19 nt, Artificial Sequence
  Description of Artificial Sequence: Synthetic oligonucleotide
uuagagucugaagccgggg

SEQ ID NO: 1908318 - RNA, 19 nt, Artificial Sequence
  Description of Artificial Sequence: Synthetic oligonucleotide
uucuugcucagcuugccuc

SEQ ID NO: 1908319 - RNA, 19 nt, Artificial Sequence
  Description of Artificial Sequence: Synthetic oligonucleotide
aaaauacuauuuggauucu

SEQ ID NO: 1908320 - RNA, 19 nt, Artificial Sequence
  Description of Artificial Sequence: Synthetic oligonucleotide
gaauguuuguuacucccaa

SEQ ID NO: 1908321 - RNA, 19 nt, Artificial Sequence
  Description of Artificial Sequence: Synthetic oligonucleotide
agaucugauugccuuggca

SEQ ID NO: 1908322 - RNA, 19 nt, Artificial Sequence
  Description of Artificial Sequence: Synthetic oligonucleotide
cucgucguucacauuguag

SEQ ID NO: 1908323 - RNA, 19 nt, Artificial Sequence
  Description of Artificial Sequence: Synthetic oligonucleotide
agcgguucagguacaaacg

SEQ ID NO: 1908324 - RNA, 19 nt, Artificial Sequence
  Description of Artificial Sequence: Synthetic oligonucleotide
uggcauucauccacaacgu

SEQ ID NO: 1908325 - RNA, 19 nt, Artificial Sequence
  Description of Artificial Sequence: Synthetic oligonucleotide
ucugaaaguuggcauucau

SEQ ID NO: 1908326 - RNA, 19 nt, Artificial Sequence
  Description of Artificial Sequence: Synthetic oligonucleotide
auuaacucgucaugagaaa

SEQ ID NO: 1908327 - RNA, 19 nt, Artificial Sequence
  Description of Artificial Sequence: Synthetic oligonucleotide
uggacaagcuaagugggcu

SEQ ID NO: 1908328 - RNA, 19 nt, Artificial Sequence
  Description of Artificial Sequence: Synthetic oligonucleotide
augaugagagaauguuugu

SEQ ID NO: 1908329 - RNA, 19 nt, Artificial Sequence
  Description of Artificial Sequence: Synthetic oligonucleotide
aaguaugaugagagaaugu

SEQ ID NO: 1908330 - RNA, 19 nt, Artificial Sequence
  Description of Artificial Sequence: Synthetic oligonucleotide
aucaaacgcuacccucccc

SEQ ID NO: 1908331 - RNA, 19 nt, Artificial Sequence
  Description of Artificial Sequence: Synthetic oligonucleotide
gguuuagagucugaagccg

SEQ ID NO: 1908332 - RNA, 19 nt, Artificial Sequence
  Description of Artificial Sequence: Synthetic oligonucleotide
gguaggcuaaguaugauga

SEQ ID NO: 1908333 - RNA, 19 nt, Artificial Sequence
  Description of Artificial Sequence: Synthetic oligonucleotide
agcuaagugggcuccgucu

SEQ ID NO: 1908334 - RNA, 19 nt, Artificial Sequence
  Description of Artificial Sequence: Synthetic oligonucleotide
agcgaguuggagcgcugcc

SEQ ID NO: 1908335 - RNA, 19 nt, Artificial Sequence
  Description of Artificial Sequence: Synthetic oligonucleotide
uccgucugaaaguuggcau

SEQ ID NO: 1908336 - RNA, 19 nt, Artificial Sequence
  Description of Artificial Sequence: Synthetic oligonucleotide
aucugauugccuuggcacu

SEQ ID NO: 1908337 - RNA, 19 nt, Artificial Sequence
  Description of Artificial Sequence: Synthetic oligonucleotide
gaaaucuagguaggcuaag

SEQ ID NO: 1908338 - RNA, 19 nt, Artificial Sequence
  Description of Artificial Sequence: Synthetic oligonucleotide
ucugauugccuuggcacug

SEQ ID NO: 1908339 - RNA, 19 nt, Artificial Sequence
  Description of Artificial Sequence: Synthetic oligonucleotide
uggcaggaaagauguuggg

SEQ ID NO: 1908340 - RNA, 19 nt, Artificial Sequence
  Description of Artificial Sequence: Synthetic oligonucleotide
guaggcuaaguaugaugag

SEQ ID NO: 1908341 - RNA, 19 nt, Artificial Sequence
  Description of Artificial Sequence: Synthetic oligonucleotide
accaauaaacagaacuaca

SEQ ID NO: 1908342 - RNA, 19 nt, Artificial Sequence
  Description of Artificial Sequence: Synthetic oligonucleotide
ugcuuucauaaagaucuga

SEQ ID NO: 1908343 - RNA, 19 nt, Artificial Sequence
  Description of Artificial Sequence: Synthetic oligonucleotide
caaaauuaagaaaggcugu

SEQ ID NO: 1908344 - RNA, 19 nt, Artificial Sequence
  Description of Artificial Sequence: Synthetic oligonucleotide
gagucugaagccggggccg

SEQ ID NO: 1908345 - RNA, 19 nt, Artificial Sequence
  Description of Artificial Sequence: Synthetic oligonucleotide
gaacugggugccuccgagg

SEQ ID NO: 1908346 - RNA, 19 nt, Artificial Sequence
  Description of Artificial Sequence: Synthetic oligonucleotide
gacaagcuaagugggcucc

SEQ ID NO: 1908347 - RNA, 19 nt, Artificial Sequence
  Description of Artificial Sequence: Synthetic oligonucleotide
augcauuaacucgucauga

SEQ ID NO: 1908348 - RNA, 19 nt, Artificial Sequence
  Description of Artificial Sequence: Synthetic oligonucleotide
guuggugucgagauacaug

SEQ ID NO: 1908349 - RNA, 19 nt, Artificial Sequence
  Description of Artificial Sequence: Synthetic oligonucleotide
uacaaacgauguacuuuca

SEQ ID NO: 1908350 - RNA, 19 nt, Artificial Sequence
  Description of Artificial Sequence: Synthetic oligonucleotide
gucaaguugacugaaggua

SEQ ID NO: 1908351 - RNA, 19 nt, Artificial Sequence
  Description of Artificial Sequence: Synthetic oligonucleotide
uucgccucggggccggcgg

SEQ ID NO: 1908352 - RNA, 19 nt, Artificial Sequence
  Description of Artificial Sequence: Synthetic oligonucleotide
cuauuuggauucuccccac

SEQ ID NO: 1908353 - RNA, 19 nt, Artificial Sequence
  Description of Artificial Sequence: Synthetic oligonucleotide
aaguugacugaagguauau

SEQ ID NO: 1908354 - RNA, 19 nt, Artificial Sequence
  Description of Artificial Sequence: Synthetic oligonucleotide
ucuaaacuccaggacugac

SEQ ID NO: 1908355 - RNA, 19 nt, Artificial Sequence
  Description of Artificial Sequence: Synthetic oligonucleotide
agauacauguggacaagcu

SEQ ID NO: 1908356 - RNA, 19 nt, Artificial Sequence
  Description of Artificial Sequence: Synthetic oligonucleotide
ccugugggcaaaaucaaac

SEQ ID NO: 1908357 - RNA, 19 nt, Artificial Sequence
  Description of Artificial Sequence: Synthetic oligonucleotide
gucguucacauuguagccc

SEQ ID NO: 1908358 - RNA, 19 nt, Artificial Sequence
  Description of Artificial Sequence: Synthetic oligonucleotide
gacuggucaaguugacuga

SEQ ID NO: 1908359 - RNA, 19 nt, Artificial Sequence
  Description of Artificial Sequence: Synthetic oligonucleotide
uucucgucguucacauugu

SEQ ID NO: 1908360 - RNA, 19 nt, Artificial Sequence
  Description of Artificial Sequence: Synthetic oligonucleotide
gguucgcucuccuucgggg

SEQ ID NO: 1908361 - RNA, 19 nt, Artificial Sequence
  Description of Artificial Sequence: Synthetic oligonucleotide
aauggaggguuggugucga

SEQ ID NO: 1908362 - RNA, 19 nt, Artificial Sequence
  Description of Artificial Sequence: Synthetic oligonucleotide
gcuaaguaugaugagagaa

SEQ ID NO: 1908363 - RNA, 19 nt, Artificial Sequence
  Description of Artificial Sequence: Synthetic oligonucleotide
cacggacaugcauuaacuc

SEQ ID NO: 1908364 - RNA, 19 nt, Artificial Sequence
  Description of Artificial Sequence: Synthetic oligonucleotide
uccaggacugacuggucaa

SEQ ID NO: 1908365 - RNA, 19 nt, Artificial Sequence
  Description of Artificial Sequence: Synthetic oligonucleotide
augggacacauccucuuau

SEQ ID NO: 1908366 - RNA, 19 nt, Artificial Sequence
  Description of Artificial Sequence: Synthetic oligonucleotide
agaaaucuagguaggcuaa

SEQ ID NO: 1908367 - RNA, 19 nt, Artificial Sequence
  Description of Artificial Sequence: Synthetic oligonucleotide
cuggucaaguugacugaag

SEQ ID NO: 1908368 - RNA, 19 nt, Artificial Sequence
  Description of Artificial Sequence: Synthetic oligonucleotide
ugggucgcuuuucgccucg

SEQ ID NO: 1908369 - RNA, 19 nt, Artificial Sequence
  Description of Artificial Sequence: Synthetic oligonucleotide
ggugcacccaaccacggac

SEQ ID NO: 1908370 - RNA, 19 nt, Artificial Sequence
  Description of Artificial Sequence: Synthetic oligonucleotide
cuucgggugccugugccgg

SEQ ID NO: 1908371 - RNA, 19 nt, Artificial Sequence
  Description of Artificial Sequence: Synthetic oligonucleotide
ugauugccuuggcacuggc

SEQ ID NO: 1908372 - RNA, 19 nt, Artificial Sequence
  Description of Artificial Sequence: Synthetic oligonucleotide
ucauuuccacugaccaaua

SEQ ID NO: 1908373 - RNA, 19 nt, Artificial Sequence
  Description of Artificial Sequence: Synthetic oligonucleotide
agugaucucuaaacuccag

SEQ ID NO: 1908374 - RNA, 19 nt, Artificial Sequence
  Description of Artificial Sequence: Synthetic oligonucleotide
agguacaaacgauguacuu

SEQ ID NO: 1908375 - RNA, 19 nt, Artificial Sequence
  Description of Artificial Sequence: Synthetic oligonucleotide
uucgcucuccuucgggguc

SEQ ID NO: 1908376 - RNA, 19 nt, Artificial Sequence
  Description of Artificial Sequence: Synthetic oligonucleotide
gcauuaacucgucaugaga

SEQ ID NO: 1908377 - RNA, 19 nt, Artificial Sequence
  Description of Artificial Sequence: Synthetic oligonucleotide
uggugucgagauacaugug

SEQ ID NO: 1908378 - RNA, 19 nt, Artificial Sequence
  Description of Artificial Sequence: Synthetic oligonucleotide
ggugcccgcgccuucagcc

SEQ ID NO: 1908379 - RNA, 19 nt, Artificial Sequence
  Description of Artificial Sequence: Synthetic oligonucleotide
cuaaacuccaggacugacu

SEQ ID NO: 1908380 - RNA, 19 nt, Artificial Sequence
  Description of Artificial Sequence: Synthetic oligonucleotide
ugcuagguuuagagucuga

SEQ ID NO: 1908381 - RNA, 19 nt, Artificial Sequence
  Description of Artificial Sequence: Synthetic oligonucleotide
gacugaagguauauuagau

SEQ ID NO: 1908382 - RNA, 19 nt, Artificial Sequence
  Description of Artificial Sequence: Synthetic oligonucleotide
aggacugacuggucaaguu

SEQ ID NO: 1908383 - RNA, 19 nt, Artificial Sequence
  Description of Artificial Sequence: Synthetic oligonucleotide
gcguggaggagcgaguugg

SEQ ID NO: 1908384 - RNA, 19 nt, Artificial Sequence
  Description of Artificial Sequence: Synthetic oligonucleotide
agucugaagccggggccgc

SEQ ID NO: 1908385 - RNA, 19 nt, Artificial Sequence
  Description of Artificial Sequence: Synthetic oligonucleotide
cauaaagaucugauugccu

SEQ ID NO: 1908386 - RNA, 19 nt, Artificial Sequence
  Description of Artificial Sequence: Synthetic oligonucleotide
gaugggacacauccucuua

SEQ ID NO: 1908387 - RNA, 19 nt, Artificial Sequence
  Description of Artificial Sequence: Synthetic oligonucleotide
uggcccugugggcaaaauc

SEQ ID NO: 1908388 - RNA, 19 nt, Artificial Sequence
  Description of Artificial Sequence: Synthetic oligonucleotide
caggugcacccaaccacgg

SEQ ID NO: 1908389 - RNA, 19 nt, Artificial Sequence
  Description of Artificial Sequence: Synthetic oligonucleotide
ucucgcgguggcugccugg

SEQ ID NO: 1908390 - RNA, 19 nt, Artificial Sequence
  Description of Artificial Sequence: Synthetic oligonucleotide
uucagacagugaucucuaa

SEQ ID NO: 1908391 - RNA, 19 nt, Artificial Sequence
  Description of Artificial Sequence: Synthetic oligonucleotide
uucggcuucgggugccugu

SEQ ID NO: 1908392 - RNA, 19 nt, Artificial Sequence
  Description of Artificial Sequence: Synthetic oligonucleotide
cugauugccuuggcacugg

SEQ ID NO: 1908393 - RNA, 19 nt, Artificial Sequence
  Description of Artificial Sequence: Synthetic oligonucleotide
ugcacccaaccacggacau

SEQ ID NO: 1908394 - RNA, 19 nt, Artificial Sequence
  Description of Artificial Sequence: Synthetic oligonucleotide
ggcccugugggcaaaauca

SEQ ID NO: 1908395 - RNA, 19 nt, Artificial Sequence
  Description of Artificial Sequence: Synthetic oligonucleotide
cagugaucucuaaacucca

SEQ ID NO: 1908396 - RNA, 19 nt, Artificial Sequence
  Description of Artificial Sequence: Synthetic oligonucleotide
ucagcuugccucccaucuu

SEQ ID NO: 1908397 - RNA, 19 nt, Artificial Sequence
  Description of Artificial Sequence: Synthetic oligonucleotide
cuacaggugcacccaacca

SEQ ID NO: 1908398 - RNA, 19 nt, Artificial Sequence
  Description of Artificial Sequence: Synthetic oligonucleotide
ccucccaucuuggaguucg

SEQ ID NO: 1908399 - RNA, 19 nt, Artificial Sequence
  Description of Artificial Sequence: Synthetic oligonucleotide
acuggucaaguugacugaa

SEQ ID NO: 1908400 - RNA, 19 nt, Artificial Sequence
  Description of Artificial Sequence: Synthetic oligonucleotide
uaagugggcuccgucugaa

SEQ ID NO: 1908401 - RNA, 19 nt, Artificial Sequence
  Description of Artificial Sequence: Synthetic oligonucleotide
gaguuggagcgcugccgcc

SEQ ID NO: 1908402 - RNA, 19 nt, Artificial Sequence
  Description of Artificial Sequence: Synthetic oligonucleotide
cauccucuuauuuuauuau

SEQ ID NO: 1908403 - RNA, 19 nt, Artificial Sequence
  Description of Artificial Sequence: Synthetic oligonucleotide
cuucgggguccccuccucc

SEQ ID NO: 1908404 - RNA, 19 nt, Artificial Sequence
  Description of Artificial Sequence: Synthetic oligonucleotide
ucuccuucgggguccccuc

SEQ ID NO: 1908405 - RNA, 19 nt, Artificial Sequence
  Description of Artificial Sequence: Synthetic oligonucleotide
uggccgcggaacugggugc

SEQ ID NO: 1908406 - RNA, 19 nt, Artificial Sequence
  Description of Artificial Sequence: Synthetic oligonucleotide
ucucgucguucacauugua

SEQ ID NO: 1908407 - RNA, 19 nt, Artificial Sequence
  Description of Artificial Sequence: Synthetic oligonucleotide
ggcucgacggcggagcccg

SEQ ID NO: 1908408 - RNA, 19 nt, Artificial Sequence
  Description of Artificial Sequence: Synthetic oligonucleotide
uggacgagggcgcggccuc

SEQ ID NO: 1908409 - RNA, 19 nt, Artificial Sequence
  Description of Artificial Sequence: Synthetic oligonucleotide
ggaggagcguggaggagcg

SEQ ID NO: 1908410 - RNA, 19 nt, Artificial Sequence
  Description of Artificial Sequence: Synthetic oligonucleotide
gaaggcgcucucccggcuc

SEQ ID NO: 1908411 - RNA, 19 nt, Artificial Sequence
  Description of Artificial Sequence: Synthetic oligonucleotide
uuggacgagggcgcggccu

SEQ ID NO: 1908412 - RNA, 19 nt, Artificial Sequence
  Description of Artificial Sequence: Synthetic oligonucleotide
ugggcuccgucugaaaguu

SEQ ID NO: 1908413 - RNA, 19 nt, Artificial Sequence
  Description of Artificial Sequence: Synthetic oligonucleotide
gcuggcgucguccggcccg

SEQ ID NO: 1908414 - RNA, 19 nt, Artificial Sequence
  Description of Artificial Sequence: Synthetic oligonucleotide
aguugacugaagguauauu

SEQ ID NO: 1908415 - RNA, 19 nt, Artificial Sequence
  Description of Artificial Sequence: Synthetic oligonucleotide
gagcgaguuggagcgcugc

SEQ ID NO: 1908416 - RNA, 19 nt, Artificial Sequence
  Description of Artificial Sequence: Synthetic oligonucleotide
cgcgcugcuagguuuagag

SEQ ID NO: 1908417 - RNA, 19 nt, Artificial Sequence
  Description of Artificial Sequence: Synthetic oligonucleotide
cuuuucgccucggggccgg

SEQ ID NO: 1908418 - RNA, 19 nt, Artificial Sequence
  Description of Artificial Sequence: Synthetic oligonucleotide
uccuucgggguccccuccu

SEQ ID NO: 1908419 - RNA, 19 nt, Artificial Sequence
  Description of Artificial Sequence: Synthetic oligonucleotide
cucgcgguggcugccuggg

SEQ ID NO: 1908420 - RNA, 19 nt, Artificial Sequence
  Description of Artificial Sequence: Synthetic oligonucleotide
caaguugacugaagguaua

SEQ ID NO: 1908421 - RNA, 19 nt, Artificial Sequence
  Description of Artificial Sequence: Synthetic oligonucleotide
uagguaggcuaaguaugau

SEQ ID NO: 1908422 - RNA, 19 nt, Artificial Sequence
  Description of Artificial Sequence: Synthetic oligonucleotide
aagugggcuccgucugaaa

SEQ ID NO: 1908423 - RNA, 19 nt, Artificial Sequence
  Description of Artificial Sequence: Synthetic oligonucleotide
cgucguucacauuguagcc

SEQ ID NO: 1908424 - RNA, 19 nt, Artificial Sequence
  Description of Artificial Sequence: Synthetic oligonucleotide
ggacaagcuaagugggcuc

SEQ ID NO: 1908425 - RNA, 19 nt, Artificial Sequence
  Description of Artificial Sequence: Synthetic oligonucleotide
uccuuggacgagggcgcgg

SEQ ID NO: 1908426 - RNA, 19 nt, Artificial Sequence
  Description of Artificial Sequence: Synthetic oligonucleotide
cagguacaaacgauguacu

SEQ ID NO: 1908427 - RNA, 19 nt, Artificial Sequence
  Description of Artificial Sequence: Synthetic oligonucleotide
cuaagugggcuccgucuga

SEQ ID NO: 1908428 - RNA, 19 nt, Artificial Sequence
  Description of Artificial Sequence: Synthetic oligonucleotide
ggucaaguugacugaaggu

SEQ ID NO: 1908429 - RNA, 19 nt, Artificial Sequence
  Description of Artificial Sequence: Synthetic oligonucleotide
gcuucgggugccugugccg

SEQ ID NO: 1908430 - RNA, 19 nt, Artificial Sequence
  Description of Artificial Sequence: Synthetic oligonucleotide
auguacuuucagacaguga

SEQ ID NO: 1908431 - RNA, 19 nt, Artificial Sequence
  Description of Artificial Sequence: Synthetic oligonucleotide
aggugcacccaaccacgga

SEQ ID NO: 1908432 - RNA, 19 nt, Artificial Sequence
  Description of Artificial Sequence: Synthetic oligonucleotide
gcgguucagguacaaacga

SEQ ID NO: 1908433 - RNA, 19 nt, Artificial Sequence
  Description of Artificial Sequence: Synthetic oligonucleotide
gccgcugggucgcuuuucg

SEQ ID NO: 1908434 - RNA, 19 nt, Artificial Sequence
  Description of Artificial Sequence: Synthetic oligonucleotide
ggguucgcucuccuucggg

SEQ ID NO: 1908435 - RNA, 19 nt, Artificial Sequence
  Description of Artificial Sequence: Synthetic oligonucleotide
acgagggcgcggccuccgc

SEQ ID NO: 1908436 - RNA, 19 nt, Artificial Sequence
  Description of Artificial Sequence: Synthetic oligonucleotide
ggaguucggcuucgggugc

SEQ ID NO: 1908437 - RNA, 19 nt, Artificial Sequence
  Description of Artificial Sequence: Synthetic oligonucleotide
ugcugggcgaaggcgcucu

SEQ ID NO: 1908438 - RNA, 19 nt, Artificial Sequence
  Description of Artificial Sequence: Synthetic oligonucleotide
caaccacggacaugcauua

SEQ ID NO: 1908439 - RNA, 19 nt, Artificial Sequence
  Description of Artificial Sequence: Synthetic oligonucleotide
ggcuaaguaugaugagaga

SEQ ID NO: 1908440 - RNA, 19 nt, Artificial Sequence
  Description of Artificial Sequence: Synthetic oligonucleotide
gcgaguuggagcgcugccg

SEQ ID NO: 1908441 - RNA, 19 nt, Artificial Sequence
  Description of Artificial Sequence: Synthetic oligonucleotide
gguacaaacgauguacuuu

SEQ ID NO: 1908442 - RNA, 19 nt, Artificial Sequence
  Description of Artificial Sequence: Synthetic oligonucleotide
ucggccgcgcccgugcucu

SEQ ID NO: 1908443 - RNA, 19 nt, Artificial Sequence
  Description of Artificial Sequence: Synthetic oligonucleotide
gaguucggcuucgggugcc

SEQ ID NO: 1908444 - RNA, 19 nt, Artificial Sequence
  Description of Artificial Sequence: Synthetic oligonucleotide
ggcuucgggugccugugcc

SEQ ID NO: 1908445 - RNA, 19 nt, Artificial Sequence
  Description of Artificial Sequence: Synthetic oligonucleotide
cuccgucugaaaguuggca

SEQ ID NO: 1908446 - RNA, 19 nt, Artificial Sequence
  Description of Artificial Sequence: Synthetic oligonucleotide
ucgggugccugugccggcc

SEQ ID NO: 1908447 - RNA, 19 nt, Artificial Sequence
  Description of Artificial Sequence: Synthetic oligonucleotide
gacgagggcgcggccuccg

SEQ ID NO: 1908448 - RNA, 19 nt, Artificial Sequence
  Description of Artificial Sequence: Synthetic oligonucleotide
auggaggguuggugucgag

SEQ ID NO: 1908449 - RNA, 19 nt, Artificial Sequence
  Description of Artificial Sequence: Synthetic oligonucleotide
ugccucccaucuuggaguu

SEQ ID NO: 1908450 - RNA, 19 nt, Artificial Sequence
  Description of Artificial Sequence: Synthetic oligonucleotide
cuuggacgagggcgcggcc

SEQ ID NO: 1908451 - RNA, 19 nt, Artificial Sequence
  Description of Artificial Sequence: Synthetic oligonucleotide
ucguccggcccggugcuug

SEQ ID NO: 1908452 - RNA, 19 nt, Artificial Sequence
  Description of Artificial Sequence: Synthetic oligonucleotide
ucggugcccgcgccuucag

SEQ ID NO: 1908453 - RNA, 19 nt, Artificial Sequence
  Description of Artificial Sequence: Synthetic oligonucleotide
gcccggaggagcguggagg

SEQ ID NO: 1908454 - RNA, 19 nt, Artificial Sequence
  Description of Artificial Sequence: Synthetic oligonucleotide
gcuagguuuagagucugaa

SEQ ID NO: 1908455 - RNA, 19 nt, Artificial Sequence
  Description of Artificial Sequence: Synthetic oligonucleotide
ggggucuccuuggacgagg

SEQ ID NO: 1908456 - RNA, 19 nt, Artificial Sequence
  Description of Artificial Sequence: Synthetic oligonucleotide
cgcugggucgcuuuucgcc

SEQ ID NO: 1908457 - RNA, 19 nt, Artificial Sequence
  Description of Artificial Sequence: Synthetic oligonucleotide
cugggucgcuuuucgccuc

SEQ ID NO: 1908458 - RNA, 19 nt, Artificial Sequence
  Description of Artificial Sequence: Synthetic oligonucleotide
gugggcuccgucugaaagu

SEQ ID NO: 1908459 - RNA, 19 nt, Artificial Sequence
  Description of Artificial Sequence: Synthetic oligonucleotide
aaccacggacaugcauuaa

SEQ ID NO: 1908460 - RNA, 19 nt, Artificial Sequence
  Description of Artificial Sequence: Synthetic oligonucleotide
cugggcgaaggcgcucucc

SEQ ID NO: 1908461 - RNA, 19 nt, Artificial Sequence
  Description of Artificial Sequence: Synthetic oligonucleotide
gugcucucgcgguggcugc

SEQ ID NO: 1908462 - RNA, 19 nt, Artificial Sequence
  Description of Artificial Sequence: Synthetic oligonucleotide
cgcgccuucagccuucuug

SEQ ID NO: 1908463 - RNA, 19 nt, Artificial Sequence
  Description of Artificial Sequence: Synthetic oligonucleotide
guucgcucuccuucggggu

SEQ ID NO: 1908464 - RNA, 19 nt, Artificial Sequence
  Description of Artificial Sequence: Synthetic oligonucleotide
gccuuggccgcggaacugg

SEQ ID NO: 1908465 - RNA, 19 nt, Artificial Sequence
  Description of Artificial Sequence: Synthetic oligonucleotide
gccuccaaggggcccgggg

SEQ ID NO: 1908466 - RNA, 19 nt, Artificial Sequence
  Description of Artificial Sequence: Synthetic oligonucleotide
gugcacccaaccacggaca

SEQ ID NO: 1908467 - RNA, 19 nt, Artificial Sequence
  Description of Artificial Sequence: Synthetic oligonucleotide
ggugccuccgaggccgcgg

SEQ ID NO: 1908468 - RNA, 19 nt, Artificial Sequence
  Description of Artificial Sequence: Synthetic oligonucleotide
gggguucgcucuccuucgg

SEQ ID NO: 1908469 - RNA, 19 nt, Artificial Sequence
  Description of Artificial Sequence: Synthetic oligonucleotide
gcgcggugccuccaagggg

SEQ ID NO: 1908470 - RNA, 19 nt, Artificial Sequence
  Description of Artificial Sequence: Synthetic oligonucleotide
uccgcgcugcuagguuuag

SEQ ID NO: 1908471 - RNA, 19 nt, Artificial Sequence
  Description of Artificial Sequence: Synthetic oligonucleotide
gccggcgggagccucaguc

SEQ ID NO: 1908472 - RNA, 19 nt, Artificial Sequence
  Description of Artificial Sequence: Synthetic oligonucleotide
acgcuacccuccccagcug

SEQ ID NO: 1908473 - RNA, 19 nt, Artificial Sequence
  Description of Artificial Sequence: Synthetic oligonucleotide
acagcgguucagguacaaa

SEQ ID NO: 1908474 - RNA, 19 nt, Artificial Sequence
  Description of Artificial Sequence: Synthetic oligonucleotide
cgucaugagaaaucuaggu

SEQ ID NO: 1908475 - RNA, 19 nt, Artificial Sequence
  Description of Artificial Sequence: Synthetic oligonucleotide
ugcccgcgccuucagccuu

SEQ ID NO: 1908476 - RNA, 19 nt, Artificial Sequence
  Description of Artificial Sequence: Synthetic oligonucleotide
ugggugccuccgaggccgc

SEQ ID NO: 1908477 - RNA, 19 nt, Artificial Sequence
  Description of Artificial Sequence: Synthetic oligonucleotide
cuggcgucguccggcccgg

SEQ ID NO: 1908478 - RNA, 19 nt, Artificial Sequence
  Description of Artificial Sequence: Synthetic oligonucleotide
gacagcgguucagguacaa

SEQ ID NO: 1908479 - RNA, 19 nt, Artificial Sequence
  Description of Artificial Sequence: Synthetic oligonucleotide
ggacaugcauuaacucguc

SEQ ID NO: 1908480 - RNA, 19 nt, Artificial Sequence
  Description of Artificial Sequence: Synthetic oligonucleotide
acucgucaugagaaaucua

SEQ ID NO: 1908481 - RNA, 19 nt, Artificial Sequence
  Description of Artificial Sequence: Synthetic oligonucleotide
ccuucggccgcgcccgugc

SEQ ID NO: 1908482 - RNA, 19 nt, Artificial Sequence
  Description of Artificial Sequence: Synthetic oligonucleotide
cgagauacauguggacaag

SEQ ID NO: 1908483 - RNA, 19 nt, Artificial Sequence
  Description of Artificial Sequence: Synthetic oligonucleotide
cucucgcgguggcugccug

SEQ ID NO: 1908484 - RNA, 19 nt, Artificial Sequence
  Description of Artificial Sequence: Synthetic oligonucleotide
gcugggucgcuuuucgccu

SEQ ID NO: 1908485 - RNA, 19 nt, Artificial Sequence
  Description of Artificial Sequence: Synthetic oligonucleotide
ccaaccacggacaugcauu

SEQ ID NO: 1908486 - RNA, 19 nt, Artificial Sequence
  Description of Artificial Sequence: Synthetic oligonucleotide
ccuuggccgcggaacuggg

SEQ ID NO: 1908487 - RNA, 19 nt, Artificial Sequence
  Description of Artificial Sequence: Synthetic oligonucleotide
gcgccuucagccuucuugu

SEQ ID NO: 1908488 - RNA, 19 nt, Artificial Sequence
  Description of Artificial Sequence: Synthetic oligonucleotide
ggggacagcgguucaggua

SEQ ID NO: 1908489 - RNA, 19 nt, Artificial Sequence
  Description of Artificial Sequence: Synthetic oligonucleotide
aguucggcuucgggugccu

SEQ ID NO: 1908490 - RNA, 19 nt, Artificial Sequence
  Description of Artificial Sequence: Synthetic oligonucleotide
cggacaugcauuaacucgu

SEQ ID NO: 1908491 - RNA, 19 nt, Artificial Sequence
  Description of Artificial Sequence: Synthetic oligonucleotide
ccacggacaugcauuaacu

SEQ ID NO: 1908492 - RNA, 19 nt, Artificial Sequence
  Description of Artificial Sequence: Synthetic oligonucleotide
ucccggcucgacggcggag

SEQ ID NO: 1908493 - RNA, 19 nt, Artificial Sequence
  Description of Artificial Sequence: Synthetic oligonucleotide
gcgccuucggccgcgcccg

SEQ ID NO: 1908494 - RNA, 19 nt, Artificial Sequence
  Description of Artificial Sequence: Synthetic oligonucleotide
cugacuggucaaguugacu

SEQ ID NO: 1908495 - RNA, 19 nt, Artificial Sequence
  Description of Artificial Sequence: Synthetic oligonucleotide
cuccgcgcugcuagguuua

SEQ ID NO: 1908496 - RNA, 19 nt, Artificial Sequence
  Description of Artificial Sequence: Synthetic oligonucleotide
gguggagcgccaggggaca

SEQ ID NO: 1908497 - RNA, 19 nt, Artificial Sequence
  Description of Artificial Sequence: Synthetic oligonucleotide
cgugcucucgcgguggcug

SEQ ID NO: 1908498 - RNA, 19 nt, Artificial Sequence
  Description of Artificial Sequence: Synthetic oligonucleotide
gagcccggaggagcgugga

SEQ ID NO: 1908499 - RNA, 19 nt, Artificial Sequence
  Description of Artificial Sequence: Synthetic oligonucleotide
ggccgcggaacugggugcc

SEQ ID NO: 1908500 - RNA, 19 nt, Artificial Sequence
  Description of Artificial Sequence: Synthetic oligonucleotide
ccaggggacagcgguucag

SEQ ID NO: 1908501 - RNA, 19 nt, Artificial Sequence
  Description of Artificial Sequence: Synthetic oligonucleotide
caagcuaagugggcuccgu

SEQ ID NO: 1908502 - RNA, 19 nt, Artificial Sequence
  Description of Artificial Sequence: Synthetic oligonucleotide
cucggugcccgcgccuuca

SEQ ID NO: 1908503 - RNA, 19 nt, Artificial Sequence
  Description of Artificial Sequence: Synthetic oligonucleotide
cgcggaacugggugccucc

SEQ ID NO: 1908504 - RNA, 19 nt, Artificial Sequence
  Description of Artificial Sequence: Synthetic oligonucleotide
cccggaggagcguggagga

SEQ ID NO: 1908505 - RNA, 19 nt, Artificial Sequence
  Description of Artificial Sequence: Synthetic oligonucleotide
ccggugcuuggcugcuggg

SEQ ID NO: 1908506 - RNA, 19 nt, Artificial Sequence
  Description of Artificial Sequence: Synthetic oligonucleotide
gguuggugucgagauacau

SEQ ID NO: 1908507 - RNA, 19 nt, Artificial Sequence
  Description of Artificial Sequence: Synthetic oligonucleotide
cccugugggcaaaaucaaa

SEQ ID NO: 1908508 - RNA, 19 nt, Artificial Sequence
  Description of Artificial Sequence: Synthetic oligonucleotide
cccggcucgacggcggagc

SEQ ID NO: 1908509 - RNA, 19 nt, Artificial Sequence
  Description of Artificial Sequence: Synthetic oligonucleotide
gcucucccggcucgacggc

SEQ ID NO: 1908510 - RNA, 19 nt, Artificial Sequence
  Description of Artificial Sequence: Synthetic oligonucleotide
cuuggccgcggaacugggu

SEQ ID NO: 1908511 - RNA, 19 nt, Artificial Sequence
  Description of Artificial Sequence: Synthetic oligonucleotide
ccgcugggucgcuuuucgc

SEQ ID NO: 1908512 - RNA, 19 nt, Artificial Sequence
  Description of Artificial Sequence: Synthetic oligonucleotide
ggaaagauguugggauuuu

SEQ ID NO: 1908513 - RNA, 19 nt, Artificial Sequence
  Description of Artificial Sequence: Synthetic oligonucleotide
gugcccgcgccuucagccu

SEQ ID NO: 1908514 - RNA, 19 nt, Artificial Sequence
  Description of Artificial Sequence: Synthetic oligonucleotide
gcuacccuccccagcugca

SEQ ID NO: 1908515 - RNA, 19 nt, Artificial Sequence
  Description of Artificial Sequence: Synthetic oligonucleotide
gggucgcuuuucgccucgg

SEQ ID NO: 1908516 - RNA, 19 nt, Artificial Sequence
  Description of Artificial Sequence: Synthetic oligonucleotide
cgcgccuucggccgcgccc

SEQ ID NO: 1908517 - RNA, 19 nt, Artificial Sequence
  Description of Artificial Sequence: Synthetic oligonucleotide
cugcugggcgaaggcgcuc

SEQ ID NO: 1908518 - RNA, 19 nt, Artificial Sequence
  Description of Artificial Sequence: Synthetic oligonucleotide
ccggcccggugcuuggcug

SEQ ID NO: 1908519 - RNA, 19 nt, Artificial Sequence
  Description of Artificial Sequence: Synthetic oligonucleotide
gcgcugcuagguuuagagu

SEQ ID NO: 1908520 - RNA, 19 nt, Artificial Sequence
  Description of Artificial Sequence: Synthetic oligonucleotide
ggguuggugucgagauaca

SEQ ID NO: 1908521 - RNA, 19 nt, Artificial Sequence
  Description of Artificial Sequence: Synthetic oligonucleotide
gccgcgcccgugcucucgc

SEQ ID NO: 1908522 - RNA, 19 nt, Artificial Sequence
  Description of Artificial Sequence: Synthetic oligonucleotide
ccggcucgacggcggagcc

SEQ ID NO: 1908523 - RNA, 19 nt, Artificial Sequence
  Description of Artificial Sequence: Synthetic oligonucleotide
cgagggcgcggccuccgcg

SEQ ID NO: 1908524 - RNA, 19 nt, Artificial Sequence
  Description of Artificial Sequence: Synthetic oligonucleotide
ggccgcgcccgugcucucg

SEQ ID NO: 1908525 - RNA, 19 nt, Artificial Sequence
  Description of Artificial Sequence: Synthetic oligonucleotide
ccgucugaaaguuggcauu

SEQ ID NO: 1908526 - RNA, 19 nt, Artificial Sequence
  Description of Artificial Sequence: Synthetic oligonucleotide
cucccggcucgacggcgga

SEQ ID NO: 1908527 - RNA, 19 nt, Artificial Sequence
  Description of Artificial Sequence: Synthetic oligonucleotide
ggacgagggcgcggccucc

SEQ ID NO: 1908528 - RNA, 19 nt, Artificial Sequence
  Description of Artificial Sequence: Synthetic oligonucleotide
cccuccccugaugggacac

SEQ ID NO: 1908529 - RNA, 19 nt, Artificial Sequence
  Description of Artificial Sequence: Synthetic oligonucleotide
ccugugccggcccuggggu

SEQ ID NO: 1908530 - RNA, 19 nt, Artificial Sequence
  Description of Artificial Sequence: Synthetic oligonucleotide
cuccccugaugggacacau

SEQ ID NO: 1908531 - RNA, 19 nt, Artificial Sequence
  Description of Artificial Sequence: Synthetic oligonucleotide
ggacagcgguucagguaca

SEQ ID NO: 1908532 - RNA, 19 nt, Artificial Sequence
  Description of Artificial Sequence: Synthetic oligonucleotide
ccggcccuggggugagcgc

SEQ ID NO: 1908533 - RNA, 19 nt, Artificial Sequence
  Description of Artificial Sequence: Synthetic oligonucleotide
aggcgcucucccggcucga

SEQ ID NO: 1908534 - RNA, 19 nt, Artificial Sequence
  Description of Artificial Sequence: Synthetic oligonucleotide
gcgccuuggccgcggaacu

SEQ ID NO: 1908535 - RNA, 19 nt, Artificial Sequence
  Description of Artificial Sequence: Synthetic oligonucleotide
ugccggcccuggggugagc

SEQ ID NO: 1908536 - RNA, 19 nt, Artificial Sequence
  Description of Artificial Sequence: Synthetic oligonucleotide
gcugggcgaaggcgcucuc

SEQ ID NO: 1908537 - RNA, 19 nt, Artificial Sequence
  Description of Artificial Sequence: Synthetic oligonucleotide
cuacccuccccagcugcau

SEQ ID NO: 1908538 - RNA, 19 nt, Artificial Sequence
  Description of Artificial Sequence: Synthetic oligonucleotide
cccaaccacggacaugcau

SEQ ID NO: 1908539 - RNA, 19 nt, Artificial Sequence
  Description of Artificial Sequence: Synthetic oligonucleotide
cuucggccgcgcccgugcu

SEQ ID NO: 1908540 - RNA, 19 nt, Artificial Sequence
  Description of Artificial Sequence: Synthetic oligonucleotide
cgguucagguacaaacgau

SEQ ID NO: 1908541 - RNA, 19 nt, Artificial Sequence
  Description of Artificial Sequence: Synthetic oligonucleotide
gucugaagccggggccgcu

SEQ ID NO: 1908542 - RNA, 19 nt, Artificial Sequence
  Description of Artificial Sequence: Synthetic oligonucleotide
ccgcggaacugggugccuc

SEQ ID NO: 1908543 - RNA, 19 nt, Artificial Sequence
  Description of Artificial Sequence: Synthetic oligonucleotide
cggagcccggaggagcgug

SEQ ID NO: 1908544 - RNA, 19 nt, Artificial Sequence
  Description of Artificial Sequence: Synthetic oligonucleotide
ccggcgggagccucagucu

SEQ ID NO: 1908545 - RNA, 19 nt, Artificial Sequence
  Description of Artificial Sequence: Synthetic oligonucleotide
uggcgucguccggcccggu

SEQ ID NO: 1908546 - RNA, 19 nt, Artificial Sequence
  Description of Artificial Sequence: Synthetic oligonucleotide
cggccuccgcgcugcuagg

SEQ ID NO: 1908547 - RNA, 19 nt, Artificial Sequence
  Description of Artificial Sequence: Synthetic oligonucleotide
ccucggugcccgcgccuuc

SEQ ID NO: 1908548 - RNA, 19 nt, Artificial Sequence
  Description of Artificial Sequence: Synthetic oligonucleotide
gccuucggccgcgcccgug

SEQ ID NO: 1908549 - RNA, 19 nt, Artificial Sequence
  Description of Artificial Sequence: Synthetic oligonucleotide
ccuccgcgcugcuagguuu

SEQ ID NO: 1908550 - RNA, 19 nt, Artificial Sequence
  Description of Artificial Sequence: Synthetic oligonucleotide
ggcccgggguggcuggcgu

SEQ ID NO: 1908551 - RNA, 19 nt, Artificial Sequence
  Description of Artificial Sequence: Synthetic oligonucleotide
ggggccggcgggagccuca

SEQ ID NO: 1908552 - RNA, 19 nt, Artificial Sequence
  Description of Artificial Sequence: Synthetic oligonucleotide
cgcccgugcucucgcggug

SEQ ID NO: 1908553 - RNA, 19 nt, Artificial Sequence
  Description of Artificial Sequence: Synthetic oligonucleotide
gccucccaucuuggaguuc

SEQ ID NO: 1908554 - RNA, 19 nt, Artificial Sequence
  Description of Artificial Sequence: Synthetic oligonucleotide
ccccuccccugaugggaca

SEQ ID NO: 1908555 - RNA, 19 nt, Artificial Sequence
  Description of Artificial Sequence: Synthetic oligonucleotide
ggggccgcugggucgcuuu

SEQ ID NO: 1908556 - RNA, 19 nt, Artificial Sequence
  Description of Artificial Sequence: Synthetic oligonucleotide
cuggcccugugggcaaaau

SEQ ID NO: 1908557 - RNA, 19 nt, Artificial Sequence
  Description of Artificial Sequence: Synthetic oligonucleotide
gggugccugugccggcccu

SEQ ID NO: 1908558 - RNA, 19 nt, Artificial Sequence
  Description of Artificial Sequence: Synthetic oligonucleotide
gcgggagccucagucuuuu

SEQ ID NO: 1908559 - RNA, 19 nt, Artificial Sequence
  Description of Artificial Sequence: Synthetic oligonucleotide
ccuccccugaugggacaca

SEQ ID NO: 1908560 - RNA, 19 nt, Artificial Sequence
  Description of Artificial Sequence: Synthetic oligonucleotide
gccuccgcgcugcuagguu

SEQ ID NO: 1908561 - RNA, 19 nt, Artificial Sequence
  Description of Artificial Sequence: Synthetic oligonucleotide
gcccgcgccuucagccuuc

SEQ ID NO: 1908562 - RNA, 19 nt, Artificial Sequence
  Description of Artificial Sequence: Synthetic oligonucleotide
cggcucgacggcggagccc

SEQ ID NO: 1908563 - RNA, 19 nt, Artificial Sequence
  Description of Artificial Sequence: Synthetic oligonucleotide
ggccuccgcgcugcuaggu

SEQ ID NO: 1908564 - RNA, 19 nt, Artificial Sequence
  Description of Artificial Sequence: Synthetic oligonucleotide
gggcgccuuggccgcggaa

SEQ ID NO: 1908565 - RNA, 19 nt, Artificial Sequence
  Description of Artificial Sequence: Synthetic oligonucleotide
gcucucgcgguggcugccu

SEQ ID NO: 1908566 - RNA, 19 nt, Artificial Sequence
  Description of Artificial Sequence: Synthetic oligonucleotide
ccgcgccuucggccgcgcc

SEQ ID NO: 1908567 - RNA, 19 nt, Artificial Sequence
  Description of Artificial Sequence: Synthetic oligonucleotide
ggcccggugcuuggcugcu

SEQ ID NO: 1908568 - RNA, 19 nt, Artificial Sequence
  Description of Artificial Sequence: Synthetic oligonucleotide
ccgcgcugcuagguuuaga

SEQ ID NO: 1908569 - RNA, 19 nt, Artificial Sequence
  Description of Artificial Sequence: Synthetic oligonucleotide
gucguccggcccggugcuu

SEQ ID NO: 1908570 - RNA, 19 nt, Artificial Sequence
  Description of Artificial Sequence: Synthetic oligonucleotide
gccgcggaacugggugccu

SEQ ID NO: 1908571 - RNA, 19 nt, Artificial Sequence
  Description of Artificial Sequence: Synthetic oligonucleotide
gcgccaggggacagcgguu

SEQ ID NO: 1908572 - RNA, 19 nt, Artificial Sequence
  Description of Artificial Sequence: Synthetic oligonucleotide
gcggagcccggaggagcgu

SEQ ID NO: 1908573 - RNA, 19 nt, Artificial Sequence
  Description of Artificial Sequence: Synthetic oligonucleotide
gcccuggggugagcgcggu

SEQ ID NO: 1908574 - RNA, 19 nt, Artificial Sequence
  Description of Artificial Sequence: Synthetic oligonucleotide
ggccggcgggagccucagu

SEQ ID NO: 1908575 - RNA, 19 nt, Artificial Sequence
  Description of Artificial Sequence: Synthetic oligonucleotide
cggccgcgcccgugcucuc

SEQ ID NO: 1908576 - RNA, 19 nt, Artificial Sequence
  Description of Artificial Sequence: Synthetic oligonucleotide
cccgcgccuucagccuucu

SEQ ID NO: 1908577 - RNA, 19 nt, Artificial Sequence
  Description of Artificial Sequence: Synthetic oligonucleotide
cgcggccuccgcgcugcua

SEQ ID NO: 1908578 - RNA, 19 nt, Artificial Sequence
  Description of Artificial Sequence: Synthetic oligonucleotide
ccgcgccuucagccuucuu

SEQ ID NO: 1908579 - RNA, 19 nt, Artificial Sequence
  Description of Artificial Sequence: Synthetic oligonucleotide
cgccuucggccgcgcccgu

SEQ ID NO: 1908580 - RNA, 19 nt, Artificial Sequence
  Description of Artificial Sequence: Synthetic oligonucleotide
ccggggccgcugggucgcu

SEQ ID NO: 1908581 - RNA, 19 nt, Artificial Sequence
  Description of Artificial Sequence: Synthetic oligonucleotide
cggggccgcugggucgcuu

SEQ ID NO: 1908582 - RNA, 19 nt, Artificial Sequence
  Description of Artificial Sequence: Synthetic oligonucleotide
aaaacugacaaauauauac

SEQ ID NO: 1908583 - RNA, 19 nt, Artificial Sequence
  Description of Artificial Sequence: Synthetic oligonucleotide
aaaacaaacccauucagcc

SEQ ID NO: 1908584 - RNA, 19 nt, Artificial Sequence
  Description of Artificial Sequence: Synthetic oligonucleotide
aaugugauaguauuuuagc

SEQ ID NO: 1908585 - RNA, 19 nt, Artificial Sequence
  Description of Artificial Sequence: Synthetic oligonucleotide
ugauauuucacuuugaaga

SEQ ID NO: 1908586 - RNA, 19 nt, Artificial Sequence
  Description of Artificial Sequence: Synthetic oligonucleotide
cugaauuuuaauuaaaucc

SEQ ID NO: 1908587 - RNA, 19 nt, Artificial Sequence
  Description of Artificial Sequence: Synthetic oligonucleotide
auuaaccuaaaacaaaccc

SEQ ID NO: 1908588 - RNA, 19 nt, Artificial Sequence
  Description of Artificial Sequence: Synthetic oligonucleotide
aaaucaucagggcugauuc

SEQ ID NO: 1908589 - RNA, 19 nt, Artificial Sequence
  Description of Artificial Sequence: Synthetic oligonucleotide
uaguccaugaauaauagcc

SEQ ID NO: 1908590 - RNA, 19 nt, Artificial Sequence
  Description of Artificial Sequence: Synthetic oligonucleotide
ugaacuuauaaugugauag

SEQ ID NO: 1908591 - RNA, 19 nt, Artificial Sequence
  Description of Artificial Sequence: Synthetic oligonucleotide
cauacaaacagccacagcc

SEQ ID NO: 1908592 - RNA, 19 nt, Artificial Sequence
  Description of Artificial Sequence: Synthetic oligonucleotide
uuauuuacaucacugacca

SEQ ID NO: 1908593 - RNA, 19 nt, Artificial Sequence
  Description of Artificial Sequence: Synthetic oligonucleotide
uuuaacaugacacuuguuc

SEQ ID NO: 1908594 - RNA, 19 nt, Artificial Sequence
  Description of Artificial Sequence: Synthetic oligonucleotide
aauugauaagcuguaagac

SEQ ID NO: 1908595 - RNA, 19 nt, Artificial Sequence
  Description of Artificial Sequence: Synthetic oligonucleotide
acguucaucacuuucaaac

SEQ ID NO: 1908596 - RNA, 19 nt, Artificial Sequence
  Description of Artificial Sequence: Synthetic oligonucleotide
uacaucacugaccagaaag

SEQ ID NO: 1908597 - RNA, 19 nt, Artificial Sequence
  Description of Artificial Sequence: Synthetic oligonucleotide
ucaauugaaucccaaauca

SEQ ID NO: 1908598 - RNA, 19 nt, Artificial Sequence
  Description of Artificial Sequence: Synthetic oligonucleotide
aauaauagccgacucuguc

SEQ ID NO: 1908599 - RNA, 19 nt, Artificial Sequence
  Description of Artificial Sequence: Synthetic oligonucleotide
ugugauaguauuuuagccc

SEQ ID NO: 1908600 - RNA, 19 nt, Artificial Sequence
  Description of Artificial Sequence: Synthetic oligonucleotide
auuaaguuugucauguucc

SEQ ID NO: 1908601 - RNA, 19 nt, Artificial Sequence
  Description of Artificial Sequence: Synthetic oligonucleotide
cuuguuucaacuuagauaa

SEQ ID NO: 1908602 - RNA, 19 nt, Artificial Sequence
  Description of Artificial Sequence: Synthetic oligonucleotide
aaaauucuguccucuuccc

SEQ ID NO: 1908603 - RNA, 19 nt, Artificial Sequence
  Description of Artificial Sequence: Synthetic oligonucleotide
augugauaguauuuuagcc

SEQ ID NO: 1908604 - RNA, 19 nt, Artificial Sequence
  Description of Artificial Sequence: Synthetic oligonucleotide
uuaaccuaaaacaaaccca

SEQ ID NO: 1908605 - RNA, 19 nt, Artificial Sequence
  Description of Artificial Sequence: Synthetic oligonucleotide
uucaguuucugacuguugg

SEQ ID NO: 1908606 - RNA, 19 nt, Artificial Sequence
  Description of Artificial Sequence: Synthetic oligonucleotide
auaauagccgacucugucc

SEQ ID NO: 1908607 - RNA, 19 nt, Artificial Sequence
  Description of Artificial Sequence: Synthetic oligonucleotide
ugaaauauauaauccauuc

SEQ ID NO: 1908608 - RNA, 19 nt, Artificial Sequence
  Description of Artificial Sequence: Synthetic oligonucleotide
ugagagauuauccugagua

SEQ ID NO: 1908609 - RNA, 19 nt, Artificial Sequence
  Description of Artificial Sequence: Synthetic oligonucleotide
ucauuuagcacacaaucca

SEQ ID NO: 1908610 - RNA, 19 nt, Artificial Sequence
  Description of Artificial Sequence: Synthetic oligonucleotide
ucaauugauaagcuguaag

SEQ ID NO: 1908611 - RNA, 19 nt, Artificial Sequence
  Description of Artificial Sequence: Synthetic oligonucleotide
uauucuuagaagcaagugu

SEQ ID NO: 1908612 - RNA, 19 nt, Artificial Sequence
  Description of Artificial Sequence: Synthetic oligonucleotide
ucuguuucaguauuaguag

SEQ ID NO: 1908613 - RNA, 19 nt, Artificial Sequence
  Description of Artificial Sequence: Synthetic oligonucleotide
uauuauuuacaucacugac

SEQ ID NO: 1908614 - RNA, 19 nt, Artificial Sequence
  Description of Artificial Sequence: Synthetic oligonucleotide
uauauaauccauuccuugc

SEQ ID NO: 1908615 - RNA, 19 nt, Artificial Sequence
  Description of Artificial Sequence: Synthetic oligonucleotide
uuuauuaaguuugucaugu

SEQ ID NO: 1908616 - RNA, 19 nt, Artificial Sequence
  Description of Artificial Sequence: Synthetic oligonucleotide
aaaggagugguauggaucu

SEQ ID NO: 1908617 - RNA, 19 nt, Artificial Sequence
  Description of Artificial Sequence: Synthetic oligonucleotide
uuagauaaggcauucuugu

SEQ ID NO: 1908618 - RNA, 19 nt, Artificial Sequence
  Description of Artificial Sequence: Synthetic oligonucleotide
aaguauuuaacuauccuug

SEQ ID NO: 1908619 - RNA, 19 nt, Artificial Sequence
  Description of Artificial Sequence: Synthetic oligonucleotide
uuagucauauauuauuuac

SEQ ID NO: 1908620 - RNA, 19 nt, Artificial Sequence
  Description of Artificial Sequence: Synthetic oligonucleotide
aauugaaucccaaaucauc

SEQ ID NO: 1908621 - RNA, 19 nt, Artificial Sequence
  Description of Artificial Sequence: Synthetic oligonucleotide
uuugaaauauauaauccau

SEQ ID NO: 1908622 - RNA, 19 nt, Artificial Sequence
  Description of Artificial Sequence: Synthetic oligonucleotide
uguuucaacuuagauaagg

SEQ ID NO: 1908623 - RNA, 19 nt, Artificial Sequence
  Description of Artificial Sequence: Synthetic oligonucleotide
ugaaucccaaaucaucagg

SEQ ID NO: 1908624 - RNA, 19 nt, Artificial Sequence
  Description of Artificial Sequence: Synthetic oligonucleotide
uucaacuuagauaaggcau

SEQ ID NO: 1908625 - RNA, 19 nt, Artificial Sequence
  Description of Artificial Sequence: Synthetic oligonucleotide
uucauuuagcacacaaucc

SEQ ID NO: 1908626 - RNA, 19 nt, Artificial Sequence
  Description of Artificial Sequence: Synthetic oligonucleotide
uccauauuuccuuacacca

SEQ ID NO: 1908627 - RNA, 19 nt, Artificial Sequence
  Description of Artificial Sequence: Synthetic oligonucleotide
aguagcauuuugcuuauuc

SEQ ID NO: 1908628 - RNA, 19 nt, Artificial Sequence
  Description of Artificial Sequence: Synthetic oligonucleotide
aaauauauacaguucucaa

SEQ ID NO: 1908629 - RNA, 19 nt, Artificial Sequence
  Description of Artificial Sequence: Synthetic oligonucleotide
uguauuaaccuaaaacaaa

SEQ ID NO: 1908630 - RNA, 19 nt, Artificial Sequence
  Description of Artificial Sequence: Synthetic oligonucleotide
uuguauuaaccuaaaacaa

SEQ ID NO: 1908631 - RNA, 19 nt, Artificial Sequence
  Description of Artificial Sequence: Synthetic oligonucleotide
uuuaauuaaaucccguauu

SEQ ID NO: 1908632 - RNA, 19 nt, Artificial Sequence
  Description of Artificial Sequence: Synthetic oligonucleotide
uguugaacuuauaauguga

SEQ ID NO: 1908633 - RNA, 19 nt, Artificial Sequence
  Description of Artificial Sequence: Synthetic oligonucleotide
auauauaauccauuccuug

SEQ ID NO: 1908634 - RNA, 19 nt, Artificial Sequence
  Description of Artificial Sequence: Synthetic oligonucleotide
ugaauaauagccgacucug

SEQ ID NO: 1908635 - RNA, 19 nt, Artificial Sequence
  Description of Artificial Sequence: Synthetic oligonucleotide
ucacugaccagaaaguucu

SEQ ID NO: 1908636 - RNA, 19 nt, Artificial Sequence
  Description of Artificial Sequence: Synthetic oligonucleotide
uugauauuucacuuugaag

SEQ ID NO: 1908637 - RNA, 19 nt, Artificial Sequence
  Description of Artificial Sequence: Synthetic oligonucleotide
aaaaggagugguauggauc

SEQ ID NO: 1908638 - RNA, 19 nt, Artificial Sequence
  Description of Artificial Sequence: Synthetic oligonucleotide
uaaccuaaaacaaacccau

SEQ ID NO: 1908639 - RNA, 19 nt, Artificial Sequence
  Description of Artificial Sequence: Synthetic oligonucleotide
aaucaucagggcugauucc

SEQ ID NO: 1908640 - RNA, 19 nt, Artificial Sequence
  Description of Artificial Sequence: Synthetic oligonucleotide
aguaacuuccuuccuaaag

SEQ ID NO: 1908641 - RNA, 19 nt, Artificial Sequence
  Description of Artificial Sequence: Synthetic oligonucleotide
uaagcuguaagacugggua

SEQ ID NO: 1908642 - RNA, 19 nt, Artificial Sequence
  Description of Artificial Sequence: Synthetic oligonucleotide
uucaauugaaucccaaauc

SEQ ID NO: 1908643 - RNA, 19 nt, Artificial Sequence
  Description of Artificial Sequence: Synthetic oligonucleotide
uccaucaugaaguuauagc

SEQ ID NO: 1908644 - RNA, 19 nt, Artificial Sequence
  Description of Artificial Sequence: Synthetic oligonucleotide
uuaauuaaaucccguauuu

SEQ ID NO: 1908645 - RNA, 19 nt, Artificial Sequence
  Description of Artificial Sequence: Synthetic oligonucleotide
uucuccaucaugaaguuau

SEQ ID NO: 1908646 - RNA, 19 nt, Artificial Sequence
  Description of Artificial Sequence: Synthetic oligonucleotide
agucauauauuauuuacau

SEQ ID NO: 1908647 - RNA, 19 nt, Artificial Sequence
  Description of Artificial Sequence: Synthetic oligonucleotide
uagcacacaauccacauaa

SEQ ID NO: 1908648 - RNA, 19 nt, Artificial Sequence
  Description of Artificial Sequence: Synthetic oligonucleotide
auugauaagcuguaagacu

SEQ ID NO: 1908649 - RNA, 19 nt, Artificial Sequence
  Description of Artificial Sequence: Synthetic oligonucleotide
uaaaaucugguugacagcu

SEQ ID NO: 1908650 - RNA, 19 nt, Artificial Sequence
  Description of Artificial Sequence: Synthetic oligonucleotide
uauaauccauuccuugcag

SEQ ID NO: 1908651 - RNA, 19 nt, Artificial Sequence
  Description of Artificial Sequence: Synthetic oligonucleotide
uauuauggauucugcaucc

SEQ ID NO: 1908652 - RNA, 19 nt, Artificial Sequence
  Description of Artificial Sequence: Synthetic oligonucleotide
uucaguauuaguagcauuu

SEQ ID NO: 1908653 - RNA, 19 nt, Artificial Sequence
  Description of Artificial Sequence: Synthetic oligonucleotide
aaagcugccacuuuccaua

SEQ ID NO: 1908654 - RNA, 19 nt, Artificial Sequence
  Description of Artificial Sequence: Synthetic oligonucleotide
auauuauuuacaucacuga

SEQ ID NO: 1908655 - RNA, 19 nt, Artificial Sequence
  Description of Artificial Sequence: Synthetic oligonucleotide
aacuauccuuguauuaacc

SEQ ID NO: 1908656 - RNA, 19 nt, Artificial Sequence
  Description of Artificial Sequence: Synthetic oligonucleotide
uuucaacuuagauaaggca

SEQ ID NO: 1908657 - RNA, 19 nt, Artificial Sequence
  Description of Artificial Sequence: Synthetic oligonucleotide
aauacguucaucacuuuca

SEQ ID NO: 1908658 - RNA, 19 nt, Artificial Sequence
  Description of Artificial Sequence: Synthetic oligonucleotide
uugugacaccuuauuaugg

SEQ ID NO: 1908659 - RNA, 19 nt, Artificial Sequence
  Description of Artificial Sequence: Synthetic oligonucleotide
uuccaaagggguaauacgu

SEQ ID NO: 1908660 - RNA, 19 nt, Artificial Sequence
  Description of Artificial Sequence: Synthetic oligonucleotide
auuuacaucacugaccaga

SEQ ID NO: 1908661 - RNA, 19 nt, Artificial Sequence
  Description of Artificial Sequence: Synthetic oligonucleotide
cuuagauaaggcauucuug

SEQ ID NO: 1908662 - RNA, 19 nt, Artificial Sequence
  Description of Artificial Sequence: Synthetic oligonucleotide
uauccuuguauuaaccuaa

SEQ ID NO: 1908663 - RNA, 19 nt, Artificial Sequence
  Description of Artificial Sequence: Synthetic oligonucleotide
aaggcauucuugugacacc

SEQ ID NO: 1908664 - RNA, 19 nt, Artificial Sequence
  Description of Artificial Sequence: Synthetic oligonucleotide
agauaaggcauucuuguga

SEQ ID NO: 1908665 - RNA, 19 nt, Artificial Sequence
  Description of Artificial Sequence: Synthetic oligonucleotide
cuaaagacgugugagauuc

SEQ ID NO: 1908666 - RNA, 19 nt, Artificial Sequence
  Description of Artificial Sequence: Synthetic oligonucleotide
aaggauucaguuucugacu

SEQ ID NO: 1908667 - RNA, 19 nt, Artificial Sequence
  Description of Artificial Sequence: Synthetic oligonucleotide
cuuugaaauauauaaucca

SEQ ID NO: 1908668 - RNA, 19 nt, Artificial Sequence
  Description of Artificial Sequence: Synthetic oligonucleotide
agagauuauccugaguaac

SEQ ID NO: 1908669 - RNA, 19 nt, Artificial Sequence
  Description of Artificial Sequence: Synthetic oligonucleotide
aauucuguccucuucccaa

SEQ ID NO: 1908670 - RNA, 19 nt, Artificial Sequence
  Description of Artificial Sequence: Synthetic oligonucleotide
ucuugugacaccuuauuau

SEQ ID NO: 1908671 - RNA, 19 nt, Artificial Sequence
  Description of Artificial Sequence: Synthetic oligonucleotide
aaagacgugugagauuccg

SEQ ID NO: 1908672 - RNA, 19 nt, Artificial Sequence
  Description of Artificial Sequence: Synthetic oligonucleotide
uuaacuauccuuguauuaa

SEQ ID NO: 1908673 - RNA, 19 nt, Artificial Sequence
  Description of Artificial Sequence: Synthetic oligonucleotide
aaacaaacccauucagccu

SEQ ID NO: 1908674 - RNA, 19 nt, Artificial Sequence
  Description of Artificial Sequence: Synthetic oligonucleotide
gacaaauauauacaguucu

SEQ ID NO: 1908675 - RNA, 19 nt, Artificial Sequence
  Description of Artificial Sequence: Synthetic oligonucleotide
uucugaguuaaucaguuuu

SEQ ID NO: 1908676 - RNA, 19 nt, Artificial Sequence
  Description of Artificial Sequence: Synthetic oligonucleotide
augaaguuauagcugaagu

SEQ ID NO: 1908677 - RNA, 19 nt, Artificial Sequence
  Description of Artificial Sequence: Synthetic oligonucleotide
uuaaaaucugguugacagc

SEQ ID NO: 1908678 - RNA, 19 nt, Artificial Sequence
  Description of Artificial Sequence: Synthetic oligonucleotide
uauaaugugauaguauuuu

SEQ ID NO: 1908679 - RNA, 19 nt, Artificial Sequence
  Description of Artificial Sequence: Synthetic oligonucleotide
aacaaacccauucagccuu

SEQ ID NO: 1908680 - RNA, 19 nt, Artificial Sequence
  Description of Artificial Sequence: Synthetic oligonucleotide
auauaauccauuccuugca

SEQ ID NO: 1908681 - RNA, 19 nt, Artificial Sequence
  Description of Artificial Sequence: Synthetic oligonucleotide
uaauagccgacucugucca

SEQ ID NO: 1908682 - RNA, 19 nt, Artificial Sequence
  Description of Artificial Sequence: Synthetic oligonucleotide
aaauauucuuucaaacacu

SEQ ID NO: 1908683 - RNA, 19 nt, Artificial Sequence
  Description of Artificial Sequence: Synthetic oligonucleotide
cuuaaagcugccacuuucc

SEQ ID NO: 1908684 - RNA, 19 nt, Artificial Sequence
  Description of Artificial Sequence: Synthetic oligonucleotide
ucuucauuguucuccaccu

SEQ ID NO: 1908685 - RNA, 19 nt, Artificial Sequence
  Description of Artificial Sequence: Synthetic oligonucleotide
aacccauucagccuucagu

SEQ ID NO: 1908686 - RNA, 19 nt, Artificial Sequence
  Description of Artificial Sequence: Synthetic oligonucleotide
uuguugaacuuauaaugug

SEQ ID NO: 1908687 - RNA, 19 nt, Artificial Sequence
  Description of Artificial Sequence: Synthetic oligonucleotide
cuugugacaccuuauuaug

SEQ ID NO: 1908688 - RNA, 19 nt, Artificial Sequence
  Description of Artificial Sequence: Synthetic oligonucleotide
uucauuguucuccaccugu

SEQ ID NO: 1908689 - RNA, 19 nt, Artificial Sequence
  Description of Artificial Sequence: Synthetic oligonucleotide
ucacuuugaagaauuccca

SEQ ID NO: 1908690 - RNA, 19 nt, Artificial Sequence
  Description of Artificial Sequence: Synthetic oligonucleotide
ucgguuguugaacuuauaa

SEQ ID NO: 1908691 - RNA, 19 nt, Artificial Sequence
  Description of Artificial Sequence: Synthetic oligonucleotide
ugucuuuuaacaugacacu

SEQ ID NO: 1908692 - RNA, 19 nt, Artificial Sequence
  Description of Artificial Sequence: Synthetic oligonucleotide
aagcuguaagacuggguag

SEQ ID NO: 1908693 - RNA, 19 nt, Artificial Sequence
  Description of Artificial Sequence: Synthetic oligonucleotide
ucuuagaagcaaguguucc

SEQ ID NO: 1908694 - RNA, 19 nt, Artificial Sequence
  Description of Artificial Sequence: Synthetic oligonucleotide
ugacaaauauauacaguuc

SEQ ID NO: 1908695 - RNA, 19 nt, Artificial Sequence
  Description of Artificial Sequence: Synthetic oligonucleotide
uuccuuacaccacacuuca

SEQ ID NO: 1908696 - RNA, 19 nt, Artificial Sequence
  Description of Artificial Sequence: Synthetic oligonucleotide
uugaaauauauaauccauu

SEQ ID NO: 1908697 - RNA, 19 nt, Artificial Sequence
  Description of Artificial Sequence: Synthetic oligonucleotide
ugugacaccuuauuaugga

SEQ ID NO: 1908698 - RNA, 19 nt, Artificial Sequence
  Description of Artificial Sequence: Synthetic oligonucleotide
guauuuuagcccaauuucc

SEQ ID NO: 1908699 - RNA, 19 nt, Artificial Sequence
  Description of Artificial Sequence: Synthetic oligonucleotide
uuauucuuagaagcaagug

SEQ ID NO: 1908700 - RNA, 19 nt, Artificial Sequence
  Description of Artificial Sequence: Synthetic oligonucleotide
auauacaguucucaauuga

SEQ ID NO: 1908701 - RNA, 19 nt, Artificial Sequence
  Description of Artificial Sequence: Synthetic oligonucleotide
caaacuguagggauccaag

SEQ ID NO: 1908702 - RNA, 19 nt, Artificial Sequence
  Description of Artificial Sequence: Synthetic oligonucleotide
uuuaacuauccuuguauua

SEQ ID NO: 1908703 - RNA, 19 nt, Artificial Sequence
  Description of Artificial Sequence: Synthetic oligonucleotide
gacaccuuauuauggauuc

SEQ ID NO: 1908704 - RNA, 19 nt, Artificial Sequence
  Description of Artificial Sequence: Synthetic oligonucleotide
acuauccuuguauuaaccu

SEQ ID NO: 1908705 - RNA, 19 nt, Artificial Sequence
  Description of Artificial Sequence: Synthetic oligonucleotide
uuaaguuugucauguuccu

SEQ ID NO: 1908706 - RNA, 19 nt, Artificial Sequence
  Description of Artificial Sequence: Synthetic oligonucleotide
gaacaaacuguagggaucc

SEQ ID NO: 1908707 - RNA, 19 nt, Artificial Sequence
  Description of Artificial Sequence: Synthetic oligonucleotide
caauugauaagcuguaaga

SEQ ID NO: 1908708 - RNA, 19 nt, Artificial Sequence
  Description of Artificial Sequence: Synthetic oligonucleotide
uaauacguucaucacuuuc

SEQ ID NO: 1908709 - RNA, 19 nt, Artificial Sequence
  Description of Artificial Sequence: Synthetic oligonucleotide
ucaacuuagauaaggcauu

SEQ ID NO: 1908710 - RNA, 19 nt, Artificial Sequence
  Description of Artificial Sequence: Synthetic oligonucleotide
ucuucccaaagccaugucu

SEQ ID NO: 1908711 - RNA, 19 nt, Artificial Sequence
  Description of Artificial Sequence: Synthetic oligonucleotide
uuuacaucacugaccagaa

SEQ ID NO: 1908712 - RNA, 19 nt, Artificial Sequence
  Description of Artificial Sequence: Synthetic oligonucleotide
uugcuuauucuuagaagca

SEQ ID NO: 1908713 - RNA, 19 nt, Artificial Sequence
  Description of Artificial Sequence: Synthetic oligonucleotide
ucuccauauuuccuuacac

SEQ ID NO: 1908714 - RNA, 19 nt, Artificial Sequence
  Description of Artificial Sequence: Synthetic oligonucleotide
aguauuuaacuauccuugu

SEQ ID NO: 1908715 - RNA, 19 nt, Artificial Sequence
  Description of Artificial Sequence: Synthetic oligonucleotide
uugaaucccaaaucaucag

SEQ ID NO: 1908716 - RNA, 19 nt, Artificial Sequence
  Description of Artificial Sequence: Synthetic oligonucleotide
ugacuguuggucauuaaua

SEQ ID NO: 1908717 - RNA, 19 nt, Artificial Sequence
  Description of Artificial Sequence: Synthetic oligonucleotide
acuuguucgguuguugaac

SEQ ID NO: 1908718 - RNA, 19 nt, Artificial Sequence
  Description of Artificial Sequence: Synthetic oligonucleotide
uccacauaacucuuuauuu

SEQ ID NO: 1908719 - RNA, 19 nt, Artificial Sequence
  Description of Artificial Sequence: Synthetic oligonucleotide
cacauaacucuuuauuuuc

SEQ ID NO: 1908720 - RNA, 19 nt, Artificial Sequence
  Description of Artificial Sequence: Synthetic oligonucleotide
gugauaguauuuuagccca

SEQ ID NO: 1908721 - RNA, 19 nt, Artificial Sequence
  Description of Artificial Sequence: Synthetic oligonucleotide
acuucaaaauucuguccuc

SEQ ID NO: 1908722 - RNA, 19 nt, Artificial Sequence
  Description of Artificial Sequence: Synthetic oligonucleotide
acaaauauauacaguucuc

SEQ ID NO: 1908723 - RNA, 19 nt, Artificial Sequence
  Description of Artificial Sequence: Synthetic oligonucleotide
aggauucaguuucugacug

SEQ ID NO: 1908724 - RNA, 19 nt, Artificial Sequence
  Description of Artificial Sequence: Synthetic oligonucleotide
auuaauacuucuuccuuua

SEQ ID NO: 1908725 - RNA, 19 nt, Artificial Sequence
  Description of Artificial Sequence: Synthetic oligonucleotide
aguccaugaauaauagccg

SEQ ID NO: 1908726 - RNA, 19 nt, Artificial Sequence
  Description of Artificial Sequence: Synthetic oligonucleotide
acaguucucaauugauaag

SEQ ID NO: 1908727 - RNA, 19 nt, Artificial Sequence
  Description of Artificial Sequence: Synthetic oligonucleotide
gauuccaaagggguaauac

SEQ ID NO: 1908728 - RNA, 19 nt, Artificial Sequence
  Description of Artificial Sequence: Synthetic oligonucleotide
ugaguaacuuccuuccuaa

SEQ ID NO: 1908729 - RNA, 19 nt, Artificial Sequence
  Description of Artificial Sequence: Synthetic oligonucleotide
acuguagggauccaaguau

SEQ ID NO: 1908730 - RNA, 19 nt, Artificial Sequence
  Description of Artificial Sequence: Synthetic oligonucleotide
cuuccuaaagacgugugag

SEQ ID NO: 1908731 - RNA, 19 nt, Artificial Sequence
  Description of Artificial Sequence: Synthetic oligonucleotide
aaauucuguccucuuccca

SEQ ID NO: 1908732 - RNA, 19 nt, Artificial Sequence
  Description of Artificial Sequence: Synthetic oligonucleotide
guuucaacuuagauaaggc

SEQ ID NO: 1908733 - RNA, 19 nt, Artificial Sequence
  Description of Artificial Sequence: Synthetic oligonucleotide
uaacuuccuuccuaaagac

SEQ ID NO: 1908734 - RNA, 19 nt, Artificial Sequence
  Description of Artificial Sequence: Synthetic oligonucleotide
uuaaucaguuuuaguuucu

SEQ ID NO: 1908735 - RNA, 19 nt, Artificial Sequence
  Description of Artificial Sequence: Synthetic oligonucleotide
aacuguagggauccaagua

SEQ ID NO: 1908736 - RNA, 19 nt, Artificial Sequence
  Description of Artificial Sequence: Synthetic oligonucleotide
uuaaagcugccacuuucca

SEQ ID NO: 1908737 - RNA, 19 nt, Artificial Sequence
  Description of Artificial Sequence: Synthetic oligonucleotide
ugaguuaaucaguuuuagu

SEQ ID NO: 1908738 - RNA, 19 nt, Artificial Sequence
  Description of Artificial Sequence: Synthetic oligonucleotide
cuguuucaguauuaguagc

SEQ ID NO: 1908739 - RNA, 19 nt, Artificial Sequence
  Description of Artificial Sequence: Synthetic oligonucleotide
ugugcaucaagagauuuuc

SEQ ID NO: 1908740 - RNA, 19 nt, Artificial Sequence
  Description of Artificial Sequence: Synthetic oligonucleotide
acgugugagauuccggauc

SEQ ID NO: 1908741 - RNA, 19 nt, Artificial Sequence
  Description of Artificial Sequence: Synthetic oligonucleotide
cuuccuuguuucaacuuag

SEQ ID NO: 1908742 - RNA, 19 nt, Artificial Sequence
  Description of Artificial Sequence: Synthetic oligonucleotide
aacuuauaaugugauagua

SEQ ID NO: 1908743 - RNA, 19 nt, Artificial Sequence
  Description of Artificial Sequence: Synthetic oligonucleotide
uuauggauucugcauccac

SEQ ID NO: 1908744 - RNA, 19 nt, Artificial Sequence
  Description of Artificial Sequence: Synthetic oligonucleotide
aagagauuuuccugcugca

SEQ ID NO: 1908745 - RNA, 19 nt, Artificial Sequence
  Description of Artificial Sequence: Synthetic oligonucleotide
cauuuagcacacaauccac

SEQ ID NO: 1908746 - RNA, 19 nt, Artificial Sequence
  Description of Artificial Sequence: Synthetic oligonucleotide
uuuucuuacgccuguguuu

SEQ ID NO: 1908747 - RNA, 19 nt, Artificial Sequence
  Description of Artificial Sequence: Synthetic oligonucleotide
ugccacuuuccauacaaac

SEQ ID NO: 1908748 - RNA, 19 nt, Artificial Sequence
  Description of Artificial Sequence: Synthetic oligonucleotide
uuccggaucacaaaauauu

SEQ ID NO: 1908749 - RNA, 19 nt, Artificial Sequence
  Description of Artificial Sequence: Synthetic oligonucleotide
uccaugaauaauagccgac

SEQ ID NO: 1908750 - RNA, 19 nt, Artificial Sequence
  Description of Artificial Sequence: Synthetic oligonucleotide
uccuuuuguugauauuuca

SEQ ID NO: 1908751 - RNA, 19 nt, Artificial Sequence
  Description of Artificial Sequence: Synthetic oligonucleotide
aacuuccuuccuaaagacg

SEQ ID NO: 1908752 - RNA, 19 nt, Artificial Sequence
  Description of Artificial Sequence: Synthetic oligonucleotide
aucccaaaucaucagggcu

SEQ ID NO: 1908753 - RNA, 19 nt, Artificial Sequence
  Description of Artificial Sequence: Synthetic oligonucleotide
uagauaaggcauucuugug

SEQ ID NO: 1908754 - RNA, 19 nt, Artificial Sequence
  Description of Artificial Sequence: Synthetic oligonucleotide
uaacuauccuuguauuaac

SEQ ID NO: 1908755 - RNA, 19 nt, Artificial Sequence
  Description of Artificial Sequence: Synthetic oligonucleotide
uuucuuacgccuguguuuc

SEQ ID NO: 1908756 - RNA, 19 nt, Artificial Sequence
  Description of Artificial Sequence: Synthetic oligonucleotide
agacgugugagauuccgga

SEQ ID NO: 1908757 - RNA, 19 nt, Artificial Sequence
  Description of Artificial Sequence: Synthetic oligonucleotide
uucugauuaaaaucugguu

SEQ ID NO: 1908758 - RNA, 19 nt, Artificial Sequence
  Description of Artificial Sequence: Synthetic oligonucleotide
uguugauauuucacuuuga

SEQ ID NO: 1908759 - RNA, 19 nt, Artificial Sequence
  Description of Artificial Sequence: Synthetic oligonucleotide
uccacuaaggauucaguuu

SEQ ID NO: 1908760 - RNA, 19 nt, Artificial Sequence
  Description of Artificial Sequence: Synthetic oligonucleotide
ggucauuaauacuucuucc

SEQ ID NO: 1908761 - RNA, 19 nt, Artificial Sequence
  Description of Artificial Sequence: Synthetic oligonucleotide
caaacugugcaucaagaga

SEQ ID NO: 1908762 - RNA, 19 nt, Artificial Sequence
  Description of Artificial Sequence: Synthetic oligonucleotide
ugaccagaaaguucugaac

SEQ ID NO: 1908763 - RNA, 19 nt, Artificial Sequence
  Description of Artificial Sequence: Synthetic oligonucleotide
cauauuuccuuacaccaca

SEQ ID NO: 1908764 - RNA, 19 nt, Artificial Sequence
  Description of Artificial Sequence: Synthetic oligonucleotide
aaagggguaauacguucau

SEQ ID NO: 1908765 - RNA, 19 nt, Artificial Sequence
  Description of Artificial Sequence: Synthetic oligonucleotide
auucuuagaagcaaguguu

SEQ ID NO: 1908766 - RNA, 19 nt, Artificial Sequence
  Description of Artificial Sequence: Synthetic oligonucleotide
cauaacucuuuauuuucuc

SEQ ID NO: 1908767 - RNA, 19 nt, Artificial Sequence
  Description of Artificial Sequence: Synthetic oligonucleotide
ucucaauugauaagcugua

SEQ ID NO: 1908768 - RNA, 19 nt, Artificial Sequence
  Description of Artificial Sequence: Synthetic oligonucleotide
ccacuuuccauacaaacag

SEQ ID NO: 1908769 - RNA, 19 nt, Artificial Sequence
  Description of Artificial Sequence: Synthetic oligonucleotide
uaauuaaaucccguauuuc

SEQ ID NO: 1908770 - RNA, 19 nt, Artificial Sequence
  Description of Artificial Sequence: Synthetic oligonucleotide
uguuggucauuaauacuuc

SEQ ID NO: 1908771 - RNA, 19 nt, Artificial Sequence
  Description of Artificial Sequence: Synthetic oligonucleotide
gauccaaguauuuaacuau

SEQ ID NO: 1908772 - RNA, 19 nt, Artificial Sequence
  Description of Artificial Sequence: Synthetic oligonucleotide
gagauuccggaucacaaaa

SEQ ID NO: 1908773 - RNA, 19 nt, Artificial Sequence
  Description of Artificial Sequence: Synthetic oligonucleotide
uucuugugacaccuuauua

SEQ ID NO: 1908774 - RNA, 19 nt, Artificial Sequence
  Description of Artificial Sequence: Synthetic oligonucleotide
uuccuaaagacgugugaga

SEQ ID NO: 1908775 - RNA, 19 nt, Artificial Sequence
  Description of Artificial Sequence: Synthetic oligonucleotide
aagcaaguguuccugcuuu

SEQ ID NO: 1908776 - RNA, 19 nt, Artificial Sequence
  Description of Artificial Sequence: Synthetic oligonucleotide
aacaugacacuuguucggu

SEQ ID NO: 1908777 - RNA, 19 nt, Artificial Sequence
  Description of Artificial Sequence: Synthetic oligonucleotide
aauccacauaacucuuuau

SEQ ID NO: 1908778 - RNA, 19 nt, Artificial Sequence
  Description of Artificial Sequence: Synthetic oligonucleotide
aaacccauucagccuucag

SEQ ID NO: 1908779 - RNA, 19 nt, Artificial Sequence
  Description of Artificial Sequence: Synthetic oligonucleotide
auaauccauuccuugcagu

SEQ ID NO: 1908780 - RNA, 19 nt, Artificial Sequence
  Description of Artificial Sequence: Synthetic oligonucleotide
uccacuacuuuuguugcug

SEQ ID NO: 1908781 - RNA, 19 nt, Artificial Sequence
  Description of Artificial Sequence: Synthetic oligonucleotide
auagccgacucuguccagc

SEQ ID NO: 1908782 - RNA, 19 nt, Artificial Sequence
  Description of Artificial Sequence: Synthetic oligonucleotide
ugacaccuuauuauggauu

SEQ ID NO: 1908783 - RNA, 19 nt, Artificial Sequence
  Description of Artificial Sequence: Synthetic oligonucleotide
uucuuagaagcaaguguuc

SEQ ID NO: 1908784 - RNA, 19 nt, Artificial Sequence
  Description of Artificial Sequence: Synthetic oligonucleotide
auaaugugauaguauuuua

SEQ ID NO: 1908785 - RNA, 19 nt, Artificial Sequence
  Description of Artificial Sequence: Synthetic oligonucleotide
acgccuguguuucucauca

SEQ ID NO: 1908786 - RNA, 19 nt, Artificial Sequence
  Description of Artificial Sequence: Synthetic oligonucleotide
aaucccguauuucuuuauu

SEQ ID NO: 1908787 - RNA, 19 nt, Artificial Sequence
  Description of Artificial Sequence: Synthetic oligonucleotide
cugacaaauauauacaguu

SEQ ID NO: 1908788 - RNA, 19 nt, Artificial Sequence
  Description of Artificial Sequence: Synthetic oligonucleotide
uuauccugaguaacuuccu

SEQ ID NO: 1908789 - RNA, 19 nt, Artificial Sequence
  Description of Artificial Sequence: Synthetic oligonucleotide
ugagauuccggaucacaaa

SEQ ID NO: 1908790 - RNA, 19 nt, Artificial Sequence
  Description of Artificial Sequence: Synthetic oligonucleotide
auccaaguauuuaacuauc

SEQ ID NO: 1908791 - RNA, 19 nt, Artificial Sequence
  Description of Artificial Sequence: Synthetic oligonucleotide
uccuaaagacgugugagau

SEQ ID NO: 1908792 - RNA, 19 nt, Artificial Sequence
  Description of Artificial Sequence: Synthetic oligonucleotide
guauuaguagcauuuugcu

SEQ ID NO: 1908793 - RNA, 19 nt, Artificial Sequence
  Description of Artificial Sequence: Synthetic oligonucleotide
acuuauaaugugauaguau

SEQ ID NO: 1908794 - RNA, 19 nt, Artificial Sequence
  Description of Artificial Sequence: Synthetic oligonucleotide
cuuauuauggauucugcau

SEQ ID NO: 1908795 - RNA, 19 nt, Artificial Sequence
  Description of Artificial Sequence: Synthetic oligonucleotide
guaguccaugaauaauagc

SEQ ID NO: 1908796 - RNA, 19 nt, Artificial Sequence
  Description of Artificial Sequence: Synthetic oligonucleotide
ugugagauuccggaucaca

SEQ ID NO: 1908797 - RNA, 19 nt, Artificial Sequence
  Description of Artificial Sequence: Synthetic oligonucleotide
aagacgugugagauuccgg

SEQ ID NO: 1908798 - RNA, 19 nt, Artificial Sequence
  Description of Artificial Sequence: Synthetic oligonucleotide
aaaucccguauuucuuuau

SEQ ID NO: 1908799 - RNA, 19 nt, Artificial Sequence
  Description of Artificial Sequence: Synthetic oligonucleotide
gauuaaaaucugguugaca

SEQ ID NO: 1908800 - RNA, 19 nt, Artificial Sequence
  Description of Artificial Sequence: Synthetic oligonucleotide
ugguugacagcuuccuugu

SEQ ID NO: 1908801 - RNA, 19 nt, Artificial Sequence
  Description of Artificial Sequence: Synthetic oligonucleotide
aagggguaauacguucauc

SEQ ID NO: 1908802 - RNA, 19 nt, Artificial Sequence
  Description of Artificial Sequence: Synthetic oligonucleotide
ucauuguucuccaccuguc

SEQ ID NO: 1908803 - RNA, 19 nt, Artificial Sequence
  Description of Artificial Sequence: Synthetic oligonucleotide
guuauagcugaaguguuga

SEQ ID NO: 1908804 - RNA, 19 nt, Artificial Sequence
  Description of Artificial Sequence: Synthetic oligonucleotide
gaacuuauaaugugauagu

SEQ ID NO: 1908805 - RNA, 19 nt, Artificial Sequence
  Description of Artificial Sequence: Synthetic oligonucleotide
cacuuuccauacaaacagc

SEQ ID NO: 1908806 - RNA, 19 nt, Artificial Sequence
  Description of Artificial Sequence: Synthetic oligonucleotide
cuaaggauucaguuucuga

SEQ ID NO: 1908807 - RNA, 19 nt, Artificial Sequence
  Description of Artificial Sequence: Synthetic oligonucleotide
accagaaaguucugaacaa

SEQ ID NO: 1908808 - RNA, 19 nt, Artificial Sequence
  Description of Artificial Sequence: Synthetic oligonucleotide
acacuuguucgguuguuga

SEQ ID NO: 1908809 - RNA, 19 nt, Artificial Sequence
  Description of Artificial Sequence: Synthetic oligonucleotide
uuucaguauuaguagcauu

SEQ ID NO: 1908810 - RNA, 19 nt, Artificial Sequence
  Description of Artificial Sequence: Synthetic oligonucleotide
aaguucugaacaaacugua

SEQ ID NO: 1908811 - RNA, 19 nt, Artificial Sequence
  Description of Artificial Sequence: Synthetic oligonucleotide
uuaguagcauuuugcuuau

SEQ ID NO: 1908812 - RNA, 19 nt, Artificial Sequence
  Description of Artificial Sequence: Synthetic oligonucleotide
acugacaaauauauacagu

SEQ ID NO: 1908813 - RNA, 19 nt, Artificial Sequence
  Description of Artificial Sequence: Synthetic oligonucleotide
ugauuaaaaucugguugac

SEQ ID NO: 1908814 - RNA, 19 nt, Artificial Sequence
  Description of Artificial Sequence: Synthetic oligonucleotide
gagagauuauccugaguaa

SEQ ID NO: 1908815 - RNA, 19 nt, Artificial Sequence
  Description of Artificial Sequence: Synthetic oligonucleotide
auccacuaaggauucaguu

SEQ ID NO: 1908816 - RNA, 19 nt, Artificial Sequence
  Description of Artificial Sequence: Synthetic oligonucleotide
aauagccgacucuguccag

SEQ ID NO: 1908817 - RNA, 19 nt, Artificial Sequence
  Description of Artificial Sequence: Synthetic oligonucleotide
uaaaucccguauuucuuua

SEQ ID NO: 1908818 - RNA, 19 nt, Artificial Sequence
  Description of Artificial Sequence: Synthetic oligonucleotide
aguucugaacaaacuguag

SEQ ID NO: 1908819 - RNA, 19 nt, Artificial Sequence
  Description of Artificial Sequence: Synthetic oligonucleotide
uuguuucaacuuagauaag

SEQ ID NO: 1908820 - RNA, 19 nt, Artificial Sequence
  Description of Artificial Sequence: Synthetic oligonucleotide
aguuucugaguuaaucagu

SEQ ID NO: 1908821 - RNA, 19 nt, Artificial Sequence
  Description of Artificial Sequence: Synthetic oligonucleotide
uuagcacacaauccacaua

SEQ ID NO: 1908822 - RNA, 19 nt, Artificial Sequence
  Description of Artificial Sequence: Synthetic oligonucleotide
uugagagauuauccugagu

SEQ ID NO: 1908823 - RNA, 19 nt, Artificial Sequence
  Description of Artificial Sequence: Synthetic oligonucleotide
auaguauuuuagcccaauu

SEQ ID NO: 1908824 - RNA, 19 nt, Artificial Sequence
  Description of Artificial Sequence: Synthetic oligonucleotide
aguuauagcugaaguguug

SEQ ID NO: 1908825 - RNA, 19 nt, Artificial Sequence
  Description of Artificial Sequence: Synthetic oligonucleotide
uccaaagggguaauacguu

SEQ ID NO: 1908826 - RNA, 19 nt, Artificial Sequence
  Description of Artificial Sequence: Synthetic oligonucleotide
caaagggguaauacguuca

SEQ ID NO: 1908827 - RNA, 19 nt, Artificial Sequence
  Description of Artificial Sequence: Synthetic oligonucleotide
aacuuagauaaggcauucu

SEQ ID NO: 1908828 - RNA, 19 nt, Artificial Sequence
  Description of Artificial Sequence: Synthetic oligonucleotide
agcaaguguuccugcuuuc

SEQ ID NO: 1908829 - RNA, 19 nt, Artificial Sequence
  Description of Artificial Sequence: Synthetic oligonucleotide
uguagggauccaaguauuu

SEQ ID NO: 1908830 - RNA, 19 nt, Artificial Sequence
  Description of Artificial Sequence: Synthetic oligonucleotide
uuauagcugaaguguugaa

SEQ ID NO: 1908831 - RNA, 19 nt, Artificial Sequence
  Description of Artificial Sequence: Synthetic oligonucleotide
auacaaacagccacagccu

SEQ ID NO: 1908832 - RNA, 19 nt, Artificial Sequence
  Description of Artificial Sequence: Synthetic oligonucleotide
auacguucaucacuuucaa

SEQ ID NO: 1908833 - RNA, 19 nt, Artificial Sequence
  Description of Artificial Sequence: Synthetic oligonucleotide
ccuuuuguugauauuucac

SEQ ID NO: 1908834 - RNA, 19 nt, Artificial Sequence
  Description of Artificial Sequence: Synthetic oligonucleotide
uaaagacgugugagauucc

SEQ ID NO: 1908835 - RNA, 19 nt, Artificial Sequence
  Description of Artificial Sequence: Synthetic oligonucleotide
uguucgguuguugaacuua

SEQ ID NO: 1908836 - RNA, 19 nt, Artificial Sequence
  Description of Artificial Sequence: Synthetic oligonucleotide
ucaugaaguuauagcugaa

SEQ ID NO: 1908837 - RNA, 19 nt, Artificial Sequence
  Description of Artificial Sequence: Synthetic oligonucleotide
aguguuccugcuuucucau

SEQ ID NO: 1908838 - RNA, 19 nt, Artificial Sequence
  Description of Artificial Sequence: Synthetic oligonucleotide
cuauccuuguauuaaccua

SEQ ID NO: 1908839 - RNA, 19 nt, Artificial Sequence
  Description of Artificial Sequence: Synthetic oligonucleotide
cuuuuaacaugacacuugu

SEQ ID NO: 1908840 - RNA, 19 nt, Artificial Sequence
  Description of Artificial Sequence: Synthetic oligonucleotide
agcuguaagacuggguagu

SEQ ID NO: 1908841 - RNA, 19 nt, Artificial Sequence
  Description of Artificial Sequence: Synthetic oligonucleotide
ucagugucuggcugauucu

SEQ ID NO: 1908842 - RNA, 19 nt, Artificial Sequence
  Description of Artificial Sequence: Synthetic oligonucleotide
ugucuggcugauucuuuga

SEQ ID NO: 1908843 - RNA, 19 nt, Artificial Sequence
  Description of Artificial Sequence: Synthetic oligonucleotide
guagcauuuugcuuauucu

SEQ ID NO: 1908844 - RNA, 19 nt, Artificial Sequence
  Description of Artificial Sequence: Synthetic oligonucleotide
agcccaauuucccucucca

SEQ ID NO: 1908845 - RNA, 19 nt, Artificial Sequence
  Description of Artificial Sequence: Synthetic oligonucleotide
caaguauuuaacuauccuu

SEQ ID NO: 1908846 - RNA, 19 nt, Artificial Sequence
  Description of Artificial Sequence: Synthetic oligonucleotide
gacacuuguucgguuguug

SEQ ID NO: 1908847 - RNA, 19 nt, Artificial Sequence
  Description of Artificial Sequence: Synthetic oligonucleotide
cacuacuuuuguugcugcc

SEQ ID NO: 1908848 - RNA, 19 nt, Artificial Sequence
  Description of Artificial Sequence: Synthetic oligonucleotide
augacacuuguucgguugu

SEQ ID NO: 1908849 - RNA, 19 nt, Artificial Sequence
  Description of Artificial Sequence: Synthetic oligonucleotide
cuuauucuuagaagcaagu

SEQ ID NO: 1908850 - RNA, 19 nt, Artificial Sequence
  Description of Artificial Sequence: Synthetic oligonucleotide
acaucacugaccagaaagu

SEQ ID NO: 1908851 - RNA, 19 nt, Artificial Sequence
  Description of Artificial Sequence: Synthetic oligonucleotide
ugauaguauuuuagcccaa

SEQ ID NO: 1908852 - RNA, 19 nt, Artificial Sequence
  Description of Artificial Sequence: Synthetic oligonucleotide
caaauuaacuucaguuucu

SEQ ID NO: 1908853 - RNA, 19 nt, Artificial Sequence
  Description of Artificial Sequence: Synthetic oligonucleotide
cacuucaaaauucuguccu

SEQ ID NO: 1908854 - RNA, 19 nt, Artificial Sequence
  Description of Artificial Sequence: Synthetic oligonucleotide
auucugcauccacuaagga

SEQ ID NO: 1908855 - RNA, 19 nt, Artificial Sequence
  Description of Artificial Sequence: Synthetic oligonucleotide
aucccguauuucuuuauua

SEQ ID NO: 1908856 - RNA, 19 nt, Artificial Sequence
  Description of Artificial Sequence: Synthetic oligonucleotide
guugcugccuucaucagaa

SEQ ID NO: 1908857 - RNA, 19 nt, Artificial Sequence
  Description of Artificial Sequence: Synthetic oligonucleotide
guauuuaacuauccuugua

SEQ ID NO: 1908858 - RNA, 19 nt, Artificial Sequence
  Description of Artificial Sequence: Synthetic oligonucleotide
ggauccaaguauuuaacua

SEQ ID NO: 1908859 - RNA, 19 nt, Artificial Sequence
  Description of Artificial Sequence: Synthetic oligonucleotide
acuaaggauucaguuucug

SEQ ID NO: 1908860 - RNA, 19 nt, Artificial Sequence
  Description of Artificial Sequence: Synthetic oligonucleotide
uucccaaagccaugucugu

SEQ ID NO: 1908861 - RNA, 19 nt, Artificial Sequence
  Description of Artificial Sequence: Synthetic oligonucleotide
uagcccaauuucccucucc

SEQ ID NO: 1908862 - RNA, 19 nt, Artificial Sequence
  Description of Artificial Sequence: Synthetic oligonucleotide
cacuuucaaacugugcauc

SEQ ID NO: 1908863 - RNA, 19 nt, Artificial Sequence
  Description of Artificial Sequence: Synthetic oligonucleotide
agcauuuugcuuauucuua

SEQ ID NO: 1908864 - RNA, 19 nt, Artificial Sequence
  Description of Artificial Sequence: Synthetic oligonucleotide
agauuauccugaguaacuu

SEQ ID NO: 1908865 - RNA, 19 nt, Artificial Sequence
  Description of Artificial Sequence: Synthetic oligonucleotide
uuauuaaguuugucauguu

SEQ ID NO: 1908866 - RNA, 19 nt, Artificial Sequence
  Description of Artificial Sequence: Synthetic oligonucleotide
cugaccagaaaguucugaa

SEQ ID NO: 1908867 - RNA, 19 nt, Artificial Sequence
  Description of Artificial Sequence: Synthetic oligonucleotide
uggauucugcauccacuaa

SEQ ID NO: 1908868 - RNA, 19 nt, Artificial Sequence
  Description of Artificial Sequence: Synthetic oligonucleotide
gagauuauccugaguaacu

SEQ ID NO: 1908869 - RNA, 19 nt, Artificial Sequence
  Description of Artificial Sequence: Synthetic oligonucleotide
auuccggaucacaaaauau

SEQ ID NO: 1908870 - RNA, 19 nt, Artificial Sequence
  Description of Artificial Sequence: Synthetic oligonucleotide
cuguaagacuggguagucc

SEQ ID NO: 1908871 - RNA, 19 nt, Artificial Sequence
  Description of Artificial Sequence: Synthetic oligonucleotide
cccguauuucuuuauuaag

SEQ ID NO: 1908872 - RNA, 19 nt, Artificial Sequence
  Description of Artificial Sequence: Synthetic oligonucleotide
caaguguuccugcuuucuc

SEQ ID NO: 1908873 - RNA, 19 nt, Artificial Sequence
  Description of Artificial Sequence: Synthetic oligonucleotide
cauuuugcuuauucuuaga

SEQ ID NO: 1908874 - RNA, 19 nt, Artificial Sequence
  Description of Artificial Sequence: Synthetic oligonucleotide
aguuugucauguuccuuuu

SEQ ID NO: 1908875 - RNA, 19 nt, Artificial Sequence
  Description of Artificial Sequence: Synthetic oligonucleotide
acugaccagaaaguucuga

SEQ ID NO: 1908876 - RNA, 19 nt, Artificial Sequence
  Description of Artificial Sequence: Synthetic oligonucleotide
caacuuagauaaggcauuc

SEQ ID NO: 1908877 - RNA, 19 nt, Artificial Sequence
  Description of Artificial Sequence: Synthetic oligonucleotide
uuacaucacugaccagaaa

SEQ ID NO: 1908878 - RNA, 19 nt, Artificial Sequence
  Description of Artificial Sequence: Synthetic oligonucleotide
uacguucaucacuuucaaa

SEQ ID NO: 1908879 - RNA, 19 nt, Artificial Sequence
  Description of Artificial Sequence: Synthetic oligonucleotide
ccaucaugaaguuauagcu

SEQ ID NO: 1908880 - RNA, 19 nt, Artificial Sequence
  Description of Artificial Sequence: Synthetic oligonucleotide
uggguaguccaugaauaau

SEQ ID NO: 1908881 - RNA, 19 nt, Artificial Sequence
  Description of Artificial Sequence: Synthetic oligonucleotide
uuucuucauuguucuccac

SEQ ID NO: 1908882 - RNA, 19 nt, Artificial Sequence
  Description of Artificial Sequence: Synthetic oligonucleotide
auacaguucucaauugaua

SEQ ID NO: 1908883 - RNA, 19 nt, Artificial Sequence
  Description of Artificial Sequence: Synthetic oligonucleotide
auaagcuguaagacugggu

SEQ ID NO: 1908884 - RNA, 19 nt, Artificial Sequence
  Description of Artificial Sequence: Synthetic oligonucleotide
agagauuuuccugcugcaa

SEQ ID NO: 1908885 - RNA, 19 nt, Artificial Sequence
  Description of Artificial Sequence: Synthetic oligonucleotide
ucuuacgccuguguuucuc

SEQ ID NO: 1908886 - RNA, 19 nt, Artificial Sequence
  Description of Artificial Sequence: Synthetic oligonucleotide
auuauggauucugcaucca

SEQ ID NO: 1908887 - RNA, 19 nt, Artificial Sequence
  Description of Artificial Sequence: Synthetic oligonucleotide
cauuaauacuucuuccuuu

SEQ ID NO: 1908888 - RNA, 19 nt, Artificial Sequence
  Description of Artificial Sequence: Synthetic oligonucleotide
ugacagcuuccuuguuuca

SEQ ID NO: 1908889 - RNA, 19 nt, Artificial Sequence
  Description of Artificial Sequence: Synthetic oligonucleotide
ccuuuauucaaauuaacuu

SEQ ID NO: 1908890 - RNA, 19 nt, Artificial Sequence
  Description of Artificial Sequence: Synthetic oligonucleotide
cuuguucgguuguugaacu

SEQ ID NO: 1908891 - RNA, 19 nt, Artificial Sequence
  Description of Artificial Sequence: Synthetic oligonucleotide
guuugucauguuccuuuuc

SEQ ID NO: 1908892 - RNA, 19 nt, Artificial Sequence
  Description of Artificial Sequence: Synthetic oligonucleotide
ccaaagggguaauacguuc

SEQ ID NO: 1908893 - RNA, 19 nt, Artificial Sequence
  Description of Artificial Sequence: Synthetic oligonucleotide
cuuacgccuguguuucuca

SEQ ID NO: 1908894 - RNA, 19 nt, Artificial Sequence
  Description of Artificial Sequence: Synthetic oligonucleotide
ccuuauuauggauucugca

SEQ ID NO: 1908895 - RNA, 19 nt, Artificial Sequence
  Description of Artificial Sequence: Synthetic oligonucleotide
caauccacauaacucuuua

SEQ ID NO: 1908896 - RNA, 19 nt, Artificial Sequence
  Description of Artificial Sequence: Synthetic oligonucleotide
ucugacuguuggucauuaa

SEQ ID NO: 1908897 - RNA, 19 nt, Artificial Sequence
  Description of Artificial Sequence: Synthetic oligonucleotide
gugagauuccggaucacaa

SEQ ID NO: 1908898 - RNA, 19 nt, Artificial Sequence
  Description of Artificial Sequence: Synthetic oligonucleotide
gguaauacguucaucacuu

SEQ ID NO: 1908899 - RNA, 19 nt, Artificial Sequence
  Description of Artificial Sequence: Synthetic oligonucleotide
gggguaauacguucaucac

SEQ ID NO: 1908900 - RNA, 19 nt, Artificial Sequence
  Description of Artificial Sequence: Synthetic oligonucleotide
accacacuucaaaauucug

SEQ ID NO: 1908901 - RNA, 19 nt, Artificial Sequence
  Description of Artificial Sequence: Synthetic oligonucleotide
uuagcccaauuucccucuc

SEQ ID NO: 1908902 - RNA, 19 nt, Artificial Sequence
  Description of Artificial Sequence: Synthetic oligonucleotide
uuacgccuguguuucucau

SEQ ID NO: 1908903 - RNA, 19 nt, Artificial Sequence
  Description of Artificial Sequence: Synthetic oligonucleotide
agcuuccuuguuucaacuu

SEQ ID NO: 1908904 - RNA, 19 nt, Artificial Sequence
  Description of Artificial Sequence: Synthetic oligonucleotide
aacaaacuguagggaucca

SEQ ID NO: 1908905 - RNA, 19 nt, Artificial Sequence
  Description of Artificial Sequence: Synthetic oligonucleotide
cuggguaguccaugaauaa

SEQ ID NO: 1908906 - RNA, 19 nt, Artificial Sequence
  Description of Artificial Sequence: Synthetic oligonucleotide
gccacuuuccauacaaaca

SEQ ID NO: 1908907 - RNA, 19 nt, Artificial Sequence
  Description of Artificial Sequence: Synthetic oligonucleotide
acaaacccauucagccuuc

SEQ ID NO: 1908908 - RNA, 19 nt, Artificial Sequence
  Description of Artificial Sequence: Synthetic oligonucleotide
cacagccugaauuuuaauu

SEQ ID NO: 1908909 - RNA, 19 nt, Artificial Sequence
  Description of Artificial Sequence: Synthetic oligonucleotide
uguucuccaccugucuuuu

SEQ ID NO: 1908910 - RNA, 19 nt, Artificial Sequence
  Description of Artificial Sequence: Synthetic oligonucleotide
gauaguauuuuagcccaau

SEQ ID NO: 1908911 - RNA, 19 nt, Artificial Sequence
  Description of Artificial Sequence: Synthetic oligonucleotide
ucaucagugucuggcugau

SEQ ID NO: 1908912 - RNA, 19 nt, Artificial Sequence
  Description of Artificial Sequence: Synthetic oligonucleotide
aaccuaaaacaaacccauu

SEQ ID NO: 1908913 - RNA, 19 nt, Artificial Sequence
  Description of Artificial Sequence: Synthetic oligonucleotide
ugcuuccuuaaagcugcca

SEQ ID NO: 1908914 - RNA, 19 nt, Artificial Sequence
  Description of Artificial Sequence: Synthetic oligonucleotide
ggguaauacguucaucacu

SEQ ID NO: 1908915 - RNA, 19 nt, Artificial Sequence
  Description of Artificial Sequence: Synthetic oligonucleotide
acaugacacuuguucgguu

SEQ ID NO: 1908916 - RNA, 19 nt, Artificial Sequence
  Description of Artificial Sequence: Synthetic oligonucleotide
guagggauccaaguauuua

SEQ ID NO: 1908917 - RNA, 19 nt, Artificial Sequence
  Description of Artificial Sequence: Synthetic oligonucleotide
gaauaauagccgacucugu

SEQ ID NO: 1908918 - RNA, 19 nt, Artificial Sequence
  Description of Artificial Sequence: Synthetic oligonucleotide
ccuuacaccacacuucaaa

SEQ ID NO: 1908919 - RNA, 19 nt, Artificial Sequence
  Description of Artificial Sequence: Synthetic oligonucleotide
agacuggguaguccaugaa

SEQ ID NO: 1908920 - RNA, 19 nt, Artificial Sequence
  Description of Artificial Sequence: Synthetic oligonucleotide
ccguauuucuuuauuaagu

SEQ ID NO: 1908921 - RNA, 19 nt, Artificial Sequence
  Description of Artificial Sequence: Synthetic oligonucleotide
agccugaauuuuaauuaaa

SEQ ID NO: 1908922 - RNA, 19 nt, Artificial Sequence
  Description of Artificial Sequence: Synthetic oligonucleotide
cacuuguucgguuguugaa

SEQ ID NO: 1908923 - RNA, 19 nt, Artificial Sequence
  Description of Artificial Sequence: Synthetic oligonucleotide
ccacuacuuuuguugcugc

SEQ ID NO: 1908924 - RNA, 19 nt, Artificial Sequence
  Description of Artificial Sequence: Synthetic oligonucleotide
acaauccacauaacucuuu

SEQ ID NO: 1908925 - RNA, 19 nt, Artificial Sequence
  Description of Artificial Sequence: Synthetic oligonucleotide
cucaauugauaagcuguaa

SEQ ID NO: 1908926 - RNA, 19 nt, Artificial Sequence
  Description of Artificial Sequence: Synthetic oligonucleotide
gggauccaaguauuuaacu

SEQ ID NO: 1908927 - RNA, 19 nt, Artificial Sequence
  Description of Artificial Sequence: Synthetic oligonucleotide
gcauucuugugacaccuua

SEQ ID NO: 1908928 - RNA, 19 nt, Artificial Sequence
  Description of Artificial Sequence: Synthetic oligonucleotide
cauucuugugacaccuuau

SEQ ID NO: 1908929 - RNA, 19 nt, Artificial Sequence
  Description of Artificial Sequence: Synthetic oligonucleotide
gacgugugagauuccggau

SEQ ID NO: 1908930 - RNA, 19 nt, Artificial Sequence
  Description of Artificial Sequence: Synthetic oligonucleotide
gugacaccuuauuauggau

SEQ ID NO: 1908931 - RNA, 19 nt, Artificial Sequence
  Description of Artificial Sequence: Synthetic oligonucleotide
guguuucucaucagugucu

SEQ ID NO: 1908932 - RNA, 19 nt, Artificial Sequence
  Description of Artificial Sequence: Synthetic oligonucleotide
ccauacaaacagccacagc

SEQ ID NO: 1908933 - RNA, 19 nt, Artificial Sequence
  Description of Artificial Sequence: Synthetic oligonucleotide
ggcugauucuuugaaauau

SEQ ID NO: 1908934 - RNA, 19 nt, Artificial Sequence
  Description of Artificial Sequence: Synthetic oligonucleotide
auccuuguauuaaccuaaa

SEQ ID NO: 1908935 - RNA, 19 nt, Artificial Sequence
  Description of Artificial Sequence: Synthetic oligonucleotide
agugucuggcugauucuuu

SEQ ID NO: 1908936 - RNA, 19 nt, Artificial Sequence
  Description of Artificial Sequence: Synthetic oligonucleotide
aaggagugguauggaucuu

SEQ ID NO: 1908937 - RNA, 19 nt, Artificial Sequence
  Description of Artificial Sequence: Synthetic oligonucleotide
agccgacucuguccagcca

SEQ ID NO: 1908938 - RNA, 19 nt, Artificial Sequence
  Description of Artificial Sequence: Synthetic oligonucleotide
cuguagggauccaaguauu

SEQ ID NO: 1908939 - RNA, 19 nt, Artificial Sequence
  Description of Artificial Sequence: Synthetic oligonucleotide
cacaauccacauaacucuu

SEQ ID NO: 1908940 - RNA, 19 nt, Artificial Sequence
  Description of Artificial Sequence: Synthetic oligonucleotide
ccucuccauauuuccuuac

SEQ ID NO: 1908941 - RNA, 19 nt, Artificial Sequence
  Description of Artificial Sequence: Synthetic oligonucleotide
cccaauuucccucuccaua

SEQ ID NO: 1908942 - RNA, 19 nt, Artificial Sequence
  Description of Artificial Sequence: Synthetic oligonucleotide
cacuaaggauucaguuucu

SEQ ID NO: 1908943 - RNA, 19 nt, Artificial Sequence
  Description of Artificial Sequence: Synthetic oligonucleotide
agccacagccugaauuuua

SEQ ID NO: 1908944 - RNA, 19 nt, Artificial Sequence
  Description of Artificial Sequence: Synthetic oligonucleotide
guucgguuguugaacuuau

SEQ ID NO: 1908945 - RNA, 19 nt, Artificial Sequence
  Description of Artificial Sequence: Synthetic oligonucleotide
gccugaauuuuaauuaaau

SEQ ID NO: 1908946 - RNA, 19 nt, Artificial Sequence
  Description of Artificial Sequence: Synthetic oligonucleotide
cauuccuugcagugguuuu

SEQ ID NO: 1908947 - RNA, 19 nt, Artificial Sequence
  Description of Artificial Sequence: Synthetic oligonucleotide
ccacauaacucuuuauuuu

SEQ ID NO: 1908948 - RNA, 19 nt, Artificial Sequence
  Description of Artificial Sequence: Synthetic oligonucleotide
gcuguaagacuggguaguc

SEQ ID NO: 1908949 - RNA, 19 nt, Artificial Sequence
  Description of Artificial Sequence: Synthetic oligonucleotide
gccuguguuucucaucagu

SEQ ID NO: 1908950 - RNA, 19 nt, Artificial Sequence
  Description of Artificial Sequence: Synthetic oligonucleotide
guaauacguucaucacuuu

SEQ ID NO: 1908951 - RNA, 19 nt, Artificial Sequence
  Description of Artificial Sequence: Synthetic oligonucleotide
ccggaucacaaaauauucu

SEQ ID NO: 1908952 - RNA, 19 nt, Artificial Sequence
  Description of Artificial Sequence: Synthetic oligonucleotide
caaacccauucagccuuca

SEQ ID NO: 1908953 - RNA, 19 nt, Artificial Sequence
  Description of Artificial Sequence: Synthetic oligonucleotide
cguucaucacuuucaaacu

SEQ ID NO: 1908954 - RNA, 19 nt, Artificial Sequence
  Description of Artificial Sequence: Synthetic oligonucleotide
gccacagccugaauuuuaa

SEQ ID NO: 1908955 - RNA, 19 nt, Artificial Sequence
  Description of Artificial Sequence: Synthetic oligonucleotide
guaagacuggguaguccau

SEQ ID NO: 1908956 - RNA, 19 nt, Artificial Sequence
  Description of Artificial Sequence: Synthetic oligonucleotide
ggcugauuccaaaggggua

SEQ ID NO: 1908957 - RNA, 19 nt, Artificial Sequence
  Description of Artificial Sequence: Synthetic oligonucleotide
cggaucacaaaauauucuu

SEQ ID NO: 1908958 - RNA, 19 nt, Artificial Sequence
  Description of Artificial Sequence: Synthetic oligonucleotide
uaguagcauuuugcuuauu

SEQ ID NO: 1908959 - RNA, 19 nt, Artificial Sequence
  Description of Artificial Sequence: Synthetic oligonucleotide
gccgacucuguccagccau

SEQ ID NO: 1908960 - RNA, 19 nt, Artificial Sequence
  Description of Artificial Sequence: Synthetic oligonucleotide
cccaaaucaucagggcuga

SEQ ID NO: 1908961 - RNA, 19 nt, Artificial Sequence
  Description of Artificial Sequence: Synthetic oligonucleotide
ccgacucuguccagccauc

SEQ ID NO: 1908962 - RNA, 19 nt, Artificial Sequence
  Description of Artificial Sequence: Synthetic oligonucleotide
cccucuccauauuuccuua

SEQ ID NO: 1908963 - RNA, 19 nt, Artificial Sequence
  Description of Artificial Sequence: Synthetic oligonucleotide
ccuaaagacgugugagauu

SEQ ID NO: 1908964 - RNA, 19 nt, Artificial Sequence
  Description of Artificial Sequence: Synthetic oligonucleotide
guguuccugcuuucucauu

SEQ ID NO: 1908965 - RNA, 19 nt, Artificial Sequence
  Description of Artificial Sequence: Synthetic oligonucleotide
ggagugguauggaucuuuu

SEQ ID NO: 1908966 - RNA, 19 nt, Artificial Sequence
  Description of Artificial Sequence: Synthetic oligonucleotide
ccacagccugaauuuuaau

SEQ ID NO: 1908967 - RNA, 19 nt, Artificial Sequence
  Description of Artificial Sequence: Synthetic oligonucleotide
ggcauucuugugacaccuu

SEQ ID NO: 1908968 - RNA, 19 nt, Artificial Sequence
  Description of Artificial Sequence: Synthetic oligonucleotide
uaauguauaaucaacaucc

SEQ ID NO: 1908969 - RNA, 19 nt, Artificial Sequence
  Description of Artificial Sequence: Synthetic oligonucleotide
aaugucauaaucuucauau

SEQ ID NO: 1908970 - RNA, 19 nt, Artificial Sequence
  Description of Artificial Sequence: Synthetic oligonucleotide
gguauuuuaaaucuuaugg

SEQ ID NO: 1908971 - RNA, 19 nt, Artificial Sequence
  Description of Artificial Sequence: Synthetic oligonucleotide
uguauaaucaacauccagc

SEQ ID NO: 1908972 - RNA, 19 nt, Artificial Sequence
  Description of Artificial Sequence: Synthetic oligonucleotide
aagguaaucuuauaauugg

SEQ ID NO: 1908973 - RNA, 19 nt, Artificial Sequence
  Description of Artificial Sequence: Synthetic oligonucleotide
aacaauguacaccauguuc

SEQ ID NO: 1908974 - RNA, 19 nt, Artificial Sequence
  Description of Artificial Sequence: Synthetic oligonucleotide
aagcauaugaagucguagc

SEQ ID NO: 1908975 - RNA, 19 nt, Artificial Sequence
  Description of Artificial Sequence: Synthetic oligonucleotide
agcacuuccacuuuguuac

SEQ ID NO: 1908976 - RNA, 19 nt, Artificial Sequence
  Description of Artificial Sequence: Synthetic oligonucleotide
uuuaagaggagcaauuccc

SEQ ID NO: 1908977 - RNA, 19 nt, Artificial Sequence
  Description of Artificial Sequence: Synthetic oligonucleotide
uuauaauuggcauuugugc

SEQ ID NO: 1908978 - RNA, 19 nt, Artificial Sequence
  Description of Artificial Sequence: Synthetic oligonucleotide
auuacuaugguuuuaggca

SEQ ID NO: 1908979 - RNA, 19 nt, Artificial Sequence
  Description of Artificial Sequence: Synthetic oligonucleotide
agcaaugacacacagcugg

SEQ ID NO: 1908980 - RNA, 19 nt, Artificial Sequence
  Description of Artificial Sequence: Synthetic oligonucleotide
aaauaacaaugucauaauc

SEQ ID NO: 1908981 - RNA, 19 nt, Artificial Sequence
  Description of Artificial Sequence: Synthetic oligonucleotide
auuuacaccacugaaauag

SEQ ID NO: 1908982 - RNA, 19 nt, Artificial Sequence
  Description of Artificial Sequence: Synthetic oligonucleotide
uaugguuuuaggcagaagu

SEQ ID NO: 1908983 - RNA, 19 nt, Artificial Sequence
  Description of Artificial Sequence: Synthetic oligonucleotide
ugucauaaucuucauaugc

SEQ ID NO: 1908984 - RNA, 19 nt, Artificial Sequence
  Description of Artificial Sequence: Synthetic oligonucleotide
accauguucauuuaagagg

SEQ ID NO: 1908985 - RNA, 19 nt, Artificial Sequence
  Description of Artificial Sequence: Synthetic oligonucleotide
uuugagaccaguaauuucu

SEQ ID NO: 1908986 - RNA, 19 nt, Artificial Sequence
  Description of Artificial Sequence: Synthetic oligonucleotide
auuucaugaagauaugguc

SEQ ID NO: 1908987 - RNA, 19 nt, Artificial Sequence
  Description of Artificial Sequence: Synthetic oligonucleotide
uugccuuuaacuuugagac

SEQ ID NO: 1908988 - RNA, 19 nt, Artificial Sequence
  Description of Artificial Sequence: Synthetic oligonucleotide
uuagcuucaauccacuuca

SEQ ID NO: 1908989 - RNA, 19 nt, Artificial Sequence
  Description of Artificial Sequence: Synthetic oligonucleotide
uuuuaaaucuuauggcuag

SEQ ID NO: 1908990 - RNA, 19 nt, Artificial Sequence
  Description of Artificial Sequence: Synthetic oligonucleotide
aagauauggucucauuaac

SEQ ID NO: 1908991 - RNA, 19 nt, Artificial Sequence
  Description of Artificial Sequence: Synthetic oligonucleotide
uuaguaguuagcaaugaca

SEQ ID NO: 1908992 - RNA, 19 nt, Artificial Sequence
  Description of Artificial Sequence: Synthetic oligonucleotide
aacuguauaaagcaauacu

SEQ ID NO: 1908993 - RNA, 19 nt, Artificial Sequence
  Description of Artificial Sequence: Synthetic oligonucleotide
ugcacaagaccuaugauca

SEQ ID NO: 1908994 - RNA, 19 nt, Artificial Sequence
  Description of Artificial Sequence: Synthetic oligonucleotide
aaaucuuauggcuagcuau

SEQ ID NO: 1908995 - RNA, 19 nt, Artificial Sequence
  Description of Artificial Sequence: Synthetic oligonucleotide
uauaaagcaauacugucaa

SEQ ID NO: 1908996 - RNA, 19 nt, Artificial Sequence
  Description of Artificial Sequence: Synthetic oligonucleotide
aagcauugcaaguaacagg

SEQ ID NO: 1908997 - RNA, 19 nt, Artificial Sequence
  Description of Artificial Sequence: Synthetic oligonucleotide
aaaaucguugaugacauca

SEQ ID NO: 1908998 - RNA, 19 nt, Artificial Sequence
  Description of Artificial Sequence: Synthetic oligonucleotide
acaagaacuguauaaagca

SEQ ID NO: 1908999 - RNA, 19 nt, Artificial Sequence
  Description of Artificial Sequence: Synthetic oligonucleotide
uccuguaagaacaauguac

SEQ ID NO: 1909000 - RNA, 19 nt, Artificial Sequence
  Description of Artificial Sequence: Synthetic oligonucleotide
caaauaauguauaaucaac

SEQ ID NO: 1909001 - RNA, 19 nt, Artificial Sequence
  Description of Artificial Sequence: Synthetic oligonucleotide
ccaaaugacaccaagaggc

SEQ ID NO: 1909002 - RNA, 19 nt, Artificial Sequence
  Description of Artificial Sequence: Synthetic oligonucleotide
uaguaguuagcaaugacac

SEQ ID NO: 1909003 - RNA, 19 nt, Artificial Sequence
  Description of Artificial Sequence: Synthetic oligonucleotide
guaagaacaauguacacca

SEQ ID NO: 1909004 - RNA, 19 nt, Artificial Sequence
  Description of Artificial Sequence: Synthetic oligonucleotide
uauaauuggcauuugugcu

SEQ ID NO: 1909005 - RNA, 19 nt, Artificial Sequence
  Description of Artificial Sequence: Synthetic oligonucleotide
aguauuugguuucaguuug

SEQ ID NO: 1909006 - RNA, 19 nt, Artificial Sequence
  Description of Artificial Sequence: Synthetic oligonucleotide
uucacuacugcauaagcug

SEQ ID NO: 1909007 - RNA, 19 nt, Artificial Sequence
  Description of Artificial Sequence: Synthetic oligonucleotide
uacaguuaaguuuucuucc

SEQ ID NO: 1909008 - RNA, 19 nt, Artificial Sequence
  Description of Artificial Sequence: Synthetic oligonucleotide
uuugccuuuaacuuugaga

SEQ ID NO: 1909009 - RNA, 19 nt, Artificial Sequence
  Description of Artificial Sequence: Synthetic oligonucleotide
aaauaguccuguaagaaca

SEQ ID NO: 1909010 - RNA, 19 nt, Artificial Sequence
  Description of Artificial Sequence: Synthetic oligonucleotide
cuuauaauuggcauuugug

SEQ ID NO: 1909011 - RNA, 19 nt, Artificial Sequence
  Description of Artificial Sequence: Synthetic oligonucleotide
uuuauuuauuuacaccacu

SEQ ID NO: 1909012 - RNA, 19 nt, Artificial Sequence
  Description of Artificial Sequence: Synthetic oligonucleotide
uaacagguauuuuaaaucu

SEQ ID NO: 1909013 - RNA, 19 nt, Artificial Sequence
  Description of Artificial Sequence: Synthetic oligonucleotide
aagaccuaugaucaaauaa

SEQ ID NO: 1909014 - RNA, 19 nt, Artificial Sequence
  Description of Artificial Sequence: Synthetic oligonucleotide
cauuacuaugguuuuaggc

SEQ ID NO: 1909015 - RNA, 19 nt, Artificial Sequence
  Description of Artificial Sequence: Synthetic oligonucleotide
aucaucaugauuuuaguau

SEQ ID NO: 1909016 - RNA, 19 nt, Artificial Sequence
  Description of Artificial Sequence: Synthetic oligonucleotide
auaauuggcauuugugcuc

SEQ ID NO: 1909017 - RNA, 19 nt, Artificial Sequence
  Description of Artificial Sequence: Synthetic oligonucleotide
aaaacaguggucacauuac

SEQ ID NO: 1909018 - RNA, 19 nt, Artificial Sequence
  Description of Artificial Sequence: Synthetic oligonucleotide
uuacuaugguuuuaggcag

SEQ ID NO: 1909019 - RNA, 19 nt, Artificial Sequence
  Description of Artificial Sequence: Synthetic oligonucleotide
aaugguguuaguaguuagc

SEQ ID NO: 1909020 - RNA, 19 nt, Artificial Sequence
  Description of Artificial Sequence: Synthetic oligonucleotide
cuuuguuacuccuugacuc

SEQ ID NO: 1909021 - RNA, 19 nt, Artificial Sequence
  Description of Artificial Sequence: Synthetic oligonucleotide
gauauggucucauuaacuc

SEQ ID NO: 1909022 - RNA, 19 nt, Artificial Sequence
  Description of Artificial Sequence: Synthetic oligonucleotide
agauguuagaaauuucaug

SEQ ID NO: 1909023 - RNA, 19 nt, Artificial Sequence
  Description of Artificial Sequence: Synthetic oligonucleotide
guagcuuucugucagaaca

SEQ ID NO: 1909024 - RNA, 19 nt, Artificial Sequence
  Description of Artificial Sequence: Synthetic oligonucleotide
cuucauaugcagauguuag

SEQ ID NO: 1909025 - RNA, 19 nt, Artificial Sequence
  Description of Artificial Sequence: Synthetic oligonucleotide
uguauaaagcaauacuguc

SEQ ID NO: 1909026 - RNA, 19 nt, Artificial Sequence
  Description of Artificial Sequence: Synthetic oligonucleotide
auaucugcaggcuuaagca

SEQ ID NO: 1909027 - RNA, 19 nt, Artificial Sequence
  Description of Artificial Sequence: Synthetic oligonucleotide
acauuacauaucugcaggc

SEQ ID NO: 1909028 - RNA, 19 nt, Artificial Sequence
  Description of Artificial Sequence: Synthetic oligonucleotide
uacaccacugaaauagucc

SEQ ID NO: 1909029 - RNA, 19 nt, Artificial Sequence
  Description of Artificial Sequence: Synthetic oligonucleotide
acuguauaaagcaauacug

SEQ ID NO: 1909030 - RNA, 19 nt, Artificial Sequence
  Description of Artificial Sequence: Synthetic oligonucleotide
agaucuuacaguuaaguuu

SEQ ID NO: 1909031 - RNA, 19 nt, Artificial Sequence
  Description of Artificial Sequence: Synthetic oligonucleotide
ucaaaaucguugaugacau

SEQ ID NO: 1909032 - RNA, 19 nt, Artificial Sequence
  Description of Artificial Sequence: Synthetic oligonucleotide
aaugacacacagcuggagu

SEQ ID NO: 1909033 - RNA, 19 nt, Artificial Sequence
  Description of Artificial Sequence: Synthetic oligonucleotide
uuaguauuugguuucaguu

SEQ ID NO: 1909034 - RNA, 19 nt, Artificial Sequence
  Description of Artificial Sequence: Synthetic oligonucleotide
guaguuagcaaugacacac

SEQ ID NO: 1909035 - RNA, 19 nt, Artificial Sequence
  Description of Artificial Sequence: Synthetic oligonucleotide
guaacagguauuuuaaauc

SEQ ID NO: 1909036 - RNA, 19 nt, Artificial Sequence
  Description of Artificial Sequence: Synthetic oligonucleotide
aguaacagguauuuuaaau

SEQ ID NO: 1909037 - RNA, 19 nt, Artificial Sequence
  Description of Artificial Sequence: Synthetic oligonucleotide
uaaucaacauccagcacca

SEQ ID NO: 1909038 - RNA, 19 nt, Artificial Sequence
  Description of Artificial Sequence: Synthetic oligonucleotide
aaucuuauaauuggcauuu

SEQ ID NO: 1909039 - RNA, 19 nt, Artificial Sequence
  Description of Artificial Sequence: Synthetic oligonucleotide
ugaagauauggucucauua

SEQ ID NO: 1909040 - RNA, 19 nt, Artificial Sequence
  Description of Artificial Sequence: Synthetic oligonucleotide
guauaaucaacauccagca

SEQ ID NO: 1909041 - RNA, 19 nt, Artificial Sequence
  Description of Artificial Sequence: Synthetic oligonucleotide
cauaucugcaggcuuaagc

SEQ ID NO: 1909042 - RNA, 19 nt, Artificial Sequence
  Description of Artificial Sequence: Synthetic oligonucleotide
uucauuacuaugguuuuag

SEQ ID NO: 1909043 - RNA, 19 nt, Artificial Sequence
  Description of Artificial Sequence: Synthetic oligonucleotide
uuauggcuagcuauguuug

SEQ ID NO: 1909044 - RNA, 19 nt, Artificial Sequence
  Description of Artificial Sequence: Synthetic oligonucleotide
auccacuucauauuuguug

SEQ ID NO: 1909045 - RNA, 19 nt, Artificial Sequence
  Description of Artificial Sequence: Synthetic oligonucleotide
uuucacuacugcauaagcu

SEQ ID NO: 1909046 - RNA, 19 nt, Artificial Sequence
  Description of Artificial Sequence: Synthetic oligonucleotide
uuugagagcuccaagcuua

SEQ ID NO: 1909047 - RNA, 19 nt, Artificial Sequence
  Description of Artificial Sequence: Synthetic oligonucleotide
gucucauuaacucuacccc

SEQ ID NO: 1909048 - RNA, 19 nt, Artificial Sequence
  Description of Artificial Sequence: Synthetic oligonucleotide
aacuuuccccaaaugacac

SEQ ID NO: 1909049 - RNA, 19 nt, Artificial Sequence
  Description of Artificial Sequence: Synthetic oligonucleotide
ugaagguaaucuuauaauu

SEQ ID NO: 1909050 - RNA, 19 nt, Artificial Sequence
  Description of Artificial Sequence: Synthetic oligonucleotide
auuaacucuaccccagucu

SEQ ID NO: 1909051 - RNA, 19 nt, Artificial Sequence
  Description of Artificial Sequence: Synthetic oligonucleotide
aagcuuaacaucauuuucu

SEQ ID NO: 1909052 - RNA, 19 nt, Artificial Sequence
  Description of Artificial Sequence: Synthetic oligonucleotide
acacaagacaucuuccaag

SEQ ID NO: 1909053 - RNA, 19 nt, Artificial Sequence
  Description of Artificial Sequence: Synthetic oligonucleotide
uuaacucuaccccagucuc

SEQ ID NO: 1909054 - RNA, 19 nt, Artificial Sequence
  Description of Artificial Sequence: Synthetic oligonucleotide
uaguccuguaagaacaaug

SEQ ID NO: 1909055 - RNA, 19 nt, Artificial Sequence
  Description of Artificial Sequence: Synthetic oligonucleotide
uucccuauuuucuacuuca

SEQ ID NO: 1909056 - RNA, 19 nt, Artificial Sequence
  Description of Artificial Sequence: Synthetic oligonucleotide
auaagcugugcuucauuac

SEQ ID NO: 1909057 - RNA, 19 nt, Artificial Sequence
  Description of Artificial Sequence: Synthetic oligonucleotide
ggucacauuacauaucugc

SEQ ID NO: 1909058 - RNA, 19 nt, Artificial Sequence
  Description of Artificial Sequence: Synthetic oligonucleotide
uuaagaggagcaauucccu

SEQ ID NO: 1909059 - RNA, 19 nt, Artificial Sequence
  Description of Artificial Sequence: Synthetic oligonucleotide
uggagaguagaguugguga

SEQ ID NO: 1909060 - RNA, 19 nt, Artificial Sequence
  Description of Artificial Sequence: Synthetic oligonucleotide
cacaagacaucuuccaagc

SEQ ID NO: 1909061 - RNA, 19 nt, Artificial Sequence
  Description of Artificial Sequence: Synthetic oligonucleotide
uauggucucauuaacucua

SEQ ID NO: 1909062 - RNA, 19 nt, Artificial Sequence
  Description of Artificial Sequence: Synthetic oligonucleotide
uaacuuugagaccaguaau

SEQ ID NO: 1909063 - RNA, 19 nt, Artificial Sequence
  Description of Artificial Sequence: Synthetic oligonucleotide
accaagaggcuucacauca

SEQ ID NO: 1909064 - RNA, 19 nt, Artificial Sequence
  Description of Artificial Sequence: Synthetic oligonucleotide
augauuuuaguauuugguu

SEQ ID NO: 1909065 - RNA, 19 nt, Artificial Sequence
  Description of Artificial Sequence: Synthetic oligonucleotide
ucacgaguucccaucauca

SEQ ID NO: 1909066 - RNA, 19 nt, Artificial Sequence
  Description of Artificial Sequence: Synthetic oligonucleotide
aaagcguggucacugagua

SEQ ID NO: 1909067 - RNA, 19 nt, Artificial Sequence
  Description of Artificial Sequence: Synthetic oligonucleotide
agcauugcaaguaacaggu

SEQ ID NO: 1909068 - RNA, 19 nt, Artificial Sequence
  Description of Artificial Sequence: Synthetic oligonucleotide
ucaguuugagagcuccaag

SEQ ID NO: 1909069 - RNA, 19 nt, Artificial Sequence
  Description of Artificial Sequence: Synthetic oligonucleotide
caggcuuaagcauugcaag

SEQ ID NO: 1909070 - RNA, 19 nt, Artificial Sequence
  Description of Artificial Sequence: Synthetic oligonucleotide
auguacaccauguucauuu

SEQ ID NO: 1909071 - RNA, 19 nt, Artificial Sequence
  Description of Artificial Sequence: Synthetic oligonucleotide
aaucuuauggcuagcuaug

SEQ ID NO: 1909072 - RNA, 19 nt, Artificial Sequence
  Description of Artificial Sequence: Synthetic oligonucleotide
ucauuuaagaggagcaauu

SEQ ID NO: 1909073 - RNA, 19 nt, Artificial Sequence
  Description of Artificial Sequence: Synthetic oligonucleotide
ucauaugcagauguuagaa

SEQ ID NO: 1909074 - RNA, 19 nt, Artificial Sequence
  Description of Artificial Sequence: Synthetic oligonucleotide
aagcaauacugucaacaca

SEQ ID NO: 1909075 - RNA, 19 nt, Artificial Sequence
  Description of Artificial Sequence: Synthetic oligonucleotide
agucguagcuuucugucag

SEQ ID NO: 1909076 - RNA, 19 nt, Artificial Sequence
  Description of Artificial Sequence: Synthetic oligonucleotide
uuuguuacuccuugacucu

SEQ ID NO: 1909077 - RNA, 19 nt, Artificial Sequence
  Description of Artificial Sequence: Synthetic oligonucleotide
ugugcuucauuacuauggu

SEQ ID NO: 1909078 - RNA, 19 nt, Artificial Sequence
  Description of Artificial Sequence: Synthetic oligonucleotide
ucauuacuaugguuuuagg

SEQ ID NO: 1909079 - RNA, 19 nt, Artificial Sequence
  Description of Artificial Sequence: Synthetic oligonucleotide
agaccaaauaacaauguca

SEQ ID NO: 1909080 - RNA, 19 nt, Artificial Sequence
  Description of Artificial Sequence: Synthetic oligonucleotide
ugguuuuaggcagaagugc

SEQ ID NO: 1909081 - RNA, 19 nt, Artificial Sequence
  Description of Artificial Sequence: Synthetic oligonucleotide
agaacaauguacaccaugu

SEQ ID NO: 1909082 - RNA, 19 nt, Artificial Sequence
  Description of Artificial Sequence: Synthetic oligonucleotide
gucaaaaucguugaugaca

SEQ ID NO: 1909083 - RNA, 19 nt, Artificial Sequence
  Description of Artificial Sequence: Synthetic oligonucleotide
agguaaucuuauaauuggc

SEQ ID NO: 1909084 - RNA, 19 nt, Artificial Sequence
  Description of Artificial Sequence: Synthetic oligonucleotide
cucauuaacucuaccccag

SEQ ID NO: 1909085 - RNA, 19 nt, Artificial Sequence
  Description of Artificial Sequence: Synthetic oligonucleotide
uugguuucaguuugagagc

SEQ ID NO: 1909086 - RNA, 19 nt, Artificial Sequence
  Description of Artificial Sequence: Synthetic oligonucleotide
uuacauaucugcaggcuua

SEQ ID NO: 1909087 - RNA, 19 nt, Artificial Sequence
  Description of Artificial Sequence: Synthetic oligonucleotide
ggucucauuaacucuaccc

SEQ ID NO: 1909088 - RNA, 19 nt, Artificial Sequence
  Description of Artificial Sequence: Synthetic oligonucleotide
acgguuaucauagcagcac

SEQ ID NO: 1909089 - RNA, 19 nt, Artificial Sequence
  Description of Artificial Sequence: Synthetic oligonucleotide
acuacugcauaagcugugc

SEQ ID NO: 1909090 - RNA, 19 nt, Artificial Sequence
  Description of Artificial Sequence: Synthetic oligonucleotide
aguagaguuggugaaugag

SEQ ID NO: 1909091 - RNA, 19 nt, Artificial Sequence
  Description of Artificial Sequence: Synthetic oligonucleotide
agauauuuauuuauuuaca

SEQ ID NO: 1909092 - RNA, 19 nt, Artificial Sequence
  Description of Artificial Sequence: Synthetic oligonucleotide
uucauaugcagauguuaga

SEQ ID NO: 1909093 - RNA, 19 nt, Artificial Sequence
  Description of Artificial Sequence: Synthetic oligonucleotide
agagcuccaagcuuaacau

SEQ ID NO: 1909094 - RNA, 19 nt, Artificial Sequence
  Description of Artificial Sequence: Synthetic oligonucleotide
cuggaguaggcagaaaugc

SEQ ID NO: 1909095 - RNA, 19 nt, Artificial Sequence
  Description of Artificial Sequence: Synthetic oligonucleotide
acuuuguuacuccuugacu

SEQ ID NO: 1909096 - RNA, 19 nt, Artificial Sequence
  Description of Artificial Sequence: Synthetic oligonucleotide
auauggucucauuaacucu

SEQ ID NO: 1909097 - RNA, 19 nt, Artificial Sequence
  Description of Artificial Sequence: Synthetic oligonucleotide
uucauauuuguugcagacc

SEQ ID NO: 1909098 - RNA, 19 nt, Artificial Sequence
  Description of Artificial Sequence: Synthetic oligonucleotide
ucacuacugcauaagcugu

SEQ ID NO: 1909099 - RNA, 19 nt, Artificial Sequence
  Description of Artificial Sequence: Synthetic oligonucleotide
uugacucugcgagagaucu

SEQ ID NO: 1909100 - RNA, 19 nt, Artificial Sequence
  Description of Artificial Sequence: Synthetic oligonucleotide
guauaaagcaauacuguca

SEQ ID NO: 1909101 - RNA, 19 nt, Artificial Sequence
  Description of Artificial Sequence: Synthetic oligonucleotide
agcaauacugucaacacaa

SEQ ID NO: 1909102 - RNA, 19 nt, Artificial Sequence
  Description of Artificial Sequence: Synthetic oligonucleotide
agagaucuuacaguuaagu

SEQ ID NO: 1909103 - RNA, 19 nt, Artificial Sequence
  Description of Artificial Sequence: Synthetic oligonucleotide
guaggcagaaaugcuaucc

SEQ ID NO: 1909104 - RNA, 19 nt, Artificial Sequence
  Description of Artificial Sequence: Synthetic oligonucleotide
uuaucauagcagcacuguc

SEQ ID NO: 1909105 - RNA, 19 nt, Artificial Sequence
  Description of Artificial Sequence: Synthetic oligonucleotide
aaaugcuauccaugcuuug

SEQ ID NO: 1909106 - RNA, 19 nt, Artificial Sequence
  Description of Artificial Sequence: Synthetic oligonucleotide
caugaagguaaucuuauaa

SEQ ID NO: 1909107 - RNA, 19 nt, Artificial Sequence
  Description of Artificial Sequence: Synthetic oligonucleotide
augaucaaauaauguauaa

SEQ ID NO: 1909108 - RNA, 19 nt, Artificial Sequence
  Description of Artificial Sequence: Synthetic oligonucleotide
ugcuuuggagaguagaguu

SEQ ID NO: 1909109 - RNA, 19 nt, Artificial Sequence
  Description of Artificial Sequence: Synthetic oligonucleotide
ugaaagcguggucacugag

SEQ ID NO: 1909110 - RNA, 19 nt, Artificial Sequence
  Description of Artificial Sequence: Synthetic oligonucleotide
uaguauuugguuucaguuu

SEQ ID NO: 1909111 - RNA, 19 nt, Artificial Sequence
  Description of Artificial Sequence: Synthetic oligonucleotide
gugugcacgguuaucauag

SEQ ID NO: 1909112 - RNA, 19 nt, Artificial Sequence
  Description of Artificial Sequence: Synthetic oligonucleotide
gcagaaaugcuauccaugc

SEQ ID NO: 1909113 - RNA, 19 nt, Artificial Sequence
  Description of Artificial Sequence: Synthetic oligonucleotide
uaaaucuuauggcuagcua

SEQ ID NO: 1909114 - RNA, 19 nt, Artificial Sequence
  Description of Artificial Sequence: Synthetic oligonucleotide
agaccuaugaucaaauaau

SEQ ID NO: 1909115 - RNA, 19 nt, Artificial Sequence
  Description of Artificial Sequence: Synthetic oligonucleotide
aucaacauccagcaccaga

SEQ ID NO: 1909116 - RNA, 19 nt, Artificial Sequence
  Description of Artificial Sequence: Synthetic oligonucleotide
ugcgagagaucuuacaguu

SEQ ID NO: 1909117 - RNA, 19 nt, Artificial Sequence
  Description of Artificial Sequence: Synthetic oligonucleotide
guagaguuggugaaugagc

SEQ ID NO: 1909118 - RNA, 19 nt, Artificial Sequence
  Description of Artificial Sequence: Synthetic oligonucleotide
ugaagucguagcuuucugu

SEQ ID NO: 1909119 - RNA, 19 nt, Artificial Sequence
  Description of Artificial Sequence: Synthetic oligonucleotide
auuacauaucugcaggcuu

SEQ ID NO: 1909120 - RNA, 19 nt, Artificial Sequence
  Description of Artificial Sequence: Synthetic oligonucleotide
ugcuugagauccagcacag

SEQ ID NO: 1909121 - RNA, 19 nt, Artificial Sequence
  Description of Artificial Sequence: Synthetic oligonucleotide
aagucguagcuuucuguca

SEQ ID NO: 1909122 - RNA, 19 nt, Artificial Sequence
  Description of Artificial Sequence: Synthetic oligonucleotide
gaccuaugaucaaauaaug

SEQ ID NO: 1909123 - RNA, 19 nt, Artificial Sequence
  Description of Artificial Sequence: Synthetic oligonucleotide
gucaacacaaaacaguggu

SEQ ID NO: 1909124 - RNA, 19 nt, Artificial Sequence
  Description of Artificial Sequence: Synthetic oligonucleotide
guuaguaguuagcaaugac

SEQ ID NO: 1909125 - RNA, 19 nt, Artificial Sequence
  Description of Artificial Sequence: Synthetic oligonucleotide
guuucaguuugagagcucc

SEQ ID NO: 1909126 - RNA, 19 nt, Artificial Sequence
  Description of Artificial Sequence: Synthetic oligonucleotide
uucauuuaagaggagcaau

SEQ ID NO: 1909127 - RNA, 19 nt, Artificial Sequence
  Description of Artificial Sequence: Synthetic oligonucleotide
aauguauaaucaacaucca

SEQ ID NO: 1909128 - RNA, 19 nt, Artificial Sequence
  Description of Artificial Sequence: Synthetic oligonucleotide
acuucauauuuguugcaga

SEQ ID NO: 1909129 - RNA, 19 nt, Artificial Sequence
  Description of Artificial Sequence: Synthetic oligonucleotide
ucaacacaaaacagugguc

SEQ ID NO: 1909130 - RNA, 19 nt, Artificial Sequence
  Description of Artificial Sequence: Synthetic oligonucleotide
uccaagcauaugaagucgu

SEQ ID NO: 1909131 - RNA, 19 nt, Artificial Sequence
  Description of Artificial Sequence: Synthetic oligonucleotide
uuuuaggcagaagugcuuc

SEQ ID NO: 1909132 - RNA, 19 nt, Artificial Sequence
  Description of Artificial Sequence: Synthetic oligonucleotide
acgaguucccaucaucaug

SEQ ID NO: 1909133 - RNA, 19 nt, Artificial Sequence
  Description of Artificial Sequence: Synthetic oligonucleotide
uuuaaaucuuauggcuagc

SEQ ID NO: 1909134 - RNA, 19 nt, Artificial Sequence
  Description of Artificial Sequence: Synthetic oligonucleotide
aacucuaccccagucucug

SEQ ID NO: 1909135 - RNA, 19 nt, Artificial Sequence
  Description of Artificial Sequence: Synthetic oligonucleotide
aguccuguaagaacaaugu

SEQ ID NO: 1909136 - RNA, 19 nt, Artificial Sequence
  Description of Artificial Sequence: Synthetic oligonucleotide
uguuaguaguuagcaauga

SEQ ID NO: 1909137 - RNA, 19 nt, Artificial Sequence
  Description of Artificial Sequence: Synthetic oligonucleotide
guuacuccuugacucugcg

SEQ ID NO: 1909138 - RNA, 19 nt, Artificial Sequence
  Description of Artificial Sequence: Synthetic oligonucleotide
acaguggucacauuacaua

SEQ ID NO: 1909139 - RNA, 19 nt, Artificial Sequence
  Description of Artificial Sequence: Synthetic oligonucleotide
auuucacaaugauggggag

SEQ ID NO: 1909140 - RNA, 19 nt, Artificial Sequence
  Description of Artificial Sequence: Synthetic oligonucleotide
uguuacuccuugacucugc

SEQ ID NO: 1909141 - RNA, 19 nt, Artificial Sequence
  Description of Artificial Sequence: Synthetic oligonucleotide
cuuugagaccaguaauuuc

SEQ ID NO: 1909142 - RNA, 19 nt, Artificial Sequence
  Description of Artificial Sequence: Synthetic oligonucleotide
cuaugaucaaauaauguau

SEQ ID NO: 1909143 - RNA, 19 nt, Artificial Sequence
  Description of Artificial Sequence: Synthetic oligonucleotide
auggggagcgccauucucc

SEQ ID NO: 1909144 - RNA, 19 nt, Artificial Sequence
  Description of Artificial Sequence: Synthetic oligonucleotide
gaacuguauaaagcaauac

SEQ ID NO: 1909145 - RNA, 19 nt, Artificial Sequence
  Description of Artificial Sequence: Synthetic oligonucleotide
caagcauaugaagucguag

SEQ ID NO: 1909146 - RNA, 19 nt, Artificial Sequence
  Description of Artificial Sequence: Synthetic oligonucleotide
uuccaagcucuccucacga

SEQ ID NO: 1909147 - RNA, 19 nt, Artificial Sequence
  Description of Artificial Sequence: Synthetic oligonucleotide
augucauaaucuucauaug

SEQ ID NO: 1909148 - RNA, 19 nt, Artificial Sequence
  Description of Artificial Sequence: Synthetic oligonucleotide
agcuccaagcuuaacauca

SEQ ID NO: 1909149 - RNA, 19 nt, Artificial Sequence
  Description of Artificial Sequence: Synthetic oligonucleotide
uuuuaguauuugguuucag

SEQ ID NO: 1909150 - RNA, 19 nt, Artificial Sequence
  Description of Artificial Sequence: Synthetic oligonucleotide
auguuagaaauuucaugaa

SEQ ID NO: 1909151 - RNA, 19 nt, Artificial Sequence
  Description of Artificial Sequence: Synthetic oligonucleotide
ugguuucaguuugagagcu

SEQ ID NO: 1909152 - RNA, 19 nt, Artificial Sequence
  Description of Artificial Sequence: Synthetic oligonucleotide
uauggcuagcuauguuugc

SEQ ID NO: 1909153 - RNA, 19 nt, Artificial Sequence
  Description of Artificial Sequence: Synthetic oligonucleotide
aagcguggucacugaguac

SEQ ID NO: 1909154 - RNA, 19 nt, Artificial Sequence
  Description of Artificial Sequence: Synthetic oligonucleotide
agcguggucacugaguacu

SEQ ID NO: 1909155 - RNA, 19 nt, Artificial Sequence
  Description of Artificial Sequence: Synthetic oligonucleotide
cauuuaagaggagcaauuc

SEQ ID NO: 1909156 - RNA, 19 nt, Artificial Sequence
  Description of Artificial Sequence: Synthetic oligonucleotide
cuuccaagcucuccucacg

SEQ ID NO: 1909157 - RNA, 19 nt, Artificial Sequence
  Description of Artificial Sequence: Synthetic oligonucleotide
guaaucuuauaauuggcau

SEQ ID NO: 1909158 - RNA, 19 nt, Artificial Sequence
  Description of Artificial Sequence: Synthetic oligonucleotide
ugcaggcuuaagcauugca

SEQ ID NO: 1909159 - RNA, 19 nt, Artificial Sequence
  Description of Artificial Sequence: Synthetic oligonucleotide
aauucccuucaaauacaag

SEQ ID NO: 1909160 - RNA, 19 nt, Artificial Sequence
  Description of Artificial Sequence: Synthetic oligonucleotide
cugaaauaguccuguaaga

SEQ ID NO: 1909161 - RNA, 19 nt, Artificial Sequence
  Description of Artificial Sequence: Synthetic oligonucleotide
uucacaucaaugagcccuc

SEQ ID NO: 1909162 - RNA, 19 nt, Artificial Sequence
  Description of Artificial Sequence: Synthetic oligonucleotide
ucauuaacucuaccccagu

SEQ ID NO: 1909163 - RNA, 19 nt, Artificial Sequence
  Description of Artificial Sequence: Synthetic oligonucleotide
ugaguacuccugcccaccc

SEQ ID NO: 1909164 - RNA, 19 nt, Artificial Sequence
  Description of Artificial Sequence: Synthetic oligonucleotide
agauauggucucauuaacu

SEQ ID NO: 1909165 - RNA, 19 nt, Artificial Sequence
  Description of Artificial Sequence: Synthetic oligonucleotide
gaucuuacaguuaaguuuu

SEQ ID NO: 1909166 - RNA, 19 nt, Artificial Sequence
  Description of Artificial Sequence: Synthetic oligonucleotide
aucuucugaaagcgugguc

SEQ ID NO: 1909167 - RNA, 19 nt, Artificial Sequence
  Description of Artificial Sequence: Synthetic oligonucleotide
ggugaaugagccuuuucac

SEQ ID NO: 1909168 - RNA, 19 nt, Artificial Sequence
  Description of Artificial Sequence: Synthetic oligonucleotide
ugcaaugguguuaguaguu

SEQ ID NO: 1909169 - RNA, 19 nt, Artificial Sequence
  Description of Artificial Sequence: Synthetic oligonucleotide
augauggggagcgccauuc

SEQ ID NO: 1909170 - RNA, 19 nt, Artificial Sequence
  Description of Artificial Sequence: Synthetic oligonucleotide
uggcuagcuauguuugcug

SEQ ID NO: 1909171 - RNA, 19 nt, Artificial Sequence
  Description of Artificial Sequence: Synthetic oligonucleotide
guguuaguaguuagcaaug

SEQ ID NO: 1909172 - RNA, 19 nt, Artificial Sequence
  Description of Artificial Sequence: Synthetic oligonucleotide
auguuugcugcaauggugu

SEQ ID NO: 1909173 - RNA, 19 nt, Artificial Sequence
  Description of Artificial Sequence: Synthetic oligonucleotide
aagaggcuucacaucaaug

SEQ ID NO: 1909174 - RNA, 19 nt, Artificial Sequence
  Description of Artificial Sequence: Synthetic oligonucleotide
gaccaaauaacaaugucau

SEQ ID NO: 1909175 - RNA, 19 nt, Artificial Sequence
  Description of Artificial Sequence: Synthetic oligonucleotide
aauuggcauuugugcucac

SEQ ID NO: 1909176 - RNA, 19 nt, Artificial Sequence
  Description of Artificial Sequence: Synthetic oligonucleotide
ccauguucauuuaagagga

SEQ ID NO: 1909177 - RNA, 19 nt, Artificial Sequence
  Description of Artificial Sequence: Synthetic oligonucleotide
cuguauaaagcaauacugu

SEQ ID NO: 1909178 - RNA, 19 nt, Artificial Sequence
  Description of Artificial Sequence: Synthetic oligonucleotide
ugggagcacuccuguaagg

SEQ ID NO: 1909179 - RNA, 19 nt, Artificial Sequence
  Description of Artificial Sequence: Synthetic oligonucleotide
cuucugaaagcguggucac

SEQ ID NO: 1909180 - RNA, 19 nt, Artificial Sequence
  Description of Artificial Sequence: Synthetic oligonucleotide
cauuaacucuaccccaguc

SEQ ID NO: 1909181 - RNA, 19 nt, Artificial Sequence
  Description of Artificial Sequence: Synthetic oligonucleotide
uauuuacaccacugaaaua

SEQ ID NO: 1909182 - RNA, 19 nt, Artificial Sequence
  Description of Artificial Sequence: Synthetic oligonucleotide
gcaaguaacagguauuuua

SEQ ID NO: 1909183 - RNA, 19 nt, Artificial Sequence
  Description of Artificial Sequence: Synthetic oligonucleotide
uccucacgaguucccauca

SEQ ID NO: 1909184 - RNA, 19 nt, Artificial Sequence
  Description of Artificial Sequence: Synthetic oligonucleotide
aaugagcccucuccuugga

SEQ ID NO: 1909185 - RNA, 19 nt, Artificial Sequence
  Description of Artificial Sequence: Synthetic oligonucleotide
uucaguuugagagcuccaa

SEQ ID NO: 1909186 - RNA, 19 nt, Artificial Sequence
  Description of Artificial Sequence: Synthetic oligonucleotide
gguuuugccuuuaacuuug

SEQ ID NO: 1909187 - RNA, 19 nt, Artificial Sequence
  Description of Artificial Sequence: Synthetic oligonucleotide
gucacauuacauaucugca

SEQ ID NO: 1909188 - RNA, 19 nt, Artificial Sequence
  Description of Artificial Sequence: Synthetic oligonucleotide
aguggucacauuacauauc

SEQ ID NO: 1909189 - RNA, 19 nt, Artificial Sequence
  Description of Artificial Sequence: Synthetic oligonucleotide
auuuuaguauuugguuuca

SEQ ID NO: 1909190 - RNA, 19 nt, Artificial Sequence
  Description of Artificial Sequence: Synthetic oligonucleotide
aauaguccuguaagaacaa

SEQ ID NO: 1909191 - RNA, 19 nt, Artificial Sequence
  Description of Artificial Sequence: Synthetic oligonucleotide
cuucacaucaaugagcccu

SEQ ID NO: 1909192 - RNA, 19 nt, Artificial Sequence
  Description of Artificial Sequence: Synthetic oligonucleotide
uaacucuaccccagucucu

SEQ ID NO: 1909193 - RNA, 19 nt, Artificial Sequence
  Description of Artificial Sequence: Synthetic oligonucleotide
ugguguuaguaguuagcaa

SEQ ID NO: 1909194 - RNA, 19 nt, Artificial Sequence
  Description of Artificial Sequence: Synthetic oligonucleotide
uggucucauuaacucuacc

SEQ ID NO: 1909195 - RNA, 19 nt, Artificial Sequence
  Description of Artificial Sequence: Synthetic oligonucleotide
ucuuauggcuagcuauguu

SEQ ID NO: 1909196 - RNA, 19 nt, Artificial Sequence
  Description of Artificial Sequence: Synthetic oligonucleotide
cuuuccccaaaugacacca

SEQ ID NO: 1909197 - RNA, 19 nt, Artificial Sequence
  Description of Artificial Sequence: Synthetic oligonucleotide
uccaagcucuccucacgag

SEQ ID NO: 1909198 - RNA, 19 nt, Artificial Sequence
  Description of Artificial Sequence: Synthetic oligonucleotide
gguguuaguaguuagcaau

SEQ ID NO: 1909199 - RNA, 19 nt, Artificial Sequence
  Description of Artificial Sequence: Synthetic oligonucleotide
ccccaaaugacaccaagag

SEQ ID NO: 1909200 - RNA, 19 nt, Artificial Sequence
  Description of Artificial Sequence: Synthetic oligonucleotide
uuuggagaguagaguuggu

SEQ ID NO: 1909201 - RNA, 19 nt, Artificial Sequence
  Description of Artificial Sequence: Synthetic oligonucleotide
uaagaggagcaauucccuu

SEQ ID NO: 1909202 - RNA, 19 nt, Artificial Sequence
  Description of Artificial Sequence: Synthetic oligonucleotide
gagcccucuccuuggagug

SEQ ID NO: 1909203 - RNA, 19 nt, Artificial Sequence
  Description of Artificial Sequence: Synthetic oligonucleotide
ucuaccccagucucugcac

SEQ ID NO: 1909204 - RNA, 19 nt, Artificial Sequence
  Description of Artificial Sequence: Synthetic oligonucleotide
uuguuacuccuugacucug

SEQ ID NO: 1909205 - RNA, 19 nt, Artificial Sequence
  Description of Artificial Sequence: Synthetic oligonucleotide
gcacgguuaucauagcagc

SEQ ID NO: 1909206 - RNA, 19 nt, Artificial Sequence
  Description of Artificial Sequence: Synthetic oligonucleotide
guugcagaccaaauaacaa

SEQ ID NO: 1909207 - RNA, 19 nt, Artificial Sequence
  Description of Artificial Sequence: Synthetic oligonucleotide
agauccagcacaguaucau

SEQ ID NO: 1909208 - RNA, 19 nt, Artificial Sequence
  Description of Artificial Sequence: Synthetic oligonucleotide
aacagguauuuuaaaucuu

SEQ ID NO: 1909209 - RNA, 19 nt, Artificial Sequence
  Description of Artificial Sequence: Synthetic oligonucleotide
agcaugaagguaaucuuau

SEQ ID NO: 1909210 - RNA, 19 nt, Artificial Sequence
  Description of Artificial Sequence: Synthetic oligonucleotide
acacacagcuggaguaggc

SEQ ID NO: 1909211 - RNA, 19 nt, Artificial Sequence
  Description of Artificial Sequence: Synthetic oligonucleotide
cccaaaugacaccaagagg

SEQ ID NO: 1909212 - RNA, 19 nt, Artificial Sequence
  Description of Artificial Sequence: Synthetic oligonucleotide
cucacgaguucccaucauc

SEQ ID NO: 1909213 - RNA, 19 nt, Artificial Sequence
  Description of Artificial Sequence: Synthetic oligonucleotide
cacuacugcauaagcugug

SEQ ID NO: 1909214 - RNA, 19 nt, Artificial Sequence
  Description of Artificial Sequence: Synthetic oligonucleotide
aggcagaagugcuucuacu

SEQ ID NO: 1909215 - RNA, 19 nt, Artificial Sequence
  Description of Artificial Sequence: Synthetic oligonucleotide
cuuauggcuagcuauguuu

SEQ ID NO: 1909216 - RNA, 19 nt, Artificial Sequence
  Description of Artificial Sequence: Synthetic oligonucleotide
cuccuugacucugcgagag

SEQ ID NO: 1909217 - RNA, 19 nt, Artificial Sequence
  Description of Artificial Sequence: Synthetic oligonucleotide
aaugauggggagcgccauu

SEQ ID NO: 1909218 - RNA, 19 nt, Artificial Sequence
  Description of Artificial Sequence: Synthetic oligonucleotide
gagaucuuacaguuaaguu

SEQ ID NO: 1909219 - RNA, 19 nt, Artificial Sequence
  Description of Artificial Sequence: Synthetic oligonucleotide
gauggggagcgccauucuc

SEQ ID NO: 1909220 - RNA, 19 nt, Artificial Sequence
  Description of Artificial Sequence: Synthetic oligonucleotide
uuacuccuugacucugcga

SEQ ID NO: 1909221 - RNA, 19 nt, Artificial Sequence
  Description of Artificial Sequence: Synthetic oligonucleotide
uaagaacaauguacaccau

SEQ ID NO: 1909222 - RNA, 19 nt, Artificial Sequence
  Description of Artificial Sequence: Synthetic oligonucleotide
uguacaccauguucauuua

SEQ ID NO: 1909223 - RNA, 19 nt, Artificial Sequence
  Description of Artificial Sequence: Synthetic oligonucleotide
auggcuagcuauguuugcu

SEQ ID NO: 1909224 - RNA, 19 nt, Artificial Sequence
  Description of Artificial Sequence: Synthetic oligonucleotide
gagagaucuuacaguuaag

SEQ ID NO: 1909225 - RNA, 19 nt, Artificial Sequence
  Description of Artificial Sequence: Synthetic oligonucleotide
cauaugaagucguagcuuu

SEQ ID NO: 1909226 - RNA, 19 nt, Artificial Sequence
  Description of Artificial Sequence: Synthetic oligonucleotide
gaguagaguuggugaauga

SEQ ID NO: 1909227 - RNA, 19 nt, Artificial Sequence
  Description of Artificial Sequence: Synthetic oligonucleotide
gagcacuccuguaaggguc

SEQ ID NO: 1909228 - RNA, 19 nt, Artificial Sequence
  Description of Artificial Sequence: Synthetic oligonucleotide
ucucugcacaagaccuaug

SEQ ID NO: 1909229 - RNA, 19 nt, Artificial Sequence
  Description of Artificial Sequence: Synthetic oligonucleotide
uggggagcgccauucucca

SEQ ID NO: 1909230 - RNA, 19 nt, Artificial Sequence
  Description of Artificial Sequence: Synthetic oligonucleotide
ggcagaaaugcuauccaug

SEQ ID NO: 1909231 - RNA, 19 nt, Artificial Sequence
  Description of Artificial Sequence: Synthetic oligonucleotide
ugugcacgguuaucauagc

SEQ ID NO: 1909232 - RNA, 19 nt, Artificial Sequence
  Description of Artificial Sequence: Synthetic oligonucleotide
gggagcgccauucuccaag

SEQ ID NO: 1909233 - RNA, 19 nt, Artificial Sequence
  Description of Artificial Sequence: Synthetic oligonucleotide
uuggagugugcacgguuau

SEQ ID NO: 1909234 - RNA, 19 nt, Artificial Sequence
  Description of Artificial Sequence: Synthetic oligonucleotide
augaagauauggucucauu

SEQ ID NO: 1909235 - RNA, 19 nt, Artificial Sequence
  Description of Artificial Sequence: Synthetic oligonucleotide
acaagaccuaugaucaaau

SEQ ID NO: 1909236 - RNA, 19 nt, Artificial Sequence
  Description of Artificial Sequence: Synthetic oligonucleotide
ggcuagcuauguuugcugc

SEQ ID NO: 1909237 - RNA, 19 nt, Artificial Sequence
  Description of Artificial Sequence: Synthetic oligonucleotide
caaugacacacagcuggag

SEQ ID NO: 1909238 - RNA, 19 nt, Artificial Sequence
  Description of Artificial Sequence: Synthetic oligonucleotide
cuccucacgaguucccauc

SEQ ID NO: 1909239 - RNA, 19 nt, Artificial Sequence
  Description of Artificial Sequence: Synthetic oligonucleotide
gagcuccaagcuuaacauc

SEQ ID NO: 1909240 - RNA, 19 nt, Artificial Sequence
  Description of Artificial Sequence: Synthetic oligonucleotide
ggagcaauucccuucaaau

SEQ ID NO: 1909241 - RNA, 19 nt, Artificial Sequence
  Description of Artificial Sequence: Synthetic oligonucleotide
gacucugcgagagaucuua

SEQ ID NO: 1909242 - RNA, 19 nt, Artificial Sequence
  Description of Artificial Sequence: Synthetic oligonucleotide
aucuuauggcuagcuaugu

SEQ ID NO: 1909243 - RNA, 19 nt, Artificial Sequence
  Description of Artificial Sequence: Synthetic oligonucleotide
accaaauaacaaugucaua

SEQ ID NO: 1909244 - RNA, 19 nt, Artificial Sequence
  Description of Artificial Sequence: Synthetic oligonucleotide
ugauggggagcgccauucu

SEQ ID NO: 1909245 - RNA, 19 nt, Artificial Sequence
  Description of Artificial Sequence: Synthetic oligonucleotide
guucauuuaagaggagcaa

SEQ ID NO: 1909246 - RNA, 19 nt, Artificial Sequence
  Description of Artificial Sequence: Synthetic oligonucleotide
acuccuugacucugcgaga

SEQ ID NO: 1909247 - RNA, 19 nt, Artificial Sequence
  Description of Artificial Sequence: Synthetic oligonucleotide
cagucucugcacaagaccu

SEQ ID NO: 1909248 - RNA, 19 nt, Artificial Sequence
  Description of Artificial Sequence: Synthetic oligonucleotide
gugcacgguuaucauagca

SEQ ID NO: 1909249 - RNA, 19 nt, Artificial Sequence
  Description of Artificial Sequence: Synthetic oligonucleotide
cacgguuaucauagcagca

SEQ ID NO: 1909250 - RNA, 19 nt, Artificial Sequence
  Description of Artificial Sequence: Synthetic oligonucleotide
aagcugugcuucauuacua

SEQ ID NO: 1909251 - RNA, 19 nt, Artificial Sequence
  Description of Artificial Sequence: Synthetic oligonucleotide
cagguuuugccuuuaacuu

SEQ ID NO: 1909252 - RNA, 19 nt, Artificial Sequence
  Description of Artificial Sequence: Synthetic oligonucleotide
uuuccccaaaugacaccaa

SEQ ID NO: 1909253 - RNA, 19 nt, Artificial Sequence
  Description of Artificial Sequence: Synthetic oligonucleotide
cagcaugaagguaaucuua

SEQ ID NO: 1909254 - RNA, 19 nt, Artificial Sequence
  Description of Artificial Sequence: Synthetic oligonucleotide
agcuucaauccacuucaua

SEQ ID NO: 1909255 - RNA, 19 nt, Artificial Sequence
  Description of Artificial Sequence: Synthetic oligonucleotide
uucccugggaggguucagc

SEQ ID NO: 1909256 - RNA, 19 nt, Artificial Sequence
  Description of Artificial Sequence: Synthetic oligonucleotide
acuaugguuuuaggcagaa

SEQ ID NO: 1909257 - RNA, 19 nt, Artificial Sequence
  Description of Artificial Sequence: Synthetic oligonucleotide
ucguagcuuucugucagaa

SEQ ID NO: 1909258 - RNA, 19 nt, Artificial Sequence
  Description of Artificial Sequence: Synthetic oligonucleotide
caaaaucguugaugacauc

SEQ ID NO: 1909259 - RNA, 19 nt, Artificial Sequence
  Description of Artificial Sequence: Synthetic oligonucleotide
cuaugguuuuaggcagaag

SEQ ID NO: 1909260 - RNA, 19 nt, Artificial Sequence
  Description of Artificial Sequence: Synthetic oligonucleotide
gaaagcguggucacugagu

SEQ ID NO: 1909261 - RNA, 19 nt, Artificial Sequence
  Description of Artificial Sequence: Synthetic oligonucleotide
caguggucacauuacauau

SEQ ID NO: 1909262 - RNA, 19 nt, Artificial Sequence
  Description of Artificial Sequence: Synthetic oligonucleotide
gcuuaagcauugcaaguaa

SEQ ID NO: 1909263 - RNA, 19 nt, Artificial Sequence
  Description of Artificial Sequence: Synthetic oligonucleotide
acucugcgagagaucuuac

SEQ ID NO: 1909264 - RNA, 19 nt, Artificial Sequence
  Description of Artificial Sequence: Synthetic oligonucleotide
auaguccuguaagaacaau

SEQ ID NO: 1909265 - RNA, 19 nt, Artificial Sequence
  Description of Artificial Sequence: Synthetic oligonucleotide
guccuguaagaacaaugua

SEQ ID NO: 1909266 - RNA, 19 nt, Artificial Sequence
  Description of Artificial Sequence: Synthetic oligonucleotide
cccuauuuucuacuucaac

SEQ ID NO: 1909267 - RNA, 19 nt, Artificial Sequence
  Description of Artificial Sequence: Synthetic oligonucleotide
gaguaggcagaaaugcuau

SEQ ID NO: 1909268 - RNA, 19 nt, Artificial Sequence
  Description of Artificial Sequence: Synthetic oligonucleotide
caagaccuaugaucaaaua

SEQ ID NO: 1909269 - RNA, 19 nt, Artificial Sequence
  Description of Artificial Sequence: Synthetic oligonucleotide
cauuacauaucugcaggcu

SEQ ID NO: 1909270 - RNA, 19 nt, Artificial Sequence
  Description of Artificial Sequence: Synthetic oligonucleotide
cugaaagcguggucacuga

SEQ ID NO: 1909271 - RNA, 19 nt, Artificial Sequence
  Description of Artificial Sequence: Synthetic oligonucleotide
ggagcgccauucuccaagc

SEQ ID NO: 1909272 - RNA, 19 nt, Artificial Sequence
  Description of Artificial Sequence: Synthetic oligonucleotide
agcacuccuguaagggucu

SEQ ID NO: 1909273 - RNA, 19 nt, Artificial Sequence
  Description of Artificial Sequence: Synthetic oligonucleotide
guauuugguuucaguuuga

SEQ ID NO: 1909274 - RNA, 19 nt, Artificial Sequence
  Description of Artificial Sequence: Synthetic oligonucleotide
gguuuuaggcagaagugcu

SEQ ID NO: 1909275 - RNA, 19 nt, Artificial Sequence
  Description of Artificial Sequence: Synthetic oligonucleotide
ggaguaggcagaaaugcua

SEQ ID NO: 1909276 - RNA, 19 nt, Artificial Sequence
  Description of Artificial Sequence: Synthetic oligonucleotide
guuugagagcuccaagcuu

SEQ ID NO: 1909277 - RNA, 19 nt, Artificial Sequence
  Description of Artificial Sequence: Synthetic oligonucleotide
gcuagcuauguuugcugca

SEQ ID NO: 1909278 - RNA, 19 nt, Artificial Sequence
  Description of Artificial Sequence: Synthetic oligonucleotide
ugagagcuccaagcuuaac

SEQ ID NO: 1909279 - RNA, 19 nt, Artificial Sequence
  Description of Artificial Sequence: Synthetic oligonucleotide
cgagagaucuuacaguuaa

SEQ ID NO: 1909280 - RNA, 19 nt, Artificial Sequence
  Description of Artificial Sequence: Synthetic oligonucleotide
uggagugugcacgguuauc

SEQ ID NO: 1909281 - RNA, 19 nt, Artificial Sequence
  Description of Artificial Sequence: Synthetic oligonucleotide
cacacagcuggaguaggca

SEQ ID NO: 1909282 - RNA, 19 nt, Artificial Sequence
  Description of Artificial Sequence: Synthetic oligonucleotide
cuguaagggucuugaggaa

SEQ ID NO: 1909283 - RNA, 19 nt, Artificial Sequence
  Description of Artificial Sequence: Synthetic oligonucleotide
cagaagugcuucuacuuuu

SEQ ID NO: 1909284 - RNA, 19 nt, Artificial Sequence
  Description of Artificial Sequence: Synthetic oligonucleotide
gcacaguaucaucuucuga

SEQ ID NO: 1909285 - RNA, 19 nt, Artificial Sequence
  Description of Artificial Sequence: Synthetic oligonucleotide
caacuauuucaucuucaau

SEQ ID NO: 1909286 - RNA, 19 nt, Artificial Sequence
  Description of Artificial Sequence: Synthetic oligonucleotide
caucauugucaggggagga

SEQ ID NO: 1909287 - RNA, 19 nt, Artificial Sequence
  Description of Artificial Sequence: Synthetic oligonucleotide
gagaguagaguuggugaau

SEQ ID NO: 1909288 - RNA, 19 nt, Artificial Sequence
  Description of Artificial Sequence: Synthetic oligonucleotide
gcuucacaucaaugagccc

SEQ ID NO: 1909289 - RNA, 19 nt, Artificial Sequence
  Description of Artificial Sequence: Synthetic oligonucleotide
uggcgcucugggagcacuc

SEQ ID NO: 1909290 - RNA, 19 nt, Artificial Sequence
  Description of Artificial Sequence: Synthetic oligonucleotide
agucucugcacaagaccua

SEQ ID NO: 1909291 - RNA, 19 nt, Artificial Sequence
  Description of Artificial Sequence: Synthetic oligonucleotide
ggcagaagugcuucuacuu

SEQ ID NO: 1909292 - RNA, 19 nt, Artificial Sequence
  Description of Artificial Sequence: Synthetic oligonucleotide
caugaagauauggucucau

SEQ ID NO: 1909293 - RNA, 19 nt, Artificial Sequence
  Description of Artificial Sequence: Synthetic oligonucleotide
guuuugccuuuaacuuuga

SEQ ID NO: 1909294 - RNA, 19 nt, Artificial Sequence
  Description of Artificial Sequence: Synthetic oligonucleotide
uucccuucccugggagggu

SEQ ID NO: 1909295 - RNA, 19 nt, Artificial Sequence
  Description of Artificial Sequence: Synthetic oligonucleotide
cacuguccagcaugaaggu

SEQ ID NO: 1909296 - RNA, 19 nt, Artificial Sequence
  Description of Artificial Sequence: Synthetic oligonucleotide
gaggagcaauucccuucaa

SEQ ID NO: 1909297 - RNA, 19 nt, Artificial Sequence
  Description of Artificial Sequence: Synthetic oligonucleotide
cguagcuuucugucagaac

SEQ ID NO: 1909298 - RNA, 19 nt, Artificial Sequence
  Description of Artificial Sequence: Synthetic oligonucleotide
gcaugaagguaaucuuaua

SEQ ID NO: 1909299 - RNA, 19 nt, Artificial Sequence
  Description of Artificial Sequence: Synthetic oligonucleotide
ccaguaauuucuggcgcuc

SEQ ID NO: 1909300 - RNA, 19 nt, Artificial Sequence
  Description of Artificial Sequence: Synthetic oligonucleotide
gucucugcacaagaccuau

SEQ ID NO: 1909301 - RNA, 19 nt, Artificial Sequence
  Description of Artificial Sequence: Synthetic oligonucleotide
gugcuucauuacuaugguu

SEQ ID NO: 1909302 - RNA, 19 nt, Artificial Sequence
  Description of Artificial Sequence: Synthetic oligonucleotide
gcgccauucuccaagcaua

SEQ ID NO: 1909303 - RNA, 19 nt, Artificial Sequence
  Description of Artificial Sequence: Synthetic oligonucleotide
ucuggcgcucugggagcac

SEQ ID NO: 1909304 - RNA, 19 nt, Artificial Sequence
  Description of Artificial Sequence: Synthetic oligonucleotide
gguuucaguuugagagcuc

SEQ ID NO: 1909305 - RNA, 19 nt, Artificial Sequence
  Description of Artificial Sequence: Synthetic oligonucleotide
ccaagcauaugaagucgua

SEQ ID NO: 1909306 - RNA, 19 nt, Artificial Sequence
  Description of Artificial Sequence: Synthetic oligonucleotide
caguaauuucuggcgcucu

SEQ ID NO: 1909307 - RNA, 19 nt, Artificial Sequence
  Description of Artificial Sequence: Synthetic oligonucleotide
gcauaugaagucguagcuu

SEQ ID NO: 1909308 - RNA, 19 nt, Artificial Sequence
  Description of Artificial Sequence: Synthetic oligonucleotide
gcaauacugucaacacaaa

SEQ ID NO: 1909309 - RNA, 19 nt, Artificial Sequence
  Description of Artificial Sequence: Synthetic oligonucleotide
ccagcaugaagguaaucuu

SEQ ID NO: 1909310 - RNA, 19 nt, Artificial Sequence
  Description of Artificial Sequence: Synthetic oligonucleotide
ccaagcucuccucacgagu

SEQ ID NO: 1909311 - RNA, 19 nt, Artificial Sequence
  Description of Artificial Sequence: Synthetic oligonucleotide
ccaagaggcuucacaucaa

SEQ ID NO: 1909312 - RNA, 19 nt, Artificial Sequence
  Description of Artificial Sequence: Synthetic oligonucleotide
guuggugaaugagccuuuu

SEQ ID NO: 1909313 - RNA, 19 nt, Artificial Sequence
  Description of Artificial Sequence: Synthetic oligonucleotide
gcauaagcugugcuucauu

SEQ ID NO: 1909314 - RNA, 19 nt, Artificial Sequence
  Description of Artificial Sequence: Synthetic oligonucleotide
caaugauggggagcgccau

SEQ ID NO: 1909315 - RNA, 19 nt, Artificial Sequence
  Description of Artificial Sequence: Synthetic oligonucleotide
gcgagagaucuuacaguua

SEQ ID NO: 1909316 - RNA, 19 nt, Artificial Sequence
  Description of Artificial Sequence: Synthetic oligonucleotide
gcauugcaaguaacaggua

SEQ ID NO: 1909317 - RNA, 19 nt, Artificial Sequence
  Description of Artificial Sequence: Synthetic oligonucleotide
cuggcgcucugggagcacu

SEQ ID NO: 1909318 - RNA, 19 nt, Artificial Sequence
  Description of Artificial Sequence: Synthetic oligonucleotide
ggggagcgccauucuccaa

SEQ ID NO: 1909319 - RNA, 19 nt, Artificial Sequence
  Description of Artificial Sequence: Synthetic oligonucleotide
ccuuggagugugcacgguu

SEQ ID NO: 1909320 - RNA, 19 nt, Artificial Sequence
  Description of Artificial Sequence: Synthetic oligonucleotide
ccucacgaguucccaucau

SEQ ID NO: 1909321 - RNA, 19 nt, Artificial Sequence
  Description of Artificial Sequence: Synthetic oligonucleotide
aacaggauugaugugaucc

SEQ ID NO: 1909322 - RNA, 19 nt, Artificial Sequence
  Description of Artificial Sequence: Synthetic oligonucleotide
agaucuacaugucagaggg

SEQ ID NO: 1909323 - RNA, 19 nt, Artificial Sequence
  Description of Artificial Sequence: Synthetic oligonucleotide
  modified_base (3)..(3): a, c, u, g, unknown or other
ugnguuucaucaaugagag

SEQ ID NO: 1909324 - RNA, 19 nt, Artificial Sequence
  Description of Artificial Sequence: Synthetic oligonucleotide
auuaguguaucuuagugag

SEQ ID NO: 1909325 - RNA, 19 nt, Artificial Sequence
  Description of Artificial Sequence: Synthetic oligonucleotide
uguguuaccagguuuacag

SEQ ID NO: 1909326 - RNA, 19 nt, Artificial Sequence
  Description of Artificial Sequence: Synthetic oligonucleotide
  modified_base (4)..(4): a, c, u, g, unknown or other
uugnguuucaucaaugaga

SEQ ID NO: 1909327 - RNA, 19 nt, Artificial Sequence
  Description of Artificial Sequence: Synthetic oligonucleotide
uauaacgaagucauguucc

SEQ ID NO: 1909328 - RNA, 19 nt, Artificial Sequence
  Description of Artificial Sequence: Synthetic oligonucleotide
ugaaucuugguuaaguugu

SEQ ID NO: 1909329 - RNA, 19 nt, Artificial Sequence
  Description of Artificial Sequence: Synthetic oligonucleotide
aauuaguguaucuuaguga

SEQ ID NO: 1909330 - RNA, 19 nt, Artificial Sequence
  Description of Artificial Sequence: Synthetic oligonucleotide
aaagcacuguaccagguag

SEQ ID NO: 1909331 - RNA, 19 nt, Artificial Sequence
  Description of Artificial Sequence: Synthetic oligonucleotide
aauccggucuaaguuaucc

SEQ ID NO: 1909332 - RNA, 19 nt, Artificial Sequence
  Description of Artificial Sequence: Synthetic oligonucleotide
agacaugugaccaugggcc

SEQ ID NO: 1909333 - RNA, 19 nt, Artificial Sequence
  Description of Artificial Sequence: Synthetic oligonucleotide
uuaaguugugucagcaagg

SEQ ID NO: 1909334 - RNA, 19 nt, Artificial Sequence
  Description of Artificial Sequence: Synthetic oligonucleotide
  modified_base (5)..(5): a, c, u, g, unknown or other
uuugnguuucaucaaugag

SEQ ID NO: 1909335 - RNA, 19 nt, Artificial Sequence
  Description of Artificial Sequence: Synthetic oligonucleotide
auucaguaguuucacaguc

SEQ ID NO: 1909336 - RNA, 19 nt, Artificial Sequence
  Description of Artificial Sequence: Synthetic oligonucleotide
gucuaaguuauccaggaag

SEQ ID NO: 1909337 - RNA, 19 nt, Artificial Sequence
  Description of Artificial Sequence: Synthetic oligonucleotide
ucgaauauguucauagacu

SEQ ID NO: 1909338 - RNA, 19 nt, Artificial Sequence
  Description of Artificial Sequence: Synthetic oligonucleotide
uuacagaucaacaccagaa

SEQ ID NO: 1909339 - RNA, 19 nt, Artificial Sequence
  Description of Artificial Sequence: Synthetic oligonucleotide
aguaguuucacaguccccg

SEQ ID NO: 1909340 - RNA, 19 nt, Artificial Sequence
  Description of Artificial Sequence: Synthetic oligonucleotide
gacaccaugaacaggauug

SEQ ID NO: 1909341 - RNA, 19 nt, Artificial Sequence
  Description of Artificial Sequence: Synthetic oligonucleotide
uccacgauucccuuagugg

SEQ ID NO: 1909342 - RNA, 19 nt, Artificial Sequence
  Description of Artificial Sequence: Synthetic oligonucleotide
gaugugaucccgucgaagc

SEQ ID NO: 1909343 - RNA, 19 nt, Artificial Sequence
  Description of Artificial Sequence: Synthetic oligonucleotide
aagcauuggaaccacuucu

SEQ ID NO: 1909344 - RNA, 19 nt, Artificial Sequence
  Description of Artificial Sequence: Synthetic oligonucleotide
uguuccacgauucccuuag

SEQ ID NO: 1909345 - RNA, 19 nt, Artificial Sequence
  Description of Artificial Sequence: Synthetic oligonucleotide
uuacuagggaaguaguuca

SEQ ID NO: 1909346 - RNA, 19 nt, Artificial Sequence
  Description of Artificial Sequence: Synthetic oligonucleotide
uuugagaugcccacugcag

SEQ ID NO: 1909347 - RNA, 19 nt, Artificial Sequence
  Description of Artificial Sequence: Synthetic oligonucleotide
caucuaccaucuuaaaugg

SEQ ID NO: 1909348 - RNA, 19 nt, Artificial Sequence
  Description of Artificial Sequence: Synthetic oligonucleotide
uuauaacgaagucauguuc

SEQ ID NO: 1909349 - RNA, 19 nt, Artificial Sequence
  Description of Artificial Sequence: Synthetic oligonucleotide
  modified_base (10)..(10): a, c, u, g, unknown or other
cuggguuugnguuucauca

SEQ ID NO: 1909350 - RNA, 19 nt, Artificial Sequence
  Description of Artificial Sequence: Synthetic oligonucleotide
auugaugugaucccgucga

SEQ ID NO: 1909351 - RNA, 19 nt, Artificial Sequence
  Description of Artificial Sequence: Synthetic oligonucleotide
uugagaugcccacugcagg

SEQ ID NO: 1909352 - RNA, 19 nt, Artificial Sequence
  Description of Artificial Sequence: Synthetic oligonucleotide
cuuagugagaucuacaugu

SEQ ID NO: 1909353 - RNA, 19 nt, Artificial Sequence
  Description of Artificial Sequence: Synthetic oligonucleotide
gaugucuugcuuacuaggg

SEQ ID NO: 1909354 - RNA, 19 nt, Artificial Sequence
  Description of Artificial Sequence: Synthetic oligonucleotide
gagaucuacaugucagagg

SEQ ID NO: 1909355 - RNA, 19 nt, Artificial Sequence
  Description of Artificial Sequence: Synthetic oligonucleotide
uuuacagaucaacaccaga

SEQ ID NO: 1909356 - RNA, 19 nt, Artificial Sequence
  Description of Artificial Sequence: Synthetic oligonucleotide
ugugugugaaucuugguua

SEQ ID NO: 1909357 - RNA, 19 nt, Artificial Sequence
  Description of Artificial Sequence: Synthetic oligonucleotide
uucaguagcuaucacugac

SEQ ID NO: 1909358 - RNA, 19 nt, Artificial Sequence
  Description of Artificial Sequence: Synthetic oligonucleotide
gauugaugugaucccgucg

SEQ ID NO: 1909359 - RNA, 19 nt, Artificial Sequence
  Description of Artificial Sequence: Synthetic oligonucleotide
agaaagcuguguuaccagg

SEQ ID NO: 1909360 - RNA, 19 nt, Artificial Sequence
  Description of Artificial Sequence: Synthetic oligonucleotide
uggucauacucacucgagg

SEQ ID NO: 1909361 - RNA, 19 nt, Artificial Sequence
  Description of Artificial Sequence: Synthetic oligonucleotide
agguauuagacguugugga

SEQ ID NO: 1909362 - RNA, 19 nt, Artificial Sequence
  Description of Artificial Sequence: Synthetic oligonucleotide
uuaaugcucaccgacuuca

SEQ ID NO: 1909363 - RNA, 19 nt, Artificial Sequence
  Description of Artificial Sequence: Synthetic oligonucleotide
uuugcugcgguuccggcgc

SEQ ID NO: 1909364 - RNA, 19 nt, Artificial Sequence
  Description of Artificial Sequence: Synthetic oligonucleotide
ucuacagccuaacgugagg

SEQ ID NO: 1909365 - RNA, 19 nt, Artificial Sequence
  Description of Artificial Sequence: Synthetic oligonucleotide
cuucuuaaugcucaccgac

SEQ ID NO: 1909366 - RNA, 19 nt, Artificial Sequence
  Description of Artificial Sequence: Synthetic oligonucleotide
uccggucuaaguuauccag

SEQ ID NO: 1909367 - RNA, 19 nt, Artificial Sequence
  Description of Artificial Sequence: Synthetic oligonucleotide
gaacaguuucuguaaggag

SEQ ID NO: 1909368 - RNA, 19 nt, Artificial Sequence
  Description of Artificial Sequence: Synthetic oligonucleotide
ugagaucuacaugucagag

SEQ ID NO: 1909369 - RNA, 19 nt, Artificial Sequence
  Description of Artificial Sequence: Synthetic oligonucleotide
gugaaucuugguuaaguug

SEQ ID NO: 1909370 - RNA, 19 nt, Artificial Sequence
  Description of Artificial Sequence: Synthetic oligonucleotide
gagacaugugaccaugggc

SEQ ID NO: 1909371 - RNA, 19 nt, Artificial Sequence
  Description of Artificial Sequence: Synthetic oligonucleotide
uaucuuagugagaucuaca

SEQ ID NO: 1909372 - RNA, 19 nt, Artificial Sequence
  Description of Artificial Sequence: Synthetic oligonucleotide
uguuaccagguuuacagau

SEQ ID NO: 1909373 - RNA, 19 nt, Artificial Sequence
  Description of Artificial Sequence: Synthetic oligonucleotide
cucgaggacaccaugaaca

SEQ ID NO: 1909374 - RNA, 19 nt, Artificial Sequence
  Description of Artificial Sequence: Synthetic oligonucleotide
ucaguagcuaucacugaca

SEQ ID NO: 1909375 - RNA, 19 nt, Artificial Sequence
  Description of Artificial Sequence: Synthetic oligonucleotide
aggaacaguuucuguaagg

SEQ ID NO: 1909376 - RNA, 19 nt, Artificial Sequence
  Description of Artificial Sequence: Synthetic oligonucleotide
uaacgugaggcuaagcuuu

SEQ ID NO: 1909377 - RNA, 19 nt, Artificial Sequence
  Description of Artificial Sequence: Synthetic oligonucleotide
augaacaggauugauguga

SEQ ID NO: 1909378 - RNA, 19 nt, Artificial Sequence
  Description of Artificial Sequence: Synthetic oligonucleotide
uaguguaucuuagugagau

SEQ ID NO: 1909379 - RNA, 19 nt, Artificial Sequence
  Description of Artificial Sequence: Synthetic oligonucleotide
ugcaggucuaugcaggcga

SEQ ID NO: 1909380 - RNA, 19 nt, Artificial Sequence
  Description of Artificial Sequence: Synthetic oligonucleotide
agagacaugugaccauggg

SEQ ID NO: 1909381 - RNA, 19 nt, Artificial Sequence
  Description of Artificial Sequence: Synthetic oligonucleotide
ugagcuuagcagcaucgca

SEQ ID NO: 1909382 - RNA, 19 nt, Artificial Sequence
  Description of Artificial Sequence: Synthetic oligonucleotide
ucaaugagagcacgugugu

SEQ ID NO: 1909383 - RNA, 19 nt, Artificial Sequence
  Description of Artificial Sequence: Synthetic oligonucleotide
cuuacuagggaaguaguuc

SEQ ID NO: 1909384 - RNA, 19 nt, Artificial Sequence
  Description of Artificial Sequence: Synthetic oligonucleotide
cuaucacugacacuccuac

SEQ ID NO: 1909385 - RNA, 19 nt, Artificial Sequence
  Description of Artificial Sequence: Synthetic oligonucleotide
cagguauuagacguugugg

SEQ ID NO: 1909386 - RNA, 19 nt, Artificial Sequence
  Description of Artificial Sequence: Synthetic oligonucleotide
acguccucuugucuggagc

SEQ ID NO: 1909387 - RNA, 19 nt, Artificial Sequence
  Description of Artificial Sequence: Synthetic oligonucleotide
acuagggaaguaguucagc

SEQ ID NO: 1909388 - RNA, 19 nt, Artificial Sequence
  Description of Artificial Sequence: Synthetic oligonucleotide
uaugcaggcgacgacacac

SEQ ID NO: 1909389 - RNA, 19 nt, Artificial Sequence
  Description of Artificial Sequence: Synthetic oligonucleotide
uauuagacguuguggauuu

SEQ ID NO: 1909390 - RNA, 19 nt, Artificial Sequence
  Description of Artificial Sequence: Synthetic oligonucleotide
uggcacaauuuuaaaggca

SEQ ID NO: 1909391 - RNA, 19 nt, Artificial Sequence
  Description of Artificial Sequence: Synthetic oligonucleotide
aguggugaagugguggaac

SEQ ID NO: 1909392 - RNA, 19 nt, Artificial Sequence
  Description of Artificial Sequence: Synthetic oligonucleotide
ucuuaaugcucaccgacuu

SEQ ID NO: 1909393 - RNA, 19 nt, Artificial Sequence
  Description of Artificial Sequence: Synthetic oligonucleotide
acaauuuuaaaggcagugu

SEQ ID NO: 1909394 - RNA, 19 nt, Artificial Sequence
  Description of Artificial Sequence: Synthetic oligonucleotide
gucagcaaggaacaguuuc

SEQ ID NO: 1909395 - RNA, 19 nt, Artificial Sequence
  Description of Artificial Sequence: Synthetic oligonucleotide
ucauacucacucgaggaca

SEQ ID NO: 1909396 - RNA, 19 nt, Artificial Sequence
  Description of Artificial Sequence: Synthetic oligonucleotide
aagcacuguaccagguagc

SEQ ID NO: 1909397 - RNA, 19 nt, Artificial Sequence
  Description of Artificial Sequence: Synthetic oligonucleotide
  modified_base (6)..(6): a, c, u, g, unknown or other
guuugnguuucaucaauga

SEQ ID NO: 1909398 - RNA, 19 nt, Artificial Sequence
  Description of Artificial Sequence: Synthetic oligonucleotide
uaaggaccuggucauacuc

SEQ ID NO: 1909399 - RNA, 19 nt, Artificial Sequence
  Description of Artificial Sequence: Synthetic oligonucleotide
uaucacugacacuccuacg

SEQ ID NO: 1909400 - RNA, 19 nt, Artificial Sequence
  Description of Artificial Sequence: Synthetic oligonucleotide
uuccacgauucccuuagug

SEQ ID NO: 1909401 - RNA, 19 nt, Artificial Sequence
  Description of Artificial Sequence: Synthetic oligonucleotide
gaccuggucauacucacuc

SEQ ID NO: 1909402 - RNA, 19 nt, Artificial Sequence
  Description of Artificial Sequence: Synthetic oligonucleotide
acuccuacguccucuuguc

SEQ ID NO: 1909403 - RNA, 19 nt, Artificial Sequence
  Description of Artificial Sequence: Synthetic oligonucleotide
acgauucccuuaguggucc

SEQ ID NO: 1909404 - RNA, 19 nt, Artificial Sequence
  Description of Artificial Sequence: Synthetic oligonucleotide
ucucgaauauguucauaga

SEQ ID NO: 1909405 - RNA, 19 nt, Artificial Sequence
  Description of Artificial Sequence: Synthetic oligonucleotide
ggcacaauuuuaaaggcag

SEQ ID NO: 1909406 - RNA, 19 nt, Artificial Sequence
  Description of Artificial Sequence: Synthetic oligonucleotide
ugugaaucuugguuaaguu

SEQ ID NO: 1909407 - RNA, 19 nt, Artificial Sequence
  Description of Artificial Sequence: Synthetic oligonucleotide
ucuaugcaggcgacgacac

SEQ ID NO: 1909408 - RNA, 19 nt, Artificial Sequence
  Description of Artificial Sequence: Synthetic oligonucleotide
cuggacguccuccagucgg

SEQ ID NO: 1909409 - RNA, 19 nt, Artificial Sequence
  Description of Artificial Sequence: Synthetic oligonucleotide
ugaacaggauugaugugau

SEQ ID NO: 1909410 - RNA, 19 nt, Artificial Sequence
  Description of Artificial Sequence: Synthetic oligonucleotide
ucuugucuggagcucgcug

SEQ ID NO: 1909411 - RNA, 19 nt, Artificial Sequence
  Description of Artificial Sequence: Synthetic oligonucleotide
gaaguaguucagcuggcca

SEQ ID NO: 1909412 - RNA, 19 nt, Artificial Sequence
  Description of Artificial Sequence: Synthetic oligonucleotide
aucgcaugccccucuacag

SEQ ID NO: 1909413 - RNA, 19 nt, Artificial Sequence
  Description of Artificial Sequence: Synthetic oligonucleotide
aucaaugagagcacgugug

SEQ ID NO: 1909414 - RNA, 19 nt, Artificial Sequence
  Description of Artificial Sequence: Synthetic oligonucleotide
cuuuauaacgaagucaugu

SEQ ID NO: 1909415 - RNA, 19 nt, Artificial Sequence
  Description of Artificial Sequence: Synthetic oligonucleotide
guguagauucaguaguuuc

SEQ ID NO: 1909416 - RNA, 19 nt, Artificial Sequence
  Description of Artificial Sequence: Synthetic oligonucleotide
auggucucgaauauguuca

SEQ ID NO: 1909417 - RNA, 19 nt, Artificial Sequence
  Description of Artificial Sequence: Synthetic oligonucleotide
uuagacguuguggauuuga

SEQ ID NO: 1909418 - RNA, 19 nt, Artificial Sequence
  Description of Artificial Sequence: Synthetic oligonucleotide
uuagugagaucuacauguc

SEQ ID NO: 1909419 - RNA, 19 nt, Artificial Sequence
  Description of Artificial Sequence: Synthetic oligonucleotide
ugcgggucaccuuugaaau

SEQ ID NO: 1909420 - RNA, 19 nt, Artificial Sequence
  Description of Artificial Sequence: Synthetic oligonucleotide
ugcuuacuagggaaguagu

SEQ ID NO: 1909421 - RNA, 19 nt, Artificial Sequence
  Description of Artificial Sequence: Synthetic oligonucleotide
uuaguguaucuuagugaga

SEQ ID NO: 1909422 - RNA, 19 nt, Artificial Sequence
  Description of Artificial Sequence: Synthetic oligonucleotide
cuuagcagcaucgcaugcc

SEQ ID NO: 1909423 - RNA, 19 nt, Artificial Sequence
  Description of Artificial Sequence: Synthetic oligonucleotide
cauacucacucgaggacac

SEQ ID NO: 1909424 - RNA, 19 nt, Artificial Sequence
  Description of Artificial Sequence: Synthetic oligonucleotide
cacugacacuccuacgucc

SEQ ID NO: 1909425 - RNA, 19 nt, Artificial Sequence
  Description of Artificial Sequence: Synthetic oligonucleotide
uguucucggugucuauggc

SEQ ID NO: 1909426 - RNA, 19 nt, Artificial Sequence
  Description of Artificial Sequence: Synthetic oligonucleotide
uugguuaaguugugucagc

SEQ ID NO: 1909427 - RNA, 19 nt, Artificial Sequence
  Description of Artificial Sequence: Synthetic oligonucleotide
cauaaggaccuggucauac

SEQ ID NO: 1909428 - RNA, 19 nt, Artificial Sequence
  Description of Artificial Sequence: Synthetic oligonucleotide
agcuuagcagcaucgcaug

SEQ ID NO: 1909429 - RNA, 19 nt, Artificial Sequence
  Description of Artificial Sequence: Synthetic oligonucleotide
accaugaacaggauugaug

SEQ ID NO: 1909430 - RNA, 19 nt, Artificial Sequence
  Description of Artificial Sequence: Synthetic oligonucleotide
ugaugugaucccgucgaag

SEQ ID NO: 1909431 - RNA, 19 nt, Artificial Sequence
  Description of Artificial Sequence: Synthetic oligonucleotide
gacucuugaggauguuggc

SEQ ID NO: 1909432 - RNA, 19 nt, Artificial Sequence
  Description of Artificial Sequence: Synthetic oligonucleotide
uagugguccuuucuggcaa

SEQ ID NO: 1909433 - RNA, 19 nt, Artificial Sequence
  Description of Artificial Sequence: Synthetic oligonucleotide
augucuugcuuacuaggga

SEQ ID NO: 1909434 - RNA, 19 nt, Artificial Sequence
  Description of Artificial Sequence: Synthetic oligonucleotide
uguaucuuagugagaucua

SEQ ID NO: 1909435 - RNA, 19 nt, Artificial Sequence
  Description of Artificial Sequence: Synthetic oligonucleotide
acgaagucauguuccacga

SEQ ID NO: 1909436 - RNA, 19 nt, Artificial Sequence
  Description of Artificial Sequence: Synthetic oligonucleotide
guaucuuagugagaucuac

SEQ ID NO: 1909437 - RNA, 19 nt, Artificial Sequence
  Description of Artificial Sequence: Synthetic oligonucleotide
uacaugucagagggaagag

SEQ ID NO: 1909438 - RNA, 19 nt, Artificial Sequence
  Description of Artificial Sequence: Synthetic oligonucleotide
ggauuugagaugcccacug

SEQ ID NO: 1909439 - RNA, 19 nt, Artificial Sequence
  Description of Artificial Sequence: Synthetic oligonucleotide
ucuugcuuacuagggaagu

SEQ ID NO: 1909440 - RNA, 19 nt, Artificial Sequence
  Description of Artificial Sequence: Synthetic oligonucleotide
gauucaguaguuucacagu

SEQ ID NO: 1909441 - RNA, 19 nt, Artificial Sequence
  Description of Artificial Sequence: Synthetic oligonucleotide
gucauacucacucgaggac

SEQ ID NO: 1909442 - RNA, 19 nt, Artificial Sequence
  Description of Artificial Sequence: Synthetic oligonucleotide
ucgcaugccccucuacagc

SEQ ID NO: 1909443 - RNA, 19 nt, Artificial Sequence
  Description of Artificial Sequence: Synthetic oligonucleotide
cuggucauacucacucgag

SEQ ID NO: 1909444 - RNA, 19 nt, Artificial Sequence
  Description of Artificial Sequence: Synthetic oligonucleotide
aguuucacaguccccggau

SEQ ID NO: 1909445 - RNA, 19 nt, Artificial Sequence
  Description of Artificial Sequence: Synthetic oligonucleotide
gaucccgucgaagcauugg

SEQ ID NO: 1909446 - RNA, 19 nt, Artificial Sequence
  Description of Artificial Sequence: Synthetic oligonucleotide
auaaggaccuggucauacu

SEQ ID NO: 1909447 - RNA, 19 nt, Artificial Sequence
  Description of Artificial Sequence: Synthetic oligonucleotide
cagagacaugugaccaugg

SEQ ID NO: 1909448 - RNA, 19 nt, Artificial Sequence
  Description of Artificial Sequence: Synthetic oligonucleotide
gguuuacagaucaacacca

SEQ ID NO: 1909449 - RNA, 19 nt, Artificial Sequence
  Description of Artificial Sequence: Synthetic oligonucleotide
guguaucuuagugagaucu

SEQ ID NO: 1909450 - RNA, 19 nt, Artificial Sequence
  Description of Artificial Sequence: Synthetic oligonucleotide
acgauggucucgaauaugu

SEQ ID NO: 1909451 - RNA, 19 nt, Artificial Sequence
  Description of Artificial Sequence: Synthetic oligonucleotide
ucacugacacuccuacguc

SEQ ID NO: 1909452 - RNA, 19 nt, Artificial Sequence
  Description of Artificial Sequence: Synthetic oligonucleotide
acguuguggauuugagaug

SEQ ID NO: 1909453 - RNA, 19 nt, Artificial Sequence
  Description of Artificial Sequence: Synthetic oligonucleotide
cuacaugucagagggaaga

SEQ ID NO: 1909454 - RNA, 19 nt, Artificial Sequence
  Description of Artificial Sequence: Synthetic oligonucleotide
ggaacagggguuugcugcg

SEQ ID NO: 1909455 - RNA, 19 nt, Artificial Sequence
  Description of Artificial Sequence: Synthetic oligonucleotide
cgaauauguucauagacuc

SEQ ID NO: 1909456 - RNA, 19 nt, Artificial Sequence
  Description of Artificial Sequence: Synthetic oligonucleotide
gcgacgacacaccagagac

SEQ ID NO: 1909457 - RNA, 19 nt, Artificial Sequence
  Description of Artificial Sequence: Synthetic oligonucleotide
guuuacagaucaacaccag

SEQ ID NO: 1909458 - RNA, 19 nt, Artificial Sequence
  Description of Artificial Sequence: Synthetic oligonucleotide
agcagcaucgcaugccccu

SEQ ID NO: 1909459 - RNA, 19 nt, Artificial Sequence
  Description of Artificial Sequence: Synthetic oligonucleotide
ggucauacucacucgagga

SEQ ID NO: 1909460 - RNA, 19 nt, Artificial Sequence
  Description of Artificial Sequence: Synthetic oligonucleotide
ugacgauggucucgaauau

SEQ ID NO: 1909461 - RNA, 19 nt, Artificial Sequence
  Description of Artificial Sequence: Synthetic oligonucleotide
  modified_base (7)..(7): a, c, u, g, unknown or other
gguuugnguuucaucaaug

SEQ ID NO: 1909462 - RNA, 19 nt, Artificial Sequence
  Description of Artificial Sequence: Synthetic oligonucleotide
  modified_base (9)..(9): a, c, u, g, unknown or other
uggguuugnguuucaucaa

SEQ ID NO: 1909463 - RNA, 19 nt, Artificial Sequence
  Description of Artificial Sequence: Synthetic oligonucleotide
ugguguagauucaguaguu

SEQ ID NO: 1909464 - RNA, 19 nt, Artificial Sequence
  Description of Artificial Sequence: Synthetic oligonucleotide
cuuaaugcucaccgacuuc

SEQ ID NO: 1909465 - RNA, 19 nt, Artificial Sequence
  Description of Artificial Sequence: Synthetic oligonucleotide
ggcgcugugaccucuggcc

SEQ ID NO: 1909466 - RNA, 19 nt, Artificial Sequence
  Description of Artificial Sequence: Synthetic oligonucleotide
gaaucuugguuaaguugug

SEQ ID NO: 1909467 - RNA, 19 nt, Artificial Sequence
  Description of Artificial Sequence: Synthetic oligonucleotide
agaucaacaccagaacaau

SEQ ID NO: 1909468 - RNA, 19 nt, Artificial Sequence
  Description of Artificial Sequence: Synthetic oligonucleotide
gcgccuguccuccauaagg

SEQ ID NO: 1909469 - RNA, 19 nt, Artificial Sequence
  Description of Artificial Sequence: Synthetic oligonucleotide
uggccaauccggucuaagu

SEQ ID NO: 1909470 - RNA, 19 nt, Artificial Sequence
  Description of Artificial Sequence: Synthetic oligonucleotide
ugugugaaucuugguuaag

SEQ ID NO: 1909471 - RNA, 19 nt, Artificial Sequence
  Description of Artificial Sequence: Synthetic oligonucleotide
uccgggaagugcuucuuaa

SEQ ID NO: 1909472 - RNA, 19 nt, Artificial Sequence
  Description of Artificial Sequence: Synthetic oligonucleotide
aucccgucgaagcauugga

SEQ ID NO: 1909473 - RNA, 19 nt, Artificial Sequence
  Description of Artificial Sequence: Synthetic oligonucleotide
augugaucccgucgaagca

SEQ ID NO: 1909474 - RNA, 19 nt, Artificial Sequence
  Description of Artificial Sequence: Synthetic oligonucleotide
ccuuagugguccuuucugg

SEQ ID NO: 1909475 - RNA, 19 nt, Artificial Sequence
  Description of Artificial Sequence: Synthetic oligonucleotide
agcacgugugugugaaucu

SEQ ID NO: 1909476 - RNA, 19 nt, Artificial Sequence
  Description of Artificial Sequence: Synthetic oligonucleotide
gacaugugaccaugggcca

SEQ ID NO: 1909477 - RNA, 19 nt, Artificial Sequence
  Description of Artificial Sequence: Synthetic oligonucleotide
uggugaagugguggaacag

SEQ ID NO: 1909478 - RNA, 19 nt, Artificial Sequence
  Description of Artificial Sequence: Synthetic oligonucleotide
gggaagagccaccugcaag

SEQ ID NO: 1909479 - RNA, 19 nt, Artificial Sequence
  Description of Artificial Sequence: Synthetic oligonucleotide
uacagccuaacgugaggcu

SEQ ID NO: 1909480 - RNA, 19 nt, Artificial Sequence
  Description of Artificial Sequence: Synthetic oligonucleotide
guucucggugucuauggca

SEQ ID NO: 1909481 - RNA, 19 nt, Artificial Sequence
  Description of Artificial Sequence: Synthetic oligonucleotide
agcauuggaaccacuucug

SEQ ID NO: 1909482 - RNA, 19 nt, Artificial Sequence
  Description of Artificial Sequence: Synthetic oligonucleotide
ugugaucccgucgaagcau

SEQ ID NO: 1909483 - RNA, 19 nt, Artificial Sequence
  Description of Artificial Sequence: Synthetic oligonucleotide
ugugcucacuuugggaggu

SEQ ID NO: 1909484 - RNA, 19 nt, Artificial Sequence
  Description of Artificial Sequence: Synthetic oligonucleotide
ucggugucuauggcagugg

SEQ ID NO: 1909485 - RNA, 19 nt, Artificial Sequence
  Description of Artificial Sequence: Synthetic oligonucleotide
ggaacaguuucuguaagga

SEQ ID NO: 1909486 - RNA, 19 nt, Artificial Sequence
  Description of Artificial Sequence: Synthetic oligonucleotide
ucuggagcucgcuggugug

SEQ ID NO: 1909487 - RNA, 19 nt, Artificial Sequence
  Description of Artificial Sequence: Synthetic oligonucleotide
guuggugcgccuguccucc

SEQ ID NO: 1909488 - RNA, 19 nt, Artificial Sequence
  Description of Artificial Sequence: Synthetic oligonucleotide
uucacaguccccggauuca

SEQ ID NO: 1909489 - RNA, 19 nt, Artificial Sequence
  Description of Artificial Sequence: Synthetic oligonucleotide
cccucuacagccuaacgug

SEQ ID NO: 1909490 - RNA, 19 nt, Artificial Sequence
  Description of Artificial Sequence: Synthetic oligonucleotide
  modified_base (2)..(2): a, c, u, g, unknown or other
gnguuucaucaaugagagc

SEQ ID NO: 1909491 - RNA, 19 nt, Artificial Sequence
  Description of Artificial Sequence: Synthetic oligonucleotide
agugguccuuucuggcaag

SEQ ID NO: 1909492 - RNA, 19 nt, Artificial Sequence
  Description of Artificial Sequence: Synthetic oligonucleotide
auccggucuaaguuaucca

SEQ ID NO: 1909493 - RNA, 19 nt, Artificial Sequence
  Description of Artificial Sequence: Synthetic oligonucleotide
agaugcccacugcaggucu

SEQ ID NO: 1909494 - RNA, 19 nt, Artificial Sequence
  Description of Artificial Sequence: Synthetic oligonucleotide
caguaguuucacagucccc

SEQ ID NO: 1909495 - RNA, 19 nt, Artificial Sequence
  Description of Artificial Sequence: Synthetic oligonucleotide
ugaaauccgggaagugcuu

SEQ ID NO: 1909496 - RNA, 19 nt, Artificial Sequence
  Description of Artificial Sequence: Synthetic oligonucleotide
caggcgacgacacaccaga

SEQ ID NO: 1909497 - RNA, 19 nt, Artificial Sequence
  Description of Artificial Sequence: Synthetic oligonucleotide
cacgauucccuuagugguc

SEQ ID NO: 1909498 - RNA, 19 nt, Artificial Sequence
  Description of Artificial Sequence: Synthetic oligonucleotide
cucacucgaggacaccaug

SEQ ID NO: 1909499 - RNA, 19 nt, Artificial Sequence
  Description of Artificial Sequence: Synthetic oligonucleotide
ggagaaagcuguguuacca

SEQ ID NO: 1909500 - RNA, 19 nt, Artificial Sequence
  Description of Artificial Sequence: Synthetic oligonucleotide
acaguccccggauucagua

SEQ ID NO: 1909501 - RNA, 19 nt, Artificial Sequence
  Description of Artificial Sequence: Synthetic oligonucleotide
guuaccagguuuacagauc

SEQ ID NO: 1909502 - RNA, 19 nt, Artificial Sequence
  Description of Artificial Sequence: Synthetic oligonucleotide
ugagagcacguguguguga

SEQ ID NO: 1909503 - RNA, 19 nt, Artificial Sequence
  Description of Artificial Sequence: Synthetic oligonucleotide
auacucacucgaggacacc

SEQ ID NO: 1909504 - RNA, 19 nt, Artificial Sequence
  Description of Artificial Sequence: Synthetic oligonucleotide
auggaggccaugagaggac

SEQ ID NO: 1909505 - RNA, 19 nt, Artificial Sequence
  Description of Artificial Sequence: Synthetic oligonucleotide
gagggagaaagcuguguua

SEQ ID NO: 1909506 - RNA, 19 nt, Artificial Sequence
  Description of Artificial Sequence: Synthetic oligonucleotide
acaaugguguagauucagu

SEQ ID NO: 1909507 - RNA, 19 nt, Artificial Sequence
  Description of Artificial Sequence: Synthetic oligonucleotide
ugaucccgucgaagcauug

SEQ ID NO: 1909508 - RNA, 19 nt, Artificial Sequence
  Description of Artificial Sequence: Synthetic oligonucleotide
ucccgucgaagcauuggaa

SEQ ID NO: 1909509 - RNA, 19 nt, Artificial Sequence
  Description of Artificial Sequence: Synthetic oligonucleotide
ccuacguccucuugucugg

SEQ ID NO: 1909510 - RNA, 19 nt, Artificial Sequence
  Description of Artificial Sequence: Synthetic oligonucleotide
ggauucaguagcuaucacu

SEQ ID NO: 1909511 - RNA, 19 nt, Artificial Sequence
  Description of Artificial Sequence: Synthetic oligonucleotide
gugaggcuaagcuuuugaa

SEQ ID NO: 1909512 - RNA, 19 nt, Artificial Sequence
  Description of Artificial Sequence: Synthetic oligonucleotide
gugcgggucaccuuugaaa

SEQ ID NO: 1909513 - RNA, 19 nt, Artificial Sequence
  Description of Artificial Sequence: Synthetic oligonucleotide
ugcgccuguccuccauaag

SEQ ID NO: 1909514 - RNA, 19 nt, Artificial Sequence
  Description of Artificial Sequence: Synthetic oligonucleotide
ccgucgaagcauuggaacc

SEQ ID NO: 1909515 - RNA, 19 nt, Artificial Sequence
  Description of Artificial Sequence: Synthetic oligonucleotide
ccggucuaaguuauccagg

SEQ ID NO: 1909516 - RNA, 19 nt, Artificial Sequence
  Description of Artificial Sequence: Synthetic oligonucleotide
guguuaccagguuuacaga

SEQ ID NO: 1909517 - RNA, 19 nt, Artificial Sequence
  Description of Artificial Sequence: Synthetic oligonucleotide
cucggugucuauggcagug

SEQ ID NO: 1909518 - RNA, 19 nt, Artificial Sequence
  Description of Artificial Sequence: Synthetic oligonucleotide
gugugugaaucuugguuaa

SEQ ID NO: 1909519 - RNA, 19 nt, Artificial Sequence
  Description of Artificial Sequence: Synthetic oligonucleotide
ccagguuuacagaucaaca

SEQ ID NO: 1909520 - RNA, 19 nt, Artificial Sequence
  Description of Artificial Sequence: Synthetic oligonucleotide
ggcagugugcucacuuugg

SEQ ID NO: 1909521 - RNA, 19 nt, Artificial Sequence
  Description of Artificial Sequence: Synthetic oligonucleotide
gaacaggauugaugugauc

SEQ ID NO: 1909522 - RNA, 19 nt, Artificial Sequence
  Description of Artificial Sequence: Synthetic oligonucleotide
gagagcacgugugugugaa

SEQ ID NO: 1909523 - RNA, 19 nt, Artificial Sequence
  Description of Artificial Sequence: Synthetic oligonucleotide
cagcaaggaacaguuucug

SEQ ID NO: 1909524 - RNA, 19 nt, Artificial Sequence
  Description of Artificial Sequence: Synthetic oligonucleotide
cacuucuggcgcugugacc

SEQ ID NO: 1909525 - RNA, 19 nt, Artificial Sequence
  Description of Artificial Sequence: Synthetic oligonucleotide
acagccuaacgugaggcua

SEQ ID NO: 1909526 - RNA, 19 nt, Artificial Sequence
  Description of Artificial Sequence: Synthetic oligonucleotide
cagguagcgcuggacgucc

SEQ ID NO: 1909527 - RNA, 19 nt, Artificial Sequence
  Description of Artificial Sequence: Synthetic oligonucleotide
ccagguauuagacguugug

SEQ ID NO: 1909528 - RNA, 19 nt, Artificial Sequence
  Description of Artificial Sequence: Synthetic oligonucleotide
uucccuuagugguccuuuc

SEQ ID NO: 1909529 - RNA, 19 nt, Artificial Sequence
  Description of Artificial Sequence: Synthetic oligonucleotide
aggauugaugugaucccgu

SEQ ID NO: 1909530 - RNA, 19 nt, Artificial Sequence
  Description of Artificial Sequence: Synthetic oligonucleotide
ggauugaugugaucccguc

SEQ ID NO: 1909531 - RNA, 19 nt, Artificial Sequence
  Description of Artificial Sequence: Synthetic oligonucleotide
caucaaugagagcacgugu

SEQ ID NO: 1909532 - RNA, 19 nt, Artificial Sequence
  Description of Artificial Sequence: Synthetic oligonucleotide
ggaaguaguucagcuggcc

SEQ ID NO: 1909533 - RNA, 19 nt, Artificial Sequence
  Description of Artificial Sequence: Synthetic oligonucleotide
cuaacgugaggcuaagcuu

SEQ ID NO: 1909534 - RNA, 19 nt, Artificial Sequence
  Description of Artificial Sequence: Synthetic oligonucleotide
cccgucgaagcauuggaac

SEQ ID NO: 1909535 - RNA, 19 nt, Artificial Sequence
  Description of Artificial Sequence: Synthetic oligonucleotide
cuauggcaguggugaagug

SEQ ID NO: 1909536 - RNA, 19 nt, Artificial Sequence
  Description of Artificial Sequence: Synthetic oligonucleotide
uaccagguuuacagaucaa

SEQ ID NO: 1909537 - RNA, 19 nt, Artificial Sequence
  Description of Artificial Sequence: Synthetic oligonucleotide
gugugaaucuugguuaagu

SEQ ID NO: 1909538 - RNA, 19 nt, Artificial Sequence
  Description of Artificial Sequence: Synthetic oligonucleotide
guauuagacguuguggauu

SEQ ID NO: 1909539 - RNA, 19 nt, Artificial Sequence
  Description of Artificial Sequence: Synthetic oligonucleotide
cuaccaucuuaaaugggau

SEQ ID NO: 1909540 - RNA, 19 nt, Artificial Sequence
  Description of Artificial Sequence: Synthetic oligonucleotide
aauccgggaagugcuucuu

SEQ ID NO: 1909541 - RNA, 19 nt, Artificial Sequence
  Description of Artificial Sequence: Synthetic oligonucleotide
acacuccuacguccucuug

SEQ ID NO: 1909542 - RNA, 19 nt, Artificial Sequence
  Description of Artificial Sequence: Synthetic oligonucleotide
guugacgauggucucgaau

SEQ ID NO: 1909543 - RNA, 19 nt, Artificial Sequence
  Description of Artificial Sequence: Synthetic oligonucleotide
ucggugcgggucaccuuug

SEQ ID NO: 1909544 - RNA, 19 nt, Artificial Sequence
  Description of Artificial Sequence: Synthetic oligonucleotide
ccuaacgugaggcuaagcu

SEQ ID NO: 1909545 - RNA, 19 nt, Artificial Sequence
  Description of Artificial Sequence: Synthetic oligonucleotide
gcuucuuaaugcucaccga

SEQ ID NO: 1909546 - RNA, 19 nt, Artificial Sequence
  Description of Artificial Sequence: Synthetic oligonucleotide
cuggccaauccggucuaag

SEQ ID NO: 1909547 - RNA, 19 nt, Artificial Sequence
  Description of Artificial Sequence: Synthetic oligonucleotide
accagccgguuggugcgcc

SEQ ID NO: 1909548 - RNA, 19 nt, Artificial Sequence
  Description of Artificial Sequence: Synthetic oligonucleotide
auguuccacgauucccuua

SEQ ID NO: 1909549 - RNA, 19 nt, Artificial Sequence
  Description of Artificial Sequence: Synthetic oligonucleotide
acuguaccagguagcgcug

SEQ ID NO: 1909550 - RNA, 19 nt, Artificial Sequence
  Description of Artificial Sequence: Synthetic oligonucleotide
cagccuaacgugaggcuaa

SEQ ID NO: 1909551 - RNA, 19 nt, Artificial Sequence
  Description of Artificial Sequence: Synthetic oligonucleotide
auuagacguuguggauuug

SEQ ID NO: 1909552 - RNA, 19 nt, Artificial Sequence
  Description of Artificial Sequence: Synthetic oligonucleotide
ggccaugagaggacggcag

SEQ ID NO: 1909553 - RNA, 19 nt, Artificial Sequence
  Description of Artificial Sequence: Synthetic oligonucleotide
gguauuagacguuguggau

SEQ ID NO: 1909554 - RNA, 19 nt, Artificial Sequence
  Description of Artificial Sequence: Synthetic oligonucleotide
caauccggucuaaguuauc

SEQ ID NO: 1909555 - RNA, 19 nt, Artificial Sequence
  Description of Artificial Sequence: Synthetic oligonucleotide
gcugucucucacugcagca

SEQ ID NO: 1909556 - RNA, 19 nt, Artificial Sequence
  Description of Artificial Sequence: Synthetic oligonucleotide
ggcgacgacacaccagaga

SEQ ID NO: 1909557 - RNA, 19 nt, Artificial Sequence
  Description of Artificial Sequence: Synthetic oligonucleotide
uguugacgauggucucgaa

SEQ ID NO: 1909558 - RNA, 19 nt, Artificial Sequence
  Description of Artificial Sequence: Synthetic oligonucleotide
agccuaacgugaggcuaag

SEQ ID NO: 1909559 - RNA, 19 nt, Artificial Sequence
  Description of Artificial Sequence: Synthetic oligonucleotide
cuugcuuacuagggaagua

SEQ ID NO: 1909560 - RNA, 19 nt, Artificial Sequence
  Description of Artificial Sequence: Synthetic oligonucleotide
uucuggcgcugugaccucu

SEQ ID NO: 1909561 - RNA, 19 nt, Artificial Sequence
  Description of Artificial Sequence: Synthetic oligonucleotide
cccggauucaguagcuauc

SEQ ID NO: 1909562 - RNA, 19 nt, Artificial Sequence
  Description of Artificial Sequence: Synthetic oligonucleotide
cacuccuacguccucuugu

SEQ ID NO: 1909563 - RNA, 19 nt, Artificial Sequence
  Description of Artificial Sequence: Synthetic oligonucleotide
gcuggacguccuccagucg

SEQ ID NO: 1909564 - RNA, 19 nt, Artificial Sequence
  Description of Artificial Sequence: Synthetic oligonucleotide
ccuggucauacucacucga

SEQ ID NO: 1909565 - RNA, 19 nt, Artificial Sequence
  Description of Artificial Sequence: Synthetic oligonucleotide
uccuccagucggugcgggu

SEQ ID NO: 1909566 - RNA, 19 nt, Artificial Sequence
  Description of Artificial Sequence: Synthetic oligonucleotide
agagcacgugugugugaau

SEQ ID NO: 1909567 - RNA, 19 nt, Artificial Sequence
  Description of Artificial Sequence: Synthetic oligonucleotide
cuaugcaggcgacgacaca

SEQ ID NO: 1909568 - RNA, 19 nt, Artificial Sequence
  Description of Artificial Sequence: Synthetic oligonucleotide
gcaguccagcauucuugag

SEQ ID NO: 1909569 - RNA, 19 nt, Artificial Sequence
  Description of Artificial Sequence: Synthetic oligonucleotide
ccacgauucccuuaguggu

SEQ ID NO: 1909570 - RNA, 19 nt, Artificial Sequence
  Description of Artificial Sequence: Synthetic oligonucleotide
gguuggugcgccuguccuc

SEQ ID NO: 1909571 - RNA, 19 nt, Artificial Sequence
  Description of Artificial Sequence: Synthetic oligonucleotide
acgugaggcuaagcuuuug

SEQ ID NO: 1909572 - RNA, 19 nt, Artificial Sequence
  Description of Artificial Sequence: Synthetic oligonucleotide
acucacucgaggacaccau

SEQ ID NO: 1909573 - RNA, 19 nt, Artificial Sequence
  Description of Artificial Sequence: Synthetic oligonucleotide
cuucuggcgcugugaccuc

SEQ ID NO: 1909574 - RNA, 19 nt, Artificial Sequence
  Description of Artificial Sequence: Synthetic oligonucleotide
cagcuggccaauccggucu

SEQ ID NO: 1909575 - RNA, 19 nt, Artificial Sequence
  Description of Artificial Sequence: Synthetic oligonucleotide
  modified_base (8)..(8): a, c, u, g, unknown or other
ggguuugnguuucaucaau

SEQ ID NO: 1909576 - RNA, 19 nt, Artificial Sequence
  Description of Artificial Sequence: Synthetic oligonucleotide
cggucuaaguuauccagga

SEQ ID NO: 1909577 - RNA, 19 nt, Artificial Sequence
  Description of Artificial Sequence: Synthetic oligonucleotide
  modified_base (12)..(12): a, c, u, g, unknown or other
agcuggguuugnguuucau

SEQ ID NO: 1909578 - RNA, 19 nt, Artificial Sequence
  Description of Artificial Sequence: Synthetic oligonucleotide
ccuccauaaggaccugguc

SEQ ID NO: 1909579 - RNA, 19 nt, Artificial Sequence
  Description of Artificial Sequence: Synthetic oligonucleotide
gcuguguuaccagguuuac

SEQ ID NO: 1909580 - RNA, 19 nt, Artificial Sequence
  Description of Artificial Sequence: Synthetic oligonucleotide
uugcugcgguuccggcgcu

SEQ ID NO: 1909581 - RNA, 19 nt, Artificial Sequence
  Description of Artificial Sequence: Synthetic oligonucleotide
gugcgccuguccuccauaa

SEQ ID NO: 1909582 - RNA, 19 nt, Artificial Sequence
  Description of Artificial Sequence: Synthetic oligonucleotide
uuggugcgccuguccucca

SEQ ID NO: 1909583 - RNA, 19 nt, Artificial Sequence
  Description of Artificial Sequence: Synthetic oligonucleotide
gacacuccuacguccucuu

SEQ ID NO: 1909584 - RNA, 19 nt, Artificial Sequence
  Description of Artificial Sequence: Synthetic oligonucleotide
aggcgacgacacaccagag

SEQ ID NO: 1909585 - RNA, 19 nt, Artificial Sequence
  Description of Artificial Sequence: Synthetic oligonucleotide
agucggugcgggucaccuu

SEQ ID NO: 1909586 - RNA, 19 nt, Artificial Sequence
  Description of Artificial Sequence: Synthetic oligonucleotide
gguggaacagggguuugcu

SEQ ID NO: 1909587 - RNA, 19 nt, Artificial Sequence
  Description of Artificial Sequence: Synthetic oligonucleotide
gcgcugugaccucuggcca

SEQ ID NO: 1909588 - RNA, 19 nt, Artificial Sequence
  Description of Artificial Sequence: Synthetic oligonucleotide
gcuaucacugacacuccua

SEQ ID NO: 1909589 - RNA, 19 nt, Artificial Sequence
  Description of Artificial Sequence: Synthetic oligonucleotide
ggugcgggucaccuuugaa

SEQ ID NO: 1909590 - RNA, 19 nt, Artificial Sequence
  Description of Artificial Sequence: Synthetic oligonucleotide
gcgggucaccuuugaaauc

SEQ ID NO: 1909591 - RNA, 19 nt, Artificial Sequence
  Description of Artificial Sequence: Synthetic oligonucleotide
cagccgguuggugcgccug

SEQ ID NO: 1909592 - RNA, 19 nt, Artificial Sequence
  Description of Artificial Sequence: Synthetic oligonucleotide
gcaucgcaugccccucuac

SEQ ID NO: 1909593 - RNA, 19 nt, Artificial Sequence
  Description of Artificial Sequence: Synthetic oligonucleotide
ccgguuggugcgccugucc

SEQ ID NO: 1909594 - RNA, 19 nt, Artificial Sequence
  Description of Artificial Sequence: Synthetic oligonucleotide
cgacacaccagagacaugu

SEQ ID NO: 1909595 - RNA, 19 nt, Artificial Sequence
  Description of Artificial Sequence: Synthetic oligonucleotide
cgcuggacguccuccaguc

SEQ ID NO: 1909596 - RNA, 19 nt, Artificial Sequence
  Description of Artificial Sequence: Synthetic oligonucleotide
cuacguccucuugucugga

SEQ ID NO: 1909597 - RNA, 19 nt, Artificial Sequence
  Description of Artificial Sequence: Synthetic oligonucleotide
ccuccagucggugcggguc

SEQ ID NO: 1909598 - RNA, 19 nt, Artificial Sequence
  Description of Artificial Sequence: Synthetic oligonucleotide
acgacacaccagagacaug

SEQ ID NO: 1909599 - RNA, 19 nt, Artificial Sequence
  Description of Artificial Sequence: Synthetic oligonucleotide
gcaggucuaugcaggcgac

SEQ ID NO: 1909600 - RNA, 19 nt, Artificial Sequence
  Description of Artificial Sequence: Synthetic oligonucleotide
gugcucacuuugggaggug

SEQ ID NO: 1909601 - RNA, 19 nt, Artificial Sequence
  Description of Artificial Sequence: Synthetic oligonucleotide
ccccucuacagccuaacgu

SEQ ID NO: 1909602 - RNA, 19 nt, Artificial Sequence
  Description of Artificial Sequence: Synthetic oligonucleotide
ccaauccggucuaaguuau

SEQ ID NO: 1909603 - RNA, 19 nt, Artificial Sequence
  Description of Artificial Sequence: Synthetic oligonucleotide
ccggcgcuuccugucaaag

SEQ ID NO: 1909604 - RNA, 19 nt, Artificial Sequence
  Description of Artificial Sequence: Synthetic oligonucleotide
guuccacgauucccuuagu

SEQ ID NO: 1909605 - RNA, 19 nt, Artificial Sequence
  Description of Artificial Sequence: Synthetic oligonucleotide
cuccuacguccucuugucu

SEQ ID NO: 1909606 - RNA, 19 nt, Artificial Sequence
  Description of Artificial Sequence: Synthetic oligonucleotide
gcuuacuagggaaguaguu

SEQ ID NO: 1909607 - RNA, 19 nt, Artificial Sequence
  Description of Artificial Sequence: Synthetic oligonucleotide
gccuaacgugaggcuaagc

SEQ ID NO: 1909608 - RNA, 19 nt, Artificial Sequence
  Description of Artificial Sequence: Synthetic oligonucleotide
cagucggugcgggucaccu

SEQ ID NO: 1909609 - RNA, 19 nt, Artificial Sequence
  Description of Artificial Sequence: Synthetic oligonucleotide
caccaugaacaggauugau

SEQ ID NO: 1909610 - RNA, 19 nt, Artificial Sequence
  Description of Artificial Sequence: Synthetic oligonucleotide
gugaucccgucgaagcauu

SEQ ID NO: 1909611 - RNA, 19 nt, Artificial Sequence
  Description of Artificial Sequence: Synthetic oligonucleotide
cagcaucgcaugccccucu

SEQ ID NO: 1909612 - RNA, 19 nt, Artificial Sequence
  Description of Artificial Sequence: Synthetic oligonucleotide
cucuugucuggagcucgcu

SEQ ID NO: 1909613 - RNA, 19 nt, Artificial Sequence
  Description of Artificial Sequence: Synthetic oligonucleotide
ggaccuggucauacucacu

SEQ ID NO: 1909614 - RNA, 19 nt, Artificial Sequence
  Description of Artificial Sequence: Synthetic oligonucleotide
gccagguauuagacguugu

SEQ ID NO: 1909615 - RNA, 19 nt, Artificial Sequence
  Description of Artificial Sequence: Synthetic oligonucleotide
gccgguuggugcgccuguc

SEQ ID NO: 1909616 - RNA, 19 nt, Artificial Sequence
  Description of Artificial Sequence: Synthetic oligonucleotide
gcuggccaauccggucuaa

SEQ ID NO: 1909617 - RNA, 19 nt, Artificial Sequence
  Description of Artificial Sequence: Synthetic oligonucleotide
ggacggcagaggggcuguc

SEQ ID NO: 1909618 - RNA, 19 nt, Artificial Sequence
  Description of Artificial Sequence: Synthetic oligonucleotide
ggagcucgcuggugugguu

SEQ ID NO: 1909619 - RNA, 19 nt, Artificial Sequence
  Description of Artificial Sequence: Synthetic oligonucleotide
cggugcgggucaccuuuga

SEQ ID NO: 1909620 - RNA, 19 nt, Artificial Sequence
  Description of Artificial Sequence: Synthetic oligonucleotide
cgauucccuuagugguccu

SEQ ID NO: 1909621 - RNA, 19 nt, Artificial Sequence
  Description of Artificial Sequence: Synthetic oligonucleotide
cgguuccggcgcuuccugu

SEQ ID NO: 1909622 - RNA, 19 nt, Artificial Sequence
  Description of Artificial Sequence: Synthetic oligonucleotide
auugauaacacauucaggc

SEQ ID NO: 1909623 - RNA, 19 nt, Artificial Sequence
  Description of Artificial Sequence: Synthetic oligonucleotide
acaaagauuauacacggcc

SEQ ID NO: 1909624 - RNA, 19 nt, Artificial Sequence
  Description of Artificial Sequence: Synthetic oligonucleotide
auucugaaacuucaaaucc

SEQ ID NO: 1909625 - RNA, 19 nt, Artificial Sequence
  Description of Artificial Sequence: Synthetic oligonucleotide
uucaaauccaugauggcgg

SEQ ID NO: 1909626 - RNA, 19 nt, Artificial Sequence
  Description of Artificial Sequence: Synthetic oligonucleotide
aaagauuauacacggccac

SEQ ID NO: 1909627 - RNA, 19 nt, Artificial Sequence
  Description of Artificial Sequence: Synthetic oligonucleotide
aagacaaagauuauacacg

SEQ ID NO: 1909628 - RNA, 19 nt, Artificial Sequence
  Description of Artificial Sequence: Synthetic oligonucleotide
aauggauggcauuaacacg

SEQ ID NO: 1909629 - RNA, 19 nt, Artificial Sequence
  Description of Artificial Sequence: Synthetic oligonucleotide
ucuuugacugccuuggagg

SEQ ID NO: 1909630 - RNA, 19 nt, Artificial Sequence
  Description of Artificial Sequence: Synthetic oligonucleotide
agacaaagauuauacacgg

SEQ ID NO: 1909631 - RNA, 19 nt, Artificial Sequence
  Description of Artificial Sequence: Synthetic oligonucleotide
uaacucauaggucauaaga

SEQ ID NO: 1909632 - RNA, 19 nt, Artificial Sequence
  Description of Artificial Sequence: Synthetic oligonucleotide
caagacaaagauuauacac

SEQ ID NO: 1909633 - RNA, 19 nt, Artificial Sequence
  Description of Artificial Sequence: Synthetic oligonucleotide
uguagauuuagccacugca

SEQ ID NO: 1909634 - RNA, 19 nt, Artificial Sequence
  Description of Artificial Sequence: Synthetic oligonucleotide
ucauaagagguucuggaag

SEQ ID NO: 1909635 - RNA, 19 nt, Artificial Sequence
  Description of Artificial Sequence: Synthetic oligonucleotide
agugauuugacacauuggu

SEQ ID NO: 1909636 - RNA, 19 nt, Artificial Sequence
  Description of Artificial Sequence: Synthetic oligonucleotide
auugguuagguguuucacc

SEQ ID NO: 1909637 - RNA, 19 nt, Artificial Sequence
  Description of Artificial Sequence: Synthetic oligonucleotide
uuuguguaccaagaaaugg

SEQ ID NO: 1909638 - RNA, 19 nt, Artificial Sequence
  Description of Artificial Sequence: Synthetic oligonucleotide
auuauacacggccaccggc

SEQ ID NO: 1909639 - RNA, 19 nt, Artificial Sequence
  Description of Artificial Sequence: Synthetic oligonucleotide
aacaguuucuuccuguggu

SEQ ID NO: 1909640 - RNA, 19 nt, Artificial Sequence
  Description of Artificial Sequence: Synthetic oligonucleotide
uguuucaaggcacuuguca

SEQ ID NO: 1909641 - RNA, 19 nt, Artificial Sequence
  Description of Artificial Sequence: Synthetic oligonucleotide
aaauacuguuucaaggcac

SEQ ID NO: 1909642 - RNA, 19 nt, Artificial Sequence
  Description of Artificial Sequence: Synthetic oligonucleotide
gucucuauguaacucauag

SEQ ID NO: 1909643 - RNA, 19 nt, Artificial Sequence
  Description of Artificial Sequence: Synthetic oligonucleotide
gacgcugacaggcaggugg

SEQ ID NO: 1909644 - RNA, 19 nt, Artificial Sequence
  Description of Artificial Sequence: Synthetic oligonucleotide
aacucauaggucauaagag

SEQ ID NO: 1909645 - RNA, 19 nt, Artificial Sequence
  Description of Artificial Sequence: Synthetic oligonucleotide
uaauucuguggaaucagcc

SEQ ID NO: 1909646 - RNA, 19 nt, Artificial Sequence
  Description of Artificial Sequence: Synthetic oligonucleotide
ucgauuaauauuucuacaa

SEQ ID NO: 1909647 - RNA, 19 nt, Artificial Sequence
  Description of Artificial Sequence: Synthetic oligonucleotide
uggaagacuccucaaauac

SEQ ID NO: 1909648 - RNA, 19 nt, Artificial Sequence
  Description of Artificial Sequence: Synthetic oligonucleotide
acaacaauauucugaaacu

SEQ ID NO: 1909649 - RNA, 19 nt, Artificial Sequence
  Description of Artificial Sequence: Synthetic oligonucleotide
aagauuauacacggccacc

SEQ ID NO: 1909650 - RNA, 19 nt, Artificial Sequence
  Description of Artificial Sequence: Synthetic oligonucleotide
cuauguaacucauagguca

SEQ ID NO: 1909651 - RNA, 19 nt, Artificial Sequence
  Description of Artificial Sequence: Synthetic oligonucleotide
auggauggcauuaacacgg

SEQ ID NO: 1909652 - RNA, 19 nt, Artificial Sequence
  Description of Artificial Sequence: Synthetic oligonucleotide
uuugccacggucauuagau

SEQ ID NO: 1909653 - RNA, 19 nt, Artificial Sequence
  Description of Artificial Sequence: Synthetic oligonucleotide
uugucuacaauggaggcag

SEQ ID NO: 1909654 - RNA, 19 nt, Artificial Sequence
  Description of Artificial Sequence: Synthetic oligonucleotide
uguuucaccaagauaucca

SEQ ID NO: 1909655 - RNA, 19 nt, Artificial Sequence
  Description of Artificial Sequence: Synthetic oligonucleotide
ucaaaggacaauuccgagc

SEQ ID NO: 1909656 - RNA, 19 nt, Artificial Sequence
  Description of Artificial Sequence: Synthetic oligonucleotide
uggacaaugaauccugacu

SEQ ID NO: 1909657 - RNA, 19 nt, Artificial Sequence
  Description of Artificial Sequence: Synthetic oligonucleotide
cuugacauaauucugugga

SEQ ID NO: 1909658 - RNA, 19 nt, Artificial Sequence
  Description of Artificial Sequence: Synthetic oligonucleotide
auuagauucugcuucgagu

SEQ ID NO: 1909659 - RNA, 19 nt, Artificial Sequence
  Description of Artificial Sequence: Synthetic oligonucleotide
cuucaaauccaugauggcg

SEQ ID NO: 1909660 - RNA, 19 nt, Artificial Sequence
  Description of Artificial Sequence: Synthetic oligonucleotide
uugguuagguguuucacca

SEQ ID NO: 1909661 - RNA, 19 nt, Artificial Sequence
  Description of Artificial Sequence: Synthetic oligonucleotide
uuauacacggccaccggcc

SEQ ID NO: 1909662 - RNA, 19 nt, Artificial Sequence
  Description of Artificial Sequence: Synthetic oligonucleotide
agaaauggauggcauuaac

SEQ ID NO: 1909663 - RNA, 19 nt, Artificial Sequence
  Description of Artificial Sequence: Synthetic oligonucleotide
uucgauuaauauuucuaca

SEQ ID NO: 1909664 - RNA, 19 nt, Artificial Sequence
  Description of Artificial Sequence: Synthetic oligonucleotide
agguguuucaccaagauau

SEQ ID NO: 1909665 - RNA, 19 nt, Artificial Sequence
  Description of Artificial Sequence: Synthetic oligonucleotide
gauugauaacacauucagg

SEQ ID NO: 1909666 - RNA, 19 nt, Artificial Sequence
  Description of Artificial Sequence: Synthetic oligonucleotide
ugcgauugauaacacauuc

SEQ ID NO: 1909667 - RNA, 19 nt, Artificial Sequence
  Description of Artificial Sequence: Synthetic oligonucleotide
uuugggugcuauuuccagg

SEQ ID NO: 1909668 - RNA, 19 nt, Artificial Sequence
  Description of Artificial Sequence: Synthetic oligonucleotide
agcuacagcagcuugacau

SEQ ID NO: 1909669 - RNA, 19 nt, Artificial Sequence
  Description of Artificial Sequence: Synthetic oligonucleotide
auggguacacugcacgggc

SEQ ID NO: 1909670 - RNA, 19 nt, Artificial Sequence
  Description of Artificial Sequence: Synthetic oligonucleotide
auggaguggacaaugaauc

SEQ ID NO: 1909671 - RNA, 19 nt, Artificial Sequence
  Description of Artificial Sequence: Synthetic oligonucleotide
aguugugggagauggagug

SEQ ID NO: 1909672 - RNA, 19 nt, Artificial Sequence
  Description of Artificial Sequence: Synthetic oligonucleotide
aaauuugccacggucauua

SEQ ID NO: 1909673 - RNA, 19 nt, Artificial Sequence
  Description of Artificial Sequence: Synthetic oligonucleotide
ucucuauguaacucauagg

SEQ ID NO: 1909674 - RNA, 19 nt, Artificial Sequence
  Description of Artificial Sequence: Synthetic oligonucleotide
uaacacgggacucugggcu

SEQ ID NO: 1909675 - RNA, 19 nt, Artificial Sequence
  Description of Artificial Sequence: Synthetic oligonucleotide
aaucagcccucucuugccg

SEQ ID NO: 1909676 - RNA, 19 nt, Artificial Sequence
  Description of Artificial Sequence: Synthetic oligonucleotide
agauuauacacggccaccg

SEQ ID NO: 1909677 - RNA, 19 nt, Artificial Sequence
  Description of Artificial Sequence: Synthetic oligonucleotide
ucuauguaacucauagguc

SEQ ID NO: 1909678 - RNA, 19 nt, Artificial Sequence
  Description of Artificial Sequence: Synthetic oligonucleotide
ugugguuggaggcuguaga

SEQ ID NO: 1909679 - RNA, 19 nt, Artificial Sequence
  Description of Artificial Sequence: Synthetic oligonucleotide
gaagucucuauguaacuca

SEQ ID NO: 1909680 - RNA, 19 nt, Artificial Sequence
  Description of Artificial Sequence: Synthetic oligonucleotide
gauuauacacggccaccgg

SEQ ID NO: 1909681 - RNA, 19 nt, Artificial Sequence
  Description of Artificial Sequence: Synthetic oligonucleotide
aaacaccacuccuaaauuu

SEQ ID NO: 1909682 - RNA, 19 nt, Artificial Sequence
  Description of Artificial Sequence: Synthetic oligonucleotide
gauggcauuaacacgggac

SEQ ID NO: 1909683 - RNA, 19 nt, Artificial Sequence
  Description of Artificial Sequence: Synthetic oligonucleotide
uccgaaauaucuucucaug

SEQ ID NO: 1909684 - RNA, 19 nt, Artificial Sequence
  Description of Artificial Sequence: Synthetic oligonucleotide
ucuggaagacuccucaaau

SEQ ID NO: 1909685 - RNA, 19 nt, Artificial Sequence
  Description of Artificial Sequence: Synthetic oligonucleotide
uccuaaauuugccacgguc

SEQ ID NO: 1909686 - RNA, 19 nt, Artificial Sequence
  Description of Artificial Sequence: Synthetic oligonucleotide
auauccaacaucuccuuau

SEQ ID NO: 1909687 - RNA, 19 nt, Artificial Sequence
  Description of Artificial Sequence: Synthetic oligonucleotide
gggacuaucaccaucuucc

SEQ ID NO: 1909688 - RNA, 19 nt, Artificial Sequence
  Description of Artificial Sequence: Synthetic oligonucleotide
gaggcuguagauuuagcca

SEQ ID NO: 1909689 - RNA, 19 nt, Artificial Sequence
  Description of Artificial Sequence: Synthetic oligonucleotide
gucgcaucagaguuggucc

SEQ ID NO: 1909690 - RNA, 19 nt, Artificial Sequence
  Description of Artificial Sequence: Synthetic oligonucleotide
cucuauguaacucauaggu

SEQ ID NO: 1909691 - RNA, 19 nt, Artificial Sequence
  Description of Artificial Sequence: Synthetic oligonucleotide
uucaggguuccuucaagcc

SEQ ID NO: 1909692 - RNA, 19 nt, Artificial Sequence
  Description of Artificial Sequence: Synthetic oligonucleotide
agauuuagccacugcacca

SEQ ID NO: 1909693 - RNA, 19 nt, Artificial Sequence
  Description of Artificial Sequence: Synthetic oligonucleotide
auuugggugcuauuuccag

SEQ ID NO: 1909694 - RNA, 19 nt, Artificial Sequence
  Description of Artificial Sequence: Synthetic oligonucleotide
uuugacacauugguuaggu

SEQ ID NO: 1909695 - RNA, 19 nt, Artificial Sequence
  Description of Artificial Sequence: Synthetic oligonucleotide
agcuugucuacaauggagg

SEQ ID NO: 1909696 - RNA, 19 nt, Artificial Sequence
  Description of Artificial Sequence: Synthetic oligonucleotide
cacauggguacacugcacg

SEQ ID NO: 1909697 - RNA, 19 nt, Artificial Sequence
  Description of Artificial Sequence: Synthetic oligonucleotide
ucucuugccguucaggguu

SEQ ID NO: 1909698 - RNA, 19 nt, Artificial Sequence
  Description of Artificial Sequence: Synthetic oligonucleotide
aaggacaauuccgagcugu

SEQ ID NO: 1909699 - RNA, 19 nt, Artificial Sequence
  Description of Artificial Sequence: Synthetic oligonucleotide
uuagguguuucaccaagau

SEQ ID NO: 1909700 - RNA, 19 nt, Artificial Sequence
  Description of Artificial Sequence: Synthetic oligonucleotide
aguuucauucccuccccag

SEQ ID NO: 1909701 - RNA, 19 nt, Artificial Sequence
  Description of Artificial Sequence: Synthetic oligonucleotide
uguaacucauaggucauaa

SEQ ID NO: 1909702 - RNA, 19 nt, Artificial Sequence
  Description of Artificial Sequence: Synthetic oligonucleotide
cauaagagguucuggaaga

SEQ ID NO: 1909703 - RNA, 19 nt, Artificial Sequence
  Description of Artificial Sequence: Synthetic oligonucleotide
uggaguggacaaugaaucc

SEQ ID NO: 1909704 - RNA, 19 nt, Artificial Sequence
  Description of Artificial Sequence: Synthetic oligonucleotide
uauguaacucauaggucau

SEQ ID NO: 1909705 - RNA, 19 nt, Artificial Sequence
  Description of Artificial Sequence: Synthetic oligonucleotide
gagugauuugacacauugg

SEQ ID NO: 1909706 - RNA, 19 nt, Artificial Sequence
  Description of Artificial Sequence: Synthetic oligonucleotide
agcgugacgugaugguagc

SEQ ID NO: 1909707 - RNA, 19 nt, Artificial Sequence
  Description of Artificial Sequence: Synthetic oligonucleotide
cauuagauucugcuucgag

SEQ ID NO: 1909708 - RNA, 19 nt, Artificial Sequence
  Description of Artificial Sequence: Synthetic oligonucleotide
uccuguggucgcaucagag

SEQ ID NO: 1909709 - RNA, 19 nt, Artificial Sequence
  Description of Artificial Sequence: Synthetic oligonucleotide
uuaacacgggacucugggc

SEQ ID NO: 1909710 - RNA, 19 nt, Artificial Sequence
  Description of Artificial Sequence: Synthetic oligonucleotide
ggaggcuguagauuuagcc

SEQ ID NO: 1909711 - RNA, 19 nt, Artificial Sequence
  Description of Artificial Sequence: Synthetic oligonucleotide
auuccgagcuguguucugc

SEQ ID NO: 1909712 - RNA, 19 nt, Artificial Sequence
  Description of Artificial Sequence: Synthetic oligonucleotide
guagauuuagccacugcac

SEQ ID NO: 1909713 - RNA, 19 nt, Artificial Sequence
  Description of Artificial Sequence: Synthetic oligonucleotide
agguguaccggcuggguug

SEQ ID NO: 1909714 - RNA, 19 nt, Artificial Sequence
  Description of Artificial Sequence: Synthetic oligonucleotide
uugacugccuuggaggagc

SEQ ID NO: 1909715 - RNA, 19 nt, Artificial Sequence
  Description of Artificial Sequence: Synthetic oligonucleotide
ugaagucucuauguaacuc

SEQ ID NO: 1909716 - RNA, 19 nt, Artificial Sequence
  Description of Artificial Sequence: Synthetic oligonucleotide
gcuucgagugauuugacac

SEQ ID NO: 1909717 - RNA, 19 nt, Artificial Sequence
  Description of Artificial Sequence: Synthetic oligonucleotide
guuucauucccuccccagc

SEQ ID NO: 1909718 - RNA, 19 nt, Artificial Sequence
  Description of Artificial Sequence: Synthetic oligonucleotide
uggagcuugcugugguugg

SEQ ID NO: 1909719 - RNA, 19 nt, Artificial Sequence
  Description of Artificial Sequence: Synthetic oligonucleotide
acauaauucuguggaauca

SEQ ID NO: 1909720 - RNA, 19 nt, Artificial Sequence
  Description of Artificial Sequence: Synthetic oligonucleotide
gacuaucaccaucuuccag

SEQ ID NO: 1909721 - RNA, 19 nt, Artificial Sequence
  Description of Artificial Sequence: Synthetic oligonucleotide
uggcaguuuguguaccaag

SEQ ID NO: 1909722 - RNA, 19 nt, Artificial Sequence
  Description of Artificial Sequence: Synthetic oligonucleotide
gaguggacaaugaauccug

SEQ ID NO: 1909723 - RNA, 19 nt, Artificial Sequence
  Description of Artificial Sequence: Synthetic oligonucleotide
cuugcgauugauaacacau

SEQ ID NO: 1909724 - RNA, 19 nt, Artificial Sequence
  Description of Artificial Sequence: Synthetic oligonucleotide
cacagugcccuccaucugc

SEQ ID NO: 1909725 - RNA, 19 nt, Artificial Sequence
  Description of Artificial Sequence: Synthetic oligonucleotide
ucaccaagauauccaacau

SEQ ID NO: 1909726 - RNA, 19 nt, Artificial Sequence
  Description of Artificial Sequence: Synthetic oligonucleotide
acgugaugguagcauuugg

SEQ ID NO: 1909727 - RNA, 19 nt, Artificial Sequence
  Description of Artificial Sequence: Synthetic oligonucleotide
ccgaaauaucuucucaugg

SEQ ID NO: 1909728 - RNA, 19 nt, Artificial Sequence
  Description of Artificial Sequence: Synthetic oligonucleotide
gggaaugcaguaucuggcg

SEQ ID NO: 1909729 - RNA, 19 nt, Artificial Sequence
  Description of Artificial Sequence: Synthetic oligonucleotide
guaacucauaggucauaag

SEQ ID NO: 1909730 - RNA, 19 nt, Artificial Sequence
  Description of Artificial Sequence: Synthetic oligonucleotide
gguuagguguuucaccaag

SEQ ID NO: 1909731 - RNA, 19 nt, Artificial Sequence
  Description of Artificial Sequence: Synthetic oligonucleotide
uugacauaauucuguggaa

SEQ ID NO: 1909732 - RNA, 19 nt, Artificial Sequence
  Description of Artificial Sequence: Synthetic oligonucleotide
uucugccucacauggguac

SEQ ID NO: 1909733 - RNA, 19 nt, Artificial Sequence
  Description of Artificial Sequence: Synthetic oligonucleotide
uggcuccuauuucaaagga

SEQ ID NO: 1909734 - RNA, 19 nt, Artificial Sequence
  Description of Artificial Sequence: Synthetic oligonucleotide
augaagucucuauguaacu

SEQ ID NO: 1909735 - RNA, 19 nt, Artificial Sequence
  Description of Artificial Sequence: Synthetic oligonucleotide
ugucucuuugacugccuug

SEQ ID NO: 1909736 - RNA, 19 nt, Artificial Sequence
  Description of Artificial Sequence: Synthetic oligonucleotide
acaauggaggcagcaagag

SEQ ID NO: 1909737 - RNA, 19 nt, Artificial Sequence
  Description of Artificial Sequence: Synthetic oligonucleotide
ucuggagugcccguggaga

SEQ ID NO: 1909738 - RNA, 19 nt, Artificial Sequence
  Description of Artificial Sequence: Synthetic oligonucleotide
aaugggccauccuggguga

SEQ ID NO: 1909739 - RNA, 19 nt, Artificial Sequence
  Description of Artificial Sequence: Synthetic oligonucleotide
acaaugaauccugacugcu

SEQ ID NO: 1909740 - RNA, 19 nt, Artificial Sequence
  Description of Artificial Sequence: Synthetic oligonucleotide
uagauucugcuucgaguga

SEQ ID NO: 1909741 - RNA, 19 nt, Artificial Sequence
  Description of Artificial Sequence: Synthetic oligonucleotide
ggaaucagcccucucuugc

SEQ ID NO: 1909742 - RNA, 19 nt, Artificial Sequence
  Description of Artificial Sequence: Synthetic oligonucleotide
aauuccgagcuguguucug
